United States Patent Application Publication US 2005/0244851 A1 - sequence listing, part 109

SEQ ID NO: 4250596 - DNA, 25 bp, Homo sapien
ctgagaaggaactagtgttggtggt

SEQ ID NO: 4250597 - DNA, 25 bp, Homo sapien
gtcacagtataggattgccattcag

SEQ ID NO: 4250598 - DNA, 25 bp, Homo sapien
gctggaagtatgattgaagtacctc

SEQ ID NO: 4250599 - DNA, 25 bp, Homo sapien
aagttgtaacgtttctggctatcca

SEQ ID NO: 4250600 - DNA, 25 bp, Homo sapien
tccaactgggagaacctcagccaat

SEQ ID NO: 4250601 - DNA, 25 bp, Homo sapien
tcttccagtcccgtgtgatgggagg

SEQ ID NO: 4250602 - DNA, 25 bp, Homo sapien
gctcaggtgtccagatggtcacttt

SEQ ID NO: 4250603 - DNA, 25 bp, Homo sapien
ctgggctgaagctgttgaatagagc

SEQ ID NO: 4250604 - DNA, 25 bp, Homo sapien
ttttttctcaaagccgagctactcc

SEQ ID NO: 4250605 - DNA, 25 bp, Homo sapien
aaaggcagggtgtctgttcacagtc

SEQ ID NO: 4250606 - DNA, 25 bp, Homo sapien
aatgaaaggcagggtgtctgttcac

SEQ ID NO: 4250607 - DNA, 25 bp, Homo sapien
tgaaaggcagggtgtctgttcacag

SEQ ID NO: 4250608 - DNA, 25 bp, Homo sapien
ctaatgaaaggcagggtgtctgttc

SEQ ID NO: 4250609 - DNA, 25 bp, Homo sapien
tgccttgctgggaacaccaccctct

SEQ ID NO: 4250610 - DNA, 25 bp, Homo sapien
tccctgccttgctgggaacaccacc

SEQ ID NO: 4250611 - DNA, 25 bp, Homo sapien
ctgccttgctgggaacaccaccctc

SEQ ID NO: 4250612 - DNA, 25 bp, Homo sapien
gtcaccgtccttccctgccttgctg

SEQ ID NO: 4250613 - DNA, 25 bp, Homo sapien
cttcttccggtcttcagccaatgag

SEQ ID NO: 4250614 - DNA, 25 bp, Homo sapien
gtttttatcttcaagcaagtcgcag

SEQ ID NO: 4250615 - DNA, 25 bp, Homo sapien
ttccggtcttcagccaatgaggatg

SEQ ID NO: 4250616 - DNA, 25 bp, Homo sapien
aagtcgcagtccctgacaaatgcct

SEQ ID NO: 4250617 - DNA, 25 bp, Homo sapien
cagggaaccgcaccccttggtcatt

SEQ ID NO: 4250618 - DNA, 25 bp, Homo sapien
tacatctcttctgataagaatctcc

SEQ ID NO: 4250619 - DNA, 25 bp, Homo sapien
tgtgtaaatgaatgctccccaggga

SEQ ID NO: 4250620 - DNA, 25 bp, Homo sapien
gataagaatctccacccttcagcta

SEQ ID NO: 4250621 - DNA, 25 bp, Homo sapien
tgtcagcggtgtatgacttctgccc

SEQ ID NO: 4250622 - DNA, 25 bp, Homo sapien
ttctgcccccagtagaatacaatgt

SEQ ID NO: 4250623 - DNA, 25 bp, Homo sapien
gaatcgagtcatttgcgctccttgc

SEQ ID NO: 4250624 - DNA, 25 bp, Homo sapien
cacagttactctcgctggatgtcag

SEQ ID NO: 4250625 - DNA, 25 bp, Homo sapien
ggctgaagtcacttcaatctgccct

SEQ ID NO: 4250626 - DNA, 25 bp, Homo sapien
acagagtgaagatgtgtgtttcctc

SEQ ID NO: 4250627 - DNA, 25 bp, Homo sapien
cctccgctgtatcccaaactcacat

SEQ ID NO: 4250628 - DNA, 25 bp, Homo sapien
aagaagttttctacccaattggctg

SEQ ID NO: 4250629 - DNA, 25 bp, Homo sapien
ggagacaacccttcttgtgtttggc

SEQ ID NO: 4250630 - DNA, 25 bp, Homo sapien
gcttttttccgtttgccattatcta

SEQ ID NO: 4250631 - DNA, 25 bp, Homo sapien
cgtttttgggctgtgaagactctgt

SEQ ID NO: 4250632 - DNA, 25 bp, Homo sapien
tatctaattcaggtgctaaatcggg

SEQ ID NO: 4250633 - DNA, 25 bp, Homo sapien
tgaagtattggcctatttttcttac

SEQ ID NO: 4250634 - DNA, 25 bp, Homo sapien
tctggatgtagttgttgtaaaccat

SEQ ID NO: 4250635 - DNA, 25 bp, Homo sapien
tcccacattcagtgctttaatctgg

SEQ ID NO: 4250636 - DNA, 25 bp, Homo sapien
cacattcagtgctttaatctggatg

SEQ ID NO: 4250637 - DNA, 25 bp, Homo sapien
cattcagtgctttaatctggatgta

SEQ ID NO: 4250638 - DNA, 25 bp, Homo sapien
tctatcaagatggtccctgggtaat

SEQ ID NO: 4250639 - DNA, 25 bp, Homo sapien
gctttatttcgttggtcacgattgc

SEQ ID NO: 4250640 - DNA, 25 bp, Homo sapien
tgctgctgaccttctatcaagatgg

SEQ ID NO: 4250641 - DNA, 25 bp, Homo sapien
tgccccgcttttgttgagtgtactt

SEQ ID NO: 4250642 - DNA, 25 bp, Homo sapien
taatatcagattaggccctgccgga

SEQ ID NO: 4250643 - DNA, 25 bp, Homo sapien
taggacttcgacataggcattttgg

SEQ ID NO: 4250644 - DNA, 25 bp, Homo sapien
aaccacatgcaaggaggctcttcga

SEQ ID NO: 4250645 - DNA, 25 bp, Homo sapien
tacagccacattccgaagtactagg

SEQ ID NO: 4250646 - DNA, 25 bp, Homo sapien
taggctttgagcttcagaagagcag

SEQ ID NO: 4250647 - DNA, 25 bp, Homo sapien
ggaagcccaaagaaataccatagga

SEQ ID NO: 4250648 - DNA, 25 bp, Homo sapien
gcaagagtgttagcttatgaacaac

SEQ ID NO: 4250649 - DNA, 25 bp, Homo sapien
tatctcaccacgcatgcaagagtgt

SEQ ID NO: 4250650 - DNA, 25 bp, Homo sapien
ccttcttctggttcttcattctctt

SEQ ID NO: 4250651 - DNA, 25 bp, Homo sapien
tctcttcctccccagggctgaccat

SEQ ID NO: 4250652 - DNA, 25 bp, Homo sapien
ctcgtgggaggccaacaccttcttc

SEQ ID NO: 4250653 - DNA, 25 bp, Homo sapien
tcgtgggaggccaacaccttcttct

SEQ ID NO: 4250654 - DNA, 25 bp, Homo sapien
atgtccacacgaatcttctcctctt

SEQ ID NO: 4250655 - DNA, 25 bp, Homo sapien
aatgtccacacgaatcttctcctct

SEQ ID NO: 4250656 - DNA, 25 bp, Homo sapien
tgggtgatcttgtgagccccatcaa

SEQ ID NO: 4250657 - DNA, 25 bp, Homo sapien
tagtcaggagagtcccccattgtgt

SEQ ID NO: 4250658 - DNA, 25 bp, Homo sapien
agtcaggagagtcccccattgtgta

SEQ ID NO: 4250659 - DNA, 25 bp, Homo sapien
gtcaggagagtcccccattgtgtac

SEQ ID NO: 4250660 - DNA, 25 bp, Homo sapien
atagtcaggagagtcccccattgtg

SEQ ID NO: 4250661 - DNA, 25 bp, Homo sapien
gtgccagcccgtggatgtccccgta

SEQ ID NO: 4250662 - DNA, 25 bp, Homo sapien
tgtccccgtaccccagtgtgatggg

SEQ ID NO: 4250663 - DNA, 25 bp, Homo sapien
aggtggatggcatgtgccagcccgt

SEQ ID NO: 4250664 - DNA, 25 bp, Homo sapien
tccccgtaccccagtgtgatgggca

SEQ ID NO: 4250665 - DNA, 25 bp, Homo sapien
taacgtatgtgaaaagcccttgagt

SEQ ID NO: 4250666 - DNA, 25 bp, Homo sapien
gatcccacctttctgggattagaaa

SEQ ID NO: 4250667 - DNA, 25 bp, Homo sapien
aaatcgtaaactatcaccctgatgc

SEQ ID NO: 4250668 - DNA, 25 bp, Homo sapien
cagattcatggactcaactaggtag

SEQ ID NO: 4250669 - DNA, 25 bp, Homo sapien
caaccacaaacgaggaccttctgta

SEQ ID NO: 4250670 - DNA, 25 bp, Homo sapien
tcaaccacaaacgaggaccttctgt

SEQ ID NO: 4250671 - DNA, 25 bp, Homo sapien
catacagtccataagcttcctgaag

SEQ ID NO: 4250672 - DNA, 25 bp, Homo sapien
tccccaaagaggatcaggcccagaa

SEQ ID NO: 4250673 - DNA, 25 bp, Homo sapien
gggcaataaccacaatgaagctagg

SEQ ID NO: 4250674 - DNA, 25 bp, Homo sapien
gaggatcaggcccagaacagtatgc

SEQ ID NO: 4250675 - DNA, 25 bp, Homo sapien
tggtggcgaggagcaaacgacacca

SEQ ID NO: 4250676 - DNA, 25 bp, Homo sapien
aacttcggatccctcctcggaaatg

SEQ ID NO: 4250677 - DNA, 25 bp, Homo sapien
tcggatccctcctcggaaatgggac

SEQ ID NO: 4250678 - DNA, 25 bp, Homo sapien
agcggtggtggcgaggagcaaacga

SEQ ID NO: 4250679 - DNA, 25 bp, Homo sapien
gggtcccagacggatgagagctggg

SEQ ID NO: 4250680 - DNA, 25 bp, Homo sapien
gcggctcacgggtgaccgggtgaag

SEQ ID NO: 4250681 - DNA, 25 bp, Homo sapien
gctgaggcagggtcatggtccggca

SEQ ID NO: 4250682 - DNA, 25 bp, Homo sapien
tgagggtcgcgtctaccggagcgcg

SEQ ID NO: 4250683 - DNA, 25 bp, Homo sapien
gggggctggaaaggcgaagtcgctg

SEQ ID NO: 4250684 - DNA, 25 bp, Homo sapien
ctttgtgggctcctgcaagtgccag

SEQ ID NO: 4250685 - DNA, 25 bp, Homo sapien
ctgcaagtgccaggcgctgaccact

SEQ ID NO: 4250686 - DNA, 25 bp, Homo sapien
gcgaagtcgctgctttgtgggctcc

SEQ ID NO: 4250687 - DNA, 25 bp, Homo sapien
ctgcttcttggtgacattgtaggac

SEQ ID NO: 4250688 - DNA, 25 bp, Homo sapien
tgcttcttggtgacattgtaggaca

SEQ ID NO: 4250689 - DNA, 25 bp, Homo sapien
cctgcttcttggtgacattgtagga

SEQ ID NO: 4250690 - DNA, 25 bp, Homo sapien
gcttcttggtgacattgtaggacat

SEQ ID NO: 4250691 - DNA, 25 bp, Homo sapien
gaaggagttgtgctctttggatccc

SEQ ID NO: 4250692 - DNA, 25 bp, Homo sapien
tacagattttggcttgtccacctcc

SEQ ID NO: 4250693 - DNA, 25 bp, Homo sapien
cagaatgagaacctggcccattgtt

SEQ ID NO: 4250694 - DNA, 25 bp, Homo sapien
ggatatttgtcaacttgcccagagt

SEQ ID NO: 4250695 - DNA, 25 bp, Homo sapien
cagaatgctgggatgactcatgaag

SEQ ID NO: 4250696 - DNA, 25 bp, Homo sapien
aatgctgggatgactcatgaagaat

SEQ ID NO: 4250697 - DNA, 25 bp, Homo sapien
ccagaatgctgggatgactcatgaa

SEQ ID NO: 4250698 - DNA, 25 bp, Homo sapien
tcataccagaagaaccccagaatgc

SEQ ID NO: 4250699 - DNA, 25 bp, Homo sapien
ttttcataggtaattcctccacatt

SEQ ID NO: 4250700 - DNA, 25 bp, Homo sapien
taggtaattcctccacattaagtga

SEQ ID NO: 4250701 - DNA, 25 bp, Homo sapien
accatatctaaaccctgtggtgaat

SEQ ID NO: 4250702 - DNA, 25 bp, Homo sapien
tttgtagagagcaccatatctaaac

SEQ ID NO: 4250703 - DNA, 25 bp, Homo sapien
gatgatgacacacttgtcctttgga

SEQ ID NO: 4250704 - DNA, 25 bp, Homo sapien
ccttagagacatgataaatgctgca

SEQ ID NO: 4250705 - DNA, 25 bp, Homo sapien
taagtcgttgcaccagagccttgaa

SEQ ID NO: 4250706 - DNA, 25 bp, Homo sapien
ctttggagctgattgagcaatggaa

SEQ ID NO: 4250707 - DNA, 25 bp, Homo sapien
aaatgcttgagtcaaaaggagagcc

SEQ ID NO: 4250708 - DNA, 25 bp, Homo sapien
aattgtatttctgctgatgggttcc

SEQ ID NO: 4250709 - DNA, 25 bp, Homo sapien
tctatattcagagaaaccatgacag

SEQ ID NO: 4250710 - DNA, 25 bp, Homo sapien
tacctatttaacattgggcaagtca

SEQ ID NO: 4250711 - DNA, 25 bp, Homo sapien
tttatctaaataacactcgtacaca

SEQ ID NO: 4250712 - DNA, 25 bp, Homo sapien
taacactcgtacacagctacagctt

SEQ ID NO: 4250713 - DNA, 25 bp, Homo sapien
aaataacactcgtacacagctacag

SEQ ID NO: 4250714 - DNA, 25 bp, Homo sapien
tacacagctacagctttcagtgaag

SEQ ID NO: 4250715 - DNA, 25 bp, Homo sapien
gagatctccagtgatatcgaccagc

SEQ ID NO: 4250716 - DNA, 25 bp, Homo sapien
gctgaatccagagtccgctgacctc

SEQ ID NO: 4250717 - DNA, 25 bp, Homo sapien
ccatcaggtttgggcggatgccaca

SEQ ID NO: 4250718 - DNA, 25 bp, Homo sapien
tcccgctgaccaaagcaaaggcgag

SEQ ID NO: 4250719 - DNA, 25 bp, Homo sapien
cttgacaggaaagacaacagacaaa

SEQ ID NO: 4250720 - DNA, 25 bp, Homo sapien
ttctgctgtcttcattgggggaggc

SEQ ID NO: 4250721 - DNA, 25 bp, Homo sapien
ttctttgagtaaatggtttactgcg

SEQ ID NO: 4250722 - DNA, 25 bp, Homo sapien
caaatcagttagttctcttctgctg

SEQ ID NO: 4250723 - DNA, 25 bp, Homo sapien
cacagcaagtgggtagaagacctgg

SEQ ID NO: 4250724 - DNA, 25 bp, Homo sapien
gcacatttgttaggttcgagccaca

SEQ ID NO: 4250725 - DNA, 25 bp, Homo sapien
tacactaagaaagcttcggtctgag

SEQ ID NO: 4250726 - DNA, 25 bp, Homo sapien
gactaggactgctggcttttacatg

SEQ ID NO: 4250727 - DNA, 25 bp, Homo sapien
gagccaccagccatggttagttttc

SEQ ID NO: 4250728 - DNA, 25 bp, Homo sapien
caccagccatggttagttttcatca

SEQ ID NO: 4250729 - DNA, 25 bp, Homo sapien
gccaccagccatggttagttttcat

SEQ ID NO: 4250730 - DNA, 25 bp, Homo sapien
ccagccatggttagttttcatcaac

SEQ ID NO: 4250731 - DNA, 25 bp, Homo sapien
tcatcctctaattcatacctgcaat

SEQ ID NO: 4250732 - DNA, 25 bp, Homo sapien
catcctctaattcatacctgcaatc

SEQ ID NO: 4250733 - DNA, 25 bp, Homo sapien
ttcatcctctaattcatacctgcaa

SEQ ID NO: 4250734 - DNA, 25 bp, Homo sapien
tacactactggtgtgcaacgtgctc

SEQ ID NO: 4250735 - DNA, 25 bp, Homo sapien
ttatctgtgttactggaggacaccc

SEQ ID NO: 4250736 - DNA, 25 bp, Homo sapien
cttaatagtaccagaaagtcaggca

SEQ ID NO: 4250737 - DNA, 25 bp, Homo sapien
gactccttggctctaaatctttgag

SEQ ID NO: 4250738 - DNA, 25 bp, Homo sapien
gatgatcacactgggcgtatcattg

SEQ ID NO: 4250739 - DNA, 25 bp, Homo sapien
cacactgggcgtatcattgtcacat

SEQ ID NO: 4250740 - DNA, 25 bp, Homo sapien
ggtgcgatgatcacactgggcgtat

SEQ ID NO: 4250741 - DNA, 25 bp, Homo sapien
cctggtgcgatgatcacactgggcg

SEQ ID NO: 4250742 - DNA, 25 bp, Homo sapien
taagccaccacgcacaatctaaaca

SEQ ID NO: 4250743 - DNA, 25 bp, Homo sapien
tatgtactctacagtgtatcctctg

SEQ ID NO: 4250744 - DNA, 25 bp, Homo sapien
tcattagcctctcatgagtagaaga

SEQ ID NO: 4250745 - DNA, 25 bp, Homo sapien
caatgtattataaagagcacgatcc

SEQ ID NO: 4250746 - DNA, 25 bp, Homo sapien
tcagcaaaggctcttagggccccag

SEQ ID NO: 4250747 - DNA, 25 bp, Homo sapien
ttcagcaaaggctcttagggcccca

SEQ ID NO: 4250748 - DNA, 25 bp, Homo sapien
cagcaaaggctcttagggccccaga

SEQ ID NO: 4250749 - DNA, 25 bp, Homo sapien
ctgggcggtgtcaagagtaataaaa

SEQ ID NO: 4250750 - DNA, 25 bp, Homo sapien
tgggcggtgtcaagagtaataaaac

SEQ ID NO: 4250751 - DNA, 25 bp, Homo sapien
gctgggcggtgtcaagagtaataaa

SEQ ID NO: 4250752 - DNA, 25 bp, Homo sapien
ggctgggcggtgtcaagagtaataa

SEQ ID NO: 4250753 - DNA, 25 bp, Homo sapien
gagttctgaaaatcccactctgaga

SEQ ID NO: 4250754 - DNA, 25 bp, Homo sapien
gacacaggaaaacatcgtttacaga

SEQ ID NO: 4250755 - DNA, 25 bp, Homo sapien
tgccatctcacattgttctcttgag

SEQ ID NO: 4250756 - DNA, 25 bp, Homo sapien
tacagacttcttcattgtgtaggga

SEQ ID NO: 4250757 - DNA, 25 bp, Homo sapien
catagcgaatttccaactagaggaa

SEQ ID NO: 4250758 - DNA, 25 bp, Homo sapien
cacatagcgaatttccaactagagg

SEQ ID NO: 4250759 - DNA, 25 bp, Homo sapien
tagcgaatttccaactagaggaagc

SEQ ID NO: 4250760 - DNA, 25 bp, Homo sapien
tcacatagcgaatttccaactagag

SEQ ID NO: 4250761 - DNA, 25 bp, Homo sapien
tctccaccctgaccgtgggattgca

SEQ ID NO: 4250762 - DNA, 25 bp, Homo sapien
cacctggtacatcctccatttaaca

SEQ ID NO: 4250763 - DNA, 25 bp, Homo sapien
gaccgtgggattgcacctggtacat

SEQ ID NO: 4250764 - DNA, 25 bp, Homo sapien
aatgttgttatttgcacgtctccac

SEQ ID NO: 4250765 - DNA, 25 bp, Homo sapien
ctgggtacatccgggagccaatgga

SEQ ID NO: 4250766 - DNA, 25 bp, Homo sapien
catccgggagccaatggaatggaac

SEQ ID NO: 4250767 - DNA, 25 bp, Homo sapien
tggaatggaactgccaaaaaccaga

SEQ ID NO: 4250768 - DNA, 25 bp, Homo sapien
aatggaatggaactgccaaaaacca

SEQ ID NO: 4250769 - DNA, 25 bp, Homo sapien
gcaagcaaagcacccagactatcag

SEQ ID NO: 4250770 - DNA, 25 bp, Homo sapien
taagtggttccctgcattggcaagc

SEQ ID NO: 4250771 - DNA, 25 bp, Homo sapien
cagcgccgtcactgtgaactctgag

SEQ ID NO: 4250772 - DNA, 25 bp, Homo sapien
cagcctccaggctattgaacgagtt

SEQ ID NO: 4250773 - DNA, 25 bp, Homo sapien
tggtgtggcatggggcccacgatga

SEQ ID NO: 4250774 - DNA, 25 bp, Homo sapien
cctgaatagaagcttccaagatggc

SEQ ID NO: 4250775 - DNA, 25 bp, Homo sapien
ggtgtggcatggggcccacgatgag

SEQ ID NO: 4250776 - DNA, 25 bp, Homo sapien
caggaggagagccagcagcccagca

SEQ ID NO: 4250777 - DNA, 25 bp, Homo sapien
aggaggagagccagcagcccagcac

SEQ ID NO: 4250778 - DNA, 25 bp, Homo sapien
cttcaacaggaggagagccagcagc

SEQ ID NO: 4250779 - DNA, 25 bp, Homo sapien
aggagagccagcagcccagcacagg

SEQ ID NO: 4250780 - DNA, 25 bp, Homo sapien
cagccgccagggagatagcagtacc

SEQ ID NO: 4250781 - DNA, 25 bp, Homo sapien
tggggccggctcagagagcagccgc

SEQ ID NO: 4250782 - DNA, 25 bp, Homo sapien
agatagcagtaccagcacggcccct

SEQ ID NO: 4250783 - DNA, 25 bp, Homo sapien
gggccggctcagagagcagccgcca

SEQ ID NO: 4250784 - DNA, 25 bp, Homo sapien
aggccaggtatgcttctccagtgct

SEQ ID NO: 4250785 - DNA, 25 bp, Homo sapien
caggccaggtatgcttctccagtgc

SEQ ID NO: 4250786 - DNA, 25 bp, Homo sapien
tcaggccaggtatgcttctccagtg

SEQ ID NO: 4250787 - DNA, 25 bp, Homo sapien
cacagaggagcagtgcatttgcccc

SEQ ID NO: 4250788 - DNA, 25 bp, Homo sapien
ttgccccgtgagcaacaggcgagga

SEQ ID NO: 4250789 - DNA, 25 bp, Homo sapien
agggcttgtccacaggtccgacagc

SEQ ID NO: 4250790 - DNA, 25 bp, Homo sapien
tccgacagccagaaccagactattt

SEQ ID NO: 4250791 - DNA, 25 bp, Homo sapien
tgcatgcattggtctgccaccgaac

SEQ ID NO: 4250792 - DNA, 25 bp, Homo sapien
tgtgcgcagtgcgaagaccttgcca

SEQ ID NO: 4250793 - DNA, 25 bp, Homo sapien
gagctgctaacatctagactggagg

SEQ ID NO: 4250794 - DNA, 25 bp, Homo sapien
gtcggagtcccatcctgtgcgcagt

SEQ ID NO: 4250795 - DNA, 25 bp, Homo sapien
gacaagatcgggcacattgagagta

SEQ ID NO: 4250796 - DNA, 25 bp, Homo sapien
gatcgggcacattgagagtagcatg

SEQ ID NO: 4250797 - DNA, 25 bp, Homo sapien
caagatcgggcacattgagagtagc

SEQ ID NO: 4250798 - DNA, 25 bp, Homo sapien
cgggcacattgagagtagcatggct

SEQ ID NO: 4250799 - DNA, 25 bp, Homo sapien
atttttaggttcaagggtacatgtg

SEQ ID NO: 4250800 - DNA, 25 bp, Homo sapien
ctgggcgtggtagcaggcacttgta

SEQ ID NO: 4250801 - DNA, 25 bp, Homo sapien
tcccagctatttgggaggctgaggc

SEQ ID NO: 4250802 - DNA, 25 bp, Homo sapien
aggaaaattgcttgatcccgggagg

SEQ ID NO: 4250803 - DNA, 25 bp, Homo sapien
gtcagtgacgtagaagccatgctcc

SEQ ID NO: 4250804 - DNA, 25 bp, Homo sapien
caggctgcgcttacatagctctcag

SEQ ID NO: 4250805 - DNA, 25 bp, Homo sapien
cgtatcgcccggtagagtgtgatga

SEQ ID NO: 4250806 - DNA, 25 bp, Homo sapien
tgtgatgaacttggatgccagcctt

SEQ ID NO: 4250807 - DNA, 25 bp, Homo sapien
cccccgaggtggagaagtcttccag

SEQ ID NO: 4250808 - DNA, 25 bp, Homo sapien
ccccgaggtggagaagtcttccagg

SEQ ID NO: 4250809 - DNA, 25 bp, Homo sapien
ggtggagaagtcttccaggtacttg

SEQ ID NO: 4250810 - DNA, 25 bp, Homo sapien
cgaggtggagaagtcttccaggtac

SEQ ID NO: 4250811 - DNA, 25 bp, Homo sapien
tacatgttgggctgcagtaatggga

SEQ ID NO: 4250812 - DNA, 25 bp, Homo sapien
agtaatgggatgcttatgctctctt

SEQ ID NO: 4250813 - DNA, 25 bp, Homo sapien
acccttctccgtctcgctggacacc

SEQ ID NO: 4250814 - DNA, 25 bp, Homo sapien
cattccatacatgttgggctgcagt

SEQ ID NO: 4250815 - DNA, 25 bp, Homo sapien
tagttattccaacatgaagatcaga

SEQ ID NO: 4250816 - DNA, 25 bp, Homo sapien
catttgtgttagttattccaacatg

SEQ ID NO: 4250817 - DNA, 25 bp, Homo sapien
aacatgaagatcagaccttccatca

SEQ ID NO: 4250818 - DNA, 25 bp, Homo sapien
tccaacatgaagatcagaccttcca

SEQ ID NO: 4250819 - DNA, 25 bp, Homo sapien
tgtatttctcacagtggttgaattt

SEQ ID NO: 4250820 - DNA, 25 bp, Homo sapien
cgatgctaacaggtgcgtcctccag

SEQ ID NO: 4250821 - DNA, 25 bp, Homo sapien
cattagtaaatggattagcgatgct

SEQ ID NO: 4250822 - DNA, 25 bp, Homo sapien
gggcacactgaagctgtagatgtat

SEQ ID NO: 4250823 - DNA, 25 bp, Homo sapien
aatagcatcgaaaaccgcttctagg

SEQ ID NO: 4250824 - DNA, 25 bp, Homo sapien
attttgagtcccgagctggcagcca

SEQ ID NO: 4250825 - DNA, 25 bp, Homo sapien
gggtctctgtgtctctacgcccaga

SEQ ID NO: 4250826 - DNA, 25 bp, Homo sapien
ggcaggtcggcacacaaagaaaacg

SEQ ID NO: 4250827 - DNA, 25 bp, Homo sapien
catgtctcagtcgtctctcttggaa

SEQ ID NO: 4250828 - DNA, 25 bp, Homo sapien
tttgtccatcagaaaggttgagcag

SEQ ID NO: 4250829 - DNA, 25 bp, Homo sapien
ttacaaagcgcaacatgaaagaggc

SEQ ID NO: 4250830 - DNA, 25 bp, Homo sapien
acatgacagagatgccccaaaggac

SEQ ID NO: 4250831 - DNA, 25 bp, Homo sapien
tgtaaaaatttcatggcacccaagg

SEQ ID NO: 4250832 - DNA, 25 bp, Homo sapien
aaactttcccaagccagggtgtgcg

SEQ ID NO: 4250833 - DNA, 25 bp, Homo sapien
tacagtactgggtagcagtctggcc

SEQ ID NO: 4250834 - DNA, 25 bp, Homo sapien
tactgcagccaaggtgacgtgtgac

SEQ ID NO: 4250835 - DNA, 25 bp, Homo sapien
ttattaaaataacataattgaggga

SEQ ID NO: 4250836 - DNA, 25 bp, Homo sapien
tattaaaataacataattgagggac

SEQ ID NO: 4250837 - DNA, 25 bp, Homo sapien
tctctgaagaaagtcccgcctgtga

SEQ ID NO: 4250838 - DNA, 25 bp, Homo sapien
ccttatgtgcaaaatgtctggcgct

SEQ ID NO: 4250839 - DNA, 25 bp, Homo sapien
tggaagactgctccctgagagggct

SEQ ID NO: 4250840 - DNA, 25 bp, Homo sapien
aatactcatgtagccaacagctggg

SEQ ID NO: 4250841 - DNA, 25 bp, Homo sapien
agcgtgcaagcattgatatcctcag

SEQ ID NO: 4250842 - DNA, 25 bp, Homo sapien
ggctcggaagcgctccggttgatct

SEQ ID NO: 4250843 - DNA, 25 bp, Homo sapien
gacgtggtcagcgtgcaagcattga

SEQ ID NO: 4250844 - DNA, 25 bp, Homo sapien
ttgatcttcggtagagagtgttgga

SEQ ID NO: 4250845 - DNA, 25 bp, Homo sapien
atctggggaggcatatcctcggccc

SEQ ID NO: 4250846 - DNA, 25 bp, Homo sapien
gaggcatatcctcggcccaccatga

SEQ ID NO: 4250847 - DNA, 25 bp, Homo sapien
cttatatagcttactaagatctggg

SEQ ID NO: 4250848 - DNA, 25 bp, Homo sapien
agttcttatatagcttactaagatc

SEQ ID NO: 4250849 - DNA, 25 bp, Homo sapien
ctggcggaggcccaggggctcccac

SEQ ID NO: 4250850 - DNA, 25 bp, Homo sapien
agctgcttaggctggcggaggccca

SEQ ID NO: 4250851 - DNA, 25 bp, Homo sapien
gctgcttaggctggcggaggcccag

SEQ ID NO: 4250852 - DNA, 25 bp, Homo sapien
aggctggcggaggcccaggggctcc

SEQ ID NO: 4250853 - DNA, 25 bp, Homo sapien
gttgggtcctttcgcaccagcacag

SEQ ID NO: 4250854 - DNA, 25 bp, Homo sapien
tgggtcctttcgcaccagcacagac

SEQ ID NO: 4250855 - DNA, 25 bp, Homo sapien
gtcctttcgcaccagcacagactta

SEQ ID NO: 4250856 - DNA, 25 bp, Homo sapien
gagttgggtcctttcgcaccagcac

SEQ ID NO: 4250857 - DNA, 25 bp, Homo sapien
tgatgtgagaataaggaagctcccc

SEQ ID NO: 4250858 - DNA, 25 bp, Homo sapien
caatacgatgccataggagtagaca

SEQ ID NO: 4250859 - DNA, 25 bp, Homo sapien
aaactgaatgggttgttatcctgca

SEQ ID NO: 4250860 - DNA, 25 bp, Homo sapien
gagtagacatccgactggaaactga

SEQ ID NO: 4250861 - DNA, 25 bp, Homo sapien
caggcactggttaaaacagctcagg

SEQ ID NO: 4250862 - DNA, 25 bp, Homo sapien
gaatgagtccattcttcagtcccca

SEQ ID NO: 4250863 - DNA, 25 bp, Homo sapien
taaaggaccaagacccagcatttct

SEQ ID NO: 4250864 - DNA, 25 bp, Homo sapien
ttttgccctataccagagactgctg

SEQ ID NO: 4250865 - DNA, 25 bp, Homo sapien
actccagcgtgactttactgttgcc

SEQ ID NO: 4250866 - DNA, 25 bp, Homo sapien
cagcgtgactttactgttgccaaac

SEQ ID NO: 4250867 - DNA, 25 bp, Homo sapien
cagtaggttgttcaacctgctgaga

SEQ ID NO: 4250868 - DNA, 25 bp, Homo sapien
acagagccagtaggttgttcaacct

SEQ ID NO: 4250869 - DNA, 25 bp, Homo sapien
ctttataacacggtaatctctccac

SEQ ID NO: 4250870 - DNA, 25 bp, Homo sapien
agttctttataacacggtaatctct

SEQ ID NO: 4250871 - DNA, 25 bp, Homo sapien
ttataacacggtaatctctccacct

SEQ ID NO: 4250872 - DNA, 25 bp, Homo sapien
ttctttataacacggtaatctctcc

SEQ ID NO: 4250873 - DNA, 25 bp, Homo sapien
ttaaaaagatatcccctggcaccga

SEQ ID NO: 4250874 - DNA, 25 bp, Homo sapien
aagtcggctcgcttctgggtaaaga

SEQ ID NO: 4250875 - DNA, 25 bp, Homo sapien
agatagacatacacacgctggccac

SEQ ID NO: 4250876 - DNA, 25 bp, Homo sapien
tcatcagtccaggtgaggcataagc

SEQ ID NO: 4250877 - DNA, 25 bp, Homo sapien
tgatagaaagcctcccttctgtttc

SEQ ID NO: 4250878 - DNA, 25 bp, Homo sapien
gtgatagaaagcctcccttctgttt

SEQ ID NO: 4250879 - DNA, 25 bp, Homo sapien
gatagaaagcctcccttctgtttcc

SEQ ID NO: 4250880 - DNA, 25 bp, Homo sapien
ttgtgatagaaagcctcccttctgt

SEQ ID NO: 4250881 - DNA, 25 bp, Homo sapien
gtcaaatgaactcaacaaccaaagg

SEQ ID NO: 4250882 - DNA, 25 bp, Homo sapien
caaatgaactcaacaaccaaaggat

SEQ ID NO: 4250883 - DNA, 25 bp, Homo sapien
aatgaactcaacaaccaaaggatac

SEQ ID NO: 4250884 - DNA, 25 bp, Homo sapien
cgagcagtcaaatgaactcaacaac

SEQ ID NO: 4250885 - DNA, 25 bp, Homo sapien
atggatgatgttctttgcatgcaaa

SEQ ID NO: 4250886 - DNA, 25 bp, Homo sapien
tgaaggtgaggccacagcacaaaca

SEQ ID NO: 4250887 - DNA, 25 bp, Homo sapien
gaaggtgaggccacagcacaaacat

SEQ ID NO: 4250888 - DNA, 25 bp, Homo sapien
ctgaaggtgaggccacagcacaaac

SEQ ID NO: 4250889 - DNA, 25 bp, Homo sapien
gaagcactaccctaggctagccagg

SEQ ID NO: 4250890 - DNA, 25 bp, Homo sapien
gcagtaacgtgatctaagctccccg

SEQ ID NO: 4250891 - DNA, 25 bp, Homo sapien
gatggattcctcacaaacggctcgg

SEQ ID NO: 4250892 - DNA, 25 bp, Homo sapien
tactatgctaggtctaagagcccag

SEQ ID NO: 4250893 - DNA, 25 bp, Homo sapien
cagaatgttcacatgccgtgttttg

SEQ ID NO: 4250894 - DNA, 25 bp, Homo sapien
cgtctgccgggcaatgtcaattagc

SEQ ID NO: 4250895 - DNA, 25 bp, Homo sapien
tggacatgcaggtgtttgtagaggc

SEQ ID NO: 4250896 - DNA, 25 bp, Homo sapien
caggtgtttgtagaggctgctgccc

SEQ ID NO: 4250897 - DNA, 25 bp, Homo sapien
attctctttcatcaatgtacactcc

SEQ ID NO: 4250898 - DNA, 25 bp, Homo sapien
ctctttcatcaatgtacactccatg

SEQ ID NO: 4250899 - DNA, 25 bp, Homo sapien
ttcatcaatgtacactccatgaccc

SEQ ID NO: 4250900 - DNA, 25 bp, Homo sapien
tttcatcaatgtacactccatgacc

SEQ ID NO: 4250901 - DNA, 25 bp, Homo sapien
aacctttaggatctttactgcaaca

SEQ ID NO: 4250902 - DNA, 25 bp, Homo sapien
tcgacaacctttaggatctttactg

SEQ ID NO: 4250903 - DNA, 25 bp, Homo sapien
tgctctggggttgggtcgacaacct

SEQ ID NO: 4250904 - DNA, 25 bp, Homo sapien
aattgctctggggttgggtcgacaa

SEQ ID NO: 4250905 - DNA, 25 bp, Homo sapien
ctgcaaaattagttggcagtcagtg

SEQ ID NO: 4250906 - DNA, 25 bp, Homo sapien
caatcagttgaatgatctcagtctt

SEQ ID NO: 4250907 - DNA, 25 bp, Homo sapien
tggcagtcagtgcaatcagttgaat

SEQ ID NO: 4250908 - DNA, 25 bp, Homo sapien
aattagttggcagtcagtgcaatca

SEQ ID NO: 4250909 - DNA, 25 bp, Homo sapien
cataggttaactgctatcgctacag

SEQ ID NO: 4250910 - DNA, 25 bp, Homo sapien
ggattataggtccaatctctacata

SEQ ID NO: 4250911 - DNA, 25 bp, Homo sapien
gccttcgatagccttggttaaacta

SEQ ID NO: 4250912 - DNA, 25 bp, Homo sapien
cctgtggggatgaaatcagtgcata

SEQ ID NO: 4250913 - DNA, 25 bp, Homo sapien
taactttagacacatccagggatcc

SEQ ID NO: 4250914 - DNA, 25 bp, Homo sapien
gagatggtcctcacgataggcccaa

SEQ ID NO: 4250915 - DNA, 25 bp, Homo sapien
gaaacgtgtataaccagccctgagt

SEQ ID NO: 4250916 - DNA, 25 bp, Homo sapien
gaaaatggccaacgctatgacccag

SEQ ID NO: 4250917 - DNA, 25 bp, Homo sapien
tacatataaataacccaaggactgc

SEQ ID NO: 4250918 - DNA, 25 bp, Homo sapien
catgaaagggattcattcagtctgc

SEQ ID NO: 4250919 - DNA, 25 bp, Homo sapien
cagaaggaatgttctatactgcagc

SEQ ID NO: 4250920 - DNA, 25 bp, Homo sapien
gccagctctcgttaacacagttatg

SEQ ID NO: 4250921 - DNA, 25 bp, Homo sapien
gacttttgagactttctgacttaaa

SEQ ID NO: 4250922 - DNA, 25 bp, Homo sapien
gcataaaagtccactgctcctcact

SEQ ID NO: 4250923 - DNA, 25 bp, Homo sapien
ttcttcattcatagaccagagcttg

SEQ ID NO: 4250924 - DNA, 25 bp, Homo sapien
ttctgaaagcatggcataaaagtcc

SEQ ID NO: 4250925 - DNA, 25 bp, Homo sapien
tgtgtactcactgtattgagctcac

SEQ ID NO: 4250926 - DNA, 25 bp, Homo sapien
cagtagtgtgtactcactgtattga

SEQ ID NO: 4250927 - DNA, 25 bp, Homo sapien
ccacatgtactttacaaatgttcag

SEQ ID NO: 4250928 - DNA, 25 bp, Homo sapien
tcactgtattgagctcactacaaca

SEQ ID NO: 4250929 - DNA, 25 bp, Homo sapien
tccaaaagagcctgacccaatccga

SEQ ID NO: 4250930 - DNA, 25 bp, Homo sapien
aataatagcttgaatctctctgtcc

SEQ ID NO: 4250931 - DNA, 25 bp, Homo sapien
tgccatttacccttataaacagttc

SEQ ID NO: 4250932 - DNA, 25 bp, Homo sapien
gtggacagcatcacttcactggctt

SEQ ID NO: 4250933 - DNA, 25 bp, Homo sapien
gcccgctctctttgtgctggcacgg

SEQ ID NO: 4250934 - DNA, 25 bp, Homo sapien
gctcagattgttggggctactggac

SEQ ID NO: 4250935 - DNA, 25 bp, Homo sapien
cagatactggtgcccgctctctttg

SEQ ID NO: 4250936 - DNA, 25 bp, Homo sapien
tactggtgcccgctctctttgtgct

SEQ ID NO: 4250937 - DNA, 25 bp, Homo sapien
ctgattcgctgtgacttcgaattgc

SEQ ID NO: 4250938 - DNA, 25 bp, Homo sapien
attcgctgtgacttcgaattgcatc

SEQ ID NO: 4250939 - DNA, 25 bp, Homo sapien
gattcgctgtgacttcgaattgcat

SEQ ID NO: 4250940 - DNA, 25 bp, Homo sapien
tgattcgctgtgacttcgaattgca

SEQ ID NO: 4250941 - DNA, 25 bp, Homo sapien
tgaaggcgtgaggtgtagaatatct

SEQ ID NO: 4250942 - DNA, 25 bp, Homo sapien
gtggatgtcgacctctgcctctggg

SEQ ID NO: 4250943 - DNA, 25 bp, Homo sapien
actggaggtgttaaaggtgaaggcg

SEQ ID NO: 4250944 - DNA, 25 bp, Homo sapien
gaccatgtggacattaggtgtggat

SEQ ID NO: 4250945 - DNA, 25 bp, Homo sapien
ctggaaacagactctcgcatacgac

SEQ ID NO: 4250946 - DNA, 25 bp, Homo sapien
gaaacagactctcgcatacgacgca

SEQ ID NO: 4250947 - DNA, 25 bp, Homo sapien
aaacagactctcgcatacgacgcat

SEQ ID NO: 4250948 - DNA, 25 bp, Homo sapien
tggaaacagactctcgcatacgacg

SEQ ID NO: 4250949 - DNA, 25 bp, Homo sapien
aaagaaggtagtgctgggactccac

SEQ ID NO: 4250950 - DNA, 25 bp, Homo sapien
agtcaaagaaggtagtgctgggact

SEQ ID NO: 4250951 - DNA, 25 bp, Homo sapien
gggactccactatcaccaatagtgg

SEQ ID NO: 4250952 - DNA, 25 bp, Homo sapien
gaaggtagtgctgggactccactat

SEQ ID NO: 4250953 - DNA, 25 bp, Homo sapien
gaaagactggtttttaggcttgcag

SEQ ID NO: 4250954 - DNA, 25 bp, Homo sapien
gccaataaacatacaggctcctgtg

SEQ ID NO: 4250955 - DNA, 25 bp, Homo sapien
tgtgaataatactgacctgccaata

SEQ ID NO: 4250956 - DNA, 25 bp, Homo sapien
ccggcccagtgtgcatttctaggaa

SEQ ID NO: 4250957 - DNA, 25 bp, Homo sapien
tacagagcagtgtctactagcaacc

SEQ ID NO: 4250958 - DNA, 25 bp, Homo sapien
gataacaagtcctactcctacctgc

SEQ ID NO: 4250959 - DNA, 25 bp, Homo sapien
gcatcaacggtgctttctgctcctt

SEQ ID NO: 4250960 - DNA, 25 bp, Homo sapien
gagtctagaatccagacctgtcagt

SEQ ID NO: 4250961 - DNA, 25 bp, Homo sapien
tctgatgttactccagtccacacac

SEQ ID NO: 4250962 - DNA, 25 bp, Homo sapien
gtctgatgttactccagtccacaca

SEQ ID NO: 4250963 - DNA, 25 bp, Homo sapien
tcatgaaatttgtagccacaagtct

SEQ ID NO: 4250964 - DNA, 25 bp, Homo sapien
gatgtcacagaaggcaagcttcagg

SEQ ID NO: 4250965 - DNA, 25 bp, Homo sapien
catcgaaatccattgagcaggaatt

SEQ ID NO: 4250966 - DNA, 25 bp, Homo sapien
gcaagcttcaggaacgtcttccgag

SEQ ID NO: 4250967 - DNA, 25 bp, Homo sapien
aatcaaagacgcagcatcagtattc

SEQ ID NO: 4250968 - DNA, 25 bp, Homo sapien
gtattccaatctaagcgtgcttttt

SEQ ID NO: 4250969 - DNA, 25 bp, Homo sapien
catgatccaggaaatctacttgaag

SEQ ID NO: 4250970 - DNA, 25 bp, Homo sapien
ttctccaatcaaagacgcagcatca

SEQ ID NO: 4250971 - DNA, 25 bp, Homo sapien
ttgtgttcgtggagaagtctgaaca

SEQ ID NO: 4250972 - DNA, 25 bp, Homo sapien
cctttgtgttcgtggagaagtctga

SEQ ID NO: 4250973 - DNA, 25 bp, Homo sapien
ctttgtgttcgtggagaagtctgaa

SEQ ID NO: 4250974 - DNA, 25 bp, Homo sapien
gtgttcgtggagaagtctgaacact

SEQ ID NO: 4250975 - DNA, 25 bp, Homo sapien
ctttcataaggcagtcatgcaagct

SEQ ID NO: 4250976 - DNA, 25 bp, Homo sapien
taaggcagtcatgcaagctcattcc

SEQ ID NO: 4250977 - DNA, 25 bp, Homo sapien
aagctcattccatttcgcacattga

SEQ ID NO: 4250978 - DNA, 25 bp, Homo sapien
gagtgctttcataaggcagtcatgc

SEQ ID NO: 4250979 - DNA, 25 bp, Homo sapien
ccggcgctgatagccaaactgctga

SEQ ID NO: 4250980 - DNA, 25 bp, Homo sapien
ttcggcaagaaaacacggatagtgt

SEQ ID NO: 4250981 - DNA, 25 bp, Homo sapien
aaaccattgctgatcgtcttccaag

SEQ ID NO: 4250982 - DNA, 25 bp, Homo sapien
caaacacggcatctttgaatccaaa

SEQ ID NO: 4250983 - DNA, 25 bp, Homo sapien
tgatgcagcttaaacaattcttaaa

SEQ ID NO: 4250984 - DNA, 25 bp, Homo sapien
gatgcagcttaaacaattcttaaac

SEQ ID NO: 4250985 - DNA, 25 bp, Homo sapien
caagaaattctcccgctgcagcctt

SEQ ID NO: 4250986 - DNA, 25 bp, Homo sapien
gaaattctcccgctgcagccttcca

SEQ ID NO: 4250987 - DNA, 25 bp, Homo sapien
aaattctcccgctgcagccttccaa

SEQ ID NO: 4250988 - DNA, 25 bp, Homo sapien
gttcaagaaattctcccgctgcagc

SEQ ID NO: 4250989 - DNA, 25 bp, Homo sapien
tcagcatggagtaattgttgactgg

SEQ ID NO: 4250990 - DNA, 25 bp, Homo sapien
aaaactgtagaatcagcatggagta

SEQ ID NO: 4250991 - DNA, 25 bp, Homo sapien
atcagcatggagtaattgttgactg

SEQ ID NO: 4250992 - DNA, 25 bp, Homo sapien
cagcatggagtaattgttgactggc

SEQ ID NO: 4250993 - DNA, 25 bp, Homo sapien
tataacaatttccaaatatttggtg

SEQ ID NO: 4250994 - DNA, 25 bp, Homo sapien
caatttccaaatatttggtggacat

SEQ ID NO: 4250995 - DNA, 25 bp, Homo sapien
aatataacaatttccaaatatttgg

SEQ ID NO: 4250996 - DNA, 25 bp, Homo sapien
aggaaatataacaatttccaaatat

SEQ ID NO: 4250997 - DNA, 25 bp, Homo sapien
ggtgtttcaaaactcgactcagaag

SEQ ID NO: 4250998 - DNA, 25 bp, Homo sapien
ccagagccctagaacgagaacaatg

SEQ ID NO: 4250999 - DNA, 25 bp, Homo sapien
tagaacccgttcacatctcaaggat

SEQ ID NO: 4251000 - DNA, 25 bp, Homo sapien
ttttcacgccttaggagcgcaggga

SEQ ID NO: 4251001 - DNA, 25 bp, Homo sapien
atcctctataagtatcccaaacctt

SEQ ID NO: 4251002 - DNA, 25 bp, Homo sapien
ccaatcctctataagtatcccaaac

SEQ ID NO: 4251003 - DNA, 25 bp, Homo sapien
caatcctctataagtatcccaaacc

SEQ ID NO: 4251004 - DNA, 25 bp, Homo sapien
aatcctctataagtatcccaaacct

SEQ ID NO: 4251005 - DNA, 25 bp, Homo sapien
aagaagaggcccctgtgcctttgtg

SEQ ID NO: 4251006 - DNA, 25 bp, Homo sapien
agaagaggcccctgtgcctttgtgg

SEQ ID NO: 4251007 - DNA, 25 bp, Homo sapien
cataagggtggcgttggcacgtttc

SEQ ID NO: 4251008 - DNA, 25 bp, Homo sapien
ttggcccatccaagtgacaacagat

SEQ ID NO: 4251009 - DNA, 25 bp, Homo sapien
gtgtcacttgactgaagtaccctga

SEQ ID NO: 4251010 - DNA, 25 bp, Homo sapien
ccaaatatgaggaatgcgcatggca

SEQ ID NO: 4251011 - DNA, 25 bp, Homo sapien
gccatctaagatggcggcccaagcg

SEQ ID NO: 4251012 - DNA, 25 bp, Homo sapien
aacgtcctgtcgttcggcggcagct

SEQ ID NO: 4251013 - DNA, 25 bp, Homo sapien
aagcgcccgcgattaagactctcgg

SEQ ID NO: 4251014 - DNA, 25 bp, Homo sapien
gaggcggtcacattcggcgcgtccc

SEQ ID NO: 4251015 - DNA, 25 bp, Homo sapien
gttgaaaaccgtctgtgagaagctt

SEQ ID NO: 4251016 - DNA, 25 bp, Homo sapien
ttgaaaaccgtctgtgagaagcttc

SEQ ID NO: 4251017 - DNA, 25 bp, Homo sapien
gagttgaaaaccgtctgtgagaagc

SEQ ID NO: 4251018 - DNA, 25 bp, Homo sapien
agagttgaaaaccgtctgtgagaag

SEQ ID NO: 4251019 - DNA, 25 bp, Homo sapien
acaggaacagctgaggaacgggaac

SEQ ID NO: 4251020 - DNA, 25 bp, Homo sapien
caggaacagctgaggaacgggaaca

SEQ ID NO: 4251021 - DNA, 25 bp, Homo sapien
ggagacttcttgaggtaacaggaac

SEQ ID NO: 4251022 - DNA, 25 bp, Homo sapien
ttagaaggatacagagtcggagact

SEQ ID NO: 4251023 - DNA, 25 bp, Homo sapien
catgagaacacggtcttagcagaga

SEQ ID NO: 4251024 - DNA, 25 bp, Homo sapien
gagaacaagtcaaggcatccagagc

SEQ ID NO: 4251025 - DNA, 25 bp, Homo sapien
gcagcagccacaaagcagttaaagg

SEQ ID NO: 4251026 - DNA, 25 bp, Homo sapien
taagtgctgtagtcccctccaacat

SEQ ID NO: 4251027 - DNA, 25 bp, Homo sapien
gaggagacattcatctgcattctgc

SEQ ID NO: 4251028 - DNA, 25 bp, Homo sapien
gctgatcatgtcttttggagataga

SEQ ID NO: 4251029 - DNA, 25 bp, Homo sapien
ctaggagacaataggaaggtgattg

SEQ ID NO: 4251030 - DNA, 25 bp, Homo sapien
aaggtgattgttactgagaggagac

SEQ ID NO: 4251031 - DNA, 25 bp, Homo sapien
tcaggatatcaatcacatagcatgg

SEQ ID NO: 4251032 - DNA, 25 bp, Homo sapien
tctgtgaccatcaagaactcagttc

SEQ ID NO: 4251033 - DNA, 25 bp, Homo sapien
gcactctgggctcccgttaaattag

SEQ ID NO: 4251034 - DNA, 25 bp, Homo sapien
tgaaatcaaaacctcagaagttacc

SEQ ID NO: 4251035 - DNA, 25 bp, Homo sapien
tcggtagcacctgagagcgcatgca

SEQ ID NO: 4251036 - DNA, 25 bp, Homo sapien
cagatcacagcttgcagagctcagg

SEQ ID NO: 4251037 - DNA, 25 bp, Homo sapien
tgagaaaaaccatgaacccagacag

SEQ ID NO: 4251038 - DNA, 25 bp, Homo sapien
gcagtactgcccaaatgagatgccc

SEQ ID NO: 4251039 - DNA, 25 bp, Homo sapien
tctcctgtgcgtctctcagaatgct

SEQ ID NO: 4251040 - DNA, 25 bp, Homo sapien
ctggcttggtctcctgtgcgtctct

SEQ ID NO: 4251041 - DNA, 25 bp, Homo sapien
gggtcgcagtggtggtcacactggg

SEQ ID NO: 4251042 - DNA, 25 bp, Homo sapien
tctgtttattggtctggcttggtct

SEQ ID NO: 4251043 - DNA, 25 bp, Homo sapien
acacggctcatccagggtcacagag

SEQ ID NO: 4251044 - DNA, 25 bp, Homo sapien
cattctgaggcataaggtggtcaca

SEQ ID NO: 4251045 - DNA, 25 bp, Homo sapien
cacagagctgttagtcaagaaagac

SEQ ID NO: 4251046 - DNA, 25 bp, Homo sapien
gaaagacgatgtgctttcgcccagc

SEQ ID NO: 4251047 - DNA, 25 bp, Homo sapien
aagccttggaggacgctgtggatac

SEQ ID NO: 4251048 - DNA, 25 bp, Homo sapien
gggatgaagccttggaggacgctgt

SEQ ID NO: 4251049 - DNA, 25 bp, Homo sapien
taaacttctggaagagggggatgaa

SEQ ID NO: 4251050 - DNA, 25 bp, Homo sapien
tgtcagcctaaacttctggaagagg

SEQ ID NO: 4251051 - DNA, 25 bp, Homo sapien
ctagtccgaagtagatgccaacggt

SEQ ID NO: 4251052 - DNA, 25 bp, Homo sapien
gcgaaggtgagcaggccgaccccaa

SEQ ID NO: 4251053 - DNA, 25 bp, Homo sapien
tgagcaggccgaccccaagagacat

SEQ ID NO: 4251054 - DNA, 25 bp, Homo sapien
agtagatgccaacggtttccaggga

SEQ ID NO: 4251055 - DNA, 25 bp, Homo sapien
ctgcgtaatagtgataacacaccag

SEQ ID NO: 4251056 - DNA, 25 bp, Homo sapien
ccagcaaggccccgatggcaaagca

SEQ ID NO: 4251057 - DNA, 25 bp, Homo sapien
gcaaggccccgatggcaaagcacag

SEQ ID NO: 4251058 - DNA, 25 bp, Homo sapien
caccagcaaggccccgatggcaaag

SEQ ID NO: 4251059 - DNA, 25 bp, Homo sapien
agggcacacgacagaggtgggctat

SEQ ID NO: 4251060 - DNA, 25 bp, Homo sapien
tgcagggcacacgacagaggtgggc

SEQ ID NO: 4251061 - DNA, 25 bp, Homo sapien
aactgcagggcacacgacagaggtg

SEQ ID NO: 4251062 - DNA, 25 bp, Homo sapien
catttcacccctagaaatctagcca

SEQ ID NO: 4251063 - DNA, 25 bp, Homo sapien
ttatattcagtcttcttaactgaga

SEQ ID NO: 4251064 - DNA, 25 bp, Homo sapien
ttcttaactgagaggcctccacttc

SEQ ID NO: 4251065 - DNA, 25 bp, Homo sapien
cttcttaactgagaggcctccactt

SEQ ID NO: 4251066 - DNA, 25 bp, Homo sapien
ttctttatattcagtcttcttaact

SEQ ID NO: 4251067 - DNA, 25 bp, Homo sapien
actttgatgcaggacgggaggtggg

SEQ ID NO: 4251068 - DNA, 25 bp, Homo sapien
cctgcctcattgagaattaatatcc

SEQ ID NO: 4251069 - DNA, 25 bp, Homo sapien
tccctgcctcattgagaattaatat

SEQ ID NO: 4251070 - DNA, 25 bp, Homo sapien
tttccctgcctcattgagaattaat

SEQ ID NO: 4251071 - DNA, 25 bp, Homo sapien
ctgggtcagagcctctccttcggag

SEQ ID NO: 4251072 - DNA, 25 bp, Homo sapien
gggtcagagcctctccttcggagtc

SEQ ID NO: 4251073 - DNA, 25 bp, Homo sapien
cacttgctgggtcagagcctctcct

SEQ ID NO: 4251074 - DNA, 25 bp, Homo sapien
ttgctgggtcagagcctctccttcg

SEQ ID NO: 4251075 - DNA, 25 bp, Homo sapien
ctgattccccagagggtaccacctc

SEQ ID NO: 4251076 - DNA, 25 bp, Homo sapien
ccagagggtaccacctctccaggag

SEQ ID NO: 4251077 - DNA, 25 bp, Homo sapien
gagggtaccacctctccaggagcat

SEQ ID NO: 4251078 - DNA, 25 bp, Homo sapien
tgattccccagagggtaccacctct

SEQ ID NO: 4251079 - DNA, 25 bp, Homo sapien
tatgaaaaagtttgggccgcacgcg

SEQ ID NO: 4251080 - DNA, 25 bp, Homo sapien
aggtggatcctgctcggagacttcc

SEQ ID NO: 4251081 - DNA, 25 bp, Homo sapien
ccacttaatctggagtcggccaggt

SEQ ID NO: 4251082 - DNA, 25 bp, Homo sapien
gccggctggagggttcctgttccaa

SEQ ID NO: 4251083 - DNA, 25 bp, Homo sapien
caagctggcttgtacacctcgatcc

SEQ ID NO: 4251084 - DNA, 25 bp, Homo sapien
agccaagctggcttgtacacctcga

SEQ ID NO: 4251085 - DNA, 25 bp, Homo sapien
gctggcttgtacacctcgatccttg

SEQ ID NO: 4251086 - DNA, 25 bp, Homo sapien
gcttgtacacctcgatccttggctc

SEQ ID NO: 4251087 - DNA, 25 bp, Homo sapien
attcaccatgtggttcttggtgcct

SEQ ID NO: 4251088 - DNA, 25 bp, Homo sapien
cattcaccatgtggttcttggtgcc

SEQ ID NO: 4251089 - DNA, 25 bp, Homo sapien
ggttcttggtgcctgttctagttcc

SEQ ID NO: 4251090 - DNA, 25 bp, Homo sapien
gttcttggtgcctgttctagttccc

SEQ ID NO: 4251091 - DNA, 25 bp, Homo sapien
tagagttgaagctcatccttcaaaa

SEQ ID NO: 4251092 - DNA, 25 bp, Homo sapien
ctccatagagttgaagctcatcctt

SEQ ID NO: 4251093 - DNA, 25 bp, Homo sapien
aaacgtcaggctccccatgcccagg

SEQ ID NO: 4251094 - DNA, 25 bp, Homo sapien
tccttcaaaacgtcaggctccccat

SEQ ID NO: 4251095 - DNA, 25 bp, Homo sapien
ggttgctctgggttgctggtcctca

SEQ ID NO: 4251096 - DNA, 25 bp, Homo sapien
aggctccgtcgatgttttccggttg

SEQ ID NO: 4251097 - DNA, 25 bp, Homo sapien
cgtcgatgttttccggttgctctgg

SEQ ID NO: 4251098 - DNA, 25 bp, Homo sapien
ttttccggttgctctgggttgctgg

SEQ ID NO: 4251099 - DNA, 25 bp, Homo sapien
acacaagctgtaggagaagctcagc

SEQ ID NO: 4251100 - DNA, 25 bp, Homo sapien
ctgcgggtaacaaacacaagctgta

SEQ ID NO: 4251101 - DNA, 25 bp, Homo sapien
cgggtaacaaacacaagctgtagga

SEQ ID NO: 4251102 - DNA, 25 bp, Homo sapien
aacaaacacaagctgtaggagaagc

SEQ ID NO: 4251103 - DNA, 25 bp, Homo sapien
ataataataataaccgcggcagaaa

SEQ ID NO: 4251104 - DNA, 25 bp, Homo sapien
aataataataaccgcggcagaaaga

SEQ ID NO: 4251105 - DNA, 25 bp, Homo sapien
cagccttcccatcttgcttgtggaa

SEQ ID NO: 4251106 - DNA, 25 bp, Homo sapien
cccagagggtcagagaaggcaaacg

SEQ ID NO: 4251107 - DNA, 25 bp, Homo sapien
ttttggactccacctcccatgtggt

SEQ ID NO: 4251108 - DNA, 25 bp, Homo sapien
cccatgtggttttgcccagagggtc

SEQ ID NO: 4251109 - DNA, 25 bp, Homo sapien
tggactccacctcccatgtggtttt

SEQ ID NO: 4251110 - DNA, 25 bp, Homo sapien
ggacttgactgttgtcctgaggctg

SEQ ID NO: 4251111 - DNA, 25 bp, Homo sapien
ccttggacattcagtgtccagtccc

SEQ ID NO: 4251112 - DNA, 25 bp, Homo sapien
tggacattcagtgtccagtcccatc

SEQ ID NO: 4251113 - DNA, 25 bp, Homo sapien
ggacattcagtgtccagtcccatcc

SEQ ID NO: 4251114 - DNA, 25 bp, Homo sapien
ctgctcatcccccatctcgtaggcc

SEQ ID NO: 4251115 - DNA, 25 bp, Homo sapien
gaacagggttctctgcacgcaacag

SEQ ID NO: 4251116 - DNA, 25 bp, Homo sapien
ccgaagtttacaaagtgatgagctc

SEQ ID NO: 4251117 - DNA, 25 bp, Homo sapien
tctcagagcagaattcagctaggca

SEQ ID NO: 4251118 - DNA, 25 bp, Homo sapien
taggcattaggaagtcactagccat

SEQ ID NO: 4251119 - DNA, 25 bp, Homo sapien
gcaaggggagctctgtgtagactat

SEQ ID NO: 4251120 - DNA, 25 bp, Homo sapien
tctgtgtagactatgtggatgctgg

SEQ ID NO: 4251121 - DNA, 25 bp, Homo sapien
aaggggagctctgtgtagactatgt

SEQ ID NO: 4251122 - DNA, 25 bp, Homo sapien
tgctgggctggtcaggggaaggaga

SEQ ID NO: 4251123 - DNA, 25 bp, Homo sapien
agctgccagaagtgtaaggcaggcc

SEQ ID NO: 4251124 - DNA, 25 bp, Homo sapien
gatctcaggggacatgatagagctg

SEQ ID NO: 4251125 - DNA, 25 bp, Homo sapien
agatctcaggggacatgatagagct

SEQ ID NO: 4251126 - DNA, 25 bp, Homo sapien
tgccagaagtgtaaggcaggcccca

SEQ ID NO: 4251127 - DNA, 25 bp, Homo sapien
ggccatcccaggaagggactcccac

SEQ ID NO: 4251128 - DNA, 25 bp, Homo sapien
ctgaggaggcaccaagagcaagcga

SEQ ID NO: 4251129 - DNA, 25 bp, Homo sapien
ctcccggaaggctgagggagccggc

SEQ ID NO: 4251130 - DNA, 25 bp, Homo sapien
cctcggccatcccaggaagggactc

SEQ ID NO: 4251131 - DNA, 25 bp, Homo sapien
gggtctcgtaatcctgggcctggct

SEQ ID NO: 4251132 - DNA, 25 bp, Homo sapien
ttcagcagggtctcgtaatcctggg

SEQ ID NO: 4251133 - DNA, 25 bp, Homo sapien
tctcgtaatcctgggcctggctgtc

SEQ ID NO: 4251134 - DNA, 25 bp, Homo sapien
gttcagcagggtctcgtaatcctgg

SEQ ID NO: 4251135 - DNA, 25 bp, Homo sapien
ggatcccactgagctgctctatctg

SEQ ID NO: 4251136 - DNA, 25 bp, Homo sapien
ctgcccaagtcagtgccagctccag

SEQ ID NO: 4251137 - DNA, 25 bp, Homo sapien
cactgagctgctctatctgcagggt

SEQ ID NO: 4251138 - DNA, 25 bp, Homo sapien
gcaggatcccactgagctgctctat

SEQ ID NO: 4251139 - DNA, 25 bp, Homo sapien
tcacggagtccagcttgatctccaa

SEQ ID NO: 4251140 - DNA, 25 bp, Homo sapien
tgtcatattgggcttggatatctgc

SEQ ID NO: 4251141 - DNA, 25 bp, Homo sapien
cagatttctcacggagtccagcttg

SEQ ID NO: 4251142 - DNA, 25 bp, Homo sapien
gctccaacctccacggactgcgtgg

SEQ ID NO: 4251143 - DNA, 25 bp, Homo sapien
tctgtctctcgctgcagctgagtga

SEQ ID NO: 4251144 - DNA, 25 bp, Homo sapien
tcaatctctgtctctcgctgcagct

SEQ ID NO: 4251145 - DNA, 25 bp, Homo sapien
tctctgtctctcgctgcagctgagt

SEQ ID NO: 4251146 - DNA, 25 bp, Homo sapien
aatctctgtctctcgctgcagctga

SEQ ID NO: 4251147 - DNA, 25 bp, Homo sapien
gtcgttctccacagactggcgcatg

SEQ ID NO: 4251148 - DNA, 25 bp, Homo sapien
tgcagagcccatggtgtcgttctcc

SEQ ID NO: 4251149 - DNA, 25 bp, Homo sapien
cttgcagagcccatggtgtcgttct

SEQ ID NO: 4251150 - DNA, 25 bp, Homo sapien
cgttctccacagactggcgcatggc

SEQ ID NO: 4251151 - DNA, 25 bp, Homo sapien
gttgatctgcagaacgatgcgggcg

SEQ ID NO: 4251152 - DNA, 25 bp, Homo sapien
tgatctgcagaacgatgcgggcgtt

SEQ ID NO: 4251153 - DNA, 25 bp, Homo sapien
attgttgatctgcagaacgatgcgg

SEQ ID NO: 4251154 - DNA, 25 bp, Homo sapien
gcattgttgatctgcagaacgatgc

SEQ ID NO: 4251155 - DNA, 25 bp, Homo sapien
tcgatggtcttgaagcaatggctcc

SEQ ID NO: 4251156 - DNA, 25 bp, Homo sapien
ggtcttgaagcaatggctccagtct

SEQ ID NO: 4251157 - DNA, 25 bp, Homo sapien
cgatggtcttgaagcaatggctcca

SEQ ID NO: 4251158 - DNA, 25 bp, Homo sapien
tgaagcaatggctccagtctctgac

SEQ ID NO: 4251159 - DNA, 25 bp, Homo sapien
aggtggttgttcaggctttgcacgg

SEQ ID NO: 4251160 - DNA, 25 bp, Homo sapien
gtggttgttcaggctttgcacggtc

SEQ ID NO: 4251161 - DNA, 25 bp, Homo sapien
ccaggtggttgttcaggctttgcac

SEQ ID NO: 4251162 - DNA, 25 bp, Homo sapien
agccatccccgaggccaggcccctg

SEQ ID NO: 4251163 - DNA, 25 bp, Homo sapien
atccgggaaccagagcccccagcga

SEQ ID NO: 4251164 - DNA, 25 bp, Homo sapien
gccaccccggaagctggtggagcgg

SEQ ID NO: 4251165 - DNA, 25 bp, Homo sapien
gtggagcgggacacggagatccggg

SEQ ID NO: 4251166 - DNA, 25 bp, Homo sapien
agatccgggaaccagagcccccagc

SEQ ID NO: 4251167 - DNA, 25 bp, Homo sapien
accagctgggcgccatagctggcac

SEQ ID NO: 4251168 - DNA, 25 bp, Homo sapien
tgctgagtgcagacggttcagagaa

SEQ ID NO: 4251169 - DNA, 25 bp, Homo sapien
ggtgagccaatgactcggtaaaggg

SEQ ID NO: 4251170 - DNA, 25 bp, Homo sapien
gatccaatgtttgggcagcgtcggc

SEQ ID NO: 4251171 - DNA, 25 bp, Homo sapien
gtcgagctcgctgaccacctactgg

SEQ ID NO: 4251172 - DNA, 25 bp, Homo sapien
ccagatgagtggtctgcttctagta

SEQ ID NO: 4251173 - DNA, 25 bp, Homo sapien
tgctgggaagcttagagccagatga

SEQ ID NO: 4251174 - DNA, 25 bp, Homo sapien
ttgaaccagccacccggtcacattt

SEQ ID NO: 4251175 - DNA, 25 bp, Homo sapien
tatctcacgtgcactgttgaaccag

SEQ ID NO: 4251176 - DNA, 25 bp, Homo sapien
ggagcctaagcaccttctgatctgt

SEQ ID NO: 4251177 - DNA, 25 bp, Homo sapien
ttcaaggctgccaagggaaatggta

SEQ ID NO: 4251178 - DNA, 25 bp, Homo sapien
gaaatggtagaatccactttcccag

SEQ ID NO: 4251179 - DNA, 25 bp, Homo sapien
cctgtggtgttacctgagcactggc

SEQ ID NO: 4251180 - DNA, 25 bp, Homo sapien
tgcacgtgcacagtaaccagatggc

SEQ ID NO: 4251181 - DNA, 25 bp, Homo sapien
caaggtcccacagtaaattggtaga

SEQ ID NO: 4251182 - DNA, 25 bp, Homo sapien
tgccaggagagttcatggagagcct

SEQ ID NO: 4251183 - DNA, 25 bp, Homo sapien
tagcataggttctgttacgactccc

SEQ ID NO: 4251184 - DNA, 25 bp, Homo sapien
actcatctggccacgcggaggatgc

SEQ ID NO: 4251185 - DNA, 25 bp, Homo sapien
gaacattcttgcagtaaagccgagg

SEQ ID NO: 4251186 - DNA, 25 bp, Homo sapien
gggccaggccagttttgacagtctc

SEQ ID NO: 4251187 - DNA, 25 bp, Homo sapien
tctatggcaccaagaaaagtcccag

SEQ ID NO: 4251188 - DNA, 25 bp, Homo sapien
tcttggcaactcttacgacgaggca

SEQ ID NO: 4251189 - DNA, 25 bp, Homo sapien
tgctagaagaccatcgcagtgatcc

SEQ ID NO: 4251190 - DNA, 25 bp, Homo sapien
caaatataggctggatccctgcagt

SEQ ID NO: 4251191 - DNA, 25 bp, Homo sapien
aaacccctcgggaatgttatctgca

SEQ ID NO: 4251192 - DNA, 25 bp, Homo sapien
tgggccccttccttaactcaggaca

SEQ ID NO: 4251193 - DNA, 25 bp, Homo sapien
ctgtgaggctgccaacagttgggcc

SEQ ID NO: 4251194 - DNA, 25 bp, Homo sapien
gggtgtctctgcctcacaaactagt

SEQ ID NO: 4251195 - DNA, 25 bp, Homo sapien
caaggtgggccctcgcttaagagaa

SEQ ID NO: 4251196 - DNA, 25 bp, Homo sapien
caagtattttctgtgatatcccagg

SEQ ID NO: 4251197 - DNA, 25 bp, Homo sapien
aattgggcaacaatgggcatcttcc

SEQ ID NO: 4251198 - DNA, 25 bp, Homo sapien
tagggaactggacaggcttggacct

SEQ ID NO: 4251199 - DNA, 25 bp, Homo sapien
gtttcaaatgtgtctagtgttcagt

SEQ ID NO: 4251200 - DNA, 25 bp, Homo sapien
tgactaggttttgaacaggagacaa

SEQ ID NO: 4251201 - DNA, 25 bp, Homo sapien
tatttatgactaggttttgaacagg

SEQ ID NO: 4251202 - DNA, 25 bp, Homo sapien
tatgactaggttttgaacaggagac

SEQ ID NO: 4251203 - DNA, 25 bp, Homo sapien
taggttttgaacaggagacaatctg

SEQ ID NO: 4251204 - DNA, 25 bp, Homo sapien
gaacctacctggtgtgagggccaag

SEQ ID NO: 4251205 - DNA, 25 bp, Homo sapien
taggcatcccgtaagaatctgtgta

SEQ ID NO: 4251206 - DNA, 25 bp, Homo sapien
tcaattgtcaccagttaggtccccg

SEQ ID NO: 4251207 - DNA, 25 bp, Homo sapien
aatgactacttgtggcttgggagcc

SEQ ID NO: 4251208 - DNA, 25 bp, Homo sapien
tatttaaacagaaaacgtgcacatg

SEQ ID NO: 4251209 - DNA, 25 bp, Homo sapien
ggccagttgggcagctctttccacg

SEQ ID NO: 4251210 - DNA, 25 bp, Homo sapien
acattgtgagcgatctcggcacagt

SEQ ID NO: 4251211 - DNA, 25 bp, Homo sapien
ttgggcagctctttccacgatggct

SEQ ID NO: 4251212 - DNA, 25 bp, Homo sapien
cacgatggctttgcggttcttggag

SEQ ID NO: 4251213 - DNA, 25 bp, Homo sapien
tgaatggagccaagagcacctggtt

SEQ ID NO: 4251214 - DNA, 25 bp, Homo sapien
cagcaagcaatggacagggatccgg

SEQ ID NO: 4251215 - DNA, 25 bp, Homo sapien
aaatcctgactatggttccctggtg

SEQ ID NO: 4251216 - DNA, 25 bp, Homo sapien
gacagccctcaacacacttggaaaa

SEQ ID NO: 4251217 - DNA, 25 bp, Homo sapien
gatcttaaagactgccaagctgcgc

SEQ ID NO: 4251218 - DNA, 25 bp, Homo sapien
tcgaatcattttgagtggacccaca

SEQ ID NO: 4251219 - DNA, 25 bp, Homo sapien
caatcttggaaggtaaccacgttag

SEQ ID NO: 4251220 - DNA, 25 bp, Homo sapien
agctgcgcttacagagcatatgcca

SEQ ID NO: 4251221 - DNA, 25 bp, Homo sapien
tacacttagaagaccaagtcacctc

SEQ ID NO: 4251222 - DNA, 25 bp, Homo sapien
ggctattattgcagtgttcacaaag

SEQ ID NO: 4251223 - DNA, 25 bp, Homo sapien
gaaacaacagccaaaggatattgta

SEQ ID NO: 4251224 - DNA, 25 bp, Homo sapien
gtagtggaaagtggctattattgca

SEQ ID NO: 4251225 - DNA, 25 bp, Homo sapien
cgaaccctgttgtcaatgcctctgg

SEQ ID NO: 4251226 - DNA, 25 bp, Homo sapien
tcttctacgaaccctgttgtcaatg

SEQ ID NO: 4251227 - DNA, 25 bp, Homo sapien
tacgaaccctgttgtcaatgcctct

SEQ ID NO: 4251228 - DNA, 25 bp, Homo sapien
tctacgaaccctgttgtcaatgcct

SEQ ID NO: 4251229 - DNA, 25 bp, Homo sapien
gttagcgtctgtgcagagtgcgaac

SEQ ID NO: 4251230 - DNA, 25 bp, Homo sapien
tagcgtctgtgcagagtgcgaactc

SEQ ID NO: 4251231 - DNA, 25 bp, Homo sapien
agcgtctgtgcagagtgcgaactct

SEQ ID NO: 4251232 - DNA, 25 bp, Homo sapien
cgtctgtgcagagtgcgaactcttc

SEQ ID NO: 4251233 - DNA, 25 bp, Homo sapien
tgacatatcggtctgactggtgccg

SEQ ID NO: 4251234 - DNA, 25 bp, Homo sapien
tatcggtctgactggtgccggatga

SEQ ID NO: 4251235 - DNA, 25 bp, Homo sapien
gacatatcggtctgactggtgccgg

SEQ ID NO: 4251236 - DNA, 25 bp, Homo sapien
catatcggtctgactggtgccggat

SEQ ID NO: 4251237 - DNA, 25 bp, Homo sapien
ggaagaatcctggaaggaggctttc

SEQ ID NO: 4251238 - DNA, 25 bp, Homo sapien
aagcggccccaggtgaggaagaatc

SEQ ID NO: 4251239 - DNA, 25 bp, Homo sapien
aggaggctttcctgcccagggactg

SEQ ID NO: 4251240 - DNA, 25 bp, Homo sapien
aagaagcggccccaggtgaggaaga

SEQ ID NO: 4251241 - DNA, 25 bp, Homo sapien
tgtcgcagagtgtcttccaatcgcc

SEQ ID NO: 4251242 - DNA, 25 bp, Homo sapien
actgtcgcagagtgtcttccaatcg

SEQ ID NO: 4251243 - DNA, 25 bp, Homo sapien
acactgtcgcagagtgtcttccaat

SEQ ID NO: 4251244 - DNA, 25 bp, Homo sapien
tcgcagagtgtcttccaatcgccag

SEQ ID NO: 4251245 - DNA, 25 bp, Homo sapien
gaatggaatgggtgcctctgccagg

SEQ ID NO: 4251246 - DNA, 25 bp, Homo sapien
aatggaatgggtgcctctgccaggc

SEQ ID NO: 4251247 - DNA, 25 bp, Homo sapien
aaaatgaagatgacactgcgcgctg

SEQ ID NO: 4251248 - DNA, 25 bp, Homo sapien
tgaagatgacactgcgcgctgaatg

SEQ ID NO: 4251249 - DNA, 25 bp, Homo sapien
gaagatgacactgcgcgctgaatgc

SEQ ID NO: 4251250 - DNA, 25 bp, Homo sapien
aatgaagatgacactgcgcgctgaa

SEQ ID NO: 4251251 - DNA, 25 bp, Homo sapien
tgtggtcttccgagccattgatttc

SEQ ID NO: 4251252 - DNA, 25 bp, Homo sapien
gagatactaccagaatttctgcctg

SEQ ID NO: 4251253 - DNA, 25 bp, Homo sapien
tcatattcccagagatactaccaga

SEQ ID NO: 4251254 - DNA, 25 bp, Homo sapien
ttcgcagccatcaactggcccagag

SEQ ID NO: 4251255 - DNA, 25 bp, Homo sapien
caggaatgcggattgccacggatta

SEQ ID NO: 4251256 - DNA, 25 bp, Homo sapien
tgaaagctgtcaagctgggccaccc

SEQ ID NO: 4251257 - DNA, 25 bp, Homo sapien
ccgacattggtgagcgctgggatcc

SEQ ID NO: 4251258 - DNA, 25 bp, Homo sapien
ggccatggcatgaacgaatacacgt

SEQ ID NO: 4251259 - DNA, 25 bp, Homo sapien
gaagagagaagggacggtggcgcgc

SEQ ID NO: 4251260 - DNA, 25 bp, Homo sapien
cctccgtaggcagcgccgaggaaga

SEQ ID NO: 4251261 - DNA, 25 bp, Homo sapien
cacctccgtaggcagcgccgaggaa

SEQ ID NO: 4251262 - DNA, 25 bp, Homo sapien
agagaagggacggtggcgcgcaagg

SEQ ID NO: 4251263 - DNA, 25 bp, Homo sapien
tgaacacatgaaatgatccacatca

SEQ ID NO: 4251264 - DNA, 25 bp, Homo sapien
acagagaaatgggaatgtccgtaca

SEQ ID NO: 4251265 - DNA, 25 bp, Homo sapien
cgtacagtgctagtgcaaatatgaa

SEQ ID NO: 4251266 - DNA, 25 bp, Homo sapien
tgggtaaagaatccaaatagacatt

SEQ ID NO: 4251267 - DNA, 25 bp, Homo sapien
gagttagtctgtctggtgagcctga

SEQ ID NO: 4251268 - DNA, 25 bp, Homo sapien
ccctgagtaccccatctgcagtatg

SEQ ID NO: 4251269 - DNA, 25 bp, Homo sapien
tcctagttcctatccctattgggag

SEQ ID NO: 4251270 - DNA, 25 bp, Homo sapien
gggtgcctgtagcatgtgcccttga

SEQ ID NO: 4251271 - DNA, 25 bp, Homo sapien
gaccaattccacatgatgtcctgga

SEQ ID NO: 4251272 - DNA, 25 bp, Homo sapien
ggtacaatgtgaggattcgatagat

SEQ ID NO: 4251273 - DNA, 25 bp, Homo sapien
atgtgtgcaccgtggaatgaggaaa

SEQ ID NO: 4251274 - DNA, 25 bp, Homo sapien
gcaagtagatcgatgttgaactggg

SEQ ID NO: 4251275 - DNA, 25 bp, Homo sapien
aggagcctggtgagacgcccatgct

SEQ ID NO: 4251276 - DNA, 25 bp, Homo sapien
tggctcctgataaatgaccgtttcc

SEQ ID NO: 4251277 - DNA, 25 bp, Homo sapien
cacgtgcccagcaacgttggagcct

SEQ ID NO: 4251278 - DNA, 25 bp, Homo sapien
cattggaaaagtggcaggtgggtca

SEQ ID NO: 4251279 - DNA, 25 bp, Homo sapien
tgagtcaagacaccatagggaaggg

SEQ ID NO: 4251280 - DNA, 25 bp, Homo sapien
cttttgctaaaagtggcacggagcc

SEQ ID NO: 4251281 - DNA, 25 bp, Homo sapien
taaggagccatgtggccccaagtgc

SEQ ID NO: 4251282 - DNA, 25 bp, Homo sapien
gccttgaacatatggtgaccctgcc

SEQ ID NO: 4251283 - DNA, 25 bp, Homo sapien
tcatctccctttgtggccagcggcc

SEQ ID NO: 4251284 - DNA, 25 bp, Homo sapien
cttgggaggaattgagagccataga

SEQ ID NO: 4251285 - DNA, 25 bp, Homo sapien
tcttcttgggaggaattgagagcca

SEQ ID NO: 4251286 - DNA, 25 bp, Homo sapien
cctttgtggccagcggcctcctttt

SEQ ID NO: 4251287 - DNA, 25 bp, Homo sapien
gatttgctgtttaccccatcccagg

SEQ ID NO: 4251288 - DNA, 25 bp, Homo sapien
gattcaagcccgagatgtgtctgca

SEQ ID NO: 4251289 - DNA, 25 bp, Homo sapien
gagagatcgggtagcattttccatg

SEQ ID NO: 4251290 - DNA, 25 bp, Homo sapien
caactaaggctatggcttctggtgc

SEQ ID NO: 4251291 - DNA, 25 bp, Homo sapien
ggcgagcggcacttaggaaagacaa

SEQ ID NO: 4251292 - DNA, 25 bp, Homo sapien
ctcaggagagtgaccccgcgtctgg

SEQ ID NO: 4251293 - DNA, 25 bp, Homo sapien
cagctctgcgactctgtggcttggg

SEQ ID NO: 4251294 - DNA, 25 bp, Homo sapien
acccatgggaaggtcgggaggctca

SEQ ID NO: 4251295 - DNA, 25 bp, Homo sapien
tccatggagacccgatgcagctgga

SEQ ID NO: 4251296 - DNA, 25 bp, Homo sapien
gggcctgctccgtgcgccctgtctg

SEQ ID NO: 4251297 - DNA, 25 bp, Homo sapien
aggctggcccgacagcctgactcga

SEQ ID NO: 4251298 - DNA, 25 bp, Homo sapien
cctgtcagcggctgctctggagcct

SEQ ID NO: 4251299 - DNA, 25 bp, Homo sapien
ttcccaggggccataggcttgcagg

SEQ ID NO: 4251300 - DNA, 25 bp, Homo sapien
tatctttcccaggggccataggctt

SEQ ID NO: 4251301 - DNA, 25 bp, Homo sapien
tctttcccaggggccataggcttgc

SEQ ID NO: 4251302 - DNA, 25 bp, Homo sapien
tatatctttcccaggggccataggc

SEQ ID NO: 4251303 - DNA, 25 bp, Homo sapien
gcagcaagcagaatggaggcctggg

SEQ ID NO: 4251304 - DNA, 25 bp, Homo sapien
cctgccagggagcatctgtggttcc

SEQ ID NO: 4251305 - DNA, 25 bp, Homo sapien
atctgtggttccagcggctgcagca

SEQ ID NO: 4251306 - DNA, 25 bp, Homo sapien
ggagggtatggtggccctgccaggg

SEQ ID NO: 4251307 - DNA, 25 bp, Homo sapien
ctgtgggacaggcgtcagcttcttg

SEQ ID NO: 4251308 - DNA, 25 bp, Homo sapien
gtgggacaggcgtcagcttcttgac

SEQ ID NO: 4251309 - DNA, 25 bp, Homo sapien
tgtgggacaggcgtcagcttcttga

SEQ ID NO: 4251310 - DNA, 25 bp, Homo sapien
taggaaaacgtgttttgcaacttga

SEQ ID NO: 4251311 - DNA, 25 bp, Homo sapien
ctaggaaaacgtgttttgcaacttg

SEQ ID NO: 4251312 - DNA, 25 bp, Homo sapien
ctgccgccgcgggttccgcgacgct

SEQ ID NO: 4251313 - DNA, 25 bp, Homo sapien
gccgccgcgggttccgcgacgctga

SEQ ID NO: 4251314 - DNA, 25 bp, Homo sapien
ccgccgcgggttccgcgacgctgac

SEQ ID NO: 4251315 - DNA, 25 bp, Homo sapien
tgccgccgcgggttccgcgacgctg

SEQ ID NO: 4251316 - DNA, 25 bp, Homo sapien
tgtatgtgacccaagagacttcttt

SEQ ID NO: 4251317 - DNA, 25 bp, Homo sapien
tatgtgacccaagagacttctttac

SEQ ID NO: 4251318 - DNA, 25 bp, Homo sapien
cgtgtatgtgacccaagagacttct

SEQ ID NO: 4251319 - DNA, 25 bp, Homo sapien
gtgacccaagagacttctttaccaa

SEQ ID NO: 4251320 - DNA, 25 bp, Homo sapien
tgccagcgggctggccctcctccct

SEQ ID NO: 4251321 - DNA, 25 bp, Homo sapien
tccctcatcagccatgctgagcatt

SEQ ID NO: 4251322 - DNA, 25 bp, Homo sapien
tctgtaaggcagcagcccgagctct

SEQ ID NO: 4251323 - DNA, 25 bp, Homo sapien
ctctgctcatggctggtctccagca

SEQ ID NO: 4251324 - DNA, 25 bp, Homo sapien
caaagaccctgacctcggaggtggt

SEQ ID NO: 4251325 - DNA, 25 bp, Homo sapien
acctcggaggtggtgtagtggttgc

SEQ ID NO: 4251326 - DNA, 25 bp, Homo sapien
agaccctgacctcggaggtggtgta

SEQ ID NO: 4251327 - DNA, 25 bp, Homo sapien
accctgacctcggaggtggtgtagt

SEQ ID NO: 4251328 - DNA, 25 bp, Homo sapien
aatgacacggagttcagccttgtcc

SEQ ID NO: 4251329 - DNA, 25 bp, Homo sapien
gccttgtcctcacacagcgagggaa

SEQ ID NO: 4251330 - DNA, 25 bp, Homo sapien
ctggcaaatgacacggagttcagcc

SEQ ID NO: 4251331 - DNA, 25 bp, Homo sapien
caaatgacacggagttcagccttgt

SEQ ID NO: 4251332 - DNA, 25 bp, Homo sapien
tcaacaaatgggtaatgggcggcca

SEQ ID NO: 4251333 - DNA, 25 bp, Homo sapien
agtcaacaaatgggtaatgggcggc

SEQ ID NO: 4251334 - DNA, 25 bp, Homo sapien
gtcaacaaatgggtaatgggcggcc

SEQ ID NO: 4251335 - DNA, 25 bp, Homo sapien
cacacacagcgcgagttgttttgtg

SEQ ID NO: 4251336 - DNA, 25 bp, Homo sapien
gaaacagggcacgatgaacctggga

SEQ ID NO: 4251337 - DNA, 25 bp, Homo sapien
taattttgcgaacggaaacagggca

SEQ ID NO: 4251338 - DNA, 25 bp, Homo sapien
tatgaacggccaggcgacggtgtct

SEQ ID NO: 4251339 - DNA, 25 bp, Homo sapien
caagggctgccttggtaatagtgac

SEQ ID NO: 4251340 - DNA, 25 bp, Homo sapien
tgtcagctgcaataaaatcacccga

SEQ ID NO: 4251341 - DNA, 25 bp, Homo sapien
taaaatgagccatcacaagggctgc

SEQ ID NO: 4251342 - DNA, 25 bp, Homo sapien
tcagtcagtccactgggtcaagtgc

SEQ ID NO: 4251343 - DNA, 25 bp, Homo sapien
tgaatgcactgagctaagaggcatc

SEQ ID NO: 4251344 - DNA, 25 bp, Homo sapien
gcagccgccaggtctttatcacagg

SEQ ID NO: 4251345 - DNA, 25 bp, Homo sapien
gccaggtctttatcacaggcctgct

SEQ ID NO: 4251346 - DNA, 25 bp, Homo sapien
gcagcagccgccaggtctttatcac

SEQ ID NO: 4251347 - DNA, 25 bp, Homo sapien
ctccagcagcaccaaaacggggtcc

SEQ ID NO: 4251348 - DNA, 25 bp, Homo sapien
tccagcagcaccaaaacggggtcca

SEQ ID NO: 4251349 - DNA, 25 bp, Homo sapien
ccagcagcaccaaaacggggtccat

SEQ ID NO: 4251350 - DNA, 25 bp, Homo sapien
tgcccagagtcacaacaagtaatgg

SEQ ID NO: 4251351 - DNA, 25 bp, Homo sapien
gtgtcctcagtcagtccaatgtctt

SEQ ID NO: 4251352 - DNA, 25 bp, Homo sapien
gggaaactcatcagctggagatctg

SEQ ID NO: 4251353 - DNA, 25 bp, Homo sapien
ggagatctgggtctggccaacaggg

SEQ ID NO: 4251354 - DNA, 25 bp, Homo sapien
tttcctctcaaaggtacacagtggg

SEQ ID NO: 4251355 - DNA, 25 bp, Homo sapien
gatgtgactgcacacagaagggcga

SEQ ID NO: 4251356 - DNA, 25 bp, Homo sapien
aaatgtactcgtttctcaggcagga

SEQ ID NO: 4251357 - DNA, 25 bp, Homo sapien
aagactgtgcgtgcttacctgcggg

SEQ ID NO: 4251358 - DNA, 25 bp, Homo sapien
caaagaaatgccacgccaatgggag

SEQ ID NO: 4251359 - DNA, 25 bp, Homo sapien
caaacggcctgaatcttttctggaa

SEQ ID NO: 4251360 - DNA, 25 bp, Homo sapien
tttgcaaacgcacaacacgcagagc

SEQ ID NO: 4251361 - DNA, 25 bp, Homo sapien
gaattgatgagtcggagacaccagg

SEQ ID NO: 4251362 - DNA, 25 bp, Homo sapien
gctgcagtggctcgaaaggctgaaa

SEQ ID NO: 4251363 - DNA, 25 bp, Homo sapien
tcaacactacttggctggctcaccg

SEQ ID NO: 4251364 - DNA, 25 bp, Homo sapien
gagagtcacagttatcgcagccatt

SEQ ID NO: 4251365 - DNA, 25 bp, Homo sapien
gctaatgtggactgaaacgcctgcc

SEQ ID NO: 4251366 - DNA, 25 bp, Homo sapien
aaagattttagccagtcctagaggg

SEQ ID NO: 4251367 - DNA, 25 bp, Homo sapien
gatggcaacagaagtgccccgggtt

SEQ ID NO: 4251368 - DNA, 25 bp, Homo sapien
gagcccagggtgccaacaagaaatg

SEQ ID NO: 4251369 - DNA, 25 bp, Homo sapien
caggctgtctacacaattgtgctga

SEQ ID NO: 4251370 - DNA, 25 bp, Homo sapien
cgggtttggtgtgcggctggcgacc

SEQ ID NO: 4251371 - DNA, 25 bp, Homo sapien
cagtactgggtgtgatgcccgtgca

SEQ ID NO: 4251372 - DNA, 25 bp, Homo sapien
agctctccggcgcatgtgaggactg

SEQ ID NO: 4251373 - DNA, 25 bp, Homo sapien
gacactctcgtgttgatgtagctct

SEQ ID NO: 4251374 - DNA, 25 bp, Homo sapien
tctcttgctcccgaataaggagccc

SEQ ID NO: 4251375 - DNA, 25 bp, Homo sapien
gcactgctgcgacgccctcgcttcc

SEQ ID NO: 4251376 - DNA, 25 bp, Homo sapien
gctctctagcgatcccgcactgctg

SEQ ID NO: 4251377 - DNA, 25 bp, Homo sapien
ccacattgctctctagcgatcccgc

SEQ ID NO: 4251378 - DNA, 25 bp, Homo sapien
ctagcgatcccgcactgctgcgacg

SEQ ID NO: 4251379 - DNA, 25 bp, Homo sapien
ataccagaagttagacgcggacatg

SEQ ID NO: 4251380 - DNA, 25 bp, Homo sapien
ccagaagttagacgcggacatgagg

SEQ ID NO: 4251381 - DNA, 25 bp, Homo sapien
gagcaggcacaggtgccgggcccac

SEQ ID NO: 4251382 - DNA, 25 bp, Homo sapien
acgctgctgccacggagcctgcacc

SEQ ID NO: 4251383 - DNA, 25 bp, Homo sapien
ccgaccgcctctaaggctggataac

SEQ ID NO: 4251384 - DNA, 25 bp, Homo sapien
ttcagagctggaccctaggccgggt

SEQ ID NO: 4251385 - DNA, 25 bp, Homo sapien
gccttcagagctggaccctaggccg

SEQ ID NO: 4251386 - DNA, 25 bp, Homo sapien
ggctggataacttggccatgctgcc

SEQ ID NO: 4251387 - DNA, 25 bp, Homo sapien
aatgatagctatgcacactcggccg

SEQ ID NO: 4251388 - DNA, 25 bp, Homo sapien
gccaggcatgcctgaaaggctttcc

SEQ ID NO: 4251389 - DNA, 25 bp, Homo sapien
cagtgtcagtgaccataacagaaat

SEQ ID NO: 4251390 - DNA, 25 bp, Homo sapien
ggctttccatgcatcgactccttcg

SEQ ID NO: 4251391 - DNA, 25 bp, Homo sapien
ttccacaagctcatcgtggtgtttc

SEQ ID NO: 4251392 - DNA, 25 bp, Homo sapien
agctcatcgtggtgtttcaggctca

SEQ ID NO: 4251393 - DNA, 25 bp, Homo sapien
ctcttccacaagctcatcgtggtgt

SEQ ID NO: 4251394 - DNA, 25 bp, Homo sapien
acaagctcatcgtggtgtttcaggc

SEQ ID NO: 4251395 - DNA, 25 bp, Homo sapien
ccgctggggagcttgcagcccccat

SEQ ID NO: 4251396 - DNA, 25 bp, Homo sapien
ctgtgagggccgtggtgagtgaggt

SEQ ID NO: 4251397 - DNA, 25 bp, Homo sapien
tggggccatgctgccgctggggagc

SEQ ID NO: 4251398 - DNA, 25 bp, Homo sapien
tgagggccgtggtgagtgaggtggg

SEQ ID NO: 4251399 - DNA, 25 bp, Homo sapien
ctggtccagagcacatctgaccttt

SEQ ID NO: 4251400 - DNA, 25 bp, Homo sapien
gcacatctgacctttcctgctgcca

SEQ ID NO: 4251401 - DNA, 25 bp, Homo sapien
tccagagcacatctgacctttcctg

SEQ ID NO: 4251402 - DNA, 25 bp, Homo sapien
ggtccagagcacatctgacctttcc

SEQ ID NO: 4251403 - DNA, 25 bp, Homo sapien
gggccggcacgtggctgtccaaccc

SEQ ID NO: 4251404 - DNA, 25 bp, Homo sapien
cccaagctctggcagagggtggaca

SEQ ID NO: 4251405 - DNA, 25 bp, Homo sapien
gggcggatggcgctcaagggcctcg

SEQ ID NO: 4251406 - DNA, 25 bp, Homo sapien
tggacagctgaggtcctgactgctg

SEQ ID NO: 4251407 - DNA, 25 bp, Homo sapien
ctgactggtggacagactgttcggc

SEQ ID NO: 4251408 - DNA, 25 bp, Homo sapien
tcctgggagaagctcgctgactggt

SEQ ID NO: 4251409 - DNA, 25 bp, Homo sapien
agaagctcgctgactggtggacaga

SEQ ID NO: 4251410 - DNA, 25 bp, Homo sapien
gcagacctgcgtgggacaagctggg

SEQ ID NO: 4251411 - DNA, 25 bp, Homo sapien
cccgtacactccttgagcagcaaca

SEQ ID NO: 4251412 - DNA, 25 bp, Homo sapien
tcccgtacactccttgagcagcaac

SEQ ID NO: 4251413 - DNA, 25 bp, Homo sapien
cgtacactccttgagcagcaacaca

SEQ ID NO: 4251414 - DNA, 25 bp, Homo sapien
cctcccgtacactccttgagcagca

SEQ ID NO: 4251415 - DNA, 25 bp, Homo sapien
tggcaaaagcccctgagccttgctg

SEQ ID NO: 4251416 - DNA, 25 bp, Homo sapien
tcccaggaatgtaggcagtttcagg

SEQ ID NO: 4251417 - DNA, 25 bp, Homo sapien
cggtcggccagtgcctcttttctct

SEQ ID NO: 4251418 - DNA, 25 bp, Homo sapien
agccttgctgctcccggtgccccac

SEQ ID NO: 4251419 - DNA, 25 bp, Homo sapien
gattagagggttccgcgcaagttca

SEQ ID NO: 4251420 - DNA, 25 bp, Homo sapien
ggcgccagacagattagagggttcc

SEQ ID NO: 4251421 - DNA, 25 bp, Homo sapien
ggttccgcgcaagttcattcatcag

SEQ ID NO: 4251422 - DNA, 25 bp, Homo sapien
cagacagattagagggttccgcgca

SEQ ID NO: 4251423 - DNA, 25 bp, Homo sapien
tcggtcttgcatgcgctgggctagc

SEQ ID NO: 4251424 - DNA, 25 bp, Homo sapien
tagcaaggtggttctaggccaagct

SEQ ID NO: 4251425 - DNA, 25 bp, Homo sapien
gacttccccagctaattcgtgtgca

SEQ ID NO: 4251426 - DNA, 25 bp, Homo sapien
ggctagagcgacttcccagatcaat

SEQ ID NO: 4251427 - DNA, 25 bp, Homo sapien
cggctcagtgttccgttgcccgact

SEQ ID NO: 4251428 - DNA, 25 bp, Homo sapien
cggcttccgagaggtcccgcaggga

SEQ ID NO: 4251429 - DNA, 25 bp, Homo sapien
agggcgctgcgcttgaggccctcac

SEQ ID NO: 4251430 - DNA, 25 bp, Homo sapien
cctcaccgctggcatagctgtcgtc

SEQ ID NO: 4251431 - DNA, 25 bp, Homo sapien
actgggacatgctgggccgcacgac

SEQ ID NO: 4251432 - DNA, 25 bp, Homo sapien
atgctgggccgcacgacgcctttct

SEQ ID NO: 4251433 - DNA, 25 bp, Homo sapien
tgggccgcacgacgcctttctgctt

SEQ ID NO: 4251434 - DNA, 25 bp, Homo sapien
gacatgctgggccgcacgacgcctt

SEQ ID NO: 4251435 - DNA, 25 bp, Homo sapien
ttgatatctgctccggggacagacg

SEQ ID NO: 4251436 - DNA, 25 bp, Homo sapien
ttggacttccgcaatggactcccgc

SEQ ID NO: 4251437 - DNA, 25 bp, Homo sapien
caggtcatcggtgaatttcttccgg

SEQ ID NO: 4251438 - DNA, 25 bp, Homo sapien
acagacgaggtgagccggatgccat

SEQ ID NO: 4251439 - DNA, 25 bp, Homo sapien
gccccagatccaggcgcaaggcctg

SEQ ID NO: 4251440 - DNA, 25 bp, Homo sapien
tccctggtcccactgaagactgaag

SEQ ID NO: 4251441 - DNA, 25 bp, Homo sapien
tgtccctggtcccactgaagactga

SEQ ID NO: 4251442 - DNA, 25 bp, Homo sapien
cctgtggttttggatggtccagctg

SEQ ID NO: 4251443 - DNA, 25 bp, Homo sapien
cggagctcctagctgcaatctgctc

SEQ ID NO: 4251444 - DNA, 25 bp, Homo sapien
ggagctcctagctgcaatctgctct

SEQ ID NO: 4251445 - DNA, 25 bp, Homo sapien
aagagcgtaagctgggacatgcgct

SEQ ID NO: 4251446 - DNA, 25 bp, Homo sapien
caggggtgagcgtcgaagccccccg

SEQ ID NO: 4251447 - DNA, 25 bp, Homo sapien
agaaagagcgtaagctgggacatgc

SEQ ID NO: 4251448 - DNA, 25 bp, Homo sapien
cccccgcggttctgtcctcgaagca

SEQ ID NO: 4251449 - DNA, 25 bp, Homo sapien
catgccgtacaaggagaaggactgt

SEQ ID NO: 4251450 - DNA, 25 bp, Homo sapien
gttctcgaagagcaggacctgcatg

SEQ ID NO: 4251451 - DNA, 25 bp, Homo sapien
gaaggactgtcggaagctgtacgtc

SEQ ID NO: 4251452 - DNA, 25 bp, Homo sapien
ggaagctgtacgtcaccgagttctt

SEQ ID NO: 4251453 - DNA, 25 bp, Homo sapien
taggttcttttataaaattcatgtt

SEQ ID NO: 4251454 - DNA, 25 bp, Homo sapien
aacatgaattttataaaagaaccta

SEQ ID NO: 4251455 - DNA, 25 bp, Homo sapien
tcgctggtgtagtccgagtttctgg

SEQ ID NO: 4251456 - DNA, 25 bp, Homo sapien
cagtagcagaccaaccgacggtggg

SEQ ID NO: 4251457 - DNA, 25 bp, Homo sapien
acaggaagatttctcgctggtgtag

SEQ ID NO: 4251458 - DNA, 25 bp, Homo sapien
tgtttgggtctggaacctcaaagag

SEQ ID NO: 4251459 - DNA, 25 bp, Homo sapien
acagccgagcccgggatgcagggat

SEQ ID NO: 4251460 - DNA, 25 bp, Homo sapien
agccgagcccgggatgcagggatcc

SEQ ID NO: 4251461 - DNA, 25 bp, Homo sapien
cgagcccgggatgcagggatccgat

SEQ ID NO: 4251462 - DNA, 25 bp, Homo sapien
ccgagcccgggatgcagggatccga

SEQ ID NO: 4251463 - DNA, 25 bp, Homo sapien
gatccgttcatagatccccatcagc

SEQ ID NO: 4251464 - DNA, 25 bp, Homo sapien
catctcacggggaatgtcctcacca

SEQ ID NO: 4251465 - DNA, 25 bp, Homo sapien
tgggacacatggtcctcattggtct

SEQ ID NO: 4251466 - DNA, 25 bp, Homo sapien
attggtctttagctctcgcttacgg

SEQ ID NO: 4251467 - DNA, 25 bp, Homo sapien
agggttcccacagggactgagggat

SEQ ID NO: 4251468 - DNA, 25 bp, Homo sapien
cagggttcccacagggactgaggga

SEQ ID NO: 4251469 - DNA, 25 bp, Homo sapien
agccagggttcccacagggactgag

SEQ ID NO: 4251470 - DNA, 25 bp, Homo sapien
ccagggttcccacagggactgaggg

SEQ ID NO: 4251471 - DNA, 25 bp, Homo sapien
tttccgctcgggcttgacattgggg

SEQ ID NO: 4251472 - DNA, 25 bp, Homo sapien
tgggttccggaattgccgcaccacc

SEQ ID NO: 4251473 - DNA, 25 bp, Homo sapien
gtctgggttccggaattgccgcacc

SEQ ID NO: 4251474 - DNA, 25 bp, Homo sapien
ttccgctcgggcttgacattggggc

SEQ ID NO: 4251475 - DNA, 25 bp, Homo sapien
tccccttggacacggatgtgcgcct

SEQ ID NO: 4251476 - DNA, 25 bp, Homo sapien
aacgcctctatgagccgctccactt

SEQ ID NO: 4251477 - DNA, 25 bp, Homo sapien
agaagtccatctcgtccacgacgca

SEQ ID NO: 4251478 - DNA, 25 bp, Homo sapien
gatgtgcgcctggaatttcctgagg

SEQ ID NO: 4251479 - DNA, 25 bp, Homo sapien
cttctgccggttgcccaggaactcg

SEQ ID NO: 4251480 - DNA, 25 bp, Homo sapien
cacgctcgatgaggtactggactcc

SEQ ID NO: 4251481 - DNA, 25 bp, Homo sapien
tgaggcccttgcgctgcagcaggaa

SEQ ID NO: 4251482 - DNA, 25 bp, Homo sapien
gaactcgccgatcatctgccggctg

SEQ ID NO: 4251483 - DNA, 25 bp, Homo sapien
gcttttagcctgaacctagtgcggg

SEQ ID NO: 4251484 - DNA, 25 bp, Homo sapien
ctaggccggtgatgaagagctcgct

SEQ ID NO: 4251485 - DNA, 25 bp, Homo sapien
tccaggatggcgtcagcttttagcc

SEQ ID NO: 4251486 - DNA, 25 bp, Homo sapien
ctagtgcgggcgatggattccaccc

SEQ ID NO: 4251487 - DNA, 25 bp, Homo sapien
ggggctgggagtctccgcaaagctc

SEQ ID NO: 4251488 - DNA, 25 bp, Homo sapien
tggggctgggagtctccgcaaagct

SEQ ID NO: 4251489 - DNA, 25 bp, Homo sapien
gggctgggagtctccgcaaagctcc

SEQ ID NO: 4251490 - DNA, 25 bp, Homo sapien
aaagctgggacggcatcgacttcag

SEQ ID NO: 4251491 - DNA, 25 bp, Homo sapien
acagaaagctgggacggcatcgact

SEQ ID NO: 4251492 - DNA, 25 bp, Homo sapien
cggggtgatgccacagaaagctggg

SEQ ID NO: 4251493 - DNA, 25 bp, Homo sapien
ccggggtgatgccacagaaagctgg

SEQ ID NO: 4251494 - DNA, 25 bp, Homo sapien
cagtgtagtcggagcctcctggctc

SEQ ID NO: 4251495 - DNA, 25 bp, Homo sapien
tgctgccccctaaaatgccccagca

SEQ ID NO: 4251496 - DNA, 25 bp, Homo sapien
cccagcaggcagtgtagtcggagcc

SEQ ID NO: 4251497 - DNA, 25 bp, Homo sapien
caggcagtgtagtcggagcctcctg

SEQ ID NO: 4251498 - DNA, 25 bp, Homo sapien
gacatcccaagatagtgcttccatg

SEQ ID NO: 4251499 - DNA, 25 bp, Homo sapien
tctctgacatcccaagatagtgctt

SEQ ID NO: 4251500 - DNA, 25 bp, Homo sapien
ggcctctctgacatcccaagatagt

SEQ ID NO: 4251501 - DNA, 25 bp, Homo sapien
ccaagatagtgcttccatgtgtccc

SEQ ID NO: 4251502 - DNA, 25 bp, Homo sapien
cgcaggctgtcacgggacgatgact

SEQ ID NO: 4251503 - DNA, 25 bp, Homo sapien
gatgacatcgttgctaaaggcaggc

SEQ ID NO: 4251504 - DNA, 25 bp, Homo sapien
cattgtcaccgtctgagtagtccga

SEQ ID NO: 4251505 - DNA, 25 bp, Homo sapien
gtagtgcctcttgcggatgacatcg

SEQ ID NO: 4251506 - DNA, 25 bp, Homo sapien
tcagacttgctctgccggttggctg

SEQ ID NO: 4251507 - DNA, 25 bp, Homo sapien
tcgtaagcactctgcctcttgagtg

SEQ ID NO: 4251508 - DNA, 25 bp, Homo sapien
tgcccgccaaggctgcgctcgtaag

SEQ ID NO: 4251509 - DNA, 25 bp, Homo sapien
tgagccattgatggccaagtggctg

SEQ ID NO: 4251510 - DNA, 25 bp, Homo sapien
ctgtcgctgggtggctcgatggtga

SEQ ID NO: 4251511 - DNA, 25 bp, Homo sapien
gcggcagatgctccacccgcagccg

SEQ ID NO: 4251512 - DNA, 25 bp, Homo sapien
taaggtccacagagctgtcgctggg

SEQ ID NO: 4251513 - DNA, 25 bp, Homo sapien
tcgatggtgagcagcggcagatgct

SEQ ID NO: 4251514 - DNA, 25 bp, Homo sapien
gctgggagccgtcgttagtcactga

SEQ ID NO: 4251515 - DNA, 25 bp, Homo sapien
ttcccctcgaagtaggagctgtgca

SEQ ID NO: 4251516 - DNA, 25 bp, Homo sapien
gatggcgtccgcaaagtcactggag

SEQ ID NO: 4251517 - DNA, 25 bp, Homo sapien
catcgtcgatggactcggccagtga

SEQ ID NO: 4251518 - DNA, 25 bp, Homo sapien
ttcatctggtactggcgaaacgccg

SEQ ID NO: 4251519 - DNA, 25 bp, Homo sapien
gcgctcgaagttcttgttcatctgg

SEQ ID NO: 4251520 - DNA, 25 bp, Homo sapien
tctctgacatggagctgcgcaagcg

SEQ ID NO: 4251521 - DNA, 25 bp, Homo sapien
ttggacagcacaatccggcgtgaca

SEQ ID NO: 4251522 - DNA, 25 bp, Homo sapien
cttgctcctgagtggacaatgaaca

SEQ ID NO: 4251523 - DNA, 25 bp, Homo sapien
accaaggacggtcctgagggccact

SEQ ID NO: 4251524 - DNA, 25 bp, Homo sapien
gctcctgagtggacaatgaacacac

SEQ ID NO: 4251525 - DNA, 25 bp, Homo sapien
tcccgaattcctgaggcacccgtga

SEQ ID NO: 4251526 - DNA, 25 bp, Homo sapien
catggaggtccttgccctcgaggag

SEQ ID NO: 4251527 - DNA, 25 bp, Homo sapien
gaaataatgccaaacagacgtccag

SEQ ID NO: 4251528 - DNA, 25 bp, Homo sapien
gctgcaggcgcagaactgaaataat

SEQ ID NO: 4251529 - DNA, 25 bp, Homo sapien
gggtctgtcaaggagagcaggcagc

SEQ ID NO: 4251530 - DNA, 25 bp, Homo sapien
ctgaaacccactcaagtttcctgct

SEQ ID NO: 4251531 - DNA, 25 bp, Homo sapien
tgaaacccactcaagtttcctgctt

SEQ ID NO: 4251532 - DNA, 25 bp, Homo sapien
gcttgcgcaggatggaggtcgagtg

SEQ ID NO: 4251533 - DNA, 25 bp, Homo sapien
gagcgtgagcgcttgatggcctcct

SEQ ID NO: 4251534 - DNA, 25 bp, Homo sapien
tcctcagcctgcttgcgcaggatgg

SEQ ID NO: 4251535 - DNA, 25 bp, Homo sapien
caggtccgaggagagctcatagctc

SEQ ID NO: 4251536 - DNA, 25 bp, Homo sapien
gctcgtagtgatccgggctcaggct

SEQ ID NO: 4251537 - DNA, 25 bp, Homo sapien
ttgggcctccgcgtgcgctgctgtt

SEQ ID NO: 4251538 - DNA, 25 bp, Homo sapien
ctcaggctggaaccgggcaccaagg

SEQ ID NO: 4251539 - DNA, 25 bp, Homo sapien
agcccataggctcccactgacgtgt

SEQ ID NO: 4251540 - DNA, 25 bp, Homo sapien
atctgaacacgacaccgggccgtgg

SEQ ID NO: 4251541 - DNA, 25 bp, Homo sapien
tctggtaagcgggaaatctgaacac

SEQ ID NO: 4251542 - DNA, 25 bp, Homo sapien
aagcttctggtaagcgggaaatctg

SEQ ID NO: 4251543 - DNA, 25 bp, Homo sapien
cgggaaatctgaacacgacaccggg

SEQ ID NO: 4251544 - DNA, 25 bp, Homo sapien
taccagaggaccaggtctatattct

SEQ ID NO: 4251545 - DNA, 25 bp, Homo sapien
tgatggtagtgcacctctgtagcca

SEQ ID NO: 4251546 - DNA, 25 bp, Homo sapien
atccacggtggctgtacagggaacc

SEQ ID NO: 4251547 - DNA, 25 bp, Homo sapien
gggaacccaatgctgccactggagt

SEQ ID NO: 4251548 - DNA, 25 bp, Homo sapien
gagcctgcaagtgcaaaggacactg

SEQ ID NO: 4251549 - DNA, 25 bp, Homo sapien
tcaagagcctgcaagtgcaaaggac

SEQ ID NO: 4251550 - DNA, 25 bp, Homo sapien
agaatcctgccggagagtctgggga

SEQ ID NO: 4251551 - DNA, 25 bp, Homo sapien
gccggagagtctggggatgcagctc

SEQ ID NO: 4251552 - DNA, 25 bp, Homo sapien
ctggggataccagacatctgttgtg

SEQ ID NO: 4251553 - DNA, 25 bp, Homo sapien
tggcagtatagggaagaagcaaaag

SEQ ID NO: 4251554 - DNA, 25 bp, Homo sapien
gggataccagacatctgttgtggca

SEQ ID NO: 4251555 - DNA, 25 bp, Homo sapien
accagacatctgttgtggcagtata

SEQ ID NO: 4251556 - DNA, 25 bp, Homo sapien
gcagtcacagtgtctcatctttaga

SEQ ID NO: 4251557 - DNA, 25 bp, Homo sapien
agattatttaatcccagaggaagca

SEQ ID NO: 4251558 - DNA, 25 bp, Homo sapien
tggccatgaagtacacagaccctga

SEQ ID NO: 4251559 - DNA, 25 bp, Homo sapien
caggcaggcggagttcaaacgctaa

SEQ ID NO: 4251560 - DNA, 25 bp, Homo sapien
tgtcaagctctagctccagaaggga

SEQ ID NO: 4251561 - DNA, 25 bp, Homo sapien
agctctagctccagaagggactggg

SEQ ID NO: 4251562 - DNA, 25 bp, Homo sapien
ggactgggtcctctccgagttgcag

SEQ ID NO: 4251563 - DNA, 25 bp, Homo sapien
tccgagttgcagtgcaggcaccaca

SEQ ID NO: 4251564 - DNA, 25 bp, Homo sapien
aataaagaaccactgcagctaggcc

SEQ ID NO: 4251565 - DNA, 25 bp, Homo sapien
tgcactgctaaaacctaagacccgt

SEQ ID NO: 4251566 - DNA, 25 bp, Homo sapien
gacaaacggactcacctgctgagga

SEQ ID NO: 4251567 - DNA, 25 bp, Homo sapien
actacaatggtacttgggttggcca

SEQ ID NO: 4251568 - DNA, 25 bp, Homo sapien
taccctggttaaggataattccaca

SEQ ID NO: 4251569 - DNA, 25 bp, Homo sapien
cctggttaaggataattccacattc

SEQ ID NO: 4251570 - DNA, 25 bp, Homo sapien
ttaaggataattccacattcaatgc

SEQ ID NO: 4251571 - DNA, 25 bp, Homo sapien
tggttaaggataattccacattcaa

SEQ ID NO: 4251572 - DNA, 25 bp, Homo sapien
acccaagtagggctgcgtggatgct

SEQ ID NO: 4251573 - DNA, 25 bp, Homo sapien
cctgttttgggcctcgtctggtcct

SEQ ID NO: 4251574 - DNA, 25 bp, Homo sapien
tccaggcatttggacctggtgagcc

SEQ ID NO: 4251575 - DNA, 25 bp, Homo sapien
tagggctgcgtggatgctccttcct

SEQ ID NO: 4251576 - DNA, 25 bp, Homo sapien
gccacaaacagccgcagcctggctg

SEQ ID NO: 4251577 - DNA, 25 bp, Homo sapien
tgccacaaacagccgcagcctggct

SEQ ID NO: 4251578 - DNA, 25 bp, Homo sapien
cagccgtcccccatctggtgctgcg

SEQ ID NO: 4251579 - DNA, 25 bp, Homo sapien
cacagatgagctccctcagccgtcc

SEQ ID NO: 4251580 - DNA, 25 bp, Homo sapien
tgctgcccacacagatgagctccct

SEQ ID NO: 4251581 - DNA, 25 bp, Homo sapien
cgtcccccatctggtgctgcggcca

SEQ ID NO: 4251582 - DNA, 25 bp, Homo sapien
gagtccggctctctgacctaaaggc

SEQ ID NO: 4251583 - DNA, 25 bp, Homo sapien
cagggaggcctagtgacttgtccaa

SEQ ID NO: 4251584 - DNA, 25 bp, Homo sapien
agcacccctaggatcactgaactgg

SEQ ID NO: 4251585 - DNA, 25 bp, Homo sapien
gctgctgctcaaggattagccataa

SEQ ID NO: 4251586 - DNA, 25 bp, Homo sapien
gcgtgcgcggctgtgctagggggcg

SEQ ID NO: 4251587 - DNA, 25 bp, Homo sapien
tgcgcggctgtgctagggggcgggg

SEQ ID NO: 4251588 - DNA, 25 bp, Homo sapien
cgtgcgcggctgtgctagggggcgg

SEQ ID NO: 4251589 - DNA, 25 bp, Homo sapien
gcgcggctgtgctagggggcgggga

SEQ ID NO: 4251590 - DNA, 25 bp, Homo sapien
ggagggcgctcaggtcggtgcagcc

SEQ ID NO: 4251591 - DNA, 25 bp, Homo sapien
gcagccgctgcagcggatgggtcag

SEQ ID NO: 4251592 - DNA, 25 bp, Homo sapien
gcagcggatgggtcaggagagcggg

SEQ ID NO: 4251593 - DNA, 25 bp, Homo sapien
ccaggcgcggaaccgggggcactgc

SEQ ID NO: 4251594 - DNA, 25 bp, Homo sapien
gaagatgtcgaacacttaactgcat

SEQ ID NO: 4251595 - DNA, 25 bp, Homo sapien
tgtcagtgccaggagtaggtcacct

SEQ ID NO: 4251596 - DNA, 25 bp, Homo sapien
cccaggagccgtgaaggaagatgtc

SEQ ID NO: 4251597 - DNA, 25 bp, Homo sapien
gttttagaatctgttggacctgggc

SEQ ID NO: 4251598 - DNA, 25 bp, Homo sapien
gaggttggacatttcatgttcccta

SEQ ID NO: 4251599 - DNA, 25 bp, Homo sapien
tacagtggctcgactttggctccct

SEQ ID NO: 4251600 - DNA, 25 bp, Homo sapien
gctctcccgtctgagaaatggctct

SEQ ID NO: 4251601 - DNA, 25 bp, Homo sapien
accatgcccgatcctaagtgagttc

SEQ ID NO: 4251602 - DNA, 25 bp, Homo sapien
caaagagcttttgaccgctggggcc

SEQ ID NO: 4251603 - DNA, 25 bp, Homo sapien
cacaggcttcgaaaggcccagagca

SEQ ID NO: 4251604 - DNA, 25 bp, Homo sapien
gggacagggcatctatgcagggcca

SEQ ID NO: 4251605 - DNA, 25 bp, Homo sapien
ccagcaaagctcagaacggaatcag

SEQ ID NO: 4251606 - DNA, 25 bp, Homo sapien
aacacaccatgtgcatttcctgagc

SEQ ID NO: 4251607 - DNA, 25 bp, Homo sapien
caaaccgtttcccatttggctcaag

SEQ ID NO: 4251608 - DNA, 25 bp, Homo sapien
ggaaatgttatcctcacttacagag

SEQ ID NO: 4251609 - DNA, 25 bp, Homo sapien
ctaggtcattgtctatgggcaggtc

SEQ ID NO: 4251610 - DNA, 25 bp, Homo sapien
tgagcacttgctacatgccgggcac

SEQ ID NO: 4251611 - DNA, 25 bp, Homo sapien
gaagctcagagatgggacccaacac

SEQ ID NO: 4251612 - DNA, 25 bp, Homo sapien
tcacagggctggtgacgaccgaatg

SEQ ID NO: 4251613 - DNA, 25 bp, Homo sapien
tatatgaacactgcgattccgccat

SEQ ID NO: 4251614 - DNA, 25 bp, Homo sapien
ccattgcttccttatcactgggcct

SEQ ID NO: 4251615 - DNA, 25 bp, Homo sapien
catctgccactggttgggctccagt

SEQ ID NO: 4251616 - DNA, 25 bp, Homo sapien
ttccttatcactgggcctcactttt

SEQ ID NO: 4251617 - DNA, 25 bp, Homo sapien
ttgcttccttatcactgggcctcac

SEQ ID NO: 4251618 - DNA, 25 bp, Homo sapien
tcctggaccctgtacagccatgcaa

SEQ ID NO: 4251619 - DNA, 25 bp, Homo sapien
gagatgcagtacttccacataaggc

SEQ ID NO: 4251620 - DNA, 25 bp, Homo sapien
gctctggatcccagccgaacgtgtg

SEQ ID NO: 4251621 - DNA, 25 bp, Homo sapien
tccaccagagactgaaagttgctcc

SEQ ID NO: 4251622 - DNA, 25 bp, Homo sapien
tgcagtcttccaatggtgcccagag

SEQ ID NO: 4251623 - DNA, 25 bp, Homo sapien
tggccgaacttcaaaaccctggatc

SEQ ID NO: 4251624 - DNA, 25 bp, Homo sapien
gagcttccgcaagtccatcttatgg

SEQ ID NO: 4251625 - DNA, 25 bp, Homo sapien
gcacatacaccgagttggccgaact

SEQ ID NO: 4251626 - DNA, 25 bp, Homo sapien
ttatcgagttatgccatgggagggt

SEQ ID NO: 4251627 - DNA, 25 bp, Homo sapien
atgccatgggagggtagaaacagga

SEQ ID NO: 4251628 - DNA, 25 bp, Homo sapien
ttatgccatgggagggtagaaacag

SEQ ID NO: 4251629 - DNA, 25 bp, Homo sapien
atcgagttatgccatgggagggtag

SEQ ID NO: 4251630 - DNA, 25 bp, Homo sapien
aacctgcaggatgcggatgggccag

SEQ ID NO: 4251631 - DNA, 25 bp, Homo sapien
cctgtgaaagtggacagcgcagggc

SEQ ID NO: 4251632 - DNA, 25 bp, Homo sapien
ggctgtgctgccgtgacttccgcag

SEQ ID NO: 4251633 - DNA, 25 bp, Homo sapien
agtggacagcgcagggcggcacggg

SEQ ID NO: 4251634 - DNA, 25 bp, Homo sapien
gaagcaatctgtgaaacctgcgcat

SEQ ID NO: 4251635 - DNA, 25 bp, Homo sapien
cgcatcaggagatcagttggcacct

SEQ ID NO: 4251636 - DNA, 25 bp, Homo sapien
tggactgaacttccctggccaacag

SEQ ID NO: 4251637 - DNA, 25 bp, Homo sapien
caccttgtgtgatcagaactagtcc

SEQ ID NO: 4251638 - DNA, 25 bp, Homo sapien
caaacaagagggactgtttaggctt

SEQ ID NO: 4251639 - DNA, 25 bp, Homo sapien
caagagggactgtttaggcttagct

SEQ ID NO: 4251640 - DNA, 25 bp, Homo sapien
aacaagagggactgtttaggcttag

SEQ ID NO: 4251641 - DNA, 25 bp, Homo sapien
acaagagggactgtttaggcttagc

SEQ ID NO: 4251642 - DNA, 25 bp, Homo sapien
acagaacacacacgctcggaagaac

SEQ ID NO: 4251643 - DNA, 25 bp, Homo sapien
tggcgacggctccatgatgatctcc

SEQ ID NO: 4251644 - DNA, 25 bp, Homo sapien
tgaccatggcgacggctccatgatg

SEQ ID NO: 4251645 - DNA, 25 bp, Homo sapien
actggacagaacacacacgctcgga

SEQ ID NO: 4251646 - DNA, 25 bp, Homo sapien
caggggctgtaggcacaggaactgc

SEQ ID NO: 4251647 - DNA, 25 bp, Homo sapien
gcaggggctgtaggcacaggaactg

SEQ ID NO: 4251648 - DNA, 25 bp, Homo sapien
gtaatccaggcaaaaggccttgaac

SEQ ID NO: 4251649 - DNA, 25 bp, Homo sapien
caggcaaaaggccttgaacttgagc

SEQ ID NO: 4251650 - DNA, 25 bp, Homo sapien
agctggaccacggtaacgtctccgc

SEQ ID NO: 4251651 - DNA, 25 bp, Homo sapien
ccacggtaacgtctccgcggagaca

SEQ ID NO: 4251652 - DNA, 25 bp, Homo sapien
aacgtctccgcggagacacggagag

SEQ ID NO: 4251653 - DNA, 25 bp, Homo sapien
tggaccacggtaacgtctccgcgga

SEQ ID NO: 4251654 - DNA, 25 bp, Homo sapien
catgtagccacatggtgcttggggt

SEQ ID NO: 4251655 - DNA, 25 bp, Homo sapien
catggtgcttggggtgggggcagct

SEQ ID NO: 4251656 - DNA, 25 bp, Homo sapien
tgcttggggtgggggcagctgggct

SEQ ID NO: 4251657 - DNA, 25 bp, Homo sapien
tggtgcttggggtgggggcagctgg

SEQ ID NO: 4251658 - DNA, 25 bp, Homo sapien
tgcagcctgatcctccgaggggcct

SEQ ID NO: 4251659 - DNA, 25 bp, Homo sapien
tccgaggggccttcagctgagctct

SEQ ID NO: 4251660 - DNA, 25 bp, Homo sapien
cagccttggatctcggaagaactat

SEQ ID NO: 4251661 - DNA, 25 bp, Homo sapien
ggcagaacttcgactgcagtcctgg

SEQ ID NO: 4251662 - DNA, 25 bp, Homo sapien
ctccaagctgtagaagctctcaggg

SEQ ID NO: 4251663 - DNA, 25 bp, Homo sapien
tctcaggggacatatcagtagtacc

SEQ ID NO: 4251664 - DNA, 25 bp, Homo sapien
gaaaccactccaagctgtagaagct

SEQ ID NO: 4251665 - DNA, 25 bp, Homo sapien
ttgaggggaaaccactccaagctgt

SEQ ID NO: 4251666 - DNA, 25 bp, Homo sapien
gtggagaggctgcttccggtgtcca

SEQ ID NO: 4251667 - DNA, 25 bp, Homo sapien
gagaggctgcttccggtgtccaggg

SEQ ID NO: 4251668 - DNA, 25 bp, Homo sapien
gaggctgcttccggtgtccagggag

SEQ ID NO: 4251669 - DNA, 25 bp, Homo sapien
ggagaggctgcttccggtgtccagg

SEQ ID NO: 4251670 - DNA, 25 bp, Homo sapien
gctggcctgtgattccgctacttcc

SEQ ID NO: 4251671 - DNA, 25 bp, Homo sapien
ttcccgtgtcccatgctggcctgtg

SEQ ID NO: 4251672 - DNA, 25 bp, Homo sapien
tcccgtgtcccatgctggcctgtga

SEQ ID NO: 4251673 - DNA, 25 bp, Homo sapien
gattccgctacttcctgtctagctg

SEQ ID NO: 4251674 - DNA, 25 bp, Homo sapien
ggccaggaatcgcttactcctgaaa

SEQ ID NO: 4251675 - DNA, 25 bp, Homo sapien
cttggccaggaatcgcttactcctg

SEQ ID NO: 4251676 - DNA, 25 bp, Homo sapien
ggaatcgcttactcctgaaagtctt

SEQ ID NO: 4251677 - DNA, 25 bp, Homo sapien
ccaggaatcgcttactcctgaaagt

SEQ ID NO: 4251678 - DNA, 25 bp, Homo sapien
tgtctcagccagacgatgaccttgt

SEQ ID NO: 4251679 - DNA, 25 bp, Homo sapien
agccagacgatgaccttgtgtgttc

SEQ ID NO: 4251680 - DNA, 25 bp, Homo sapien
agctctgagctgtctcagccagacg

SEQ ID NO: 4251681 - DNA, 25 bp, Homo sapien
ttattccagaacaccctgtgctttc

SEQ ID NO: 4251682 - DNA, 25 bp, Homo sapien
tgagcttggctgtctctctcgttgg

SEQ ID NO: 4251683 - DNA, 25 bp, Homo sapien
gccccatggaaagctggtggagcct

SEQ ID NO: 4251684 - DNA, 25 bp, Homo sapien
tggagcctggcaggcgttcccctgc

SEQ ID NO: 4251685 - DNA, 25 bp, Homo sapien
gtttctcggtctggaagcattcctc

SEQ ID NO: 4251686 - DNA, 25 bp, Homo sapien
actgaagacacagccaggggatgga

SEQ ID NO: 4251687 - DNA, 25 bp, Homo sapien
gctccccgtgtggactgaagacaca

SEQ ID NO: 4251688 - DNA, 25 bp, Homo sapien
ctggccattcggtctcaggcacagc

SEQ ID NO: 4251689 - DNA, 25 bp, Homo sapien
tctggccattcggtctcaggcacag

SEQ ID NO: 4251690 - DNA, 25 bp, Homo sapien
gacacatcctctcctgcggtagcca

SEQ ID NO: 4251691 - DNA, 25 bp, Homo sapien
ctgacacatcctctcctgcggtagc

SEQ ID NO: 4251692 - DNA, 25 bp, Homo sapien
tgacacatcctctcctgcggtagcc

SEQ ID NO: 4251693 - DNA, 25 bp, Homo sapien
acacatcctctcctgcggtagccat

SEQ ID NO: 4251694 - DNA, 25 bp, Homo sapien
caggggacagacacccgaacaagga

SEQ ID NO: 4251695 - DNA, 25 bp, Homo sapien
tcgagtaaccgtggtcgccaggctg

SEQ ID NO: 4251696 - DNA, 25 bp, Homo sapien
accgtgcccaggagcgagcgaggac

SEQ ID NO: 4251697 - DNA, 25 bp, Homo sapien
ggacgtcgagtaaccgtggtcgcca

SEQ ID NO: 4251698 - DNA, 25 bp, Homo sapien
gcgagcgaggacgtcgagtaaccgt

SEQ ID NO: 4251699 - DNA, 25 bp, Homo sapien
tgcacgtggctagggagaatttctg

SEQ ID NO: 4251700 - DNA, 25 bp, Homo sapien
gatgacactactttccaaggcggct

SEQ ID NO: 4251701 - DNA, 25 bp, Homo sapien
ggaccttccatgtgccgggcaagta

SEQ ID NO: 4251702 - DNA, 25 bp, Homo sapien
tctgttgctaaaatgcacgcgccgc

SEQ ID NO: 4251703 - DNA, 25 bp, Homo sapien
tcgatgctattttggagtcctggct

SEQ ID NO: 4251704 - DNA, 25 bp, Homo sapien
gatctgaaagccacgagggctggca

SEQ ID NO: 4251705 - DNA, 25 bp, Homo sapien
agaccctggccctataacagttgag

SEQ ID NO: 4251706 - DNA, 25 bp, Homo sapien
aatggagcacatccactgcttctcg

SEQ ID NO: 4251707 - DNA, 25 bp, Homo sapien
gccgcggatgagtgagggagctgtg

SEQ ID NO: 4251708 - DNA, 25 bp, Homo sapien
tggggccgcggatgagtgagggagc

SEQ ID NO: 4251709 - DNA, 25 bp, Homo sapien
ggagctcacgctgcacggggccacg

SEQ ID NO: 4251710 - DNA, 25 bp, Homo sapien
gctcacgctgcacggggccacgctg

SEQ ID NO: 4251711 - DNA, 25 bp, Homo sapien
cacagaaccaaacgttctaatgcaa

SEQ ID NO: 4251712 - DNA, 25 bp, Homo sapien
cagaaccaaacgttctaatgcaagt

SEQ ID NO: 4251713 - DNA, 25 bp, Homo sapien
acagaaccaaacgttctaatgcaag

SEQ ID NO: 4251714 - DNA, 25 bp, Homo sapien
gaaccaaacgttctaatgcaagtac

SEQ ID NO: 4251715 - DNA, 25 bp, Homo sapien
acatgatcacagttataatatggta

SEQ ID NO: 4251716 - DNA, 25 bp, Homo sapien
tgtaatagtcacaatactgagcgaa

SEQ ID NO: 4251717 - DNA, 25 bp, Homo sapien
tagaactgactgtttcgatggaaat

SEQ ID NO: 4251718 - DNA, 25 bp, Homo sapien
aatactgagcgaacatgatcacagt

SEQ ID NO: 4251719 - DNA, 25 bp, Homo sapien
tgaggtccagatacctccaccacat

SEQ ID NO: 4251720 - DNA, 25 bp, Homo sapien
cgccctcgcttgacctctgctcact

SEQ ID NO: 4251721 - DNA, 25 bp, Homo sapien
gcacctgcatgctgacgacgccctc

SEQ ID NO: 4251722 - DNA, 25 bp, Homo sapien
gcatgctgacgacgccctcgcttga

SEQ ID NO: 4251723 - DNA, 25 bp, Homo sapien
ggatacatttcgatggaccatggac

SEQ ID NO: 4251724 - DNA, 25 bp, Homo sapien
ctccccaggcaagggatacatttcg

SEQ ID NO: 4251725 - DNA, 25 bp, Homo sapien
ctgcggttttgttcggtggtgatca

SEQ ID NO: 4251726 - DNA, 25 bp, Homo sapien
cagcaagtgctcctaagcttgtggc

SEQ ID NO: 4251727 - DNA, 25 bp, Homo sapien
catgcctgcattccctcatttggaa

SEQ ID NO: 4251728 - DNA, 25 bp, Homo sapien
ctctgagtcgtccaagctccatggc

SEQ ID NO: 4251729 - DNA, 25 bp, Homo sapien
agtatccgcatctgtgatctgggct

SEQ ID NO: 4251730 - DNA, 25 bp, Homo sapien
agaaccctctgagtcgtccaagctc

SEQ ID NO: 4251731 - DNA, 25 bp, Homo sapien
ggcagccatactccacctggctgtc

SEQ ID NO: 4251732 - DNA, 25 bp, Homo sapien
ctccctgcttccagacgtggctctg

SEQ ID NO: 4251733 - DNA, 25 bp, Homo sapien
cttgcctcccacacgattggaagag

SEQ ID NO: 4251734 - DNA, 25 bp, Homo sapien
gggattcgaatccagatctgcctga

SEQ ID NO: 4251735 - DNA, 25 bp, Homo sapien
tgggctgagctacaggtccaggaat

SEQ ID NO: 4251736 - DNA, 25 bp, Homo sapien
gagacctgggctgagctacaggtcc

SEQ ID NO: 4251737 - DNA, 25 bp, Homo sapien
tgagctacaggtccaggaatagggt

SEQ ID NO: 4251738 - DNA, 25 bp, Homo sapien
tccaggaatagggtggtggctagac

SEQ ID NO: 4251739 - DNA, 25 bp, Homo sapien
cacctggggcaccactgagtgtagc

SEQ ID NO: 4251740 - DNA, 25 bp, Homo sapien
gccacctggggcaccactgagtgta

SEQ ID NO: 4251741 - DNA, 25 bp, Homo sapien
acctggggcaccactgagtgtagcc

SEQ ID NO: 4251742 - DNA, 25 bp, Homo sapien
ctgccacctggggcaccactgagtg

SEQ ID NO: 4251743 - DNA, 25 bp, Homo sapien
taggctcaggctactttcgaaagag

SEQ ID NO: 4251744 - DNA, 25 bp, Homo sapien
tctcaaagctggtaggaaaaatggt

SEQ ID NO: 4251745 - DNA, 25 bp, Homo sapien
catcggctatatcagggtccactag

SEQ ID NO: 4251746 - DNA, 25 bp, Homo sapien
caagagttgcaacatctcaaagctg

SEQ ID NO: 4251747 - DNA, 25 bp, Homo sapien
tcagcatggaccaacttcctgaaca

SEQ ID NO: 4251748 - DNA, 25 bp, Homo sapien
gctttcagcatggaccaacttcctg

SEQ ID NO: 4251749 - DNA, 25 bp, Homo sapien
tgggctttcagcatggaccaacttc

SEQ ID NO: 4251750 - DNA, 25 bp, Homo sapien
cagcatggaccaacttcctgaacac

SEQ ID NO: 4251751 - DNA, 25 bp, Homo sapien
agcagcgtgtgctgcggcaggacca

SEQ ID NO: 4251752 - DNA, 25 bp, Homo sapien
ttggtcggggggtgaaacaagcagc

SEQ ID NO: 4251753 - DNA, 25 bp, Homo sapien
gtcggggggtgaaacaagcagcgtg

SEQ ID NO: 4251754 - DNA, 25 bp, Homo sapien
ctgtaggagccaggtctgcaggggt

SEQ ID NO: 4251755 - DNA, 25 bp, Homo sapien
aagagtccccggcacatgtgcagtg

SEQ ID NO: 4251756 - DNA, 25 bp, Homo sapien
taagttcaacattcaccacggcagg

SEQ ID NO: 4251757 - DNA, 25 bp, Homo sapien
cacacagagggagttagcggcttcc

SEQ ID NO: 4251758 - DNA, 25 bp, Homo sapien
gcaagactggtaacacctgccaaca

SEQ ID NO: 4251759 - DNA, 25 bp, Homo sapien
agtaggcttagcgtgtgcacacact

SEQ ID NO: 4251760 - DNA, 25 bp, Homo sapien
ggatacagtaggcttagcgtgtgca

SEQ ID NO: 4251761 - DNA, 25 bp, Homo sapien
gcttagcgtgtgcacacactgttga

SEQ ID NO: 4251762 - DNA, 25 bp, Homo sapien
tagcgtgtgcacacactgttgatgc

SEQ ID NO: 4251763 - DNA, 25 bp, Homo sapien
catattgagttttccgatccacgaa

SEQ ID NO: 4251764 - DNA, 25 bp, Homo sapien
tgtgctgatcacaaatcctgctatt

SEQ ID NO: 4251765 - DNA, 25 bp, Homo sapien
cattaagcctaaagatcaactcggg

SEQ ID NO: 4251766 - DNA, 25 bp, Homo sapien
gcttggattctgataggaactgcat

SEQ ID NO: 4251767 - DNA, 25 bp, Homo sapien
caacatcgacatggcctgaatgaac

SEQ ID NO: 4251768 - DNA, 25 bp, Homo sapien
tcaacatcgacatggcctgaatgaa

SEQ ID NO: 4251769 - DNA, 25 bp, Homo sapien
cactggtgatcccatacagtgggag

SEQ ID NO: 4251770 - DNA, 25 bp, Homo sapien
tggtgatcccatacagtgggagcca

SEQ ID NO: 4251771 - DNA, 25 bp, Homo sapien
atcccatacagtgggagccagagag

SEQ ID NO: 4251772 - DNA, 25 bp, Homo sapien
gatcccatacagtgggagccagaga

SEQ ID NO: 4251773 - DNA, 25 bp, Homo sapien
ctgtgaaaggagcatggggtggtaa

SEQ ID NO: 4251774 - DNA, 25 bp, Homo sapien
gcatggggtggtaaggacaagggcc

SEQ ID NO: 4251775 - DNA, 25 bp, Homo sapien
caagggccagtcttgggtcctctgt

SEQ ID NO: 4251776 - DNA, 25 bp, Homo sapien
aggacaagggccagtcttgggtcct

SEQ ID NO: 4251777 - DNA, 25 bp, Homo sapien
ctttagccactttcagaagctgatg

SEQ ID NO: 4251778 - DNA, 25 bp, Homo sapien
cagcgcgagcccagatctatggcct

SEQ ID NO: 4251779 - DNA, 25 bp, Homo sapien
caataactgccagcaacaccgttgg

SEQ ID NO: 4251780 - DNA, 25 bp, Homo sapien
tctatggcctttggcgtaactgctt

SEQ ID NO: 4251781 - DNA, 25 bp, Homo sapien
tgatgtttgtcaacaataccttgac

SEQ ID NO: 4251782 - DNA, 25 bp, Homo sapien
gatgatgtttgtcaacaataccttg

SEQ ID NO: 4251783 - DNA, 25 bp, Homo sapien
tttgtcaacaataccttgacttggg

SEQ ID NO: 4251784 - DNA, 25 bp, Homo sapien
tgtttgtcaacaataccttgacttg

SEQ ID NO: 4251785 - DNA, 25 bp, Homo sapien
gaaggctgtcgagggccctattcct

SEQ ID NO: 4251786 - DNA, 25 bp, Homo sapien
tgcgtgggacagtgaggactaccct

SEQ ID NO: 4251787 - DNA, 25 bp, Homo sapien
cgctttcaagccaacaacgtgaggg

SEQ ID NO: 4251788 - DNA, 25 bp, Homo sapien
ttagaccctcgtgcgggactctgct

SEQ ID NO: 4251789 - DNA, 25 bp, Homo sapien
catggaaatcatagtttagtgaaag

SEQ ID NO: 4251790 - DNA, 25 bp, Homo sapien
ttcatggaaatcatagtttagtgaa

SEQ ID NO: 4251791 - DNA, 25 bp, Homo sapien
gaaatcatagtttagtgaaagacaa

SEQ ID NO: 4251792 - DNA, 25 bp, Homo sapien
tggaaatcatagtttagtgaaagac

SEQ ID NO: 4251793 - DNA, 25 bp, Homo sapien
ctgacgctccgcgagctttctcctt

SEQ ID NO: 4251794 - DNA, 25 bp, Homo sapien
taatcgctggaaagcacttttgaca

SEQ ID NO: 4251795 - DNA, 25 bp, Homo sapien
tcgctggaaagcacttttgacacac

SEQ ID NO: 4251796 - DNA, 25 bp, Homo sapien
aatcgctggaaagcacttttgacac

SEQ ID NO: 4251797 - DNA, 25 bp, Homo sapien
ctaatcgctggaaagcacttttgac

SEQ ID NO: 4251798 - DNA, 25 bp, Homo sapien
tccattctccgaggagccagtgtct

SEQ ID NO: 4251799 - DNA, 25 bp, Homo sapien
cagtgtctgcagaacttcggtgtga

SEQ ID NO: 4251800 - DNA, 25 bp, Homo sapien
tgtgatccatcctggatgccactgg

SEQ ID NO: 4251801 - DNA, 25 bp, Homo sapien
ggctggcccacttttctgggcatat

SEQ ID NO: 4251802 - DNA, 25 bp, Homo sapien
ctgcccaaggtgggcgggtcccata

SEQ ID NO: 4251803 - DNA, 25 bp, Homo sapien
aaggtgggcgggtcccatagcaaat

SEQ ID NO: 4251804 - DNA, 25 bp, Homo sapien
cccaaggtgggcgggtcccatagca

SEQ ID NO: 4251805 - DNA, 25 bp, Homo sapien
gtgggcgggtcccatagcaaatgcc

SEQ ID NO: 4251806 - DNA, 25 bp, Homo sapien
cctgaagccttcggatgaggaaaga

SEQ ID NO: 4251807 - DNA, 25 bp, Homo sapien
aggagtagaatctaaaggccctgaa

SEQ ID NO: 4251808 - DNA, 25 bp, Homo sapien
ccctgaagccttcggatgaggaaag

SEQ ID NO: 4251809 - DNA, 25 bp, Homo sapien
ccaggagtagaatctaaaggccctg

SEQ ID NO: 4251810 - DNA, 25 bp, Homo sapien
ccattccccggactctcatgggcat

SEQ ID NO: 4251811 - DNA, 25 bp, Homo sapien
gagcctgccccattccccggactct

SEQ ID NO: 4251812 - DNA, 25 bp, Homo sapien
gcctgccccattccccggactctca

SEQ ID NO: 4251813 - DNA, 25 bp, Homo sapien
tgccccattccccggactctcatgg

SEQ ID NO: 4251814 - DNA, 25 bp, Homo sapien
tggtactgctacagcgaactgccca

SEQ ID NO: 4251815 - DNA, 25 bp, Homo sapien
tgaacaggaaggctacagcagcaag

SEQ ID NO: 4251816 - DNA, 25 bp, Homo sapien
cagcaagccgacgtgttcatgttct

SEQ ID NO: 4251817 - DNA, 25 bp, Homo sapien
catgttctcaaaattggacccccta

SEQ ID NO: 4251818 - DNA, 25 bp, Homo sapien
cagaggcttctacacgtcctcaaac

SEQ ID NO: 4251819 - DNA, 25 bp, Homo sapien
cagcaggtgtgcaatggaaggaacc

SEQ ID NO: 4251820 - DNA, 25 bp, Homo sapien
agtgagggtggcctgaacagatcca

SEQ ID NO: 4251821 - DNA, 25 bp, Homo sapien
aaactctcccaaatcacccataatg

SEQ ID NO: 4251822 - DNA, 25 bp, Homo sapien
aaactggccatcttttctgcgcatg

SEQ ID NO: 4251823 - DNA, 25 bp, Homo sapien
cttcacatacttaaggccaactggg

SEQ ID NO: 4251824 - DNA, 25 bp, Homo sapien
cagatggtcctaagggtgctccaaa

SEQ ID NO: 4251825 - DNA, 25 bp, Homo sapien
tggaaactgttctgacaaccccaga

SEQ ID NO: 4251826 - DNA, 25 bp, Homo sapien
tgcagaggtggagatagcagccagc

SEQ ID NO: 4251827 - DNA, 25 bp, Homo sapien
ctgggtccacagacgtgagaaggcg

SEQ ID NO: 4251828 - DNA, 25 bp, Homo sapien
acagacgtgagaaggcgccagctcc

SEQ ID NO: 4251829 - DNA, 25 bp, Homo sapien
gtgagaaggcgccagctccacccgg

SEQ ID NO: 4251830 - DNA, 25 bp, Homo sapien
gacatggggttccccgaggatgccc

SEQ ID NO: 4251831 - DNA, 25 bp, Homo sapien
cgcttgaggacatggggttccccga

SEQ ID NO: 4251832 - DNA, 25 bp, Homo sapien
tgccccctgctccctgtgaatctcc

SEQ ID NO: 4251833 - DNA, 25 bp, Homo sapien
tcctcattcctgtctccgcttgagg

SEQ ID NO: 4251834 - DNA, 25 bp, Homo sapien
ggtctctgctcttactctcagcaac

SEQ ID NO: 4251835 - DNA, 25 bp, Homo sapien
ttctgggtcctcctggccgtgaggc

SEQ ID NO: 4251836 - DNA, 25 bp, Homo sapien
tcagagccgcggacacaggagacag

SEQ ID NO: 4251837 - DNA, 25 bp, Homo sapien
gacagaaagaccctcgtgttctggg

SEQ ID NO: 4251838 - DNA, 25 bp, Homo sapien
ggcaggggcttctgaccctctgtgg

SEQ ID NO: 4251839 - DNA, 25 bp, Homo sapien
gcaggggcttctgaccctctgtggt

SEQ ID NO: 4251840 - DNA, 25 bp, Homo sapien
gaatttacaccgtgcttggccaggc

SEQ ID NO: 4251841 - DNA, 25 bp, Homo sapien
ctgaatttacaccgtgcttggccag

SEQ ID NO: 4251842 - DNA, 25 bp, Homo sapien
cagcaggagccaatgcgcttcctct

SEQ ID NO: 4251843 - DNA, 25 bp, Homo sapien
aggagccaatgcgcttcctcttcac

SEQ ID NO: 4251844 - DNA, 25 bp, Homo sapien
gcaggagccaatgcgcttcctcttc

SEQ ID NO: 4251845 - DNA, 25 bp, Homo sapien
gagccaatgcgcttcctcttcactg

SEQ ID NO: 4251846 - DNA, 25 bp, Homo sapien
gtggctgatgcaggaatgggttctc

SEQ ID NO: 4251847 - DNA, 25 bp, Homo sapien
gggcgatgtcctatcctcgcagaat

SEQ ID NO: 4251848 - DNA, 25 bp, Homo sapien
tggtcaggggcgatgtcctatcctc

SEQ ID NO: 4251849 - DNA, 25 bp, Homo sapien
tcctatcctcgcagaatactgcaga

SEQ ID NO: 4251850 - DNA, 25 bp, Homo sapien
tgcaggggacggttgctaactcatc

SEQ ID NO: 4251851 - DNA, 25 bp, Homo sapien
gtctgcaggggacggttgctaactc

SEQ ID NO: 4251852 - DNA, 25 bp, Homo sapien
gggacggttgctaactcatccataa

SEQ ID NO: 4251853 - DNA, 25 bp, Homo sapien
ttgctaactcatccataaccacctt

SEQ ID NO: 4251854 - DNA, 25 bp, Homo sapien
ggccagccccactttcaagggacat

SEQ ID NO: 4251855 - DNA, 25 bp, Homo sapien
ccgccactgtcatcacttgcctgga

SEQ ID NO: 4251856 - DNA, 25 bp, Homo sapien
agggacatccagaacccagctttcc

SEQ ID NO: 4251857 - DNA, 25 bp, Homo sapien
gcacccacatgcctgagtccctgcc

SEQ ID NO: 4251858 - DNA, 25 bp, Homo sapien
tttgttcccattatttgatgtggtc

SEQ ID NO: 4251859 - DNA, 25 bp, Homo sapien
tgttgactccttagcccagagactg

SEQ ID NO: 4251860 - DNA, 25 bp, Homo sapien
tgttcccattatttgatgtggtcca

SEQ ID NO: 4251861 - DNA, 25 bp, Homo sapien
ctgttgactccttagcccagagact

SEQ ID NO: 4251862 - DNA, 25 bp, Homo sapien
tgtcgccggtgtcgctccagcaggc

SEQ ID NO: 4251863 - DNA, 25 bp, Homo sapien
gcgacgatccgggtcagctcctgca

SEQ ID NO: 4251864 - DNA, 25 bp, Homo sapien
gggatggcgccgagcggctgcgggc

SEQ ID NO: 4251865 - DNA, 25 bp, Homo sapien
agcaggccggcgttctcccggctca

SEQ ID NO: 4251866 - DNA, 25 bp, Homo sapien
tgtgtgctcggtaaatcgagtctcg

SEQ ID NO: 4251867 - DNA, 25 bp, Homo sapien
cggaacaacgactgcctgccaaatt

SEQ ID NO: 4251868 - DNA, 25 bp, Homo sapien
gcatgggctgaagggaaaagcccca

SEQ ID NO: 4251869 - DNA, 25 bp, Homo sapien
caaattcctggtaggtgccagccat

SEQ ID NO: 4251870 - DNA, 25 bp, Homo sapien
tgtctccaactttataaaagtagta

SEQ ID NO: 4251871 - DNA, 25 bp, Homo sapien
gctttggaaagattgtctccaactt

SEQ ID NO: 4251872 - DNA, 25 bp, Homo sapien
gagttgctttggaaagattgtctcc

SEQ ID NO: 4251873 - DNA, 25 bp, Homo sapien
aagagttgctttggaaagattgtct

SEQ ID NO: 4251874 - DNA, 25 bp, Homo sapien
catccaggttgtcagtttaagctca

SEQ ID NO: 4251875 - DNA, 25 bp, Homo sapien
tcctatttacatccaggttgtcagt

SEQ ID NO: 4251876 - DNA, 25 bp, Homo sapien
ccagtagaaaggctcctatttacat

SEQ ID NO: 4251877 - DNA, 25 bp, Homo sapien
gtttaagctcaagtaatatgcaagg

SEQ ID NO: 4251878 - DNA, 25 bp, Homo sapien
gaatgcagcagggatgttccatctt

SEQ ID NO: 4251879 - DNA, 25 bp, Homo sapien
cctgatggagtgaaagggatcacac

SEQ ID NO: 4251880 - DNA, 25 bp, Homo sapien
gactgaagtctgttcacagtggccc

SEQ ID NO: 4251881 - DNA, 25 bp, Homo sapien
tgcgcctgatgagctgccatgaaag

SEQ ID NO: 4251882 - DNA, 25 bp, Homo sapien
ctagtgggaggcataggctgggctc

SEQ ID NO: 4251883 - DNA, 25 bp, Homo sapien
gctttgcgagcaggaggcaatgcat

SEQ ID NO: 4251884 - DNA, 25 bp, Homo sapien
acagcaagatcccggggcgtgcaga

SEQ ID NO: 4251885 - DNA, 25 bp, Homo sapien
cacagcaagatcccggggcgtgcag

SEQ ID NO: 4251886 - DNA, 25 bp, Homo sapien
cagcaagatcccggggcgtgcagac

SEQ ID NO: 4251887 - DNA, 25 bp, Homo sapien
acagggttggttagagcaggtcggg

SEQ ID NO: 4251888 - DNA, 25 bp, Homo sapien
cacagggttggttagagcaggtcgg

SEQ ID NO: 4251889 - DNA, 25 bp, Homo sapien
gagcacagggttggttagagcaggt

SEQ ID NO: 4251890 - DNA, 25 bp, Homo sapien
ggttggttagagcaggtcggggcag

SEQ ID NO: 4251891 - DNA, 25 bp, Homo sapien
cgctgtcccagccaacagggcgaag

SEQ ID NO: 4251892 - DNA, 25 bp, Homo sapien
acatgacctggtaggaatccaggaa

SEQ ID NO: 4251893 - DNA, 25 bp, Homo sapien
cagccaacagggcgaagagcgtgaa

SEQ ID NO: 4251894 - DNA, 25 bp, Homo sapien
aagaacatgacctggtaggaatcca

SEQ ID NO: 4251895 - DNA, 25 bp, Homo sapien
tgtacgtctacagggcagtccacag

SEQ ID NO: 4251896 - DNA, 25 bp, Homo sapien
ggaagatgagttaccaaaaccacca

SEQ ID NO: 4251897 - DNA, 25 bp, Homo sapien
gttcctgccctactgtacgtctaca

SEQ ID NO: 4251898 - DNA, 25 bp, Homo sapien
cacaggtccctcttagatgtaagga

SEQ ID NO: 4251899 - DNA, 25 bp, Homo sapien
aaagccactgtcactgggatggcaa

SEQ ID NO: 4251900 - DNA, 25 bp, Homo sapien
gccgaccgtgtatgtgatgaagctg

SEQ ID NO: 4251901 - DNA, 25 bp, Homo sapien
aaaagacttctcctttgcgaatgcc

SEQ ID NO: 4251902 - DNA, 25 bp, Homo sapien
ggcgatccaccacaaaagccactgt

SEQ ID NO: 4251903 - DNA, 25 bp, Homo sapien
tcaaaaggatttcagcctggtcggc

SEQ ID NO: 4251904 - DNA, 25 bp, Homo sapien
aaagaccctgatctcggaactggtg

SEQ ID NO: 4251905 - DNA, 25 bp, Homo sapien
cgctgcttgtccgtcagcctgtgca

SEQ ID NO: 4251906 - DNA, 25 bp, Homo sapien
gggaggcactgaccaccagagctgt

SEQ ID NO: 4251907 - DNA, 25 bp, Homo sapien
tctctgggtgcaaggcctggatgac

SEQ ID NO: 4251908 - DNA, 25 bp, Homo sapien
ccggcttgaactgggactggcagct

SEQ ID NO: 4251909 - DNA, 25 bp, Homo sapien
gcctggatgacttccctctgggtgg

SEQ ID NO: 4251910 - DNA, 25 bp, Homo sapien
tccacggtgaacacatcttgagatg

SEQ ID NO: 4251911 - DNA, 25 bp, Homo sapien
gaggtgacgggccatgatcctctga

SEQ ID NO: 4251912 - DNA, 25 bp, Homo sapien
aacaatcactttggaggctgtagcc

SEQ ID NO: 4251913 - DNA, 25 bp, Homo sapien
gtctcccacggcaacaatcactttg

SEQ ID NO: 4251914 - DNA, 25 bp, Homo sapien
ctctcaggttagagcttctgtctcc

SEQ ID NO: 4251915 - DNA, 25 bp, Homo sapien
tcagagcagggatgcgattgaagcc

SEQ ID NO: 4251916 - DNA, 25 bp, Homo sapien
cctgcctccaggagatctgatttct

SEQ ID NO: 4251917 - DNA, 25 bp, Homo sapien
tgtaggtgaccaggcatcactgtca

SEQ ID NO: 4251918 - DNA, 25 bp, Homo sapien
tggcccatgcagagctgtaggtgac

SEQ ID NO: 4251919 - DNA, 25 bp, Homo sapien
gagcactggctatgagctgagcacc

SEQ ID NO: 4251920 - DNA, 25 bp, Homo sapien
gggcttctgacgtgctaactcacta

SEQ ID NO: 4251921 - DNA, 25 bp, Homo sapien
cactgagtgtggcataagcttctac

SEQ ID NO: 4251922 - DNA, 25 bp, Homo sapien
caagaaaatcgggacatagcgagac

SEQ ID NO: 4251923 - DNA, 25 bp, Homo sapien
gaaaagtcttcataatcctcccaga

SEQ ID NO: 4251924 - DNA, 25 bp, Homo sapien
ggaaaagtcttcataatcctcccag

SEQ ID NO: 4251925 - DNA, 25 bp, Homo sapien
ccacatgtgcctccggctgcttaga

SEQ ID NO: 4251926 - DNA, 25 bp, Homo sapien
tgtgcctccggctgcttagagccca

SEQ ID NO: 4251927 - DNA, 25 bp, Homo sapien
actgagccacatgtgcctccggctg

SEQ ID NO: 4251928 - DNA, 25 bp, Homo sapien
aggccactgagccacatgtgcctcc

SEQ ID NO: 4251929 - DNA, 25 bp, Homo sapien
tcctcaggtgcccagcgacctcata

SEQ ID NO: 4251930 - DNA, 25 bp, Homo sapien
acctcatagtaaaccgtcacggatc

SEQ ID NO: 4251931 - DNA, 25 bp, Homo sapien
cacacccgtcttggggtcgatgtgg

SEQ ID NO: 4251932 - DNA, 25 bp, Homo sapien
aggatgctgttggccgaggagctcc

SEQ ID NO: 4251933 - DNA, 25 bp, Homo sapien
ggatgacaggccagcttcctcgctg

SEQ ID NO: 4251934 - DNA, 25 bp, Homo sapien
gtgccggtcatgctcctgactccag

SEQ ID NO: 4251935 - DNA, 25 bp, Homo sapien
catagctggacactccagtcaaagc

SEQ ID NO: 4251936 - DNA, 25 bp, Homo sapien
cctttccatagctggacactccagt

SEQ ID NO: 4251937 - DNA, 25 bp, Homo sapien
ctgtgcggacaacgcaggtgttgtt

SEQ ID NO: 4251938 - DNA, 25 bp, Homo sapien
ttggtggggcccttcccgatctgca

SEQ ID NO: 4251939 - DNA, 25 bp, Homo sapien
ggcatgaagtccgagaggcccgggt

SEQ ID NO: 4251940 - DNA, 25 bp, Homo sapien
acacacggagcagtgtcaggcccac

SEQ ID NO: 4251941 - DNA, 25 bp, Homo sapien
tgaggaccgaactgtgagcatggaa

SEQ ID NO: 4251942 - DNA, 25 bp, Homo sapien
gtcacggtcattcccaaaggcacgg

SEQ ID NO: 4251943 - DNA, 25 bp, Homo sapien
tccagagttgtcgtggaagtggaca

SEQ ID NO: 4251944 - DNA, 25 bp, Homo sapien
ggctcatggaaaccctcaggtagga

SEQ ID NO: 4251945 - DNA, 25 bp, Homo sapien
tagaccctgatgctagaaagccttt

SEQ ID NO: 4251946 - DNA, 25 bp, Homo sapien
tggatgtcccgatcatagaccctga

SEQ ID NO: 4251947 - DNA, 25 bp, Homo sapien
aacaatgatggtttggttggcccca

SEQ ID NO: 4251948 - DNA, 25 bp, Homo sapien
caatcacttcgatggtggatgtccc

SEQ ID NO: 4251949 - DNA, 25 bp, Homo sapien
gcttctatttcagggttgagcagct

SEQ ID NO: 4251950 - DNA, 25 bp, Homo sapien
tctgcttctatttcagggttgagca

SEQ ID NO: 4251951 - DNA, 25 bp, Homo sapien
tatgagttgggcgacattaatattt

SEQ ID NO: 4251952 - DNA, 25 bp, Homo sapien
tgtctgcagctttatatatgagttg

SEQ ID NO: 4251953 - DNA, 25 bp, Homo sapien
ttttacccggccgagcacgttcatg

SEQ ID NO: 4251954 - DNA, 25 bp, Homo sapien
acttggatctcatccgagagttctc

SEQ ID NO: 4251955 - DNA, 25 bp, Homo sapien
ggccgagcacgttcatggcaaagtt

SEQ ID NO: 4251956 - DNA, 25 bp, Homo sapien
caaagttgtactgtgacgggagtcg

SEQ ID NO: 4251957 - DNA, 25 bp, Homo sapien
tgatgccggtgacatagatgggcat

SEQ ID NO: 4251958 - DNA, 25 bp, Homo sapien
tcggaggtccaggacgtcccgcttg

SEQ ID NO: 4251959 - DNA, 25 bp, Homo sapien
gtggttggtgatgccggtgacatag

SEQ ID NO: 4251960 - DNA, 25 bp, Homo sapien
tcgtggtgccgccctcggaggtcca

SEQ ID NO: 4251961 - DNA, 25 bp, Homo sapien
cgtcctcatccgcatgatgggggcg

SEQ ID NO: 4251962 - DNA, 25 bp, Homo sapien
gatgggggcgcggatcctcacggcc

SEQ ID NO: 4251963 - DNA, 25 bp, Homo sapien
gggcgcggatcctcacggcccttag

SEQ ID NO: 4251964 - DNA, 25 bp, Homo sapien
tcctcatccgcatgatgggggcgcg

SEQ ID NO: 4251965 - DNA, 25 bp, Homo sapien
gccgttcccgatggcgaggccctgt

SEQ ID NO: 4251966 - DNA, 25 bp, Homo sapien
ctctgcatccactgcctgcacgagc

SEQ ID NO: 4251967 - DNA, 25 bp, Homo sapien
agacacagtgccgttcccgatggcg

SEQ ID NO: 4251968 - DNA, 25 bp, Homo sapien
tgcctgcacgagcccagacacagtg

SEQ ID NO: 4251969 - DNA, 25 bp, Homo sapien
tgctgatggagaaaaggatgttgga

SEQ ID NO: 4251970 - DNA, 25 bp, Homo sapien
gctgatggagaaaaggatgttggac

SEQ ID NO: 4251971 - DNA, 25 bp, Homo sapien
ctgatggagaaaaggatgttggact

SEQ ID NO: 4251972 - DNA, 25 bp, Homo sapien
gaggcggcgtgcctggaaccaggtg

SEQ ID NO: 4251973 - DNA, 25 bp, Homo sapien
tgcacgcagggccagaggcggcgtg

SEQ ID NO: 4251974 - DNA, 25 bp, Homo sapien
tcttctcccagtcactgcacgcagg

SEQ ID NO: 4251975 - DNA, 25 bp, Homo sapien
ttctcccagtcactgcacgcagggc

SEQ ID NO: 4251976 - DNA, 25 bp, Homo sapien
ggccccgataagcagtgtcaccttc

SEQ ID NO: 4251977 - DNA, 25 bp, Homo sapien
catcgtggccccgataagcagtgtc

SEQ ID NO: 4251978 - DNA, 25 bp, Homo sapien
tcgtggccccgataagcagtgtcac

SEQ ID NO: 4251979 - DNA, 25 bp, Homo sapien
tgcatcgtggccccgataagcagtg

SEQ ID NO: 4251980 - DNA, 25 bp, Homo sapien
ccgagtggcccggatgcagggtgga

SEQ ID NO: 4251981 - DNA, 25 bp, Homo sapien
cgagtggcccggatgcagggtggat

SEQ ID NO: 4251982 - DNA, 25 bp, Homo sapien
ccccgagtggcccggatgcagggtg

SEQ ID NO: 4251983 - DNA, 25 bp, Homo sapien
gtggcccggatgcagggtggatgct

SEQ ID NO: 4251984 - DNA, 25 bp, Homo sapien
atggtgtgggaagaactcgtcttac

SEQ ID NO: 4251985 - DNA, 25 bp, Homo sapien
ccacaccgcggatgaggaatgtgat

SEQ ID NO: 4251986 - DNA, 25 bp, Homo sapien
acacttgcagttagactggtctggc

SEQ ID NO: 4251987 - DNA, 25 bp, Homo sapien
gatggtgtagttgtcaagggcttca

SEQ ID NO: 4251988 - DNA, 25 bp, Homo sapien
tggtctggccgatggccacaccgcg

SEQ ID NO: 4251989 - DNA, 25 bp, Homo sapien
tccagcacgcggacgtatgccttca

SEQ ID NO: 4251990 - DNA, 25 bp, Homo sapien
cacgcggacgtatgccttcactgtc

SEQ ID NO: 4251991 - DNA, 25 bp, Homo sapien
tgtgcaagtccagcacgcggacgta

SEQ ID NO: 4251992 - DNA, 25 bp, Homo sapien
caatgtaatgatcggggaggctgct

SEQ ID NO: 4251993 - DNA, 25 bp, Homo sapien
gtcaaccacacggatgtacagctcc

SEQ ID NO: 4251994 - DNA, 25 bp, Homo sapien
cttgtcaaccacacggatgtacagc

SEQ ID NO: 4251995 - DNA, 25 bp, Homo sapien
ggaagacgaggcacaagtcatggat

SEQ ID NO: 4251996 - DNA, 25 bp, Homo sapien
agacgaggcacaagtcatggatcat

SEQ ID NO: 4251997 - DNA, 25 bp, Homo sapien
tggatgagcccgggagcaaagggtg

SEQ ID NO: 4251998 - DNA, 25 bp, Homo sapien
atggtggatgagcccgggagcaaag

SEQ ID NO: 4251999 - DNA, 25 bp, Homo sapien
ggtggatgagcccgggagcaaaggg

SEQ ID NO: 4252000 - DNA, 25 bp, Homo sapien
gatggtggatgagcccgggagcaaa

SEQ ID NO: 4252001 - DNA, 25 bp, Homo sapien
gacctggactctttccccagcctcc

SEQ ID NO: 4252002 - DNA, 25 bp, Homo sapien
cctggactctttccccagcctccac

SEQ ID NO: 4252003 - DNA, 25 bp, Homo sapien
taaagacctggactctttccccagc

SEQ ID NO: 4252004 - DNA, 25 bp, Homo sapien
aagacctggactctttccccagcct

SEQ ID NO: 4252005 - DNA, 25 bp, Homo sapien
caggtccagcgtccttcctcagaac

SEQ ID NO: 4252006 - DNA, 25 bp, Homo sapien
cccaggtccagcgtccttcctcaga

SEQ ID NO: 4252007 - DNA, 25 bp, Homo sapien
aggcccaggtccagcgtccttcctc

SEQ ID NO: 4252008 - DNA, 25 bp, Homo sapien
ggcccaggtccagcgtccttcctca

SEQ ID NO: 4252009 - DNA, 25 bp, Homo sapien
gaaattccatagtgcaccgactgcg

SEQ ID NO: 4252010 - DNA, 25 bp, Homo sapien
acagcgatgctgtaagggcgtgccc

SEQ ID NO: 4252011 - DNA, 25 bp, Homo sapien
cagatttgtcccgacaggtggcgac

SEQ ID NO: 4252012 - DNA, 25 bp, Homo sapien
tgaaactgtcaaatacctcggagct

SEQ ID NO: 4252013 - DNA, 25 bp, Homo sapien
ccatgacgggctgcgcctcacagga

SEQ ID NO: 4252014 - DNA, 25 bp, Homo sapien
ctctgagtgcacgagttaatgggaa

SEQ ID NO: 4252015 - DNA, 25 bp, Homo sapien
tgaatccgcagtgcttaacacagca

SEQ ID NO: 4252016 - DNA, 25 bp, Homo sapien
atggagagacacagctgcggctcac

SEQ ID NO: 4252017 - DNA, 25 bp, Homo sapien
cccacaggacccctgctgcgtgagc

SEQ ID NO: 4252018 - DNA, 25 bp, Homo sapien
ccctgctgcgtgagccccagagagc

SEQ ID NO: 4252019 - DNA, 25 bp, Homo sapien
catccttccgtgctgaatatgtatc

SEQ ID NO: 4252020 - DNA, 25 bp, Homo sapien
aaagccacacattcccgcaagccat

SEQ ID NO: 4252021 - DNA, 25 bp, Homo sapien
tgcagctggaaaaagccacagccac

SEQ ID NO: 4252022 - DNA, 25 bp, Homo sapien
tgctgctctgcagctggaaaaagcc

SEQ ID NO: 4252023 - DNA, 25 bp, Homo sapien
gctctgcagctggaaaaagccacag

SEQ ID NO: 4252024 - DNA, 25 bp, Homo sapien
tgctctgcagctggaaaaagccaca

SEQ ID NO: 4252025 - DNA, 25 bp, Homo sapien
ctgaagcaaccaggacttgctgctg

SEQ ID NO: 4252026 - DNA, 25 bp, Homo sapien
gagtagacatccctcggaaacagtc

SEQ ID NO: 4252027 - DNA, 25 bp, Homo sapien
gagttgcgagagtctttggcacaag

SEQ ID NO: 4252028 - DNA, 25 bp, Homo sapien
gctgctgacgtcaatactccctgga

SEQ ID NO: 4252029 - DNA, 25 bp, Homo sapien
tctgcaggacagtgtaaggaggcca

SEQ ID NO: 4252030 - DNA, 25 bp, Homo sapien
cctgtggtgcgtgaaataagatgcc

SEQ ID NO: 4252031 - DNA, 25 bp, Homo sapien
cacacagccgtttaaaatctctggg

SEQ ID NO: 4252032 - DNA, 25 bp, Homo sapien
aaaacagccggaggtgccagttctg

SEQ ID NO: 4252033 - DNA, 25 bp, Homo sapien
cactagaagcgcacaagagtagatt

SEQ ID NO: 4252034 - DNA, 25 bp, Homo sapien
tccgagtgtgagtcaagtgctagct

SEQ ID NO: 4252035 - DNA, 25 bp, Homo sapien
tgagcacagctaaagtcaatgcttg

SEQ ID NO: 4252036 - DNA, 25 bp, Homo sapien
tcaatgcttgcaagagtagggagag

SEQ ID NO: 4252037 - DNA, 25 bp, Homo sapien
accaacagtggggaccgatggccca

SEQ ID NO: 4252038 - DNA, 25 bp, Homo sapien
acagtggggaccgatggcccaagct

SEQ ID NO: 4252039 - DNA, 25 bp, Homo sapien
cagcccagataaggaatgaaaacca

SEQ ID NO: 4252040 - DNA, 25 bp, Homo sapien
acaacagcccagataaggaatgaaa

SEQ ID NO: 4252041 - DNA, 25 bp, Homo sapien
caacatctgcggtgctggtgttgag

SEQ ID NO: 4252042 - DNA, 25 bp, Homo sapien
gacaacatctgcggtgctggtgttg

SEQ ID NO: 4252043 - DNA, 25 bp, Homo sapien
acaacatctgcggtgctggtgttga

SEQ ID NO: 4252044 - DNA, 25 bp, Homo sapien
tgggccgcatgtgggagggcgagga

SEQ ID NO: 4252045 - DNA, 25 bp, Homo sapien
ttgggccgcatgtgggagggcgagg

SEQ ID NO: 4252046 - DNA, 25 bp, Homo sapien
gatgagctctatggaggccgacaga

SEQ ID NO: 4252047 - DNA, 25 bp, Homo sapien
acctcttctgggctcaccctcacgt

SEQ ID NO: 4252048 - DNA, 25 bp, Homo sapien
tggttgtagatggtcacctcttctg

SEQ ID NO: 4252049 - DNA, 25 bp, Homo sapien
tatggaggccgacagaggcaccaga

SEQ ID NO: 4252050 - DNA, 25 bp, Homo sapien
tactattaatagcagtgcctctcct

SEQ ID NO: 4252051 - DNA, 25 bp, Homo sapien
tccaatgtacctattggtcccctac

SEQ ID NO: 4252052 - DNA, 25 bp, Homo sapien
aagcagacagtgactcaggacactg

SEQ ID NO: 4252053 - DNA, 25 bp, Homo sapien
ggctattcttgagaagcccttccca

SEQ ID NO: 4252054 - DNA, 25 bp, Homo sapien
ggctgtggttcctgatgcctcgtga

SEQ ID NO: 4252055 - DNA, 25 bp, Homo sapien
ctgtggttcctgatgcctcgtgaac

SEQ ID NO: 4252056 - DNA, 25 bp, Homo sapien
gctgtggttcctgatgcctcgtgaa

SEQ ID NO: 4252057 - DNA, 25 bp, Homo sapien
gcttcctgtctggtctctgttctcc

SEQ ID NO: 4252058 - DNA, 25 bp, Homo sapien
ctgcctgggccatcaggcttgtgcc

SEQ ID NO: 4252059 - DNA, 25 bp, Homo sapien
tgggccatcaggcttgtgcccagct

SEQ ID NO: 4252060 - DNA, 25 bp, Homo sapien
cttggcaggcttcctgtctggtctc

SEQ ID NO: 4252061 - DNA, 25 bp, Homo sapien
cagagagctgaagttgtcgaaccgg

SEQ ID NO: 4252062 - DNA, 25 bp, Homo sapien
gcagctcaggctcgatgctggccaa

SEQ ID NO: 4252063 - DNA, 25 bp, Homo sapien
ggccctcctggtcgtaagcagccag

SEQ ID NO: 4252064 - DNA, 25 bp, Homo sapien
tggccactctcatcgtcctgggaca

SEQ ID NO: 4252065 - DNA, 25 bp, Homo sapien
gacctactactgtgggcaggctgct

SEQ ID NO: 4252066 - DNA, 25 bp, Homo sapien
acaggtcagatgttgtggtcacccc

SEQ ID NO: 4252067 - DNA, 25 bp, Homo sapien
tatctggtcccaaacgtcaacagtg

SEQ ID NO: 4252068 - DNA, 25 bp, Homo sapien
ggaatgcagatttcaacgcctaaga

SEQ ID NO: 4252069 - DNA, 25 bp, Homo sapien
caaacagggctagttttccattcgg

SEQ ID NO: 4252070 - DNA, 25 bp, Homo sapien
catgagcatcattcacaaacagggc

SEQ ID NO: 4252071 - DNA, 25 bp, Homo sapien
ctagagaggctcatgcagcatgggc

SEQ ID NO: 4252072 - DNA, 25 bp, Homo sapien
tcagcaggcatgcaaaggtctcatc

SEQ ID NO: 4252073 - DNA, 25 bp, Homo sapien
ctcctcccgagcatagcccacactc

SEQ ID NO: 4252074 - DNA, 25 bp, Homo sapien
ttgttccccaccgacagggcgatga

SEQ ID NO: 4252075 - DNA, 25 bp, Homo sapien
tagacaggcgcgagggtgagcctgg

SEQ ID NO: 4252076 - DNA, 25 bp, Homo sapien
gggcgcagacgaacttcaccacggc

SEQ ID NO: 4252077 - DNA, 25 bp, Homo sapien
accacggcaggctccaccgcaggaa

SEQ ID NO: 4252078 - DNA, 25 bp, Homo sapien
gcctgacaggtcacaaggatccagt

SEQ ID NO: 4252079 - DNA, 25 bp, Homo sapien
gaagaatttggacggctcgaggatc

SEQ ID NO: 4252080 - DNA, 25 bp, Homo sapien
tcagtgtcctcagcggtgacgttct

SEQ ID NO: 4252081 - DNA, 25 bp, Homo sapien
gagcccagggttaccaaggcaacag

SEQ ID NO: 4252082 - DNA, 25 bp, Homo sapien
tagatagaattaagccctcactctg

SEQ ID NO: 4252083 - DNA, 25 bp, Homo sapien
gcctctttcgtcaaacaatctggta

SEQ ID NO: 4252084 - DNA, 25 bp, Homo sapien
gaaactcattctcgtcatctgcagc

SEQ ID NO: 4252085 - DNA, 25 bp, Homo sapien
gaagacttggcattcttctaaggca

SEQ ID NO: 4252086 - DNA, 25 bp, Homo sapien
gaggtctccctgatcatgctatagg

SEQ ID NO: 4252087 - DNA, 25 bp, Homo sapien
tggagggtacggtgtgtctgtttcc

SEQ ID NO: 4252088 - DNA, 25 bp, Homo sapien
tgatcatgctataggcttgtggagg

SEQ ID NO: 4252089 - DNA, 25 bp, Homo sapien
ggagcttcatggcctgagaggtctc

SEQ ID NO: 4252090 - DNA, 25 bp, Homo sapien
tccaaatattcctcacgtgcaacag

SEQ ID NO: 4252091 - DNA, 25 bp, Homo sapien
ttcctcacgtgcaacagagacatca

SEQ ID NO: 4252092 - DNA, 25 bp, Homo sapien
gacatcaattcctctattggttaag

SEQ ID NO: 4252093 - DNA, 25 bp, Homo sapien
tattggttaagtccctgtcacttgg

SEQ ID NO: 4252094 - DNA, 25 bp, Homo sapien
gtgatcttggcactcaggtggacgt

SEQ ID NO: 4252095 - DNA, 25 bp, Homo sapien
tcacaagaagcgtggtagagccctg

SEQ ID NO: 4252096 - DNA, 25 bp, Homo sapien
tggccgtgtctgtagctcacaagaa

SEQ ID NO: 4252097 - DNA, 25 bp, Homo sapien
ctttacccggatgccgctgcagtgc

SEQ ID NO: 4252098 - DNA, 25 bp, Homo sapien
cactgtagacttcatgagcttagtt

SEQ ID NO: 4252099 - DNA, 25 bp, Homo sapien
ggatgcagtatgctcagggattttt

SEQ ID NO: 4252100 - DNA, 25 bp, Homo sapien
ccttctgtgcagcttcaaactgcaa

SEQ ID NO: 4252101 - DNA, 25 bp, Homo sapien
ttagtttctcctggatgcagtatgc

SEQ ID NO: 4252102 - DNA, 25 bp, Homo sapien
tccacctcgacagccaagtcaaagt

SEQ ID NO: 4252103 - DNA, 25 bp, Homo sapien
tggcacggggcaaactccatgctgt

SEQ ID NO: 4252104 - DNA, 25 bp, Homo sapien
aagtcaaagtgggagcagtcgctca

SEQ ID NO: 4252105 - DNA, 25 bp, Homo sapien
tcgctcaaggtgaccacctcactgg

SEQ ID NO: 4252106 - DNA, 25 bp, Homo sapien
ctgaacccgatgtcactgcctgtgg

SEQ ID NO: 4252107 - DNA, 25 bp, Homo sapien
gcctgtggtcatcacgcccttgaca

SEQ ID NO: 4252108 - DNA, 25 bp, Homo sapien
catctcaccgaaatggagtgggttc

SEQ ID NO: 4252109 - DNA, 25 bp, Homo sapien
tgacagtaactgtggcaaccaggtg

SEQ ID NO: 4252110 - DNA, 25 bp, Homo sapien
ttcctcactgacacacaaggtcgat

SEQ ID NO: 4252111 - DNA, 25 bp, Homo sapien
aatgtggtatcagctagggtctggc

SEQ ID NO: 4252112 - DNA, 25 bp, Homo sapien
cttggtcaccgagccagttgcagga

SEQ ID NO: 4252113 - DNA, 25 bp, Homo sapien
tggagtgggacgaacccttggtcac

SEQ ID NO: 4252114 - DNA, 25 bp, Homo sapien
agccggtgccagtgcacagacagga

SEQ ID NO: 4252115 - DNA, 25 bp, Homo sapien
caggacacctgtcaccactccatgg

SEQ ID NO: 4252116 - DNA, 25 bp, Homo sapien
cctgtcaccactccatgggacagca

SEQ ID NO: 4252117 - DNA, 25 bp, Homo sapien
gagccggtgccagtgcacagacagg

SEQ ID NO: 4252118 - DNA, 25 bp, Homo sapien
ccgtctttggttgccacggaaatgt

SEQ ID NO: 4252119 - DNA, 25 bp, Homo sapien
tattgtgtactgataggcgcccgtc

SEQ ID NO: 4252120 - DNA, 25 bp, Homo sapien
tgtgtactgataggcgcccgtcttt

SEQ ID NO: 4252121 - DNA, 25 bp, Homo sapien
tgccacggaaatgtcaagatgctgg

SEQ ID NO: 4252122 - DNA, 25 bp, Homo sapien
ttcataggacaaggcacgacgcagg

SEQ ID NO: 4252123 - DNA, 25 bp, Homo sapien
gcttcataggacaaggcacgacgca

SEQ ID NO: 4252124 - DNA, 25 bp, Homo sapien
agggtggcttcataggacaaggcac

SEQ ID NO: 4252125 - DNA, 25 bp, Homo sapien
tggcttcataggacaaggcacgacg

SEQ ID NO: 4252126 - DNA, 25 bp, Homo sapien
agcacctcgaagaactcagcaggaa

SEQ ID NO: 4252127 - DNA, 25 bp, Homo sapien
gcacctcgaagaactcagcaggaag

SEQ ID NO: 4252128 - DNA, 25 bp, Homo sapien
gagcacctcgaagaactcagcagga

SEQ ID NO: 4252129 - DNA, 25 bp, Homo sapien
tctggaacccagtacggagaaagcc

SEQ ID NO: 4252130 - DNA, 25 bp, Homo sapien
tacagctaactgcaaatggtgacca

SEQ ID NO: 4252131 - DNA, 25 bp, Homo sapien
cgacatcttcaaggacaccgagagg

SEQ ID NO: 4252132 - DNA, 25 bp, Homo sapien
agaaagccaggacgtgctccgtgac

SEQ ID NO: 4252133 - DNA, 25 bp, Homo sapien
tccccccagccaggacctgaacagg

SEQ ID NO: 4252134 - DNA, 25 bp, Homo sapien
agccaggacctgaacaggcactcac

SEQ ID NO: 4252135 - DNA, 25 bp, Homo sapien
ctcatccccccagccaggacctgaa

SEQ ID NO: 4252136 - DNA, 25 bp, Homo sapien
cccagccaggacctgaacaggcact

SEQ ID NO: 4252137 - DNA, 25 bp, Homo sapien
cacctgtcaccagggtgaacagtga

SEQ ID NO: 4252138 - DNA, 25 bp, Homo sapien
acctgtcaccagggtgaacagtgaa

SEQ ID NO: 4252139 - DNA, 25 bp, Homo sapien
ctgtcaccagggtgaacagtgaacc

SEQ ID NO: 4252140 - DNA, 25 bp, Homo sapien
cctgtcaccagggtgaacagtgaac

SEQ ID NO: 4252141 - DNA, 25 bp, Homo sapien
gagggagcctgagcactcaggcctc

SEQ ID NO: 4252142 - DNA, 25 bp, Homo sapien
agggagcctgagcactcaggcctca

SEQ ID NO: 4252143 - DNA, 25 bp, Homo sapien
tcgaccacgtagatagtgctgttgg

SEQ ID NO: 4252144 - DNA, 25 bp, Homo sapien
ccaggttcgaccacgtagatagtgc

SEQ ID NO: 4252145 - DNA, 25 bp, Homo sapien
tatccaggttcgaccacgtagatag

SEQ ID NO: 4252146 - DNA, 25 bp, Homo sapien
ctaggtatccaggttcgaccacgta

SEQ ID NO: 4252147 - DNA, 25 bp, Homo sapien
ctagaagcaccttgcatgcgaatac

SEQ ID NO: 4252148 - DNA, 25 bp, Homo sapien
gcagctccgccatgcctaagaacac

SEQ ID NO: 4252149 - DNA, 25 bp, Homo sapien
gccaaggacgaggctgctctgtccc

SEQ ID NO: 4252150 - DNA, 25 bp, Homo sapien
ccaaggacgaggctgctctgtccca

SEQ ID NO: 4252151 - DNA, 25 bp, Homo sapien
tggccaaggacgaggctgctctgtc

SEQ ID NO: 4252152 - DNA, 25 bp, Homo sapien
gctgcaactcgtactgatcggaagg

SEQ ID NO: 4252153 - DNA, 25 bp, Homo sapien
ctgaagctgcaactcgtactgatcg

SEQ ID NO: 4252154 - DNA, 25 bp, Homo sapien
gaagctgcaactcgtactgatcgga

SEQ ID NO: 4252155 - DNA, 25 bp, Homo sapien
gcaactcgtactgatcggaaggcat

SEQ ID NO: 4252156 - DNA, 25 bp, Homo sapien
gaagtcttcgcagatattaagggca

SEQ ID NO: 4252157 - DNA, 25 bp, Homo sapien
tactgattcgatcagccagcatgcc

SEQ ID NO: 4252158 - DNA, 25 bp, Homo sapien
cagctgcccttctataggtcaggaa

SEQ ID NO: 4252159 - DNA, 25 bp, Homo sapien
agtgcctgccagattcaaagttcct

SEQ ID NO: 4252160 - DNA, 25 bp, Homo sapien
ccacctctgctaggctgtgagctcc

SEQ ID NO: 4252161 - DNA, 25 bp, Homo sapien
cacctctgctaggctgtgagctcca

SEQ ID NO: 4252162 - DNA, 25 bp, Homo sapien
tgtcatccaacgcagaatgctctga

SEQ ID NO: 4252163 - DNA, 25 bp, Homo sapien
atgatactgcactcccaacatgggt

SEQ ID NO: 4252164 - DNA, 25 bp, Homo sapien
tgaaaaaacaatccagctaggctga

SEQ ID NO: 4252165 - DNA, 25 bp, Homo sapien
taattatcgcatgttaatgagccca

SEQ ID NO: 4252166 - DNA, 25 bp, Homo sapien
ctcagctactgcaacatcctctgcc

SEQ ID NO: 4252167 - DNA, 25 bp, Homo sapien
tctcagctactgcaacatcctctgc

SEQ ID NO: 4252168 - DNA, 25 bp, Homo sapien
tcagctactgcaacatcctctgcct

SEQ ID NO: 4252169 - DNA, 25 bp, Homo sapien
gatctcagctactgcaacatcctct

SEQ ID NO: 4252170 - DNA, 25 bp, Homo sapien
gccacacaggaatgaccaaccaggt

SEQ ID NO: 4252171 - DNA, 25 bp, Homo sapien
tcggatggactggacctgagagctc

SEQ ID NO: 4252172 - DNA, 25 bp, Homo sapien
aagcgtcttccttcaggccgcagtg

SEQ ID NO: 4252173 - DNA, 25 bp, Homo sapien
tgaagtcaggtaaacatcgggctct

SEQ ID NO: 4252174 - DNA, 25 bp, Homo sapien
aggtagacgtcataggccgggttca

SEQ ID NO: 4252175 - DNA, 25 bp, Homo sapien
cataggccgggttcagaaggatgtt

SEQ ID NO: 4252176 - DNA, 25 bp, Homo sapien
ttgtagtgaatggaggttcccacca

SEQ ID NO: 4252177 - DNA, 25 bp, Homo sapien
cttgtagtgaatggaggttcccacc

SEQ ID NO: 4252178 - DNA, 25 bp, Homo sapien
taagaaggagggatgtacgtagact

SEQ ID NO: 4252179 - DNA, 25 bp, Homo sapien
atggtgtccccttgcttggcagcct

SEQ ID NO: 4252180 - DNA, 25 bp, Homo sapien
ggatgtacgtagactccaagaaagt

SEQ ID NO: 4252181 - DNA, 25 bp, Homo sapien
ctgagatgtaagaaggagggatgta

SEQ ID NO: 4252182 - DNA, 25 bp, Homo sapien
catgaaaatcatcagggtgacggga

SEQ ID NO: 4252183 - DNA, 25 bp, Homo sapien
cactttttggactaaactggcagat

SEQ ID NO: 4252184 - DNA, 25 bp, Homo sapien
ccccgatggtcgtaaagcacatgaa

SEQ ID NO: 4252185 - DNA, 25 bp, Homo sapien
aaggcggcacagtcgggaatacaag

SEQ ID NO: 4252186 - DNA, 25 bp, Homo sapien
cagcgcattgtgggagtctgagaac

SEQ ID NO: 4252187 - DNA, 25 bp, Homo sapien
ctgagaacctgtccgcctcggagtc

SEQ ID NO: 4252188 - DNA, 25 bp, Homo sapien
atcgtccactcgaagaccagtccag

SEQ ID NO: 4252189 - DNA, 25 bp, Homo sapien
tcggagtccttcacaatcgtccact

SEQ ID NO: 4252190 - DNA, 25 bp, Homo sapien
tcctgggagtaaactcctctccctc

SEQ ID NO: 4252191 - DNA, 25 bp, Homo sapien
ggtggtggagacgatctggatgtca

SEQ ID NO: 4252192 - DNA, 25 bp, Homo sapien
ggatgtcatggatgaggtccacaat

SEQ ID NO: 4252193 - DNA, 25 bp, Homo sapien
ggtccacaatggcatcacagcgcag

SEQ ID NO: 4252194 - DNA, 25 bp, Homo sapien
gagacgatctggatgtcatggatga

SEQ ID NO: 4252195 - DNA, 25 bp, Homo sapien
atgctggccacctccggccgggtgg

SEQ ID NO: 4252196 - DNA, 25 bp, Homo sapien
gagcactgctgctcgtccaggccca

SEQ ID NO: 4252197 - DNA, 25 bp, Homo sapien
cactgctgctcgtccaggcccagcg

SEQ ID NO: 4252198 - DNA, 25 bp, Homo sapien
tggccacctccggccgggtggacaa

SEQ ID NO: 4252199 - DNA, 25 bp, Homo sapien
ggaagaagacagcatttactctctg

SEQ ID NO: 4252200 - DNA, 25 bp, Homo sapien
cagtggaagaagacagcatttactc

SEQ ID NO: 4252201 - DNA, 25 bp, Homo sapien
aagacagcatttactctctggagct

SEQ ID NO: 4252202 - DNA, 25 bp, Homo sapien
gtggaagaagacagcatttactctc

SEQ ID NO: 4252203 - DNA, 25 bp, Homo sapien
caagcagctgacctgtgagtgccat

SEQ ID NO: 4252204 - DNA, 25 bp, Homo sapien
ccctcatggatggactaagcgcctt

SEQ ID NO: 4252205 - DNA, 25 bp, Homo sapien
gagtgagcagtctaaaacctggaag

SEQ ID NO: 4252206 - DNA, 25 bp, Homo sapien
ccttcccaccatgagaggatgtcac

SEQ ID NO: 4252207 - DNA, 25 bp, Homo sapien
caggccataggggaactcagggacc

SEQ ID NO: 4252208 - DNA, 25 bp, Homo sapien
gggtggtggatgacacacgccacct

SEQ ID NO: 4252209 - DNA, 25 bp, Homo sapien
gcacacagaatgtgctggcgtctgg

SEQ ID NO: 4252210 - DNA, 25 bp, Homo sapien
gactgacagtgagttttgaaagagt

SEQ ID NO: 4252211 - DNA, 25 bp, Homo sapien
tcgcttgaggagttctccttggtct

SEQ ID NO: 4252212 - DNA, 25 bp, Homo sapien
agcgtgaagttaacgcgcgtggccc

SEQ ID NO: 4252213 - DNA, 25 bp, Homo sapien
cccgcgtgaagggcagcagcacttt

SEQ ID NO: 4252214 - DNA, 25 bp, Homo sapien
agttaacgcgcgtggcccgcgtgaa

SEQ ID NO: 4252215 - DNA, 25 bp, Homo sapien
gcctccagcgtgaagttaacgcgcg

SEQ ID NO: 4252216 - DNA, 25 bp, Homo sapien
gccaacagcaccgacagcgtcagca

SEQ ID NO: 4252217 - DNA, 25 bp, Homo sapien
caacagcaccgacagcgtcagcagc

SEQ ID NO: 4252218 - DNA, 25 bp, Homo sapien
ccgccaacagcaccgacagcgtcag

SEQ ID NO: 4252219 - DNA, 25 bp, Homo sapien
ccgccgccaacagcaccgacagcgt

SEQ ID NO: 4252220 - DNA, 25 bp, Homo sapien
cgcgcgtcacctcccgcgaccctgc

SEQ ID NO: 4252221 - DNA, 25 bp, Homo sapien
cgcgtcacctcccgcgaccctgcgc

SEQ ID NO: 4252222 - DNA, 25 bp, Homo sapien
gcgcgtcacctcccgcgaccctgcg

SEQ ID NO: 4252223 - DNA, 25 bp, Homo sapien
gcatcccgccctggtatttgcccct

SEQ ID NO: 4252224 - DNA, 25 bp, Homo sapien
gctttggaccttgcgctctggcccg

SEQ ID NO: 4252225 - DNA, 25 bp, Homo sapien
gacacatgccccaggacatttggga

SEQ ID NO: 4252226 - DNA, 25 bp, Homo sapien
ccggacccacggtcagcaaggaagg

SEQ ID NO: 4252227 - DNA, 25 bp, Homo sapien
agacaccgcactgggcttcagcgag

SEQ ID NO: 4252228 - DNA, 25 bp, Homo sapien
agcgaggcccgcataggctgagcct

SEQ ID NO: 4252229 - DNA, 25 bp, Homo sapien
gggtcaccctcgaagcctgagggcc

SEQ ID NO: 4252230 - DNA, 25 bp, Homo sapien
ggcccctgggttgggcatagacacc

SEQ ID NO: 4252231 - DNA, 25 bp, Homo sapien
gggagccttcatagaccccacaggc

SEQ ID NO: 4252232 - DNA, 25 bp, Homo sapien
gtgatgaccacagggcatgtctagt

SEQ ID NO: 4252233 - DNA, 25 bp, Homo sapien
gtggtgatgaccacagggcatgtct

SEQ ID NO: 4252234 - DNA, 25 bp, Homo sapien
gggctgactgctgggagccttcata

SEQ ID NO: 4252235 - DNA, 25 bp, Homo sapien
cttagtgaaccaatagggcagagga

SEQ ID NO: 4252236 - DNA, 25 bp, Homo sapien
ggcttagtgaaccaatagggcagag

SEQ ID NO: 4252237 - DNA, 25 bp, Homo sapien
ctggcttagtgaaccaatagggcag

SEQ ID NO: 4252238 - DNA, 25 bp, Homo sapien
gcttagtgaaccaatagggcagagg

SEQ ID NO: 4252239 - DNA, 25 bp, Homo sapien
cagttcgaaacttaacctgttctct

SEQ ID NO: 4252240 - DNA, 25 bp, Homo sapien
ataagagaccggctttcgagccttt

SEQ ID NO: 4252241 - DNA, 25 bp, Homo sapien
gagaccggctttcgagcctttgagg

SEQ ID NO: 4252242 - DNA, 25 bp, Homo sapien
tccccaccaactacaatcatatggg

SEQ ID NO: 4252243 - DNA, 25 bp, Homo sapien
tgaaggctttgccaggcgggacccc

SEQ ID NO: 4252244 - DNA, 25 bp, Homo sapien
gacttagggtcatcaggttttccaa

SEQ ID NO: 4252245 - DNA, 25 bp, Homo sapien
ggtcatcaggttttccaatggccat

SEQ ID NO: 4252246 - DNA, 25 bp, Homo sapien
tagggtcatcaggttttccaatggc

SEQ ID NO: 4252247 - DNA, 25 bp, Homo sapien
ttagggtcatcaggttttccaatgg

SEQ ID NO: 4252248 - DNA, 25 bp, Homo sapien
taggcctaaccttggccgagtttga

SEQ ID NO: 4252249 - DNA, 25 bp, Homo sapien
gaagagaaccatgtctaggcctaac

SEQ ID NO: 4252250 - DNA, 25 bp, Homo sapien
tgatttccctgcagactacagactg

SEQ ID NO: 4252251 - DNA, 25 bp, Homo sapien
taatgaaagcacacgctaacacgga

SEQ ID NO: 4252252 - DNA, 25 bp, Homo sapien
tctggcctccgggactttgaacctg

SEQ ID NO: 4252253 - DNA, 25 bp, Homo sapien
cttctggttgtttaagaactcatct

SEQ ID NO: 4252254 - DNA, 25 bp, Homo sapien
ctccgggactttgaacctgcagtat

SEQ ID NO: 4252255 - DNA, 25 bp, Homo sapien
tatttgaatgcaagctccttctggc

SEQ ID NO: 4252256 - DNA, 25 bp, Homo sapien
tcatgcaatcatggcaggcacacgg

SEQ ID NO: 4252257 - DNA, 25 bp, Homo sapien
aacgtctgtgcgcttcccttgtgcc

SEQ ID NO: 4252258 - DNA, 25 bp, Homo sapien
cggacaaccccagctgtcgcttggg

SEQ ID NO: 4252259 - DNA, 25 bp, Homo sapien
tcaggattaggttgtgaggctcaga

SEQ ID NO: 4252260 - DNA, 25 bp, Homo sapien
gctctacagagggaaacgcaggctc

SEQ ID NO: 4252261 - DNA, 25 bp, Homo sapien
gaagcgcaggaacaggacatacggt

SEQ ID NO: 4252262 - DNA, 25 bp, Homo sapien
gagagcctacatgtcttcgccggga

SEQ ID NO: 4252263 - DNA, 25 bp, Homo sapien
ttctacccagcttgggaagcgcagg

SEQ ID NO: 4252264 - DNA, 25 bp, Homo sapien
gcgaggctgggccatcaacgtgggt

SEQ ID NO: 4252265 - DNA, 25 bp, Homo sapien
agcgaggctgggccatcaacgtggg

SEQ ID NO: 4252266 - DNA, 25 bp, Homo sapien
gaggctgggccatcaacgtgggtga

SEQ ID NO: 4252267 - DNA, 25 bp, Homo sapien
cgaggctgggccatcaacgtgggtg

SEQ ID NO: 4252268 - DNA, 25 bp, Homo sapien
ttttgagaacggcagacccaggtcg

SEQ ID NO: 4252269 - DNA, 25 bp, Homo sapien
ccccttggtcatgggatttgctgcc

SEQ ID NO: 4252270 - DNA, 25 bp, Homo sapien
tacaggtgggttccctcatctggag

SEQ ID NO: 4252271 - DNA, 25 bp, Homo sapien
ccaggtcggagtgaggaagcttcca

SEQ ID NO: 4252272 - DNA, 25 bp, Homo sapien
gaaagttcttgtagcgcaaggcctg

SEQ ID NO: 4252273 - DNA, 25 bp, Homo sapien
gaccccgaggctctaacaatgcact

SEQ ID NO: 4252274 - DNA, 25 bp, Homo sapien
aatcctagaggcttgattggcccag

SEQ ID NO: 4252275 - DNA, 25 bp, Homo sapien
tgtgctggaggcaaagaatccctac

SEQ ID NO: 4252276 - DNA, 25 bp, Homo sapien
tgcctccagagggtgtgaacacatc

SEQ ID NO: 4252277 - DNA, 25 bp, Homo sapien
tccagagggtgtgaacacatccagg

SEQ ID NO: 4252278 - DNA, 25 bp, Homo sapien
atctgaagcctctcttgcgggcaga

SEQ ID NO: 4252279 - DNA, 25 bp, Homo sapien
tgaagcctctcttgcgggcagaaga

SEQ ID NO: 4252280 - DNA, 25 bp, Homo sapien
cactgagcaccaagaccttcactgt

SEQ ID NO: 4252281 - DNA, 25 bp, Homo sapien
tcactgagcaccaagaccttcactg

SEQ ID NO: 4252282 - DNA, 25 bp, Homo sapien
tgagcaccaagaccttcactgtact

SEQ ID NO: 4252283 - DNA, 25 bp, Homo sapien
actgagcaccaagaccttcactgta

SEQ ID NO: 4252284 - DNA, 25 bp, Homo sapien
gggtcacccgatgcagctgcacaga

SEQ ID NO: 4252285 - DNA, 25 bp, Homo sapien
tcagccgcggaaatggtggacccgc

SEQ ID NO: 4252286 - DNA, 25 bp, Homo sapien
cagccctcggaggaactgagcaggg

SEQ ID NO: 4252287 - DNA, 25 bp, Homo sapien
cagccccatcagccgcggaaatggt

SEQ ID NO: 4252288 - DNA, 25 bp, Homo sapien
ggcttgacacaaagcccacgcctgg

SEQ ID NO: 4252289 - DNA, 25 bp, Homo sapien
ctagtgcgtggcatcaggagcaaac

SEQ ID NO: 4252290 - DNA, 25 bp, Homo sapien
gcgtggcatcaggagcaaaccctct

SEQ ID NO: 4252291 - DNA, 25 bp, Homo sapien
caaaccctctcaggcttgacacaaa

SEQ ID NO: 4252292 - DNA, 25 bp, Homo sapien
gtggaagggagttctcctcgaagtc

SEQ ID NO: 4252293 - DNA, 25 bp, Homo sapien
tcctcgaagtccgtggcatctggca

SEQ ID NO: 4252294 - DNA, 25 bp, Homo sapien
ctcgaagtccgtggcatctggcatt

SEQ ID NO: 4252295 - DNA, 25 bp, Homo sapien
cctcgaagtccgtggcatctggcat

SEQ ID NO: 4252296 - DNA, 25 bp, Homo sapien
ccatctgctcccttatcagggccct

SEQ ID NO: 4252297 - DNA, 25 bp, Homo sapien
ctggagaaaggaggggttgaagcac

SEQ ID NO: 4252298 - DNA, 25 bp, Homo sapien
tgagtcacgagcgagccgggccata

SEQ ID NO: 4252299 - DNA, 25 bp, Homo sapien
gcgagccgggccataggaggtaggg

SEQ ID NO: 4252300 - DNA, 25 bp, Homo sapien
aatgggccagcatgagtcacgagcg

SEQ ID NO: 4252301 - DNA, 25 bp, Homo sapien
ccagcatgagtcacgagcgagccgg

SEQ ID NO: 4252302 - DNA, 25 bp, Homo sapien
agccctcacgctgtctgcacccagg

SEQ ID NO: 4252303 - DNA, 25 bp, Homo sapien
agagatgactaagcaggctcagggc

SEQ ID NO: 4252304 - DNA, 25 bp, Homo sapien
gggcagccctcacgctgtctgcacc

SEQ ID NO: 4252305 - DNA, 25 bp, Homo sapien
agcaggctcagggccgaacccactg

SEQ ID NO: 4252306 - DNA, 25 bp, Homo sapien
ctggtgggtgatgcgtgctctgtct

SEQ ID NO: 4252307 - DNA, 25 bp, Homo sapien
tgtctgcgataacagtcttggaagg

SEQ ID NO: 4252308 - DNA, 25 bp, Homo sapien
gtgatgcgtgctctgtctgcgataa

SEQ ID NO: 4252309 - DNA, 25 bp, Homo sapien
gctctgaagggacagccgctttggc

SEQ ID NO: 4252310 - DNA, 25 bp, Homo sapien
gagtggacatacaaccatcagacag

SEQ ID NO: 4252311 - DNA, 25 bp, Homo sapien
ccctcctgagtggacatacaaccat

SEQ ID NO: 4252312 - DNA, 25 bp, Homo sapien
ccatcagacagcaccaggatactct

SEQ ID NO: 4252313 - DNA, 25 bp, Homo sapien
caccaggatactctgagctgcatgc

SEQ ID NO: 4252314 - DNA, 25 bp, Homo sapien
caaagctaggagagtgaccgaggac

SEQ ID NO: 4252315 - DNA, 25 bp, Homo sapien
gccagttcatgctgtgcccggagct

SEQ ID NO: 4252316 - DNA, 25 bp, Homo sapien
gacccctacagctatgaccaggagg

SEQ ID NO: 4252317 - DNA, 25 bp, Homo sapien
ggttgccacgggaacttctcagatg

SEQ ID NO: 4252318 - DNA, 25 bp, Homo sapien
tatagccctggtagacgttgttcac

SEQ ID NO: 4252319 - DNA, 25 bp, Homo sapien
tgttcacttgttcgccctggagggt

SEQ ID NO: 4252320 - DNA, 25 bp, Homo sapien
tatatggacgtatttttatagccct

SEQ ID NO: 4252321 - DNA, 25 bp, Homo sapien
tacttacacctgcagtcatgagaat

SEQ ID NO: 4252322 - DNA, 25 bp, Homo sapien
agcaggtaggcaagcctgcctggca

SEQ ID NO: 4252323 - DNA, 25 bp, Homo sapien
gcaggtaggcaagcctgcctggcac

SEQ ID NO: 4252324 - DNA, 25 bp, Homo sapien
ttagcaggtaggcaagcctgcctgg

SEQ ID NO: 4252325 - DNA, 25 bp, Homo sapien
tagcaggtaggcaagcctgcctggc

SEQ ID NO: 4252326 - DNA, 25 bp, Homo sapien
cagagctggtgggatcagtgtcatg

SEQ ID NO: 4252327 - DNA, 25 bp, Homo sapien
gcagggacctgcaggttactgtgca

SEQ ID NO: 4252328 - DNA, 25 bp, Homo sapien
tggtgaggctacatggagggctgag

SEQ ID NO: 4252329 - DNA, 25 bp, Homo sapien
gctggtgggatcagtgtcatggtga

SEQ ID NO: 4252330 - DNA, 25 bp, Homo sapien
agcaacagtgggagctccacccctg

SEQ ID NO: 4252331 - DNA, 25 bp, Homo sapien
ggaccagcaacagtgggagctccac

SEQ ID NO: 4252332 - DNA, 25 bp, Homo sapien
caacagtgggagctccacccctggc

SEQ ID NO: 4252333 - DNA, 25 bp, Homo sapien
ctggaccagcaacagtgggagctcc

SEQ ID NO: 4252334 - DNA, 25 bp, Homo sapien
caagggtcttgccagaggttgcttg

SEQ ID NO: 4252335 - DNA, 25 bp, Homo sapien
gggtcttgccagaggttgcttggct

SEQ ID NO: 4252336 - DNA, 25 bp, Homo sapien
gccaagggtcttgccagaggttgct

SEQ ID NO: 4252337 - DNA, 25 bp, Homo sapien
tcttgccagaggttgcttggctggt

SEQ ID NO: 4252338 - DNA, 25 bp, Homo sapien
taccagtccatccatccgtctgttc

SEQ ID NO: 4252339 - DNA, 25 bp, Homo sapien
ccagtccatccatccgtctgttcat

SEQ ID NO: 4252340 - DNA, 25 bp, Homo sapien
cagtccatccatccgtctgttcatc

SEQ ID NO: 4252341 - DNA, 25 bp, Homo sapien
agtccatccatccgtctgttcatct

SEQ ID NO: 4252342 - DNA, 25 bp, Homo sapien
aggtcgtgctgattgggtctctcca

SEQ ID NO: 4252343 - DNA, 25 bp, Homo sapien
catgcaaccaaggagcgaactgctg

SEQ ID NO: 4252344 - DNA, 25 bp, Homo sapien
tggtgttacggatgccactcggctc

SEQ ID NO: 4252345 - DNA, 25 bp, Homo sapien
gctgtcaacatgaggcatcccttgt

SEQ ID NO: 4252346 - DNA, 25 bp, Homo sapien
cctccagtgggttttgacgtgcagc

SEQ ID NO: 4252347 - DNA, 25 bp, Homo sapien
tgtgcacagataagttgcgggccgc

SEQ ID NO: 4252348 - DNA, 25 bp, Homo sapien
cagcggaagttcctagcgcagcgtg

SEQ ID NO: 4252349 - DNA, 25 bp, Homo sapien
gcagcatgctcaaaggcacgaagga

SEQ ID NO: 4252350 - DNA, 25 bp, Homo sapien
caccgtgtgatgcagctggtccaca

SEQ ID NO: 4252351 - DNA, 25 bp, Homo sapien
ctggaagggtctccatagagggaac

SEQ ID NO: 4252352 - DNA, 25 bp, Homo sapien
gaactgaagaaaccaccgtgtgatg

SEQ ID NO: 4252353 - DNA, 25 bp, Homo sapien
ctcatatgaggaggcgggtctacca

SEQ ID NO: 4252354 - DNA, 25 bp, Homo sapien
gagtctcatggagggtactgttgga

SEQ ID NO: 4252355 - DNA, 25 bp, Homo sapien
tcatggagggtactgttggaacccc

SEQ ID NO: 4252356 - DNA, 25 bp, Homo sapien
gtctcatggagggtactgttggaac

SEQ ID NO: 4252357 - DNA, 25 bp, Homo sapien
tctcatggagggtactgttggaacc

SEQ ID NO: 4252358 - DNA, 25 bp, Homo sapien
caggaactgccggtggtgtcacatc

SEQ ID NO: 4252359 - DNA, 25 bp, Homo sapien
ggtgtcacatccttaacctggctga

SEQ ID NO: 4252360 - DNA, 25 bp, Homo sapien
tatttatggagatgtcggagtgaca

SEQ ID NO: 4252361 - DNA, 25 bp, Homo sapien
ttaacctggctgacatcggaacacc

SEQ ID NO: 4252362 - DNA, 25 bp, Homo sapien
tggcggtctctgaacgtctctttcc

SEQ ID NO: 4252363 - DNA, 25 bp, Homo sapien
tctctttccgctagcctgggccttt

SEQ ID NO: 4252364 - DNA, 25 bp, Homo sapien
ttccgctagcctgggcctttcctgg

SEQ ID NO: 4252365 - DNA, 25 bp, Homo sapien
tgaacgtctctttccgctagcctgg

SEQ ID NO: 4252366 - DNA, 25 bp, Homo sapien
ttcactcgcagcacatgctcccctt

SEQ ID NO: 4252367 - DNA, 25 bp, Homo sapien
gaaagttctggtcaccaccgagcct

SEQ ID NO: 4252368 - DNA, 25 bp, Homo sapien
tcactgaaagttctggtcaccaccg

SEQ ID NO: 4252369 - DNA, 25 bp, Homo sapien
ccccttcttcactgaaagttctggt

SEQ ID NO: 4252370 - DNA, 25 bp, Homo sapien
cagaagcttatcctcatcatgggtg

SEQ ID NO: 4252371 - DNA, 25 bp, Homo sapien
tcctcatcatgggtggaagcagagt

SEQ ID NO: 4252372 - DNA, 25 bp, Homo sapien
tcaagaggtgcagaagcttatcctc

SEQ ID NO: 4252373 - DNA, 25 bp, Homo sapien
gatcatgggcttggatgtaattcaa

SEQ ID NO: 4252374 - DNA, 25 bp, Homo sapien
tggtacagagatttcgggggccaca

SEQ ID NO: 4252375 - DNA, 25 bp, Homo sapien
gtacagagatttcgggggccacagt

SEQ ID NO: 4252376 - DNA, 25 bp, Homo sapien
acagagatttcgggggccacagtcc

SEQ ID NO: 4252377 - DNA, 25 bp, Homo sapien
agagatttcgggggccacagtccac

SEQ ID NO: 4252378 - DNA, 25 bp, Homo sapien
tgatgaggatggtgagctgctgagg

SEQ ID NO: 4252379 - DNA, 25 bp, Homo sapien
gtgatgaggatggtgagctgctgag

SEQ ID NO: 4252380 - DNA, 25 bp, Homo sapien
ctgatgagccctctgaagatggtga

SEQ ID NO: 4252381 - DNA, 25 bp, Homo sapien
tgatgagccctctgaagatggtgag

SEQ ID NO: 4252382 - DNA, 25 bp, Homo sapien
gatgagccctctgaagatggtgagc

SEQ ID NO: 4252383 - DNA, 25 bp, Homo sapien
ttgatagaagaaggactgattccca

SEQ ID NO: 4252384 - DNA, 25 bp, Homo sapien
gctgctcccgagtggatgtggcctt

SEQ ID NO: 4252385 - DNA, 25 bp, Homo sapien
tagactctgtggtcatggcgggcat

SEQ ID NO: 4252386 - DNA, 25 bp, Homo sapien
ggcagacgtgttcccactggtgaga

SEQ ID NO: 4252387 - DNA, 25 bp, Homo sapien
gaaaaatcgagccatccagtgaaga

SEQ ID NO: 4252388 - DNA, 25 bp, Homo sapien
cgtggtcagcataccgcattgaaga

SEQ ID NO: 4252389 - DNA, 25 bp, Homo sapien
taatcgtggtcagcataccgcattg

SEQ ID NO: 4252390 - DNA, 25 bp, Homo sapien
taccgcattgaagaaaaatcgagcc

SEQ ID NO: 4252391 - DNA, 25 bp, Homo sapien
aggtgaattttgtgctttatgctgc

SEQ ID NO: 4252392 - DNA, 25 bp, Homo sapien
gaagccaaccatttggcttctccat

SEQ ID NO: 4252393 - DNA, 25 bp, Homo sapien
tctccattcggagaatgtactccaa

SEQ ID NO: 4252394 - DNA, 25 bp, Homo sapien
ttgctggtagtcacggaaggctgtc

SEQ ID NO: 4252395 - DNA, 25 bp, Homo sapien
gctcccatgagtcttggcgtcctca

SEQ ID NO: 4252396 - DNA, 25 bp, Homo sapien
gtgcagcacgtcttgcctccgagca

SEQ ID NO: 4252397 - DNA, 25 bp, Homo sapien
cagctcccatgagtcttggcgtcct

SEQ ID NO: 4252398 - DNA, 25 bp, Homo sapien
ttgcctccgagcacggccagctccc

SEQ ID NO: 4252399 - DNA, 25 bp, Homo sapien
agctgtccaaacaccggccaggcgc

SEQ ID NO: 4252400 - DNA, 25 bp, Homo sapien
cagtgtgcggttggaggaagtggcc

SEQ ID NO: 4252401 - DNA, 25 bp, Homo sapien
ggaaaggttggctgtctgcagtgtg

SEQ ID NO: 4252402 - DNA, 25 bp, Homo sapien
agcactcccgaggatcggccctggg

SEQ ID NO: 4252403 - DNA, 25 bp, Homo sapien
tctgccacgtgaactctgccactgt

SEQ ID NO: 4252404 - DNA, 25 bp, Homo sapien
cagagcgtctgccacgtgaactctg

SEQ ID NO: 4252405 - DNA, 25 bp, Homo sapien
agcgtctgccacgtgaactctgcca

SEQ ID NO: 4252406 - DNA, 25 bp, Homo sapien
gtctgccacgtgaactctgccactg

SEQ ID NO: 4252407 - DNA, 25 bp, Homo sapien
actgtacccaacgtgcagtctttcc

SEQ ID NO: 4252408 - DNA, 25 bp, Homo sapien
tgtacccaacgtgcagtctttcctt

SEQ ID NO: 4252409 - DNA, 25 bp, Homo sapien
ctgtacccaacgtgcagtctttcct

SEQ ID NO: 4252410 - DNA, 25 bp, Homo sapien
gatgggcagtgagaaaactcatgag

SEQ ID NO: 4252411 - DNA, 25 bp, Homo sapien
gaggaatttgacaatggcaatctgc

SEQ ID NO: 4252412 - DNA, 25 bp, Homo sapien
gaaaactcatgagatgccccaggga

SEQ ID NO: 4252413 - DNA, 25 bp, Homo sapien
acaatggtggccaaagaaggtgatg

SEQ ID NO: 4252414 - DNA, 25 bp, Homo sapien
tgtgcctgcccttgggtggaaaagc

SEQ ID NO: 4252415 - DNA, 25 bp, Homo sapien
gggaaaagcctcctcaggactgtgc

SEQ ID NO: 4252416 - DNA, 25 bp, Homo sapien
ggcaccctctgcagagaggttcagg

SEQ ID NO: 4252417 - DNA, 25 bp, Homo sapien
cttgccaattggcagggcaccctct

SEQ ID NO: 4252418 - DNA, 25 bp, Homo sapien
gaaagtccagttcctgctccgtgaa

SEQ ID NO: 4252419 - DNA, 25 bp, Homo sapien
tcaggtcttgctgaggggctccctt

SEQ ID NO: 4252420 - DNA, 25 bp, Homo sapien
ccataagccatgtttgaagaatccc

SEQ ID NO: 4252421 - DNA, 25 bp, Homo sapien
gaagaatcccatagttgtggagaga

SEQ ID NO: 4252422 - DNA, 25 bp, Homo sapien
gcaactcaaagtgccatacagtcat

SEQ ID NO: 4252423 - DNA, 25 bp, Homo sapien
tacagtcattactgggaggatcctc

SEQ ID NO: 4252424 - DNA, 25 bp, Homo sapien
tcttggcggttcaacacaatcacac

SEQ ID NO: 4252425 - DNA, 25 bp, Homo sapien
tatttgcccatgctgtgatccaggc

SEQ ID NO: 4252426 - DNA, 25 bp, Homo sapien
gggacagagttcagaggtgccttct

SEQ ID NO: 4252427 - DNA, 25 bp, Homo sapien
ggagtcagacacagcctagatactg

SEQ ID NO: 4252428 - DNA, 25 bp, Homo sapien
acatacacacacgagtacggcggag

SEQ ID NO: 4252429 - DNA, 25 bp, Homo sapien
cacacacgagtacggcggaggcgct

SEQ ID NO: 4252430 - DNA, 25 bp, Homo sapien
gagtacggcggaggcgctgcaaggc

SEQ ID NO: 4252431 - DNA, 25 bp, Homo sapien
atacacacacgagtacggcggaggc

SEQ ID NO: 4252432 - DNA, 25 bp, Homo sapien
tgggcccggctgctcatcggcccct

SEQ ID NO: 4252433 - DNA, 25 bp, Homo sapien
gccttgggagcaggatatccaggaa

SEQ ID NO: 4252434 - DNA, 25 bp, Homo sapien
aggatatccaggaagccccgctggg

SEQ ID NO: 4252435 - DNA, 25 bp, Homo sapien
gacagctttctaggctgaggctctg

SEQ ID NO: 4252436 - DNA, 25 bp, Homo sapien
aggacacgcaggcaatggctagtgt

SEQ ID NO: 4252437 - DNA, 25 bp, Homo sapien
caggcaatggctagtgtcttggtga

SEQ ID NO: 4252438 - DNA, 25 bp, Homo sapien
tctgctgcaggatgacggtcaagtc

SEQ ID NO: 4252439 - DNA, 25 bp, Homo sapien
cacgcaggcaatggctagtgtcttg

SEQ ID NO: 4252440 - DNA, 25 bp, Homo sapien
ggtgggtacctgcaaaatcagctag

SEQ ID NO: 4252441 - DNA, 25 bp, Homo sapien
catctagtgctgcaaggtgggtacc

SEQ ID NO: 4252442 - DNA, 25 bp, Homo sapien
tttgattgcagaaaacggatcccga

SEQ ID NO: 4252443 - DNA, 25 bp, Homo sapien
tcatttcgaagctaccactcagtgg

SEQ ID NO: 4252444 - DNA, 25 bp, Homo sapien
cagcaatctgacttgcagcgggagg

SEQ ID NO: 4252445 - DNA, 25 bp, Homo sapien
gcttggaaacggtccagtcctccca

SEQ ID NO: 4252446 - DNA, 25 bp, Homo sapien
gaacagaatagttgagggctctgag

SEQ ID NO: 4252447 - DNA, 25 bp, Homo sapien
agaaggcttcgctccagccgcggag

SEQ ID NO: 4252448 - DNA, 25 bp, Homo sapien
tcttcaggaaggtgggccgcttgtt

SEQ ID NO: 4252449 - DNA, 25 bp, Homo sapien
cacgtcttggtggtgcacgagcctg

SEQ ID NO: 4252450 - DNA, 25 bp, Homo sapien
tacttgtccttgagcacgtagccca

SEQ ID NO: 4252451 - DNA, 25 bp, Homo sapien
gcttgcggtacgacagtggcttctt

SEQ ID NO: 4252452 - DNA, 25 bp, Homo sapien
tgggtagttaatttccttgcggcca

SEQ ID NO: 4252453 - DNA, 25 bp, Homo sapien
gattctctcactagactgaacgtct

SEQ ID NO: 4252454 - DNA, 25 bp, Homo sapien
actgtgggtagttaatttccttgcg

SEQ ID NO: 4252455 - DNA, 25 bp, Homo sapien
ctgaacgtctagtcttgagggcaaa

SEQ ID NO: 4252456 - DNA, 25 bp, Homo sapien
cacaccagctgccaacaagccccag

SEQ ID NO: 4252457 - DNA, 25 bp, Homo sapien
gttgagtcttgtttcctcatggcag

SEQ ID NO: 4252458 - DNA, 25 bp, Homo sapien
gcagcagtaggctggccccattgct

SEQ ID NO: 4252459 - DNA, 25 bp, Homo sapien
tgagggagcgggtgataaacacatc

SEQ ID NO: 4252460 - DNA, 25 bp, Homo sapien
aaacacatctgcgagcctttccgag

SEQ ID NO: 4252461 - DNA, 25 bp, Homo sapien
taaatggcgtgttgcaaaatcctgg

SEQ ID NO: 4252462 - DNA, 25 bp, Homo sapien
tcatagtcccaatcgacagatgtgg

SEQ ID NO: 4252463 - DNA, 25 bp, Homo sapien
tcccatgcctttgagtaaatggcgt

SEQ ID NO: 4252464 - DNA, 25 bp, Homo sapien
tgactggcaccggtcggaacaagga

SEQ ID NO: 4252465 - DNA, 25 bp, Homo sapien
ggcattctgcttgatctcccgggca

SEQ ID NO: 4252466 - DNA, 25 bp, Homo sapien
aaagaccttggcgaagccgatgccg

SEQ ID NO: 4252467 - DNA, 25 bp, Homo sapien
tgtgcaagttcatgagagtccgggc

SEQ ID NO: 4252468 - DNA, 25 bp, Homo sapien
tcaggttgccctgggtacaggcagc

SEQ ID NO: 4252469 - DNA, 25 bp, Homo sapien
tgctggactggacagcttccccatg

SEQ ID NO: 4252470 - DNA, 25 bp, Homo sapien
gctggactggacagcttccccatgc

SEQ ID NO: 4252471 - DNA, 25 bp, Homo sapien
ttccccatgccagggctgtctttgc

SEQ ID NO: 4252472 - DNA, 25 bp, Homo sapien
ggctgtctttgccgtggcgtgccat

SEQ ID NO: 4252473 - DNA, 25 bp, Homo sapien
cgggctcgcaactctctgcattagt

SEQ ID NO: 4252474 - DNA, 25 bp, Homo sapien
gggctcgcaactctctgcattagtc

SEQ ID NO: 4252475 - DNA, 25 bp, Homo sapien
ggctcgcaactctctgcattagtca

SEQ ID NO: 4252476 - DNA, 25 bp, Homo sapien
ggatatctggggtggtgccttgagt

SEQ ID NO: 4252477 - DNA, 25 bp, Homo sapien
ggggatatctggggtggtgccttga

SEQ ID NO: 4252478 - DNA, 25 bp, Homo sapien
gatatctggggtggtgccttgagtg

SEQ ID NO: 4252479 - DNA, 25 bp, Homo sapien
atatctggggtggtgccttgagtgg

SEQ ID NO: 4252480 - DNA, 25 bp, Homo sapien
atccatccttctaagcattcaccag

SEQ ID NO: 4252481 - DNA, 25 bp, Homo sapien
gctcaccagacatgtgttgcactct

SEQ ID NO: 4252482 - DNA, 25 bp, Homo sapien
gtctctctcactggaaaggtcttca

SEQ ID NO: 4252483 - DNA, 25 bp, Homo sapien
tctcacagccctagatgggtaaaat

SEQ ID NO: 4252484 - DNA, 25 bp, Homo sapien
ctgtgatgtccctacatccactgag

SEQ ID NO: 4252485 - DNA, 25 bp, Homo sapien
tgtgatgtccctacatccactgagc

SEQ ID NO: 4252486 - DNA, 25 bp, Homo sapien
gtgatgtccctacatccactgagca

SEQ ID NO: 4252487 - DNA, 25 bp, Homo sapien
cctatgacgatgatggcgtcgggcc

SEQ ID NO: 4252488 - DNA, 25 bp, Homo sapien
acagatgatgcttgcgcccagagct

SEQ ID NO: 4252489 - DNA, 25 bp, Homo sapien
tccagcggccattgcggaactgaaa

SEQ ID NO: 4252490 - DNA, 25 bp, Homo sapien
gacactcgtccaggcccatttgtga

SEQ ID NO: 4252491 - DNA, 25 bp, Homo sapien
cacagagagatggagcattaggcca

SEQ ID NO: 4252492 - DNA, 25 bp, Homo sapien
gacacagagagatggagcattaggc

SEQ ID NO: 4252493 - DNA, 25 bp, Homo sapien
cagagagatggagcattaggccagc

SEQ ID NO: 4252494 - DNA, 25 bp, Homo sapien
agagatggagcattaggccagcaag

SEQ ID NO: 4252495 - DNA, 25 bp, Homo sapien
gacaggcaatgccctgccctcaagg

SEQ ID NO: 4252496 - DNA, 25 bp, Homo sapien
catgctaggagacagctgtgcacct

SEQ ID NO: 4252497 - DNA, 25 bp, Homo sapien
tgtgcacctgacaggcaatgccctg

SEQ ID NO: 4252498 - DNA, 25 bp, Homo sapien
ctaggagacagctgtgcacctgaca

SEQ ID NO: 4252499 - DNA, 25 bp, Homo sapien
tcctcctgagaggatgagctccctg

SEQ ID NO: 4252500 - DNA, 25 bp, Homo sapien
caaagatgtggctccgggtgagtac

SEQ ID NO: 4252501 - DNA, 25 bp, Homo sapien
catcaaatgcatcagtaaacttggg

SEQ ID NO: 4252502 - DNA, 25 bp, Homo sapien
gcagtatggtgggtgctgccacaaa

SEQ ID NO: 4252503 - DNA, 25 bp, Homo sapien
cggccgcggccggacaacttgcgaa

SEQ ID NO: 4252504 - DNA, 25 bp, Homo sapien
gaaatccccgctccagagacgtgga

SEQ ID NO: 4252505 - DNA, 25 bp, Homo sapien
tggtcggctctgcacgcacctgcta

SEQ ID NO: 4252506 - DNA, 25 bp, Homo sapien
ggctggcggtactggcgcgagcccc

SEQ ID NO: 4252507 - DNA, 25 bp, Homo sapien
tccggaggtagaccatgcccaggct

SEQ ID NO: 4252508 - DNA, 25 bp, Homo sapien
ggcagcgccgcgctttccggttcat

SEQ ID NO: 4252509 - DNA, 25 bp, Homo sapien
ccgatccggaggtagaccatgccca

SEQ ID NO: 4252510 - DNA, 25 bp, Homo sapien
caggctgagaaagaggtggcccagg

SEQ ID NO: 4252511 - DNA, 25 bp, Homo sapien
cctgagcctcgccaggagcacggga

SEQ ID NO: 4252512 - DNA, 25 bp, Homo sapien
gggcaatcaacatagcccgcccggg

SEQ ID NO: 4252513 - DNA, 25 bp, Homo sapien
gaccggtgcaagtgtgcgagacgcg

SEQ ID NO: 4252514 - DNA, 25 bp, Homo sapien
agcacgggagccacggagcgggagg

SEQ ID NO: 4252515 - DNA, 25 bp, Homo sapien
caacggaaaactggggctcctggat

SEQ ID NO: 4252516 - DNA, 25 bp, Homo sapien
aactggggctcctggattcccctga

SEQ ID NO: 4252517 - DNA, 25 bp, Homo sapien
aaactggggctcctggattcccctg

SEQ ID NO: 4252518 - DNA, 25 bp, Homo sapien
actggggctcctggattcccctgac

SEQ ID NO: 4252519 - DNA, 25 bp, Homo sapien
cctcggcgtcggcattttataaaat

SEQ ID NO: 4252520 - DNA, 25 bp, Homo sapien
gagttgtaaccaccgacgagaatct

SEQ ID NO: 4252521 - DNA, 25 bp, Homo sapien
ccgaagacgagtgtgcggagcctta

SEQ ID NO: 4252522 - DNA, 25 bp, Homo sapien
gaatctttttcactggcggcctcgg

SEQ ID NO: 4252523 - DNA, 25 bp, Homo sapien
tctctgttctatatactttctcttt

SEQ ID NO: 4252524 - DNA, 25 bp, Homo sapien
tctgttctatatactttctctttca

SEQ ID NO: 4252525 - DNA, 25 bp, Homo sapien
ctgttctatatactttctctttcat

SEQ ID NO: 4252526 - DNA, 25 bp, Homo sapien
ctctgttctatatactttctctttc

SEQ ID NO: 4252527 - DNA, 25 bp, Homo sapien
tccagttcttccaccgaatatacta

SEQ ID NO: 4252528 - DNA, 25 bp, Homo sapien
cacaacttccacaactacgtcaatt

SEQ ID NO: 4252529 - DNA, 25 bp, Homo sapien
catcatctatcaattctaccacttc

SEQ ID NO: 4252530 - DNA, 25 bp, Homo sapien
gaatatactatgtcctccagctgca

SEQ ID NO: 4252531 - DNA, 25 bp, Homo sapien
gccgcgccctggccgtgtgagccca

SEQ ID NO: 4252532 - DNA, 25 bp, Homo sapien
caaatcgccccgcctcagggacccg

SEQ ID NO: 4252533 - DNA, 25 bp, Homo sapien
ccgcgccctggccgtgtgagcccat

SEQ ID NO: 4252534 - DNA, 25 bp, Homo sapien
aatgatcccaattcaccatgtccag

SEQ ID NO: 4252535 - DNA, 25 bp, Homo sapien
ccagtctccacagagtataacaagg

SEQ ID NO: 4252536 - DNA, 25 bp, Homo sapien
taatagctaggtggtcagtaataga

SEQ ID NO: 4252537 - DNA, 25 bp, Homo sapien
gaaatcttcctagactaaatgatcc

SEQ ID NO: 4252538 - DNA, 25 bp, Homo sapien
tccagtatattttctgaggatgctc

SEQ ID NO: 4252539 - DNA, 25 bp, Homo sapien
gaggatgctccagataccggagtat

SEQ ID NO: 4252540 - DNA, 25 bp, Homo sapien
tcatttaccattccagtatattttc

SEQ ID NO: 4252541 - DNA, 25 bp, Homo sapien
ccattccagtatattttctgaggat

SEQ ID NO: 4252542 - DNA, 25 bp, Homo sapien
tcattcattcgctggttctaaattg

SEQ ID NO: 4252543 - DNA, 25 bp, Homo sapien
taaattggcaaaataatgagcactt

SEQ ID NO: 4252544 - DNA, 25 bp, Homo sapien
cattcgctggttctaaattggcaaa

SEQ ID NO: 4252545 - DNA, 25 bp, Homo sapien
ttcattcgctggttctaaattggca

SEQ ID NO: 4252546 - DNA, 25 bp, Homo sapien
ccaaatggacatgagggtgtgactc

SEQ ID NO: 4252547 - DNA, 25 bp, Homo sapien
caaatggacatgagggtgtgactca

SEQ ID NO: 4252548 - DNA, 25 bp, Homo sapien
tgggatgagacagcctaaaacagga

SEQ ID NO: 4252549 - DNA, 25 bp, Homo sapien
tctctagcatagcttgtgactttgc

SEQ ID NO: 4252550 - DNA, 25 bp, Homo sapien
tgtgttatcaggaccttgcctgggc

SEQ ID NO: 4252551 - DNA, 25 bp, Homo sapien
gacttcttagattgtgttatcagga

SEQ ID NO: 4252552 - DNA, 25 bp, Homo sapien
ccccagcgagcagtggcaacgtgtt

SEQ ID NO: 4252553 - DNA, 25 bp, Homo sapien
ggcacgggatccactaggcaaagcc

SEQ ID NO: 4252554 - DNA, 25 bp, Homo sapien
gagaacttttaatgcctagctaaag

SEQ ID NO: 4252555 - DNA, 25 bp, Homo sapien
ccgcagagcgcagcttgggacctgc

SEQ ID NO: 4252556 - DNA, 25 bp, Homo sapien
taatagagataagtactgggttgca

SEQ ID NO: 4252557 - DNA, 25 bp, Homo sapien
tatagggtcccttccagcaacatct

SEQ ID NO: 4252558 - DNA, 25 bp, Homo sapien
taaaatcgctctacagtgggtgtgg

SEQ ID NO: 4252559 - DNA, 25 bp, Homo sapien
caacatctgccccttagccataaaa

SEQ ID NO: 4252560 - DNA, 25 bp, Homo sapien
cagctcattcgaaaaggcctctttg

SEQ ID NO: 4252561 - DNA, 25 bp, Homo sapien
tatttcagctcattcgaaaaggcct

SEQ ID NO: 4252562 - DNA, 25 bp, Homo sapien
gcctctttgggtaaattgttgtgaa

SEQ ID NO: 4252563 - DNA, 25 bp, Homo sapien
ggtaaattgttgtgaaatcgtaatg

SEQ ID NO: 4252564 - DNA, 25 bp, Homo sapien
atggcccttttatctgggggtgctt

SEQ ID NO: 4252565 - DNA, 25 bp, Homo sapien
tggagaaaggttgatactatgaaga

SEQ ID NO: 4252566 - DNA, 25 bp, Homo sapien
gagcaaaagaatgctctggatggcc

SEQ ID NO: 4252567 - DNA, 25 bp, Homo sapien
gaagatgctgagactgcctgttatg

SEQ ID NO: 4252568 - DNA, 25 bp, Homo sapien
acaaatgtaacactatttgaggcaa

SEQ ID NO: 4252569 - DNA, 25 bp, Homo sapien
tctctgaacattgccaaacgggagc

SEQ ID NO: 4252570 - DNA, 25 bp, Homo sapien
caagagaaagcaacgcggtttgtga

SEQ ID NO: 4252571 - DNA, 25 bp, Homo sapien
ctgaacattgccaaacgggagctcc

SEQ ID NO: 4252572 - DNA, 25 bp, Homo sapien
ccccgaatcctgagacgcagaaata

SEQ ID NO: 4252573 - DNA, 25 bp, Homo sapien
agggccacgtgaccaatgatcaggt

SEQ ID NO: 4252574 - DNA, 25 bp, Homo sapien
caacacgatatggattagggccacg

SEQ ID NO: 4252575 - DNA, 25 bp, Homo sapien
tgggcaacaacatatcacgcagcaa

SEQ ID NO: 4252576 - DNA, 25 bp, Homo sapien
catttcttatggctatgaaactgga

SEQ ID NO: 4252577 - DNA, 25 bp, Homo sapien
ctatgaaactggaaagtttgttgtt

SEQ ID NO: 4252578 - DNA, 25 bp, Homo sapien
gaaagcagcatttcttatggctatg

SEQ ID NO: 4252579 - DNA, 25 bp, Homo sapien
gcagcatttcttatggctatgaaac

SEQ ID NO: 4252580 - DNA, 25 bp, Homo sapien
aataagcacatagttaatgtctagg

SEQ ID NO: 4252581 - DNA, 25 bp, Homo sapien
agttaatgtctagggagaaaagcaa

SEQ ID NO: 4252582 - DNA, 25 bp, Homo sapien
cacatagttaatgtctagggagaaa

SEQ ID NO: 4252583 - DNA, 25 bp, Homo sapien
ataagcacatagttaatgtctaggg

SEQ ID NO: 4252584 - DNA, 25 bp, Homo sapien
gaatctcccaaagtggatagtgaag

SEQ ID NO: 4252585 - DNA, 25 bp, Homo sapien
cagaatctcccaaagtggatagtga

SEQ ID NO: 4252586 - DNA, 25 bp, Homo sapien
tctcccaaagtggatagtgaagtgt

SEQ ID NO: 4252587 - DNA, 25 bp, Homo sapien
cccaaagtggatagtgaagtgtgag

SEQ ID NO: 4252588 - DNA, 25 bp, Homo sapien
ccaatccctgcgacttccagggcag

SEQ ID NO: 4252589 - DNA, 25 bp, Homo sapien
gaaacccaatccctgcgacttccag

SEQ ID NO: 4252590 - DNA, 25 bp, Homo sapien
aacccaatccctgcgacttccaggg

SEQ ID NO: 4252591 - DNA, 25 bp, Homo sapien
aatccctgcgacttccagggcagca

SEQ ID NO: 4252592 - DNA, 25 bp, Homo sapien
accatgaattggtcattcctaaaaa

SEQ ID NO: 4252593 - DNA, 25 bp, Homo sapien
gcaacagataggctgctagattacg

SEQ ID NO: 4252594 - DNA, 25 bp, Homo sapien
acatggccaagataaagaccatgaa

SEQ ID NO: 4252595 - DNA, 25 bp, Homo sapien
gactgtgaacgacaattttatgaca

SEQ ID NO: 4252596 - DNA, 25 bp, Homo sapien
cagactgcttacaatttttggtggc

SEQ ID NO: 4252597 - DNA, 25 bp, Homo sapien
gaaagaataacattgtaaagccata

SEQ ID NO: 4252598 - DNA, 25 bp, Homo sapien
tggtaaatcatctgactggagatag

SEQ ID NO: 4252599 - DNA, 25 bp, Homo sapien
attaaattgtctgcgaatcgtatgg

SEQ ID NO: 4252600 - DNA, 25 bp, Homo sapien
ccagtcatggtggagcacgcctata

SEQ ID NO: 4252601 - DNA, 25 bp, Homo sapien
agccagtcatggtggagcacgccta

SEQ ID NO: 4252602 - DNA, 25 bp, Homo sapien
gtctcagctacttgggaggctgagg

SEQ ID NO: 4252603 - DNA, 25 bp, Homo sapien
gaggctgaggtgggagaatcgtttg

SEQ ID NO: 4252604 - DNA, 25 bp, Homo sapien
tgcacctgactagactgagagccag

SEQ ID NO: 4252605 - DNA, 25 bp, Homo sapien
gagccagtgtgaacatgggccccaa

SEQ ID NO: 4252606 - DNA, 25 bp, Homo sapien
tcggaataacaaggaacagccaagc

SEQ ID NO: 4252607 - DNA, 25 bp, Homo sapien
gaatggaagggtccaaatcttcatc

SEQ ID NO: 4252608 - DNA, 25 bp, Homo sapien
taaatcagctcactcacaagaaacg

SEQ ID NO: 4252609 - DNA, 25 bp, Homo sapien
gaaatcatatctgaccatctggcct

SEQ ID NO: 4252610 - DNA, 25 bp, Homo sapien
ttgcaaaaggtccactccaaaagga

SEQ ID NO: 4252611 - DNA, 25 bp, Homo sapien
cacaggtttgggtaggacacacata

SEQ ID NO: 4252612 - DNA, 25 bp, Homo sapien
tcttctttggttgcagtggcctcaa

SEQ ID NO: 4252613 - DNA, 25 bp, Homo sapien
gcatgcattcctgcatggcccggaa

SEQ ID NO: 4252614 - DNA, 25 bp, Homo sapien
tctgcttgttctgctggcttcttct

SEQ ID NO: 4252615 - DNA, 25 bp, Homo sapien
cctcaatgggagctgtttcttctgc

SEQ ID NO: 4252616 - DNA, 25 bp, Homo sapien
atctcctccgtgctatagtggaagc

SEQ ID NO: 4252617 - DNA, 25 bp, Homo sapien
cccttgatctcctccgtgctatagt

SEQ ID NO: 4252618 - DNA, 25 bp, Homo sapien
ttgatctcctccgtgctatagtgga

SEQ ID NO: 4252619 - DNA, 25 bp, Homo sapien
gatctcctccgtgctatagtggaag

SEQ ID NO: 4252620 - DNA, 25 bp, Homo sapien
cagatacgtactgcttttaataaca

SEQ ID NO: 4252621 - DNA, 25 bp, Homo sapien
aaaggcagatacgtactgcttttaa

SEQ ID NO: 4252622 - DNA, 25 bp, Homo sapien
ctaaaggcagatacgtactgctttt

SEQ ID NO: 4252623 - DNA, 25 bp, Homo sapien
ggcagatacgtactgcttttaataa

SEQ ID NO: 4252624 - DNA, 25 bp, Homo sapien
gagcagtcagggcaacaagtgaagg

SEQ ID NO: 4252625 - DNA, 25 bp, Homo sapien
taggagcagtcagggcaacaagtga

SEQ ID NO: 4252626 - DNA, 25 bp, Homo sapien
cagtcagggcaacaagtgaagggtc

SEQ ID NO: 4252627 - DNA, 25 bp, Homo sapien
ctaggagcagtcagggcaacaagtg

SEQ ID NO: 4252628 - DNA, 25 bp, Homo sapien
catgctcctcgtatggatcgttggg

SEQ ID NO: 4252629 - DNA, 25 bp, Homo sapien
gctcctaatcgtggccggaagaagg

SEQ ID NO: 4252630 - DNA, 25 bp, Homo sapien
tgaggaacactgcagccgttccact

SEQ ID NO: 4252631 - DNA, 25 bp, Homo sapien
gaagggtcataaggtgaggaacact

SEQ ID NO: 4252632 - DNA, 25 bp, Homo sapien
cacagtccaagaggccgggggacca

SEQ ID NO: 4252633 - DNA, 25 bp, Homo sapien
atactgccccgcaccaacatttgca

SEQ ID NO: 4252634 - DNA, 25 bp, Homo sapien
agaataatcgacagctgacactgag

SEQ ID NO: 4252635 - DNA, 25 bp, Homo sapien
cccgcaccaacatttgcacaagaat

SEQ ID NO: 4252636 - DNA, 25 bp, Homo sapien
tgcacaagaataatcgacagctgac

SEQ ID NO: 4252637 - DNA, 25 bp, Homo sapien
ttttcagtcaacagggacaggttta

SEQ ID NO: 4252638 - DNA, 25 bp, Homo sapien
tttcagtcaacagggacaggtttat

SEQ ID NO: 4252639 - DNA, 25 bp, Homo sapien
tcacagatgaatacgacacaggcat

SEQ ID NO: 4252640 - DNA, 25 bp, Homo sapien
ctccagctctgtggtagtacctggt

SEQ ID NO: 4252641 - DNA, 25 bp, Homo sapien
tctgtggtagtacctggtggtcaca

SEQ ID NO: 4252642 - DNA, 25 bp, Homo sapien
cctggtggtcacagatgaatacgac

SEQ ID NO: 4252643 - DNA, 25 bp, Homo sapien
gaggggaatagacattccagaagga

SEQ ID NO: 4252644 - DNA, 25 bp, Homo sapien
ggagggatcctacctttgtccctga

SEQ ID NO: 4252645 - DNA, 25 bp, Homo sapien
ggaatagacattccagaaggaacca

SEQ ID NO: 4252646 - DNA, 25 bp, Homo sapien
ggatcctacctttgtccctgacaaa

SEQ ID NO: 4252647 - DNA, 25 bp, Homo sapien
cgggctcctccgaagcccgcgcgga

SEQ ID NO: 4252648 - DNA, 25 bp, Homo sapien
cacctttacgccgtgacctccctct

SEQ ID NO: 4252649 - DNA, 25 bp, Homo sapien
gcagctgcacctttacgccgtgacc

SEQ ID NO: 4252650 - DNA, 25 bp, Homo sapien
gaccttgcagaagcggcggtggcgg

SEQ ID NO: 4252651 - DNA, 25 bp, Homo sapien
tgcgcaggcgcatcaatgaggtact

SEQ ID NO: 4252652 - DNA, 25 bp, Homo sapien
tgaggtactgcaatgtcccggaccg

SEQ ID NO: 4252653 - DNA, 25 bp, Homo sapien
ccatggccgcgaatgtgagtatccc

SEQ ID NO: 4252654 - DNA, 25 bp, Homo sapien
tatagtttccaggacgtctcgccgc

SEQ ID NO: 4252655 - DNA, 25 bp, Homo sapien
ggatgctttcggaaaacacgctgta

SEQ ID NO: 4252656 - DNA, 25 bp, Homo sapien
taaataactgccgacttcaaaagtg

SEQ ID NO: 4252657 - DNA, 25 bp, Homo sapien
caagatgacttatctgggtttagga

SEQ ID NO: 4252658 - DNA, 25 bp, Homo sapien
ctgtaatcatctctattggcctggg

SEQ ID NO: 4252659 - DNA, 25 bp, Homo sapien
taaataatgcctccttgtagctgac

SEQ ID NO: 4252660 - DNA, 25 bp, Homo sapien
acacgggagacctgagttctgagcc

SEQ ID NO: 4252661 - DNA, 25 bp, Homo sapien
tgagacaaagcccatagaatgcctg

SEQ ID NO: 4252662 - DNA, 25 bp, Homo sapien
cagaggcatcctgagttgacacggg

SEQ ID NO: 4252663 - DNA, 25 bp, Homo sapien
aggagtccagcctgcgcaagacagt

SEQ ID NO: 4252664 - DNA, 25 bp, Homo sapien
caggagtccagcctgcgcaagacag

SEQ ID NO: 4252665 - DNA, 25 bp, Homo sapien
ctgtcaccacaaaatgttacttgga

SEQ ID NO: 4252666 - DNA, 25 bp, Homo sapien
tagctttttttaggcttctgtcacc

SEQ ID NO: 4252667 - DNA, 25 bp, Homo sapien
cagatgacctgtacttctctgctct

SEQ ID NO: 4252668 - DNA, 25 bp, Homo sapien
gttacttggaaaactagatcccagc

SEQ ID NO: 4252669 - DNA, 25 bp, Homo sapien
gcaaccgaggcgagtgaacttgtcg

SEQ ID NO: 4252670 - DNA, 25 bp, Homo sapien
gaagaaacgatcagcgcattcacgg

SEQ ID NO: 4252671 - DNA, 25 bp, Homo sapien
aacttgtcggacagatgaagactct

SEQ ID NO: 4252672 - DNA, 25 bp, Homo sapien
tgaagactctaactggaagaaacga

SEQ ID NO: 4252673 - DNA, 25 bp, Homo sapien
tgggtgcccctctagtgggcgctca

SEQ ID NO: 4252674 - DNA, 25 bp, Homo sapien
gagtatctcctagcaaagtgttctg

SEQ ID NO: 4252675 - DNA, 25 bp, Homo sapien
gaaagaacaggtctaggaggcagaa

SEQ ID NO: 4252676 - DNA, 25 bp, Homo sapien
aaaagctttgaaggcttcaccctgg

SEQ ID NO: 4252677 - DNA, 25 bp, Homo sapien
gcagccagtatcctggccgcttctg

SEQ ID NO: 4252678 - DNA, 25 bp, Homo sapien
aggaggcagccagtatcctggccgc

SEQ ID NO: 4252679 - DNA, 25 bp, Homo sapien
tcatcttctcggttttgaggccagg

SEQ ID NO: 4252680 - DNA, 25 bp, Homo sapien
agctgctcaaatgggaacaggtggg

SEQ ID NO: 4252681 - DNA, 25 bp, Homo sapien
caagcggccttagagacagaagact

SEQ ID NO: 4252682 - DNA, 25 bp, Homo sapien
gtgttcagcgccaaatcagacccat

SEQ ID NO: 4252683 - DNA, 25 bp, Homo sapien
taccatgtaactgggcctagggtcc

SEQ ID NO: 4252684 - DNA, 25 bp, Homo sapien
aaagctatccctgacttgaggctgg

SEQ ID NO: 4252685 - DNA, 25 bp, Homo sapien
gcctctccctgatgagcagaccttt

SEQ ID NO: 4252686 - DNA, 25 bp, Homo sapien
ttccagttccctagagcccgcttct

SEQ ID NO: 4252687 - DNA, 25 bp, Homo sapien
cttgggcccgtagcgacgcttcagc

SEQ ID NO: 4252688 - DNA, 25 bp, Homo sapien
caacttccagttccctagagcccgc

SEQ ID NO: 4252689 - DNA, 25 bp, Homo sapien
ctgcaggcaaaaatgaagtgggaga

SEQ ID NO: 4252690 - DNA, 25 bp, Homo sapien
gcaggcaaaaatgaagtgggagaaa

SEQ ID NO: 4252691 - DNA, 25 bp, Homo sapien
aggcaaaaatgaagtgggagaaaag

SEQ ID NO: 4252692 - DNA, 25 bp, Homo sapien
tgcaggcaaaaatgaagtgggagaa

SEQ ID NO: 4252693 - DNA, 25 bp, Homo sapien
tggacacaggcaattcaagacagag

SEQ ID NO: 4252694 - DNA, 25 bp, Homo sapien
aggaagaggccacccgctgagtgtt

SEQ ID NO: 4252695 - DNA, 25 bp, Homo sapien
tgcctgccatgatgtcagagagggc

SEQ ID NO: 4252696 - DNA, 25 bp, Homo sapien
tgagtgttgcttcccgcttctgctg

SEQ ID NO: 4252697 - DNA, 25 bp, Homo sapien
gagcacgtctttgaattcctcgcag

SEQ ID NO: 4252698 - DNA, 25 bp, Homo sapien
aggcagtcaggagcacgtctttgaa

SEQ ID NO: 4252699 - DNA, 25 bp, Homo sapien
ctcgcagacgatgtatccatcagtc

SEQ ID NO: 4252700 - DNA, 25 bp, Homo sapien
tctttgaattcctcgcagacgatgt

SEQ ID NO: 4252701 - DNA, 25 bp, Homo sapien
agaattggtaaagcactgactttgc

SEQ ID NO: 4252702 - DNA, 25 bp, Homo sapien
ctctggagggaagccagaattggta

SEQ ID NO: 4252703 - DNA, 25 bp, Homo sapien
tgactttgcaaatccagtgtaacat

SEQ ID NO: 4252704 - DNA, 25 bp, Homo sapien
cagtttcattggctccgttccctct

SEQ ID NO: 4252705 - DNA, 25 bp, Homo sapien
tgtttagcctccatcgaaggcccct

SEQ ID NO: 4252706 - DNA, 25 bp, Homo sapien
tgtgtttagcctccatcgaaggccc

SEQ ID NO: 4252707 - DNA, 25 bp, Homo sapien
catccctgtgtttagcctccatcga

SEQ ID NO: 4252708 - DNA, 25 bp, Homo sapien
tccctgtgtttagcctccatcgaag

SEQ ID NO: 4252709 - DNA, 25 bp, Homo sapien
gcggtgtagattgggcaggttcagc

SEQ ID NO: 4252710 - DNA, 25 bp, Homo sapien
agtagccgccatggaaatcaaagcc

SEQ ID NO: 4252711 - DNA, 25 bp, Homo sapien
ggcctggacacagtcgatgtccagc

SEQ ID NO: 4252712 - DNA, 25 bp, Homo sapien
cgatgtccagcttgcgggccacgcg

SEQ ID NO: 4252713 - DNA, 25 bp, Homo sapien
tccacggccactgggggctgatact

SEQ ID NO: 4252714 - DNA, 25 bp, Homo sapien
cctctgtctgccagtagccaaacag

SEQ ID NO: 4252715 - DNA, 25 bp, Homo sapien
tcgggctttccgagcacggttagaa

SEQ ID NO: 4252716 - DNA, 25 bp, Homo sapien
gggctcagcaagtcgggctttccga

SEQ ID NO: 4252717 - DNA, 25 bp, Homo sapien
tatggaacattctctgtcccagaca

SEQ ID NO: 4252718 - DNA, 25 bp, Homo sapien
cagacactattctcggtgttttttg

SEQ ID NO: 4252719 - DNA, 25 bp, Homo sapien
ccccttttcttactacaagcactag

SEQ ID NO: 4252720 - DNA, 25 bp, Homo sapien
ctacaagcactagctaacatttatg

SEQ ID NO: 4252721 - DNA, 25 bp, Homo sapien
gtcacacagctcgtaagggccagag

SEQ ID NO: 4252722 - DNA, 25 bp, Homo sapien
tacaattcaggtaactgtccatcag

SEQ ID NO: 4252723 - DNA, 25 bp, Homo sapien
tgtccatcagtagagcctgtgtctc

SEQ ID NO: 4252724 - DNA, 25 bp, Homo sapien
tataacctatgtctgctcacacgcc

SEQ ID NO: 4252725 - DNA, 25 bp, Homo sapien
gaagatccatttcttacaaatgtct

SEQ ID NO: 4252726 - DNA, 25 bp, Homo sapien
aggagtctgaggcctactttttggc

SEQ ID NO: 4252727 - DNA, 25 bp, Homo sapien
ctcaagccgggaaagtgagacattt

SEQ ID NO: 4252728 - DNA, 25 bp, Homo sapien
tctcccgctcagctacaggcctgtg

SEQ ID NO: 4252729 - DNA, 25 bp, Homo sapien
ttcagccacgtgtccctggaatgca

SEQ ID NO: 4252730 - DNA, 25 bp, Homo sapien
ggaatgcagagtgtgcacacaatcc

SEQ ID NO: 4252731 - DNA, 25 bp, Homo sapien
cttcagccacgtgtccctggaatgc

SEQ ID NO: 4252732 - DNA, 25 bp, Homo sapien
tcttcagccacgtgtccctggaatg

SEQ ID NO: 4252733 - DNA, 25 bp, Homo sapien
tgtgctaggcaaacagccttgaacg

SEQ ID NO: 4252734 - DNA, 25 bp, Homo sapien
ccaacacaggacacaaaggtaactc

SEQ ID NO: 4252735 - DNA, 25 bp, Homo sapien
ccccactgcgggaatgcgggacagt

SEQ ID NO: 4252736 - DNA, 25 bp, Homo sapien
gccttgaacgtggactgcctgtctt

SEQ ID NO: 4252737 - DNA, 25 bp, Homo sapien
gatccaacctcatcctaagtcaagg

SEQ ID NO: 4252738 - DNA, 25 bp, Homo sapien
tagacagctttacccaactgtaggc

SEQ ID NO: 4252739 - DNA, 25 bp, Homo sapien
acatgaggtccggttaggttcggca

SEQ ID NO: 4252740 - DNA, 25 bp, Homo sapien
tgttctcagcacgtttaagggaggc

SEQ ID NO: 4252741 - DNA, 25 bp, Homo sapien
cggaacatctttgactgcccagagg

SEQ ID NO: 4252742 - DNA, 25 bp, Homo sapien
tcttcagacaggagcgggtaaaaaa

SEQ ID NO: 4252743 - DNA, 25 bp, Homo sapien
tgtcatggtcgtggtcttcagacag

SEQ ID NO: 4252744 - DNA, 25 bp, Homo sapien
ccactgggggcggaacatctttgac

SEQ ID NO: 4252745 - DNA, 25 bp, Homo sapien
tgtgcttaatgctgtaggctgtaca

SEQ ID NO: 4252746 - DNA, 25 bp, Homo sapien
gattccacctacatgggtccctata

SEQ ID NO: 4252747 - DNA, 25 bp, Homo sapien
tgtgactataaataccgcatgattc

SEQ ID NO: 4252748 - DNA, 25 bp, Homo sapien
cctatagtaggcacactcagagaca

SEQ ID NO: 4252749 - DNA, 25 bp, Homo sapien
taaatatgcacctctaatgcttcct

SEQ ID NO: 4252750 - DNA, 25 bp, Homo sapien
gactacccgtacatacccataagag

SEQ ID NO: 4252751 - DNA, 25 bp, Homo sapien
tgcctctggacgacgcctgcattct

SEQ ID NO: 4252752 - DNA, 25 bp, Homo sapien
tctgtcactgacatggtgcctctgg

SEQ ID NO: 4252753 - DNA, 25 bp, Homo sapien
gcagagccctgaagagagggtccag

SEQ ID NO: 4252754 - DNA, 25 bp, Homo sapien
aaacagaaagctccaagacagggca

SEQ ID NO: 4252755 - DNA, 25 bp, Homo sapien
cgacatcaaacagaaagctccaaga

SEQ ID NO: 4252756 - DNA, 25 bp, Homo sapien
gagccctgaagagagggtccagcat

SEQ ID NO: 4252757 - DNA, 25 bp, Homo sapien
gtccagtcagatgagctcccatcag

SEQ ID NO: 4252758 - DNA, 25 bp, Homo sapien
cccgagaatgctgtccagtcagatg

SEQ ID NO: 4252759 - DNA, 25 bp, Homo sapien
agcccgagaatgctgtccagtcaga

SEQ ID NO: 4252760 - DNA, 25 bp, Homo sapien
tcagcccgagaatgctgtccagtca

SEQ ID NO: 4252761 - DNA, 25 bp, Homo sapien
atacccaaggatggcgagctgtctc

SEQ ID NO: 4252762 - DNA, 25 bp, Homo sapien
tcatatttcaggagatgccgcttca

SEQ ID NO: 4252763 - DNA, 25 bp, Homo sapien
cgagctgtctcgggatagatggcct

SEQ ID NO: 4252764 - DNA, 25 bp, Homo sapien
gagtagaccgcttctccacgacaat

SEQ ID NO: 4252765 - DNA, 25 bp, Homo sapien
ggttcttatataagccaatggcagt

SEQ ID NO: 4252766 - DNA, 25 bp, Homo sapien
cttatataagccaatggcagtgggc

SEQ ID NO: 4252767 - DNA, 25 bp, Homo sapien
gttcttatataagccaatggcagtg

SEQ ID NO: 4252768 - DNA, 25 bp, Homo sapien
tcttatataagccaatggcagtggg

SEQ ID NO: 4252769 - DNA, 25 bp, Homo sapien
tctggtatggtctcaaggtctcggc

SEQ ID NO: 4252770 - DNA, 25 bp, Homo sapien
gactgggtcgtacctctgtgtgaca

SEQ ID NO: 4252771 - DNA, 25 bp, Homo sapien
tgtgtgacatctcggacccagccgt

SEQ ID NO: 4252772 - DNA, 25 bp, Homo sapien
catgggcttggtggcgtacttgtaa

SEQ ID NO: 4252773 - DNA, 25 bp, Homo sapien
cacgatgggtcctggaggcactctt

SEQ ID NO: 4252774 - DNA, 25 bp, Homo sapien
ttctcaccatcgctgcacattttct

SEQ ID NO: 4252775 - DNA, 25 bp, Homo sapien
tccttacgatggctcccacgatggg

SEQ ID NO: 4252776 - DNA, 25 bp, Homo sapien
gatgccgctggcaagcttgggtcct

SEQ ID NO: 4252777 - DNA, 25 bp, Homo sapien
ctgaggatccgggggctttcctctg

SEQ ID NO: 4252778 - DNA, 25 bp, Homo sapien
ttggagggccaggttcggaatcctc

SEQ ID NO: 4252779 - DNA, 25 bp, Homo sapien
ggagggccaggttcggaatcctcat

SEQ ID NO: 4252780 - DNA, 25 bp, Homo sapien
tggagggccaggttcggaatcctca

SEQ ID NO: 4252781 - DNA, 25 bp, Homo sapien
agctcaaaatcagagccgctgccag

SEQ ID NO: 4252782 - DNA, 25 bp, Homo sapien
ccgctgccagcctcatcactcccac

SEQ ID NO: 4252783 - DNA, 25 bp, Homo sapien
cgagagctcaaaatcagagccgctg

SEQ ID NO: 4252784 - DNA, 25 bp, Homo sapien
tgcgagagctcaaaatcagagccgc

SEQ ID NO: 4252785 - DNA, 25 bp, Homo sapien
ctcctctttataagacaccctggag

SEQ ID NO: 4252786 - DNA, 25 bp, Homo sapien
tctcctctttataagacaccctgga

SEQ ID NO: 4252787 - DNA, 25 bp, Homo sapien
tctttataagacaccctggaggcca

SEQ ID NO: 4252788 - DNA, 25 bp, Homo sapien
ctttataagacaccctggaggccac

SEQ ID NO: 4252789 - DNA, 25 bp, Homo sapien
ccggccatgcggacgtcgctgggtt

SEQ ID NO: 4252790 - DNA, 25 bp, Homo sapien
gcggacgtcgctgggttgccttctc

SEQ ID NO: 4252791 - DNA, 25 bp, Homo sapien
ccatgcggacgtcgctgggttgcct

SEQ ID NO: 4252792 - DNA, 25 bp, Homo sapien
gccgctcccggccatgcggacgtcg

SEQ ID NO: 4252793 - DNA, 25 bp, Homo sapien
gcaggtgcccttagcaaaggtttcc

SEQ ID NO: 4252794 - DNA, 25 bp, Homo sapien
tggaggagggcttgctccgtttctt

SEQ ID NO: 4252795 - DNA, 25 bp, Homo sapien
cgcagtcaatctttccttggaaggt

SEQ ID NO: 4252796 - DNA, 25 bp, Homo sapien
tttctagaacttggctggaagtttc

SEQ ID NO: 4252797 - DNA, 25 bp, Homo sapien
gacaataccagccgggtcaagagct

SEQ ID NO: 4252798 - DNA, 25 bp, Homo sapien
ctgacttcagaggaattggctgtag

SEQ ID NO: 4252799 - DNA, 25 bp, Homo sapien
cagaggaattggctgtagagacaat

SEQ ID NO: 4252800 - DNA, 25 bp, Homo sapien
aattggctgtagagacaataccagc

SEQ ID NO: 4252801 - DNA, 25 bp, Homo sapien
gtaataacagatcgagtcagaactc

SEQ ID NO: 4252802 - DNA, 25 bp, Homo sapien
tagctgagtgacttccctaagcctg

SEQ ID NO: 4252803 - DNA, 25 bp, Homo sapien
catctagaataatccctgcctcggc

SEQ ID NO: 4252804 - DNA, 25 bp, Homo sapien
cacaggagcacaggtccagaagtct

SEQ ID NO: 4252805 - DNA, 25 bp, Homo sapien
gaggcatcatgtagctattctgggc

SEQ ID NO: 4252806 - DNA, 25 bp, Homo sapien
tggtacaccacaactagaggcgata

SEQ ID NO: 4252807 - DNA, 25 bp, Homo sapien
ggtagtgtcggtaacacacctggaa

SEQ ID NO: 4252808 - DNA, 25 bp, Homo sapien
taaaaaacagtgatccgggaggatc

SEQ ID NO: 4252809 - DNA, 25 bp, Homo sapien
ggaccaattcctcatcatctcgagc

SEQ ID NO: 4252810 - DNA, 25 bp, Homo sapien
tctcgagcagagtaaatagcaaatc

SEQ ID NO: 4252811 - DNA, 25 bp, Homo sapien
aatctcctttccaatgtagtctgca

SEQ ID NO: 4252812 - DNA, 25 bp, Homo sapien
caggttatcttgttcactggctgaa

SEQ ID NO: 4252813 - DNA, 25 bp, Homo sapien
aggtgtccacatctcgaggcagcac

SEQ ID NO: 4252814 - DNA, 25 bp, Homo sapien
tgcagatgttatttcgatagaagcc

SEQ ID NO: 4252815 - DNA, 25 bp, Homo sapien
cacttcaccaggtttgagaggtagt

SEQ ID NO: 4252816 - DNA, 25 bp, Homo sapien
gaagccatttgctagcaggcagaga

SEQ ID NO: 4252817 - DNA, 25 bp, Homo sapien
tgtcctcatggacccctttattgaa

SEQ ID NO: 4252818 - DNA, 25 bp, Homo sapien
tccgaagatatgtctcaaactccag

SEQ ID NO: 4252819 - DNA, 25 bp, Homo sapien
tgtgtcctcatggacccctttattg

SEQ ID NO: 4252820 - DNA, 25 bp, Homo sapien
cgtttcatcgccctccgaagatatg

SEQ ID NO: 4252821 - DNA, 25 bp, Homo sapien
gcctgctctggcgtttcaatctcta

SEQ ID NO: 4252822 - DNA, 25 bp, Homo sapien
gcttcacaggcagaagagatcgaga

SEQ ID NO: 4252823 - DNA, 25 bp, Homo sapien
agatcgagagaaggctgtactttct

SEQ ID NO: 4252824 - DNA, 25 bp, Homo sapien
tgtactttctctcacgtcacccagc

SEQ ID NO: 4252825 - DNA, 25 bp, Homo sapien
cttcaacctcttcccaatcattttc

SEQ ID NO: 4252826 - DNA, 25 bp, Homo sapien
caacctcttcccaatcattttcact

SEQ ID NO: 4252827 - DNA, 25 bp, Homo sapien
actttcttcctcttcttcattgctg

SEQ ID NO: 4252828 - DNA, 25 bp, Homo sapien
ctttcttcctcttcttcattgctgt

SEQ ID NO: 4252829 - DNA, 25 bp, Homo sapien
ggtgtgccttcttgaggtcacttgg

SEQ ID NO: 4252830 - DNA, 25 bp, Homo sapien
gtgccttcttgaggtcacttggaaa

SEQ ID NO: 4252831 - DNA, 25 bp, Homo sapien
cagatggtgtgccttcttgaggtca

SEQ ID NO: 4252832 - DNA, 25 bp, Homo sapien
cctctcttcagatggtgtgccttct

SEQ ID NO: 4252833 - DNA, 25 bp, Homo sapien
tcgctgagggcttcatcctttataa

SEQ ID NO: 4252834 - DNA, 25 bp, Homo sapien
cagatttaacagtcaccttggccac

SEQ ID NO: 4252835 - DNA, 25 bp, Homo sapien
tctttccttgtgaaactttggagag

SEQ ID NO: 4252836 - DNA, 25 bp, Homo sapien
ttcttttttgctggaccatctgctg

SEQ ID NO: 4252837 - DNA, 25 bp, Homo sapien
cactcttgaggctgaactgactgga

SEQ ID NO: 4252838 - DNA, 25 bp, Homo sapien
gttatcattcgggagtcagcacact

SEQ ID NO: 4252839 - DNA, 25 bp, Homo sapien
tggaactctgggtgagactcagctg

SEQ ID NO: 4252840 - DNA, 25 bp, Homo sapien
caataaggagggtatctggcaagga

SEQ ID NO: 4252841 - DNA, 25 bp, Homo sapien
tttctggctgcgcagttcgcgtccc

SEQ ID NO: 4252842 - DNA, 25 bp, Homo sapien
tggccttggatttctggctgcgcag

SEQ ID NO: 4252843 - DNA, 25 bp, Homo sapien
gctcttggccttggatttctggctg

SEQ ID NO: 4252844 - DNA, 25 bp, Homo sapien
tggatttctggctgcgcagttcgcg

SEQ ID NO: 4252845 - DNA, 25 bp, Homo sapien
tgcttgtctgggcaaattccacttc

SEQ ID NO: 4252846 - DNA, 25 bp, Homo sapien
caaattccacttcgcgagtgacgca

SEQ ID NO: 4252847 - DNA, 25 bp, Homo sapien
tctgggcaaattccacttcgcgagt

SEQ ID NO: 4252848 - DNA, 25 bp, Homo sapien
ggccgcgatgcgctagaacgccggc

SEQ ID NO: 4252849 - DNA, 25 bp, Homo sapien
tctgtacatcttccagagtggccat

SEQ ID NO: 4252850 - DNA, 25 bp, Homo sapien
tgccttctgtacatcttccagagtg

SEQ ID NO: 4252851 - DNA, 25 bp, Homo sapien
ctggcccgcagcctctctgccttct

SEQ ID NO: 4252852 - DNA, 25 bp, Homo sapien
cgcctccaggctggcccgcagcctc

SEQ ID NO: 4252853 - DNA, 25 bp, Homo sapien
agtcaccggggatgccatggcttag

SEQ ID NO: 4252854 - DNA, 25 bp, Homo sapien
gcctgacagtgagatcgcagctcac

SEQ ID NO: 4252855 - DNA, 25 bp, Homo sapien
agaggcctgacagtgagatcgcagc

SEQ ID NO: 4252856 - DNA, 25 bp, Homo sapien
gaggcctgacagtgagatcgcagct

SEQ ID NO: 4252857 - DNA, 25 bp, Homo sapien
gagtccagacacaggaggatcagct

SEQ ID NO: 4252858 - DNA, 25 bp, Homo sapien
cagtggagtccagacacaggaggat

SEQ ID NO: 4252859 - DNA, 25 bp, Homo sapien
gacacaggaggatcagcttcagagg

SEQ ID NO: 4252860 - DNA, 25 bp, Homo sapien
ccagacacaggaggatcagcttcag

SEQ ID NO: 4252861 - DNA, 25 bp, Homo sapien
gggcagagtgtgctggaccacagag

SEQ ID NO: 4252862 - DNA, 25 bp, Homo sapien
tgcagctggagtccctgcagctggg

SEQ ID NO: 4252863 - DNA, 25 bp, Homo sapien
cagctgggcagagtgtgctggacca

SEQ ID NO: 4252864 - DNA, 25 bp, Homo sapien
gctgggcagagtgtgctggaccaca

SEQ ID NO: 4252865 - DNA, 25 bp, Homo sapien
gagcgtgcactgagcagaaggcaca

SEQ ID NO: 4252866 - DNA, 25 bp, Homo sapien
tatttctgaggcatgatgcggacag

SEQ ID NO: 4252867 - DNA, 25 bp, Homo sapien
gatatattgtaacagtgtgtgtgcc

SEQ ID NO: 4252868 - DNA, 25 bp, Homo sapien
tgctgagggtaagggaccttgccac

SEQ ID NO: 4252869 - DNA, 25 bp, Homo sapien
cagagaaacgtatgtcctccccaac

SEQ ID NO: 4252870 - DNA, 25 bp, Homo sapien
atctttggcagagaaacgtatgtcc

SEQ ID NO: 4252871 - DNA, 25 bp, Homo sapien
gtggcctggtgccaaaggcttctgc

SEQ ID NO: 4252872 - DNA, 25 bp, Homo sapien
ttggcagagaaacgtatgtcctccc

SEQ ID NO: 4252873 - DNA, 25 bp, Homo sapien
tcaagaacgttcaagcagattgccc

SEQ ID NO: 4252874 - DNA, 25 bp, Homo sapien
gacacagagagagcaaccggtttgc

SEQ ID NO: 4252875 - DNA, 25 bp, Homo sapien
tcagaggagccacttgaagtcagtt

SEQ ID NO: 4252876 - DNA, 25 bp, Homo sapien
cacacccttggacgttagaactgca

SEQ ID NO: 4252877 - DNA, 25 bp, Homo sapien
ggcacatagcagatcctgcataaaa

SEQ ID NO: 4252878 - DNA, 25 bp, Homo sapien
taaaagctaccattcagcctctgct

SEQ ID NO: 4252879 - DNA, 25 bp, Homo sapien
tctgctcattgcaagaatccttatc

SEQ ID NO: 4252880 - DNA, 25 bp, Homo sapien
gaatccttatccattatccccaact

SEQ ID NO: 4252881 - DNA, 25 bp, Homo sapien
gcatcttcagcacttgatggacatg

SEQ ID NO: 4252882 - DNA, 25 bp, Homo sapien
ggtgataagtttgaacctcctgagg

SEQ ID NO: 4252883 - DNA, 25 bp, Homo sapien
tgtttcctgagagtagccattccat

SEQ ID NO: 4252884 - DNA, 25 bp, Homo sapien
tagttgatcccaggctagctaagca

SEQ ID NO: 4252885 - DNA, 25 bp, Homo sapien
catcaatagtgatcctgtttagaga

SEQ ID NO: 4252886 - DNA, 25 bp, Homo sapien
ctaacttccacggatgctgactgta

SEQ ID NO: 4252887 - DNA, 25 bp, Homo sapien
tccaactccgagttcacatcaatag

SEQ ID NO: 4252888 - DNA, 25 bp, Homo sapien
caatagtgatcctgtttagagagaa

SEQ ID NO: 4252889 - DNA, 25 bp, Homo sapien
cgtcgcccgcgcagagccgtgagaa

SEQ ID NO: 4252890 - DNA, 25 bp, Homo sapien
agccgtgagaacacccgggaagcgc

SEQ ID NO: 4252891 - DNA, 25 bp, Homo sapien
cgcgcagagccgtgagaacacccgg

SEQ ID NO: 4252892 - DNA, 25 bp, Homo sapien
aacacccgggaagcgcgcaggctct

SEQ ID NO: 4252893 - DNA, 25 bp, Homo sapien
gacaccggttcctttgcccagaggc

SEQ ID NO: 4252894 - DNA, 25 bp, Homo sapien
ttcctttgcccagaggcagccgctg

SEQ ID NO: 4252895 - DNA, 25 bp, Homo sapien
ctgtgagcccgggacaccggttcct

SEQ ID NO: 4252896 - DNA, 25 bp, Homo sapien
gccgctgctgctggttgtcgtgtgt

SEQ ID NO: 4252897 - DNA, 25 bp, Homo sapien
gcagaggaagacacgccagacagga

SEQ ID NO: 4252898 - DNA, 25 bp, Homo sapien
gggcagaggaagacacgccagacag

SEQ ID NO: 4252899 - DNA, 25 bp, Homo sapien
agaggaagacacgccagacaggaag

SEQ ID NO: 4252900 - DNA, 25 bp, Homo sapien
cagaggaagacacgccagacaggaa

SEQ ID NO: 4252901 - DNA, 25 bp, Homo sapien
agcttcctagtccacagcctgagga

SEQ ID NO: 4252902 - DNA, 25 bp, Homo sapien
tggcacccaggcctcccacctgcag

SEQ ID NO: 4252903 - DNA, 25 bp, Homo sapien
agcctggcacccaggcctcccacct

SEQ ID NO: 4252904 - DNA, 25 bp, Homo sapien
ccacctgcagcaggacacggggcat

SEQ ID NO: 4252905 - DNA, 25 bp, Homo sapien
gtggcagtgaccacttccagcctgg

SEQ ID NO: 4252906 - DNA, 25 bp, Homo sapien
ctgggaactgcagagtagtggaaac

SEQ ID NO: 4252907 - DNA, 25 bp, Homo sapien
actgggaactgcagagtagtggaaa

SEQ ID NO: 4252908 - DNA, 25 bp, Homo sapien
tgggaactgcagagtagtggaaaca

SEQ ID NO: 4252909 - DNA, 25 bp, Homo sapien
gggaactgcagagtagtggaaacac

SEQ ID NO: 4252910 - DNA, 25 bp, Homo sapien
tctgaatcccgttgctgctgtggag

SEQ ID NO: 4252911 - DNA, 25 bp, Homo sapien
ctctgaatcccgttgctgctgtgga

SEQ ID NO: 4252912 - DNA, 25 bp, Homo sapien
tgaatcccgttgctgctgtggagtt

SEQ ID NO: 4252913 - DNA, 25 bp, Homo sapien
ctgaatcccgttgctgctgtggagt

SEQ ID NO: 4252914 - DNA, 25 bp, Homo sapien
tgaaggcaccgccacgatgctgaca

SEQ ID NO: 4252915 - DNA, 25 bp, Homo sapien
gcaccgccacgatgctgacacgctg

SEQ ID NO: 4252916 - DNA, 25 bp, Homo sapien
aaggcaccgccacgatgctgacacg

SEQ ID NO: 4252917 - DNA, 25 bp, Homo sapien
actgaaggcaccgccacgatgctga

SEQ ID NO: 4252918 - DNA, 25 bp, Homo sapien
aaagacaattgatctctgcacacaa

SEQ ID NO: 4252919 - DNA, 25 bp, Homo sapien
tccttgatcctggtagtcacattca

SEQ ID NO: 4252920 - DNA, 25 bp, Homo sapien
acatggataaaccttcaggctatta

SEQ ID NO: 4252921 - DNA, 25 bp, Homo sapien
caactggtatgaagttccttgatcc

SEQ ID NO: 4252922 - DNA, 25 bp, Homo sapien
cagcaacggtcacagtcctcaaggt

SEQ ID NO: 4252923 - DNA, 25 bp, Homo sapien
caatgaaacgggaagcagcacagat

SEQ ID NO: 4252924 - DNA, 25 bp, Homo sapien
tccatttacaggaacaccactcagc

SEQ ID NO: 4252925 - DNA, 25 bp, Homo sapien
cactcagcaatgaaacgggaagcag

SEQ ID NO: 4252926 - DNA, 25 bp, Homo sapien
aagataattatagggccaggcctgg

SEQ ID NO: 4252927 - DNA, 25 bp, Homo sapien
taggttggtacagccatgagtgccc

SEQ ID NO: 4252928 - DNA, 25 bp, Homo sapien
tgacttgcccgagtaggagatcgcc

SEQ ID NO: 4252929 - DNA, 25 bp, Homo sapien
tcagatagttcgcactccctgggct

SEQ ID NO: 4252930 - DNA, 25 bp, Homo sapien
ctgcagtgtcctgtccttggaagca

SEQ ID NO: 4252931 - DNA, 25 bp, Homo sapien
ttgatgacttctgggctggtcagct

SEQ ID NO: 4252932 - DNA, 25 bp, Homo sapien
tggtcagctcttgtccaaccctggc

SEQ ID NO: 4252933 - DNA, 25 bp, Homo sapien
caaggccagtgtggccttgatgact

SEQ ID NO: 4252934 - DNA, 25 bp, Homo sapien
tgctgaacctgggtcaaggccagtg

SEQ ID NO: 4252935 - DNA, 25 bp, Homo sapien
ccagggccctggtcagaggcagcat

SEQ ID NO: 4252936 - DNA, 25 bp, Homo sapien
ccaagtggccgtgctatgacacaaa

SEQ ID NO: 4252937 - DNA, 25 bp, Homo sapien
cctggccaagagacccattgggtgc

SEQ ID NO: 4252938 - DNA, 25 bp, Homo sapien
tgttcagttgccagtgattgatccc

SEQ ID NO: 4252939 - DNA, 25 bp, Homo sapien
ttaatataacgagcctgagccctgg

SEQ ID NO: 4252940 - DNA, 25 bp, Homo sapien
tcctccacgcagttagagtgggctg

SEQ ID NO: 4252941 - DNA, 25 bp, Homo sapien
tgggagcatcctccacgcagttaga

SEQ ID NO: 4252942 - DNA, 25 bp, Homo sapien
ccacgcagttagagtgggctgttga

SEQ ID NO: 4252943 - DNA, 25 bp, Homo sapien
gagcatcctccacgcagttagagtg

SEQ ID NO: 4252944 - DNA, 25 bp, Homo sapien
taaggggggtagatactacacatgt

SEQ ID NO: 4252945 - DNA, 25 bp, Homo sapien
tggaccattccggaggaagttgtaa

SEQ ID NO: 4252946 - DNA, 25 bp, Homo sapien
ccagctccgagactgctggggtctc

SEQ ID NO: 4252947 - DNA, 25 bp, Homo sapien
aagagaacaactggaccattccgga

SEQ ID NO: 4252948 - DNA, 25 bp, Homo sapien
ggaaggacagtgggaccatcctcag

SEQ ID NO: 4252949 - DNA, 25 bp, Homo sapien
cagtcccgcttcccttgctgtcggc

SEQ ID NO: 4252950 - DNA, 25 bp, Homo sapien
cgcttcccttgctgtcggcgttcat

SEQ ID NO: 4252951 - DNA, 25 bp, Homo sapien
tcccgcttcccttgctgtcggcgtt

SEQ ID NO: 4252952 - DNA, 25 bp, Homo sapien
agtcccgcttcccttgctgtcggcg

SEQ ID NO: 4252953 - DNA, 25 bp, Homo sapien
gctccaagatgctcaccagtggctt

SEQ ID NO: 4252954 - DNA, 25 bp, Homo sapien
aggctccaagatgctcaccagtggc

SEQ ID NO: 4252955 - DNA, 25 bp, Homo sapien
ctccaagatgctcaccagtggcttt

SEQ ID NO: 4252956 - DNA, 25 bp, Homo sapien
ggctccaagatgctcaccagtggct

SEQ ID NO: 4252957 - DNA, 25 bp, Homo sapien
tggcctgaggcgtctgctgcccggg

SEQ ID NO: 4252958 - DNA, 25 bp, Homo sapien
gggagaagagaggcccatccagcac

SEQ ID NO: 4252959 - DNA, 25 bp, Homo sapien
gccctggcctgaggcgtctgctgcc

SEQ ID NO: 4252960 - DNA, 25 bp, Homo sapien
ggagaagagaggcccatccagcacc

SEQ ID NO: 4252961 - DNA, 25 bp, Homo sapien
tcagtgtgaactttgccctggagag

SEQ ID NO: 4252962 - DNA, 25 bp, Homo sapien
tgtgtgtggtcttgggcaaggcccc

SEQ ID NO: 4252963 - DNA, 25 bp, Homo sapien
tgtgtggtcttgggcaaggccccca

SEQ ID NO: 4252964 - DNA, 25 bp, Homo sapien
gtgtggtcttgggcaaggcccccat

SEQ ID NO: 4252965 - DNA, 25 bp, Homo sapien
ctgtgtgtggtcttgggcaaggccc

SEQ ID NO: 4252966 - DNA, 25 bp, Homo sapien
tacacacccagggacgtggacacac

SEQ ID NO: 4252967 - DNA, 25 bp, Homo sapien
cacacagcccatgagggatggagct

SEQ ID NO: 4252968 - DNA, 25 bp, Homo sapien
ggacgtggacacactgcagtgtgcc

SEQ ID NO: 4252969 - DNA, 25 bp, Homo sapien
gcaggaagcagatccctgaaggccc

SEQ ID NO: 4252970 - DNA, 25 bp, Homo sapien
gatgatgttctgagagttgtaagag

SEQ ID NO: 4252971 - DNA, 25 bp, Homo sapien
taagaggccgaccagacaatcctcg

SEQ ID NO: 4252972 - DNA, 25 bp, Homo sapien
tggcctgatagacgagacaaactct

SEQ ID NO: 4252973 - DNA, 25 bp, Homo sapien
gcaacaactcttgttggtggcctga

SEQ ID NO: 4252974 - DNA, 25 bp, Homo sapien
agtgcatcatgggtctcaaattcag

SEQ ID NO: 4252975 - DNA, 25 bp, Homo sapien
cagctccaggacattgtagacaggg

SEQ ID NO: 4252976 - DNA, 25 bp, Homo sapien
cagcctgaaaattggccctccggga

SEQ ID NO: 4252977 - DNA, 25 bp, Homo sapien
tcccagtggaatttcaggctagtct

SEQ ID NO: 4252978 - DNA, 25 bp, Homo sapien
gagtctcccagaacgtggacgatcg

SEQ ID NO: 4252979 - DNA, 25 bp, Homo sapien
atcgcccagggcaacgcagtggagt

SEQ ID NO: 4252980 - DNA, 25 bp, Homo sapien
ggcggaagaggcgagcggtggagtt

SEQ ID NO: 4252981 - DNA, 25 bp, Homo sapien
gcgagcccggtctggtttgcacctg

SEQ ID NO: 4252982 - DNA, 25 bp, Homo sapien
gcgagcccgggttctttgtgtgtcc

SEQ ID NO: 4252983 - DNA, 25 bp, Homo sapien
ctggcaacgaacgttcgccgcgcgg

SEQ ID NO: 4252984 - DNA, 25 bp, Homo sapien
ttcgccgcgcggcatgagggtgtgc

SEQ ID NO: 4252985 - DNA, 25 bp, Homo sapien
gagcccgggttctttgtgtgtccga

SEQ ID NO: 4252986 - DNA, 25 bp, Homo sapien
gagggaccgggagctgggcgcgcag

SEQ ID NO: 4252987 - DNA, 25 bp, Homo sapien
agggaccgggagctgggcgcgcagc

SEQ ID NO: 4252988 - DNA, 25 bp, Homo sapien
tgagtgtggttgtgtctccaggtcc

SEQ ID NO: 4252989 - DNA, 25 bp, Homo sapien
taggtgcatgcactccataggtggt

SEQ ID NO: 4252990 - DNA, 25 bp, Homo sapien
gtccaatggccagagctggttctcc

SEQ ID NO: 4252991 - DNA, 25 bp, Homo sapien
tgtcctcggctgtacccaagagggt

SEQ ID NO: 4252992 - DNA, 25 bp, Homo sapien
cattgatgtcaagacccactgtgga

SEQ ID NO: 4252993 - DNA, 25 bp, Homo sapien
gaaggttaagctcccactggtccag

SEQ ID NO: 4252994 - DNA, 25 bp, Homo sapien
tgaagccgggactaggcaagcgttt

SEQ ID NO: 4252995 - DNA, 25 bp, Homo sapien
attttacaatgggatgtggcctgcg

SEQ ID NO: 4252996 - DNA, 25 bp, Homo sapien
tgcatgcaggccaccttggcttcct

SEQ ID NO: 4252997 - DNA, 25 bp, Homo sapien
tgcaggccaccttggcttcctgtca

SEQ ID NO: 4252998 - DNA, 25 bp, Homo sapien
cttctgggggcctgcatgcaggcca

SEQ ID NO: 4252999 - DNA, 25 bp, Homo sapien
catgcaggccaccttggcttcctgt

SEQ ID NO: 4253000 - DNA, 25 bp, Homo sapien
aaaacataggtgatgcagcataggc

SEQ ID NO: 4253001 - DNA, 25 bp, Homo sapien
cataggcaaagggtggaactaggca

SEQ ID NO: 4253002 - DNA, 25 bp, Homo sapien
tggttgaacgaaggcacgccatgaa

SEQ ID NO: 4253003 - DNA, 25 bp, Homo sapien
tgtgtaattcacgacgatgacccat

SEQ ID NO: 4253004 - DNA, 25 bp, Homo sapien
gatctgccccttgttctctggtgag

SEQ ID NO: 4253005 - DNA, 25 bp, Homo sapien
cagtacagtaccagtgtgatgcgga

SEQ ID NO: 4253006 - DNA, 25 bp, Homo sapien
tattgtctgccaggtccattggagc

SEQ ID NO: 4253007 - DNA, 25 bp, Homo sapien
gttgttgcatagagaagcctgcagc

SEQ ID NO: 4253008 - DNA, 25 bp, Homo sapien
ttacccacctcttaggagctggccc

SEQ ID NO: 4253009 - DNA, 25 bp, Homo sapien
ggaatgggccagagaagagggagcg

SEQ ID NO: 4253010 - DNA, 25 bp, Homo sapien
acccacctcttaggagctggcccag

SEQ ID NO: 4253011 - DNA, 25 bp, Homo sapien
ccacctcttaggagctggcccagga

SEQ ID NO: 4253012 - DNA, 25 bp, Homo sapien
gggttcctctagtgtgtatattttc

SEQ ID NO: 4253013 - DNA, 25 bp, Homo sapien
aggtccttaggcccactgtcactgg

SEQ ID NO: 4253014 - DNA, 25 bp, Homo sapien
tcagggctgggacatcgttggcaaa

SEQ ID NO: 4253015 - DNA, 25 bp, Homo sapien
tcactggtgtggagcccttacttgg

SEQ ID NO: 4253016 - DNA, 25 bp, Homo sapien
tgggacccttgccttccagaatctc

SEQ ID NO: 4253017 - DNA, 25 bp, Homo sapien
ttctgagcaccccagctccattttc

SEQ ID NO: 4253018 - DNA, 25 bp, Homo sapien
ggtattctgggacccttgccttcca

SEQ ID NO: 4253019 - DNA, 25 bp, Homo sapien
agaatctccattctgagcaccccag

SEQ ID NO: 4253020 - DNA, 25 bp, Homo sapien
tgcataggtccctggcccgtccttt

SEQ ID NO: 4253021 - DNA, 25 bp, Homo sapien
ttggtgaccctcaagctgaagccca

SEQ ID NO: 4253022 - DNA, 25 bp, Homo sapien
cacttctcttatatgccccagatgc

SEQ ID NO: 4253023 - DNA, 25 bp, Homo sapien
ccagatgcataggtccctggcccgt

SEQ ID NO: 4253024 - DNA, 25 bp, Homo sapien
cccagagcccgggccaggcttggga

SEQ ID NO: 4253025 - DNA, 25 bp, Homo sapien
gaaattcaggttcaaggaggctcat

SEQ ID NO: 4253026 - DNA, 25 bp, Homo sapien
taacggtggcgaaagcgcagtagcc

SEQ ID NO: 4253027 - DNA, 25 bp, Homo sapien
gaagttgaaactaggctgccattaa

SEQ ID NO: 4253028 - DNA, 25 bp, Homo sapien
tcctcatggtttggagtatgtgcag

SEQ ID NO: 4253029 - DNA, 25 bp, Homo sapien
gtgacatggtgtctacctctgagaa

SEQ ID NO: 4253030 - DNA, 25 bp, Homo sapien
cgttggcatccgctttcaggcaggc

SEQ ID NO: 4253031 - DNA, 25 bp, Homo sapien
cagagcccttttctagtgacatggt

SEQ ID NO: 4253032 - DNA, 25 bp, Homo sapien
tgtctccggaatgtctcccatcaga

SEQ ID NO: 4253033 - DNA, 25 bp, Homo sapien
ttgatagacttgagctgaataaaca

SEQ ID NO: 4253034 - DNA, 25 bp, Homo sapien
gggccgaagtcttcagagtcattgt

SEQ ID NO: 4253035 - DNA, 25 bp, Homo sapien
taatcattcctagttaatgagtttg

SEQ ID NO: 4253036 - DNA, 25 bp, Homo sapien
tctgaaggtcaagcagaggagggtg

SEQ ID NO: 4253037 - DNA, 25 bp, Homo sapien
ggactctacacccatcttaaggtgg

SEQ ID NO: 4253038 - DNA, 25 bp, Homo sapien
gaaagttctgtccagtaaacgcagg

SEQ ID NO: 4253039 - DNA, 25 bp, Homo sapien
gaggagatacctcattaaacttggc

SEQ ID NO: 4253040 - DNA, 25 bp, Homo sapien
ctgaagctgaatgaggaggccctat

SEQ ID NO: 4253041 - DNA, 25 bp, Homo sapien
caaagcgcttagagcaaggcctgct

SEQ ID NO: 4253042 - DNA, 25 bp, Homo sapien
taaagagactccatatgcaggcacc

SEQ ID NO: 4253043 - DNA, 25 bp, Homo sapien
caaactcgggagtcagttgagccct

SEQ ID NO: 4253044 - DNA, 25 bp, Homo sapien
tgggaggatccagcaagctcttgca

SEQ ID NO: 4253045 - DNA, 25 bp, Homo sapien
tctggctgtaaagaggagcgctacc

SEQ ID NO: 4253046 - DNA, 25 bp, Homo sapien
ctctgggctgagtacacgggaatcc

SEQ ID NO: 4253047 - DNA, 25 bp, Homo sapien
ccgttttcctgagacccctgtgaga

SEQ ID NO: 4253048 - DNA, 25 bp, Homo sapien
aaatattgcatatgaggaggccggc

SEQ ID NO: 4253049 - DNA, 25 bp, Homo sapien
gatgatcagctccaagacatcaccc

SEQ ID NO: 4253050 - DNA, 25 bp, Homo sapien
agtcgaagtcccgtgtacggacgtg

SEQ ID NO: 4253051 - DNA, 25 bp, Homo sapien
tgctgtgtgccgtgtgcggcttgcg

SEQ ID NO: 4253052 - DNA, 25 bp, Homo sapien
cgccaggcagcagtcgaagtcccgt

SEQ ID NO: 4253053 - DNA, 25 bp, Homo sapien
caagggaacagaaccgagatgtcag

SEQ ID NO: 4253054 - DNA, 25 bp, Homo sapien
gaaccgagatgtcagccctgctgcg

SEQ ID NO: 4253055 - DNA, 25 bp, Homo sapien
gggaacagaaccgagatgtcagccc

SEQ ID NO: 4253056 - DNA, 25 bp, Homo sapien
acagaaccgagatgtcagccctgct

SEQ ID NO: 4253057 - DNA, 25 bp, Homo sapien
gctggcccatcagggcgcacagtgt

SEQ ID NO: 4253058 - DNA, 25 bp, Homo sapien
cgcacagtgtggacatagacacctt

SEQ ID NO: 4253059 - DNA, 25 bp, Homo sapien
tgcaggaccctgtcgaagggctgga

SEQ ID NO: 4253060 - DNA, 25 bp, Homo sapien
tgaaaccaaagtcatgccgcatggg

SEQ ID NO: 4253061 - DNA, 25 bp, Homo sapien
tccaagggtgtaggcagcaacagct

SEQ ID NO: 4253062 - DNA, 25 bp, Homo sapien
cttgtgcatctccaagggtgtaggc

SEQ ID NO: 4253063 - DNA, 25 bp, Homo sapien
aagggtgtaggcagcaacagctcct

SEQ ID NO: 4253064 - DNA, 25 bp, Homo sapien
aacagctcctccatttctgcaggag

SEQ ID NO: 4253065 - DNA, 25 bp, Homo sapien
gagggccaccctctgcacggtgccc

SEQ ID NO: 4253066 - DNA, 25 bp, Homo sapien
ctgcacggtgcccgtcatgatggat

SEQ ID NO: 4253067 - DNA, 25 bp, Homo sapien
gcacggtgcccgtcatgatggatgc

SEQ ID NO: 4253068 - DNA, 25 bp, Homo sapien
agggccaccctctgcacggtgcccg

SEQ ID NO: 4253069 - DNA, 25 bp, Homo sapien
cagagtgaacagccccgggtgcccc

SEQ ID NO: 4253070 - DNA, 25 bp, Homo sapien
ttctccaaacatgcgccagaagccc

SEQ ID NO: 4253071 - DNA, 25 bp, Homo sapien
tcagcagctctgactgaccacatga

SEQ ID NO: 4253072 - DNA, 25 bp, Homo sapien
cacatgactccaggtcttcgagagc

SEQ ID NO: 4253073 - DNA, 25 bp, Homo sapien
tcttcgagagcttctccaaacatgc

SEQ ID NO: 4253074 - DNA, 25 bp, Homo sapien
tgtaacgtaggaaccagagagcgtc

SEQ ID NO: 4253075 - DNA, 25 bp, Homo sapien
cgtaggaaccagagagcgtcaactc

SEQ ID NO: 4253076 - DNA, 25 bp, Homo sapien
taacgtaggaaccagagagcgtcaa

SEQ ID NO: 4253077 - DNA, 25 bp, Homo sapien
ctgtaacgtaggaaccagagagcgt

SEQ ID NO: 4253078 - DNA, 25 bp, Homo sapien
caggactgtcggtggccagttagaa

SEQ ID NO: 4253079 - DNA, 25 bp, Homo sapien
cagtggttggtgacacggaataggg

SEQ ID NO: 4253080 - DNA, 25 bp, Homo sapien
ggtggagagcggtgacacaggatgc

SEQ ID NO: 4253081 - DNA, 25 bp, Homo sapien
gggcgtcctcggtggcagttctggg

SEQ ID NO: 4253082 - DNA, 25 bp, Homo sapien
taattagccagatagacacaaggtg

SEQ ID NO: 4253083 - DNA, 25 bp, Homo sapien
gccacgcagtagagatgatagccaa

SEQ ID NO: 4253084 - DNA, 25 bp, Homo sapien
tgatcaaaagcaccacgatgggagg

SEQ ID NO: 4253085 - DNA, 25 bp, Homo sapien
tacagagctggagattcattcgcaa

SEQ ID NO: 4253086 - DNA, 25 bp, Homo sapien
gttggcggctcccaatcatcctcct

SEQ ID NO: 4253087 - DNA, 25 bp, Homo sapien
tatagctcgtcctccggggctcggt

SEQ ID NO: 4253088 - DNA, 25 bp, Homo sapien
ctggggggtcgtgccccgggctgct

SEQ ID NO: 4253089 - DNA, 25 bp, Homo sapien
tggggttggggtatagctcgtcctc

SEQ ID NO: 4253090 - DNA, 25 bp, Homo sapien
ctctgggtcattgaggccagctggc

SEQ ID NO: 4253091 - DNA, 25 bp, Homo sapien
ctgggtcattgaggccagctggcca

SEQ ID NO: 4253092 - DNA, 25 bp, Homo sapien
ctggccagccaccagactcagacgt

SEQ ID NO: 4253093 - DNA, 25 bp, Homo sapien
gaccatggggagttccggtggctct

SEQ ID NO: 4253094 - DNA, 25 bp, Homo sapien
agccggcgagaagcgggctgctggc

SEQ ID NO: 4253095 - DNA, 25 bp, Homo sapien
tgaggctgcccgacttgcggggtag

SEQ ID NO: 4253096 - DNA, 25 bp, Homo sapien
gtggccgagctgtcccaagactcca

SEQ ID NO: 4253097 - DNA, 25 bp, Homo sapien
gcacagccggcgagaagcgggctgc

SEQ ID NO: 4253098 - DNA, 25 bp, Homo sapien
ttcagtgtgacggtctctccagcca

SEQ ID NO: 4253099 - DNA, 25 bp, Homo sapien
caggaggtggatggcctcgctcagc

SEQ ID NO: 4253100 - DNA, 25 bp, Homo sapien
agcggccggcccttgaggctaacgt

SEQ ID NO: 4253101 - DNA, 25 bp, Homo sapien
taacgttgttgatggccagaatgcg

SEQ ID NO: 4253102 - DNA, 25 bp, Homo sapien
tgtcaccccatatgggagctcctgg

SEQ ID NO: 4253103 - DNA, 25 bp, Homo sapien
ctgtagcaggtgcttagagtgacct

SEQ ID NO: 4253104 - DNA, 25 bp, Homo sapien
cagacctcacagtagggcgtgaagg

SEQ ID NO: 4253105 - DNA, 25 bp, Homo sapien
tggacacccattacaatgacctgag

SEQ ID NO: 4253106 - DNA, 25 bp, Homo sapien
tccactgtgtaactgacggcacctg

SEQ ID NO: 4253107 - DNA, 25 bp, Homo sapien
tggtgaggcctgagatgacaatggg

SEQ ID NO: 4253108 - DNA, 25 bp, Homo sapien
aggttcctccgtgcccgaaatggtg

SEQ ID NO: 4253109 - DNA, 25 bp, Homo sapien
cgtgcccgaaatggtgatgcccagg

SEQ ID NO: 4253110 - DNA, 25 bp, Homo sapien
aggaagcaaagggaaccccgatcat

SEQ ID NO: 4253111 - DNA, 25 bp, Homo sapien
caaagggtgggcctctggaggtagg

SEQ ID NO: 4253112 - DNA, 25 bp, Homo sapien
tcaaagggtgggcctctggaggtag

SEQ ID NO: 4253113 - DNA, 25 bp, Homo sapien
agggtgggcctctggaggtaggagg

SEQ ID NO: 4253114 - DNA, 25 bp, Homo sapien
gtgggcctctggaggtaggaggcca

SEQ ID NO: 4253115 - DNA, 25 bp, Homo sapien
cggatattgtcaatggccagtagct

SEQ ID NO: 4253116 - DNA, 25 bp, Homo sapien
ccagtagcttgtcgcctggctccag

SEQ ID NO: 4253117 - DNA, 25 bp, Homo sapien
gcaggatttgcacggcgtcctccat

SEQ ID NO: 4253118 - DNA, 25 bp, Homo sapien
ggtcctcgcactgccgcaggatttg

SEQ ID NO: 4253119 - DNA, 25 bp, Homo sapien
gatgtcggagatgatcaagggctcc

SEQ ID NO: 4253120 - DNA, 25 bp, Homo sapien
ctgcctttcttgatgtcggagatga

SEQ ID NO: 4253121 - DNA, 25 bp, Homo sapien
gtcggagatgatcaagggctcccct

SEQ ID NO: 4253122 - DNA, 25 bp, Homo sapien
tgtcggagatgatcaagggctcccc

SEQ ID NO: 4253123 - DNA, 25 bp, Homo sapien
gtgccactgcttgggatgacggact

SEQ ID NO: 4253124 - DNA, 25 bp, Homo sapien
ttcttgggcagcttcacgtggaagg

SEQ ID NO: 4253125 - DNA, 25 bp, Homo sapien
ccagctccacgctgcgcttcttggg

SEQ ID NO: 4253126 - DNA, 25 bp, Homo sapien
agctgatggtgatgcccagctccac

SEQ ID NO: 4253127 - DNA, 25 bp, Homo sapien
ctccatagtcccgtcctcggtggca

SEQ ID NO: 4253128 - DNA, 25 bp, Homo sapien
gttggcttcctccatagtcccgtcc

SEQ ID NO: 4253129 - DNA, 25 bp, Homo sapien
tgccattgatggacaggacacggtc

SEQ ID NO: 4253130 - DNA, 25 bp, Homo sapien
cagcacgaccttgtgggccagtgcg

SEQ ID NO: 4253131 - DNA, 25 bp, Homo sapien
gactgtcaggctcgatgaagcacac

SEQ ID NO: 4253132 - DNA, 25 bp, Homo sapien
cctccgtggtctccgtgtgcacaat

SEQ ID NO: 4253133 - DNA, 25 bp, Homo sapien
gtctcggtggcgaagatgccgccct

SEQ ID NO: 4253134 - DNA, 25 bp, Homo sapien
agagcacgacctccgtggtctccgt

SEQ ID NO: 4253135 - DNA, 25 bp, Homo sapien
ggccccaccgtgctggaggctagcg

SEQ ID NO: 4253136 - DNA, 25 bp, Homo sapien
cccaccgtgctggaggctagcgaca

SEQ ID NO: 4253137 - DNA, 25 bp, Homo sapien
gccccaccgtgctggaggctagcga

SEQ ID NO: 4253138 - DNA, 25 bp, Homo sapien
ccccaccgtgctggaggctagcgac

SEQ ID NO: 4253139 - DNA, 25 bp, Homo sapien
ttcaggtgagccgccccacggaggt

SEQ ID NO: 4253140 - DNA, 25 bp, Homo sapien
attcaggtgagccgccccacggagg

SEQ ID NO: 4253141 - DNA, 25 bp, Homo sapien
cattcaggtgagccgccccacggag

SEQ ID NO: 4253142 - DNA, 25 bp, Homo sapien
gcattcaggtgagccgccccacgga

SEQ ID NO: 4253143 - DNA, 25 bp, Homo sapien
ggcaaccgcgaatctactttcatct

SEQ ID NO: 4253144 - DNA, 25 bp, Homo sapien
tcaccacgatgcatttgagaacatt

SEQ ID NO: 4253145 - DNA, 25 bp, Homo sapien
caaagatcttcctatgtccctcagc

SEQ ID NO: 4253146 - DNA, 25 bp, Homo sapien
gttcatccacattttgcaggtgtca

SEQ ID NO: 4253147 - DNA, 25 bp, Homo sapien
gacatacaccctttggcaagcctca

SEQ ID NO: 4253148 - DNA, 25 bp, Homo sapien
cattctggacagctagagtctcagg

SEQ ID NO: 4253149 - DNA, 25 bp, Homo sapien
gatatagtaacgcagcactgaggct

SEQ ID NO: 4253150 - DNA, 25 bp, Homo sapien
cactgaggctttatccatgaatgaa

SEQ ID NO: 4253151 - DNA, 25 bp, Homo sapien
tcctccgccccattgtagttcgagg

SEQ ID NO: 4253152 - DNA, 25 bp, Homo sapien
ttgttgcaggaaaaggcgtggttca

SEQ ID NO: 4253153 - DNA, 25 bp, Homo sapien
tcgaggactcatgggctgggatcca

SEQ ID NO: 4253154 - DNA, 25 bp, Homo sapien
gcgtggttcaaggtcggcgaggaaa

SEQ ID NO: 4253155 - DNA, 25 bp, Homo sapien
aggtgggcatcctgcagtggccggg

SEQ ID NO: 4253156 - DNA, 25 bp, Homo sapien
gcacgcaggggtcccagcggtgcag

SEQ ID NO: 4253157 - DNA, 25 bp, Homo sapien
acgcaggggtcccagcggtgcagct

SEQ ID NO: 4253158 - DNA, 25 bp, Homo sapien
ggcacgcaggggtcccagcggtgca

SEQ ID NO: 4253159 - DNA, 25 bp, Homo sapien
cacgcaggggtcccagcggtgcagc

SEQ ID NO: 4253160 - DNA, 25 bp, Homo sapien
agaggtgcaggcgttagtggctgag

SEQ ID NO: 4253161 - DNA, 25 bp, Homo sapien
ggaaagagaggtgcaggcgttagtg

SEQ ID NO: 4253162 - DNA, 25 bp, Homo sapien
aagagaggtgcaggcgttagtggct

SEQ ID NO: 4253163 - DNA, 25 bp, Homo sapien
gtgcaggcgttagtggctgagggca

SEQ ID NO: 4253164 - DNA, 25 bp, Homo sapien
agaggtctatggctatgagtgctgc

SEQ ID NO: 4253165 - DNA, 25 bp, Homo sapien
tatggctatgagtgctgccatgaag

SEQ ID NO: 4253166 - DNA, 25 bp, Homo sapien
gccggagaggtctatggctatgagt

SEQ ID NO: 4253167 - DNA, 25 bp, Homo sapien
gagtgctgccatgaagtttctccaa

SEQ ID NO: 4253168 - DNA, 25 bp, Homo sapien
ctgcctctgaggcctcagtggccgc

SEQ ID NO: 4253169 - DNA, 25 bp, Homo sapien
tgcctctgaggcctcagtggccgct

SEQ ID NO: 4253170 - DNA, 25 bp, Homo sapien
ctctgaggcctcagtggccgctgac

SEQ ID NO: 4253171 - DNA, 25 bp, Homo sapien
cctctgaggcctcagtggccgctga

SEQ ID NO: 4253172 - DNA, 25 bp, Homo sapien
atctccagccgcaccttctctgaaa

SEQ ID NO: 4253173 - DNA, 25 bp, Homo sapien
ggtgccatcgatggacaggatgtgg

SEQ ID NO: 4253174 - DNA, 25 bp, Homo sapien
gccatcgatggacaggatgtggtct

SEQ ID NO: 4253175 - DNA, 25 bp, Homo sapien
tcgatggacaggatgtggtctccag

SEQ ID NO: 4253176 - DNA, 25 bp, Homo sapien
gcttgatgcggtcgatggtaatgac

SEQ ID NO: 4253177 - DNA, 25 bp, Homo sapien
taatgactgacttgttccggaggga

SEQ ID NO: 4253178 - DNA, 25 bp, Homo sapien
aagggtcccgaagcattagccaccg

SEQ ID NO: 4253179 - DNA, 25 bp, Homo sapien
cagggcagaccctggcgtcttgact

SEQ ID NO: 4253180 - DNA, 25 bp, Homo sapien
ggcccaaggtcataaggtcatgcag

SEQ ID NO: 4253181 - DNA, 25 bp, Homo sapien
ggttcagtcccttagctctcgcttg

SEQ ID NO: 4253182 - DNA, 25 bp, Homo sapien
tcactgtgaccaaccatgctggcca

SEQ ID NO: 4253183 - DNA, 25 bp, Homo sapien
tatgaagagcctgtggtataccagc

SEQ ID NO: 4253184 - DNA, 25 bp, Homo sapien
tgagcagcctgtcgcccaccttcag

SEQ ID NO: 4253185 - DNA, 25 bp, Homo sapien
gggtggccacatcatactccacctg

SEQ ID NO: 4253186 - DNA, 25 bp, Homo sapien
gcagcgggattccatcgacactgag

SEQ ID NO: 4253187 - DNA, 25 bp, Homo sapien
acatcatactccacctgaaagagtg

SEQ ID NO: 4253188 - DNA, 25 bp, Homo sapien
gtgattctggcctgatgacaacccg

SEQ ID NO: 4253189 - DNA, 25 bp, Homo sapien
tatgaatagctcatcacagggccct

SEQ ID NO: 4253190 - DNA, 25 bp, Homo sapien
tcttagggaccattccacagacggg

SEQ ID NO: 4253191 - DNA, 25 bp, Homo sapien
aacaggtggccaaagctattctcgg

SEQ ID NO: 4253192 - DNA, 25 bp, Homo sapien
caagcgggcgggacttgtgcccatc

SEQ ID NO: 4253193 - DNA, 25 bp, Homo sapien
ccaccgggccgcacgtaggtcagga

SEQ ID NO: 4253194 - DNA, 25 bp, Homo sapien
acaagcgggcgggacttgtgcccat

SEQ ID NO: 4253195 - DNA, 25 bp, Homo sapien
acgtaggtcaggacaagcgggcggg

SEQ ID NO: 4253196 - DNA, 25 bp, Homo sapien
gctatccatggaccctcttatgaga

SEQ ID NO: 4253197 - DNA, 25 bp, Homo sapien
ttcttgctgccccaataccaagggc

SEQ ID NO: 4253198 - DNA, 25 bp, Homo sapien
tcgccctcccaagagatggtgcaag

SEQ ID NO: 4253199 - DNA, 25 bp, Homo sapien
tctcagtctcggtagcagctttcac

SEQ ID NO: 4253200 - DNA, 25 bp, Homo sapien
tccttgtagagggagacgtccactg

SEQ ID NO: 4253201 - DNA, 25 bp, Homo sapien
gagggagacgtccactgtctttgaa

SEQ ID NO: 4253202 - DNA, 25 bp, Homo sapien
cttgtagagggagacgtccactgtc

SEQ ID NO: 4253203 - DNA, 25 bp, Homo sapien
ctaaggacaaagccaaagctattgc

SEQ ID NO: 4253204 - DNA, 25 bp, Homo sapien
catgctcacagagacgacggcagaa

SEQ ID NO: 4253205 - DNA, 25 bp, Homo sapien
ttttacaggtcgaacaagtgaggct

SEQ ID NO: 4253206 - DNA, 25 bp, Homo sapien
tacaccaccgttacttagtgcaggg

SEQ ID NO: 4253207 - DNA, 25 bp, Homo sapien
gccggtagatgtgcccaaagctcat

SEQ ID NO: 4253208 - DNA, 25 bp, Homo sapien
gatcccgttcacagaccgaatatag

SEQ ID NO: 4253209 - DNA, 25 bp, Homo sapien
gagcctggtcaggtggatcccgttc

SEQ ID NO: 4253210 - DNA, 25 bp, Homo sapien
tagtcaccaatgttcagcagatcac

SEQ ID NO: 4253211 - DNA, 25 bp, Homo sapien
gtgatgatctcatcgtggcggagcc

SEQ ID NO: 4253212 - DNA, 25 bp, Homo sapien
ctgagatagtcaggcccagcgtgct

SEQ ID NO: 4253213 - DNA, 25 bp, Homo sapien
tgtcggtgccacctgagatagtcag

SEQ ID NO: 4253214 - DNA, 25 bp, Homo sapien
tttccatccttgtcggtgccacctg

SEQ ID NO: 4253215 - DNA, 25 bp, Homo sapien
gtgccacctgagatagtcaggccca

SEQ ID NO: 4253216 - DNA, 25 bp, Homo sapien
tgcggcacgccagggaaacgtcggc

SEQ ID NO: 4253217 - DNA, 25 bp, Homo sapien
tgtctgcggcacgccagggaaacgt

SEQ ID NO: 4253218 - DNA, 25 bp, Homo sapien
ctgtctgcggcacgccagggaaacg

SEQ ID NO: 4253219 - DNA, 25 bp, Homo sapien
tctgcggcacgccagggaaacgtcg

SEQ ID NO: 4253220 - DNA, 25 bp, Homo sapien
caggagagaaagagggaaaggccga

SEQ ID NO: 4253221 - DNA, 25 bp, Homo sapien
aggagagaaagagggaaaggccgag

SEQ ID NO: 4253222 - DNA, 25 bp, Homo sapien
ctgcaggagagaaagagggaaaggc

SEQ ID NO: 4253223 - DNA, 25 bp, Homo sapien
tgcaggagagaaagagggaaaggcc

SEQ ID NO: 4253224 - DNA, 25 bp, Homo sapien
caaaactacggaagacttcacaaat

SEQ ID NO: 4253225 - DNA, 25 bp, Homo sapien
tgctccgccagaccagggctgggct

SEQ ID NO: 4253226 - DNA, 25 bp, Homo sapien
ctgggctctctttgcttgccagcag

SEQ ID NO: 4253227 - DNA, 25 bp, Homo sapien
ggtcccagttgccaactaccgtgct

SEQ ID NO: 4253228 - DNA, 25 bp, Homo sapien
tgcagctgtaaccattgagaaaggt

SEQ ID NO: 4253229 - DNA, 25 bp, Homo sapien
ttttcagctggaaacgtgcataaaa

SEQ ID NO: 4253230 - DNA, 25 bp, Homo sapien
tcagctggaaacgtgcataaaaaac

SEQ ID NO: 4253231 - DNA, 25 bp, Homo sapien
ctggaaacgtgcataaaaaacagag

SEQ ID NO: 4253232 - DNA, 25 bp, Homo sapien
cagctggaaacgtgcataaaaaaca

SEQ ID NO: 4253233 - DNA, 25 bp, Homo sapien
caccaccttgcccatgggccttggg

SEQ ID NO: 4253234 - DNA, 25 bp, Homo sapien
tctcctcctgccgagaaccagtctc

SEQ ID NO: 4253235 - DNA, 25 bp, Homo sapien
tctcacccctctgggtcggacactc

SEQ ID NO: 4253236 - DNA, 25 bp, Homo sapien
tgccagcacaggaactcctcaccac

SEQ ID NO: 4253237 - DNA, 25 bp, Homo sapien
gcctctccaggggtctcccggctga

SEQ ID NO: 4253238 - DNA, 25 bp, Homo sapien
ggtctcccggctgagcccacacagc

SEQ ID NO: 4253239 - DNA, 25 bp, Homo sapien
ggggtctcccggctgagcccacaca

SEQ ID NO: 4253240 - DNA, 25 bp, Homo sapien
ccgcctctccaggggtctcccggct

SEQ ID NO: 4253241 - DNA, 25 bp, Homo sapien
tgcccaccaactccctcgggagcca

SEQ ID NO: 4253242 - DNA, 25 bp, Homo sapien
gttcgctattgtctcccctgctgcc

SEQ ID NO: 4253243 - DNA, 25 bp, Homo sapien
cctgctgcccaccaactccctcggg

SEQ ID NO: 4253244 - DNA, 25 bp, Homo sapien
tgctgcccaccaactccctcgggag

SEQ ID NO: 4253245 - DNA, 25 bp, Homo sapien
tccatctacagcctcttcagtcagg

SEQ ID NO: 4253246 - DNA, 25 bp, Homo sapien
cttcagtcagggaggacaggcgcat

SEQ ID NO: 4253247 - DNA, 25 bp, Homo sapien
gcctcttcagtcagggaggacaggc

SEQ ID NO: 4253248 - DNA, 25 bp, Homo sapien
cactcgcctccattccctccatcta

SEQ ID NO: 4253249 - DNA, 25 bp, Homo sapien
caagctcctggaaaggtcatgccgt

SEQ ID NO: 4253250 - DNA, 25 bp, Homo sapien
gctatgcaatgtaggcagatgggaa

SEQ ID NO: 4253251 - DNA, 25 bp, Homo sapien
agattggcaattggaagccttgcct

SEQ ID NO: 4253252 - DNA, 25 bp, Homo sapien
ggaagccttgccacatttctgtctc

SEQ ID NO: 4253253 - DNA, 25 bp, Homo sapien
cgcagggccgggttccgcagacaca

SEQ ID NO: 4253254 - DNA, 25 bp, Homo sapien
cagggccgggttccgcagacacagt

SEQ ID NO: 4253255 - DNA, 25 bp, Homo sapien
gcacgcagggccgggttccgcagac

SEQ ID NO: 4253256 - DNA, 25 bp, Homo sapien
acgcagggccgggttccgcagacac

SEQ ID NO: 4253257 - DNA, 25 bp, Homo sapien
gagtcccttggctgatggaggtgct

SEQ ID NO: 4253258 - DNA, 25 bp, Homo sapien
tttccgctccatctgactatctccc

SEQ ID NO: 4253259 - DNA, 25 bp, Homo sapien
ctgccaaggacccatgaagagttgc

SEQ ID NO: 4253260 - DNA, 25 bp, Homo sapien
gagttgcggtcagcctgagtccctt

SEQ ID NO: 4253261 - DNA, 25 bp, Homo sapien
agccgccacttgagtgacaccgcca

SEQ ID NO: 4253262 - DNA, 25 bp, Homo sapien
gccacttgagtgacaccgccagcat

SEQ ID NO: 4253263 - DNA, 25 bp, Homo sapien
ttgagacgccgcctcaccacgccca

SEQ ID NO: 4253264 - DNA, 25 bp, Homo sapien
cgcccagccgccacttgagtgacac

SEQ ID NO: 4253265 - DNA, 25 bp, Homo sapien
gcgctcctgtgcccgctccagagct

SEQ ID NO: 4253266 - DNA, 25 bp, Homo sapien
ctccagagctgcttgcgctaactgg

SEQ ID NO: 4253267 - DNA, 25 bp, Homo sapien
ggcgctcctgtgcccgctccagagc

SEQ ID NO: 4253268 - DNA, 25 bp, Homo sapien
cagagctgcttgcgctaactggcac

SEQ ID NO: 4253269 - DNA, 25 bp, Homo sapien
ccttggcatcctcagtgtaagtggc

SEQ ID NO: 4253270 - DNA, 25 bp, Homo sapien
tcccggccacctcgtcaccagcaca

SEQ ID NO: 4253271 - DNA, 25 bp, Homo sapien
tggagcttgtcccggccacctcgtc

SEQ ID NO: 4253272 - DNA, 25 bp, Homo sapien
ctcccacctggcccatagaaaactg

SEQ ID NO: 4253273 - DNA, 25 bp, Homo sapien
cccacctggcccatagaaaactgga

SEQ ID NO: 4253274 - DNA, 25 bp, Homo sapien
cctgctggagcgcatggtccctgga

SEQ ID NO: 4253275 - DNA, 25 bp, Homo sapien
ggcctgctggagcgcatggtccctg

SEQ ID NO: 4253276 - DNA, 25 bp, Homo sapien
ctgctggagcgcatggtccctggag

SEQ ID NO: 4253277 - DNA, 25 bp, Homo sapien
gcctgctggagcgcatggtccctgg

SEQ ID NO: 4253278 - DNA, 25 bp, Homo sapien
tctcgcagaaattatcagtgaaggg

SEQ ID NO: 4253279 - DNA, 25 bp, Homo sapien
tcacggcagacaggatagaagtaga

SEQ ID NO: 4253280 - DNA, 25 bp, Homo sapien
gatgatcaggcagcatttccagtac

SEQ ID NO: 4253281 - DNA, 25 bp, Homo sapien
cggcagacaggatagaagtagaaga

SEQ ID NO: 4253282 - DNA, 25 bp, Homo sapien
gccactgatgaaccccgaaatgtgg

SEQ ID NO: 4253283 - DNA, 25 bp, Homo sapien
ccgaaatgtgggcaaagttgtcgat

SEQ ID NO: 4253284 - DNA, 25 bp, Homo sapien
aggccactgatgaaccccgaaatgt

SEQ ID NO: 4253285 - DNA, 25 bp, Homo sapien
aaagaggccactgatgaaccccgaa

SEQ ID NO: 4253286 - DNA, 25 bp, Homo sapien
agcccaaaggtgcagaggaagagca

SEQ ID NO: 4253287 - DNA, 25 bp, Homo sapien
gcccaaaggtgcagaggaagagcac

SEQ ID NO: 4253288 - DNA, 25 bp, Homo sapien
cagcagcccaaaggtgcagaggaag

SEQ ID NO: 4253289 - DNA, 25 bp, Homo sapien
agggcagcagcccaaaggtgcagag

SEQ ID NO: 4253290 - DNA, 25 bp, Homo sapien
cgctccaggatctgccagctctgga

SEQ ID NO: 4253291 - DNA, 25 bp, Homo sapien
ttgaagaaggcatgccagggccgct

SEQ ID NO: 4253292 - DNA, 25 bp, Homo sapien
agggccgctccaggatctgccagct

SEQ ID NO: 4253293 - DNA, 25 bp, Homo sapien
aggcatgccagggccgctccaggat

SEQ ID NO: 4253294 - DNA, 25 bp, Homo sapien
cccgcgggatggtcatctggaagca

SEQ ID NO: 4253295 - DNA, 25 bp, Homo sapien
caggtcccgcgggatggtcatctgg

SEQ ID NO: 4253296 - DNA, 25 bp, Homo sapien
tccaggtcccgcgggatggtcatct

SEQ ID NO: 4253297 - DNA, 25 bp, Homo sapien
ggtcccgcgggatggtcatctggaa

SEQ ID NO: 4253298 - DNA, 25 bp, Homo sapien
cacaggcggtagaactggtcaggca

SEQ ID NO: 4253299 - DNA, 25 bp, Homo sapien
ccacaggcggtagaactggtcaggc

SEQ ID NO: 4253300 - DNA, 25 bp, Homo sapien
ctcatggaaatagcccctcatgaag

SEQ ID NO: 4253301 - DNA, 25 bp, Homo sapien
tggaaatagcccctcatgaagtcac

SEQ ID NO: 4253302 - DNA, 25 bp, Homo sapien
aaatagcccctcatgaagtcacagt

SEQ ID NO: 4253303 - DNA, 25 bp, Homo sapien
gagagcagagcatggcctcctcatg

SEQ ID NO: 4253304 - DNA, 25 bp, Homo sapien
ccgtcctgtgatgacacagtccatg

SEQ ID NO: 4253305 - DNA, 25 bp, Homo sapien
ggtgccaatgcagcagggccgtcct

SEQ ID NO: 4253306 - DNA, 25 bp, Homo sapien
cgtcctgtgatgacacagtccatgt

SEQ ID NO: 4253307 - DNA, 25 bp, Homo sapien
tctcttgtggccggcaagctctggg

SEQ ID NO: 4253308 - DNA, 25 bp, Homo sapien
gagccaaactgtctcttgtggccgg

SEQ ID NO: 4253309 - DNA, 25 bp, Homo sapien
tcctggtggcagacagagccaaact

SEQ ID NO: 4253310 - DNA, 25 bp, Homo sapien
tcatcatataccctgggatcctggt

SEQ ID NO: 4253311 - DNA, 25 bp, Homo sapien
cgtgctcgcgccctgcgcgaatgaa

SEQ ID NO: 4253312 - DNA, 25 bp, Homo sapien
cgcgccctgcgcgaatgaagctgtg

SEQ ID NO: 4253313 - DNA, 25 bp, Homo sapien
attgccagcatgggcgagcactcct

SEQ ID NO: 4253314 - DNA, 25 bp, Homo sapien
cctgcggatcctggcatatgcaagg

SEQ ID NO: 4253315 - DNA, 25 bp, Homo sapien
cgttctcgtagacccagtggttcca

SEQ ID NO: 4253316 - DNA, 25 bp, Homo sapien
ggttccacagaatcgagtccatcgt

SEQ ID NO: 4253317 - DNA, 25 bp, Homo sapien
tcatgctgtgagaagtccacgggca

SEQ ID NO: 4253318 - DNA, 25 bp, Homo sapien
caagtgcacgaaggtgagccagtgg

SEQ ID NO: 4253319 - DNA, 25 bp, Homo sapien
ggttgttgagccgtcccaccatgct

SEQ ID NO: 4253320 - DNA, 25 bp, Homo sapien
agagtttgcgcaccggcacagcgat

SEQ ID NO: 4253321 - DNA, 25 bp, Homo sapien
atacagccgcttctcccgggcgaag

SEQ ID NO: 4253322 - DNA, 25 bp, Homo sapien
ctgtcgatgtgcttgtggtaggtgt

SEQ ID NO: 4253323 - DNA, 25 bp, Homo sapien
gttccgccgcggccccgcggtgctc

SEQ ID NO: 4253324 - DNA, 25 bp, Homo sapien
tccgccgcggccccgcggtgctcac

SEQ ID NO: 4253325 - DNA, 25 bp, Homo sapien
tggttccgccgcggccccgcggtgc

SEQ ID NO: 4253326 - DNA, 25 bp, Homo sapien
ctggttccgccgcggccccgcggtg

SEQ ID NO: 4253327 - DNA, 25 bp, Homo sapien
aggctgcggtgtcttcccgcttccg

SEQ ID NO: 4253328 - DNA, 25 bp, Homo sapien
ccagcctcgctccaaaggcagcatc

SEQ ID NO: 4253329 - DNA, 25 bp, Homo sapien
ggctgcgaggctgcggtgtcttccc

SEQ ID NO: 4253330 - DNA, 25 bp, Homo sapien
agtgaggtactcctgctccggtgcc

SEQ ID NO: 4253331 - DNA, 25 bp, Homo sapien
tccctaatcgagcagcctttcatca

SEQ ID NO: 4253332 - DNA, 25 bp, Homo sapien
aggtgccatccctaatcgagcagcc

SEQ ID NO: 4253333 - DNA, 25 bp, Homo sapien
gtgttttccgccagaaagctggctg

SEQ ID NO: 4253334 - DNA, 25 bp, Homo sapien
gtccatctcatcagggaaattcgtg

SEQ ID NO: 4253335 - DNA, 25 bp, Homo sapien
gctttcgtggcagtgtatggcagcc

SEQ ID NO: 4253336 - DNA, 25 bp, Homo sapien
tttgggctgcactcggtgccatacg

SEQ ID NO: 4253337 - DNA, 25 bp, Homo sapien
tgccagggcactcagagaactactg

SEQ ID NO: 4253338 - DNA, 25 bp, Homo sapien
cacagaggctgatggctaagtcacc

SEQ ID NO: 4253339 - DNA, 25 bp, Homo sapien
gccttccctgaccagagctcagctg

SEQ ID NO: 4253340 - DNA, 25 bp, Homo sapien
cccagggaagtccagtccagtcttg

SEQ ID NO: 4253341 - DNA, 25 bp, Homo sapien
cagtccagtcttgccaagctccaag

SEQ ID NO: 4253342 - DNA, 25 bp, Homo sapien
gaagtccagtccagtcttgccaagc

SEQ ID NO: 4253343 - DNA, 25 bp, Homo sapien
tgcttctaagctacgctgctgactg

SEQ ID NO: 4253344 - DNA, 25 bp, Homo sapien
ctgcttctaagctacgctgctgact

SEQ ID NO: 4253345 - DNA, 25 bp, Homo sapien
tagatacttggagaaggaacggccg

SEQ ID NO: 4253346 - DNA, 25 bp, Homo sapien
tagttgttgcctaccatgggagagg

SEQ ID NO: 4253347 - DNA, 25 bp, Homo sapien
cagcacttgccatatcgacaggtaa

SEQ ID NO: 4253348 - DNA, 25 bp, Homo sapien
aacggccgggtcaaagagtgtcagc

SEQ ID NO: 4253349 - DNA, 25 bp, Homo sapien
agagagctacatagtccctctcagg

SEQ ID NO: 4253350 - DNA, 25 bp, Homo sapien
cctgttctggactgtgtgctttgcc

SEQ ID NO: 4253351 - DNA, 25 bp, Homo sapien
gagctacatagtccctctcaggaca

SEQ ID NO: 4253352 - DNA, 25 bp, Homo sapien
tcaggacattacagcccccacttcc

SEQ ID NO: 4253353 - DNA, 25 bp, Homo sapien
tatgccgaggagtcctggaatatct

SEQ ID NO: 4253354 - DNA, 25 bp, Homo sapien
gactttatgccgaggagtcctggaa

SEQ ID NO: 4253355 - DNA, 25 bp, Homo sapien
cacagaagactttatgccgaggagt

SEQ ID NO: 4253356 - DNA, 25 bp, Homo sapien
ccgaggagtcctggaatatctcctt

SEQ ID NO: 4253357 - DNA, 25 bp, Homo sapien
aatgcagctgagaacaacccagggc

SEQ ID NO: 4253358 - DNA, 25 bp, Homo sapien
aggctccgggctcagctggagtagg

SEQ ID NO: 4253359 - DNA, 25 bp, Homo sapien
gctcagctggagtaggtgagtaggg

SEQ ID NO: 4253360 - DNA, 25 bp, Homo sapien
taggggtgaacacacaaggtgagtc

SEQ ID NO: 4253361 - DNA, 25 bp, Homo sapien
ccccttgccgggaccccctgctcat

SEQ ID NO: 4253362 - DNA, 25 bp, Homo sapien
gccccttgccgggaccccctgctca

SEQ ID NO: 4253363 - DNA, 25 bp, Homo sapien
gacactgctggtgagcggaattgct

SEQ ID NO: 4253364 - DNA, 25 bp, Homo sapien
aattgctagaggttcatcccaggcc

SEQ ID NO: 4253365 - DNA, 25 bp, Homo sapien
tcagggtgagtccatgtgtctctcc

SEQ ID NO: 4253366 - DNA, 25 bp, Homo sapien
tgaagcccagagaccttaagtagct

SEQ ID NO: 4253367 - DNA, 25 bp, Homo sapien
tccctgtgtcggagtccctctgcga

SEQ ID NO: 4253368 - DNA, 25 bp, Homo sapien
ctccctgtgtcggagtccctctgcg

SEQ ID NO: 4253369 - DNA, 25 bp, Homo sapien
gatatgatgcgatgaagatgccact

SEQ ID NO: 4253370 - DNA, 25 bp, Homo sapien
ttactgaccagaggagactaaggag

SEQ ID NO: 4253371 - DNA, 25 bp, Homo sapien
ggctgatctaggtgacttgcttcca

SEQ ID NO: 4253372 - DNA, 25 bp, Homo sapien
tcatgatcccatgcaaactctgaga

SEQ ID NO: 4253373 - DNA, 25 bp, Homo sapien
ttcacaagcttaacggagcccggta

SEQ ID NO: 4253374 - DNA, 25 bp, Homo sapien
gagtccagcctgtaatcatgtcctt

SEQ ID NO: 4253375 - DNA, 25 bp, Homo sapien
gttaagatgcttcgggctggacaca

SEQ ID NO: 4253376 - DNA, 25 bp, Homo sapien
tgcacaggctacagtcggtgagtcc

SEQ ID NO: 4253377 - DNA, 25 bp, Homo sapien
ctgcatcgctaagatggagatgaca

SEQ ID NO: 4253378 - DNA, 25 bp, Homo sapien
tgcatcgctaagatggagatgacaa

SEQ ID NO: 4253379 - DNA, 25 bp, Homo sapien
gcatcgctaagatggagatgacaac

SEQ ID NO: 4253380 - DNA, 25 bp, Homo sapien
taacgtgtgaaaagtgccaggcagc

SEQ ID NO: 4253381 - DNA, 25 bp, Homo sapien
gtgaagagcgattccaacccagaaa

SEQ ID NO: 4253382 - DNA, 25 bp, Homo sapien
cacaagcagtaagccgtgaagagcg

SEQ ID NO: 4253383 - DNA, 25 bp, Homo sapien
gaaagtcagctttcgagttcacgtg

SEQ ID NO: 4253384 - DNA, 25 bp, Homo sapien
cagctgatctaccactcttccacag

SEQ ID NO: 4253385 - DNA, 25 bp, Homo sapien
cacagcctgtctgagcttttctctc

SEQ ID NO: 4253386 - DNA, 25 bp, Homo sapien
tgatctaccactcttccacagcctg

SEQ ID NO: 4253387 - DNA, 25 bp, Homo sapien
ttccacagcctgtctgagcttttct

SEQ ID NO: 4253388 - DNA, 25 bp, Homo sapien
tagctgttggtcttattgttgctct

SEQ ID NO: 4253389 - DNA, 25 bp, Homo sapien
gcttttctatgatgtgcctaaatgt

SEQ ID NO: 4253390 - DNA, 25 bp, Homo sapien
ctatctgggactcccaagtacacct

SEQ ID NO: 4253391 - DNA, 25 bp, Homo sapien
tctgtgttcctaaggttggcaatta

SEQ ID NO: 4253392 - DNA, 25 bp, Homo sapien
catgcctagagcaagggagtctgca

SEQ ID NO: 4253393 - DNA, 25 bp, Homo sapien
cgtttactgagggatgttggccaac

SEQ ID NO: 4253394 - DNA, 25 bp, Homo sapien
tagtacaagacgtgctgttggccgg

SEQ ID NO: 4253395 - DNA, 25 bp, Homo sapien
gaatcaaggtctcagcaggctcagt

SEQ ID NO: 4253396 - DNA, 25 bp, Homo sapien
tgctgggacctctcggaaaggccat

SEQ ID NO: 4253397 - DNA, 25 bp, Homo sapien
tctacctaggactggagctaactgg

SEQ ID NO: 4253398 - DNA, 25 bp, Homo sapien
tgtcttggagcacaggagaccagcg

SEQ ID NO: 4253399 - DNA, 25 bp, Homo sapien
caaccccagctgctaggcaatgtgg

SEQ ID NO: 4253400 - DNA, 25 bp, Homo sapien
tttaatggtgttcccagactgggcc

SEQ ID NO: 4253401 - DNA, 25 bp, Homo sapien
gacatacatacgtgcagggtgctta

SEQ ID NO: 4253402 - DNA, 25 bp, Homo sapien
aatgtgtattgtacccagcccggaa

SEQ ID NO: 4253403 - DNA, 25 bp, Homo sapien
agaatttgacttgaccctgggatgc

SEQ ID NO: 4253404 - DNA, 25 bp, Homo sapien
gtgtgccgggctatgttctccgtgc

SEQ ID NO: 4253405 - DNA, 25 bp, Homo sapien
tgtgtgccgggctatgttctccgtg

SEQ ID NO: 4253406 - DNA, 25 bp, Homo sapien
tgccgggctatgttctccgtgctgg

SEQ ID NO: 4253407 - DNA, 25 bp, Homo sapien
tgtgccgggctatgttctccgtgct

SEQ ID NO: 4253408 - DNA, 25 bp, Homo sapien
tcctgttttgaagaaggcttgaggg

SEQ ID NO: 4253409 - DNA, 25 bp, Homo sapien
tgccatagggacagttcctgccctt

SEQ ID NO: 4253410 - DNA, 25 bp, Homo sapien
ctgttttgaagaaggcttgagggct

SEQ ID NO: 4253411 - DNA, 25 bp, Homo sapien
cctctttgtcccatggttgccatag

SEQ ID NO: 4253412 - DNA, 25 bp, Homo sapien
gatgggcactttcacatgagcttgc

SEQ ID NO: 4253413 - DNA, 25 bp, Homo sapien
tttgtttctggagaacgtggccaca

SEQ ID NO: 4253414 - DNA, 25 bp, Homo sapien
tggagctggcttaaaggcttcaggc

SEQ ID NO: 4253415 - DNA, 25 bp, Homo sapien
tggccacatccagctttggagctgg

SEQ ID NO: 4253416 - DNA, 25 bp, Homo sapien
gcactggacatccaagttcctttga

SEQ ID NO: 4253417 - DNA, 25 bp, Homo sapien
cccaggctctgaggccgacatctgg

SEQ ID NO: 4253418 - DNA, 25 bp, Homo sapien
tccaagttcctttgatcctaagttc

SEQ ID NO: 4253419 - DNA, 25 bp, Homo sapien
gacatccaagttcctttgatcctaa

SEQ ID NO: 4253420 - DNA, 25 bp, Homo sapien
ctaggtttttaccgcgaggttgctg

SEQ ID NO: 4253421 - DNA, 25 bp, Homo sapien
ccacttccaacgctcccgctaggtt

SEQ ID NO: 4253422 - DNA, 25 bp, Homo sapien
cacttccaacgctcccgctaggttt

SEQ ID NO: 4253423 - DNA, 25 bp, Homo sapien
tttttaccgcgaggttgctggcagc

SEQ ID NO: 4253424 - DNA, 25 bp, Homo sapien
ccttctctcctcctagaccccgagg

SEQ ID NO: 4253425 - DNA, 25 bp, Homo sapien
cttctctcctcctagaccccgaggc

SEQ ID NO: 4253426 - DNA, 25 bp, Homo sapien
ttctctcctcctagaccccgaggct

SEQ ID NO: 4253427 - DNA, 25 bp, Homo sapien
ttcaccagatgctgggacctctgag

SEQ ID NO: 4253428 - DNA, 25 bp, Homo sapien
gagtctccatcatagaggaaacact

SEQ ID NO: 4253429 - DNA, 25 bp, Homo sapien
tttccctgcattttacccttctctg

SEQ ID NO: 4253430 - DNA, 25 bp, Homo sapien
ttacccttctctgcttcaccagatg

SEQ ID NO: 4253431 - DNA, 25 bp, Homo sapien
gaagagagtcttattgttggagttc

SEQ ID NO: 4253432 - DNA, 25 bp, Homo sapien
cagaagaggagtgaagtctttgttc

SEQ ID NO: 4253433 - DNA, 25 bp, Homo sapien
tgaatataattctcgctaatagaag

SEQ ID NO: 4253434 - DNA, 25 bp, Homo sapien
tttctccccgtaggaggtgtgaata

SEQ ID NO: 4253435 - DNA, 25 bp, Homo sapien
gaagatccagtaccagctctgaggc

SEQ ID NO: 4253436 - DNA, 25 bp, Homo sapien
caatgatccctgaagggtttccaga

SEQ ID NO: 4253437 - DNA, 25 bp, Homo sapien
tctgaggccagttctaaaaggcccc

SEQ ID NO: 4253438 - DNA, 25 bp, Homo sapien
gaagagtgcccgcttcatccagatc

SEQ ID NO: 4253439 - DNA, 25 bp, Homo sapien
ttaatcagacgtttgcagaaccctg

SEQ ID NO: 4253440 - DNA, 25 bp, Homo sapien
aagagctatctgtcaggtatacata

SEQ ID NO: 4253441 - DNA, 25 bp, Homo sapien
ggtggaaaatggctcctgttcattt

SEQ ID NO: 4253442 - DNA, 25 bp, Homo sapien
tttgataagagctatctgtcaggta

SEQ ID NO: 4253443 - DNA, 25 bp, Homo sapien
ctgggtcagggtgtggcaggccatg

SEQ ID NO: 4253444 - DNA, 25 bp, Homo sapien
tcagggtgtggcaggccatgacccc

SEQ ID NO: 4253445 - DNA, 25 bp, Homo sapien
gggtgtggcaggccatgaccccagt

SEQ ID NO: 4253446 - DNA, 25 bp, Homo sapien
gtgtggcaggccatgaccccagtcc

SEQ ID NO: 4253447 - DNA, 25 bp, Homo sapien
gtgcccccgatcagtgtgctcctgt

SEQ ID NO: 4253448 - DNA, 25 bp, Homo sapien
ggcggtggtaggctcagcagacaca

SEQ ID NO: 4253449 - DNA, 25 bp, Homo sapien
acagcagtagcaggtgactgcaaat

SEQ ID NO: 4253450 - DNA, 25 bp, Homo sapien
aaatactccattgaatgattgtgcc

SEQ ID NO: 4253451 - DNA, 25 bp, Homo sapien
tttgtgctttgacccatgagtccag

SEQ ID NO: 4253452 - DNA, 25 bp, Homo sapien
gttttgtgctttgacccatgagtcc

SEQ ID NO: 4253453 - DNA, 25 bp, Homo sapien
tgctttgacccatgagtccagcctc

SEQ ID NO: 4253454 - DNA, 25 bp, Homo sapien
tgtgctttgacccatgagtccagcc

SEQ ID NO: 4253455 - DNA, 25 bp, Homo sapien
gtagcccagatgacgcagggtttcc

SEQ ID NO: 4253456 - DNA, 25 bp, Homo sapien
gtttccacagtatcacatttgcgct

SEQ ID NO: 4253457 - DNA, 25 bp, Homo sapien
cgtggtcccagttacagtgcaaatg

SEQ ID NO: 4253458 - DNA, 25 bp, Homo sapien
gatgtggaaacttagcctccccagg

SEQ ID NO: 4253459 - DNA, 25 bp, Homo sapien
taccagggtcgatgggagcagccat

SEQ ID NO: 4253460 - DNA, 25 bp, Homo sapien
agcaataccagggtcgatgggagca

SEQ ID NO: 4253461 - DNA, 25 bp, Homo sapien
ctcgtagcaataccagggtcgatgg

SEQ ID NO: 4253462 - DNA, 25 bp, Homo sapien
aataccagggtcgatgggagcagcc

SEQ ID NO: 4253463 - DNA, 25 bp, Homo sapien
taagcctgacgctcacatagtggct

SEQ ID NO: 4253464 - DNA, 25 bp, Homo sapien
tgtatcacccatggctctgactcat

SEQ ID NO: 4253465 - DNA, 25 bp, Homo sapien
aaggcaccagttacaaatgttcagg

SEQ ID NO: 4253466 - DNA, 25 bp, Homo sapien
ccagcagaggctgtgctagagatgc

SEQ ID NO: 4253467 - DNA, 25 bp, Homo sapien
ggcatcagcctgaccgccaagttct

SEQ ID NO: 4253468 - DNA, 25 bp, Homo sapien
agacggccccggcacctatttctgg

SEQ ID NO: 4253469 - DNA, 25 bp, Homo sapien
tctgaaggaagggacgctgatgaaa

SEQ ID NO: 4253470 - DNA, 25 bp, Homo sapien
tacagcacctctctcatgagcaggg

SEQ ID NO: 4253471 - DNA, 25 bp, Homo sapien
taaaatcatttattaggtggggcat

SEQ ID NO: 4253472 - DNA, 25 bp, Homo sapien
aaaatcatttattaggtggggcatg

SEQ ID NO: 4253473 - DNA, 25 bp, Homo sapien
aaatcatttattaggtggggcatgg

SEQ ID NO: 4253474 - DNA, 25 bp, Homo sapien
aatcatttattaggtggggcatggt

SEQ ID NO: 4253475 - DNA, 25 bp, Homo sapien
tgtaggcgcggcatctagtggacac

SEQ ID NO: 4253476 - DNA, 25 bp, Homo sapien
gcacccagcccaggcgtagctcttg

SEQ ID NO: 4253477 - DNA, 25 bp, Homo sapien
aagtgcctgttggatgactgtctgg

SEQ ID NO: 4253478 - DNA, 25 bp, Homo sapien
ttcacccagctagctggcacccagc

SEQ ID NO: 4253479 - DNA, 25 bp, Homo sapien
ccacattactcagccaattctgttg

SEQ ID NO: 4253480 - DNA, 25 bp, Homo sapien
ggctctgcatctggctggtctcctg

SEQ ID NO: 4253481 - DNA, 25 bp, Homo sapien
cacattccacattactcagccaatt

SEQ ID NO: 4253482 - DNA, 25 bp, Homo sapien
accctgcacagagacgcagggcagg

SEQ ID NO: 4253483 - DNA, 25 bp, Homo sapien
ttctctgtggtccatggttcatgcc

SEQ ID NO: 4253484 - DNA, 25 bp, Homo sapien
cagaggttcgggcaccattttccaa

SEQ ID NO: 4253485 - DNA, 25 bp, Homo sapien
gggagttattcactccatggaggga

SEQ ID NO: 4253486 - DNA, 25 bp, Homo sapien
tcccgggcctgatgagaggtaacct

SEQ ID NO: 4253487 - DNA, 25 bp, Homo sapien
tcgggcagtgccttttcatccgtct

SEQ ID NO: 4253488 - DNA, 25 bp, Homo sapien
tacagagcggcctgtgagcatgagc

SEQ ID NO: 4253489 - DNA, 25 bp, Homo sapien
gagcatgagcttcccgctgtcttca

SEQ ID NO: 4253490 - DNA, 25 bp, Homo sapien
gtcttccagagcattaacccctcga

SEQ ID NO: 4253491 - DNA, 25 bp, Homo sapien
tgcaagcacacatcactttagaggg

SEQ ID NO: 4253492 - DNA, 25 bp, Homo sapien
caataacagatggaatcctgtggac

SEQ ID NO: 4253493 - DNA, 25 bp, Homo sapien
gagcagtcctcaacactatgtcagt

SEQ ID NO: 4253494 - DNA, 25 bp, Homo sapien
tgtgccaccagttttctaacaaggg

SEQ ID NO: 4253495 - DNA, 25 bp, Homo sapien
ccagatctgtatcactccggagcaa

SEQ ID NO: 4253496 - DNA, 25 bp, Homo sapien
taaaggcaattaagcttccccagtc

SEQ ID NO: 4253497 - DNA, 25 bp, Homo sapien
tcaaattgatcagtggttcaggcct

SEQ ID NO: 4253498 - DNA, 25 bp, Homo sapien
aaagcagtgccgacttcaatgtgca

SEQ ID NO: 4253499 - DNA, 25 bp, Homo sapien
tactgggcctataacattgtgcagg

SEQ ID NO: 4253500 - DNA, 25 bp, Homo sapien
gattagatcagagctccagtctcac

SEQ ID NO: 4253501 - DNA, 25 bp, Homo sapien
gcagggcacttatctcacctcagga

SEQ ID NO: 4253502 - DNA, 25 bp, Homo sapien
ttctcctgtcgcagcctcatgaagt

SEQ ID NO: 4253503 - DNA, 25 bp, Homo sapien
aaaagagtacacaaccacaaagcac

SEQ ID NO: 4253504 - DNA, 25 bp, Homo sapien
gtacacaaccacaaagcactgggcc

SEQ ID NO: 4253505 - DNA, 25 bp, Homo sapien
gcccggccaatgccatctattaaaa

SEQ ID NO: 4253506 - DNA, 25 bp, Homo sapien
catgcccggccaatgccatctatta

SEQ ID NO: 4253507 - DNA, 25 bp, Homo sapien
gaccgtagaatagtcaacgctgagt

SEQ ID NO: 4253508 - DNA, 25 bp, Homo sapien
gaatgctgaacgaccctaatgaccg

SEQ ID NO: 4253509 - DNA, 25 bp, Homo sapien
tgaagcactggttgtgcgacacgca

SEQ ID NO: 4253510 - DNA, 25 bp, Homo sapien
aactgtagtggatcagatgggcagc

SEQ ID NO: 4253511 - DNA, 25 bp, Homo sapien
cagaacgggcgcatctttagacctt

SEQ ID NO: 4253512 - DNA, 25 bp, Homo sapien
actatcagtaccgaggaagggccga

SEQ ID NO: 4253513 - DNA, 25 bp, Homo sapien
catttaggataaataagcgcctgca

SEQ ID NO: 4253514 - DNA, 25 bp, Homo sapien
ggcatggaattacacaagatctgga

SEQ ID NO: 4253515 - DNA, 25 bp, Homo sapien
ctgggagaatccgtcgcgccagtca

SEQ ID NO: 4253516 - DNA, 25 bp, Homo sapien
caacaacagacactttgcgagcctt

SEQ ID NO: 4253517 - DNA, 25 bp, Homo sapien
tgcgcgacgtccacgagtttttagg

SEQ ID NO: 4253518 - DNA, 25 bp, Homo sapien
tttttaggacgaccagcccttcagc

SEQ ID NO: 4253519 - DNA, 25 bp, Homo sapien
ggctcccgccatccgccgacaccgg

SEQ ID NO: 4253520 - DNA, 25 bp, Homo sapien
ggcgtctcgtctctcgcccgctgcc

SEQ ID NO: 4253521 - DNA, 25 bp, Homo sapien
ctcggcgtctcgtctctcgcccgct

SEQ ID NO: 4253522 - DNA, 25 bp, Homo sapien
ccgggctcccgccatccgccgacac

SEQ ID NO: 4253523 - DNA, 25 bp, Homo sapien
cgcccggcgctttgcatagtgggcc

SEQ ID NO: 4253524 - DNA, 25 bp, Homo sapien
tagtccgcctttggcggccgtcgca

SEQ ID NO: 4253525 - DNA, 25 bp, Homo sapien
gccgccattttgttctcgacggaga

SEQ ID NO: 4253526 - DNA, 25 bp, Homo sapien
cgccttatagttggccctccgccag

SEQ ID NO: 4253527 - DNA, 25 bp, Homo sapien
gcatgagccaccacacccagtccag

SEQ ID NO: 4253528 - DNA, 25 bp, Homo sapien
atgagccaccacacccagtccagat

SEQ ID NO: 4253529 - DNA, 25 bp, Homo sapien
aggcatgagccaccacacccagtcc

SEQ ID NO: 4253530 - DNA, 25 bp, Homo sapien
caatcttcccacctccaccttccaa

SEQ ID NO: 4253531 - DNA, 25 bp, Homo sapien
agcaggaacatgtcgattttgcttc

SEQ ID NO: 4253532 - DNA, 25 bp, Homo sapien
gcttccttggttacaggcagtgata

SEQ ID NO: 4253533 - DNA, 25 bp, Homo sapien
tacaggcagtgatagtgtacttgac

SEQ ID NO: 4253534 - DNA, 25 bp, Homo sapien
gatagtgtacttgaccttccgcaga

SEQ ID NO: 4253535 - DNA, 25 bp, Homo sapien
ccagtgccataaagtagtaacaata

SEQ ID NO: 4253536 - DNA, 25 bp, Homo sapien
cacaccagtgccataaagtagtaac

SEQ ID NO: 4253537 - DNA, 25 bp, Homo sapien
caccagtgccataaagtagtaacaa

SEQ ID NO: 4253538 - DNA, 25 bp, Homo sapien
cttcacaccagtgccataaagtagt

SEQ ID NO: 4253539 - DNA, 25 bp, Homo sapien
ggattacaggccccgccatcatacc

SEQ ID NO: 4253540 - DNA, 25 bp, Homo sapien
gccccgccatcatacccggcttatt

SEQ ID NO: 4253541 - DNA, 25 bp, Homo sapien
caggccccgccatcatacccggctt

SEQ ID NO: 4253542 - DNA, 25 bp, Homo sapien
tacaggccccgccatcatacccggc

SEQ ID NO: 4253543 - DNA, 25 bp, Homo sapien
tctttgcaacagagatgttgaactg

SEQ ID NO: 4253544 - DNA, 25 bp, Homo sapien
tatgagatcattccagggtcctttg

SEQ ID NO: 4253545 - DNA, 25 bp, Homo sapien
gagatgttgaactggctggaacaga

SEQ ID NO: 4253546 - DNA, 25 bp, Homo sapien
gagaatggtggtgtatgagatcatt

SEQ ID NO: 4253547 - DNA, 25 bp, Homo sapien
tactgtgctgtaggaaactgagttc

SEQ ID NO: 4253548 - DNA, 25 bp, Homo sapien
ttccagccagagacatagcatgttt

SEQ ID NO: 4253549 - DNA, 25 bp, Homo sapien
gatgctagacctgcccataagtgta

SEQ ID NO: 4253550 - DNA, 25 bp, Homo sapien
caaaagtgtggtacagatgctagac

SEQ ID NO: 4253551 - DNA, 25 bp, Homo sapien
cagatctccaggaataggacccagg

SEQ ID NO: 4253552 - DNA, 25 bp, Homo sapien
agtatgcttaatgctcaggccacgt

SEQ ID NO: 4253553 - DNA, 25 bp, Homo sapien
ttcaagtggacagtagagttcagcc

SEQ ID NO: 4253554 - DNA, 25 bp, Homo sapien
tttgagtggctagcccaggtggaac

SEQ ID NO: 4253555 - DNA, 25 bp, Homo sapien
aaaggcccaaggtgagataaggtct

SEQ ID NO: 4253556 - DNA, 25 bp, Homo sapien
cagcaggcactgttgtggcttccca

SEQ ID NO: 4253557 - DNA, 25 bp, Homo sapien
tctgcagtacacacaaaaggcccaa

SEQ ID NO: 4253558 - DNA, 25 bp, Homo sapien
gataaggtctcagtgctacagttaa

SEQ ID NO: 4253559 - DNA, 25 bp, Homo sapien
tacatctgtgagtctgcatcccgtc

SEQ ID NO: 4253560 - DNA, 25 bp, Homo sapien
tagaccctagttcactgagcaagaa

SEQ ID NO: 4253561 - DNA, 25 bp, Homo sapien
tgttgacagacaaagccatcccctg

SEQ ID NO: 4253562 - DNA, 25 bp, Homo sapien
gctgtgcatgtatcctcgggcagga

SEQ ID NO: 4253563 - DNA, 25 bp, Homo sapien
tattgaggcagaacccatattggag

SEQ ID NO: 4253564 - DNA, 25 bp, Homo sapien
ggtacctcttgtcacttcatctgca

SEQ ID NO: 4253565 - DNA, 25 bp, Homo sapien
catattggagcagaatttgggtacc

SEQ ID NO: 4253566 - DNA, 25 bp, Homo sapien
tatgtggcccctcaaataagctggt

SEQ ID NO: 4253567 - DNA, 25 bp, Homo sapien
agatgtccagaaccaatcatgtggg

SEQ ID NO: 4253568 - DNA, 25 bp, Homo sapien
gcagcaatcacgatgcctgggctgg

SEQ ID NO: 4253569 - DNA, 25 bp, Homo sapien
cagactgtgtatagcactgcagagc

SEQ ID NO: 4253570 - DNA, 25 bp, Homo sapien
gctaaaaggtatgttcgcaggagat

SEQ ID NO: 4253571 - DNA, 25 bp, Homo sapien
ggctaacactgtacatgaggcttga

SEQ ID NO: 4253572 - DNA, 25 bp, Homo sapien
catccattgaagaggcagtgctaga

SEQ ID NO: 4253573 - DNA, 25 bp, Homo sapien
tttttagcagcctgatagagcctcc

SEQ ID NO: 4253574 - DNA, 25 bp, Homo sapien
cacctaccggtgaggcattcaggca

SEQ ID NO: 4253575 - DNA, 25 bp, Homo sapien
tcaccggagccagtctatagcgcaa

SEQ ID NO: 4253576 - DNA, 25 bp, Homo sapien
agtataatggccagatcaccggagc

SEQ ID NO: 4253577 - DNA, 25 bp, Homo sapien
cactcccttttatagattggcccgg

SEQ ID NO: 4253578 - DNA, 25 bp, Homo sapien
tctgtgcaatacagacgggacccca

SEQ ID NO: 4253579 - DNA, 25 bp, Homo sapien
agtgtgagcgttaccttcccagggc

SEQ ID NO: 4253580 - DNA, 25 bp, Homo sapien
tctgcagactcctctagaacctggg

SEQ ID NO: 4253581 - DNA, 25 bp, Homo sapien
cagtcggtggtgacccagttcagaa

SEQ ID NO: 4253582 - DNA, 25 bp, Homo sapien
tcactagggtacaggagacaatcat

SEQ ID NO: 4253583 - DNA, 25 bp, Homo sapien
ttgggctgtggtgaaacaaccttgc

SEQ ID NO: 4253584 - DNA, 25 bp, Homo sapien
gcataacagctttcagatcccagtt

SEQ ID NO: 4253585 - DNA, 25 bp, Homo sapien
taagtccccttgctggtgatggctg

SEQ ID NO: 4253586 - DNA, 25 bp, Homo sapien
tcaggttggttaagtaaagtcagcc

SEQ ID NO: 4253587 - DNA, 25 bp, Homo sapien
tcttctgaggcagttaggacaccag

SEQ ID NO: 4253588 - DNA, 25 bp, Homo sapien
tttgggctccaactttcacagggct

SEQ ID NO: 4253589 - DNA, 25 bp, Homo sapien
ggacatttcctgcagagcactcttg

SEQ ID NO: 4253590 - DNA, 25 bp, Homo sapien
tatgggtgttccaaggtccctcggc

SEQ ID NO: 4253591 - DNA, 25 bp, Homo sapien
gatatgtgtgcccttaaaagctaca

SEQ ID NO: 4253592 - DNA, 25 bp, Homo sapien
taatctggccttaaactgagactcg

SEQ ID NO: 4253593 - DNA, 25 bp, Homo sapien
tgcggcatataagctacagatctca

SEQ ID NO: 4253594 - DNA, 25 bp, Homo sapien
cagtagttgctcatagacctgggaa

SEQ ID NO: 4253595 - DNA, 25 bp, Homo sapien
tatgagaccatagtactcagtgcct

SEQ ID NO: 4253596 - DNA, 25 bp, Homo sapien
tggcctcatcccacaagattgtgcg

SEQ ID NO: 4253597 - DNA, 25 bp, Homo sapien
gggctatttagcttaacagcagtct

SEQ ID NO: 4253598 - DNA, 25 bp, Homo sapien
tgacaatcacgctattgaaagtggc

SEQ ID NO: 4253599 - DNA, 25 bp, Homo sapien
ggtagggaagccacacacatgtttc

SEQ ID NO: 4253600 - DNA, 25 bp, Homo sapien
tctttacatccacccagcaaggcag

SEQ ID NO: 4253601 - DNA, 25 bp, Homo sapien
taccttagccttagcggccaagagg

SEQ ID NO: 4253602 - DNA, 25 bp, Homo sapien
tacagacaggccttaaattggcaag

SEQ ID NO: 4253603 - DNA, 25 bp, Homo sapien
agtctgatgcatgacagaactcact

SEQ ID NO: 4253604 - DNA, 25 bp, Homo sapien
gatacaggtttagatggtgctgcca

SEQ ID NO: 4253605 - DNA, 25 bp, Homo sapien
aaagtctgatgcatgacagaactca

SEQ ID NO: 4253606 - DNA, 25 bp, Homo sapien
accacagcagatgatacaggtttag

SEQ ID NO: 4253607 - DNA, 25 bp, Homo sapien
tatccaggatcaagtagcctacagg

SEQ ID NO: 4253608 - DNA, 25 bp, Homo sapien
ggcaggtggtatcaaggtcaagact

SEQ ID NO: 4253609 - DNA, 25 bp, Homo sapien
tgtcaagcctgaactcaaaccctag

SEQ ID NO: 4253610 - DNA, 25 bp, Homo sapien
ttgcagccaagtagaacgcccaggc

SEQ ID NO: 4253611 - DNA, 25 bp, Homo sapien
tcctccagagcttggtaagcagggc

SEQ ID NO: 4253612 - DNA, 25 bp, Homo sapien
aagattcaaagccagcggagaccag

SEQ ID NO: 4253613 - DNA, 25 bp, Homo sapien
gggtcgcaggaccaaaacaggtgtc

SEQ ID NO: 4253614 - DNA, 25 bp, Homo sapien
tcagataaagtcaggtctccttggc

SEQ ID NO: 4253615 - DNA, 25 bp, Homo sapien
ctattaggaagcgttttattgacca

SEQ ID NO: 4253616 - DNA, 25 bp, Homo sapien
taggaagcgttttattgaccagcag

SEQ ID NO: 4253617 - DNA, 25 bp, Homo sapien
gaagcgttttattgaccagcagagc

SEQ ID NO: 4253618 - DNA, 25 bp, Homo sapien
ttaggaagcgttttattgaccagca

SEQ ID NO: 4253619 - DNA, 25 bp, Homo sapien
aatctccccactggtcagacaccat

SEQ ID NO: 4253620 - DNA, 25 bp, Homo sapien
ggccaaagtaatcccattccaatct

SEQ ID NO: 4253621 - DNA, 25 bp, Homo sapien
tcctctcccacatccttttacacag

SEQ ID NO: 4253622 - DNA, 25 bp, Homo sapien
cttttacacaggtgtgtaaagtcct

SEQ ID NO: 4253623 - DNA, 25 bp, Homo sapien
ggcatcggctttcagagcggctttg

SEQ ID NO: 4253624 - DNA, 25 bp, Homo sapien
catcggctttcagagcggctttgta

SEQ ID NO: 4253625 - DNA, 25 bp, Homo sapien
ctgggcatcggctttcagagcggct

SEQ ID NO: 4253626 - DNA, 25 bp, Homo sapien
tgggcatcggctttcagagcggctt

SEQ ID NO: 4253627 - DNA, 25 bp, Homo sapien
cagtactttcgagggccgaagttgg

SEQ ID NO: 4253628 - DNA, 25 bp, Homo sapien
cacagatgcactcccgcaggcagta

SEQ ID NO: 4253629 - DNA, 25 bp, Homo sapien
tgcactcccgcaggcagtactttcg

SEQ ID NO: 4253630 - DNA, 25 bp, Homo sapien
agggcacctgcccttccacttcaca

SEQ ID NO: 4253631 - DNA, 25 bp, Homo sapien
cacagacggcaaccaagcattggca

SEQ ID NO: 4253632 - DNA, 25 bp, Homo sapien
tacacagtgcggtcagcctatctgc

SEQ ID NO: 4253633 - DNA, 25 bp, Homo sapien
gagcgctgaaagaaggcctgctgtt

SEQ ID NO: 4253634 - DNA, 25 bp, Homo sapien
cattggcaactttgagtggcaggca

SEQ ID NO: 4253635 - DNA, 25 bp, Homo sapien
tctgggctgagaagtttgttccttc

SEQ ID NO: 4253636 - DNA, 25 bp, Homo sapien
ctctgggctgagaagtttgttcctt

SEQ ID NO: 4253637 - DNA, 25 bp, Homo sapien
cttccaggtcaaaccaaacaactca

SEQ ID NO: 4253638 - DNA, 25 bp, Homo sapien
tctctgggctgagaagtttgttcct

SEQ ID NO: 4253639 - DNA, 25 bp, Homo sapien
tgatgtgctccatgatctccttatt

SEQ ID NO: 4253640 - DNA, 25 bp, Homo sapien
ctgatgtgctccatgatctccttat

SEQ ID NO: 4253641 - DNA, 25 bp, Homo sapien
tctgatgtgctccatgatctcctta

SEQ ID NO: 4253642 - DNA, 25 bp, Homo sapien
tacagtgcgtgtagaaaatcctaag

SEQ ID NO: 4253643 - DNA, 25 bp, Homo sapien
tccaatgagatatacacccaatggg

SEQ ID NO: 4253644 - DNA, 25 bp, Homo sapien
taaatatctgagtggccaataagca

SEQ ID NO: 4253645 - DNA, 25 bp, Homo sapien
ctcgacaagaaagcagcccgttttt

SEQ ID NO: 4253646 - DNA, 25 bp, Homo sapien
aatatcagcatgagcgaggacgcgc

SEQ ID NO: 4253647 - DNA, 25 bp, Homo sapien
caatcgctttggaaaggcggtgcct

SEQ ID NO: 4253648 - DNA, 25 bp, Homo sapien
aacacaaggctagaatgtcccgctg

SEQ ID NO: 4253649 - DNA, 25 bp, Homo sapien
cctgtggagtactgctgggatctgc

SEQ ID NO: 4253650 - DNA, 25 bp, Homo sapien
catcctgacgctcccataggaagga

SEQ ID NO: 4253651 - DNA, 25 bp, Homo sapien
tctccaggcatgtctgggacagccc

SEQ ID NO: 4253652 - DNA, 25 bp, Homo sapien
ataagcaaacgcaggtagaaatggg

SEQ ID NO: 4253653 - DNA, 25 bp, Homo sapien
aaaattacccccatggtgtgaggca

SEQ ID NO: 4253654 - DNA, 25 bp, Homo sapien
taagtagaatcgcaggaagggtgac

SEQ ID NO: 4253655 - DNA, 25 bp, Homo sapien
tgcacccaagggtttttgtattgaa

SEQ ID NO: 4253656 - DNA, 25 bp, Homo sapien
aagggtgacggcgtcatgttcttaa

SEQ ID NO: 4253657 - DNA, 25 bp, Homo sapien
gttcttaaacatcatgatctgcacc

SEQ ID NO: 4253658 - DNA, 25 bp, Homo sapien
taattcactgtcatgaccttcacgg

SEQ ID NO: 4253659 - DNA, 25 bp, Homo sapien
acgttcccctggctcagatattgca

SEQ ID NO: 4253660 - DNA, 25 bp, Homo sapien
gcccagctccccatgcgtgttgtaa

SEQ ID NO: 4253661 - DNA, 25 bp, Homo sapien
tcacggagtccttgaacaccacgtt

SEQ ID NO: 4253662 - DNA, 25 bp, Homo sapien
aggactagctagcacccgcgcggat

SEQ ID NO: 4253663 - DNA, 25 bp, Homo sapien
cagcgacgagaaaggactagctagc

SEQ ID NO: 4253664 - DNA, 25 bp, Homo sapien
gactagctagcacccgcgcggatct

SEQ ID NO: 4253665 - DNA, 25 bp, Homo sapien
aaggactagctagcacccgcgcgga

SEQ ID NO: 4253666 - DNA, 25 bp, Homo sapien
taagtactgtggtgctaccagcacg

SEQ ID NO: 4253667 - DNA, 25 bp, Homo sapien
tatggcctagagctagttacacggc

SEQ ID NO: 4253668 - DNA, 25 bp, Homo sapien
aaggccccagagtagtgcatgcaaa

SEQ ID NO: 4253669 - DNA, 25 bp, Homo sapien
taaaatatctcatcagggcgggcac

SEQ ID NO: 4253670 - DNA, 25 bp, Homo sapien
gggggctgaggcacaaatatcactt

SEQ ID NO: 4253671 - DNA, 25 bp, Homo sapien
aaatacagagattaaccaggcgtgg

SEQ ID NO: 4253672 - DNA, 25 bp, Homo sapien
caaaatggtgaaactctacctctac

SEQ ID NO: 4253673 - DNA, 25 bp, Homo sapien
taaaaatacagagattaaccaggcg

SEQ ID NO: 4253674 - DNA, 25 bp, Homo sapien
ccagtgacagacaattgttctatca

SEQ ID NO: 4253675 - DNA, 25 bp, Homo sapien
gctgatcaaatagccttggaaatta

SEQ ID NO: 4253676 - DNA, 25 bp, Homo sapien
caccgattcctaaattagagacccg

SEQ ID NO: 4253677 - DNA, 25 bp, Homo sapien
ggccttttaaacagacccagatcag

SEQ ID NO: 4253678 - DNA, 25 bp, Homo sapien
gcctactagggatggacttctgtca

SEQ ID NO: 4253679 - DNA, 25 bp, Homo sapien
attcacattgataccctgcactggg

SEQ ID NO: 4253680 - DNA, 25 bp, Homo sapien
tagtggaaatacctcaaagtgcgca

SEQ ID NO: 4253681 - DNA, 25 bp, Homo sapien
taggcagtagcaaatggacccaaga

SEQ ID NO: 4253682 - DNA, 25 bp, Homo sapien
gatgttcgtcttcctcactgaaggg

SEQ ID NO: 4253683 - DNA, 25 bp, Homo sapien
gaatgaatggattccctgccactgc

SEQ ID NO: 4253684 - DNA, 25 bp, Homo sapien
tgatacaggtgggttcctcaaaggg

SEQ ID NO: 4253685 - DNA, 25 bp, Homo sapien
tgatgttatcgatctgctgcaggag

SEQ ID NO: 4253686 - DNA, 25 bp, Homo sapien
ggaggaccagtagtggcctcttcca

SEQ ID NO: 4253687 - DNA, 25 bp, Homo sapien
ggcccagaccacactctggtgggtt

SEQ ID NO: 4253688 - DNA, 25 bp, Homo sapien
gggtctaaggaaacccctgcagcag

SEQ ID NO: 4253689 - DNA, 25 bp, Homo sapien
tgctctggggtaagcgctcctggcc

SEQ ID NO: 4253690 - DNA, 25 bp, Homo sapien
caaagcataagcaaggtgggtgcga

SEQ ID NO: 4253691 - DNA, 25 bp, Homo sapien
cctagatccaaagcataagcaaggt

SEQ ID NO: 4253692 - DNA, 25 bp, Homo sapien
tagatccaaagcataagcaaggtgg

SEQ ID NO: 4253693 - DNA, 25 bp, Homo sapien
tccaaagcataagcaaggtgggtgc

SEQ ID NO: 4253694 - DNA, 25 bp, Homo sapien
gaaaagggccgatttctctgaagtc

SEQ ID NO: 4253695 - DNA, 25 bp, Homo sapien
tgaagtccagggaccgagtccgtgt

SEQ ID NO: 4253696 - DNA, 25 bp, Homo sapien
cttggcctgcctgatgaatgatgtg

SEQ ID NO: 4253697 - DNA, 25 bp, Homo sapien
agagtgcgcacttcatccatgcggc

SEQ ID NO: 4253698 - DNA, 25 bp, Homo sapien
gcctttcctcaagccttcgctggga

SEQ ID NO: 4253699 - DNA, 25 bp, Homo sapien
tctgcctttcctcaagccttcgctg

SEQ ID NO: 4253700 - DNA, 25 bp, Homo sapien
ttcctcaagccttcgctgggactcc

SEQ ID NO: 4253701 - DNA, 25 bp, Homo sapien
ctttcctcaagccttcgctgggact

SEQ ID NO: 4253702 - DNA, 25 bp, Homo sapien
tggttggcagtgacatcaaaccaag

SEQ ID NO: 4253703 - DNA, 25 bp, Homo sapien
gttggcagtgacatcaaaccaagca

SEQ ID NO: 4253704 - DNA, 25 bp, Homo sapien
ggcagtgacatcaaaccaagcaact

SEQ ID NO: 4253705 - DNA, 25 bp, Homo sapien
cagtgacatcaaaccaagcaacttt

SEQ ID NO: 4253706 - DNA, 25 bp, Homo sapien
agccgcaaattgcttggatgtggtg

SEQ ID NO: 4253707 - DNA, 25 bp, Homo sapien
gagtatctgatcattctctgcagcc

SEQ ID NO: 4253708 - DNA, 25 bp, Homo sapien
gttcaagcccaaggttaagatcttc

SEQ ID NO: 4253709 - DNA, 25 bp, Homo sapien
cacaaaaagtgtagctgagtatctg

SEQ ID NO: 4253710 - DNA, 25 bp, Homo sapien
agcgtctatcagctcatacactttc

SEQ ID NO: 4253711 - DNA, 25 bp, Homo sapien
tggcatgttccagactgtaggttgt

SEQ ID NO: 4253712 - DNA, 25 bp, Homo sapien
cttaaagcgtctatcagctcataca

SEQ ID NO: 4253713 - DNA, 25 bp, Homo sapien
catgttccagactgtaggttgtctc

SEQ ID NO: 4253714 - DNA, 25 bp, Homo sapien
tgatgctgccatcctgatgtattct

SEQ ID NO: 4253715 - DNA, 25 bp, Homo sapien
taatgatgctgccatcctgatgtat

SEQ ID NO: 4253716 - DNA, 25 bp, Homo sapien
atgatgctgccatcctgatgtattc

SEQ ID NO: 4253717 - DNA, 25 bp, Homo sapien
tttaatgatgctgccatcctgatgt

SEQ ID NO: 4253718 - DNA, 25 bp, Homo sapien
cacgatgtcaggtgtgtgctccttc

SEQ ID NO: 4253719 - DNA, 25 bp, Homo sapien
ctcagggactccttgctggcactgg

SEQ ID NO: 4253720 - DNA, 25 bp, Homo sapien
tctcatccaggaccgagctgacact

SEQ ID NO: 4253721 - DNA, 25 bp, Homo sapien
cagtgtgtacagcagcggatccggt

SEQ ID NO: 4253722 - DNA, 25 bp, Homo sapien
gcggttccggatgctgaacttattc

SEQ ID NO: 4253723 - DNA, 25 bp, Homo sapien
ggacatcctggtcgttgacccaagg

SEQ ID NO: 4253724 - DNA, 25 bp, Homo sapien
gacccaaggcaccacagacttttct

SEQ ID NO: 4253725 - DNA, 25 bp, Homo sapien
gcacataatagacccgcagaggcgg

SEQ ID NO: 4253726 - DNA, 25 bp, Homo sapien
gaatctttgcagactcagtatttgt

SEQ ID NO: 4253727 - DNA, 25 bp, Homo sapien
tctttgcagactcagtatttgttct

SEQ ID NO: 4253728 - DNA, 25 bp, Homo sapien
ctttgcagactcagtatttgttctg

SEQ ID NO: 4253729 - DNA, 25 bp, Homo sapien
ctcgaatctttgcagactcagtatt

SEQ ID NO: 4253730 - DNA, 25 bp, Homo sapien
ttttgaagtcggaaagatggcttct

SEQ ID NO: 4253731 - DNA, 25 bp, Homo sapien
agtggtcaattctagcagctcggtg

SEQ ID NO: 4253732 - DNA, 25 bp, Homo sapien
ttattgacttccacaacatagtggt

SEQ ID NO: 4253733 - DNA, 25 bp, Homo sapien
taacctgattattagtttattgact

SEQ ID NO: 4253734 - DNA, 25 bp, Homo sapien
aaatgacttatagtttctctgaggg

SEQ ID NO: 4253735 - DNA, 25 bp, Homo sapien
aaggaaggtagggagacaaatgact

SEQ ID NO: 4253736 - DNA, 25 bp, Homo sapien
atgacttatagtttctctgagggag

SEQ ID NO: 4253737 - DNA, 25 bp, Homo sapien
gaaggtagggagacaaatgacttat

SEQ ID NO: 4253738 - DNA, 25 bp, Homo sapien
tagctgaaagactcatatccttggg

SEQ ID NO: 4253739 - DNA, 25 bp, Homo sapien
ggatcaacccctccatagctgaaag

SEQ ID NO: 4253740 - DNA, 25 bp, Homo sapien
gggttcccacatgtaaggatcaacc

SEQ ID NO: 4253741 - DNA, 25 bp, Homo sapien
tccttgggtccctgactctgctcga

SEQ ID NO: 4253742 - DNA, 25 bp, Homo sapien
tctttatcttaattggagtggtggt

SEQ ID NO: 4253743 - DNA, 25 bp, Homo sapien
aactttttgaattgggccaggcgca

SEQ ID NO: 4253744 - DNA, 25 bp, Homo sapien
ttcttctttatcttaattggagtgg

SEQ ID NO: 4253745 - DNA, 25 bp, Homo sapien
ttatcttaattggagtggtggtgaa

SEQ ID NO: 4253746 - DNA, 25 bp, Homo sapien
tccccataggcttaactggacacag

SEQ ID NO: 4253747 - DNA, 25 bp, Homo sapien
tactgcccacgcacttattgaatgc

SEQ ID NO: 4253748 - DNA, 25 bp, Homo sapien
catccgtggactggtgttccccata

SEQ ID NO: 4253749 - DNA, 25 bp, Homo sapien
agagttcttgcttccccactactgc

SEQ ID NO: 4253750 - DNA, 25 bp, Homo sapien
catgactaggtaaattattttataa

SEQ ID NO: 4253751 - DNA, 25 bp, Homo sapien
tacttactgaaaatgggctagactg

SEQ ID NO: 4253752 - DNA, 25 bp, Homo sapien
tgttcccagaaaggacatagccctt

SEQ ID NO: 4253753 - DNA, 25 bp, Homo sapien
aaaactgcctggcaatgttcccaga

SEQ ID NO: 4253754 - DNA, 25 bp, Homo sapien
gaccaaatggagacgtaatctgctt

SEQ ID NO: 4253755 - DNA, 25 bp, Homo sapien
gctcttggaagctcaaaaaccaagg

SEQ ID NO: 4253756 - DNA, 25 bp, Homo sapien
ttttgttcttcgactatgaccttcc

SEQ ID NO: 4253757 - DNA, 25 bp, Homo sapien
cgcccagaggagcagcatcttatct

SEQ ID NO: 4253758 - DNA, 25 bp, Homo sapien
cctttttctgggctatagagggcaa

SEQ ID NO: 4253759 - DNA, 25 bp, Homo sapien
gaaactctgaaaacgcctggcacat

SEQ ID NO: 4253760 - DNA, 25 bp, Homo sapien
gttaaagctctcaacgacagcaggg

SEQ ID NO: 4253761 - DNA, 25 bp, Homo sapien
gctgatgagaactatcccgtgagtt

SEQ ID NO: 4253762 - DNA, 25 bp, Homo sapien
ctctgtgtctggttcgaaatgtggc

SEQ ID NO: 4253763 - DNA, 25 bp, Homo sapien
tcccctgggtcgtccagagaagcca

SEQ ID NO: 4253764 - DNA, 25 bp, Homo sapien
cctcgtaatgtgagtgaagctgata

SEQ ID NO: 4253765 - DNA, 25 bp, Homo sapien
agactgcagatccttcaggcacaga

SEQ ID NO: 4253766 - DNA, 25 bp, Homo sapien
aatttgccctttgacatcacggtct

SEQ ID NO: 4253767 - DNA, 25 bp, Homo sapien
ctaggaaggcaggaatctcatgcca

SEQ ID NO: 4253768 - DNA, 25 bp, Homo sapien
ttagcttaagcagcacacagatggt

SEQ ID NO: 4253769 - DNA, 25 bp, Homo sapien
ggaaccatggttcccgcagcattag

SEQ ID NO: 4253770 - DNA, 25 bp, Homo sapien
gagtcagcttgattcctcccaagga

SEQ ID NO: 4253771 - DNA, 25 bp, Homo sapien
acttcataattcatatgccacttca

SEQ ID NO: 4253772 - DNA, 25 bp, Homo sapien
taattcatatgccacttcagccact

SEQ ID NO: 4253773 - DNA, 25 bp, Homo sapien
ttcataattcatatgccacttcagc

SEQ ID NO: 4253774 - DNA, 25 bp, Homo sapien
cataattcatatgccacttcagcca

SEQ ID NO: 4253775 - DNA, 25 bp, Homo sapien
agtaagttcttgatacttgtaagac

SEQ ID NO: 4253776 - DNA, 25 bp, Homo sapien
gtaagttcttgatacttgtaagaca

SEQ ID NO: 4253777 - DNA, 25 bp, Homo sapien
taagttcttgatacttgtaagacac

SEQ ID NO: 4253778 - DNA, 25 bp, Homo sapien
tacaagccacagtatatagtgaggg

SEQ ID NO: 4253779 - DNA, 25 bp, Homo sapien
gatggactgtagaagaccaccgagg

SEQ ID NO: 4253780 - DNA, 25 bp, Homo sapien
gagggactgcctggtcctcaaagct

SEQ ID NO: 4253781 - DNA, 25 bp, Homo sapien
tatagcagccctaggtctggcctgt

SEQ ID NO: 4253782 - DNA, 25 bp, Homo sapien
acaaataacacaaagcccaccacat

SEQ ID NO: 4253783 - DNA, 25 bp, Homo sapien
caaataacacaaagcccaccacatc

SEQ ID NO: 4253784 - DNA, 25 bp, Homo sapien
aaataacacaaagcccaccacatcc

SEQ ID NO: 4253785 - DNA, 25 bp, Homo sapien
actcatctcaatttataaccgcagg

SEQ ID NO: 4253786 - DNA, 25 bp, Homo sapien
gggagggcacagactctatatgttt

SEQ ID NO: 4253787 - DNA, 25 bp, Homo sapien
taagactgtaaaatctgggagggca

SEQ ID NO: 4253788 - DNA, 25 bp, Homo sapien
taaccgcaggtacatacgtgaagtg

SEQ ID NO: 4253789 - DNA, 25 bp, Homo sapien
cagactgggcctgaccctctgtatg

SEQ ID NO: 4253790 - DNA, 25 bp, Homo sapien
gactgggcctgaccctctgtatgta

SEQ ID NO: 4253791 - DNA, 25 bp, Homo sapien
ccagactgggcctgaccctctgtat

SEQ ID NO: 4253792 - DNA, 25 bp, Homo sapien
actgggcctgaccctctgtatgtac

SEQ ID NO: 4253793 - DNA, 25 bp, Homo sapien
ctcctgcgggcacccaggtttgtcc

SEQ ID NO: 4253794 - DNA, 25 bp, Homo sapien
ggctcctgcgggcacccaggtttgt

SEQ ID NO: 4253795 - DNA, 25 bp, Homo sapien
ccgggctcctgcgggcacccaggtt

SEQ ID NO: 4253796 - DNA, 25 bp, Homo sapien
cgggctcctgcgggcacccaggttt

SEQ ID NO: 4253797 - DNA, 25 bp, Homo sapien
aaagggcggatacggattcgaatag

SEQ ID NO: 4253798 - DNA, 25 bp, Homo sapien
cgccgagtcttcgagggcgcgaaaa

SEQ ID NO: 4253799 - DNA, 25 bp, Homo sapien
cggaagacaagctggtagacgcctg

SEQ ID NO: 4253800 - DNA, 25 bp, Homo sapien
atctccatcggtcgctcggaactcg

SEQ ID NO: 4253801 - DNA, 25 bp, Homo sapien
tgctgatagacttcctgtacctcct

SEQ ID NO: 4253802 - DNA, 25 bp, Homo sapien
tgaggctttcacaatccccactttt

SEQ ID NO: 4253803 - DNA, 25 bp, Homo sapien
cttgccttgaggctttcacaatccc

SEQ ID NO: 4253804 - DNA, 25 bp, Homo sapien
ctgtgaagtgctgatagacttcctg

SEQ ID NO: 4253805 - DNA, 25 bp, Homo sapien
cttctgcgataagggaggcacttga

SEQ ID NO: 4253806 - DNA, 25 bp, Homo sapien
gctcttctgcgataagggaggcact

SEQ ID NO: 4253807 - DNA, 25 bp, Homo sapien
tcttctgcgataagggaggcacttg

SEQ ID NO: 4253808 - DNA, 25 bp, Homo sapien
ttgctcttctgcgataagggaggca

SEQ ID NO: 4253809 - DNA, 25 bp, Homo sapien
gggcgcatgtggcaagacctataat

SEQ ID NO: 4253810 - DNA, 25 bp, Homo sapien
gaggacccgggagattatgatgacc

SEQ ID NO: 4253811 - DNA, 25 bp, Homo sapien
gattatgaccgtggacatgacagcc

SEQ ID NO: 4253812 - DNA, 25 bp, Homo sapien
tacatcaaagcagaattacgacaac

SEQ ID NO: 4253813 - DNA, 25 bp, Homo sapien
actggaggtgaatggtcaagtctga

SEQ ID NO: 4253814 - DNA, 25 bp, Homo sapien
tcaggtactggaggtgaatggtcaa

SEQ ID NO: 4253815 - DNA, 25 bp, Homo sapien
gtactggaggtgaatggtcaagtct

SEQ ID NO: 4253816 - DNA, 25 bp, Homo sapien
gaggtgaatggtcaagtctgatctc

SEQ ID NO: 4253817 - DNA, 25 bp, Homo sapien
ccagccagcttgttctggattttgt

SEQ ID NO: 4253818 - DNA, 25 bp, Homo sapien
caacaacagttccagcgtttagtga

SEQ ID NO: 4253819 - DNA, 25 bp, Homo sapien
tccagcgtttagtgagggctggact

SEQ ID NO: 4253820 - DNA, 25 bp, Homo sapien
aacagttccagcgtttagtgagggc

SEQ ID NO: 4253821 - DNA, 25 bp, Homo sapien
agctgagacttagtagttggagatc

SEQ ID NO: 4253822 - DNA, 25 bp, Homo sapien
ttttagctgagacttagtagttgga

SEQ ID NO: 4253823 - DNA, 25 bp, Homo sapien
tttagctgagacttagtagttggag

SEQ ID NO: 4253824 - DNA, 25 bp, Homo sapien
tagctgagacttagtagttggagat

SEQ ID NO: 4253825 - DNA, 25 bp, Homo sapien
tggtggttgatcctcaggtagttag

SEQ ID NO: 4253826 - DNA, 25 bp, Homo sapien
caattttagacctgattaattgact

SEQ ID NO: 4253827 - DNA, 25 bp, Homo sapien
attttagacctgattaattgactta

SEQ ID NO: 4253828 - DNA, 25 bp, Homo sapien
gatcctcaggtagttagggaggaaa

SEQ ID NO: 4253829 - DNA, 25 bp, Homo sapien
acaacaatctgataccgaagacctc

SEQ ID NO: 4253830 - DNA, 25 bp, Homo sapien
aacacaacaatctgataccgaagac

SEQ ID NO: 4253831 - DNA, 25 bp, Homo sapien
aaaacacaacaatctgataccgaag

SEQ ID NO: 4253832 - DNA, 25 bp, Homo sapien
taaaaaacacaacaatctgataccg

SEQ ID NO: 4253833 - DNA, 25 bp, Homo sapien
tgtcatggattgctctgggaattct

SEQ ID NO: 4253834 - DNA, 25 bp, Homo sapien
attttgcagataaccttcactcttc

SEQ ID NO: 4253835 - DNA, 25 bp, Homo sapien
ctcctctgtcatggattgctctggg

SEQ ID NO: 4253836 - DNA, 25 bp, Homo sapien
ctctgggaattctgagccctagttc

SEQ ID NO: 4253837 - DNA, 25 bp, Homo sapien
tgagctaagacaaaagcacaagatc

SEQ ID NO: 4253838 - DNA, 25 bp, Homo sapien
ctatggatctagaatgaaagggcgt

SEQ ID NO: 4253839 - DNA, 25 bp, Homo sapien
taactacatatgctattcaggacag

SEQ ID NO: 4253840 - DNA, 25 bp, Homo sapien
gaaagggcgtgtatttgagtcctag

SEQ ID NO: 4253841 - DNA, 25 bp, Homo sapien
caggatgaccgggtaacccatcaaa

SEQ ID NO: 4253842 - DNA, 25 bp, Homo sapien
tctccaaaacactttgcatatatat

SEQ ID NO: 4253843 - DNA, 25 bp, Homo sapien
ataatcacctctgtacccatcttct

SEQ ID NO: 4253844 - DNA, 25 bp, Homo sapien
cacctctgtacccatcttctccaaa

SEQ ID NO: 4253845 - DNA, 25 bp, Homo sapien
ctcccagaactcccataatcacctc

SEQ ID NO: 4253846 - DNA, 25 bp, Homo sapien
tatcacatacgattttctcatctgt

SEQ ID NO: 4253847 - DNA, 25 bp, Homo sapien
gatccatatcacatacgattttctc

SEQ ID NO: 4253848 - DNA, 25 bp, Homo sapien
acagatccatatcacatacgatttt

SEQ ID NO: 4253849 - DNA, 25 bp, Homo sapien
ccatatcacatacgattttctcatc

SEQ ID NO: 4253850 - DNA, 25 bp, Homo sapien
cttccaggccaatgattaggagtcc

SEQ ID NO: 4253851 - DNA, 25 bp, Homo sapien
cctggagctcttctaatttatggac

SEQ ID NO: 4253852 - DNA, 25 bp, Homo sapien
gagggatcgcagtttgatgctcaga

SEQ ID NO: 4253853 - DNA, 25 bp, Homo sapien
gctcagaggttgcttatatgcaaac

SEQ ID NO: 4253854 - DNA, 25 bp, Homo sapien
gcatcagcctcatgagcactgagcc

SEQ ID NO: 4253855 - DNA, 25 bp, Homo sapien
aaccctcaaaagctagtcctgtctg

SEQ ID NO: 4253856 - DNA, 25 bp, Homo sapien
gtcagaagaccccggtcagtgtcag

SEQ ID NO: 4253857 - DNA, 25 bp, Homo sapien
gggcatcagcctcatgagcactgag

SEQ ID NO: 4253858 - DNA, 25 bp, Homo sapien
cagtctttttaaatcatcatccagt

SEQ ID NO: 4253859 - DNA, 25 bp, Homo sapien
cagtccatctgtaaacactaaaagg

SEQ ID NO: 4253860 - DNA, 25 bp, Homo sapien
catcatccagtccatctgtaaacac

SEQ ID NO: 4253861 - DNA, 25 bp, Homo sapien
ctgtggagaaactccgatgtttttt

SEQ ID NO: 4253862 - DNA, 25 bp, Homo sapien
atggctccatagcaagggttctcag

SEQ ID NO: 4253863 - DNA, 25 bp, Homo sapien
gatggctccatagcaagggttctca

SEQ ID NO: 4253864 - DNA, 25 bp, Homo sapien
gcctgagtcaaaggtaagctggcca

SEQ ID NO: 4253865 - DNA, 25 bp, Homo sapien
gatgaatagcattatctcccaagga

SEQ ID NO: 4253866 - DNA, 25 bp, Homo sapien
tggcagcctgatgaaccaagaactt

SEQ ID NO: 4253867 - DNA, 25 bp, Homo sapien
tcccaaggactgcaaaaagttcaca

SEQ ID NO: 4253868 - DNA, 25 bp, Homo sapien
gtaacccttgaagcttctgctgaat

SEQ ID NO: 4253869 - DNA, 25 bp, Homo sapien
gccacggctgatgttagaaagtaaa

SEQ ID NO: 4253870 - DNA, 25 bp, Homo sapien
ttgcatcagctctggcagtaaccct

SEQ ID NO: 4253871 - DNA, 25 bp, Homo sapien
ttgaaggagttgagatatcaattcc

SEQ ID NO: 4253872 - DNA, 25 bp, Homo sapien
tacatcatggtacactttgtcctca

SEQ ID NO: 4253873 - DNA, 25 bp, Homo sapien
caaaagctgcgattttttggcttct

SEQ ID NO: 4253874 - DNA, 25 bp, Homo sapien
cttgtggatcacagaccttagaaag

SEQ ID NO: 4253875 - DNA, 25 bp, Homo sapien
ctcaaaatttacatcatggtacact

SEQ ID NO: 4253876 - DNA, 25 bp, Homo sapien
aaattcagagctttcccagtgcggg

SEQ ID NO: 4253877 - DNA, 25 bp, Homo sapien
atcggtgatcacaatcaaatattgt

SEQ ID NO: 4253878 - DNA, 25 bp, Homo sapien
gattacattatcttgggccacccca

SEQ ID NO: 4253879 - DNA, 25 bp, Homo sapien
tattgttgaacactgggtctccctc

SEQ ID NO: 4253880 - DNA, 25 bp, Homo sapien
atcaaagatggccctgtaaatgtcc

SEQ ID NO: 4253881 - DNA, 25 bp, Homo sapien
tcaaagatggccctgtaaatgtcca

SEQ ID NO: 4253882 - DNA, 25 bp, Homo sapien
catcaaagatggccctgtaaatgtc

SEQ ID NO: 4253883 - DNA, 25 bp, Homo sapien
tggcgtgcgcctgcaaccgcaggca

SEQ ID NO: 4253884 - DNA, 25 bp, Homo sapien
gagaccgagagggagaggggagagg

SEQ ID NO: 4253885 - DNA, 25 bp, Homo sapien
gagaggggagaagggagagggaaga

SEQ ID NO: 4253886 - DNA, 25 bp, Homo sapien
agggagaccgagagggagaggggag

SEQ ID NO: 4253887 - DNA, 25 bp, Homo sapien
gggagatagattctgaaccatctat

SEQ ID NO: 4253888 - DNA, 25 bp, Homo sapien
cacactgggatactggctgaggata

SEQ ID NO: 4253889 - DNA, 25 bp, Homo sapien
tatcgagcaacattgattcggccgg

SEQ ID NO: 4253890 - DNA, 25 bp, Homo sapien
tgctgccagacccatcaataaggaa

SEQ ID NO: 4253891 - DNA, 25 bp, Homo sapien
ttcggccggtgtctgcaaaaacctg

SEQ ID NO: 4253892 - DNA, 25 bp, Homo sapien
taatggaaactttactgtccaccat

SEQ ID NO: 4253893 - DNA, 25 bp, Homo sapien
tttactgtccaccatctcagagcag

SEQ ID NO: 4253894 - DNA, 25 bp, Homo sapien
cttcttgtaggggatagctcgtccc

SEQ ID NO: 4253895 - DNA, 25 bp, Homo sapien
gatagctcgtcccactaatggaaac

SEQ ID NO: 4253896 - DNA, 25 bp, Homo sapien
ggaggatatgatgctatcttctcca

SEQ ID NO: 4253897 - DNA, 25 bp, Homo sapien
aaggattccagggggactgaattct

SEQ ID NO: 4253898 - DNA, 25 bp, Homo sapien
ggattccagggggactgaattcttc

SEQ ID NO: 4253899 - DNA, 25 bp, Homo sapien
aaggaggatatgatgctatcttctc

SEQ ID NO: 4253900 - DNA, 25 bp, Homo sapien
tctgagacattgtgggtgcccactg

SEQ ID NO: 4253901 - DNA, 25 bp, Homo sapien
atggtgacgcctgcccttcggaggt

SEQ ID NO: 4253902 - DNA, 25 bp, Homo sapien
tctctgagacattgtgggtgcccac

SEQ ID NO: 4253903 - DNA, 25 bp, Homo sapien
actgcatagatggtgacgcctgccc

SEQ ID NO: 4253904 - DNA, 25 bp, Homo sapien
gaccggctacccttctcctgaatga

SEQ ID NO: 4253905 - DNA, 25 bp, Homo sapien
tcaggaaatctaatgcagcaccagt

SEQ ID NO: 4253906 - DNA, 25 bp, Homo sapien
gagaagccttccgtgatgactacag

SEQ ID NO: 4253907 - DNA, 25 bp, Homo sapien
gaatgaaaacctcgttcctcaggaa

SEQ ID NO: 4253908 - DNA, 25 bp, Homo sapien
taaccctgctaaattcctcaatgag

SEQ ID NO: 4253909 - DNA, 25 bp, Homo sapien
agtcagccgggacagcagttgcgca

SEQ ID NO: 4253910 - DNA, 25 bp, Homo sapien
caagccaagtctcacagtatcagga

SEQ ID NO: 4253911 - DNA, 25 bp, Homo sapien
gaaaattcaagtcgtggttcctcac

SEQ ID NO: 4253912 - DNA, 25 bp, Homo sapien
agcctcctcgttggctgtaatcctg

SEQ ID NO: 4253913 - DNA, 25 bp, Homo sapien
tgtcaaagtcctgcacacccacaga

SEQ ID NO: 4253914 - DNA, 25 bp, Homo sapien
tctgcacatcatagacaaggtctgg

SEQ ID NO: 4253915 - DNA, 25 bp, Homo sapien
gtgttcctgctgtctagtcccttgg

SEQ ID NO: 4253916 - DNA, 25 bp, Homo sapien
tctctcttagtctctgtgcagcatc

SEQ ID NO: 4253917 - DNA, 25 bp, Homo sapien
ttctctcttagtctctgtgcagcat

SEQ ID NO: 4253918 - DNA, 25 bp, Homo sapien
ctttctctcttagtctctgtgcagc

SEQ ID NO: 4253919 - DNA, 25 bp, Homo sapien
tttctctcttagtctctgtgcagca

SEQ ID NO: 4253920 - DNA, 25 bp, Homo sapien
gaattaatgaccactgcatactggg

SEQ ID NO: 4253921 - DNA, 25 bp, Homo sapien
taatgaccactgcatactggggaat

SEQ ID NO: 4253922 - DNA, 25 bp, Homo sapien
gaccactgcatactggggaatgccc

SEQ ID NO: 4253923 - DNA, 25 bp, Homo sapien
ccactgcatactggggaatgccctg

SEQ ID NO: 4253924 - DNA, 25 bp, Homo sapien
ctgggtcttgtaggtattgagcaaa

SEQ ID NO: 4253925 - DNA, 25 bp, Homo sapien
tctgggtcttgtaggtattgagcaa

SEQ ID NO: 4253926 - DNA, 25 bp, Homo sapien
aaaatgctcatgaatgtgagctatc

SEQ ID NO: 4253927 - DNA, 25 bp, Homo sapien
catgaatgtgagctatcatctcatt

SEQ ID NO: 4253928 - DNA, 25 bp, Homo sapien
caatttggtacttgtccctgccaac

SEQ ID NO: 4253929 - DNA, 25 bp, Homo sapien
cccaatttggtacttgtccctgcca

SEQ ID NO: 4253930 - DNA, 25 bp, Homo sapien
ccaatttggtacttgtccctgccaa

SEQ ID NO: 4253931 - DNA, 25 bp, Homo sapien
agaccatgtctgcataggctttgat

SEQ ID NO: 4253932 - DNA, 25 bp, Homo sapien
aaactggcccgtgatgtgtcttgtg

SEQ ID NO: 4253933 - DNA, 25 bp, Homo sapien
ccatgtctgcataggctttgatgaa

SEQ ID NO: 4253934 - DNA, 25 bp, Homo sapien
ggaaactggcccgtgatgtgtcttg

SEQ ID NO: 4253935 - DNA, 25 bp, Homo sapien
tggctcactggttattttttgcaac

SEQ ID NO: 4253936 - DNA, 25 bp, Homo sapien
agcacagagtctgaagaatacttcc

SEQ ID NO: 4253937 - DNA, 25 bp, Homo sapien
gagtctgaagaatacttcctgaaaa

SEQ ID NO: 4253938 - DNA, 25 bp, Homo sapien
ggctcactggttattttttgcaact

SEQ ID NO: 4253939 - DNA, 25 bp, Homo sapien
catcttctttcaaccggtcagccac

SEQ ID NO: 4253940 - DNA, 25 bp, Homo sapien
aactccatcttctttcaaccggtca

SEQ ID NO: 4253941 - DNA, 25 bp, Homo sapien
tccatcttctttcaaccggtcagcc

SEQ ID NO: 4253942 - DNA, 25 bp, Homo sapien
aacaactccatcttctttcaaccgg

SEQ ID NO: 4253943 - DNA, 25 bp, Homo sapien
gttggtcctgataaactccagggcg

SEQ ID NO: 4253944 - DNA, 25 bp, Homo sapien
tatactgggcaagtcccactcggac

SEQ ID NO: 4253945 - DNA, 25 bp, Homo sapien
tgctgatgtcaagccccaagatgac

SEQ ID NO: 4253946 - DNA, 25 bp, Homo sapien
cctgtgcggtatggcagattctgga

SEQ ID NO: 4253947 - DNA, 25 bp, Homo sapien
tgtacaagaagttccgcacactgcg

SEQ ID NO: 4253948 - DNA, 25 bp, Homo sapien
caatgccttcgcaggtccatggaca

SEQ ID NO: 4253949 - DNA, 25 bp, Homo sapien
tctgacgccaatagcataaagcagg

SEQ ID NO: 4253950 - DNA, 25 bp, Homo sapien
tcaccacggcgatctgaggtacctc

SEQ ID NO: 4253951 - DNA, 25 bp, Homo sapien
tccagggatggctgactggcttgtc

SEQ ID NO: 4253952 - DNA, 25 bp, Homo sapien
ggatggctgactggcttgtcgcctt

SEQ ID NO: 4253953 - DNA, 25 bp, Homo sapien
gctgactggcttgtcgccttaacat

SEQ ID NO: 4253954 - DNA, 25 bp, Homo sapien
atggctgactggcttgtcgccttaa

SEQ ID NO: 4253955 - DNA, 25 bp, Homo sapien
gcacttcaggctactcaaataatct

SEQ ID NO: 4253956 - DNA, 25 bp, Homo sapien
ttcaggctactcaaataatcttctt

SEQ ID NO: 4253957 - DNA, 25 bp, Homo sapien
acttcaggctactcaaataatcttc

SEQ ID NO: 4253958 - DNA, 25 bp, Homo sapien
cacttcaggctactcaaataatctt

SEQ ID NO: 4253959 - DNA, 25 bp, Homo sapien
taagatggtcactaccactagatgg

SEQ ID NO: 4253960 - DNA, 25 bp, Homo sapien
tttccttttaagatggtcactacca

SEQ ID NO: 4253961 - DNA, 25 bp, Homo sapien
ttctccttcaatgaatcgattgcct

SEQ ID NO: 4253962 - DNA, 25 bp, Homo sapien
cattcactataagcttccagattct

SEQ ID NO: 4253963 - DNA, 25 bp, Homo sapien
catctctaatgtcctatgccagtga

SEQ ID NO: 4253964 - DNA, 25 bp, Homo sapien
tacccagaggacctgttaaagccca

SEQ ID NO: 4253965 - DNA, 25 bp, Homo sapien
gagctggtccgaggaaccatatttc

SEQ ID NO: 4253966 - DNA, 25 bp, Homo sapien
gtgtagtgtgaacccttagaatctg

SEQ ID NO: 4253967 - DNA, 25 bp, Homo sapien
ttaattccctatggagaaaatcaag

SEQ ID NO: 4253968 - DNA, 25 bp, Homo sapien
catttagcatgcagtggttcctgct

SEQ ID NO: 4253969 - DNA, 25 bp, Homo sapien
aaatcaagtgtctattttcaagtaa

SEQ ID NO: 4253970 - DNA, 25 bp, Homo sapien
ggttcctgctcaagcgagtgtctgc

SEQ ID NO: 4253971 - DNA, 25 bp, Homo sapien
aatcagcatacttgggatagccatc

SEQ ID NO: 4253972 - DNA, 25 bp, Homo sapien
agccatcaccttaactacttcacag

SEQ ID NO: 4253973 - DNA, 25 bp, Homo sapien
aatattataaactctggtcaccctg

SEQ ID NO: 4253974 - DNA, 25 bp, Homo sapien
ggtcaccctgtgatctatcttaaca

SEQ ID NO: 4253975 - DNA, 25 bp, Homo sapien
tggtttagaattaagttgccagaaa

SEQ ID NO: 4253976 - DNA, 25 bp, Homo sapien
ttctggtttagaattaagttgccag

SEQ ID NO: 4253977 - DNA, 25 bp, Homo sapien
ctggtttagaattaagttgccagaa

SEQ ID NO: 4253978 - DNA, 25 bp, Homo sapien
tttctggtttagaattaagttgcca

SEQ ID NO: 4253979 - DNA, 25 bp, Homo sapien
aaaccagcagttttgaggcggaata

SEQ ID NO: 4253980 - DNA, 25 bp, Homo sapien
tcttcttcgtgtttggatcaatcac

SEQ ID NO: 4253981 - DNA, 25 bp, Homo sapien
tgaggcggaatacatagcttccaag

SEQ ID NO: 4253982 - DNA, 25 bp, Homo sapien
caagcttcttcttcgtgtttggatc

SEQ ID NO: 4253983 - DNA, 25 bp, Homo sapien
ttaacccattaccatcggagcagcc

SEQ ID NO: 4253984 - DNA, 25 bp, Homo sapien
tctgattaacccattaccatcggag

SEQ ID NO: 4253985 - DNA, 25 bp, Homo sapien
tcatcagtggtggttgtataccaac

SEQ ID NO: 4253986 - DNA, 25 bp, Homo sapien
atcatcagtggtggttgtataccaa

SEQ ID NO: 4253987 - DNA, 25 bp, Homo sapien
catctttttgtcacgcccacagtga

SEQ ID NO: 4253988 - DNA, 25 bp, Homo sapien
taagcaaggacctgtgaaagatgcc

SEQ ID NO: 4253989 - DNA, 25 bp, Homo sapien
tctttccatgcttcctagttatgcc

SEQ ID NO: 4253990 - DNA, 25 bp, Homo sapien
caaaaacttggatagcttaattcac

SEQ ID NO: 4253991 - DNA, 25 bp, Homo sapien
taaggacgcaaatcttcaggacagt

SEQ ID NO: 4253992 - DNA, 25 bp, Homo sapien
tgttgcccaggtgttatgaaagaat

SEQ ID NO: 4253993 - DNA, 25 bp, Homo sapien
gaagatgctcatgcctaagaatgaa

SEQ ID NO: 4253994 - DNA, 25 bp, Homo sapien
tcacctagaggtaccgtttacatgg

SEQ ID NO: 4253995 - DNA, 25 bp, Homo sapien
gaacaacttaaaggcactgatttct

SEQ ID NO: 4253996 - DNA, 25 bp, Homo sapien
tagagctctaaaaacatgccaccag

SEQ ID NO: 4253997 - DNA, 25 bp, Homo sapien
taaagatcttgtacaggatgcaaac

SEQ ID NO: 4253998 - DNA, 25 bp, Homo sapien
gacaggttactgaccattgagtgtt

SEQ ID NO: 4253999 - DNA, 25 bp, Homo sapien
ggacaagatctagacccattgtaga

SEQ ID NO: 4254000 - DNA, 25 bp, Homo sapien
tagacccattgtagagggaggaaaa

SEQ ID NO: 4254001 - DNA, 25 bp, Homo sapien
gatctagacccattgtagagggagg

SEQ ID NO: 4254002 - DNA, 25 bp, Homo sapien
gagggagggacaagatctagaccca

SEQ ID NO: 4254003 - DNA, 25 bp, Homo sapien
gaatgcacatttgaattccctcggg

SEQ ID NO: 4254004 - DNA, 25 bp, Homo sapien
caacacttaagcttcgagactgcag

SEQ ID NO: 4254005 - DNA, 25 bp, Homo sapien
ttaaaagtctaatgccccagtgtac

SEQ ID NO: 4254006 - DNA, 25 bp, Homo sapien
taaacctcatgattggccaaccaag

SEQ ID NO: 4254007 - DNA, 25 bp, Homo sapien
gtcactattgtatgaagagatttac

SEQ ID NO: 4254008 - DNA, 25 bp, Homo sapien
caagccgtttttattacacttagtg

SEQ ID NO: 4254009 - DNA, 25 bp, Homo sapien
caaaaaagaagtcactattgtatga

SEQ ID NO: 4254010 - DNA, 25 bp, Homo sapien
tgactaaaatatacaggctgtgaca

SEQ ID NO: 4254011 - DNA, 25 bp, Homo sapien
tcttgtcaatctaataacagtggca

SEQ ID NO: 4254012 - DNA, 25 bp, Homo sapien
tcttagaataaatccccttggctgg

SEQ ID NO: 4254013 - DNA, 25 bp, Homo sapien
taaggaatactagtgcagcataacc

SEQ ID NO: 4254014 - DNA, 25 bp, Homo sapien
ggataaggcttatgctgtagaacct

SEQ ID NO: 4254015 - DNA, 25 bp, Homo sapien
aagtggagaggacatctccattttc

SEQ ID NO: 4254016 - DNA, 25 bp, Homo sapien
catttagatatcgtgggataaagtg

SEQ ID NO: 4254017 - DNA, 25 bp, Homo sapien
ctgaacaccagaggtggtgaaaatg

SEQ ID NO: 4254018 - DNA, 25 bp, Homo sapien
ggtatcccagcatacacgctttttt

SEQ ID NO: 4254019 - DNA, 25 bp, Homo sapien
tgttgatatgcacatcggccagggc

SEQ ID NO: 4254020 - DNA, 25 bp, Homo sapien
gaagaacaatctttagccctcaagg

SEQ ID NO: 4254021 - DNA, 25 bp, Homo sapien
ttgcttccacaatgccgttatacgg

SEQ ID NO: 4254022 - DNA, 25 bp, Homo sapien
cattagagcagtttagagtagacgt

SEQ ID NO: 4254023 - DNA, 25 bp, Homo sapien
ctgctactgctgaggccccggttgt

SEQ ID NO: 4254024 - DNA, 25 bp, Homo sapien
tctcttccctttgagcactgtaggg

SEQ ID NO: 4254025 - DNA, 25 bp, Homo sapien
ctgaggccccggttgttgttggctt

SEQ ID NO: 4254026 - DNA, 25 bp, Homo sapien
tgcttcatccggttctccaaggcct

SEQ ID NO: 4254027 - DNA, 25 bp, Homo sapien
ttatagaagctgagtggagccagga

SEQ ID NO: 4254028 - DNA, 25 bp, Homo sapien
ccccagaacagcacttggaaacaac

SEQ ID NO: 4254029 - DNA, 25 bp, Homo sapien
cccagaacagcacttggaaacaacc

SEQ ID NO: 4254030 - DNA, 25 bp, Homo sapien
agtggagccaggagcccccccagaa

SEQ ID NO: 4254031 - DNA, 25 bp, Homo sapien
tcagtgatcaatactgacagcacaa

SEQ ID NO: 4254032 - DNA, 25 bp, Homo sapien
gtgatcaatactgacagcacaacca

SEQ ID NO: 4254033 - DNA, 25 bp, Homo sapien
tcaatactgacagcacaaccacaga

SEQ ID NO: 4254034 - DNA, 25 bp, Homo sapien
atactgacagcacaaccacagagac

SEQ ID NO: 4254035 - DNA, 25 bp, Homo sapien
gtaatgcagcatgggggccctgaga

SEQ ID NO: 4254036 - DNA, 25 bp, Homo sapien
ctggtaatgcagcatgggggccctg

SEQ ID NO: 4254037 - DNA, 25 bp, Homo sapien
ggtaatgcagcatgggggccctgag

SEQ ID NO: 4254038 - DNA, 25 bp, Homo sapien
taatgcagcatgggggccctgagac

SEQ ID NO: 4254039 - DNA, 25 bp, Homo sapien
tcatcttcagacacaaagttgctac

SEQ ID NO: 4254040 - DNA, 25 bp, Homo sapien
tgaactaaagctggacacggactgg

SEQ ID NO: 4254041 - DNA, 25 bp, Homo sapien
tcaggcatctcagacgggcttgttg

SEQ ID NO: 4254042 - DNA, 25 bp, Homo sapien
cctcacaaccgcagggaactggtca

SEQ ID NO: 4254043 - DNA, 25 bp, Homo sapien
gatcccatggatattaagcgccctt

SEQ ID NO: 4254044 - DNA, 25 bp, Homo sapien
aatgtgacttcccaagcctgaatga

SEQ ID NO: 4254045 - DNA, 25 bp, Homo sapien
aagagtctctacctctgtgagtgcc

SEQ ID NO: 4254046 - DNA, 25 bp, Homo sapien
taagttgagagagaacaccagtcac

SEQ ID NO: 4254047 - DNA, 25 bp, Homo sapien
ttagggcaatagaagcaagagctgc

SEQ ID NO: 4254048 - DNA, 25 bp, Homo sapien
caaagcctctttggcctttagcggt

SEQ ID NO: 4254049 - DNA, 25 bp, Homo sapien
taaagaacacactcaaaggctaccc

SEQ ID NO: 4254050 - DNA, 25 bp, Homo sapien
aacatatcccaaacaaagccagctg

SEQ ID NO: 4254051 - DNA, 25 bp, Homo sapien
gcatcaggctcaggtttgctccctg

SEQ ID NO: 4254052 - DNA, 25 bp, Homo sapien
tggcagatcctccacagatgtgctg

SEQ ID NO: 4254053 - DNA, 25 bp, Homo sapien
cgccgctcgtggatctcatctgaga

SEQ ID NO: 4254054 - DNA, 25 bp, Homo sapien
ccatcttgtactcgccttttgccag

SEQ ID NO: 4254055 - DNA, 25 bp, Homo sapien
cacatagtactttgccttgagttca

SEQ ID NO: 4254056 - DNA, 25 bp, Homo sapien
ctgcacatagtactttgccttgagt

SEQ ID NO: 4254057 - DNA, 25 bp, Homo sapien
ctttgccttgagttcaaaataaggc

SEQ ID NO: 4254058 - DNA, 25 bp, Homo sapien
ctcgagctgcacatagtactttgcc

SEQ ID NO: 4254059 - DNA, 25 bp, Homo sapien
cagggaaggccctgtccagacttac

SEQ ID NO: 4254060 - DNA, 25 bp, Homo sapien
tgccgtctccttatgcaccagctcg

SEQ ID NO: 4254061 - DNA, 25 bp, Homo sapien
cagctgtcgcatgcggcccatggcg

SEQ ID NO: 4254062 - DNA, 25 bp, Homo sapien
ttatgcaccagctcgctcctggtct

SEQ ID NO: 4254063 - DNA, 25 bp, Homo sapien
gcccatggcggcattgtacctggct

SEQ ID NO: 4254064 - DNA, 25 bp, Homo sapien
taacaaaggcttcagtgcttcagat

SEQ ID NO: 4254065 - DNA, 25 bp, Homo sapien
tactgactgcccttgtaatagtcca

SEQ ID NO: 4254066 - DNA, 25 bp, Homo sapien
catctgttggtaattcattgaggca

SEQ ID NO: 4254067 - DNA, 25 bp, Homo sapien
gaactgtgtcacagatgcagtggat

SEQ ID NO: 4254068 - DNA, 25 bp, Homo sapien
ggtcctgtacagaaagagtcccctg

SEQ ID NO: 4254069 - DNA, 25 bp, Homo sapien
gagctaagctggcacgaggagacat

SEQ ID NO: 4254070 - DNA, 25 bp, Homo sapien
ggaaagctccgagcccatggcaata

SEQ ID NO: 4254071 - DNA, 25 bp, Homo sapien
tatatatacaaaacctccagggcag

SEQ ID NO: 4254072 - DNA, 25 bp, Homo sapien
caacgcggatttgactcttgaagtc

SEQ ID NO: 4254073 - DNA, 25 bp, Homo sapien
agctcagccgagagtctcaggctgc

SEQ ID NO: 4254074 - DNA, 25 bp, Homo sapien
ggaaatcctattggcattaacctgc

SEQ ID NO: 4254075 - DNA, 25 bp, Homo sapien
agtcatttgtgtgccaagctttcta

SEQ ID NO: 4254076 - DNA, 25 bp, Homo sapien
ctctggaagtcctgcgtggctttct

SEQ ID NO: 4254077 - DNA, 25 bp, Homo sapien
gcatctcctgccaggcggagtcgaa

SEQ ID NO: 4254078 - DNA, 25 bp, Homo sapien
cctctgagtggcgtgattcagcatc

SEQ ID NO: 4254079 - DNA, 25 bp, Homo sapien
tgctcggccagggagatggtctcct

SEQ ID NO: 4254080 - DNA, 25 bp, Homo sapien
tctgggcccaatggatgagataaac

SEQ ID NO: 4254081 - DNA, 25 bp, Homo sapien
gagtgagcaacaaatcagtgagcga

SEQ ID NO: 4254082 - DNA, 25 bp, Homo sapien
tgagataaacacatcagcccttggc

SEQ ID NO: 4254083 - DNA, 25 bp, Homo sapien
ggcaaaccagcccatcgtgggacag

SEQ ID NO: 4254084 - DNA, 25 bp, Homo sapien
agaaaagatgctcttttgacggcct

SEQ ID NO: 4254085 - DNA, 25 bp, Homo sapien
gaatcccttatttcttcaagcaaga

SEQ ID NO: 4254086 - DNA, 25 bp, Homo sapien
tctctgcttcagttatgaatccctt

SEQ ID NO: 4254087 - DNA, 25 bp, Homo sapien
cagcaacatttaagggtaaactctc

SEQ ID NO: 4254088 - DNA, 25 bp, Homo sapien
gaaatctttggtacaaccgataaca

SEQ ID NO: 4254089 - DNA, 25 bp, Homo sapien
gaaagatgacacctagaaatctttg

SEQ ID NO: 4254090 - DNA, 25 bp, Homo sapien
gatgacacctagaaatctttggtac

SEQ ID NO: 4254091 - DNA, 25 bp, Homo sapien
cctagaaatctttggtacaaccgat

SEQ ID NO: 4254092 - DNA, 25 bp, Homo sapien
atttgaatagggctctatgctctca

SEQ ID NO: 4254093 - DNA, 25 bp, Homo sapien
aatacattatttgaatagggctcta

SEQ ID NO: 4254094 - DNA, 25 bp, Homo sapien
ttcacatcgtaataaaggccccagg

SEQ ID NO: 4254095 - DNA, 25 bp, Homo sapien
catcgtaataaaggccccaggccct

SEQ ID NO: 4254096 - DNA, 25 bp, Homo sapien
cagctttcatgggaagagctccatg

SEQ ID NO: 4254097 - DNA, 25 bp, Homo sapien
aattttaaaaggcagcttatgggct

SEQ ID NO: 4254098 - DNA, 25 bp, Homo sapien
ttaaaaggcagcttatgggctgggc

SEQ ID NO: 4254099 - DNA, 25 bp, Homo sapien
agacactaacagctttcatgggaag

SEQ ID NO: 4254100 - DNA, 25 bp, Homo sapien
gacggagacaatgtagaccaattgt

SEQ ID NO: 4254101 - DNA, 25 bp, Homo sapien
aaattggcctgctcaaagcatcaag

SEQ ID NO: 4254102 - DNA, 25 bp, Homo sapien
gggtattctatcagccccaatccaa

SEQ ID NO: 4254103 - DNA, 25 bp, Homo sapien
tcagggagacggagacaatgtagac

SEQ ID NO: 4254104 - DNA, 25 bp, Homo sapien
cctccactgcggtgggtttccctga

SEQ ID NO: 4254105 - DNA, 25 bp, Homo sapien
tattatcatgtaagtgggaagacgc

SEQ ID NO: 4254106 - DNA, 25 bp, Homo sapien
gatctattatcatgtaagtgggaag

SEQ ID NO: 4254107 - DNA, 25 bp, Homo sapien
tcatgtaagtgggaagacgctcggc

SEQ ID NO: 4254108 - DNA, 25 bp, Homo sapien
gggatctattatcatgtaagtggga

SEQ ID NO: 4254109 - DNA, 25 bp, Homo sapien
tctcagcatgaataatttcatcaga

SEQ ID NO: 4254110 - DNA, 25 bp, Homo sapien
ttctcagcatgaataatttcatcag

SEQ ID NO: 4254111 - DNA, 25 bp, Homo sapien
ggaatgacgcagttcccaggaactg

SEQ ID NO: 4254112 - DNA, 25 bp, Homo sapien
ggcagcaggaatgacgcagttccca

SEQ ID NO: 4254113 - DNA, 25 bp, Homo sapien
gcagcaggaatgacgcagttcccag

SEQ ID NO: 4254114 - DNA, 25 bp, Homo sapien
gcaggaatgacgcagttcccaggaa

SEQ ID NO: 4254115 - DNA, 25 bp, Homo sapien
agggaagaacgtcactgagccagac

SEQ ID NO: 4254116 - DNA, 25 bp, Homo sapien
ccaaagtcccgtggcaagaactgcc

SEQ ID NO: 4254117 - DNA, 25 bp, Homo sapien
ggccacagggaagaacgtcactgag

SEQ ID NO: 4254118 - DNA, 25 bp, Homo sapien
tgagccagacctcctcacccaaagt

SEQ ID NO: 4254119 - DNA, 25 bp, Homo sapien
caggcctgagatccctcaattagcc

SEQ ID NO: 4254120 - DNA, 25 bp, Homo sapien
tgagatccctcaattagccaactcc

SEQ ID NO: 4254121 - DNA, 25 bp, Homo sapien
gatccctcaattagccaactccatt

SEQ ID NO: 4254122 - DNA, 25 bp, Homo sapien
ggcctgagatccctcaattagccaa

SEQ ID NO: 4254123 - DNA, 25 bp, Homo sapien
gacactggatattccagtggataga

SEQ ID NO: 4254124 - DNA, 25 bp, Homo sapien
tgagtgagtacctgatgctccatca

SEQ ID NO: 4254125 - DNA, 25 bp, Homo sapien
ggatattccagacactggaatagac

SEQ ID NO: 4254126 - DNA, 25 bp, Homo sapien
ttaagtaccctcaactgagacactg

SEQ ID NO: 4254127 - DNA, 25 bp, Homo sapien
ctgactcaaactagaaggaactgct

SEQ ID NO: 4254128 - DNA, 25 bp, Homo sapien
gaagtcctacttggcagcatctgga

SEQ ID NO: 4254129 - DNA, 25 bp, Homo sapien
gaagccgaaacccaagctcatgctg

SEQ ID NO: 4254130 - DNA, 25 bp, Homo sapien
caacctcatgagatagccagggctg

SEQ ID NO: 4254131 - DNA, 25 bp, Homo sapien
ttttctaccctgcttcttcctgccc

SEQ ID NO: 4254132 - DNA, 25 bp, Homo sapien
cttttctaccctgcttcttcctgcc

SEQ ID NO: 4254133 - DNA, 25 bp, Homo sapien
ttctaccctgcttcttcctgcccac

SEQ ID NO: 4254134 - DNA, 25 bp, Homo sapien
tttctaccctgcttcttcctgccca

SEQ ID NO: 4254135 - DNA, 25 bp, Homo sapien
cagagcggaacttctgacgagcatc

SEQ ID NO: 4254136 - DNA, 25 bp, Homo sapien
gccaattttcttcaccagttcatcc

SEQ ID NO: 4254137 - DNA, 25 bp, Homo sapien
ccagtagggcttggagtcttccaca

SEQ ID NO: 4254138 - DNA, 25 bp, Homo sapien
cagtttcaccgttgcttcaaccaga

SEQ ID NO: 4254139 - DNA, 25 bp, Homo sapien
gaagggatctgcaaacacctactgg

SEQ ID NO: 4254140 - DNA, 25 bp, Homo sapien
gaaacacagttgaggcttaagaagg

SEQ ID NO: 4254141 - DNA, 25 bp, Homo sapien
aaacacagttgaggcttaagaaggg

SEQ ID NO: 4254142 - DNA, 25 bp, Homo sapien
ggaaacacagttgaggcttaagaag

SEQ ID NO: 4254143 - DNA, 25 bp, Homo sapien
aggcatctgcctgacaaagccacac

SEQ ID NO: 4254144 - DNA, 25 bp, Homo sapien
caggcatctgcctgacaaagccaca

SEQ ID NO: 4254145 - DNA, 25 bp, Homo sapien
cctcaggcatctgcctgacaaagcc

SEQ ID NO: 4254146 - DNA, 25 bp, Homo sapien
tcaggcatctgcctgacaaagccac

SEQ ID NO: 4254147 - DNA, 25 bp, Homo sapien
tcccgagcctggatcccatgtccaa

SEQ ID NO: 4254148 - DNA, 25 bp, Homo sapien
ctcccgagcctggatcccatgtcca

SEQ ID NO: 4254149 - DNA, 25 bp, Homo sapien
agctcccgagcctggatcccatgtc

SEQ ID NO: 4254150 - DNA, 25 bp, Homo sapien
ccgagcctggatcccatgtccaaca

SEQ ID NO: 4254151 - DNA, 25 bp, Homo sapien
ccaggcttagggtcatccgctgcag

SEQ ID NO: 4254152 - DNA, 25 bp, Homo sapien
cccttatcagaccaggcttagggtc

SEQ ID NO: 4254153 - DNA, 25 bp, Homo sapien
cttctcccttatcagaccaggctta

SEQ ID NO: 4254154 - DNA, 25 bp, Homo sapien
ggcttagggtcatccgctgcagctt

SEQ ID NO: 4254155 - DNA, 25 bp, Homo sapien
gtgctgtccacattcacaccagtga

SEQ ID NO: 4254156 - DNA, 25 bp, Homo sapien
acaccagtgagaaaacggagggcca

SEQ ID NO: 4254157 - DNA, 25 bp, Homo sapien
gctctgcaagatgcactcgcatgca

SEQ ID NO: 4254158 - DNA, 25 bp, Homo sapien
gcatgcatgaccgcatcctcacggt

SEQ ID NO: 4254159 - DNA, 25 bp, Homo sapien
agactgtacggcacattaagaggca

SEQ ID NO: 4254160 - DNA, 25 bp, Homo sapien
catatttaacccttaacagccctgg

SEQ ID NO: 4254161 - DNA, 25 bp, Homo sapien
ggataaactatagtagccacttagc

SEQ ID NO: 4254162 - DNA, 25 bp, Homo sapien
tgtagtttagtttctgtcagctcca

SEQ ID NO: 4254163 - DNA, 25 bp, Homo sapien
gagggtacatttttctagagccagg

SEQ ID NO: 4254164 - DNA, 25 bp, Homo sapien
agctagcaacaactggtaacatctg

SEQ ID NO: 4254165 - DNA, 25 bp, Homo sapien
aacaatgtggtgatggatcttctcc

SEQ ID NO: 4254166 - DNA, 25 bp, Homo sapien
caggttttatctacaattaaggcag

SEQ ID NO: 4254167 - DNA, 25 bp, Homo sapien
agaaggacagcccatgctcttgtat

SEQ ID NO: 4254168 - DNA, 25 bp, Homo sapien
gctcttgtatacctacgatggaaat

SEQ ID NO: 4254169 - DNA, 25 bp, Homo sapien
gaaggacagcccatgctcttgtata

SEQ ID NO: 4254170 - DNA, 25 bp, Homo sapien
tatacctacgatggaaatggaggtg

SEQ ID NO: 4254171 - DNA, 25 bp, Homo sapien
ttagcgataacccttcacgcaactc

SEQ ID NO: 4254172 - DNA, 25 bp, Homo sapien
cttcacgcaactcagagcaacaggc

SEQ ID NO: 4254173 - DNA, 25 bp, Homo sapien
tgcatccagatttggtaactccagg

SEQ ID NO: 4254174 - DNA, 25 bp, Homo sapien
catccagatttggtaactccagggc

SEQ ID NO: 4254175 - DNA, 25 bp, Homo sapien
tccactgacgtttgctatttctcct

SEQ ID NO: 4254176 - DNA, 25 bp, Homo sapien
ctcactcttagggaccatgtgcttc

SEQ ID NO: 4254177 - DNA, 25 bp, Homo sapien
tacgcacgcagcagaaatcaaggct

SEQ ID NO: 4254178 - DNA, 25 bp, Homo sapien
tcttagggaccatgtgcttcttgtc

SEQ ID NO: 4254179 - DNA, 25 bp, Homo sapien
ttcaccaagaacaggaactcagctc

SEQ ID NO: 4254180 - DNA, 25 bp, Homo sapien
caagaacaggaactcagctctctgt

SEQ ID NO: 4254181 - DNA, 25 bp, Homo sapien
caccaagaacaggaactcagctctc

SEQ ID NO: 4254182 - DNA, 25 bp, Homo sapien
ccaagaacaggaactcagctctctg

SEQ ID NO: 4254183 - DNA, 25 bp, Homo sapien
tctgttgatatcatccgtggactga

SEQ ID NO: 4254184 - DNA, 25 bp, Homo sapien
ccgtctgttgatatcatccgtggac

SEQ ID NO: 4254185 - DNA, 25 bp, Homo sapien
caagttcagtctcccgtctgttgat

SEQ ID NO: 4254186 - DNA, 25 bp, Homo sapien
gtctcccgtctgttgatatcatccg

SEQ ID NO: 4254187 - DNA, 25 bp, Homo sapien
ctggatccggggatccacctcttct

SEQ ID NO: 4254188 - DNA, 25 bp, Homo sapien
tggatccggggatccacctcttctt

SEQ ID NO: 4254189 - DNA, 25 bp, Homo sapien
ggatccggggatccacctcttcttc

SEQ ID NO: 4254190 - DNA, 25 bp, Homo sapien
ggcaggcggcaggatttcggctggc

SEQ ID NO: 4254191 - DNA, 25 bp, Homo sapien
gcggcaggatttcggctggctcctc

SEQ ID NO: 4254192 - DNA, 25 bp, Homo sapien
tcctccgagcggctccgcttcagtg

SEQ ID NO: 4254193 - DNA, 25 bp, Homo sapien
aggatttcggctggctcctccgagc

SEQ ID NO: 4254194 - DNA, 25 bp, Homo sapien
gagccgcctcgccacagccgggcac

SEQ ID NO: 4254195 - DNA, 25 bp, Homo sapien
gatgcggatacctccggccgcggcg

SEQ ID NO: 4254196 - DNA, 25 bp, Homo sapien
cagccgggcacggtcggggagccgc

SEQ ID NO: 4254197 - DNA, 25 bp, Homo sapien
ccgggagacgcagctcgccgatgcg

SEQ ID NO: 4254198 - DNA, 25 bp, Homo sapien
gagccccataccgaaacacagaggt

SEQ ID NO: 4254199 - DNA, 25 bp, Homo sapien
aaacacagaggtgcggcggtcctac

SEQ ID NO: 4254200 - DNA, 25 bp, Homo sapien
tgatgcattgccgaaggctgcggcc

SEQ ID NO: 4254201 - DNA, 25 bp, Homo sapien
aatggcggaggttccgtgcactgat

SEQ ID NO: 4254202 - DNA, 25 bp, Homo sapien
gaggtggcaagtgtaacccctgttg

SEQ ID NO: 4254203 - DNA, 25 bp, Homo sapien
aacccctgttgatgggcacactctg

SEQ ID NO: 4254204 - DNA, 25 bp, Homo sapien
ggagcatggagaatgcattgagctg

SEQ ID NO: 4254205 - DNA, 25 bp, Homo sapien
aatgcattgagctgggatttaagga

SEQ ID NO: 4254206 - DNA, 25 bp, Homo sapien
gaaactgataactagcatcccctct

SEQ ID NO: 4254207 - DNA, 25 bp, Homo sapien
ctgtctggactaagaatgaatctgc

SEQ ID NO: 4254208 - DNA, 25 bp, Homo sapien
cacactctggtgtcaatatcggaag

SEQ ID NO: 4254209 - DNA, 25 bp, Homo sapien
tacgtggcactttaggtcagaggct

SEQ ID NO: 4254210 - DNA, 25 bp, Homo sapien
tatctgtagtcttacaggacctaca

SEQ ID NO: 4254211 - DNA, 25 bp, Homo sapien
cttgacccagatgaattacaggcca

SEQ ID NO: 4254212 - DNA, 25 bp, Homo sapien
gtctaaattgaattaaacttgtctc

SEQ ID NO: 4254213 - DNA, 25 bp, Homo sapien
gccacagcacctagagaatccagga

SEQ ID NO: 4254214 - DNA, 25 bp, Homo sapien
tctggcaccacatgggctgtcagct

SEQ ID NO: 4254215 - DNA, 25 bp, Homo sapien
tgtcacatccatagcaaggctttct

SEQ ID NO: 4254216 - DNA, 25 bp, Homo sapien
tcccatctggaacagtttgtcctcc

SEQ ID NO: 4254217 - DNA, 25 bp, Homo sapien
ctgcatcgctatctcctccagggca

SEQ ID NO: 4254218 - DNA, 25 bp, Homo sapien
aatcattctcatttgaagtatcttt

SEQ ID NO: 4254219 - DNA, 25 bp, Homo sapien
ggaaagatattagaggctcggcatt

SEQ ID NO: 4254220 - DNA, 25 bp, Homo sapien
gggaaagatattagaggctcggcat

SEQ ID NO: 4254221 - DNA, 25 bp, Homo sapien
aaaggtgttttctccacatcgatcc

SEQ ID NO: 4254222 - DNA, 25 bp, Homo sapien
ctgactttcagtaagtgaaaatggc

SEQ ID NO: 4254223 - DNA, 25 bp, Homo sapien
tgactttcagtaagtgaaaatggca

SEQ ID NO: 4254224 - DNA, 25 bp, Homo sapien
ggtgttttctccacatcgatccagc

SEQ ID NO: 4254225 - DNA, 25 bp, Homo sapien
acagtcaccagaagtacacagctat

SEQ ID NO: 4254226 - DNA, 25 bp, Homo sapien
tcaccagaagtacacagctatcaaa

SEQ ID NO: 4254227 - DNA, 25 bp, Homo sapien
tgtatttcaaactgtacagtcacca

SEQ ID NO: 4254228 - DNA, 25 bp, Homo sapien
aaattgtatttcaaactgtacagtc

SEQ ID NO: 4254229 - DNA, 25 bp, Homo sapien
gtgactggtctgttttggcatctcc

SEQ ID NO: 4254230 - DNA, 25 bp, Homo sapien
ttcagctttctgtgactggtctgtt

SEQ ID NO: 4254231 - DNA, 25 bp, Homo sapien
ttgcagaggcctttttaggcttggg

SEQ ID NO: 4254232 - DNA, 25 bp, Homo sapien
gcagaggcctttttaggcttgggct

SEQ ID NO: 4254233 - DNA, 25 bp, Homo sapien
acctagcggatcttctctgcggttc

SEQ ID NO: 4254234 - DNA, 25 bp, Homo sapien
ctagcggatcttctctgcggttcgt

SEQ ID NO: 4254235 - DNA, 25 bp, Homo sapien
acaacctagcggatcttctctgcgg

SEQ ID NO: 4254236 - DNA, 25 bp, Homo sapien
caacctagcggatcttctctgcggt

SEQ ID NO: 4254237 - DNA, 25 bp, Homo sapien
ctttagcatctccttcagcctttct

SEQ ID NO: 4254238 - DNA, 25 bp, Homo sapien
cttggctttatctcctttagcatct

SEQ ID NO: 4254239 - DNA, 25 bp, Homo sapien
ctccttcagcctttctcttgggcat

SEQ ID NO: 4254240 - DNA, 25 bp, Homo sapien
ttggctttatctcctttagcatctc

SEQ ID NO: 4254241 - DNA, 25 bp, Homo sapien
tggcgacggcggcgggacgtaggtg

SEQ ID NO: 4254242 - DNA, 25 bp, Homo sapien
ggtggccgcggcgatggcgacggcg

SEQ ID NO: 4254243 - DNA, 25 bp, Homo sapien
gcgatggcgacggcggcgggacgta

SEQ ID NO: 4254244 - DNA, 25 bp, Homo sapien
atggcgacggcggcgggacgtaggt

SEQ ID NO: 4254245 - DNA, 25 bp, Homo sapien
tggacgcgggacacagcggcgcacg

SEQ ID NO: 4254246 - DNA, 25 bp, Homo sapien
gacacagcggcgcacgggctttggt

SEQ ID NO: 4254247 - DNA, 25 bp, Homo sapien
cgggacacagcggcgcacgggcttt

SEQ ID NO: 4254248 - DNA, 25 bp, Homo sapien
ggacgcgggacacagcggcgcacgg

SEQ ID NO: 4254249 - DNA, 25 bp, Homo sapien
tcttcatactgctccgatatctgac

SEQ ID NO: 4254250 - DNA, 25 bp, Homo sapien
actgctccgatatctgactttttaa

SEQ ID NO: 4254251 - DNA, 25 bp, Homo sapien
catactgctccgatatctgactttt

SEQ ID NO: 4254252 - DNA, 25 bp, Homo sapien
cttcttcatactgctccgatatctg

SEQ ID NO: 4254253 - DNA, 25 bp, Homo sapien
ggcttcgatatttcccctccagatg

SEQ ID NO: 4254254 - DNA, 25 bp, Homo sapien
tggcttcgatatttcccctccagat

SEQ ID NO: 4254255 - DNA, 25 bp, Homo sapien
ttcttggcttcgatatttcccctcc

SEQ ID NO: 4254256 - DNA, 25 bp, Homo sapien
tcattcttggcttcgatatttcccc

SEQ ID NO: 4254257 - DNA, 25 bp, Homo sapien
ttattttggatttcacagacacagc

SEQ ID NO: 4254258 - DNA, 25 bp, Homo sapien
ttttggatttcacagacacagcagg

SEQ ID NO: 4254259 - DNA, 25 bp, Homo sapien
tggatttcacagacacagcaggcac

SEQ ID NO: 4254260 - DNA, 25 bp, Homo sapien
ggatttcacagacacagcaggcaca

SEQ ID NO: 4254261 - DNA, 25 bp, Homo sapien
aaaatggagttagtcacgctaggcc

SEQ ID NO: 4254262 - DNA, 25 bp, Homo sapien
tgagtcttaagccagcagggatgaa

SEQ ID NO: 4254263 - DNA, 25 bp, Homo sapien
cccatagagttttgtgaccaggctt

SEQ ID NO: 4254264 - DNA, 25 bp, Homo sapien
tctggaaaccccacgaaaatgacag

SEQ ID NO: 4254265 - DNA, 25 bp, Homo sapien
gagaaaacgagactatgcagagaga

SEQ ID NO: 4254266 - DNA, 25 bp, Homo sapien
tgttgacaactccacctcatgtgct

SEQ ID NO: 4254267 - DNA, 25 bp, Homo sapien
tattaatggacaagaagttgggtgc

SEQ ID NO: 4254268 - DNA, 25 bp, Homo sapien
gaaaaccaagggtcaccacacatct

SEQ ID NO: 4254269 - DNA, 25 bp, Homo sapien
atcgctttaggccaggagttcagga

SEQ ID NO: 4254270 - DNA, 25 bp, Homo sapien
ccagcctgggcaacatagcgagacc

SEQ ID NO: 4254271 - DNA, 25 bp, Homo sapien
gcctgggcaacatagcgagaccatc

SEQ ID NO: 4254272 - DNA, 25 bp, Homo sapien
tgggcaacatagcgagaccatctct

SEQ ID NO: 4254273 - DNA, 25 bp, Homo sapien
cagcccaggcaaagacacttcaact

SEQ ID NO: 4254274 - DNA, 25 bp, Homo sapien
gggacaattactgcccctcttagag

SEQ ID NO: 4254275 - DNA, 25 bp, Homo sapien
caagttgcacaatatgaccctcacc

SEQ ID NO: 4254276 - DNA, 25 bp, Homo sapien
tacccaaaatgctatcacaagttgc

SEQ ID NO: 4254277 - DNA, 25 bp, Homo sapien
tcagggaacagagattagcttgtaa

SEQ ID NO: 4254278 - DNA, 25 bp, Homo sapien
gagtgatcactcaatatcccagtgg

SEQ ID NO: 4254279 - DNA, 25 bp, Homo sapien
tgtgatcctcttgtaaccacccatg

SEQ ID NO: 4254280 - DNA, 25 bp, Homo sapien
tctgttgaggtacaataaacgattg

SEQ ID NO: 4254281 - DNA, 25 bp, Homo sapien
ggcttccctttgtgagtaatccgat

SEQ ID NO: 4254282 - DNA, 25 bp, Homo sapien
tgagtaatccgatctttctctctgg

SEQ ID NO: 4254283 - DNA, 25 bp, Homo sapien
tccctttgtgagtaatccgatcttt

SEQ ID NO: 4254284 - DNA, 25 bp, Homo sapien
gagtaatccgatctttctctctggc

SEQ ID NO: 4254285 - DNA, 25 bp, Homo sapien
tgctacttgatcattcctctgggag

SEQ ID NO: 4254286 - DNA, 25 bp, Homo sapien
aacagaaaatgttgctacttgatca

SEQ ID NO: 4254287 - DNA, 25 bp, Homo sapien
gaaaatgttgctacttgatcattcc

SEQ ID NO: 4254288 - DNA, 25 bp, Homo sapien
gttgctacttgatcattcctctggg

SEQ ID NO: 4254289 - DNA, 25 bp, Homo sapien
ctggcccaatgctgagaattgattt

SEQ ID NO: 4254290 - DNA, 25 bp, Homo sapien
gctggcccaatgctgagaattgatt

SEQ ID NO: 4254291 - DNA, 25 bp, Homo sapien
tggcccaatgctgagaattgatttt

SEQ ID NO: 4254292 - DNA, 25 bp, Homo sapien
ctcaaggtccaagaatcctcttggg

SEQ ID NO: 4254293 - DNA, 25 bp, Homo sapien
ctttccggtaacaattgtgccactg

SEQ ID NO: 4254294 - DNA, 25 bp, Homo sapien
tcaaggtccaagaatcctcttgggg

SEQ ID NO: 4254295 - DNA, 25 bp, Homo sapien
gatccctttccggtaacaattgtgc

SEQ ID NO: 4254296 - DNA, 25 bp, Homo sapien
ggcatatgctactgtgccctactaa

SEQ ID NO: 4254297 - DNA, 25 bp, Homo sapien
agtggctggtttattcacaggtgag

SEQ ID NO: 4254298 - DNA, 25 bp, Homo sapien
actccagccatagtgaccccagagt

SEQ ID NO: 4254299 - DNA, 25 bp, Homo sapien
agaaatgtctgctccccaatagaga

SEQ ID NO: 4254300 - DNA, 25 bp, Homo sapien
tacttgtctcttggccggatggtct

SEQ ID NO: 4254301 - DNA, 25 bp, Homo sapien
acttgctcagtgtcagaggtcggca

SEQ ID NO: 4254302 - DNA, 25 bp, Homo sapien
ttgatggaaaactgaccgaaggacc

SEQ ID NO: 4254303 - DNA, 25 bp, Homo sapien
catatcttaaagttggcagctgcct

SEQ ID NO: 4254304 - DNA, 25 bp, Homo sapien
tgataatggctcactccatcgctac

SEQ ID NO: 4254305 - DNA, 25 bp, Homo sapien
taatggctcactccatcgctacagc

SEQ ID NO: 4254306 - DNA, 25 bp, Homo sapien
tggctcactccatcgctacagcctc

SEQ ID NO: 4254307 - DNA, 25 bp, Homo sapien
ctcactccatcgctacagcctccaa

SEQ ID NO: 4254308 - DNA, 25 bp, Homo sapien
aatggcctgtctttatccagcttag

SEQ ID NO: 4254309 - DNA, 25 bp, Homo sapien
gcctgtctttatccagcttagccaa

SEQ ID NO: 4254310 - DNA, 25 bp, Homo sapien
ctgtctttatccagcttagccaata

SEQ ID NO: 4254311 - DNA, 25 bp, Homo sapien
cagcttagccaataaaatccaagaa

SEQ ID NO: 4254312 - DNA, 25 bp, Homo sapien
tcatgtactcaagacagggttctca

SEQ ID NO: 4254313 - DNA, 25 bp, Homo sapien
gatggcagaatcacaacacccagca

SEQ ID NO: 4254314 - DNA, 25 bp, Homo sapien
gaaaggcttacaggctcaactcgtg

SEQ ID NO: 4254315 - DNA, 25 bp, Homo sapien
gggacccctcctccagatgtagttg

SEQ ID NO: 4254316 - DNA, 25 bp, Homo sapien
taatgacaagaatctctttacgtgc

SEQ ID NO: 4254317 - DNA, 25 bp, Homo sapien
tgcctgggggaacacttacagtcac

SEQ ID NO: 4254318 - DNA, 25 bp, Homo sapien
tttacgtgctacagggtccttaggc

SEQ ID NO: 4254319 - DNA, 25 bp, Homo sapien
acagtcacatgagtaatgacaagaa

SEQ ID NO: 4254320 - DNA, 25 bp, Homo sapien
gcacccagacgaaagagtgatttta

SEQ ID NO: 4254321 - DNA, 25 bp, Homo sapien
tctgcgggtggtatgtttcaagacc

SEQ ID NO: 4254322 - DNA, 25 bp, Homo sapien
tggataaagcgggactactgtacat

SEQ ID NO: 4254323 - DNA, 25 bp, Homo sapien
aacaggtaattgaaattgtggtaag

SEQ ID NO: 4254324 - DNA, 25 bp, Homo sapien
ccacaggagatgggttcttaggagg

SEQ ID NO: 4254325 - DNA, 25 bp, Homo sapien
accacaggagatgggttcttaggag

SEQ ID NO: 4254326 - DNA, 25 bp, Homo sapien
acctgtgtccataaagagctgagcc

SEQ ID NO: 4254327 - DNA, 25 bp, Homo sapien
cctgtgtccataaagagctgagcca

SEQ ID NO: 4254328 - DNA, 25 bp, Homo sapien
aacctgtgtccataaagagctgagc

SEQ ID NO: 4254329 - DNA, 25 bp, Homo sapien
ctgtgtccataaagagctgagccag

SEQ ID NO: 4254330 - DNA, 25 bp, Homo sapien
tcttcctgtctagatgattaggtag

SEQ ID NO: 4254331 - DNA, 25 bp, Homo sapien
aaaatagaggttaattatcttcctg

SEQ ID NO: 4254332 - DNA, 25 bp, Homo sapien
ttaggtagactatgttcaagacacc

SEQ ID NO: 4254333 - DNA, 25 bp, Homo sapien
tttgcagctttaatagtaatcactc

SEQ ID NO: 4254334 - DNA, 25 bp, Homo sapien
gtccattaacccaagctcattaggg

SEQ ID NO: 4254335 - DNA, 25 bp, Homo sapien
tattgtgcagtagagggcttgtttc

SEQ ID NO: 4254336 - DNA, 25 bp, Homo sapien
tttcagggtctcgtgcacatgtcgc

SEQ ID NO: 4254337 - DNA, 25 bp, Homo sapien
cacaattcctagtagggaatccaca

SEQ ID NO: 4254338 - DNA, 25 bp, Homo sapien
catttaaagactggattccattcat

SEQ ID NO: 4254339 - DNA, 25 bp, Homo sapien
aaaaatatgatctggtcccatcttg

SEQ ID NO: 4254340 - DNA, 25 bp, Homo sapien
caagacacttttgcctggttttaat

SEQ ID NO: 4254341 - DNA, 25 bp, Homo sapien
taagcatggcatgatcatacagtcc

SEQ ID NO: 4254342 - DNA, 25 bp, Homo sapien
tccgtagtcacgaaacaagacactt

SEQ ID NO: 4254343 - DNA, 25 bp, Homo sapien
ctgaacatgactttggagaaccctg

SEQ ID NO: 4254344 - DNA, 25 bp, Homo sapien
gaaatgcccataatacggaaccaaa

SEQ ID NO: 4254345 - DNA, 25 bp, Homo sapien
aataaatttgtgatagttactaagg

SEQ ID NO: 4254346 - DNA, 25 bp, Homo sapien
agatagtaagaccaggcagggctcc

SEQ ID NO: 4254347 - DNA, 25 bp, Homo sapien
gctcgtccctgaagacaattcttga

SEQ ID NO: 4254348 - DNA, 25 bp, Homo sapien
caggattaaaatgttagagaccaac

SEQ ID NO: 4254349 - DNA, 25 bp, Homo sapien
gagccacctcgctcgtccctgaaga

SEQ ID NO: 4254350 - DNA, 25 bp, Homo sapien
aattcttgagtacctccaagagcac

SEQ ID NO: 4254351 - DNA, 25 bp, Homo sapien
tggatctggtagtgcgtcctgtagt

SEQ ID NO: 4254352 - DNA, 25 bp, Homo sapien
ctggatctggtagtgcgtcctgtag

SEQ ID NO: 4254353 - DNA, 25 bp, Homo sapien
ggatctggtagtgcgtcctgtagtc

SEQ ID NO: 4254354 - DNA, 25 bp, Homo sapien
gatctggtagtgcgtcctgtagtcc

SEQ ID NO: 4254355 - DNA, 25 bp, Homo sapien
taaataaataagtgttagagacaat

SEQ ID NO: 4254356 - DNA, 25 bp, Homo sapien
ataaataaataagtgttagagacaa

SEQ ID NO: 4254357 - DNA, 25 bp, Homo sapien
aataaataaataagtgttagagaca

SEQ ID NO: 4254358 - DNA, 25 bp, Homo sapien
aataaataagtgttagagacaataa

SEQ ID NO: 4254359 - DNA, 25 bp, Homo sapien
tccttgtcccagggctggcgaagct

SEQ ID NO: 4254360 - DNA, 25 bp, Homo sapien
cttgtcccagggctggcgaagctct

SEQ ID NO: 4254361 - DNA, 25 bp, Homo sapien
tccatggatcccaggtaactgcaaa

SEQ ID NO: 4254362 - DNA, 25 bp, Homo sapien
agggctggcgaagctctgaagagca

SEQ ID NO: 4254363 - DNA, 25 bp, Homo sapien
catctttagtcagatcacactggaa

SEQ ID NO: 4254364 - DNA, 25 bp, Homo sapien
gactctggcggtacatgatccagaa

SEQ ID NO: 4254365 - DNA, 25 bp, Homo sapien
tgcatcttatcaggatgaacagctg

SEQ ID NO: 4254366 - DNA, 25 bp, Homo sapien
tgttttgtaagacaaggtgcatctt

SEQ ID NO: 4254367 - DNA, 25 bp, Homo sapien
acagccagcttcaagcattgttaac

SEQ ID NO: 4254368 - DNA, 25 bp, Homo sapien
cataggcaaagatattcggatcttc

SEQ ID NO: 4254369 - DNA, 25 bp, Homo sapien
caagcattgttaacttttgatcttc

SEQ ID NO: 4254370 - DNA, 25 bp, Homo sapien
taaacagtttccaaccccacagcca

SEQ ID NO: 4254371 - DNA, 25 bp, Homo sapien
aaagatcccaatttttctgagcctc

SEQ ID NO: 4254372 - DNA, 25 bp, Homo sapien
gaggtgagaatccttgcctgcagcc

SEQ ID NO: 4254373 - DNA, 25 bp, Homo sapien
ctggtggtccagtgtctgtctttga

SEQ ID NO: 4254374 - DNA, 25 bp, Homo sapien
tctctacatgatcttagctcctcaa

SEQ ID NO: 4254375 - DNA, 25 bp, Homo sapien
aatggatcagatacatttcctgagg

SEQ ID NO: 4254376 - DNA, 25 bp, Homo sapien
gaggtgagtttcacgcctcaaacag

SEQ ID NO: 4254377 - DNA, 25 bp, Homo sapien
gaaactgacggtaacacttaacaca

SEQ ID NO: 4254378 - DNA, 25 bp, Homo sapien
gattctccatcaccaaataatatga

SEQ ID NO: 4254379 - DNA, 25 bp, Homo sapien
ctgcagggctagggccaggcgcact

SEQ ID NO: 4254380 - DNA, 25 bp, Homo sapien
tgcagggctagggccaggcgcactc

SEQ ID NO: 4254381 - DNA, 25 bp, Homo sapien
cagggctagggccaggcgcactcac

SEQ ID NO: 4254382 - DNA, 25 bp, Homo sapien
gcagggctagggccaggcgcactca

SEQ ID NO: 4254383 - DNA, 25 bp, Homo sapien
gcagaatacgggaagaaccgcgaaa

SEQ ID NO: 4254384 - DNA, 25 bp, Homo sapien
cctaaaccaattctgaggaccacga

SEQ ID NO: 4254385 - DNA, 25 bp, Homo sapien
cgaattcggattatccgggagttct

SEQ ID NO: 4254386 - DNA, 25 bp, Homo sapien
cctcggaggcagaatacgggaagaa

SEQ ID NO: 4254387 - DNA, 25 bp, Homo sapien
agaacttgcttctggacccgggtgg

SEQ ID NO: 4254388 - DNA, 25 bp, Homo sapien
cttccagagcggtggcccggaagca

SEQ ID NO: 4254389 - DNA, 25 bp, Homo sapien
tgccggctcggctctccttgtcttc

SEQ ID NO: 4254390 - DNA, 25 bp, Homo sapien
agacgccagcgccagaagctcggat

SEQ ID NO: 4254391 - DNA, 25 bp, Homo sapien
cgcgaggaacattgcctgaggctcg

SEQ ID NO: 4254392 - DNA, 25 bp, Homo sapien
atgggaccgcaaacccgctgctgga

SEQ ID NO: 4254393 - DNA, 25 bp, Homo sapien
aaacccgctgctggaccgcgaggaa

SEQ ID NO: 4254394 - DNA, 25 bp, Homo sapien
ggccatgaatgggaccgcaaacccg

SEQ ID NO: 4254395 - DNA, 25 bp, Homo sapien
gaacttctggtttccgtggtgctaa

SEQ ID NO: 4254396 - DNA, 25 bp, Homo sapien
tcaaatcagagttcgtgagcctggg

SEQ ID NO: 4254397 - DNA, 25 bp, Homo sapien
taggaattggctgacagagcatccc

SEQ ID NO: 4254398 - DNA, 25 bp, Homo sapien
tatagacgctgttgagagagtgcac

SEQ ID NO: 4254399 - DNA, 25 bp, Homo sapien
ggaattgttcatgagtttgtgtgtc

SEQ ID NO: 4254400 - DNA, 25 bp, Homo sapien
tggaattgttcatgagtttgtgtgt

SEQ ID NO: 4254401 - DNA, 25 bp, Homo sapien
attgttcatgagtttgtgtgtcatc

SEQ ID NO: 4254402 - DNA, 25 bp, Homo sapien
gaattgttcatgagtttgtgtgtca

SEQ ID NO: 4254403 - DNA, 25 bp, Homo sapien
caatgtctactgtactgtgggtcat

SEQ ID NO: 4254404 - DNA, 25 bp, Homo sapien
ccagtgaagtgcagaggatagacat

SEQ ID NO: 4254405 - DNA, 25 bp, Homo sapien
gaactctggtcggtatgagctcctt

SEQ ID NO: 4254406 - DNA, 25 bp, Homo sapien
gagaagactacccagccagtgaagt

SEQ ID NO: 4254407 - DNA, 25 bp, Homo sapien
aaagacgccaccctcaggttgatgt

SEQ ID NO: 4254408 - DNA, 25 bp, Homo sapien
tgtcacctgtgggagaccgggtcca

SEQ ID NO: 4254409 - DNA, 25 bp, Homo sapien
cctcgcagtagaggcgaagggaaca

SEQ ID NO: 4254410 - DNA, 25 bp, Homo sapien
catgtgcctgtctctaaagacgcca

SEQ ID NO: 4254411 - DNA, 25 bp, Homo sapien
cacaggctcattaaatagcttcgta

SEQ ID NO: 4254412 - DNA, 25 bp, Homo sapien
ctccagctggtaaaaattgggcaat

SEQ ID NO: 4254413 - DNA, 25 bp, Homo sapien
tcattaaatagcttcgtacaaaaac

SEQ ID NO: 4254414 - DNA, 25 bp, Homo sapien
aaacccaagggtgtccctccagctg

SEQ ID NO: 4254415 - DNA, 25 bp, Homo sapien
aaagaaatgccacgggacgctgtca

SEQ ID NO: 4254416 - DNA, 25 bp, Homo sapien
tcaggcacacaggaggacaaggcta

SEQ ID NO: 4254417 - DNA, 25 bp, Homo sapien
gctcacagacatgcacgactaataa

SEQ ID NO: 4254418 - DNA, 25 bp, Homo sapien
gccaggaacgctctgcctagagaga

SEQ ID NO: 4254419 - DNA, 25 bp, Homo sapien
gctgcccagtgtgagtgagaatgcc

SEQ ID NO: 4254420 - DNA, 25 bp, Homo sapien
gttcataggcctagagagacccgac

SEQ ID NO: 4254421 - DNA, 25 bp, Homo sapien
ggaaacactgagaagaggagcctct

SEQ ID NO: 4254422 - DNA, 25 bp, Homo sapien
gaatgcctgcacgtttcggtggtca

SEQ ID NO: 4254423 - DNA, 25 bp, Homo sapien
tgccagttctgtggggcgcagccca

SEQ ID NO: 4254424 - DNA, 25 bp, Homo sapien
aggacatggccagtttgatgacagt

SEQ ID NO: 4254425 - DNA, 25 bp, Homo sapien
tcaggtgaagtagcggcagggcgtg

SEQ ID NO: 4254426 - DNA, 25 bp, Homo sapien
atgtagcagtactgggtgcattgca

SEQ ID NO: 4254427 - DNA, 25 bp, Homo sapien
tagcggcagggcgtggagtcgatgt

SEQ ID NO: 4254428 - DNA, 25 bp, Homo sapien
cagggcgtggagtcgatgtagcagt

SEQ ID NO: 4254429 - DNA, 25 bp, Homo sapien
cctgggctctactcgatcctgtact

SEQ ID NO: 4254430 - DNA, 25 bp, Homo sapien
agggcgttaaaccttacaggcacag

SEQ ID NO: 4254431 - DNA, 25 bp, Homo sapien
gatgatcatccgagacagggcgtta

SEQ ID NO: 4254432 - DNA, 25 bp, Homo sapien
aagagccaactctctggcagaggcc

SEQ ID NO: 4254433 - DNA, 25 bp, Homo sapien
aagtcagagccgtcacagtcctcca

SEQ ID NO: 4254434 - DNA, 25 bp, Homo sapien
atgccggtgaccatctccacagtag

SEQ ID NO: 4254435 - DNA, 25 bp, Homo sapien
tcgcatgtcaggtagccaaagtcag

SEQ ID NO: 4254436 - DNA, 25 bp, Homo sapien
ggagataggtctcgcatgtcaggta

SEQ ID NO: 4254437 - DNA, 25 bp, Homo sapien
gtcgtcacccacatcgctgttaccg

SEQ ID NO: 4254438 - DNA, 25 bp, Homo sapien
gctggtctgcagtgtaatccacagg

SEQ ID NO: 4254439 - DNA, 25 bp, Homo sapien
tcgctgttaccgtcgtcacactcct

SEQ ID NO: 4254440 - DNA, 25 bp, Homo sapien
ggagcccatccccacaggtgccgtg

SEQ ID NO: 4254441 - DNA, 25 bp, Homo sapien
aaggcaatggcgttttgggtgttca

SEQ ID NO: 4254442 - DNA, 25 bp, Homo sapien
ccttgaagtacagagatctctggtc

SEQ ID NO: 4254443 - DNA, 25 bp, Homo sapien
cttgaagtacagagatctctggtct

SEQ ID NO: 4254444 - DNA, 25 bp, Homo sapien
gtctctgcggaaggcaatggcgttt

SEQ ID NO: 4254445 - DNA, 25 bp, Homo sapien
tcaagctcctcctggttgttgacca

SEQ ID NO: 4254446 - DNA, 25 bp, Homo sapien
caagctcctcctggttgttgaccac

SEQ ID NO: 4254447 - DNA, 25 bp, Homo sapien
agctcctcctggttgttgaccacaa

SEQ ID NO: 4254448 - DNA, 25 bp, Homo sapien
tcctcctggttgttgaccacaaaaa

SEQ ID NO: 4254449 - DNA, 25 bp, Homo sapien
gggaactgggcccatacacagattc

SEQ ID NO: 4254450 - DNA, 25 bp, Homo sapien
tcatagtgggtccacaaagacatct

SEQ ID NO: 4254451 - DNA, 25 bp, Homo sapien
gacatcttcctggaggcccgggaaa

SEQ ID NO: 4254452 - DNA, 25 bp, Homo sapien
ccgtaggaagggttattcacattca

SEQ ID NO: 4254453 - DNA, 25 bp, Homo sapien
ctaggaagcaacagactgctgtgtt

SEQ ID NO: 4254454 - DNA, 25 bp, Homo sapien
taggaagcaacagactgctgtgtta

SEQ ID NO: 4254455 - DNA, 25 bp, Homo sapien
gagaagaccaaacaaccagggagat

SEQ ID NO: 4254456 - DNA, 25 bp, Homo sapien
gatgtgagcgacctttgcaacagaa

SEQ ID NO: 4254457 - DNA, 25 bp, Homo sapien
ggttaaagtccacagcatttcaggg

SEQ ID NO: 4254458 - DNA, 25 bp, Homo sapien
ccagggagatgtgagcgacctttgc

SEQ ID NO: 4254459 - DNA, 25 bp, Homo sapien
aaagagatgcttttgatccaagaca

SEQ ID NO: 4254460 - DNA, 25 bp, Homo sapien
gagatgcttttgatccaagacatgg

SEQ ID NO: 4254461 - DNA, 25 bp, Homo sapien
ctgagggagaggttcaaagagatgc

SEQ ID NO: 4254462 - DNA, 25 bp, Homo sapien
gcttttgatccaagacatggaggag

SEQ ID NO: 4254463 - DNA, 25 bp, Homo sapien
gatatgatcagaaagtgtactccct

SEQ ID NO: 4254464 - DNA, 25 bp, Homo sapien
gaagaagtgaggacatgtcttgaaa

SEQ ID NO: 4254465 - DNA, 25 bp, Homo sapien
gatcagaaagtgtactccctagcaa

SEQ ID NO: 4254466 - DNA, 25 bp, Homo sapien
ggacatgtcttgaaaagatatgatc

SEQ ID NO: 4254467 - DNA, 25 bp, Homo sapien
cattaagatcccagtccgctaagga

SEQ ID NO: 4254468 - DNA, 25 bp, Homo sapien
ataacagagaggcaatgaccagggc

SEQ ID NO: 4254469 - DNA, 25 bp, Homo sapien
tccagctccacagacggcaaggtgt

SEQ ID NO: 4254470 - DNA, 25 bp, Homo sapien
gaggacaggattgcaatacaccgaa

SEQ ID NO: 4254471 - DNA, 25 bp, Homo sapien
aggcttgcctggtgggcccataact

SEQ ID NO: 4254472 - DNA, 25 bp, Homo sapien
ggcttgcctggtgggcccataactc

SEQ ID NO: 4254473 - DNA, 25 bp, Homo sapien
cttgcctggtgggcccataactcca

SEQ ID NO: 4254474 - DNA, 25 bp, Homo sapien
caggcttgcctggtgggcccataac

SEQ ID NO: 4254475 - DNA, 25 bp, Homo sapien
catacactccctatgggctggaatc

SEQ ID NO: 4254476 - DNA, 25 bp, Homo sapien
ggcatttatcccagatcatagcata

SEQ ID NO: 4254477 - DNA, 25 bp, Homo sapien
tcctggatggagtcagttcacccca

SEQ ID NO: 4254478 - DNA, 25 bp, Homo sapien
aacacaatggtaggcagctttgctg

SEQ ID NO: 4254479 - DNA, 25 bp, Homo sapien
cctttccagccacaacggtgacagg

SEQ ID NO: 4254480 - DNA, 25 bp, Homo sapien
aacggtgacaggtgaccggctgcct

SEQ ID NO: 4254481 - DNA, 25 bp, Homo sapien
cttggtaatgtgcaaggagttcttg

SEQ ID NO: 4254482 - DNA, 25 bp, Homo sapien
gggccgtcttggtaatgtgcaagga

SEQ ID NO: 4254483 - DNA, 25 bp, Homo sapien
cctgctatcccaggttcaccttttg

SEQ ID NO: 4254484 - DNA, 25 bp, Homo sapien
tttcctggtcttcctgtgggtcctc

SEQ ID NO: 4254485 - DNA, 25 bp, Homo sapien
gtcttcctgtgggtcctcggtgtcc

SEQ ID NO: 4254486 - DNA, 25 bp, Homo sapien
cggtgtcctgctatcccaggttcac

SEQ ID NO: 4254487 - DNA, 25 bp, Homo sapien
agtttctgacagcttaaggtagtga

SEQ ID NO: 4254488 - DNA, 25 bp, Homo sapien
ccaaaatgatgttagcttaggagct

SEQ ID NO: 4254489 - DNA, 25 bp, Homo sapien
tgacgttcactgttgccctgaatga

SEQ ID NO: 4254490 - DNA, 25 bp, Homo sapien
tacattagcttgaagcagtcaggaa

SEQ ID NO: 4254491 - DNA, 25 bp, Homo sapien
ctgccccaacattccaggaaatcct

SEQ ID NO: 4254492 - DNA, 25 bp, Homo sapien
ggtcacccttttcacctctggatcc

SEQ ID NO: 4254493 - DNA, 25 bp, Homo sapien
acccaggtcacccttttcacctctg

SEQ ID NO: 4254494 - DNA, 25 bp, Homo sapien
ccaggtcacccttttcacctctgga

SEQ ID NO: 4254495 - DNA, 25 bp, Homo sapien
caggtcacccttttcacctctggat

SEQ ID NO: 4254496 - DNA, 25 bp, Homo sapien
ttttcccctctggatccagggtagc

SEQ ID NO: 4254497 - DNA, 25 bp, Homo sapien
tttcccctctggatccagggtagcc

SEQ ID NO: 4254498 - DNA, 25 bp, Homo sapien
cttttcccctctggatccagggtag

SEQ ID NO: 4254499 - DNA, 25 bp, Homo sapien
agcccattggtcctcttgaccctgg

SEQ ID NO: 4254500 - DNA, 25 bp, Homo sapien
gagcccattggtcctcttgaccctg

SEQ ID NO: 4254501 - DNA, 25 bp, Homo sapien
ttggtcctcttgaccctggcaagcc

SEQ ID NO: 4254502 - DNA, 25 bp, Homo sapien
ccattggtcctcttgaccctggcaa

SEQ ID NO: 4254503 - DNA, 25 bp, Homo sapien
tcatacccaggtcacctttttcacc

SEQ ID NO: 4254504 - DNA, 25 bp, Homo sapien
tggccaaccgatgggcccaggcatg

SEQ ID NO: 4254505 - DNA, 25 bp, Homo sapien
ccgatgggcccaggcatgccaggaa

SEQ ID NO: 4254506 - DNA, 25 bp, Homo sapien
ccttcagggcctggccaaccgatgg

SEQ ID NO: 4254507 - DNA, 25 bp, Homo sapien
agggcctggccaaccgatgggccca

SEQ ID NO: 4254508 - DNA, 25 bp, Homo sapien
cttcaaagaccaagaacaaaagtca

SEQ ID NO: 4254509 - DNA, 25 bp, Homo sapien
tcaaagaccaagaacaaaagtcagg

SEQ ID NO: 4254510 - DNA, 25 bp, Homo sapien
caaagaccaagaacaaaagtcaggg

SEQ ID NO: 4254511 - DNA, 25 bp, Homo sapien
aagaccaagaacaaaagtcagggca

SEQ ID NO: 4254512 - DNA, 25 bp, Homo sapien
tggagctatgaagggtttctctgat

SEQ ID NO: 4254513 - DNA, 25 bp, Homo sapien
aagggtttctctgatgggtagcaga

SEQ ID NO: 4254514 - DNA, 25 bp, Homo sapien
ctatgaagggtttctctgatgggta

SEQ ID NO: 4254515 - DNA, 25 bp, Homo sapien
aatgtcactggttggagctatgaag

SEQ ID NO: 4254516 - DNA, 25 bp, Homo sapien
cttccttcctggtcggccaagctcc

SEQ ID NO: 4254517 - DNA, 25 bp, Homo sapien
cctttggtcctgtcttgccaggaag

SEQ ID NO: 4254518 - DNA, 25 bp, Homo sapien
ccctttggtcctgtcttgccaggaa

SEQ ID NO: 4254519 - DNA, 25 bp, Homo sapien
tccctttggtcctgtcttgccagga

SEQ ID NO: 4254520 - DNA, 25 bp, Homo sapien
ctttggtcctgtcttgccaggaagc

SEQ ID NO: 4254521 - DNA, 25 bp, Homo sapien
attgcaagccgtgctttttttttgt

SEQ ID NO: 4254522 - DNA, 25 bp, Homo sapien
aggggtgggctgcttggtagcaata

SEQ ID NO: 4254523 - DNA, 25 bp, Homo sapien
tctctggagggtactcttgtttgtc

SEQ ID NO: 4254524 - DNA, 25 bp, Homo sapien
ctctggagggtactcttgtttgtct

SEQ ID NO: 4254525 - DNA, 25 bp, Homo sapien
ggtctctggagggtactcttgtttg

SEQ ID NO: 4254526 - DNA, 25 bp, Homo sapien
ccactttcctgtgctgaacgcaggc

SEQ ID NO: 4254527 - DNA, 25 bp, Homo sapien
tttcctgtgctgaacgcaggcacct

SEQ ID NO: 4254528 - DNA, 25 bp, Homo sapien
actttcctgtgctgaacgcaggcac

SEQ ID NO: 4254529 - DNA, 25 bp, Homo sapien
tcctgtgctgaacgcaggcacctct

SEQ ID NO: 4254530 - DNA, 25 bp, Homo sapien
ggggagcctagcgagccttgcatgc

SEQ ID NO: 4254531 - DNA, 25 bp, Homo sapien
gcatgcacggggactgcgaggtctc

SEQ ID NO: 4254532 - DNA, 25 bp, Homo sapien
ggagcctagcgagccttgcatgcac

SEQ ID NO: 4254533 - DNA, 25 bp, Homo sapien
gcctagcgagccttgcatgcacggg

SEQ ID NO: 4254534 - DNA, 25 bp, Homo sapien
gaagatgacaccttgggctaccagt

SEQ ID NO: 4254535 - DNA, 25 bp, Homo sapien
gacgaacctggcttgtatggattac

SEQ ID NO: 4254536 - DNA, 25 bp, Homo sapien
tcatctgctcttgagacgaacctgg

SEQ ID NO: 4254537 - DNA, 25 bp, Homo sapien
gggatcaggtctctaagcctggcag

SEQ ID NO: 4254538 - DNA, 25 bp, Homo sapien
tggaggaggcgtcagcaggcagcat

SEQ ID NO: 4254539 - DNA, 25 bp, Homo sapien
gtggaggaggcgtcagcaggcagca

SEQ ID NO: 4254540 - DNA, 25 bp, Homo sapien
gctttgtggccaccacgcttcttct

SEQ ID NO: 4254541 - DNA, 25 bp, Homo sapien
cttcttctgatccaggctgggaagg

SEQ ID NO: 4254542 - DNA, 25 bp, Homo sapien
tggccaccacgcttcttctgatcca

SEQ ID NO: 4254543 - DNA, 25 bp, Homo sapien
accacgcttcttctgatccaggctg

SEQ ID NO: 4254544 - DNA, 25 bp, Homo sapien
tgacggctgacccagtcttgcctca

SEQ ID NO: 4254545 - DNA, 25 bp, Homo sapien
ctttctgtgcatctgatccattcca

SEQ ID NO: 4254546 - DNA, 25 bp, Homo sapien
tgtgcatctgatccattccatcctc

SEQ ID NO: 4254547 - DNA, 25 bp, Homo sapien
cgtcttcacgcccatctctccatga

SEQ ID NO: 4254548 - DNA, 25 bp, Homo sapien
agcctgccgagtaacagagcagtcc

SEQ ID NO: 4254549 - DNA, 25 bp, Homo sapien
cctgccgagtaacagagcagtcctg

SEQ ID NO: 4254550 - DNA, 25 bp, Homo sapien
atgatgagcagatgagcgaggctga

SEQ ID NO: 4254551 - DNA, 25 bp, Homo sapien
agagcagtcctgaaatgatgagcag

SEQ ID NO: 4254552 - DNA, 25 bp, Homo sapien
gaacactagccggagacaggctgag

SEQ ID NO: 4254553 - DNA, 25 bp, Homo sapien
agtagcaatgggtaggcagccctgc

SEQ ID NO: 4254554 - DNA, 25 bp, Homo sapien
gattcgtcacgcctctgagtgctcc

SEQ ID NO: 4254555 - DNA, 25 bp, Homo sapien
aagcggactggccagggaacactag

SEQ ID NO: 4254556 - DNA, 25 bp, Homo sapien
aagtgttgctgacaaagctaaacgt

SEQ ID NO: 4254557 - DNA, 25 bp, Homo sapien
agtgttgctgacaaagctaaacgta

SEQ ID NO: 4254558 - DNA, 25 bp, Homo sapien
gtgttgctgacaaagctaaacgtaa

SEQ ID NO: 4254559 - DNA, 25 bp, Homo sapien
aaacttggtgtggatatcccatcat

SEQ ID NO: 4254560 - DNA, 25 bp, Homo sapien
agcaatggggcaccccgctcctgga

SEQ ID NO: 4254561 - DNA, 25 bp, Homo sapien
gtggatatcccatcatcatagtgca

SEQ ID NO: 4254562 - DNA, 25 bp, Homo sapien
gacactgtggtgatgccaaacttgg

SEQ ID NO: 4254563 - DNA, 25 bp, Homo sapien
gaactcctaaggactgcgctgcaag

SEQ ID NO: 4254564 - DNA, 25 bp, Homo sapien
aactcctaaggactgcgctgcaagt

SEQ ID NO: 4254565 - DNA, 25 bp, Homo sapien
ctcctaaggactgcgctgcaagtct

SEQ ID NO: 4254566 - DNA, 25 bp, Homo sapien
ctgaactcctaaggactgcgctgca

SEQ ID NO: 4254567 - DNA, 25 bp, Homo sapien
ggagcctccctaattcctggacact

SEQ ID NO: 4254568 - DNA, 25 bp, Homo sapien
tccatgaggtccaccccagtaagga

SEQ ID NO: 4254569 - DNA, 25 bp, Homo sapien
cagtaaggacggtctcagaagccaa

SEQ ID NO: 4254570 - DNA, 25 bp, Homo sapien
acagagaatctggaaaccttttggg

SEQ ID NO: 4254571 - DNA, 25 bp, Homo sapien
ctcatacgggggacaagtccaaaca

SEQ ID NO: 4254572 - DNA, 25 bp, Homo sapien
cgacagtcccctcatacgggggaca

SEQ ID NO: 4254573 - DNA, 25 bp, Homo sapien
atacgggggacaagtccaaacactg

SEQ ID NO: 4254574 - DNA, 25 bp, Homo sapien
gacagtcccctcatacgggggacaa

SEQ ID NO: 4254575 - DNA, 25 bp, Homo sapien
cacgcgccccatgcctgtgtttatg

SEQ ID NO: 4254576 - DNA, 25 bp, Homo sapien
ccatgagagataagtgcgggcttga

SEQ ID NO: 4254577 - DNA, 25 bp, Homo sapien
cagcccgcagctggttgatggtgca

SEQ ID NO: 4254578 - DNA, 25 bp, Homo sapien
tgtgtttatgctggttgccatgaga

SEQ ID NO: 4254579 - DNA, 25 bp, Homo sapien
caggtaatgaacctctgatccagat

SEQ ID NO: 4254580 - DNA, 25 bp, Homo sapien
ggaggttgccaggtaatgaacctct

SEQ ID NO: 4254581 - DNA, 25 bp, Homo sapien
tagcgatggcatttctatcatcagt

SEQ ID NO: 4254582 - DNA, 25 bp, Homo sapien
tcaaatattatgtgctttagcgatg

SEQ ID NO: 4254583 - DNA, 25 bp, Homo sapien
ttcccaaagtcattggattcaggac

SEQ ID NO: 4254584 - DNA, 25 bp, Homo sapien
aagtcattggattcaggacaaccat

SEQ ID NO: 4254585 - DNA, 25 bp, Homo sapien
ctgagacacgatagagaggaagaaa

SEQ ID NO: 4254586 - DNA, 25 bp, Homo sapien
aagaaaagctgaagataaattccca

SEQ ID NO: 4254587 - DNA, 25 bp, Homo sapien
ttcctcactgctgtttgcgtgcgcg

SEQ ID NO: 4254588 - DNA, 25 bp, Homo sapien
cagggtctggcgagggtcaagttag

SEQ ID NO: 4254589 - DNA, 25 bp, Homo sapien
gggtcaagttagaaaggaggctgct

SEQ ID NO: 4254590 - DNA, 25 bp, Homo sapien
tcactgctgtttgcgtgcgcgtgtg

SEQ ID NO: 4254591 - DNA, 25 bp, Homo sapien
ttatgtgccaccatctacctccttg

SEQ ID NO: 4254592 - DNA, 25 bp, Homo sapien
gagaaggcagccaagtctcagatgt

SEQ ID NO: 4254593 - DNA, 25 bp, Homo sapien
ggcagaaacaactctcctgattcaa

SEQ ID NO: 4254594 - DNA, 25 bp, Homo sapien
tcaagggcagagagattcctaattg

SEQ ID NO: 4254595 - DNA, 25 bp, Homo sapien
gtccaagaatcattcaactctgagg

SEQ ID NO: 4254596 - DNA, 25 bp, Homo sapien
tcttggtagggagacaggacataag

SEQ ID NO: 4254597 - DNA, 25 bp, Homo sapien
tgaggatgcaaaaccacattcttgg

SEQ ID NO: 4254598 - DNA, 25 bp, Homo sapien
tcagaaaggttgtgagtccaagaat

SEQ ID NO: 4254599 - DNA, 25 bp, Homo sapien
caaggttaaactagagaagacagaa

SEQ ID NO: 4254600 - DNA, 25 bp, Homo sapien
catggattatgtggcaatctgtttc

SEQ ID NO: 4254601 - DNA, 25 bp, Homo sapien
tttccacccagttatcatggattat

SEQ ID NO: 4254602 - DNA, 25 bp, Homo sapien
caagagtgtcctcaggaagtagatg

SEQ ID NO: 4254603 - DNA, 25 bp, Homo sapien
ttagtaactggctccataaatagcc

SEQ ID NO: 4254604 - DNA, 25 bp, Homo sapien
aaccctatttgttccagttgagtca

SEQ ID NO: 4254605 - DNA, 25 bp, Homo sapien
tctgctctatttcagtcagtctggg

SEQ ID NO: 4254606 - DNA, 25 bp, Homo sapien
caaattgtcaaagaaagctgaatgg

SEQ ID NO: 4254607 - DNA, 25 bp, Homo sapien
tgacttaatggcaggatgaagatat

SEQ ID NO: 4254608 - DNA, 25 bp, Homo sapien
tgttgagttccgtgttgccacgact

SEQ ID NO: 4254609 - DNA, 25 bp, Homo sapien
tcaaagatcccaataccaaagtctt

SEQ ID NO: 4254610 - DNA, 25 bp, Homo sapien
tgtatggaaaccagaggtgtatgag

SEQ ID NO: 4254611 - DNA, 25 bp, Homo sapien
tgaggaggagattcagatgcacacc

SEQ ID NO: 4254612 - DNA, 25 bp, Homo sapien
taagtggtcactgttcagcgccctg

SEQ ID NO: 4254613 - DNA, 25 bp, Homo sapien
catgcacactgccacgttattgttg

SEQ ID NO: 4254614 - DNA, 25 bp, Homo sapien
ttgcttaggtgctagatgtctcccc

SEQ ID NO: 4254615 - DNA, 25 bp, Homo sapien
tatgcgaccctgaaaaagccactta

SEQ ID NO: 4254616 - DNA, 25 bp, Homo sapien
ccttgggtcatctcagggagtggat

SEQ ID NO: 4254617 - DNA, 25 bp, Homo sapien
gaagagaccattgcctgactttcca

SEQ ID NO: 4254618 - DNA, 25 bp, Homo sapien
tatgtgtatgaaccctcctaagagt

SEQ ID NO: 4254619 - DNA, 25 bp, Homo sapien
ggtctggactatgacggaaatgcca

SEQ ID NO: 4254620 - DNA, 25 bp, Homo sapien
gaccataaattcacgtaagtcacca

SEQ ID NO: 4254621 - DNA, 25 bp, Homo sapien
gatgccatattccacagaccataaa

SEQ ID NO: 4254622 - DNA, 25 bp, Homo sapien
taaaggtttcaacatcaggtctgga

SEQ ID NO: 4254623 - DNA, 25 bp, Homo sapien
gacagctcaagcaggataagccgaa

SEQ ID NO: 4254624 - DNA, 25 bp, Homo sapien
gatggcaggatggtaataaggcccc

SEQ ID NO: 4254625 - DNA, 25 bp, Homo sapien
tcctccagaggatccggctttagct

SEQ ID NO: 4254626 - DNA, 25 bp, Homo sapien
gaaaattagatcgtccccagagaag

SEQ ID NO: 4254627 - DNA, 25 bp, Homo sapien
cagaggcataaagacggaacgaagg

SEQ ID NO: 4254628 - DNA, 25 bp, Homo sapien
gaggttgtataacccaaagcagagc

SEQ ID NO: 4254629 - DNA, 25 bp, Homo sapien
tagagttaggcattctggaacccac

SEQ ID NO: 4254630 - DNA, 25 bp, Homo sapien
tttcaaggagctatttggtgccagg

SEQ ID NO: 4254631 - DNA, 25 bp, Homo sapien
tcaacactttccgacataccatctg

SEQ ID NO: 4254632 - DNA, 25 bp, Homo sapien
actcaacactttccgacataccatc

SEQ ID NO: 4254633 - DNA, 25 bp, Homo sapien
caacactttccgacataccatctgt

SEQ ID NO: 4254634 - DNA, 25 bp, Homo sapien
cactcaacactttccgacataccat

SEQ ID NO: 4254635 - DNA, 25 bp, Homo sapien
gatgcagatggacttgggtcagatc

SEQ ID NO: 4254636 - DNA, 25 bp, Homo sapien
gagatgcagatggacttgggtcaga

SEQ ID NO: 4254637 - DNA, 25 bp, Homo sapien
agatgcagatggacttgggtcagat

SEQ ID NO: 4254638 - DNA, 25 bp, Homo sapien
cctagtgctttagttagtttggtga

SEQ ID NO: 4254639 - DNA, 25 bp, Homo sapien
gagttccttttgaattcggtctgaa

SEQ ID NO: 4254640 - DNA, 25 bp, Homo sapien
aacatccttcggcatgtcaactgca

SEQ ID NO: 4254641 - DNA, 25 bp, Homo sapien
gttcatcagtgcatgcacattgaag

SEQ ID NO: 4254642 - DNA, 25 bp, Homo sapien
gcttacttaatacccaggcatcagg

SEQ ID NO: 4254643 - DNA, 25 bp, Homo sapien
attttagggcctcacgatcaccagc

SEQ ID NO: 4254644 - DNA, 25 bp, Homo sapien
cagggtggacctctgatccttggta

SEQ ID NO: 4254645 - DNA, 25 bp, Homo sapien
tgggaatttagctcaccgtgaacac

SEQ ID NO: 4254646 - DNA, 25 bp, Homo sapien
tcatcaaacatttcatgagggatcc

SEQ ID NO: 4254647 - DNA, 25 bp, Homo sapien
taacaaccagctctagtggtaacta

SEQ ID NO: 4254648 - DNA, 25 bp, Homo sapien
tagagggagagctcattaccctgag

SEQ ID NO: 4254649 - DNA, 25 bp, Homo sapien
ccctgcggggtgctagattcccttt

SEQ ID NO: 4254650 - DNA, 25 bp, Homo sapien
taacagtagagtaattttgctgtgg

SEQ ID NO: 4254651 - DNA, 25 bp, Homo sapien
acagtagagtaattttgctgtggaa

SEQ ID NO: 4254652 - DNA, 25 bp, Homo sapien
attttaacagtagagtaattttgct

SEQ ID NO: 4254653 - DNA, 25 bp, Homo sapien
ttttaacagtagagtaattttgctg

SEQ ID NO: 4254654 - DNA, 25 bp, Homo sapien
tagagcgggtcagccaatgaaaatc

SEQ ID NO: 4254655 - DNA, 25 bp, Homo sapien
tattagagcgggtcagccaatgaaa

SEQ ID NO: 4254656 - DNA, 25 bp, Homo sapien
atattagagcgggtcagccaatgaa

SEQ ID NO: 4254657 - DNA, 25 bp, Homo sapien
ttacatattagagcgggtcagccaa

SEQ ID NO: 4254658 - DNA, 25 bp, Homo sapien
gacatgagtaggaagaactgtgcac

SEQ ID NO: 4254659 - DNA, 25 bp, Homo sapien
ttgtaaaagaggaagacgagaactc

SEQ ID NO: 4254660 - DNA, 25 bp, Homo sapien
tcaatgataaatggcagacggacag

SEQ ID NO: 4254661 - DNA, 25 bp, Homo sapien
caggcacagatataggcattcccat

SEQ ID NO: 4254662 - DNA, 25 bp, Homo sapien
taggtttcttgagtatctcctctct

SEQ ID NO: 4254663 - DNA, 25 bp, Homo sapien
ctaggtttcttgagtatctcctctc

SEQ ID NO: 4254664 - DNA, 25 bp, Homo sapien
atcactaggtttcttgagtatctcc

SEQ ID NO: 4254665 - DNA, 25 bp, Homo sapien
cactaggtttcttgagtatctcctc

SEQ ID NO: 4254666 - DNA, 25 bp, Homo sapien
ccttgtattacagttgcatctccct

SEQ ID NO: 4254667 - DNA, 25 bp, Homo sapien
ccgtttaagaatcacctcctctgag

SEQ ID NO: 4254668 - DNA, 25 bp, Homo sapien
tcccctttgccgagttagtctctgc

SEQ ID NO: 4254669 - DNA, 25 bp, Homo sapien
tcctcttgctacagagcctgttgca

SEQ ID NO: 4254670 - DNA, 25 bp, Homo sapien
tgtggtacgtttgctcagaactgga

SEQ ID NO: 4254671 - DNA, 25 bp, Homo sapien
ggtttggctcaccatgctattcgta

SEQ ID NO: 4254672 - DNA, 25 bp, Homo sapien
tccatgaagtcgtgaggaccgagcc

SEQ ID NO: 4254673 - DNA, 25 bp, Homo sapien
tgtgaggttaccagactgtccctct

SEQ ID NO: 4254674 - DNA, 25 bp, Homo sapien
ctgggccttccgtgtggcttgtggc

SEQ ID NO: 4254675 - DNA, 25 bp, Homo sapien
ggctcaatcatgatgttgataagag

SEQ ID NO: 4254676 - DNA, 25 bp, Homo sapien
cagtcatgacttgctcataatgtga

SEQ ID NO: 4254677 - DNA, 25 bp, Homo sapien
acaaaataccctttgcctccaaatg

SEQ ID NO: 4254678 - DNA, 25 bp, Homo sapien
tccattgttattcactaccaacagt

SEQ ID NO: 4254679 - DNA, 25 bp, Homo sapien
caacagtatgattggcaagttgtac

SEQ ID NO: 4254680 - DNA, 25 bp, Homo sapien
ccattgttattcactaccaacagta

SEQ ID NO: 4254681 - DNA, 25 bp, Homo sapien
tttctttccaagtatctgtatcaaa

SEQ ID NO: 4254682 - DNA, 25 bp, Homo sapien
ggtgactgggtcttgtgtgtcattt

SEQ ID NO: 4254683 - DNA, 25 bp, Homo sapien
gggcacctggtgaacgcttcataag

SEQ ID NO: 4254684 - DNA, 25 bp, Homo sapien
gcacctggtgaacgcttcataagta

SEQ ID NO: 4254685 - DNA, 25 bp, Homo sapien
ctggtgaacgcttcataagtatttg

SEQ ID NO: 4254686 - DNA, 25 bp, Homo sapien
actcccattgttccgaaagtaccag

SEQ ID NO: 4254687 - DNA, 25 bp, Homo sapien
ctatctttagccaccacggcagctg

SEQ ID NO: 4254688 - DNA, 25 bp, Homo sapien
tgttccgaaagtaccagcatcaagc

SEQ ID NO: 4254689 - DNA, 25 bp, Homo sapien
ttgcccagggcttctatctttagcc

SEQ ID NO: 4254690 - DNA, 25 bp, Homo sapien
catgtattaattctcaaacgtcttc

SEQ ID NO: 4254691 - DNA, 25 bp, Homo sapien
ggcacaaaccttctagtcatattta

SEQ ID NO: 4254692 - DNA, 25 bp, Homo sapien
tctacaaaacctcacctaaggatac

SEQ ID NO: 4254693 - DNA, 25 bp, Homo sapien
ttagactgctaggaactaatttgtc

SEQ ID NO: 4254694 - DNA, 25 bp, Homo sapien
agcacagtccgtccaatgtccatag

SEQ ID NO: 4254695 - DNA, 25 bp, Homo sapien
tccttcacttaccacgaaacagtct

SEQ ID NO: 4254696 - DNA, 25 bp, Homo sapien
cataggcagggattttttagaagct

SEQ ID NO: 4254697 - DNA, 25 bp, Homo sapien
acagtctctaggtagttgttcttga

SEQ ID NO: 4254698 - DNA, 25 bp, Homo sapien
taaccaatgttaataagatgctatc

SEQ ID NO: 4254699 - DNA, 25 bp, Homo sapien
actacaagctacaaggtttccaaat

SEQ ID NO: 4254700 - DNA, 25 bp, Homo sapien
ggaaatacgcaacaactacaagcta

SEQ ID NO: 4254701 - DNA, 25 bp, Homo sapien
caaatggctataaaatggccactct

SEQ ID NO: 4254702 - DNA, 25 bp, Homo sapien
tctactactgcactgccacctcaac

SEQ ID NO: 4254703 - DNA, 25 bp, Homo sapien
atctactactgcactgccacctcaa

SEQ ID NO: 4254704 - DNA, 25 bp, Homo sapien
gatctactactgcactgccacctca

SEQ ID NO: 4254705 - DNA, 25 bp, Homo sapien
ctgttattgagcgtcagtaggtccg

SEQ ID NO: 4254706 - DNA, 25 bp, Homo sapien
tgttattgagcgtcagtaggtccga

SEQ ID NO: 4254707 - DNA, 25 bp, Homo sapien
tattgagcgtcagtaggtccgattt

SEQ ID NO: 4254708 - DNA, 25 bp, Homo sapien
tgagcgtcagtaggtccgattttac

SEQ ID NO: 4254709 - DNA, 25 bp, Homo sapien
ggatgcagcttcattgctcttcatt

SEQ ID NO: 4254710 - DNA, 25 bp, Homo sapien
tctctcagagttttccaccacttgc

SEQ ID NO: 4254711 - DNA, 25 bp, Homo sapien
tctcagagttttccaccacttgctc

SEQ ID NO: 4254712 - DNA, 25 bp, Homo sapien
cttggatgcagcttcattgctcttc

SEQ ID NO: 4254713 - DNA, 25 bp, Homo sapien
atggtgttttatcaagttcctctaa

SEQ ID NO: 4254714 - DNA, 25 bp, Homo sapien
ccatggtgttttatcaagttcctct

SEQ ID NO: 4254715 - DNA, 25 bp, Homo sapien
ctggaggatactgccatggtgtttt

SEQ ID NO: 4254716 - DNA, 25 bp, Homo sapien
ggaggatactgccatggtgttttat

SEQ ID NO: 4254717 - DNA, 25 bp, Homo sapien
tacccttcacattactcagactctt

SEQ ID NO: 4254718 - DNA, 25 bp, Homo sapien
acacggaagtatcttcttaaagaag

SEQ ID NO: 4254719 - DNA, 25 bp, Homo sapien
taaacacctgatagaatcaatggga

SEQ ID NO: 4254720 - DNA, 25 bp, Homo sapien
gactatacggccatactacccttca

SEQ ID NO: 4254721 - DNA, 25 bp, Homo sapien
tagtgacagcatgtatgtttcctag

SEQ ID NO: 4254722 - DNA, 25 bp, Homo sapien
ctagcaaagtaacagcgggctttac

SEQ ID NO: 4254723 - DNA, 25 bp, Homo sapien
cagcgggctttacattattccccaa

SEQ ID NO: 4254724 - DNA, 25 bp, Homo sapien
ctgcttagtgacagcatgtatgttt

SEQ ID NO: 4254725 - DNA, 25 bp, Homo sapien
ggaggcagtccaaaatgtaaaatcc

SEQ ID NO: 4254726 - DNA, 25 bp, Homo sapien
aacttcacatctggctgatatcttg

SEQ ID NO: 4254727 - DNA, 25 bp, Homo sapien
ggataaacttcacatctggctgata

SEQ ID NO: 4254728 - DNA, 25 bp, Homo sapien
ctggataaacttcacatctggctga

SEQ ID NO: 4254729 - DNA, 25 bp, Homo sapien
ataacacaattacatcagcaaattg

SEQ ID NO: 4254730 - DNA, 25 bp, Homo sapien
aattacatcagcaaattgcaaagcc

SEQ ID NO: 4254731 - DNA, 25 bp, Homo sapien
cacaattacatcagcaaattgcaaa

SEQ ID NO: 4254732 - DNA, 25 bp, Homo sapien
taacacaattacatcagcaaattgc

SEQ ID NO: 4254733 - DNA, 25 bp, Homo sapien
tatgagacccaatttaacaaacaga

SEQ ID NO: 4254734 - DNA, 25 bp, Homo sapien
aaaaagccctcagaagccaggtgct

SEQ ID NO: 4254735 - DNA, 25 bp, Homo sapien
tcagcaggacggacttgcttactga

SEQ ID NO: 4254736 - DNA, 25 bp, Homo sapien
gaggaacaattaaagatctagcagc

SEQ ID NO: 4254737 - DNA, 25 bp, Homo sapien
gcagcttgttcagagggcagcttta

SEQ ID NO: 4254738 - DNA, 25 bp, Homo sapien
tctgaaactgaagtgaccctggaac

SEQ ID NO: 4254739 - DNA, 25 bp, Homo sapien
tgcagacagactcaaaacagcacag

SEQ ID NO: 4254740 - DNA, 25 bp, Homo sapien
tatgtgatactataagggagcagca

SEQ ID NO: 4254741 - DNA, 25 bp, Homo sapien
gattctttcagaactccatcctaga

SEQ ID NO: 4254742 - DNA, 25 bp, Homo sapien
tttaccccatcatgaagtatagaaa

SEQ ID NO: 4254743 - DNA, 25 bp, Homo sapien
catttccaggcacatcatacttaaa

SEQ ID NO: 4254744 - DNA, 25 bp, Homo sapien
tagatgccaatctgagatgactcag

SEQ ID NO: 4254745 - DNA, 25 bp, Homo sapien
tggctgcacctacacagtatggatg

SEQ ID NO: 4254746 - DNA, 25 bp, Homo sapien
cacagtatggatggttgtcagggac

SEQ ID NO: 4254747 - DNA, 25 bp, Homo sapien
gatctggctgcacctacacagtatg

SEQ ID NO: 4254748 - DNA, 25 bp, Homo sapien
ctggatctggctgcacctacacagt

SEQ ID NO: 4254749 - DNA, 25 bp, Homo sapien
tctcttctgcatgagcgtaagcagc

SEQ ID NO: 4254750 - DNA, 25 bp, Homo sapien
ctcttctgcatgagcgtaagcagca

SEQ ID NO: 4254751 - DNA, 25 bp, Homo sapien
actctcttctgcatgagcgtaagca

SEQ ID NO: 4254752 - DNA, 25 bp, Homo sapien
ctctcttctgcatgagcgtaagcag

SEQ ID NO: 4254753 - DNA, 25 bp, Homo sapien
gggttgtttggcattcctaataaca

SEQ ID NO: 4254754 - DNA, 25 bp, Homo sapien
gaggtgacatgcagcgttccatgta

SEQ ID NO: 4254755 - DNA, 25 bp, Homo sapien
ttctgccatgctaataggaggtgac

SEQ ID NO: 4254756 - DNA, 25 bp, Homo sapien
ctaataacagaagccgccgtgcaca

SEQ ID NO: 4254757 - DNA, 25 bp, Homo sapien
cccactacagttccactcactgggt

SEQ ID NO: 4254758 - DNA, 25 bp, Homo sapien
aatattcaaactgtcacagttaagt

SEQ ID NO: 4254759 - DNA, 25 bp, Homo sapien
taatattttagtatcataatatgca

SEQ ID NO: 4254760 - DNA, 25 bp, Homo sapien
acaccaagtcctgtgctatttcatt

SEQ ID NO: 4254761 - DNA, 25 bp, Homo sapien
cctggacgaccatagatactgcttc

SEQ ID NO: 4254762 - DNA, 25 bp, Homo sapien
cctgaaggttcacaaaatctgctgg

SEQ ID NO: 4254763 - DNA, 25 bp, Homo sapien
tgctggtatgtcaacatagcaagca

SEQ ID NO: 4254764 - DNA, 25 bp, Homo sapien
ttcacctgaaggttcacaaaatctg

SEQ ID NO: 4254765 - DNA, 25 bp, Homo sapien
cttttcaataacaaaaggaatagct

SEQ ID NO: 4254766 - DNA, 25 bp, Homo sapien
agagaacttggtatataatctacaa

SEQ ID NO: 4254767 - DNA, 25 bp, Homo sapien
tgcttgggcgggcagagaacttggt

SEQ ID NO: 4254768 - DNA, 25 bp, Homo sapien
cttgggcgggcagagaacttggtat

SEQ ID NO: 4254769 - DNA, 25 bp, Homo sapien
tggtatataatctacaagcttcaac

SEQ ID NO: 4254770 - DNA, 25 bp, Homo sapien
tggaaagctcccattgtttcttggt

SEQ ID NO: 4254771 - DNA, 25 bp, Homo sapien
ctgaggaaactcctggaaagctccc

SEQ ID NO: 4254772 - DNA, 25 bp, Homo sapien
ctttcagaggaaccaccaatcacaa

SEQ ID NO: 4254773 - DNA, 25 bp, Homo sapien
ggaaccaccaatcacaagcaagggc

SEQ ID NO: 4254774 - DNA, 25 bp, Homo sapien
cataccgcccaaggcatggatgaga

SEQ ID NO: 4254775 - DNA, 25 bp, Homo sapien
ccataccgcccaaggcatggatgag

SEQ ID NO: 4254776 - DNA, 25 bp, Homo sapien
gccataccgcccaaggcatggatga

SEQ ID NO: 4254777 - DNA, 25 bp, Homo sapien
ataccgcccaaggcatggatgagac

SEQ ID NO: 4254778 - DNA, 25 bp, Homo sapien
tgggccagaaacaacaaggcagact

SEQ ID NO: 4254779 - DNA, 25 bp, Homo sapien
cagaaacaacaaggcagactcctgg

SEQ ID NO: 4254780 - DNA, 25 bp, Homo sapien
gccagaaacaacaaggcagactcct

SEQ ID NO: 4254781 - DNA, 25 bp, Homo sapien
gggccagaaacaacaaggcagactc

SEQ ID NO: 4254782 - DNA, 25 bp, Homo sapien
tgtcagatatccaatcgcggaggca

SEQ ID NO: 4254783 - DNA, 25 bp, Homo sapien
cagatatccaatcgcggaggcagca

SEQ ID NO: 4254784 - DNA, 25 bp, Homo sapien
ctgcttgtcagatatccaatcgcgg

SEQ ID NO: 4254785 - DNA, 25 bp, Homo sapien
tatccaatcgcggaggcagcataac

SEQ ID NO: 4254786 - DNA, 25 bp, Homo sapien
tgcctacgatgccaaatatgtactc

SEQ ID NO: 4254787 - DNA, 25 bp, Homo sapien
tacttgatgcctagctgctgggcag

SEQ ID NO: 4254788 - DNA, 25 bp, Homo sapien
tcactgggatgcctacgatgccaaa

SEQ ID NO: 4254789 - DNA, 25 bp, Homo sapien
gcttgctcattcctcatcccgatgt

SEQ ID NO: 4254790 - DNA, 25 bp, Homo sapien
cccaaggccccaccatatcgccaca

SEQ ID NO: 4254791 - DNA, 25 bp, Homo sapien
caccatatcgccacatccttccctc

SEQ ID NO: 4254792 - DNA, 25 bp, Homo sapien
tgaggaacgaagaacaggggagtaa

SEQ ID NO: 4254793 - DNA, 25 bp, Homo sapien
ggccccaccatatcgccacatcctt

SEQ ID NO: 4254794 - DNA, 25 bp, Homo sapien
tcctcgctgcgctctgcgaagttac

SEQ ID NO: 4254795 - DNA, 25 bp, Homo sapien
gctctgcgaagttactgtccggcat

SEQ ID NO: 4254796 - DNA, 25 bp, Homo sapien
gatgactttagcaccagacacctgc

SEQ ID NO: 4254797 - DNA, 25 bp, Homo sapien
ttttcagggcctgagcgatgacttt

SEQ ID NO: 4254798 - DNA, 25 bp, Homo sapien
gcggaatcatccagcaaggcaaacg

SEQ ID NO: 4254799 - DNA, 25 bp, Homo sapien
gcagccggcaaacaagcggaatcat

SEQ ID NO: 4254800 - DNA, 25 bp, Homo sapien
tctggtactgcacctctgacggaca

SEQ ID NO: 4254801 - DNA, 25 bp, Homo sapien
cgaaaagctctaagcactcacgcag

SEQ ID NO: 4254802 - DNA, 25 bp, Homo sapien
tgtggcaccagattccaccctggga

SEQ ID NO: 4254803 - DNA, 25 bp, Homo sapien
gatgaccctagaagtccctgaccag

SEQ ID NO: 4254804 - DNA, 25 bp, Homo sapien
gaaaggaaggctatctccacgtctg

SEQ ID NO: 4254805 - DNA, 25 bp, Homo sapien
tgttatttactttacgagaggccca

SEQ ID NO: 4254806 - DNA, 25 bp, Homo sapien
tgtggtttttctcacacgggaagtg

SEQ ID NO: 4254807 - DNA, 25 bp, Homo sapien
ttctcatgtaggtgcagctgtgctt

SEQ ID NO: 4254808 - DNA, 25 bp, Homo sapien
aagtggcttggtttgcgtggtttct

SEQ ID NO: 4254809 - DNA, 25 bp, Homo sapien
catttttggctaaaccagacttggg

SEQ ID NO: 4254810 - DNA, 25 bp, Homo sapien
ctgttgtctgcttgaaatggcgtct

SEQ ID NO: 4254811 - DNA, 25 bp, Homo sapien
tggcccctgtactgttgtctgcttg

SEQ ID NO: 4254812 - DNA, 25 bp, Homo sapien
cagtctggcccctgtactgttgtct

SEQ ID NO: 4254813 - DNA, 25 bp, Homo sapien
gttgtctgcttgaaatggcgtcttc

SEQ ID NO: 4254814 - DNA, 25 bp, Homo sapien
caggtcagctcagattgcgcagtct

SEQ ID NO: 4254815 - DNA, 25 bp, Homo sapien
aaatatttccaagtagccagtcagg

SEQ ID NO: 4254816 - DNA, 25 bp, Homo sapien
ttagcctgctaacttccttgacctt

SEQ ID NO: 4254817 - DNA, 25 bp, Homo sapien
ctgaccccagctcatgcgggaggga

SEQ ID NO: 4254818 - DNA, 25 bp, Homo sapien
caggcccaaagacagaagttaccgg

SEQ ID NO: 4254819 - DNA, 25 bp, Homo sapien
gaagggactcctgcatttgttaaga

SEQ ID NO: 4254820 - DNA, 25 bp, Homo sapien
gaacagggcctgaatgctttagaca

SEQ ID NO: 4254821 - DNA, 25 bp, Homo sapien
ggttctcttggaggacagacccagg

SEQ ID NO: 4254822 - DNA, 25 bp, Homo sapien
tgcatattcaccttcctactactaa

SEQ ID NO: 4254823 - DNA, 25 bp, Homo sapien
tgcttaaaatctagtagtcaatgcc

SEQ ID NO: 4254824 - DNA, 25 bp, Homo sapien
ctactaataattaggaagggttcat

SEQ ID NO: 4254825 - DNA, 25 bp, Homo sapien
tatagatttgtagataatatgcaca

SEQ ID NO: 4254826 - DNA, 25 bp, Homo sapien
aaaatatacaggaatcttgatgtac

SEQ ID NO: 4254827 - DNA, 25 bp, Homo sapien
cacatctgtgttttattatactcta

SEQ ID NO: 4254828 - DNA, 25 bp, Homo sapien
atatacaggaatcttgatgtactga

SEQ ID NO: 4254829 - DNA, 25 bp, Homo sapien
acaactcacatctgtgttttattat

SEQ ID NO: 4254830 - DNA, 25 bp, Homo sapien
gtattttcacccgtattgcacccag

SEQ ID NO: 4254831 - DNA, 25 bp, Homo sapien
cataagtgactaaggtgtgccattc

SEQ ID NO: 4254832 - DNA, 25 bp, Homo sapien
ggtagtcttcaatttggcaggcaac

SEQ ID NO: 4254833 - DNA, 25 bp, Homo sapien
agaggttgaagactccatgccccag

SEQ ID NO: 4254834 - DNA, 25 bp, Homo sapien
tcctcagtcaggtctatttcaagat

SEQ ID NO: 4254835 - DNA, 25 bp, Homo sapien
aattgttcctggcactgcaaaacca

SEQ ID NO: 4254836 - DNA, 25 bp, Homo sapien
tcttctgttacaatagtgttgcttg

SEQ ID NO: 4254837 - DNA, 25 bp, Homo sapien
gttgcttgtgtaagcaggttagagt

SEQ ID NO: 4254838 - DNA, 25 bp, Homo sapien
tcctcttaggttgaatttctacgtg

SEQ ID NO: 4254839 - DNA, 25 bp, Homo sapien
cctaatgccatcagatctcttaaca

SEQ ID NO: 4254840 - DNA, 25 bp, Homo sapien
cattggctcactgtgggatctttcc

SEQ ID NO: 4254841 - DNA, 25 bp, Homo sapien
tctacgtgaatatcaaagtgccttt

SEQ ID NO: 4254842 - DNA, 25 bp, Homo sapien
gctaggttcattcctcatgatgggc

SEQ ID NO: 4254843 - DNA, 25 bp, Homo sapien
tcggagtcgttgagctcatccacgt

SEQ ID NO: 4254844 - DNA, 25 bp, Homo sapien
cacatccttattgggagcacaggcc

SEQ ID NO: 4254845 - DNA, 25 bp, Homo sapien
tcagtaggtctcagaatcggagtcg

SEQ ID NO: 4254846 - DNA, 25 bp, Homo sapien
gaacgaagaattgagtcctagaaga

SEQ ID NO: 4254847 - DNA, 25 bp, Homo sapien
tcaaaggaaacgatcagttgtgcca

SEQ ID NO: 4254848 - DNA, 25 bp, Homo sapien
agttgtgccaaaagctgatctatca

SEQ ID NO: 4254849 - DNA, 25 bp, Homo sapien
gaactgatgagagcactagggagtc

SEQ ID NO: 4254850 - DNA, 25 bp, Homo sapien
cattttcatctactgcaagcacact

SEQ ID NO: 4254851 - DNA, 25 bp, Homo sapien
cccatttcgggcagcaacatgcaga

SEQ ID NO: 4254852 - DNA, 25 bp, Homo sapien
ccaaaagttcctgaaccaccattgt

SEQ ID NO: 4254853 - DNA, 25 bp, Homo sapien
tcctgaaccaccattgttagcccat

SEQ ID NO: 4254854 - DNA, 25 bp, Homo sapien
tcagccataggtcccatcgacaggt

SEQ ID NO: 4254855 - DNA, 25 bp, Homo sapien
caacttgtgaagaccaagaggtaca

SEQ ID NO: 4254856 - DNA, 25 bp, Homo sapien
gaaattgcattcctccgttgttaag

SEQ ID NO: 4254857 - DNA, 25 bp, Homo sapien
caccttgtcaacgtgtagctcggca

SEQ ID NO: 4254858 - DNA, 25 bp, Homo sapien
tctatctggaggttggctgctcaca

SEQ ID NO: 4254859 - DNA, 25 bp, Homo sapien
aaccttattggcttacagacacaca

SEQ ID NO: 4254860 - DNA, 25 bp, Homo sapien
gatctgactaatcccagaacgggca

SEQ ID NO: 4254861 - DNA, 25 bp, Homo sapien
cctcaaaatggaatagcaagggaca

SEQ ID NO: 4254862 - DNA, 25 bp, Homo sapien
gtattaacaaggcactagtttcatg

SEQ ID NO: 4254863 - DNA, 25 bp, Homo sapien
ggttgcattgatgaggtttctatct

SEQ ID NO: 4254864 - DNA, 25 bp, Homo sapien
gtttgcaaggctgcgttggttgcat

SEQ ID NO: 4254865 - DNA, 25 bp, Homo sapien
ttatcttttccagtattaacaaggc

SEQ ID NO: 4254866 - DNA, 25 bp, Homo sapien
ctacaagccaaatggagggcagtat

SEQ ID NO: 4254867 - DNA, 25 bp, Homo sapien
ccaaatggagggcagtatttttact

SEQ ID NO: 4254868 - DNA, 25 bp, Homo sapien
gttctgcactagcactgctaaccag

SEQ ID NO: 4254869 - DNA, 25 bp, Homo sapien
tactgttatcttgtaaagtcagttc

SEQ ID NO: 4254870 - DNA, 25 bp, Homo sapien
tagagtccacagaattgacttgagc

SEQ ID NO: 4254871 - DNA, 25 bp, Homo sapien
gcagctgtaaacactctacatggtc

SEQ ID NO: 4254872 - DNA, 25 bp, Homo sapien
tgacttgagcattatggctgagcag

SEQ ID NO: 4254873 - DNA, 25 bp, Homo sapien
gcagccatcataagaggtgttttcc

SEQ ID NO: 4254874 - DNA, 25 bp, Homo sapien
ttttgaatctgtggcgttcacaatg

SEQ ID NO: 4254875 - DNA, 25 bp, Homo sapien
ccttttgaatctgtggcgttcacaa

SEQ ID NO: 4254876 - DNA, 25 bp, Homo sapien
tccttttgaatctgtggcgttcaca

SEQ ID NO: 4254877 - DNA, 25 bp, Homo sapien
tgaatctgtggcgttcacaatgctg

SEQ ID NO: 4254878 - DNA, 25 bp, Homo sapien
ctcagcagcaccttcgttgtcattt

SEQ ID NO: 4254879 - DNA, 25 bp, Homo sapien
aaagcagttctacacatgtctcgtg

SEQ ID NO: 4254880 - DNA, 25 bp, Homo sapien
agcagttctacacatgtctcgtgac

SEQ ID NO: 4254881 - DNA, 25 bp, Homo sapien
tctaaaagcagttctacacatgtct

SEQ ID NO: 4254882 - DNA, 25 bp, Homo sapien
taaaagcagttctacacatgtctcg

SEQ ID NO: 4254883 - DNA, 25 bp, Homo sapien
tcatctggcccaaaacgtcatagtg

SEQ ID NO: 4254884 - DNA, 25 bp, Homo sapien
agtgggtagaaaccaatgatgctgc

SEQ ID NO: 4254885 - DNA, 25 bp, Homo sapien
gagtcccttgcaacaatcatctggc

SEQ ID NO: 4254886 - DNA, 25 bp, Homo sapien
gatattgtatgtggcaatgcctaca

SEQ ID NO: 4254887 - DNA, 25 bp, Homo sapien
ggacaggagtgagcctacgtactaa

SEQ ID NO: 4254888 - DNA, 25 bp, Homo sapien
gaagcttgaactttgacaacactga

SEQ ID NO: 4254889 - DNA, 25 bp, Homo sapien
gataactttgtcagaacagctccca

SEQ ID NO: 4254890 - DNA, 25 bp, Homo sapien
cctataaaagcgatgactgtgactg

SEQ ID NO: 4254891 - DNA, 25 bp, Homo sapien
tgtagcaagcccagtgaagtgccgt

SEQ ID NO: 4254892 - DNA, 25 bp, Homo sapien
cagacaggtgtataggcgtccggcc

SEQ ID NO: 4254893 - DNA, 25 bp, Homo sapien
tagcaccatgttgaagtaatgcatc

SEQ ID NO: 4254894 - DNA, 25 bp, Homo sapien
gaagtgccgtatatccatgattgtc

SEQ ID NO: 4254895 - DNA, 25 bp, Homo sapien
gtctgtgtgcccgttgagaacagat

SEQ ID NO: 4254896 - DNA, 25 bp, Homo sapien
tgtccttccccacttatctttggca

SEQ ID NO: 4254897 - DNA, 25 bp, Homo sapien
tgctcctttgttcagcaatgagtaa

SEQ ID NO: 4254898 - DNA, 25 bp, Homo sapien
gagaacagatagcatcagaggcgtc

SEQ ID NO: 4254899 - DNA, 25 bp, Homo sapien
caacaggaataggttcagtgctgtc

SEQ ID NO: 4254900 - DNA, 25 bp, Homo sapien
tgtactctggttttcgaaatacgcc

SEQ ID NO: 4254901 - DNA, 25 bp, Homo sapien
gaaatacgcccttctgtgatgcaac

SEQ ID NO: 4254902 - DNA, 25 bp, Homo sapien
gctgtcacttaagactgtactctgg

SEQ ID NO: 4254903 - DNA, 25 bp, Homo sapien
tctgcatttcctattaatagccgta

SEQ ID NO: 4254904 - DNA, 25 bp, Homo sapien
taatagccgtaagcattctgaatga

SEQ ID NO: 4254905 - DNA, 25 bp, Homo sapien
tattaatagccgtaagcattctgaa

SEQ ID NO: 4254906 - DNA, 25 bp, Homo sapien
ttcctattaatagccgtaagcattc

SEQ ID NO: 4254907 - DNA, 25 bp, Homo sapien
agaaaatgtccatctaaaagcacat

SEQ ID NO: 4254908 - DNA, 25 bp, Homo sapien
ggatagttgcactgaatttaatatg

SEQ ID NO: 4254909 - DNA, 25 bp, Homo sapien
ttttgggatagttgcactgaattta

SEQ ID NO: 4254910 - DNA, 25 bp, Homo sapien
gaaaatgtccatctaaaagcacatc

SEQ ID NO: 4254911 - DNA, 25 bp, Homo sapien
taactacttctaagggactggctaa

SEQ ID NO: 4254912 - DNA, 25 bp, Homo sapien
ggaaatgactggtaaacctccagga

SEQ ID NO: 4254913 - DNA, 25 bp, Homo sapien
gataggcactaagagtaacctgtgg

SEQ ID NO: 4254914 - DNA, 25 bp, Homo sapien
tagatgctctctatagacctccaaa

SEQ ID NO: 4254915 - DNA, 25 bp, Homo sapien
tgctgcatgaataggtgtcctcttc

SEQ ID NO: 4254916 - DNA, 25 bp, Homo sapien
ggctccctgattaatgagtacatcc

SEQ ID NO: 4254917 - DNA, 25 bp, Homo sapien
caacatggcccttaaaagctgcaag

SEQ ID NO: 4254918 - DNA, 25 bp, Homo sapien
ttttactaagattgaggctccctga

SEQ ID NO: 4254919 - DNA, 25 bp, Homo sapien
tatggtactagtttgagtcaacaca

SEQ ID NO: 4254920 - DNA, 25 bp, Homo sapien
aaacccagcacattaagtaattctc

SEQ ID NO: 4254921 - DNA, 25 bp, Homo sapien
caagtcggctatgaaggcagtactc

SEQ ID NO: 4254922 - DNA, 25 bp, Homo sapien
catgataactattacatggaccaaa

SEQ ID NO: 4254923 - DNA, 25 bp, Homo sapien
gctctattatctgaatcactcagca

SEQ ID NO: 4254924 - DNA, 25 bp, Homo sapien
ttatctgaatcactcagcatgtctg

SEQ ID NO: 4254925 - DNA, 25 bp, Homo sapien
gttgctctattatctgaatcactca

SEQ ID NO: 4254926 - DNA, 25 bp, Homo sapien
tattgttgctctattatctgaatca

SEQ ID NO: 4254927 - DNA, 25 bp, Homo sapien
aacatctagaggagtttcacttgca

SEQ ID NO: 4254928 - DNA, 25 bp, Homo sapien
acatctagaggagtttcacttgcaa

SEQ ID NO: 4254929 - DNA, 25 bp, Homo sapien
catctagaggagtttcacttgcaat

SEQ ID NO: 4254930 - DNA, 25 bp, Homo sapien
gaactgcgttgtatccttgcttatc

SEQ ID NO: 4254931 - DNA, 25 bp, Homo sapien
gctgaagacatagacggtgaccata

SEQ ID NO: 4254932 - DNA, 25 bp, Homo sapien
cttatcacggatccctggatttgca

SEQ ID NO: 4254933 - DNA, 25 bp, Homo sapien
gacggtgaccataagcagctgaata

SEQ ID NO: 4254934 - DNA, 25 bp, Homo sapien
tgtctgatgtagctgcatagtgcag

SEQ ID NO: 4254935 - DNA, 25 bp, Homo sapien
acacttgctcctgatcccacaagag

SEQ ID NO: 4254936 - DNA, 25 bp, Homo sapien
gcagttggcagcagcgtagtgcagt

SEQ ID NO: 4254937 - DNA, 25 bp, Homo sapien
acaggcactggtaattgcagttggc

SEQ ID NO: 4254938 - DNA, 25 bp, Homo sapien
gcactctgtgtcaattcctactcta

SEQ ID NO: 4254939 - DNA, 25 bp, Homo sapien
tcctgtatggttctaatgcactctg

SEQ ID NO: 4254940 - DNA, 25 bp, Homo sapien
cctgttgtgaaatacttagtgggat

SEQ ID NO: 4254941 - DNA, 25 bp, Homo sapien
taagtaggcttatgagagcaatctg

SEQ ID NO: 4254942 - DNA, 25 bp, Homo sapien
cagaaggtttaggcactccaaattc

SEQ ID NO: 4254943 - DNA, 25 bp, Homo sapien
tctgcaccagtattcagcagaaggt

SEQ ID NO: 4254944 - DNA, 25 bp, Homo sapien
aagtctgcaccagtattcagcagaa

SEQ ID NO: 4254945 - DNA, 25 bp, Homo sapien
tgcaccagtattcagcagaaggttt

SEQ ID NO: 4254946 - DNA, 25 bp, Homo sapien
ttaactggaaggttctctggcgacc

SEQ ID NO: 4254947 - DNA, 25 bp, Homo sapien
gatataagcgatcctccaagtctca

SEQ ID NO: 4254948 - DNA, 25 bp, Homo sapien
tctctgtaggcaagttacgtggaag

SEQ ID NO: 4254949 - DNA, 25 bp, Homo sapien
cactcataacctacaacttggctgg

SEQ ID NO: 4254950 - DNA, 25 bp, Homo sapien
tgcagctgcatgtagacaagtcctg

SEQ ID NO: 4254951 - DNA, 25 bp, Homo sapien
cagctgcagctgcatgtagacaagt

SEQ ID NO: 4254952 - DNA, 25 bp, Homo sapien
tgcatgtagacaagtcctgccaaaa

SEQ ID NO: 4254953 - DNA, 25 bp, Homo sapien
cctgccaaaatcatctggggtatct

SEQ ID NO: 4254954 - DNA, 25 bp, Homo sapien
aagcaggatagagaccatctaaaaa

SEQ ID NO: 4254955 - DNA, 25 bp, Homo sapien
ggatagagaccatctaaaaattttg

SEQ ID NO: 4254956 - DNA, 25 bp, Homo sapien
tattaaattatccatactggaccca

SEQ ID NO: 4254957 - DNA, 25 bp, Homo sapien
gggttattaaattatccatactgga

SEQ ID NO: 4254958 - DNA, 25 bp, Homo sapien
aaagaagttttctgcagcaatctga

SEQ ID NO: 4254959 - DNA, 25 bp, Homo sapien
gaaagaagttttctgcagcaatctg

SEQ ID NO: 4254960 - DNA, 25 bp, Homo sapien
agaagttttctgcagcaatctgaaa

SEQ ID NO: 4254961 - DNA, 25 bp, Homo sapien
aagttttctgcagcaatctgaaaag

SEQ ID NO: 4254962 - DNA, 25 bp, Homo sapien
agggggaacattccatgtatgccac

SEQ ID NO: 4254963 - DNA, 25 bp, Homo sapien
gggggaacattccatgtatgccacg

SEQ ID NO: 4254964 - DNA, 25 bp, Homo sapien
ggggaacattccatgtatgccacgc

SEQ ID NO: 4254965 - DNA, 25 bp, Homo sapien
gagggggaacattccatgtatgcca

SEQ ID NO: 4254966 - DNA, 25 bp, Homo sapien
taataagagtgttgatcagcagctc

SEQ ID NO: 4254967 - DNA, 25 bp, Homo sapien
agctcatggccataccgtgctgcta

SEQ ID NO: 4254968 - DNA, 25 bp, Homo sapien
ttatcctcacagtcgattacagctc

SEQ ID NO: 4254969 - DNA, 25 bp, Homo sapien
tgtcagcaccacttgtaataagagt

SEQ ID NO: 4254970 - DNA, 25 bp, Homo sapien
ctgcaatataggacttactgtcaga

SEQ ID NO: 4254971 - DNA, 25 bp, Homo sapien
tgcaatataggacttactgtcagac

SEQ ID NO: 4254972 - DNA, 25 bp, Homo sapien
gcaatataggacttactgtcagaca

SEQ ID NO: 4254973 - DNA, 25 bp, Homo sapien
atggtttgtgatcgggagaatctac

SEQ ID NO: 4254974 - DNA, 25 bp, Homo sapien
gataatggtttgtgatcgggagaat

SEQ ID NO: 4254975 - DNA, 25 bp, Homo sapien
cactctggataatggtttgtgatcg

SEQ ID NO: 4254976 - DNA, 25 bp, Homo sapien
tctggataatggtttgtgatcggga

SEQ ID NO: 4254977 - DNA, 25 bp, Homo sapien
tggagagcagtcatgtgtagtgggg

SEQ ID NO: 4254978 - DNA, 25 bp, Homo sapien
gtttgccataagacacgttagcggg

SEQ ID NO: 4254979 - DNA, 25 bp, Homo sapien
caatcagtgcagtaaggctcatgtc

SEQ ID NO: 4254980 - DNA, 25 bp, Homo sapien
tgaggaaatgtaggccccagggtta

SEQ ID NO: 4254981 - DNA, 25 bp, Homo sapien
taagcctatatgtggcactggatca

SEQ ID NO: 4254982 - DNA, 25 bp, Homo sapien
tgaaccaccttatcagttttgacaa

SEQ ID NO: 4254983 - DNA, 25 bp, Homo sapien
catcatcacataacgtcccttcatg

SEQ ID NO: 4254984 - DNA, 25 bp, Homo sapien
tgtatataacataaacccctgccaa

SEQ ID NO: 4254985 - DNA, 25 bp, Homo sapien
cttgagtaaggctttcactcagcat

SEQ ID NO: 4254986 - DNA, 25 bp, Homo sapien
acaatgctccatgtgttgatgcagc

SEQ ID NO: 4254987 - DNA, 25 bp, Homo sapien
caacatcttgtccattatagcaggc

SEQ ID NO: 4254988 - DNA, 25 bp, Homo sapien
tgacatcggccccattgccaactag

SEQ ID NO: 4254989 - DNA, 25 bp, Homo sapien
tatagcaggctacatgaagaggtgt

SEQ ID NO: 4254990 - DNA, 25 bp, Homo sapien
gctaattatcaatgttgtgagctat

SEQ ID NO: 4254991 - DNA, 25 bp, Homo sapien
atcaatgttgtgagctattttagca

SEQ ID NO: 4254992 - DNA, 25 bp, Homo sapien
gttaaagtagttttgctaattatca

SEQ ID NO: 4254993 - DNA, 25 bp, Homo sapien
gtagttttgctaattatcaatgttg

SEQ ID NO: 4254994 - DNA, 25 bp, Homo sapien
gctttgggtcaccaggtatcatgta

SEQ ID NO: 4254995 - DNA, 25 bp, Homo sapien
taatgtgtcctgactccgtgaagag

SEQ ID NO: 4254996 - DNA, 25 bp, Homo sapien
agctcaggtgagcattccttgttgg

SEQ ID NO: 4254997 - DNA, 25 bp, Homo sapien
tgtagtaaagaatctgacctctccc

SEQ ID NO: 4254998 - DNA, 25 bp, Homo sapien
gagcctccataaggaaccaaccttg

SEQ ID NO: 4254999 - DNA, 25 bp, Homo sapien
tagttggtcataagtaaagggtggc

SEQ ID NO: 4255000 - DNA, 25 bp, Homo sapien
ggaaactctggaccctaatcttgta

SEQ ID NO: 4255001 - DNA, 25 bp, Homo sapien
tagttggccccaacataatgcagct

SEQ ID NO: 4255002 - DNA, 25 bp, Homo sapien
tacgctgatcattccactagaggct

SEQ ID NO: 4255003 - DNA, 25 bp, Homo sapien
tgctgcatgaagaggtgtataagac

SEQ ID NO: 4255004 - DNA, 25 bp, Homo sapien
tcacttcagctccatgcgacacaag

SEQ ID NO: 4255005 - DNA, 25 bp, Homo sapien
tagaaggtacttgactacgctgatc

SEQ ID NO: 4255006 - DNA, 25 bp, Homo sapien
ttccaccagatcttaaccaacttag

SEQ ID NO: 4255007 - DNA, 25 bp, Homo sapien
tgtggtagtttagcaccaaactcac

SEQ ID NO: 4255008 - DNA, 25 bp, Homo sapien
cttactggaatcgtttcaatctggg

SEQ ID NO: 4255009 - DNA, 25 bp, Homo sapien
tgaagcagtcctcacacgttgggct

SEQ ID NO: 4255010 - DNA, 25 bp, Homo sapien
ggctcatgtaactgacatcatcttg

SEQ ID NO: 4255011 - DNA, 25 bp, Homo sapien
cagtaattaaatgctccagcccaga

SEQ ID NO: 4255012 - DNA, 25 bp, Homo sapien
catcatcttgaatgtggctggtcac

SEQ ID NO: 4255013 - DNA, 25 bp, Homo sapien
ggctctgctcagttactcaaggacc

SEQ ID NO: 4255014 - DNA, 25 bp, Homo sapien
agaaccgctgctggccaaggtgaag

SEQ ID NO: 4255015 - DNA, 25 bp, Homo sapien
ccccatagtgggtagaaactctgaa

SEQ ID NO: 4255016 - DNA, 25 bp, Homo sapien
aatatggattctcgggcttctgccc

SEQ ID NO: 4255017 - DNA, 25 bp, Homo sapien
gactctggatgttgcccgcttagaa

SEQ ID NO: 4255018 - DNA, 25 bp, Homo sapien
tactcttacgaactactgaagaacc

SEQ ID NO: 4255019 - DNA, 25 bp, Homo sapien
ctctgaaatactcttacgaactact

SEQ ID NO: 4255020 - DNA, 25 bp, Homo sapien
tactgaagaaccttttcgaaggaga

SEQ ID NO: 4255021 - DNA, 25 bp, Homo sapien
ccttttcgaaggagaaatactgtca

SEQ ID NO: 4255022 - DNA, 25 bp, Homo sapien
taatattggcacctctagacaagag

SEQ ID NO: 4255023 - DNA, 25 bp, Homo sapien
tagcacgcctatctttcttgtcaaa

SEQ ID NO: 4255024 - DNA, 25 bp, Homo sapien
ttggcacctctagacaagagtagtt

SEQ ID NO: 4255025 - DNA, 25 bp, Homo sapien
atgctgcccaatggatagcacgcct

SEQ ID NO: 4255026 - DNA, 25 bp, Homo sapien
gatacgtttacattactcagaagag

SEQ ID NO: 4255027 - DNA, 25 bp, Homo sapien
gcagtcctccctgctcgatcagata

SEQ ID NO: 4255028 - DNA, 25 bp, Homo sapien
tctgcagaatgcttcaaaagtacct

SEQ ID NO: 4255029 - DNA, 25 bp, Homo sapien
gaagaggtaccaaagcttcagcaca

SEQ ID NO: 4255030 - DNA, 25 bp, Homo sapien
aggaagtgaggagcttctctgctcg

SEQ ID NO: 4255031 - DNA, 25 bp, Homo sapien
taggaagtgaggagcttctctgctc

SEQ ID NO: 4255032 - DNA, 25 bp, Homo sapien
agcttctctgctcggccgcccatcg

SEQ ID NO: 4255033 - DNA, 25 bp, Homo sapien
aggagcttctctgctcggccgccca

SEQ ID NO: 4255034 - DNA, 25 bp, Homo sapien
gttgtagggcatagtttaggtccat

SEQ ID NO: 4255035 - DNA, 25 bp, Homo sapien
ccttcagctgtggatactagcacct

SEQ ID NO: 4255036 - DNA, 25 bp, Homo sapien
ggaaaagactgtataccctccttca

SEQ ID NO: 4255037 - DNA, 25 bp, Homo sapien
gtcttcaagcgctaaagttcttctg

SEQ ID NO: 4255038 - DNA, 25 bp, Homo sapien
tgctctgtgtaaaggtgtcaaccat

SEQ ID NO: 4255039 - DNA, 25 bp, Homo sapien
taaaggtgtcaaccatttgctgtct

SEQ ID NO: 4255040 - DNA, 25 bp, Homo sapien
tgtgtaaaggtgtcaaccatttgct

SEQ ID NO: 4255041 - DNA, 25 bp, Homo sapien
tctgtgtaaaggtgtcaaccatttg

SEQ ID NO: 4255042 - DNA, 25 bp, Homo sapien
ttagtctagggctctaggcagccag

SEQ ID NO: 4255043 - DNA, 25 bp, Homo sapien
tcatgggttagtggaaggaacactg

SEQ ID NO: 4255044 - DNA, 25 bp, Homo sapien
gaagacacagtcatgggttagtgga

SEQ ID NO: 4255045 - DNA, 25 bp, Homo sapien
ggtctaacgttgtgaagacacagtc

SEQ ID NO: 4255046 - DNA, 25 bp, Homo sapien
tctagtttcaattctaatttataac

SEQ ID NO: 4255047 - DNA, 25 bp, Homo sapien
atcagtcagtttaacttgggcctca

SEQ ID NO: 4255048 - DNA, 25 bp, Homo sapien
ctgttttgatggatccagaatttaa

SEQ ID NO: 4255049 - DNA, 25 bp, Homo sapien
aaattagggttatagaaatcagtca

SEQ ID NO: 4255050 - DNA, 25 bp, Homo sapien
tagggttatagaaatcagtcagttt

SEQ ID NO: 4255051 - DNA, 25 bp, Homo sapien
tacagaaccttatgagtctatatac

SEQ ID NO: 4255052 - DNA, 25 bp, Homo sapien
tattgtctgaagactattcttctga

SEQ ID NO: 4255053 - DNA, 25 bp, Homo sapien
ttcaaaccaaatttaagcagaactc

SEQ ID NO: 4255054 - DNA, 25 bp, Homo sapien
gaactcctggagcatctatacagaa

SEQ ID NO: 4255055 - DNA, 25 bp, Homo sapien
taaattagagcctaactggtaagtc

SEQ ID NO: 4255056 - DNA, 25 bp, Homo sapien
gcctaactggtaagtctaaagagaa

SEQ ID NO: 4255057 - DNA, 25 bp, Homo sapien
tagccttggattttactccagctaa

SEQ ID NO: 4255058 - DNA, 25 bp, Homo sapien
ttcaatagaaatctagccttggatt

SEQ ID NO: 4255059 - DNA, 25 bp, Homo sapien
gcgtgcaatggggttcgcttttcat

SEQ ID NO: 4255060 - DNA, 25 bp, Homo sapien
gcatctccaaggtaagctgcggcgt

SEQ ID NO: 4255061 - DNA, 25 bp, Homo sapien
ctccaaggtaagctgcggcgtgcaa

SEQ ID NO: 4255062 - DNA, 25 bp, Homo sapien
ccaaggtaagctgcggcgtgcaatg

SEQ ID NO: 4255063 - DNA, 25 bp, Homo sapien
attttttcgtcagtatatttccaca

SEQ ID NO: 4255064 - DNA, 25 bp, Homo sapien
tttcacaacagtacccttaggggca

SEQ ID NO: 4255065 - DNA, 25 bp, Homo sapien
gggattcgacattatactttaaagc

SEQ ID NO: 4255066 - DNA, 25 bp, Homo sapien
agatgcttgtgctgctgatatatat

SEQ ID NO: 4255067 - DNA, 25 bp, Homo sapien
tcggcaggctaatgtttagaatttc

SEQ ID NO: 4255068 - DNA, 25 bp, Homo sapien
tgactggacaattgtaatcatcaaa

SEQ ID NO: 4255069 - DNA, 25 bp, Homo sapien
ccatctgtgactggacaattgtaat

SEQ ID NO: 4255070 - DNA, 25 bp, Homo sapien
tcatcaaatgcaatccagttgttcg

SEQ ID NO: 4255071 - DNA, 25 bp, Homo sapien
aaaattcttaatgctgtatacaaag

SEQ ID NO: 4255072 - DNA, 25 bp, Homo sapien
tcaggacagagcaacagaggagaaa

SEQ ID NO: 4255073 - DNA, 25 bp, Homo sapien
gagacagtctgcagcgaacaaaggg

SEQ ID NO: 4255074 - DNA, 25 bp, Homo sapien
cattcagtggaatgtcagctgcttc

SEQ ID NO: 4255075 - DNA, 25 bp, Homo sapien
cctccaacgagaatgacggatcaca

SEQ ID NO: 4255076 - DNA, 25 bp, Homo sapien
caatagactgtgatctgtgccgaac

SEQ ID NO: 4255077 - DNA, 25 bp, Homo sapien
tgtgaactctgaaagggtcaatcct

SEQ ID NO: 4255078 - DNA, 25 bp, Homo sapien
caagaggaatcctgagtggctaagt

SEQ ID NO: 4255079 - DNA, 25 bp, Homo sapien
gctttaaatactgaacctagaggaa

SEQ ID NO: 4255080 - DNA, 25 bp, Homo sapien
ccaggttagtaattaccagggagag

SEQ ID NO: 4255081 - DNA, 25 bp, Homo sapien
aaaatagtctgaggcactagctgag

SEQ ID NO: 4255082 - DNA, 25 bp, Homo sapien
caaatggagtcctttgggagccata

SEQ ID NO: 4255083 - DNA, 25 bp, Homo sapien
tctttcttaaatattagtgctcgaa

SEQ ID NO: 4255084 - DNA, 25 bp, Homo sapien
taaatatagcttgcaccagtgatgg

SEQ ID NO: 4255085 - DNA, 25 bp, Homo sapien
tcaggatctccgttaaatatagctt

SEQ ID NO: 4255086 - DNA, 25 bp, Homo sapien
aatattagtgctcgaacttcatcag

SEQ ID NO: 4255087 - DNA, 25 bp, Homo sapien
aaacctggcagttgatgaaaatagc

SEQ ID NO: 4255088 - DNA, 25 bp, Homo sapien
atactatactagtcaaggagccagc

SEQ ID NO: 4255089 - DNA, 25 bp, Homo sapien
aattcattacagaaaaggccatgcc

SEQ ID NO: 4255090 - DNA, 25 bp, Homo sapien
tgacagtagcactaaaaccaaggtt

SEQ ID NO: 4255091 - DNA, 25 bp, Homo sapien
tggagaatgtagggatttattttcc

SEQ ID NO: 4255092 - DNA, 25 bp, Homo sapien
gtggagaatgtagggatttattttc

SEQ ID NO: 4255093 - DNA, 25 bp, Homo sapien
aaaacaacaatacacactcgactca

SEQ ID NO: 4255094 - DNA, 25 bp, Homo sapien
caaaacaacaatacacactcgactc

SEQ ID NO: 4255095 - DNA, 25 bp, Homo sapien
ttcccatcgatagcataagcaaggc

SEQ ID NO: 4255096 - DNA, 25 bp, Homo sapien
cgtttacatgtgatgagtcagacca

SEQ ID NO: 4255097 - DNA, 25 bp, Homo sapien
tcagaccacaagagacaatacgact

SEQ ID NO: 4255098 - DNA, 25 bp, Homo sapien
cagagatgatcacagcgatacccac

SEQ ID NO: 4255099 - DNA, 25 bp, Homo sapien
gcagaaatggtgttagtggagaatc

SEQ ID NO: 4255100 - DNA, 25 bp, Homo sapien
ggcaccaggcagaaatggtgttagt

SEQ ID NO: 4255101 - DNA, 25 bp, Homo sapien
tgtggctgctccagcaaaagggcac

SEQ ID NO: 4255102 - DNA, 25 bp, Homo sapien
ttctccatcaggcagttgtctgtgg

SEQ ID NO: 4255103 - DNA, 25 bp, Homo sapien
tccaacggagcaacagtctgaagag

SEQ ID NO: 4255104 - DNA, 25 bp, Homo sapien
gactgtgcatcttctttgagccaac

SEQ ID NO: 4255105 - DNA, 25 bp, Homo sapien
tagaacctcagtatcagtcccacag

SEQ ID NO: 4255106 - DNA, 25 bp, Homo sapien
aaagactgcagacccacaggatgaa

SEQ ID NO: 4255107 - DNA, 25 bp, Homo sapien
gatctgagctacttctcgggatgta

SEQ ID NO: 4255108 - DNA, 25 bp, Homo sapien
cagagatctgagctacttctcggga

SEQ ID NO: 4255109 - DNA, 25 bp, Homo sapien
tgagctacttctcgggatgtaactt

SEQ ID NO: 4255110 - DNA, 25 bp, Homo sapien
gagatctgagctacttctcgggatg

SEQ ID NO: 4255111 - DNA, 25 bp, Homo sapien
ctagcaggagaaaaaaatagtgcat

SEQ ID NO: 4255112 - DNA, 25 bp, Homo sapien
tggacagccttcacaattagaaggt

SEQ ID NO: 4255113 - DNA, 25 bp, Homo sapien
cagccttcacaattagaaggttcat

SEQ ID NO: 4255114 - DNA, 25 bp, Homo sapien
ttggacagccttcacaattagaagg

SEQ ID NO: 4255115 - DNA, 25 bp, Homo sapien
gacagccttcacaattagaaggttc

SEQ ID NO: 4255116 - DNA, 25 bp, Homo sapien
cctgcaatggactcataaaaaaggt

SEQ ID NO: 4255117 - DNA, 25 bp, Homo sapien
caaacggcttaactgctttcgtgtg

SEQ ID NO: 4255118 - DNA, 25 bp, Homo sapien
ccctataatgacagttgcagtaaga

SEQ ID NO: 4255119 - DNA, 25 bp, Homo sapien
tgactaacagtggttttagcaagta

SEQ ID NO: 4255120 - DNA, 25 bp, Homo sapien
tctaatctattctgctatcactgag

SEQ ID NO: 4255121 - DNA, 25 bp, Homo sapien
aacatctgtgatatgctatgtgctg

SEQ ID NO: 4255122 - DNA, 25 bp, Homo sapien
agtgatcttaacaaacaggtaacct

SEQ ID NO: 4255123 - DNA, 25 bp, Homo sapien
gatctttgcaacctgtaatactagc

SEQ ID NO: 4255124 - DNA, 25 bp, Homo sapien
tccaccagtgtctactttctatgta

SEQ ID NO: 4255125 - DNA, 25 bp, Homo sapien
tctatgtaatagaatattaaacaca

SEQ ID NO: 4255126 - DNA, 25 bp, Homo sapien
taatattaggcctatcctaagccaa

SEQ ID NO: 4255127 - DNA, 25 bp, Homo sapien
catttgttaatattaggcctatcct

SEQ ID NO: 4255128 - DNA, 25 bp, Homo sapien
gagcacatgactgaaactagacaat

SEQ ID NO: 4255129 - DNA, 25 bp, Homo sapien
agtagcccaacacacagtagccttc

SEQ ID NO: 4255130 - DNA, 25 bp, Homo sapien
taacaacatgtctcgttcaggaaag

SEQ ID NO: 4255131 - DNA, 25 bp, Homo sapien
tatacatccttgtaacagacacagg

SEQ ID NO: 4255132 - DNA, 25 bp, Homo sapien
gagaaaacagtcagtaggctatcac

SEQ ID NO: 4255133 - DNA, 25 bp, Homo sapien
ttgaatgacaccgagtaaatacact

SEQ ID NO: 4255134 - DNA, 25 bp, Homo sapien
ccagaggccatgtaggatggtgaaa

SEQ ID NO: 4255135 - DNA, 25 bp, Homo sapien
acttactgtgcatacagtgtcagga

SEQ ID NO: 4255136 - DNA, 25 bp, Homo sapien
tcctgtaagcctgagactcaaaggc

SEQ ID NO: 4255137 - DNA, 25 bp, Homo sapien
gcaaagccagtcatttaacccataa

SEQ ID NO: 4255138 - DNA, 25 bp, Homo sapien
gcaaaccaagcctactgtgagtgac

SEQ ID NO: 4255139 - DNA, 25 bp, Homo sapien
aacactgcctatgtgaagactcact

SEQ ID NO: 4255140 - DNA, 25 bp, Homo sapien
cccatactattttcctctggtggag

SEQ ID NO: 4255141 - DNA, 25 bp, Homo sapien
tactgtttcaattccaatcacaggc

SEQ ID NO: 4255142 - DNA, 25 bp, Homo sapien
taggaattcccatactattttcctc

SEQ ID NO: 4255143 - DNA, 25 bp, Homo sapien
gttgtactgtttcaattccaatcac

SEQ ID NO: 4255144 - DNA, 25 bp, Homo sapien
attggtctgagtgtagaagatgaac

SEQ ID NO: 4255145 - DNA, 25 bp, Homo sapien
gaagatgaactgaaatggcggcaaa

SEQ ID NO: 4255146 - DNA, 25 bp, Homo sapien
aaaattggagaagagtagactggcc

SEQ ID NO: 4255147 - DNA, 25 bp, Homo sapien
gaactactgcattagtccaataaga

SEQ ID NO: 4255148 - DNA, 25 bp, Homo sapien
ccagtccagaatgagtacattcact

SEQ ID NO: 4255149 - DNA, 25 bp, Homo sapien
cagtccagaatgagtacattcactg

SEQ ID NO: 4255150 - DNA, 25 bp, Homo sapien
gtccagaatgagtacattcactgaa

SEQ ID NO: 4255151 - DNA, 25 bp, Homo sapien
cccagtccagaatgagtacattcac

SEQ ID NO: 4255152 - DNA, 25 bp, Homo sapien
gacgcgagggcggtgagcgtggaac

SEQ ID NO: 4255153 - DNA, 25 bp, Homo sapien
cagctcgcccgacgcgagggcggtg

SEQ ID NO: 4255154 - DNA, 25 bp, Homo sapien
agaggaagcgattgcccggcagctc

SEQ ID NO: 4255155 - DNA, 25 bp, Homo sapien
aggaaagaggaagcgattgcccggc

SEQ ID NO: 4255156 - DNA, 25 bp, Homo sapien
ggtcacggagtttgaggaacgccat

SEQ ID NO: 4255157 - DNA, 25 bp, Homo sapien
ctggtcacggagtttgaggaacgcc

SEQ ID NO: 4255158 - DNA, 25 bp, Homo sapien
tggtcacggagtttgaggaacgcca

SEQ ID NO: 4255159 - DNA, 25 bp, Homo sapien
actgcgctgagaagacctgcgggca

SEQ ID NO: 4255160 - DNA, 25 bp, Homo sapien
tcctctgaggactccccgccctctt

SEQ ID NO: 4255161 - DNA, 25 bp, Homo sapien
ggaccagcgggtccgcggccgactg

SEQ ID NO: 4255162 - DNA, 25 bp, Homo sapien
gagaggtgaggtgcccggccggtcc

SEQ ID NO: 4255163 - DNA, 25 bp, Homo sapien
gccgcgccgttccagcccgcggcag

SEQ ID NO: 4255164 - DNA, 25 bp, Homo sapien
cgcgccgttccagcccgcggcagcg

SEQ ID NO: 4255165 - DNA, 25 bp, Homo sapien
cgcggccgcgccgttccagcccgcg

SEQ ID NO: 4255166 - DNA, 25 bp, Homo sapien
cggccgcgccgttccagcccgcggc

SEQ ID NO: 4255167 - DNA, 25 bp, Homo sapien
agaggccagagtaagccgagcgccc

SEQ ID NO: 4255168 - DNA, 25 bp, Homo sapien
accgcccgccgcgattggcggccgc

SEQ ID NO: 4255169 - DNA, 25 bp, Homo sapien
aggccagagtaagccgagcgcccat

SEQ ID NO: 4255170 - DNA, 25 bp, Homo sapien
ccaccgcccgccgcgattggcggcc

SEQ ID NO: 4255171 - DNA, 25 bp, Homo sapien
gaacaggttgtggacgcccaatcgt

SEQ ID NO: 4255172 - DNA, 25 bp, Homo sapien
gagaaagcgtgagaatgtgcccctg

SEQ ID NO: 4255173 - DNA, 25 bp, Homo sapien
ccggacttgcacgtggagaaagcgt

SEQ ID NO: 4255174 - DNA, 25 bp, Homo sapien
agtcccaatccgaagctaagctgtg

SEQ ID NO: 4255175 - DNA, 25 bp, Homo sapien
agaaggtcacgctgaagacgccgct

SEQ ID NO: 4255176 - DNA, 25 bp, Homo sapien
agacgccgctgatctcctcccctat

SEQ ID NO: 4255177 - DNA, 25 bp, Homo sapien
ctgtgacagaggctgacatggccat

SEQ ID NO: 4255178 - DNA, 25 bp, Homo sapien
tcctcccctatggacactgtgacag

SEQ ID NO: 4255179 - DNA, 25 bp, Homo sapien
gagaggagacccctgtgtaagtcat

SEQ ID NO: 4255180 - DNA, 25 bp, Homo sapien
ctctggtgccctgtaggctgatgaa

SEQ ID NO: 4255181 - DNA, 25 bp, Homo sapien
ccctgtaggctgatgaaagtggaga

SEQ ID NO: 4255182 - DNA, 25 bp, Homo sapien
gagacccctgtgtaagtcatgttga

SEQ ID NO: 4255183 - DNA, 25 bp, Homo sapien
tgtttgagttcaatgacgtcatgcc

SEQ ID NO: 4255184 - DNA, 25 bp, Homo sapien
tgtcattgaccacaatgctttgtgt

SEQ ID NO: 4255185 - DNA, 25 bp, Homo sapien
gatgtcattgaccacaatgctttgt

SEQ ID NO: 4255186 - DNA, 25 bp, Homo sapien
gacgtcatgccattgatgtcattga

SEQ ID NO: 4255187 - DNA, 25 bp, Homo sapien
tctgattcttgcagagatatgcatg

SEQ ID NO: 4255188 - DNA, 25 bp, Homo sapien
tatgcatgagcacagtcactaggta

SEQ ID NO: 4255189 - DNA, 25 bp, Homo sapien
actaggtagaacttcctcagttgcc

SEQ ID NO: 4255190 - DNA, 25 bp, Homo sapien
gaacttcctcagttgccttgggtgg

SEQ ID NO: 4255191 - DNA, 25 bp, Homo sapien
ctctgtttcccaggcgaacagtcag

SEQ ID NO: 4255192 - DNA, 25 bp, Homo sapien
gcgaacagtcagcttcaacaagcag

SEQ ID NO: 4255193 - DNA, 25 bp, Homo sapien
tttcccaggcgaacagtcagcttca

SEQ ID NO: 4255194 - DNA, 25 bp, Homo sapien
caggcgaacagtcagcttcaacaag

SEQ ID NO: 4255195 - DNA, 25 bp, Homo sapien
tagacgatggcctccaagtacctgc

SEQ ID NO: 4255196 - DNA, 25 bp, Homo sapien
ttagacgatggcctccaagtacctg

SEQ ID NO: 4255197 - DNA, 25 bp, Homo sapien
taatgcttgtgagaatggatgagcc

SEQ ID NO: 4255198 - DNA, 25 bp, Homo sapien
ctaatgcttgtgagaatggatgagc

SEQ ID NO: 4255199 - DNA, 25 bp, Homo sapien
ttcctccattatctttgtgtctggc

SEQ ID NO: 4255200 - DNA, 25 bp, Homo sapien
tcttcctccattatctttgtgtctg

SEQ ID NO: 4255201 - DNA, 25 bp, Homo sapien
tcctcttcctccattatctttgtgt

SEQ ID NO: 4255202 - DNA, 25 bp, Homo sapien
tcctccattatctttgtgtctggct

SEQ ID NO: 4255203 - DNA, 25 bp, Homo sapien
agcaaagaatccagatgacagccat

SEQ ID NO: 4255204 - DNA, 25 bp, Homo sapien
aagcaaagaatccagatgacagcca

SEQ ID NO: 4255205 - DNA, 25 bp, Homo sapien
tgctgcatggtgtcatgctgatgtc

SEQ ID NO: 4255206 - DNA, 25 bp, Homo sapien
cttgctgcatggtgtcatgctgatg

SEQ ID NO: 4255207 - DNA, 25 bp, Homo sapien
ctgcatggtgtcatgctgatgtcac

SEQ ID NO: 4255208 - DNA, 25 bp, Homo sapien
ccttgctgcatggtgtcatgctgat

SEQ ID NO: 4255209 - DNA, 25 bp, Homo sapien
accgccatttcctttgatgacccat

SEQ ID NO: 4255210 - DNA, 25 bp, Homo sapien
tagctcttgggacttcgtttgtctc

SEQ ID NO: 4255211 - DNA, 25 bp, Homo sapien
acccattttgggcatagttctttga

SEQ ID NO: 4255212 - DNA, 25 bp, Homo sapien
tgataaagggaccttcaccgccatt

SEQ ID NO: 4255213 - DNA, 25 bp, Homo sapien
tgtctagtgaggtcatgctgggcca

SEQ ID NO: 4255214 - DNA, 25 bp, Homo sapien
tctctggacacgctttggatagatc

SEQ ID NO: 4255215 - DNA, 25 bp, Homo sapien
ctagtgaggtcatgctgggccatct

SEQ ID NO: 4255216 - DNA, 25 bp, Homo sapien
ctttgtctagtgaggtcatgctggg

SEQ ID NO: 4255217 - DNA, 25 bp, Homo sapien
gacaagagaatgctgctggtgacca

SEQ ID NO: 4255218 - DNA, 25 bp, Homo sapien
agcttgtaggcaaaggaagacttgc

SEQ ID NO: 4255219 - DNA, 25 bp, Homo sapien
gaagacttgctgaggcttccaagtg

SEQ ID NO: 4255220 - DNA, 25 bp, Homo sapien
cagcttgtaggcaaaggaagacttg

SEQ ID NO: 4255221 - DNA, 25 bp, Homo sapien
aagacttgctgaggcttccaagtga

SEQ ID NO: 4255222 - DNA, 25 bp, Homo sapien
gacattttgctcagaaggttcagaa

SEQ ID NO: 4255223 - DNA, 25 bp, Homo sapien
tcatgtgtcgatagggaacattaag

SEQ ID NO: 4255224 - DNA, 25 bp, Homo sapien
tgtcgatagggaacattaagtctgt

SEQ ID NO: 4255225 - DNA, 25 bp, Homo sapien
ttaagtctgtgacattttgctcaga

SEQ ID NO: 4255226 - DNA, 25 bp, Homo sapien
ctcagccctttggtggttgacacaa

SEQ ID NO: 4255227 - DNA, 25 bp, Homo sapien
gccctttggtggttgacacaaacat

SEQ ID NO: 4255228 - DNA, 25 bp, Homo sapien
ttggtggttgacacaaacattcttt

SEQ ID NO: 4255229 - DNA, 25 bp, Homo sapien
tggtggttgacacaaacattctttt

SEQ ID NO: 4255230 - DNA, 25 bp, Homo sapien
tcctgccccgtgatgccttacactc

SEQ ID NO: 4255231 - DNA, 25 bp, Homo sapien
gccccgtgatgccttacactctctg

SEQ ID NO: 4255232 - DNA, 25 bp, Homo sapien
ctgccccgtgatgccttacactctc

SEQ ID NO: 4255233 - DNA, 25 bp, Homo sapien
ctctcctgccccgtgatgccttaca

SEQ ID NO: 4255234 - DNA, 25 bp, Homo sapien
gctttatctgagttgtttcattacc

SEQ ID NO: 4255235 - DNA, 25 bp, Homo sapien
tctgctttatctgagttgtttcatt

SEQ ID NO: 4255236 - DNA, 25 bp, Homo sapien
taccaggacccagaatttctactgc

SEQ ID NO: 4255237 - DNA, 25 bp, Homo sapien
atctgagttgtttcattaccaggac

SEQ ID NO: 4255238 - DNA, 25 bp, Homo sapien
aatgtgctgtcaaaggaggtttttc

SEQ ID NO: 4255239 - DNA, 25 bp, Homo sapien
tttgagcagctacaaagaggaaggc

SEQ ID NO: 4255240 - DNA, 25 bp, Homo sapien
aggctttgggtagtaaaggatccag

SEQ ID NO: 4255241 - DNA, 25 bp, Homo sapien
cttttcaaccatgcgaggaaatgga

SEQ ID NO: 4255242 - DNA, 25 bp, Homo sapien
atcttcctagcaaggagttgccctg

SEQ ID NO: 4255243 - DNA, 25 bp, Homo sapien
ttcctagcaaggagttgccctgaag

SEQ ID NO: 4255244 - DNA, 25 bp, Homo sapien
gccctgaagatgtgctcaattgtga

SEQ ID NO: 4255245 - DNA, 25 bp, Homo sapien
gctcaattgtgacttgacagcttct

SEQ ID NO: 4255246 - DNA, 25 bp, Homo sapien
ccagggagtgtgcagcgatactgct

SEQ ID NO: 4255247 - DNA, 25 bp, Homo sapien
gagtgtgcagcgatactgcttggac

SEQ ID NO: 4255248 - DNA, 25 bp, Homo sapien
caggccagggagtgtgcagcgatac

SEQ ID NO: 4255249 - DNA, 25 bp, Homo sapien
tgtgcagcgatactgcttggactca

SEQ ID NO: 4255250 - DNA, 25 bp, Homo sapien
gctggatgggagttggcctgctgat

SEQ ID NO: 4255251 - DNA, 25 bp, Homo sapien
ccatggctggatgggagttggcctg

SEQ ID NO: 4255252 - DNA, 25 bp, Homo sapien
ggttcccatggctggatgggagttg

SEQ ID NO: 4255253 - DNA, 25 bp, Homo sapien
ggctggatgggagttggcctgctga

SEQ ID NO: 4255254 - DNA, 25 bp, Homo sapien
caaatcaattgcaaaccagtgtacc

SEQ ID NO: 4255255 - DNA, 25 bp, Homo sapien
gtccttgtagcaaccatgccccata

SEQ ID NO: 4255256 - DNA, 25 bp, Homo sapien
ccagtgtaccatggcgtccttgtag

SEQ ID NO: 4255257 - DNA, 25 bp, Homo sapien
tgtctgtggcctatttccccgttag

SEQ ID NO: 4255258 - DNA, 25 bp, Homo sapien
tatctgacaaatctgaggcagcagg

SEQ ID NO: 4255259 - DNA, 25 bp, Homo sapien
taatatctgacaaatctgaggcagc

SEQ ID NO: 4255260 - DNA, 25 bp, Homo sapien
tcctgggccatagcaacttctatta

SEQ ID NO: 4255261 - DNA, 25 bp, Homo sapien
tttgggatctttgattcctgggcca

SEQ ID NO: 4255262 - DNA, 25 bp, Homo sapien
acaagcttcaaggagatttggagct

SEQ ID NO: 4255263 - DNA, 25 bp, Homo sapien
tttggagctttcgagtctctccttc

SEQ ID NO: 4255264 - DNA, 25 bp, Homo sapien
tccatatacaacattgcagtttatc

SEQ ID NO: 4255265 - DNA, 25 bp, Homo sapien
tacaacattgcagtttatcacaagc

SEQ ID NO: 4255266 - DNA, 25 bp, Homo sapien
tccgtacagcattctccagagtcat

SEQ ID NO: 4255267 - DNA, 25 bp, Homo sapien
cctccgtacagcattctccagagtc

SEQ ID NO: 4255268 - DNA, 25 bp, Homo sapien
ctccgtacagcattctccagagtca

SEQ ID NO: 4255269 - DNA, 25 bp, Homo sapien
gcagtcctgagggttgctgaaaaca

SEQ ID NO: 4255270 - DNA, 25 bp, Homo sapien
agggttgctgaaaacaaagcagtca

SEQ ID NO: 4255271 - DNA, 25 bp, Homo sapien
cttgcagcagtcctgagggttgctg

SEQ ID NO: 4255272 - DNA, 25 bp, Homo sapien
tcctgagggttgctgaaaacaaagc

SEQ ID NO: 4255273 - DNA, 25 bp, Homo sapien
tcagaactgtggtgaactccaaaag

SEQ ID NO: 4255274 - DNA, 25 bp, Homo sapien
aactgtggtgaactccaaaaggcca

SEQ ID NO: 4255275 - DNA, 25 bp, Homo sapien
tacagagttagagcccgagtattca

SEQ ID NO: 4255276 - DNA, 25 bp, Homo sapien
ccaatggtgtatccaagagcaggac

SEQ ID NO: 4255277 - DNA, 25 bp, Homo sapien
ttaagcagcagctcacccaccatca

SEQ ID NO: 4255278 - DNA, 25 bp, Homo sapien
aatcacatcagagtaattgtgggta

SEQ ID NO: 4255279 - DNA, 25 bp, Homo sapien
ggatagtggtcccagagtgaatctg

SEQ ID NO: 4255280 - DNA, 25 bp, Homo sapien
gtgaatctggtaggcttcatttttt

SEQ ID NO: 4255281 - DNA, 25 bp, Homo sapien
ttaggaaggacgctctggcttgccc

SEQ ID NO: 4255282 - DNA, 25 bp, Homo sapien
cccgggtgctctagagaagtgcttc

SEQ ID NO: 4255283 - DNA, 25 bp, Homo sapien
gcaccatgtttacagggccaccagt

SEQ ID NO: 4255284 - DNA, 25 bp, Homo sapien
tgaatgcgagcacgagccacttgtg

SEQ ID NO: 4255285 - DNA, 25 bp, Homo sapien
caatgtgccccgtgaaaaaagacaa

SEQ ID NO: 4255286 - DNA, 25 bp, Homo sapien
gcggctataccagaatctcacaatg

SEQ ID NO: 4255287 - DNA, 25 bp, Homo sapien
gccaagaagcactatgaacagcatc

SEQ ID NO: 4255288 - DNA, 25 bp, Homo sapien
tccaagcccctaactggaggaggct

SEQ ID NO: 4255289 - DNA, 25 bp, Homo sapien
ccaggcctgcctgatgattcttggt

SEQ ID NO: 4255290 - DNA, 25 bp, Homo sapien
ttccctcgattggtgctgcctttca

SEQ ID NO: 4255291 - DNA, 25 bp, Homo sapien
gaaaggccctgagcgcaaagggtta

SEQ ID NO: 4255292 - DNA, 25 bp, Homo sapien
gggttaacacgctgcccctggaatg

SEQ ID NO: 4255293 - DNA, 25 bp, Homo sapien
gacctgacaaatttgccagaaggcc

SEQ ID NO: 4255294 - DNA, 25 bp, Homo sapien
gcaggacaaaaccaggaccctctga

SEQ ID NO: 4255295 - DNA, 25 bp, Homo sapien
cagagtcgggatcaggcttgtgctt

SEQ ID NO: 4255296 - DNA, 25 bp, Homo sapien
gaggactgtgttcattgcctgaccc

SEQ ID NO: 4255297 - DNA, 25 bp, Homo sapien
aaggcagactgcataatatttggtg

SEQ ID NO: 4255298 - DNA, 25 bp, Homo sapien
tttccccaaaggcagactgcataat

SEQ ID NO: 4255299 - DNA, 25 bp, Homo sapien
gactgcataatatttggtgcttctc

SEQ ID NO: 4255300 - DNA, 25 bp, Homo sapien
gaataatttattccgtttcagtgga

SEQ ID NO: 4255301 - DNA, 25 bp, Homo sapien
tttcagagctatgcttggtaccccc

SEQ ID NO: 4255302 - DNA, 25 bp, Homo sapien
tcaggagcccaatcacagaatcgat

SEQ ID NO: 4255303 - DNA, 25 bp, Homo sapien
agagcatttggagaccgcatccagg

SEQ ID NO: 4255304 - DNA, 25 bp, Homo sapien
gaccctggagcagaataaatgccta

SEQ ID NO: 4255305 - DNA, 25 bp, Homo sapien
gcatccaggtatacaaaagcatggc

SEQ ID NO: 4255306 - DNA, 25 bp, Homo sapien
agggtgaccaactgctatggactga

SEQ ID NO: 4255307 - DNA, 25 bp, Homo sapien
aagagtgggactagacttagggtga

SEQ ID NO: 4255308 - DNA, 25 bp, Homo sapien
atccaacagctgctcagatcaagag

SEQ ID NO: 4255309 - DNA, 25 bp, Homo sapien
catccaacagctgctcagatcaaga

SEQ ID NO: 4255310 - DNA, 25 bp, Homo sapien
cctgtgaccatagatagagcttgat

SEQ ID NO: 4255311 - DNA, 25 bp, Homo sapien
gagaaactcattattcagccactag

SEQ ID NO: 4255312 - DNA, 25 bp, Homo sapien
tcatcacggcaaggaaagaccacgt

SEQ ID NO: 4255313 - DNA, 25 bp, Homo sapien
gtaactgtcctgaaatctccccgaa

SEQ ID NO: 4255314 - DNA, 25 bp, Homo sapien
aagtcatccccttttcactctgatc

SEQ ID NO: 4255315 - DNA, 25 bp, Homo sapien
tcatccccttttcactctgatcctg

SEQ ID NO: 4255316 - DNA, 25 bp, Homo sapien
atccccttttcactctgatcctgtc

SEQ ID NO: 4255317 - DNA, 25 bp, Homo sapien
tcaagtcatccccttttcactctga

SEQ ID NO: 4255318 - DNA, 25 bp, Homo sapien
gcttatacacaggcataaatcctag

SEQ ID NO: 4255319 - DNA, 25 bp, Homo sapien
tatacacaggcataaatcctagatt

SEQ ID NO: 4255320 - DNA, 25 bp, Homo sapien
cgagtggagggggggcttatacaca

SEQ ID NO: 4255321 - DNA, 25 bp, Homo sapien
ctccctgcgagtggagggggggctt

SEQ ID NO: 4255322 - DNA, 25 bp, Homo sapien
ttgtaccgttgtcttcatcactggg

SEQ ID NO: 4255323 - DNA, 25 bp, Homo sapien
catggaagctgtggtgcaagaaaac

SEQ ID NO: 4255324 - DNA, 25 bp, Homo sapien
cagcagtggcgttttgaccagatca

SEQ ID NO: 4255325 - DNA, 25 bp, Homo sapien
taaagatttgtacctgcgtccgtgt

SEQ ID NO: 4255326 - DNA, 25 bp, Homo sapien
tgttacagggtttgcactgactgga

SEQ ID NO: 4255327 - DNA, 25 bp, Homo sapien
ccatgagtgtgggaagaacacggct

SEQ ID NO: 4255328 - DNA, 25 bp, Homo sapien
gaacacggctcatctggagcacagc

SEQ ID NO: 4255329 - DNA, 25 bp, Homo sapien
tctgagcccatataactgtctggaa

SEQ ID NO: 4255330 - DNA, 25 bp, Homo sapien
ccagaaaaactggagctgctatctt

SEQ ID NO: 4255331 - DNA, 25 bp, Homo sapien
ttaaagtcataacttgcccagatgc

SEQ ID NO: 4255332 - DNA, 25 bp, Homo sapien
caagaaggcactgccgatcactctc

SEQ ID NO: 4255333 - DNA, 25 bp, Homo sapien
tctcctctaggcacagatcaagggt

SEQ ID NO: 4255334 - DNA, 25 bp, Homo sapien
tggccctcatcttgaggaggcagct

SEQ ID NO: 4255335 - DNA, 25 bp, Homo sapien
gcaggcagattaccctatacagtgg

SEQ ID NO: 4255336 - DNA, 25 bp, Homo sapien
gagagtgctgccaatactgatggga

SEQ ID NO: 4255337 - DNA, 25 bp, Homo sapien
ggatttggaataacagggatactga

SEQ ID NO: 4255338 - DNA, 25 bp, Homo sapien
gaggatatagaagtataccatagaa

SEQ ID NO: 4255339 - DNA, 25 bp, Homo sapien
aagtataccatagaagttaggagtg

SEQ ID NO: 4255340 - DNA, 25 bp, Homo sapien
tatagaagtataccatagaagttag

SEQ ID NO: 4255341 - DNA, 25 bp, Homo sapien
ttagaggatatagaagtataccata

SEQ ID NO: 4255342 - DNA, 25 bp, Homo sapien
ggatcatatcagacttgaagtgaga

SEQ ID NO: 4255343 - DNA, 25 bp, Homo sapien
agagctgctgtcctgatttgaaaca

SEQ ID NO: 4255344 - DNA, 25 bp, Homo sapien
tatggtcacgcggatcatatcagac

SEQ ID NO: 4255345 - DNA, 25 bp, Homo sapien
ggtccaaagttcaaggtttcagcta

SEQ ID NO: 4255346 - DNA, 25 bp, Homo sapien
caggtcttagaaaaagtgccagagc

SEQ ID NO: 4255347 - DNA, 25 bp, Homo sapien
ggttcacacagcaaccctgtcaaag

SEQ ID NO: 4255348 - DNA, 25 bp, Homo sapien
ctagtgcctagcatgtgacaggtac

SEQ ID NO: 4255349 - DNA, 25 bp, Homo sapien
catggactaggagaaagcgcaaaac

SEQ ID NO: 4255350 - DNA, 25 bp, Homo sapien
cccaaagcagttaagatttctacct

SEQ ID NO: 4255351 - DNA, 25 bp, Homo sapien
caaactgtagaaattggcaatttcc

SEQ ID NO: 4255352 - DNA, 25 bp, Homo sapien
aactactgtccataacaaaaagtct

SEQ ID NO: 4255353 - DNA, 25 bp, Homo sapien
tgtcttactaccacttgactcagtt

SEQ ID NO: 4255354 - DNA, 25 bp, Homo sapien
tttgaattatctgactttatttagc

SEQ ID NO: 4255355 - DNA, 25 bp, Homo sapien
atctgactttatttagcatgcaatg

SEQ ID NO: 4255356 - DNA, 25 bp, Homo sapien
aattatctgactttatttagcatgc

SEQ ID NO: 4255357 - DNA, 25 bp, Homo sapien
tgaattatctgactttatttagcat

SEQ ID NO: 4255358 - DNA, 25 bp, Homo sapien
tcagtttttataggtgctccaggaa

SEQ ID NO: 4255359 - DNA, 25 bp, Homo sapien
gaaaggcaatcacctgatcgagtct

SEQ ID NO: 4255360 - DNA, 25 bp, Homo sapien
taaggcacacgtatcacacagaact

SEQ ID NO: 4255361 - DNA, 25 bp, Homo sapien
gatcgagtctcctaattgtacagct

SEQ ID NO: 4255362 - DNA, 25 bp, Homo sapien
caagggtgtctgttcgtgtttgaaa

SEQ ID NO: 4255363 - DNA, 25 bp, Homo sapien
catgggacagttcattttgctttgc

SEQ ID NO: 4255364 - DNA, 25 bp, Homo sapien
gaaactcatcagcatcagaaagagc

SEQ ID NO: 4255365 - DNA, 25 bp, Homo sapien
tcagaaagagctaacatgttggcag

SEQ ID NO: 4255366 - DNA, 25 bp, Homo sapien
gaatatgccacataatgtactgagc

SEQ ID NO: 4255367 - DNA, 25 bp, Homo sapien
tgtgcagtacatttaccagtaacag

SEQ ID NO: 4255368 - DNA, 25 bp, Homo sapien
taatttattgtctcagcctagtggc

SEQ ID NO: 4255369 - DNA, 25 bp, Homo sapien
ctggcaggtaaaaaaggctactcac

SEQ ID NO: 4255370 - DNA, 25 bp, Homo sapien
caagctcattctccgctgtagatgc

SEQ ID NO: 4255371 - DNA, 25 bp, Homo sapien
ctctgcaggagtgaatgtctggttt

SEQ ID NO: 4255372 - DNA, 25 bp, Homo sapien
ggctgcatgttatagaggcttatta

SEQ ID NO: 4255373 - DNA, 25 bp, Homo sapien
aataggtctctcattttcaagctca

SEQ ID NO: 4255374 - DNA, 25 bp, Homo sapien
gcacagctaccagccatggaaattt

SEQ ID NO: 4255375 - DNA, 25 bp, Homo sapien
gccaaaagcacagctaccagccatg

SEQ ID NO: 4255376 - DNA, 25 bp, Homo sapien
acactgtgatatgccaaaagcacag

SEQ ID NO: 4255377 - DNA, 25 bp, Homo sapien
cagccatggaaatttgacgttaacc

SEQ ID NO: 4255378 - DNA, 25 bp, Homo sapien
agaaatattacttgctctgacctgg

SEQ ID NO: 4255379 - DNA, 25 bp, Homo sapien
gaaaactgaggagactggcttggta

SEQ ID NO: 4255380 - DNA, 25 bp, Homo sapien
taatactatgaccaaactctctgca

SEQ ID NO: 4255381 - DNA, 25 bp, Homo sapien
gaaatgacacgctgaacagaacatg

SEQ ID NO: 4255382 - DNA, 25 bp, Homo sapien
tgctgttgtcagataccgaagtaat

SEQ ID NO: 4255383 - DNA, 25 bp, Homo sapien
gaacagcaaatcataaatggttgtc

SEQ ID NO: 4255384 - DNA, 25 bp, Homo sapien
gaagccagtagctttgcattcgata

SEQ ID NO: 4255385 - DNA, 25 bp, Homo sapien
agaatccacactcttacagaacagc

SEQ ID NO: 4255386 - DNA, 25 bp, Homo sapien
ggctgggactgtttctccacacaca

SEQ ID NO: 4255387 - DNA, 25 bp, Homo sapien
ttctttgttggctgaaggggctggg

SEQ ID NO: 4255388 - DNA, 25 bp, Homo sapien
aactaattctttgttggctgaaggg

SEQ ID NO: 4255389 - DNA, 25 bp, Homo sapien
ctaattctttgttggctgaaggggc

SEQ ID NO: 4255390 - DNA, 25 bp, Homo sapien
tcagttcagagcaaccacttctcag

SEQ ID NO: 4255391 - DNA, 25 bp, Homo sapien
gagccaatgacagcaccagaagtag

SEQ ID NO: 4255392 - DNA, 25 bp, Homo sapien
cagcaatctgattcccgaaggatca

SEQ ID NO: 4255393 - DNA, 25 bp, Homo sapien
tctgttgcccaatatgtggaaccct

SEQ ID NO: 4255394 - DNA, 25 bp, Homo sapien
agagagcagctaggacacgttgcca

SEQ ID NO: 4255395 - DNA, 25 bp, Homo sapien
gctaggacacgttgccacgtcttcc

SEQ ID NO: 4255396 - DNA, 25 bp, Homo sapien
gagcagctaggacacgttgccacgt

SEQ ID NO: 4255397 - DNA, 25 bp, Homo sapien
atgagagagcagctaggacacgttg

SEQ ID NO: 4255398 - DNA, 25 bp, Homo sapien
ccagggccttcagcgagaaatgccg

SEQ ID NO: 4255399 - DNA, 25 bp, Homo sapien
cacctaggaaggtcaggcgagcttc

SEQ ID NO: 4255400 - DNA, 25 bp, Homo sapien
gcagcaaaggctacccaatgatgga

SEQ ID NO: 4255401 - DNA, 25 bp, Homo sapien
caaactgcgcttgcttgggtgaacc

SEQ ID NO: 4255402 - DNA, 25 bp, Homo sapien
tcatattggaagtcctcgatttcca

SEQ ID NO: 4255403 - DNA, 25 bp, Homo sapien
tcctcgtcatattggaagtcctcga

SEQ ID NO: 4255404 - DNA, 25 bp, Homo sapien
cctcgatttccacctcgtcatgaaa

SEQ ID NO: 4255405 - DNA, 25 bp, Homo sapien
gtctccgagtcctcgtcatattgga

SEQ ID NO: 4255406 - DNA, 25 bp, Homo sapien
cagtccgaggccagctccgagggtt

SEQ ID NO: 4255407 - DNA, 25 bp, Homo sapien
tccgaggccagctccgagggtttaa

SEQ ID NO: 4255408 - DNA, 25 bp, Homo sapien
gggtaacgccccagcagtccgaggc

SEQ ID NO: 4255409 - DNA, 25 bp, Homo sapien
tggccgaaggggtaacgccccagca

SEQ ID NO: 4255410 - DNA, 25 bp, Homo sapien
cctgcgcggccaaatggataaccgg

SEQ ID NO: 4255411 - DNA, 25 bp, Homo sapien
ggataaccggtagcggtcaccatgg

SEQ ID NO: 4255412 - DNA, 25 bp, Homo sapien
gctcggcatcatcaggtcgcgccgg

SEQ ID NO: 4255413 - DNA, 25 bp, Homo sapien
gcccttccggcgcataggcaatgac

SEQ ID NO: 4255414 - DNA, 25 bp, Homo sapien
tgaccttgagcccagggcgacggtc

SEQ ID NO: 4255415 - DNA, 25 bp, Homo sapien
tcctggtgacggacgaacagttccc

SEQ ID NO: 4255416 - DNA, 25 bp, Homo sapien
ggcgacggtcagcttgttaattcct

SEQ ID NO: 4255417 - DNA, 25 bp, Homo sapien
tagaatttcgcttcaccgagtgacc

SEQ ID NO: 4255418 - DNA, 25 bp, Homo sapien
gaaattctcagcttagggtgatggc

SEQ ID NO: 4255419 - DNA, 25 bp, Homo sapien
gaccaaggtagtagttcaagtgaga

SEQ ID NO: 4255420 - DNA, 25 bp, Homo sapien
tatggaatttggctgtgttagggac

SEQ ID NO: 4255421 - DNA, 25 bp, Homo sapien
actcagtgaggttggaacattagga

SEQ ID NO: 4255422 - DNA, 25 bp, Homo sapien
taaattgttttctagagtggctgtg

SEQ ID NO: 4255423 - DNA, 25 bp, Homo sapien
aacattttcaggcactattaaattg

SEQ ID NO: 4255424 - DNA, 25 bp, Homo sapien
tttcaggcactattaaattgttttc

SEQ ID NO: 4255425 - DNA, 25 bp, Homo sapien
ggcactattaaattgttttctagag

SEQ ID NO: 4255426 - DNA, 25 bp, Homo sapien
gttccaatttctccagaccctaaca

SEQ ID NO: 4255427 - DNA, 25 bp, Homo sapien
attgtttgtctctttgattatagcc

SEQ ID NO: 4255428 - DNA, 25 bp, Homo sapien
ccatccacgtgggtgtgaactgcca

SEQ ID NO: 4255429 - DNA, 25 bp, Homo sapien
tatataatctgaatacaagaacctt

SEQ ID NO: 4255430 - DNA, 25 bp, Homo sapien
ggttttcaatatgctccagtcccag

SEQ ID NO: 4255431 - DNA, 25 bp, Homo sapien
gcttgagtaaaagggtacatgccca

SEQ ID NO: 4255432 - DNA, 25 bp, Homo sapien
gattcacctaagaaacctgggcttg

SEQ ID NO: 4255433 - DNA, 25 bp, Homo sapien
tctgggttcacaatacggtaagcac

SEQ ID NO: 4255434 - DNA, 25 bp, Homo sapien
ttgaaacatcgttaaccctgaggga

SEQ ID NO: 4255435 - DNA, 25 bp, Homo sapien
taaaaccatatgtggtgggatgcca

SEQ ID NO: 4255436 - DNA, 25 bp, Homo sapien
tgttgagtgcaaggaggcagtccca

SEQ ID NO: 4255437 - DNA, 25 bp, Homo sapien
aatattgacaataccaagcgttggc

SEQ ID NO: 4255438 - DNA, 25 bp, Homo sapien
taatatcctctaagacccttctgtg

SEQ ID NO: 4255439 - DNA, 25 bp, Homo sapien
gcattctgtttttgtcagccctcag

SEQ ID NO: 4255440 - DNA, 25 bp, Homo sapien
catggcctcaaaagtccgaatattg

SEQ ID NO: 4255441 - DNA, 25 bp, Homo sapien
caaagcctagcaattgtatcgtgtc

SEQ ID NO: 4255442 - DNA, 25 bp, Homo sapien
gcttcctgtggcatcacatgaggca

SEQ ID NO: 4255443 - DNA, 25 bp, Homo sapien
catgaggcatataatgtctgtccca

SEQ ID NO: 4255444 - DNA, 25 bp, Homo sapien
catactatgagttggtgccttagca

SEQ ID NO: 4255445 - DNA, 25 bp, Homo sapien
tagcaacctttagacgaccagtgag

SEQ ID NO: 4255446 - DNA, 25 bp, Homo sapien
gctgtgtcatgctgctaataggaca

SEQ ID NO: 4255447 - DNA, 25 bp, Homo sapien
aacagcctgattgtatgaaaaacca

SEQ ID NO: 4255448 - DNA, 25 bp, Homo sapien
ttttaagaggagtgaaataacagcc

SEQ ID NO: 4255449 - DNA, 25 bp, Homo sapien
gacaagacagggttcctctatatcc

SEQ ID NO: 4255450 - DNA, 25 bp, Homo sapien
taaaacctgcaggagctcatcagcc

SEQ ID NO: 4255451 - DNA, 25 bp, Homo sapien
ggattgttatatgggactcacagca

SEQ ID NO: 4255452 - DNA, 25 bp, Homo sapien
aaggctgcacccatgctctggaggg

SEQ ID NO: 4255453 - DNA, 25 bp, Homo sapien
ggtgatgacatgtagatacctccta

SEQ ID NO: 4255454 - DNA, 25 bp, Homo sapien
ttcctctgctggagggacatgccgc

SEQ ID NO: 4255455 - DNA, 25 bp, Homo sapien
tgcacaggtctctcccgtagcctgg

SEQ ID NO: 4255456 - DNA, 25 bp, Homo sapien
gggacatgccgctgttgtgcaaggg

SEQ ID NO: 4255457 - DNA, 25 bp, Homo sapien
ttaacaaatcatttgatcccctcat

SEQ ID NO: 4255458 - DNA, 25 bp, Homo sapien
tacacctgagagctattcctgaacg

SEQ ID NO: 4255459 - DNA, 25 bp, Homo sapien
aggtttatttaacgcccatgtcaag

SEQ ID NO: 4255460 - DNA, 25 bp, Homo sapien
gcatcagcaactctagtgaagcatg

SEQ ID NO: 4255461 - DNA, 25 bp, Homo sapien
taagatgggatatactacgcttcag

SEQ ID NO: 4255462 - DNA, 25 bp, Homo sapien
cccatttcacacttgaggcgattga

SEQ ID NO: 4255463 - DNA, 25 bp, Homo sapien
atttcaccccatttcacacttgagg

SEQ ID NO: 4255464 - DNA, 25 bp, Homo sapien
acttgaggcgattgatgctcagagc

SEQ ID NO: 4255465 - DNA, 25 bp, Homo sapien
aggtgggtgccatttcaccccattt

SEQ ID NO: 4255466 - DNA, 25 bp, Homo sapien
tgccaagtgcacaagcttcctcatg

SEQ ID NO: 4255467 - DNA, 25 bp, Homo sapien
gaccctgtggccagtggtattcaac

SEQ ID NO: 4255468 - DNA, 25 bp, Homo sapien
tttactgtccgtgggacctggtcag

SEQ ID NO: 4255469 - DNA, 25 bp, Homo sapien
atcacagtgggtttgcaggactccc

SEQ ID NO: 4255470 - DNA, 25 bp, Homo sapien
ggcctgttgctgactagcatatatt

SEQ ID NO: 4255471 - DNA, 25 bp, Homo sapien
tagcctggaaccgtttgcttttcaa

SEQ ID NO: 4255472 - DNA, 25 bp, Homo sapien
ccaaagctgagcaatgtaaggccct

SEQ ID NO: 4255473 - DNA, 25 bp, Homo sapien
aaaaagctatgtgatgtggctgtac

SEQ ID NO: 4255474 - DNA, 25 bp, Homo sapien
taacttgcctcactaatttacttaa

SEQ ID NO: 4255475 - DNA, 25 bp, Homo sapien
agacttgcctcactaatttaaaaag

SEQ ID NO: 4255476 - DNA, 25 bp, Homo sapien
atgggaggtggctgtaccccttact

SEQ ID NO: 4255477 - DNA, 25 bp, Homo sapien
gtttgttagacactgatgtaaggtt

SEQ ID NO: 4255478 - DNA, 25 bp, Homo sapien
tggcatctgagttccacttgccatc

SEQ ID NO: 4255479 - DNA, 25 bp, Homo sapien
caggactgttcctagtgacacgata

SEQ ID NO: 4255480 - DNA, 25 bp, Homo sapien
tcctttggacatgaggccaggactg

SEQ ID NO: 4255481 - DNA, 25 bp, Homo sapien
ctacaaatgacgagaaagcacagca

SEQ ID NO: 4255482 - DNA, 25 bp, Homo sapien
tgtgggctggaatcctttggacatg

SEQ ID NO: 4255483 - DNA, 25 bp, Homo sapien
catagatgatttattgccgtaagta

SEQ ID NO: 4255484 - DNA, 25 bp, Homo sapien
aactcatagatgatttattgccgta

SEQ ID NO: 4255485 - DNA, 25 bp, Homo sapien
atagatgatttattgccgtaagtaa

SEQ ID NO: 4255486 - DNA, 25 bp, Homo sapien
ctcatagatgatttattgccgtaag

SEQ ID NO: 4255487 - DNA, 25 bp, Homo sapien
tcccgatgccctgaagtgacagaag

SEQ ID NO: 4255488 - DNA, 25 bp, Homo sapien
tccatggatttgacccgaatgctcc

SEQ ID NO: 4255489 - DNA, 25 bp, Homo sapien
taaaatagcacataacaagggcgcc

SEQ ID NO: 4255490 - DNA, 25 bp, Homo sapien
gttaagtcaccaagtagctgcaggg

SEQ ID NO: 4255491 - DNA, 25 bp, Homo sapien
tgacctcttgcattctaacactggg

SEQ ID NO: 4255492 - DNA, 25 bp, Homo sapien
ccatgagggctagaataacctgacc

SEQ ID NO: 4255493 - DNA, 25 bp, Homo sapien
gctcacaaggagaggtcaagccaag

SEQ ID NO: 4255494 - DNA, 25 bp, Homo sapien
ggatgtgcaaaaaccaacactgtca

SEQ ID NO: 4255495 - DNA, 25 bp, Homo sapien
aggaccattctgcacagcctcaccc

SEQ ID NO: 4255496 - DNA, 25 bp, Homo sapien
gaccattctgcacagcctcaccctc

SEQ ID NO: 4255497 - DNA, 25 bp, Homo sapien
cctctccaggattggagtgcccagt

SEQ ID NO: 4255498 - DNA, 25 bp, Homo sapien
caggaccattctgcacagcctcacc

SEQ ID NO: 4255499 - DNA, 25 bp, Homo sapien
atctcctcggagactccaccctcct

SEQ ID NO: 4255500 - DNA, 25 bp, Homo sapien
ttcatctcctcggagactccaccct

SEQ ID NO: 4255501 - DNA, 25 bp, Homo sapien
tctcctcggagactccaccctcctg

SEQ ID NO: 4255502 - DNA, 25 bp, Homo sapien
tcatctcctcggagactccaccctc

SEQ ID NO: 4255503 - DNA, 25 bp, Homo sapien
ttgtttgtctctggcactgagttta

SEQ ID NO: 4255504 - DNA, 25 bp, Homo sapien
gactggtcttctaagttcttctcat

SEQ ID NO: 4255505 - DNA, 25 bp, Homo sapien
tgcttgttgtttgtctctggcactg

SEQ ID NO: 4255506 - DNA, 25 bp, Homo sapien
gtttcccatgtctccagctttggaa

SEQ ID NO: 4255507 - DNA, 25 bp, Homo sapien
atttcctcatctgcctgttgtgcat

SEQ ID NO: 4255508 - DNA, 25 bp, Homo sapien
cttttgatttcctcatctgcctgtt

SEQ ID NO: 4255509 - DNA, 25 bp, Homo sapien
gatttcctcatctgcctgttgtgca

SEQ ID NO: 4255510 - DNA, 25 bp, Homo sapien
ttgatttcctcatctgcctgttgtg

SEQ ID NO: 4255511 - DNA, 25 bp, Homo sapien
tcttctctggagaatcgccactgaa

SEQ ID NO: 4255512 - DNA, 25 bp, Homo sapien
cttctctggagaatcgccactgaaa

SEQ ID NO: 4255513 - DNA, 25 bp, Homo sapien
ttcttctctggagaatcgccactga

SEQ ID NO: 4255514 - DNA, 25 bp, Homo sapien
taaatatgccacatcctcggtgtgc

SEQ ID NO: 4255515 - DNA, 25 bp, Homo sapien
tatgtgtgtcctcgctaagaagctg

SEQ ID NO: 4255516 - DNA, 25 bp, Homo sapien
tcgacaagtatctgttgagcaccaa

SEQ ID NO: 4255517 - DNA, 25 bp, Homo sapien
cacgcacgtacacagaggtttcttt

SEQ ID NO: 4255518 - DNA, 25 bp, Homo sapien
tctgaatagggaacctatttgaagg

SEQ ID NO: 4255519 - DNA, 25 bp, Homo sapien
ttaggagattagaatagctgaggcg

SEQ ID NO: 4255520 - DNA, 25 bp, Homo sapien
gagtcatacaaaactagaactcctt

SEQ ID NO: 4255521 - DNA, 25 bp, Homo sapien
agatcacttgggctctgaataggga

SEQ ID NO: 4255522 - DNA, 25 bp, Homo sapien
agtgggtcccatcctctctgaattt

SEQ ID NO: 4255523 - DNA, 25 bp, Homo sapien
gtgggtcccatcctctctgaatttt

SEQ ID NO: 4255524 - DNA, 25 bp, Homo sapien
ctttggaatctgtgtgccccaccac

SEQ ID NO: 4255525 - DNA, 25 bp, Homo sapien
taaagtctccctgccgactcaagtt

SEQ ID NO: 4255526 - DNA, 25 bp, Homo sapien
ttcaaccttattacagcagctttta

SEQ ID NO: 4255527 - DNA, 25 bp, Homo sapien
tgcatgcgatgccatgaccttcaca

SEQ ID NO: 4255528 - DNA, 25 bp, Homo sapien
cacttgctgaatgcatgcagttccc

SEQ ID NO: 4255529 - DNA, 25 bp, Homo sapien
ggccctttgcgtgctgtgtgttgaa

SEQ ID NO: 4255530 - DNA, 25 bp, Homo sapien
ctgcagcgggtgtctgtcagcatct

SEQ ID NO: 4255531 - DNA, 25 bp, Homo sapien
tgcagttcccgtgagcctgtggctg

SEQ ID NO: 4255532 - DNA, 25 bp, Homo sapien
tcacattacaccttcagagcctgga

SEQ ID NO: 4255533 - DNA, 25 bp, Homo sapien
tccccctggagttgttggctggtga

SEQ ID NO: 4255534 - DNA, 25 bp, Homo sapien
ggcttcaagtcaccattgctttggc

SEQ ID NO: 4255535 - DNA, 25 bp, Homo sapien
gagcctggagaaagaccttcctcca

SEQ ID NO: 4255536 - DNA, 25 bp, Homo sapien
aggctgcagctgacttcgtgccctt

SEQ ID NO: 4255537 - DNA, 25 bp, Homo sapien
gggaatatctagcaggctgaagcct

SEQ ID NO: 4255538 - DNA, 25 bp, Homo sapien
tttcatcctagtgggaatatctagc

SEQ ID NO: 4255539 - DNA, 25 bp, Homo sapien
gcaggacgatggcagacaaggccct

SEQ ID NO: 4255540 - DNA, 25 bp, Homo sapien
caggtgttccttgggctctgcgagc

SEQ ID NO: 4255541 - DNA, 25 bp, Homo sapien
tgagatgtgattcgggttgccaggg

SEQ ID NO: 4255542 - DNA, 25 bp, Homo sapien
cagaaaatccactgaagatgaagcc

SEQ ID NO: 4255543 - DNA, 25 bp, Homo sapien
gctctgcgagcccttggaagctgga

SEQ ID NO: 4255544 - DNA, 25 bp, Homo sapien
cttgattttctgaggtagacaaggt

SEQ ID NO: 4255545 - DNA, 25 bp, Homo sapien
aatctgcttggtggatacactcccc

SEQ ID NO: 4255546 - DNA, 25 bp, Homo sapien
ctgcttggtggatacactcccctcg

SEQ ID NO: 4255547 - DNA, 25 bp, Homo sapien
tgattttctgaggtagacaaggtct

SEQ ID NO: 4255548 - DNA, 25 bp, Homo sapien
tcagcaggggcacgtagtctgtctg

SEQ ID NO: 4255549 - DNA, 25 bp, Homo sapien
cataggccgccagcgagttcagcag

SEQ ID NO: 4255550 - DNA, 25 bp, Homo sapien
tcttgacgacgggagttggtagcac

SEQ ID NO: 4255551 - DNA, 25 bp, Homo sapien
cgtagtctgtctgcacttcgacacc

SEQ ID NO: 4255552 - DNA, 25 bp, Homo sapien
gtgttatgtgccctgccttgcaggg

SEQ ID NO: 4255553 - DNA, 25 bp, Homo sapien
tgcctgtgttatgtgccctgccttg

SEQ ID NO: 4255554 - DNA, 25 bp, Homo sapien
cctgtgttatgtgccctgccttgca

SEQ ID NO: 4255555 - DNA, 25 bp, Homo sapien
ctttgcctgtgttatgtgccctgcc

SEQ ID NO: 4255556 - DNA, 25 bp, Homo sapien
tacctctccctagcaagtggaaggc

SEQ ID NO: 4255557 - DNA, 25 bp, Homo sapien
gcagggctatgcctggtatcactgt

SEQ ID NO: 4255558 - DNA, 25 bp, Homo sapien
gaaagaagggccacttcacctctac

SEQ ID NO: 4255559 - DNA, 25 bp, Homo sapien
acgtggccctcaggatgctaaaggg

SEQ ID NO: 4255560 - DNA, 25 bp, Homo sapien
tctggctgttcattagtccaatgtt

SEQ ID NO: 4255561 - DNA, 25 bp, Homo sapien
gccataacagatgcgctgccgggtc

SEQ ID NO: 4255562 - DNA, 25 bp, Homo sapien
aatgttacaagtcctgcagtccacc

SEQ ID NO: 4255563 - DNA, 25 bp, Homo sapien
gctctaccagagacaaatccaccag

SEQ ID NO: 4255564 - DNA, 25 bp, Homo sapien
aagatatgaggaagccagctacctg

SEQ ID NO: 4255565 - DNA, 25 bp, Homo sapien
actgcgctagtccttcctgcctaaa

SEQ ID NO: 4255566 - DNA, 25 bp, Homo sapien
ctgaggactagcaaggtttgggaac

SEQ ID NO: 4255567 - DNA, 25 bp, Homo sapien
agccagccagccagaatgtgaattt

SEQ ID NO: 4255568 - DNA, 25 bp, Homo sapien
caaagatatctgttctaagcagtgc

SEQ ID NO: 4255569 - DNA, 25 bp, Homo sapien
catggtggaacctaagactctaagt

SEQ ID NO: 4255570 - DNA, 25 bp, Homo sapien
gaactaatgtggatccagaaaccat

SEQ ID NO: 4255571 - DNA, 25 bp, Homo sapien
gaaaacagggagaagtccttcatgc

SEQ ID NO: 4255572 - DNA, 25 bp, Homo sapien
tagtcttatagatggccccacaaag

SEQ ID NO: 4255573 - DNA, 25 bp, Homo sapien
gtggcattagggttgggctggaaat

SEQ ID NO: 4255574 - DNA, 25 bp, Homo sapien
ggctggaaatgacgagcaactgcct

SEQ ID NO: 4255575 - DNA, 25 bp, Homo sapien
caaagccagctgatagtcttataga

SEQ ID NO: 4255576 - DNA, 25 bp, Homo sapien
tgaaagcacatcgttgccaagtgcg

SEQ ID NO: 4255577 - DNA, 25 bp, Homo sapien
cagaaaaggcggctctggttgacac

SEQ ID NO: 4255578 - DNA, 25 bp, Homo sapien
caagggccacccaaggtattctgtg

SEQ ID NO: 4255579 - DNA, 25 bp, Homo sapien
tagaatgctttatgtggagcccaag

SEQ ID NO: 4255580 - DNA, 25 bp, Homo sapien
aggagctttctctgtgaaaggggaa

SEQ ID NO: 4255581 - DNA, 25 bp, Homo sapien
caggctccactatccaaggacaggg

SEQ ID NO: 4255582 - DNA, 25 bp, Homo sapien
taacagcagaagagtactagcggcc

SEQ ID NO: 4255583 - DNA, 25 bp, Homo sapien
gacttacctgggcaacacaaactgt

SEQ ID NO: 4255584 - DNA, 25 bp, Homo sapien
ttcagaacacccgagcaagtggctg

SEQ ID NO: 4255585 - DNA, 25 bp, Homo sapien
cgctgctaaagtagatctgaggcta

SEQ ID NO: 4255586 - DNA, 25 bp, Homo sapien
tcacctgtgctatgatttgctttgc

SEQ ID NO: 4255587 - DNA, 25 bp, Homo sapien
tcaaagtactgaaggcgctgctaaa

SEQ ID NO: 4255588 - DNA, 25 bp, Homo sapien
gctattctgacttcctcgttactca

SEQ ID NO: 4255589 - DNA, 25 bp, Homo sapien
tggaaaaggctctatggctcaggta

SEQ ID NO: 4255590 - DNA, 25 bp, Homo sapien
tgggctgtcaggctcaaagataaac

SEQ ID NO: 4255591 - DNA, 25 bp, Homo sapien
tgctagaacatattccagggagagg

SEQ ID NO: 4255592 - DNA, 25 bp, Homo sapien
ggtttccaaccgagcaaaatgcaat

SEQ ID NO: 4255593 - DNA, 25 bp, Homo sapien
gggtctgacggagcctcttcaaaga

SEQ ID NO: 4255594 - DNA, 25 bp, Homo sapien
gtcagggtctgacggagcctcttca

SEQ ID NO: 4255595 - DNA, 25 bp, Homo sapien
caagtcagggtctgacggagcctct

SEQ ID NO: 4255596 - DNA, 25 bp, Homo sapien
gcccaagtcagggtctgacggagcc

SEQ ID NO: 4255597 - DNA, 25 bp, Homo sapien
gcatcatagccctgtatggttttgc

SEQ ID NO: 4255598 - DNA, 25 bp, Homo sapien
caggactgtccattgttcaaccaca

SEQ ID NO: 4255599 - DNA, 25 bp, Homo sapien
tccatctgtcaagccatgtaaggaa

SEQ ID NO: 4255600 - DNA, 25 bp, Homo sapien
tttgctatcttctgtggaaacagct

SEQ ID NO: 4255601 - DNA, 25 bp, Homo sapien
ccttttcatgctccagcgtcaggat

SEQ ID NO: 4255602 - DNA, 25 bp, Homo sapien
cagatctgagcttgtcagatgcgtt

SEQ ID NO: 4255603 - DNA, 25 bp, Homo sapien
gaagttcacatgatgtgggctgcag

SEQ ID NO: 4255604 - DNA, 25 bp, Homo sapien
ttttggaagttcacatgatgtgggc

SEQ ID NO: 4255605 - DNA, 25 bp, Homo sapien
gtcagatgcgttgatttttggaagt

SEQ ID NO: 4255606 - DNA, 25 bp, Homo sapien
taggcaatgagggtaaaaagaaata

SEQ ID NO: 4255607 - DNA, 25 bp, Homo sapien
tgggtgctgctctagtcaatgtacc

SEQ ID NO: 4255608 - DNA, 25 bp, Homo sapien
tgatcaagaactatcttaggcaatg

SEQ ID NO: 4255609 - DNA, 25 bp, Homo sapien
tctgagctctgcacaattcgacaag

SEQ ID NO: 4255610 - DNA, 25 bp, Homo sapien
taggatataaaactgccacatgagc

SEQ ID NO: 4255611 - DNA, 25 bp, Homo sapien
cactgctggtaaaggtatggtgata

SEQ ID NO: 4255612 - DNA, 25 bp, Homo sapien
tcaggctagtttcggactgctggac

SEQ ID NO: 4255613 - DNA, 25 bp, Homo sapien
taacaatgttgcaggagcttgccac

SEQ ID NO: 4255614 - DNA, 25 bp, Homo sapien
tgacggccttgtccactccttgtct

SEQ ID NO: 4255615 - DNA, 25 bp, Homo sapien
ggctgaagttcagaatggctatcaa

SEQ ID NO: 4255616 - DNA, 25 bp, Homo sapien
caaaatctggttatctgtaacagca

SEQ ID NO: 4255617 - DNA, 25 bp, Homo sapien
taaagagtcgcttgttttgacggcc

SEQ ID NO: 4255618 - DNA, 25 bp, Homo sapien
tagctggcataacagatcctcttgg

SEQ ID NO: 4255619 - DNA, 25 bp, Homo sapien
gaggtcgcacagcaccaccttgatt

SEQ ID NO: 4255620 - DNA, 25 bp, Homo sapien
tgattccaggattagcaatcgccaa

SEQ ID NO: 4255621 - DNA, 25 bp, Homo sapien
tcttggctctctgagggcgccttct

SEQ ID NO: 4255622 - DNA, 25 bp, Homo sapien
tgaatttaatgtggttaaagccaag

SEQ ID NO: 4255623 - DNA, 25 bp, Homo sapien
ggacttcacggttgcgcttgccagg

SEQ ID NO: 4255624 - DNA, 25 bp, Homo sapien
gccctgtggaggacttcacggttgc

SEQ ID NO: 4255625 - DNA, 25 bp, Homo sapien
ctaagatacgggctgcatacaggaa

SEQ ID NO: 4255626 - DNA, 25 bp, Homo sapien
gaagtggtcgctcatgtgctctaac

SEQ ID NO: 4255627 - DNA, 25 bp, Homo sapien
cactattccaaggtagaagactgcg

SEQ ID NO: 4255628 - DNA, 25 bp, Homo sapien
gacagggtagtattgccggcacttc

SEQ ID NO: 4255629 - DNA, 25 bp, Homo sapien
gaagactgcgttcaccagcatgcct

SEQ ID NO: 4255630 - DNA, 25 bp, Homo sapien
gaaacctgattgcacatgcataacc

SEQ ID NO: 4255631 - DNA, 25 bp, Homo sapien
tgcataacccttgtacgctcctctg

SEQ ID NO: 4255632 - DNA, 25 bp, Homo sapien
ggaaacagtgttggaacgaagagcc

SEQ ID NO: 4255633 - DNA, 25 bp, Homo sapien
ttggaacgaagagcctccaaagcat

SEQ ID NO: 4255634 - DNA, 25 bp, Homo sapien
ctctggcacaggatggaaggctgca

SEQ ID NO: 4255635 - DNA, 25 bp, Homo sapien
agagcccaggtcttgagggtaagca

SEQ ID NO: 4255636 - DNA, 25 bp, Homo sapien
gcccaggtcttgagggtaagcaggg

SEQ ID NO: 4255637 - DNA, 25 bp, Homo sapien
cccagagagcccaggtcttgagggt

SEQ ID NO: 4255638 - DNA, 25 bp, Homo sapien
agcctgggtgaaaatctggggctcc

SEQ ID NO: 4255639 - DNA, 25 bp, Homo sapien
tttagagcctgggtgaaaatctggg

SEQ ID NO: 4255640 - DNA, 25 bp, Homo sapien
cctgggtgaaaatctggggctccaa

SEQ ID NO: 4255641 - DNA, 25 bp, Homo sapien
gagtttagagcctgggtgaaaatct

SEQ ID NO: 4255642 - DNA, 25 bp, Homo sapien
aataagtcagcgagcaggaagagga

SEQ ID NO: 4255643 - DNA, 25 bp, Homo sapien
tggaagctgtggcaacggagacact

SEQ ID NO: 4255644 - DNA, 25 bp, Homo sapien
ttcgtgaacctgtctagcctcctgg

SEQ ID NO: 4255645 - DNA, 25 bp, Homo sapien
tgcttccgcatggagaatccactgg

SEQ ID NO: 4255646 - DNA, 25 bp, Homo sapien
gtcctgggcacctgcggaagttcct

SEQ ID NO: 4255647 - DNA, 25 bp, Homo sapien
gacaagtttccccagtgaataatcc

SEQ ID NO: 4255648 - DNA, 25 bp, Homo sapien
gggcacctgcggaagttccttggac

SEQ ID NO: 4255649 - DNA, 25 bp, Homo sapien
tgaataatcctctcacaggaggcag

SEQ ID NO: 4255650 - DNA, 25 bp, Homo sapien
caggaaatgaccagatgctagattt

SEQ ID NO: 4255651 - DNA, 25 bp, Homo sapien
cttgctctcaggaaatgaccagatg

SEQ ID NO: 4255652 - DNA, 25 bp, Homo sapien
tctcaggaaatgaccagatgctaga

SEQ ID NO: 4255653 - DNA, 25 bp, Homo sapien
ttgctctcaggaaatgaccagatgc

SEQ ID NO: 4255654 - DNA, 25 bp, Homo sapien
accatctccctctccggagggtgag

SEQ ID NO: 4255655 - DNA, 25 bp, Homo sapien
ttggtttctcccagccggagcactg

SEQ ID NO: 4255656 - DNA, 25 bp, Homo sapien
agtgtcttgctcaccccctgtggtg

SEQ ID NO: 4255657 - DNA, 25 bp, Homo sapien
ggttgctctccggtccatccagtgt

SEQ ID NO: 4255658 - DNA, 25 bp, Homo sapien
tggcatcctcggtgctgttggcagt

SEQ ID NO: 4255659 - DNA, 25 bp, Homo sapien
ttgcatctctggcatcctcggtgct

SEQ ID NO: 4255660 - DNA, 25 bp, Homo sapien
gcatcctcggtgctgttggcagtag

SEQ ID NO: 4255661 - DNA, 25 bp, Homo sapien
atctctggcatcctcggtgctgttg

SEQ ID NO: 4255662 - DNA, 25 bp, Homo sapien
gaggaatggtactgaggtataacac

SEQ ID NO: 4255663 - DNA, 25 bp, Homo sapien
ggccctggcttgcagcctcctggat

SEQ ID NO: 4255664 - DNA, 25 bp, Homo sapien
caccaacgaatttcaggccctggct

SEQ ID NO: 4255665 - DNA, 25 bp, Homo sapien
ggtataacaccaacgaatttcaggc

SEQ ID NO: 4255666 - DNA, 25 bp, Homo sapien
gtgacaacatagcacagcacacgca

SEQ ID NO: 4255667 - DNA, 25 bp, Homo sapien
tccgtgacaacatagcacagcacac

SEQ ID NO: 4255668 - DNA, 25 bp, Homo sapien
cccgatccgtgacaacatagcacag

SEQ ID NO: 4255669 - DNA, 25 bp, Homo sapien
acaacatagcacagcacacgcaggg

SEQ ID NO: 4255670 - DNA, 25 bp, Homo sapien
catacagaaatgatttgggagaagg

SEQ ID NO: 4255671 - DNA, 25 bp, Homo sapien
ctgtgcatacagaaatgatttggga

SEQ ID NO: 4255672 - DNA, 25 bp, Homo sapien
atctgtgcatacagaaatgatttgg

SEQ ID NO: 4255673 - DNA, 25 bp, Homo sapien
tgcatacagaaatgatttgggagaa

SEQ ID NO: 4255674 - DNA, 25 bp, Homo sapien
gcatacaactaaattcaagttatct

SEQ ID NO: 4255675 - DNA, 25 bp, Homo sapien
aagaatccaaccaacaatagaagta

SEQ ID NO: 4255676 - DNA, 25 bp, Homo sapien
gaagtaagcaagcctcgtccaccca

SEQ ID NO: 4255677 - DNA, 25 bp, Homo sapien
aggaaagaatccaaccaacaataga

SEQ ID NO: 4255678 - DNA, 25 bp, Homo sapien
gtactgcctcctcaccggcagctcc

SEQ ID NO: 4255679 - DNA, 25 bp, Homo sapien
ctctagcttctgtactgcctcctca

SEQ ID NO: 4255680 - DNA, 25 bp, Homo sapien
tctctagcttctgtactgcctcctc

SEQ ID NO: 4255681 - DNA, 25 bp, Homo sapien
cttctgtactgcctcctcaccggca

SEQ ID NO: 4255682 - DNA, 25 bp, Homo sapien
tgacatttgaaactcccacggtaaa

SEQ ID NO: 4255683 - DNA, 25 bp, Homo sapien
tcataatcaggcatacccatgggcc

SEQ ID NO: 4255684 - DNA, 25 bp, Homo sapien
tgccctgcccctgaaatgggtcttg

SEQ ID NO: 4255685 - DNA, 25 bp, Homo sapien
gatgaggcaatgtaggtcccaaaaa

SEQ ID NO: 4255686 - DNA, 25 bp, Homo sapien
ccttatgtgggttgtaattctgtca

SEQ ID NO: 4255687 - DNA, 25 bp, Homo sapien
tgcagtgtcctctagccatcttcag

SEQ ID NO: 4255688 - DNA, 25 bp, Homo sapien
gtgaaacatcccacctaaatggctg

SEQ ID NO: 4255689 - DNA, 25 bp, Homo sapien
caatcctaatgggacctggctcttt

SEQ ID NO: 4255690 - DNA, 25 bp, Homo sapien
taagaggtggcaagaactttaggta

SEQ ID NO: 4255691 - DNA, 25 bp, Homo sapien
gaaaatagaggagacaaagggagtc

SEQ ID NO: 4255692 - DNA, 25 bp, Homo sapien
caatacacacaataagtaaaaacag

SEQ ID NO: 4255693 - DNA, 25 bp, Homo sapien
aaacagtaacgtgtcttaagaggtg

SEQ ID NO: 4255694 - DNA, 25 bp, Homo sapien
tagggtagggacaaagtaacatcca

SEQ ID NO: 4255695 - DNA, 25 bp, Homo sapien
gggacaaagtaacatccaggtgccc

SEQ ID NO: 4255696 - DNA, 25 bp, Homo sapien
gtagggacaaagtaacatccaggtg

SEQ ID NO: 4255697 - DNA, 25 bp, Homo sapien
caatagggtagggacaaagtaacat

SEQ ID NO: 4255698 - DNA, 25 bp, Homo sapien
aatagttttacttccttggatgtgg

SEQ ID NO: 4255699 - DNA, 25 bp, Homo sapien
gcctcctgcactagctctagaatag

SEQ ID NO: 4255700 - DNA, 25 bp, Homo sapien
gaatagttttacttccttggatgtg

SEQ ID NO: 4255701 - DNA, 25 bp, Homo sapien
cctcctgcactagctctagaatagt

SEQ ID NO: 4255702 - DNA, 25 bp, Homo sapien
ttcttgcctgctctcagggttgaca

SEQ ID NO: 4255703 - DNA, 25 bp, Homo sapien
tgcctgctctcagggttgacacctc

SEQ ID NO: 4255704 - DNA, 25 bp, Homo sapien
tctcagggttgacacctcagacacc

SEQ ID NO: 4255705 - DNA, 25 bp, Homo sapien
ctctcagggttgacacctcagacac

SEQ ID NO: 4255706 - DNA, 25 bp, Homo sapien
gcaggaatgaccgtaagccacattt

SEQ ID NO: 4255707 - DNA, 25 bp, Homo sapien
aaggcaggaatgaccgtaagccaca

SEQ ID NO: 4255708 - DNA, 25 bp, Homo sapien
ggcaggaatgaccgtaagccacatt

SEQ ID NO: 4255709 - DNA, 25 bp, Homo sapien
aggcaggaatgaccgtaagccacat

SEQ ID NO: 4255710 - DNA, 25 bp, Homo sapien
caggcttatgcgtatgtgaacaaaa

SEQ ID NO: 4255711 - DNA, 25 bp, Homo sapien
cacttctaggatgtccctatacaag

SEQ ID NO: 4255712 - DNA, 25 bp, Homo sapien
gtattcggatcatagggtaaattcc

SEQ ID NO: 4255713 - DNA, 25 bp, Homo sapien
caagcatctgagtcttaattacaaa

SEQ ID NO: 4255714 - DNA, 25 bp, Homo sapien
ctgtcagctgttaaccccactccag

SEQ ID NO: 4255715 - DNA, 25 bp, Homo sapien
ggtctgtcagctgttaaccccactc

SEQ ID NO: 4255716 - DNA, 25 bp, Homo sapien
caggtctgtcagctgttaaccccac

SEQ ID NO: 4255717 - DNA, 25 bp, Homo sapien
tgcaggtctgtcagctgttaacccc

SEQ ID NO: 4255718 - DNA, 25 bp, Homo sapien
cactcaggggaacactcgcaaacct

SEQ ID NO: 4255719 - DNA, 25 bp, Homo sapien
gggaacactcgcaaacctcttcaat

SEQ ID NO: 4255720 - DNA, 25 bp, Homo sapien
tgcctgttcactcaggggaacactc

SEQ ID NO: 4255721 - DNA, 25 bp, Homo sapien
cgcaaacctcttcaatggtaccctg

SEQ ID NO: 4255722 - DNA, 25 bp, Homo sapien
taaggaggaacagcaatctaattcc

SEQ ID NO: 4255723 - DNA, 25 bp, Homo sapien
ggtctaaggaggaacagcaatctaa

SEQ ID NO: 4255724 - DNA, 25 bp, Homo sapien
tctaaggaggaacagcaatctaatt

SEQ ID NO: 4255725 - DNA, 25 bp, Homo sapien
gtggtctaaggaggaacagcaatct

SEQ ID NO: 4255726 - DNA, 25 bp, Homo sapien
catagtaagacctctaagatgtagc

SEQ ID NO: 4255727 - DNA, 25 bp, Homo sapien
aatgatgggtttggtacaatacagc

SEQ ID NO: 4255728 - DNA, 25 bp, Homo sapien
gaaagtaacgtcaaaaaggcactga

SEQ ID NO: 4255729 - DNA, 25 bp, Homo sapien
ggtctttaatgaagccccagattct

SEQ ID NO: 4255730 - DNA, 25 bp, Homo sapien
gttcaaaactgcacccattcaggag

SEQ ID NO: 4255731 - DNA, 25 bp, Homo sapien
acatagacatccctgtgatacagca

SEQ ID NO: 4255732 - DNA, 25 bp, Homo sapien
gagagccagcagcaagtggtcacca

SEQ ID NO: 4255733 - DNA, 25 bp, Homo sapien
acttcacagccattcacaggcaggg

SEQ ID NO: 4255734 - DNA, 25 bp, Homo sapien
cgtctgccaagggtggtgtagtcat

SEQ ID NO: 4255735 - DNA, 25 bp, Homo sapien
accaccctagcgtctgccaagggtg

SEQ ID NO: 4255736 - DNA, 25 bp, Homo sapien
accaccaccctagcgtctgccaagg

SEQ ID NO: 4255737 - DNA, 25 bp, Homo sapien
cctagcgtctgccaagggtggtgta

SEQ ID NO: 4255738 - DNA, 25 bp, Homo sapien
tgtaaactcaaacgcccatgggcaa

SEQ ID NO: 4255739 - DNA, 25 bp, Homo sapien
caaactagcgctgtaaactcaaacg

SEQ ID NO: 4255740 - DNA, 25 bp, Homo sapien
tcaaacgcccatgggcaacgagtga

SEQ ID NO: 4255741 - DNA, 25 bp, Homo sapien
tcagatggccaaactagcgctgtaa

SEQ ID NO: 4255742 - DNA, 25 bp, Homo sapien
gaaggtgcgggttgcctgtaactca

SEQ ID NO: 4255743 - DNA, 25 bp, Homo sapien
gatcctgccctcaagtctagataga

SEQ ID NO: 4255744 - DNA, 25 bp, Homo sapien
cacatatgagggattgaaggcactg

SEQ ID NO: 4255745 - DNA, 25 bp, Homo sapien
taatgatgagcctagggaacgtgtg

SEQ ID NO: 4255746 - DNA, 25 bp, Homo sapien
tgagaaaggacggtactcgccttaa

SEQ ID NO: 4255747 - DNA, 25 bp, Homo sapien
ggcagaatagtgggaaacaaagtta

SEQ ID NO: 4255748 - DNA, 25 bp, Homo sapien
gttactgagaaaggacggtactcgc

SEQ ID NO: 4255749 - DNA, 25 bp, Homo sapien
cagtgaccggggcagaatagtggga

SEQ ID NO: 4255750 - DNA, 25 bp, Homo sapien
tctctcagggagctgtgcatgccta

SEQ ID NO: 4255751 - DNA, 25 bp, Homo sapien
ggagatgttaccagggacatctaac

SEQ ID NO: 4255752 - DNA, 25 bp, Homo sapien
ctgggaacattctggacatgatggg

SEQ ID NO: 4255753 - DNA, 25 bp, Homo sapien
gacatctaactatccgaccctgcta

SEQ ID NO: 4255754 - DNA, 25 bp, Homo sapien
cggactgagaagtcgttaatgactt

SEQ ID NO: 4255755 - DNA, 25 bp, Homo sapien
ccaaacttcggactgagaagtcgtt

SEQ ID NO: 4255756 - DNA, 25 bp, Homo sapien
caaacttcggactgagaagtcgtta

SEQ ID NO: 4255757 - DNA, 25 bp, Homo sapien
acttcggactgagaagtcgttaatg

SEQ ID NO: 4255758 - DNA, 25 bp, Homo sapien
caaattccaggttagagatgcaaac

SEQ ID NO: 4255759 - DNA, 25 bp, Homo sapien
tcatgcccaacctagagcaaatgac

SEQ ID NO: 4255760 - DNA, 25 bp, Homo sapien
tgcaaaccaagacctgtagacttac

SEQ ID NO: 4255761 - DNA, 25 bp, Homo sapien
tcctcttctaaagcactctcattaa

SEQ ID NO: 4255762 - DNA, 25 bp, Homo sapien
ctgttggaaaagcaatctgatctag

SEQ ID NO: 4255763 - DNA, 25 bp, Homo sapien
gggttcactgttggaaaagcaatct

SEQ ID NO: 4255764 - DNA, 25 bp, Homo sapien
cactgttggaaaagcaatctgatct

SEQ ID NO: 4255765 - DNA, 25 bp, Homo sapien
cttggggttcactgttggaaaagca

SEQ ID NO: 4255766 - DNA, 25 bp, Homo sapien
caggatggctctaaagatgtgctcc

SEQ ID NO: 4255767 - DNA, 25 bp, Homo sapien
caggggcgtcttctcccgctcatgg

SEQ ID NO: 4255768 - DNA, 25 bp, Homo sapien
cgtcttctcccgctcatgggtgggc

SEQ ID NO: 4255769 - DNA, 25 bp, Homo sapien
ttctcccgctcatgggtgggctgca

SEQ ID NO: 4255770 - DNA, 25 bp, Homo sapien
ctgggcgggcaggtcacgcagggag

SEQ ID NO: 4255771 - DNA, 25 bp, Homo sapien
ggtcacgcagggaggccagcctcac

SEQ ID NO: 4255772 - DNA, 25 bp, Homo sapien
actgctgaggacccagggagctccg

SEQ ID NO: 4255773 - DNA, 25 bp, Homo sapien
ggcgggcaggtcacgcagggaggcc

SEQ ID NO: 4255774 - DNA, 25 bp, Homo sapien
gctgggtgtcgaccttatggaaacc

SEQ ID NO: 4255775 - DNA, 25 bp, Homo sapien
tatggaaggcaactgcacgttgtca

SEQ ID NO: 4255776 - DNA, 25 bp, Homo sapien
aaaagggcaaaaccacatgtggcgg

SEQ ID NO: 4255777 - DNA, 25 bp, Homo sapien
tctgtgagtcatcgaatatgggccc

SEQ ID NO: 4255778 - DNA, 25 bp, Homo sapien
ggcagagtctcatctccttactgga

SEQ ID NO: 4255779 - DNA, 25 bp, Homo sapien
gtctcatctccttactggacagagg

SEQ ID NO: 4255780 - DNA, 25 bp, Homo sapien
gacagagggcttggtgcagatccca

SEQ ID NO: 4255781 - DNA, 25 bp, Homo sapien
cttactggacagagggcttggtgca

SEQ ID NO: 4255782 - DNA, 25 bp, Homo sapien
gaaattctcctctgataaggccaca

SEQ ID NO: 4255783 - DNA, 25 bp, Homo sapien
cagattagccacaagaccaagatga

SEQ ID NO: 4255784 - DNA, 25 bp, Homo sapien
caaggtggccaaaccaagagtgcct

SEQ ID NO: 4255785 - DNA, 25 bp, Homo sapien
gagtcagccagtgtaaagctcagag

SEQ ID NO: 4255786 - DNA, 25 bp, Homo sapien
catacacacgagttgagcagctccg

SEQ ID NO: 4255787 - DNA, 25 bp, Homo sapien
ggattaccgccttcttgcataaact

SEQ ID NO: 4255788 - DNA, 25 bp, Homo sapien
agctccggctccattaaccaatttg

SEQ ID NO: 4255789 - DNA, 25 bp, Homo sapien
tcagctttgcatgaaggattaccgc

SEQ ID NO: 4255790 - DNA, 25 bp, Homo sapien
gactcagaaaaatcaacgagacaaa

SEQ ID NO: 4255791 - DNA, 25 bp, Homo sapien
aaagccatgctgacagactgctgcc

SEQ ID NO: 4255792 - DNA, 25 bp, Homo sapien
gatttgcactgaactccactacagg

SEQ ID NO: 4255793 - DNA, 25 bp, Homo sapien
ctgctgaagtacttgtggaaaggga

SEQ ID NO: 4255794 - DNA, 25 bp, Homo sapien
ttccaggacacatggtagatgcccc

SEQ ID NO: 4255795 - DNA, 25 bp, Homo sapien
ggacacatggtagatgcccctgcat

SEQ ID NO: 4255796 - DNA, 25 bp, Homo sapien
taatagggcactctccagtacaccc

SEQ ID NO: 4255797 - DNA, 25 bp, Homo sapien
cccctgcatgctggacacgaagtct

SEQ ID NO: 4255798 - DNA, 25 bp, Homo sapien
ctggcttgtaggctaaccaacagct

SEQ ID NO: 4255799 - DNA, 25 bp, Homo sapien
gtaggctaaccaacagctggctagg

SEQ ID NO: 4255800 - DNA, 25 bp, Homo sapien
gcttgtaggctaaccaacagctggc

SEQ ID NO: 4255801 - DNA, 25 bp, Homo sapien
cagctggctaggtgtagtctcaaac

SEQ ID NO: 4255802 - DNA, 25 bp, Homo sapien
cacagtggttacaaatatcaagcat

SEQ ID NO: 4255803 - DNA, 25 bp, Homo sapien
taacgtatttactgctatgggagtc

SEQ ID NO: 4255804 - DNA, 25 bp, Homo sapien
gagagtgatataattaaggcaagca

SEQ ID NO: 4255805 - DNA, 25 bp, Homo sapien
aaataaagcatgaacgtatgtaacg

SEQ ID NO: 4255806 - DNA, 25 bp, Homo sapien
cagaagacaaaagtcaaagccaggg

SEQ ID NO: 4255807 - DNA, 25 bp, Homo sapien
ctccatatcccaggacttccttccc

SEQ ID NO: 4255808 - DNA, 25 bp, Homo sapien
agccaggggtgaacaggacatgatg

SEQ ID NO: 4255809 - DNA, 25 bp, Homo sapien
ttcccacagtgcagaaatggaaggc

SEQ ID NO: 4255810 - DNA, 25 bp, Homo sapien
gaagagttatgtgccctagtagaaa

SEQ ID NO: 4255811 - DNA, 25 bp, Homo sapien
tatccacaatgtgtaacagacacct

SEQ ID NO: 4255812 - DNA, 25 bp, Homo sapien
gctgaagcgggagtctctactttaa

SEQ ID NO: 4255813 - DNA, 25 bp, Homo sapien
aaatgagccaggaatagcagcgtgt

SEQ ID NO: 4255814 - DNA, 25 bp, Homo sapien
taactaacgcaagagacacgtgagc

SEQ ID NO: 4255815 - DNA, 25 bp, Homo sapien
tggaccacacctgggcaagcaaagt

SEQ ID NO: 4255816 - DNA, 25 bp, Homo sapien
tagaaatatcatgtaagaggcctgt

SEQ ID NO: 4255817 - DNA, 25 bp, Homo sapien
tcaatgacgtcaacaaccaacgccg

SEQ ID NO: 4255818 - DNA, 25 bp, Homo sapien
tggaaggcaactattcaaggatgcc

SEQ ID NO: 4255819 - DNA, 25 bp, Homo sapien
tatgtgaaggacttcgaagcgtgac

SEQ ID NO: 4255820 - DNA, 25 bp, Homo sapien
tacaatagcaagagttgccatcagc

SEQ ID NO: 4255821 - DNA, 25 bp, Homo sapien
tattaggtgctatgtgagtcggttg

SEQ ID NO: 4255822 - DNA, 25 bp, Homo sapien
gcagccagttatgaggctgttatgc

SEQ ID NO: 4255823 - DNA, 25 bp, Homo sapien
tctggtctcttcattacacaggagt

SEQ ID NO: 4255824 - DNA, 25 bp, Homo sapien
aatggaggagggctttgtcccaaca

SEQ ID NO: 4255825 - DNA, 25 bp, Homo sapien
aacgtgacttcctgttcgaaatgga

SEQ ID NO: 4255826 - DNA, 25 bp, Homo sapien
ttcccactccaggagaacgtgactt

SEQ ID NO: 4255827 - DNA, 25 bp, Homo sapien
tcagagacggagagtccctcaaagt

SEQ ID NO: 4255828 - DNA, 25 bp, Homo sapien
ctgctggctactccctcagagacgg

SEQ ID NO: 4255829 - DNA, 25 bp, Homo sapien
tatccttccctgtcctagaagcacg

SEQ ID NO: 4255830 - DNA, 25 bp, Homo sapien
agaagcacgaaacctacctctccgg

SEQ ID NO: 4255831 - DNA, 25 bp, Homo sapien
gaatacacaggactagccatcaagg

SEQ ID NO: 4255832 - DNA, 25 bp, Homo sapien
tgttagcccaacattccccatggag

SEQ ID NO: 4255833 - DNA, 25 bp, Homo sapien
gggtagaagcaaaaatggctcctct

SEQ ID NO: 4255834 - DNA, 25 bp, Homo sapien
caatgtttggaagctcctggaagcc

SEQ ID NO: 4255835 - DNA, 25 bp, Homo sapien
gaataactggttgacgcagaaggca

SEQ ID NO: 4255836 - DNA, 25 bp, Homo sapien
tatttacatgagtgctagggccttg

SEQ ID NO: 4255837 - DNA, 25 bp, Homo sapien
gacccctttgttatactcactgtga

SEQ ID NO: 4255838 - DNA, 25 bp, Homo sapien
ggaaggctaaccacaggacatttgc

SEQ ID NO: 4255839 - DNA, 25 bp, Homo sapien
aagtccactgctccatcacaataca

SEQ ID NO: 4255840 - DNA, 25 bp, Homo sapien
gctccatcacaatacatcagctgca

SEQ ID NO: 4255841 - DNA, 25 bp, Homo sapien
actgctccatcacaatacatcagct

SEQ ID NO: 4255842 - DNA, 25 bp, Homo sapien
agtccactgctccatcacaatacat

SEQ ID NO: 4255843 - DNA, 25 bp, Homo sapien
gagctctctttcatgtgcggtggat

SEQ ID NO: 4255844 - DNA, 25 bp, Homo sapien
cttcagtggactggcagttggcgct

SEQ ID NO: 4255845 - DNA, 25 bp, Homo sapien
gctctctttcatgtgcggtggataa

SEQ ID NO: 4255846 - DNA, 25 bp, Homo sapien
tcaaacaaatatcactgcgacaccc

SEQ ID NO: 4255847 - DNA, 25 bp, Homo sapien
atcagtctccattactctagcatca

SEQ ID NO: 4255848 - DNA, 25 bp, Homo sapien
cattactctagcatcaagtactggt

SEQ ID NO: 4255849 - DNA, 25 bp, Homo sapien
tctagcatcaagtactggttcttca

SEQ ID NO: 4255850 - DNA, 25 bp, Homo sapien
tgggctaccaccatcccatcagtct

SEQ ID NO: 4255851 - DNA, 25 bp, Homo sapien
tattcccaggccgtttttcatcacg

SEQ ID NO: 4255852 - DNA, 25 bp, Homo sapien
cagcactcagagtcgtgaactccag

SEQ ID NO: 4255853 - DNA, 25 bp, Homo sapien
gaagcggtattcataggacacatct

SEQ ID NO: 4255854 - DNA, 25 bp, Homo sapien
gaactccaggaagcggtattcatag

SEQ ID NO: 4255855 - DNA, 25 bp, Homo sapien
ggtagccactaccactttagtttga

SEQ ID NO: 4255856 - DNA, 25 bp, Homo sapien
ggatcagaagagtaccaagaagcat

SEQ ID NO: 4255857 - DNA, 25 bp, Homo sapien
taaaggacaggttccctgatagcag

SEQ ID NO: 4255858 - DNA, 25 bp, Homo sapien
caatcagactcccaaccttgaggct

SEQ ID NO: 4255859 - DNA, 25 bp, Homo sapien
tcaatttcctcagggctgaagtgaa

SEQ ID NO: 4255860 - DNA, 25 bp, Homo sapien
tatcatttcctgtaacgctgttctg

SEQ ID NO: 4255861 - DNA, 25 bp, Homo sapien
caaaattagtataagcccctggctg

SEQ ID NO: 4255862 - DNA, 25 bp, Homo sapien
tattgaacagttcagctggcaacgt

SEQ ID NO: 4255863 - DNA, 25 bp, Homo sapien
catatccatcctggcgtcccttgag

SEQ ID NO: 4255864 - DNA, 25 bp, Homo sapien
cagctgagggcaagcacagagtcac

SEQ ID NO: 4255865 - DNA, 25 bp, Homo sapien
cagggagcgtgcctggttctacaac

SEQ ID NO: 4255866 - DNA, 25 bp, Homo sapien
agggatcacccataaccacacaggg

SEQ ID NO: 4255867 - DNA, 25 bp, Homo sapien
tcggcacccgcgtccctgtgcttct

SEQ ID NO: 4255868 - DNA, 25 bp, Homo sapien
tcagtgctggggactctcggcaccc

SEQ ID NO: 4255869 - DNA, 25 bp, Homo sapien
ctgtgcttctggtggttccggcgct

SEQ ID NO: 4255870 - DNA, 25 bp, Homo sapien
aagaggagatccccgttttcagtgc

SEQ ID NO: 4255871 - DNA, 25 bp, Homo sapien
gccgcgtggtcgtgtgtctgtccct

SEQ ID NO: 4255872 - DNA, 25 bp, Homo sapien
atcttcagggaaagcctcgcggccc

SEQ ID NO: 4255873 - DNA, 25 bp, Homo sapien
gctccctgaggcagcgtgttccgtc

SEQ ID NO: 4255874 - DNA, 25 bp, Homo sapien
ccgggaggaaagtttgtgccataca

SEQ ID NO: 4255875 - DNA, 25 bp, Homo sapien
ctggaatatttaatgaggagccaaa

SEQ ID NO: 4255876 - DNA, 25 bp, Homo sapien
cacttgtgttctgtagagagctgcc

SEQ ID NO: 4255877 - DNA, 25 bp, Homo sapien
acttgtgttctgtagagagctgcct

SEQ ID NO: 4255878 - DNA, 25 bp, Homo sapien
tattcctggcagataagcgctcctg

SEQ ID NO: 4255879 - DNA, 25 bp, Homo sapien
tcatcaacaggactatcaacagctg

SEQ ID NO: 4255880 - DNA, 25 bp, Homo sapien
tgacaatgataacccacaagtgtcc

SEQ ID NO: 4255881 - DNA, 25 bp, Homo sapien
cgctcctgggtataggtggaatgac

SEQ ID NO: 4255882 - DNA, 25 bp, Homo sapien
tatcaccactgtcacaccaacaaga

SEQ ID NO: 4255883 - DNA, 25 bp, Homo sapien
gagaaatccactgagcctgggccat

SEQ ID NO: 4255884 - DNA, 25 bp, Homo sapien
ctccctatcaccactgtcacaccaa

SEQ ID NO: 4255885 - DNA, 25 bp, Homo sapien
ccaacaagaacagtgtagtgagaaa

SEQ ID NO: 4255886 - DNA, 25 bp, Homo sapien
tgcagaatccacattcaggtccctg

SEQ ID NO: 4255887 - DNA, 25 bp, Homo sapien
gccctctcaaaggtacctgcagaat

SEQ ID NO: 4255888 - DNA, 25 bp, Homo sapien
taaacgccctctcaaaggtacctgc

SEQ ID NO: 4255889 - DNA, 25 bp, Homo sapien
aacgccctctcaaaggtacctgcag

SEQ ID NO: 4255890 - DNA, 25 bp, Homo sapien
gattcaggtctatctgaactttttc

SEQ ID NO: 4255891 - DNA, 25 bp, Homo sapien
tgattcaggtctatctgaacttttt

SEQ ID NO: 4255892 - DNA, 25 bp, Homo sapien
ttttgattcaggtctatctgaactt

SEQ ID NO: 4255893 - DNA, 25 bp, Homo sapien
tttgattcaggtctatctgaacttt

SEQ ID NO: 4255894 - DNA, 25 bp, Homo sapien
gtgaatcctctcagcgattcccaca

SEQ ID NO: 4255895 - DNA, 25 bp, Homo sapien
tccaccattggtccacgaagacctc

SEQ ID NO: 4255896 - DNA, 25 bp, Homo sapien
tgccctagccccatcagcaagggct

SEQ ID NO: 4255897 - DNA, 25 bp, Homo sapien
ggtttccatcgccacccactgttgt

SEQ ID NO: 4255898 - DNA, 25 bp, Homo sapien
ctctcgcgctctctggagtgagaag

SEQ ID NO: 4255899 - DNA, 25 bp, Homo sapien
gtcgtggtccctacgtctctcttct

SEQ ID NO: 4255900 - DNA, 25 bp, Homo sapien
gcgctctctggagtgagaagaacca

SEQ ID NO: 4255901 - DNA, 25 bp, Homo sapien
caacagccaaattgtcgtggtccct

SEQ ID NO: 4255902 - DNA, 25 bp, Homo sapien
agcccagactcctgggtggattcat

SEQ ID NO: 4255903 - DNA, 25 bp, Homo sapien
tcctttcgggggccagcccagactc

SEQ ID NO: 4255904 - DNA, 25 bp, Homo sapien
ccagcccagactcctgggtggattc

SEQ ID NO: 4255905 - DNA, 25 bp, Homo sapien
tttcgggggccagcccagactcctg

SEQ ID NO: 4255906 - DNA, 25 bp, Homo sapien
tcccctcaagagctaaacagttact

SEQ ID NO: 4255907 - DNA, 25 bp, Homo sapien
tgatgagatcccctcaagagctaaa

SEQ ID NO: 4255908 - DNA, 25 bp, Homo sapien
tgagatcccctcaagagctaaacag

SEQ ID NO: 4255909 - DNA, 25 bp, Homo sapien
ctctgatgagatcccctcaagagct

SEQ ID NO: 4255910 - DNA, 25 bp, Homo sapien
ttgcctgttccgtcaggatccgctg

SEQ ID NO: 4255911 - DNA, 25 bp, Homo sapien
ctgggttttgcctgttccgtcagga

SEQ ID NO: 4255912 - DNA, 25 bp, Homo sapien
ctgttccgtcaggatccgctgtgag

SEQ ID NO: 4255913 - DNA, 25 bp, Homo sapien
gttttgcctgttccgtcaggatccg

SEQ ID NO: 4255914 - DNA, 25 bp, Homo sapien
gacagccaagagaattttagtgaag

SEQ ID NO: 4255915 - DNA, 25 bp, Homo sapien
tgagtttacctttaaagacagccaa

SEQ ID NO: 4255916 - DNA, 25 bp, Homo sapien
gaaagcaggcaaggcgattaagcaa

SEQ ID NO: 4255917 - DNA, 25 bp, Homo sapien
caaggcgattaagcaatgtggcagc

SEQ ID NO: 4255918 - DNA, 25 bp, Homo sapien
cattgctaccgttccagggtttggc

SEQ ID NO: 4255919 - DNA, 25 bp, Homo sapien
gcaaacctcctcaaagactagtgac

SEQ ID NO: 4255920 - DNA, 25 bp, Homo sapien
gactagtgacaaaggctggaaacga

SEQ ID NO: 4255921 - DNA, 25 bp, Homo sapien
catgtaactagataagccaggagga

SEQ ID NO: 4255922 - DNA, 25 bp, Homo sapien
gatttaagcattgcccgacttcttc

SEQ ID NO: 4255923 - DNA, 25 bp, Homo sapien
tgcccgacttcttctaaagtgatgc

SEQ ID NO: 4255924 - DNA, 25 bp, Homo sapien
tcaaacagatttaagcattgcccga

SEQ ID NO: 4255925 - DNA, 25 bp, Homo sapien
gcccgacttcttctaaagtgatgca

SEQ ID NO: 4255926 - DNA, 25 bp, Homo sapien
acatatcattaacctgtgaagatgt

SEQ ID NO: 4255927 - DNA, 25 bp, Homo sapien
agacatatcattaacctgtgaagat

SEQ ID NO: 4255928 - DNA, 25 bp, Homo sapien
gacatatcattaacctgtgaagatg

SEQ ID NO: 4255929 - DNA, 25 bp, Homo sapien
tttgtatgcttcggtccacagattt

SEQ ID NO: 4255930 - DNA, 25 bp, Homo sapien
ttctctggattaaacagacaagata

SEQ ID NO: 4255931 - DNA, 25 bp, Homo sapien
gtggagtagcttcatgaactgaaca

SEQ ID NO: 4255932 - DNA, 25 bp, Homo sapien
cagagggtggagtagcttcatgaac

SEQ ID NO: 4255933 - DNA, 25 bp, Homo sapien
agtggtagttaacagctgaataagc

SEQ ID NO: 4255934 - DNA, 25 bp, Homo sapien
tcatttggcacaacttcagctcctg

SEQ ID NO: 4255935 - DNA, 25 bp, Homo sapien
cggaggtacaacatagctcctttgc

SEQ ID NO: 4255936 - DNA, 25 bp, Homo sapien
tttgctccccaacaggccactgtgg

SEQ ID NO: 4255937 - DNA, 25 bp, Homo sapien
ggtacaacatagctcctttgctccc

SEQ ID NO: 4255938 - DNA, 25 bp, Homo sapien
gaggtacaacatagctcctttgctc

SEQ ID NO: 4255939 - DNA, 25 bp, Homo sapien
cctgaactggtgaatttgggtaagt

SEQ ID NO: 4255940 - DNA, 25 bp, Homo sapien
gtgaatttgggtaagtaggatatgc

SEQ ID NO: 4255941 - DNA, 25 bp, Homo sapien
ccagtgatgacctgaactggtgaat

SEQ ID NO: 4255942 - DNA, 25 bp, Homo sapien
tatacaggcaactgatatccagtga

SEQ ID NO: 4255943 - DNA, 25 bp, Homo sapien
ctgaacatactgagttataggattc

SEQ ID NO: 4255944 - DNA, 25 bp, Homo sapien
tcagtgtttggattagtccagacat

SEQ ID NO: 4255945 - DNA, 25 bp, Homo sapien
tgtgggctgcatataagtttcagtg

SEQ ID NO: 4255946 - DNA, 25 bp, Homo sapien
tactgagttataggattcatcgtgg

SEQ ID NO: 4255947 - DNA, 25 bp, Homo sapien
tggaggaggatgattaaaaaccaaa

SEQ ID NO: 4255948 - DNA, 25 bp, Homo sapien
tggtggaggaggatgattaaaaacc

SEQ ID NO: 4255949 - DNA, 25 bp, Homo sapien
tgtggtggaggaggatgattaaaaa

SEQ ID NO: 4255950 - DNA, 25 bp, Homo sapien
ggtggaggaggatgattaaaaacca

SEQ ID NO: 4255951 - DNA, 25 bp, Homo sapien
gcttcagctttttaccatggaaatt

SEQ ID NO: 4255952 - DNA, 25 bp, Homo sapien
taaattttgtttcctgattgcaggg

SEQ ID NO: 4255953 - DNA, 25 bp, Homo sapien
tttttaccatggaaatttatctgtg

SEQ ID NO: 4255954 - DNA, 25 bp, Homo sapien
gattgcagggcccagcttcagcttt

SEQ ID NO: 4255955 - DNA, 25 bp, Homo sapien
tgcacatccacgtcattaaaaaatg

SEQ ID NO: 4255956 - DNA, 25 bp, Homo sapien
ttctgcacatccacgtcattaaaaa

SEQ ID NO: 4255957 - DNA, 25 bp, Homo sapien
tctactatcttctgcacatccacgt

SEQ ID NO: 4255958 - DNA, 25 bp, Homo sapien
gcacatccacgtcattaaaaaatga

SEQ ID NO: 4255959 - DNA, 25 bp, Homo sapien
atatctagcaaagaagcttctaatc

SEQ ID NO: 4255960 - DNA, 25 bp, Homo sapien
tatctagcaaagaagcttctaatct

SEQ ID NO: 4255961 - DNA, 25 bp, Homo sapien
catatctagcaaagaagcttctaat

SEQ ID NO: 4255962 - DNA, 25 bp, Homo sapien
aaatatagccttggctggttgcagc

SEQ ID NO: 4255963 - DNA, 25 bp, Homo sapien
atatagccttggctggttgcagctg

SEQ ID NO: 4255964 - DNA, 25 bp, Homo sapien
aatatagccttggctggttgcagct

SEQ ID NO: 4255965 - DNA, 25 bp, Homo sapien
tcgtgcggcaaagatggcgtcaggc

SEQ ID NO: 4255966 - DNA, 25 bp, Homo sapien
gcaaagatggcgtcaggcgagcttt

SEQ ID NO: 4255967 - DNA, 25 bp, Homo sapien
tggcgtcaggcgagcttttctgtcg

SEQ ID NO: 4255968 - DNA, 25 bp, Homo sapien
gagcttttctgtcgccgccacacga

SEQ ID NO: 4255969 - DNA, 25 bp, Homo sapien
cccctcagctacagggccatgcctt

SEQ ID NO: 4255970 - DNA, 25 bp, Homo sapien
gaagtttaagaaggcaagtccctca

SEQ ID NO: 4255971 - DNA, 25 bp, Homo sapien
ccccaccaagtacagggaccaggag

SEQ ID NO: 4255972 - DNA, 25 bp, Homo sapien
cagctacagggccatgccttcagga

SEQ ID NO: 4255973 - DNA, 25 bp, Homo sapien
ctctgccagtagagaacccgaaccg

SEQ ID NO: 4255974 - DNA, 25 bp, Homo sapien
gtgcctcaagaaggccgtggccctt

SEQ ID NO: 4255975 - DNA, 25 bp, Homo sapien
gaaccgggaaatgggtgcctcaaga

SEQ ID NO: 4255976 - DNA, 25 bp, Homo sapien
tgcctctctgtgtaggccgcgccac

SEQ ID NO: 4255977 - DNA, 25 bp, Homo sapien
aaccaagagcgggtgacaaggctga

SEQ ID NO: 4255978 - DNA, 25 bp, Homo sapien
ctgtgaggtccgctggaacccgctg

SEQ ID NO: 4255979 - DNA, 25 bp, Homo sapien
cagaggctgtgcttggcgcaccact

SEQ ID NO: 4255980 - DNA, 25 bp, Homo sapien
atggcggcaggcagcagttcccgac

SEQ ID NO: 4255981 - DNA, 25 bp, Homo sapien
gcgcaggcggactgaggcgtggtcc

SEQ ID NO: 4255982 - DNA, 25 bp, Homo sapien
cgcaggcggactgaggcgtggtccg

SEQ ID NO: 4255983 - DNA, 25 bp, Homo sapien
caggcggactgaggcgtggtccgcg

SEQ ID NO: 4255984 - DNA, 25 bp, Homo sapien
gagcgcaggcggactgaggcgtggt

SEQ ID NO: 4255985 - DNA, 25 bp, Homo sapien
gtagggtacgcagcgcgtgtgcgca

SEQ ID NO: 4255986 - DNA, 25 bp, Homo sapien
gcgcgtggtatcggcctcagccaat

SEQ ID NO: 4255987 - DNA, 25 bp, Homo sapien
cccctaaaataagtatgcatactga

SEQ ID NO: 4255988 - DNA, 25 bp, Homo sapien
tccggtgcctcagtcccaggaaggc

SEQ ID NO: 4255989 - DNA, 25 bp, Homo sapien
cttgaaatcgcttaatagaaagaat

SEQ ID NO: 4255990 - DNA, 25 bp, Homo sapien
cacaatgatgtaagtagatgtggag

SEQ ID NO: 4255991 - DNA, 25 bp, Homo sapien
gtggcataattcgtatcagttcaga

SEQ ID NO: 4255992 - DNA, 25 bp, Homo sapien
caatgtgttaagattagtggcataa

SEQ ID NO: 4255993 - DNA, 25 bp, Homo sapien
tcccagttgctttgaaactgctttt

SEQ ID NO: 4255994 - DNA, 25 bp, Homo sapien
ctttctttggtatcctcaacactac

SEQ ID NO: 4255995 - DNA, 25 bp, Homo sapien
gaagtagatagaggatctgaggaca

SEQ ID NO: 4255996 - DNA, 25 bp, Homo sapien
tcactatgtttgttggaaggggcat

SEQ ID NO: 4255997 - DNA, 25 bp, Homo sapien
tatcctcaacactactatcactatg

SEQ ID NO: 4255998 - DNA, 25 bp, Homo sapien
aagagaatgctgaggcactgtgctg

SEQ ID NO: 4255999 - DNA, 25 bp, Homo sapien
gacctggagagtgcaaagacaagga

SEQ ID NO: 4256000 - DNA, 25 bp, Homo sapien
tgataaatgagctatgaaccagcgc

SEQ ID NO: 4256001 - DNA, 25 bp, Homo sapien
taagggtctgctcccatgggtggac

SEQ ID NO: 4256002 - DNA, 25 bp, Homo sapien
caagaataccactgaagcgatgatg

SEQ ID NO: 4256003 - DNA, 25 bp, Homo sapien
taggcctaccaagtttctgcaatgt

SEQ ID NO: 4256004 - DNA, 25 bp, Homo sapien
tactctctgttgttttactggtcca

SEQ ID NO: 4256005 - DNA, 25 bp, Homo sapien
ttctgggcacacctcaccaatgggt

SEQ ID NO: 4256006 - DNA, 25 bp, Homo sapien
ccagaactccttttaagagcagagt

SEQ ID NO: 4256007 - DNA, 25 bp, Homo sapien
actccttttaagagcagagtggaaa

SEQ ID NO: 4256008 - DNA, 25 bp, Homo sapien
tgttgaagttgactagaactccttt

SEQ ID NO: 4256009 - DNA, 25 bp, Homo sapien
gaactccttttaagagcagagtgga

SEQ ID NO: 4256010 - DNA, 25 bp, Homo sapien
tatgtcttttgaccttaaattaaca

SEQ ID NO: 4256011 - DNA, 25 bp, Homo sapien
ccagttgggcccctgaaaagctttg

SEQ ID NO: 4256012 - DNA, 25 bp, Homo sapien
atgtcttttgaccttaaattaacat

SEQ ID NO: 4256013 - DNA, 25 bp, Homo sapien
gaaagcgggtagttcaatgacacca

SEQ ID NO: 4256014 - DNA, 25 bp, Homo sapien
caaagtggtagctactgctccagcc

SEQ ID NO: 4256015 - DNA, 25 bp, Homo sapien
gacaccagagttaaggtctctgtga

SEQ ID NO: 4256016 - DNA, 25 bp, Homo sapien
aggagtctgaaagcgggtagttcaa

SEQ ID NO: 4256017 - DNA, 25 bp, Homo sapien
gacaaaggcaatacctcagacattc

SEQ ID NO: 4256018 - DNA, 25 bp, Homo sapien
aaggcaatacctcagacattctgta

SEQ ID NO: 4256019 - DNA, 25 bp, Homo sapien
gcaatacctcagacattctgtatct

SEQ ID NO: 4256020 - DNA, 25 bp, Homo sapien
gagacaaaggcaatacctcagacat

SEQ ID NO: 4256021 - DNA, 25 bp, Homo sapien
aacatggagtccatcagtttggcca

SEQ ID NO: 4256022 - DNA, 25 bp, Homo sapien
tcagtttggccaagccccagatttt

SEQ ID NO: 4256023 - DNA, 25 bp, Homo sapien
gtccatcagtttggccaagccccag

SEQ ID NO: 4256024 - DNA, 25 bp, Homo sapien
caattttcctctgcaagcactttaa

SEQ ID NO: 4256025 - DNA, 25 bp, Homo sapien
gcggcacacaagggcttcggattcc

SEQ ID NO: 4256026 - DNA, 25 bp, Homo sapien
ggcacacaagggcttcggattcctc

SEQ ID NO: 4256027 - DNA, 25 bp, Homo sapien
gttgcggcacacaagggcttcggat

SEQ ID NO: 4256028 - DNA, 25 bp, Homo sapien
tgcggcacacaagggcttcggattc

SEQ ID NO: 4256029 - DNA, 25 bp, Homo sapien
cattaacaactagggccctggtcat

SEQ ID NO: 4256030 - DNA, 25 bp, Homo sapien
ccattaacaactagggccctggtca

SEQ ID NO: 4256031 - DNA, 25 bp, Homo sapien
ctattcagtcaccaccatattctcc

SEQ ID NO: 4256032 - DNA, 25 bp, Homo sapien
attcagtcaccaccatattctcctg

SEQ ID NO: 4256033 - DNA, 25 bp, Homo sapien
tcagtcaccaccatattctcctgac

SEQ ID NO: 4256034 - DNA, 25 bp, Homo sapien
tattcagtcaccaccatattctcct

SEQ ID NO: 4256035 - DNA, 25 bp, Homo sapien
tgtttgccaatctctagtgacttag

SEQ ID NO: 4256036 - DNA, 25 bp, Homo sapien
gtttttagactcatagtgtttgcca

SEQ ID NO: 4256037 - DNA, 25 bp, Homo sapien
tattcttccagctagagagagatgg

SEQ ID NO: 4256038 - DNA, 25 bp, Homo sapien
tgaaagccattctctgtggtcctgc

SEQ ID NO: 4256039 - DNA, 25 bp, Homo sapien
cttatcaaagcttctgttggtggat

SEQ ID NO: 4256040 - DNA, 25 bp, Homo sapien
caaagctgaggatgcgcctgggaaa

SEQ ID NO: 4256041 - DNA, 25 bp, Homo sapien
gatctctggagggagaaactctcag

SEQ ID NO: 4256042 - DNA, 25 bp, Homo sapien
tgaagcaagtctccatccattagag

SEQ ID NO: 4256043 - DNA, 25 bp, Homo sapien
tagggccccagtaggagagttgcta

SEQ ID NO: 4256044 - DNA, 25 bp, Homo sapien
gtcagggacagcatctttactgttt

SEQ ID NO: 4256045 - DNA, 25 bp, Homo sapien
tgactgctcaatgatgtcagggaca

SEQ ID NO: 4256046 - DNA, 25 bp, Homo sapien
aagtttggtagtgggcagttgctga

SEQ ID NO: 4256047 - DNA, 25 bp, Homo sapien
ttgctgactgctcaatgatgtcagg

SEQ ID NO: 4256048 - DNA, 25 bp, Homo sapien
aagagtcccgaccagcaatttcttc

SEQ ID NO: 4256049 - DNA, 25 bp, Homo sapien
ccgatctgtcctgtcagtctacttg

SEQ ID NO: 4256050 - DNA, 25 bp, Homo sapien
tgcaggtgtagaagagtcccgacca

SEQ ID NO: 4256051 - DNA, 25 bp, Homo sapien
aggccccaggaaccgatctgtcctg

SEQ ID NO: 4256052 - DNA, 25 bp, Homo sapien
cagggaaaggggaataagtgatcca

SEQ ID NO: 4256053 - DNA, 25 bp, Homo sapien
aaaggggaataagtgatccatcctc

SEQ ID NO: 4256054 - DNA, 25 bp, Homo sapien
gggaaaggggaataagtgatccatc

SEQ ID NO: 4256055 - DNA, 25 bp, Homo sapien
gaaaggggaataagtgatccatcct

SEQ ID NO: 4256056 - DNA, 25 bp, Homo sapien
tttgtttgacccattaagattgatt

SEQ ID NO: 4256057 - DNA, 25 bp, Homo sapien
gacccattaagattgattaatctga

SEQ ID NO: 4256058 - DNA, 25 bp, Homo sapien
cattaagattgattaatctgactcc

SEQ ID NO: 4256059 - DNA, 25 bp, Homo sapien
taagattgattaatctgactccaaa

SEQ ID NO: 4256060 - DNA, 25 bp, Homo sapien
caggaggaaagcatcgctgtggttt

SEQ ID NO: 4256061 - DNA, 25 bp, Homo sapien
tctgatgacgtcagtgtctccaaat

SEQ ID NO: 4256062 - DNA, 25 bp, Homo sapien
tggttttactgaacagatggtctga

SEQ ID NO: 4256063 - DNA, 25 bp, Homo sapien
cagatggtctgatgacgtcagtgtc

SEQ ID NO: 4256064 - DNA, 25 bp, Homo sapien
gaaagtcacatgggatgatttcttt

SEQ ID NO: 4256065 - DNA, 25 bp, Homo sapien
atcgaagcccaagcttgatggcaga

SEQ ID NO: 4256066 - DNA, 25 bp, Homo sapien
ttaacatcgaagcccaagcttgatg

SEQ ID NO: 4256067 - DNA, 25 bp, Homo sapien
aagctctacgaggaatctttttctc

SEQ ID NO: 4256068 - DNA, 25 bp, Homo sapien
agttgtcagctgcataaagtgatgc

SEQ ID NO: 4256069 - DNA, 25 bp, Homo sapien
tatttccattatgcaaagttgtcag

SEQ ID NO: 4256070 - DNA, 25 bp, Homo sapien
tccattatgcaaagttgtcagctgc

SEQ ID NO: 4256071 - DNA, 25 bp, Homo sapien
tgcatgccagtgtctgggtctttat

SEQ ID NO: 4256072 - DNA, 25 bp, Homo sapien
attggacacaagctctttgttcgct

SEQ ID NO: 4256073 - DNA, 25 bp, Homo sapien
ctttgttcgctgacttattgcatga

SEQ ID NO: 4256074 - DNA, 25 bp, Homo sapien
caagctctttgttcgctgacttatt

SEQ ID NO: 4256075 - DNA, 25 bp, Homo sapien
ttcgctgacttattgcatgattctc

SEQ ID NO: 4256076 - DNA, 25 bp, Homo sapien
ccctttaagtaacctgcgtgtcaga

SEQ ID NO: 4256077 - DNA, 25 bp, Homo sapien
gaaaacgtctgcaggattccgaaca

SEQ ID NO: 4256078 - DNA, 25 bp, Homo sapien
atggatgtggcccatgaccctggca

SEQ ID NO: 4256079 - DNA, 25 bp, Homo sapien
aagtgcatctctaaggccagatcca

SEQ ID NO: 4256080 - DNA, 25 bp, Homo sapien
catgatctgcttttcaaggggaaga

SEQ ID NO: 4256081 - DNA, 25 bp, Homo sapien
gacaatggttctgaaacactggctg

SEQ ID NO: 4256082 - DNA, 25 bp, Homo sapien
ttctcgaaaacccatgatctgcttt

SEQ ID NO: 4256083 - DNA, 25 bp, Homo sapien
agatgaaagcgccaggattagacaa

SEQ ID NO: 4256084 - DNA, 25 bp, Homo sapien
ttctgccagcggccagaggcttatc

SEQ ID NO: 4256085 - DNA, 25 bp, Homo sapien
ccagaggcttatcacacatcaaatt

SEQ ID NO: 4256086 - DNA, 25 bp, Homo sapien
cctccttgttctgccagcggccaga

SEQ ID NO: 4256087 - DNA, 25 bp, Homo sapien
cacatctgataggccctccttgttc

SEQ ID NO: 4256088 - DNA, 25 bp, Homo sapien
gcaggtgtgcagtcccgtctggatt

SEQ ID NO: 4256089 - DNA, 25 bp, Homo sapien
cccgtctggattttcacactggaga

SEQ ID NO: 4256090 - DNA, 25 bp, Homo sapien
ttcacactggagaagccaagagccc

SEQ ID NO: 4256091 - DNA, 25 bp, Homo sapien
gagaagccaagagcccagcgtcact

SEQ ID NO: 4256092 - DNA, 25 bp, Homo sapien
tggtactttgcccctatcttctgac

SEQ ID NO: 4256093 - DNA, 25 bp, Homo sapien
ctcttgctcccttccaagttccctg

SEQ ID NO: 4256094 - DNA, 25 bp, Homo sapien
tccctggtactttgcccctatcttc

SEQ ID NO: 4256095 - DNA, 25 bp, Homo sapien
tcttgctcccttccaagttccctgg

SEQ ID NO: 4256096 - DNA, 25 bp, Homo sapien
gtggagtcccgccaagcccacagtt

SEQ ID NO: 4256097 - DNA, 25 bp, Homo sapien
tctcccaccgcagttgtcagacatg

SEQ ID NO: 4256098 - DNA, 25 bp, Homo sapien
agacatgaaagacatccccagctgt

SEQ ID NO: 4256099 - DNA, 25 bp, Homo sapien
gttgtcagacatgaaagacatcccc

SEQ ID NO: 4256100 - DNA, 25 bp, Homo sapien
gtagaatcttctccaatcgtttgtc

SEQ ID NO: 4256101 - DNA, 25 bp, Homo sapien
tgatactacgtgcatccactgttgt

SEQ ID NO: 4256102 - DNA, 25 bp, Homo sapien
gtcttttctcttgatactacgtgca

SEQ ID NO: 4256103 - DNA, 25 bp, Homo sapien
cttcttcgtccatatgaggtcgttc

SEQ ID NO: 4256104 - DNA, 25 bp, Homo sapien
tcggacagcggcctcttaaaactcc

SEQ ID NO: 4256105 - DNA, 25 bp, Homo sapien
tctgatgctcctctatgcttccaca

SEQ ID NO: 4256106 - DNA, 25 bp, Homo sapien
gactgtacaataggcacatgctccc

SEQ ID NO: 4256107 - DNA, 25 bp, Homo sapien
ctatgcttccacatggagactgtac

SEQ ID NO: 4256108 - DNA, 25 bp, Homo sapien
cggtggcagtagtcaggatggagcc

SEQ ID NO: 4256109 - DNA, 25 bp, Homo sapien
tagtcaggatggagccttcctcatg

SEQ ID NO: 4256110 - DNA, 25 bp, Homo sapien
tctgaaccaccaactggccctttct

SEQ ID NO: 4256111 - DNA, 25 bp, Homo sapien
catggacctgaagacttctctctga

SEQ ID NO: 4256112 - DNA, 25 bp, Homo sapien
ttaatgttttactgctgaagagaca

SEQ ID NO: 4256113 - DNA, 25 bp, Homo sapien
agttttttcagtaaagcgctgagtg

SEQ ID NO: 4256114 - DNA, 25 bp, Homo sapien
tttttcagtaaagcgctgagtgact

SEQ ID NO: 4256115 - DNA, 25 bp, Homo sapien
ttcagtaaagcgctgagtgactgct

SEQ ID NO: 4256116 - DNA, 25 bp, Homo sapien
ttttttcagtaaagcgctgagtgac

SEQ ID NO: 4256117 - DNA, 25 bp, Homo sapien
gttatcctctgaatttagcactgag

SEQ ID NO: 4256118 - DNA, 25 bp, Homo sapien
tactgttatcctctgaatttagcac

SEQ ID NO: 4256119 - DNA, 25 bp, Homo sapien
ctaagttactgttatcctctgaatt

SEQ ID NO: 4256120 - DNA, 25 bp, Homo sapien
agttactgttatcctctgaatttag

SEQ ID NO: 4256121 - DNA, 25 bp, Homo sapien
ctgtggatgctcttacacctcggca

SEQ ID NO: 4256122 - DNA, 25 bp, Homo sapien
tctagaaacttataggtgcctctgc

SEQ ID NO: 4256123 - DNA, 25 bp, Homo sapien
cagtctgctgatatgccggctctag

SEQ ID NO: 4256124 - DNA, 25 bp, Homo sapien
gacctcagatctggagtcacactgg

SEQ ID NO: 4256125 - DNA, 25 bp, Homo sapien
tattgtccgttaaggtttgcaaatg

SEQ ID NO: 4256126 - DNA, 25 bp, Homo sapien
ctctttccaatcagcattcatattg

SEQ ID NO: 4256127 - DNA, 25 bp, Homo sapien
tttgcaaatgttggtctgcatccac

SEQ ID NO: 4256128 - DNA, 25 bp, Homo sapien
tgtgagctccaattgctctctttcc

SEQ ID NO: 4256129 - DNA, 25 bp, Homo sapien
aggtcaggaaacaggtcaccatttt

SEQ ID NO: 4256130 - DNA, 25 bp, Homo sapien
gtcaggaaacaggtcaccattttta

SEQ ID NO: 4256131 - DNA, 25 bp, Homo sapien
tcaggaaacaggtcaccatttttat

SEQ ID NO: 4256132 - DNA, 25 bp, Homo sapien
caggaaacaggtcaccatttttatc

SEQ ID NO: 4256133 - DNA, 25 bp, Homo sapien
ccttctgggtaacaagattaatctg

SEQ ID NO: 4256134 - DNA, 25 bp, Homo sapien
ctctctcatgtgaatgccatatgtc

SEQ ID NO: 4256135 - DNA, 25 bp, Homo sapien
tctctcatgtgaatgccatatgtct

SEQ ID NO: 4256136 - DNA, 25 bp, Homo sapien
ggtaacaagattaatctgtcttttc

SEQ ID NO: 4256137 - DNA, 25 bp, Homo sapien
gaagcatactcacaggctactatga

SEQ ID NO: 4256138 - DNA, 25 bp, Homo sapien
tacaaaaacacgaattcagaggatc

SEQ ID NO: 4256139 - DNA, 25 bp, Homo sapien
ctatttctgttagtgtgtaggccca

SEQ ID NO: 4256140 - DNA, 25 bp, Homo sapien
cagaggatcggaagaattaaaacgc

SEQ ID NO: 4256141 - DNA, 25 bp, Homo sapien
tagtttctcctttgcgccctgcggg

SEQ ID NO: 4256142 - DNA, 25 bp, Homo sapien
agttcaccccgcctctggactatta

SEQ ID NO: 4256143 - DNA, 25 bp, Homo sapien
aatgaaagccaggtctttaagttca

SEQ ID NO: 4256144 - DNA, 25 bp, Homo sapien
tacaacaccacgctaatgaaagcca

SEQ ID NO: 4256145 - DNA, 25 bp, Homo sapien
tccgataattctgccgccgcgactt

SEQ ID NO: 4256146 - DNA, 25 bp, Homo sapien
ttcccctgcaggaatcttccgataa

SEQ ID NO: 4256147 - DNA, 25 bp, Homo sapien
cgggttatttttggcgcccgcagag

SEQ ID NO: 4256148 - DNA, 25 bp, Homo sapien
cggcgccggagctgactcgtctctc

SEQ ID NO: 4256149 - DNA, 25 bp, Homo sapien
gggagaagggcgctcatcgcccacc

SEQ ID NO: 4256150 - DNA, 25 bp, Homo sapien
cctcagccgtccttggattctattt

SEQ ID NO: 4256151 - DNA, 25 bp, Homo sapien
ccaagggcgccctgaaagccggagt

SEQ ID NO: 4256152 - DNA, 25 bp, Homo sapien
ggaggaagcccactgctaacaggaa

SEQ ID NO: 4256153 - DNA, 25 bp, Homo sapien
tacgtggtgagacctgctaaagccc

SEQ ID NO: 4256154 - DNA, 25 bp, Homo sapien
tgctgtggacacttgtacgtggtga

SEQ ID NO: 4256155 - DNA, 25 bp, Homo sapien
ctatttagggccgtgccttttacag

SEQ ID NO: 4256156 - DNA, 25 bp, Homo sapien
taatcaaactcagataccaattggt

SEQ ID NO: 4256157 - DNA, 25 bp, Homo sapien
tggtgagatgtgtggcctctgtggc

SEQ ID NO: 4256158 - DNA, 25 bp, Homo sapien
tgagatgtgtggcctctgtggcagt

SEQ ID NO: 4256159 - DNA, 25 bp, Homo sapien
gagatgtgtggcctctgtggcagtg

SEQ ID NO: 4256160 - DNA, 25 bp, Homo sapien
ggtgagatgtgtggcctctgtggca

SEQ ID NO: 4256161 - DNA, 25 bp, Homo sapien
tggttgccagacagtaaagtaagac

SEQ ID NO: 4256162 - DNA, 25 bp, Homo sapien
ggaggatggcttagaagataccacc

SEQ ID NO: 4256163 - DNA, 25 bp, Homo sapien
tgtcctcatcattactggttgccag

SEQ ID NO: 4256164 - DNA, 25 bp, Homo sapien
ccaccaaaataacagggcttgataa

SEQ ID NO: 4256165 - DNA, 25 bp, Homo sapien
tggagctttctacatccctgcttag

SEQ ID NO: 4256166 - DNA, 25 bp, Homo sapien
aacatttgatgcgttgactgcccgc

SEQ ID NO: 4256167 - DNA, 25 bp, Homo sapien
agttttgtcaagtctgctggccagt

SEQ ID NO: 4256168 - DNA, 25 bp, Homo sapien
cagttgtcaatttggccagagtcag

SEQ ID NO: 4256169 - DNA, 25 bp, Homo sapien
ttggtggagtgacaaaggttggcag

SEQ ID NO: 4256170 - DNA, 25 bp, Homo sapien
aagccgggacccgtgaatgcacagc

SEQ ID NO: 4256171 - DNA, 25 bp, Homo sapien
ggaacagcataagccgggacccgtg

SEQ ID NO: 4256172 - DNA, 25 bp, Homo sapien
gggacccgtgaatgcacagcacagc

SEQ ID NO: 4256173 - DNA, 25 bp, Homo sapien
ttggggtgttggggattgaggctgt

SEQ ID NO: 4256174 - DNA, 25 bp, Homo sapien
tgttggggattgaggctgtgttcca

SEQ ID NO: 4256175 - DNA, 25 bp, Homo sapien
gtgttggggattgaggctgtgttcc

SEQ ID NO: 4256176 - DNA, 25 bp, Homo sapien
gggtgttggggattgaggctgtgtt

SEQ ID NO: 4256177 - DNA, 25 bp, Homo sapien
gcacatgcataagtgttcttcttgg

SEQ ID NO: 4256178 - DNA, 25 bp, Homo sapien
caaagattctgtgaacatggacttc

SEQ ID NO: 4256179 - DNA, 25 bp, Homo sapien
tcttgggaatcctcattgcaaagat

SEQ ID NO: 4256180 - DNA, 25 bp, Homo sapien
gagtcacctgaggtattggcacatg

SEQ ID NO: 4256181 - DNA, 25 bp, Homo sapien
gagtcacttgatcatggattccaga

SEQ ID NO: 4256182 - DNA, 25 bp, Homo sapien
tacttgagtcacttgatcatggatt

SEQ ID NO: 4256183 - DNA, 25 bp, Homo sapien
caataggtacttgagtcacttgatc

SEQ ID NO: 4256184 - DNA, 25 bp, Homo sapien
acaataggtacttgagtcacttgat

SEQ ID NO: 4256185 - DNA, 25 bp, Homo sapien
agaaagtgtgaattggtgaatctca

SEQ ID NO: 4256186 - DNA, 25 bp, Homo sapien
actttgagaaagtgtgaattggtga

SEQ ID NO: 4256187 - DNA, 25 bp, Homo sapien
gaaagtgtgaattggtgaatctcac

SEQ ID NO: 4256188 - DNA, 25 bp, Homo sapien
gagaaagtgtgaattggtgaatctc

SEQ ID NO: 4256189 - DNA, 25 bp, Homo sapien
ggtgctgcatgcatacattcaaagg

SEQ ID NO: 4256190 - DNA, 25 bp, Homo sapien
tgtgctaattggtagccctgaggtc

SEQ ID NO: 4256191 - DNA, 25 bp, Homo sapien
ggagaattctctctgtatcctgaca

SEQ ID NO: 4256192 - DNA, 25 bp, Homo sapien
caagaccctccaagtaaggcctgca

SEQ ID NO: 4256193 - DNA, 25 bp, Homo sapien
gaattttcggatatgtgttgtagga

SEQ ID NO: 4256194 - DNA, 25 bp, Homo sapien
tgtgttgtaggaatctatctctttt

SEQ ID NO: 4256195 - DNA, 25 bp, Homo sapien
ttcatccggaattttcggatatgtg

SEQ ID NO: 4256196 - DNA, 25 bp, Homo sapien
ccggaattttcggatatgtgttgta

SEQ ID NO: 4256197 - DNA, 25 bp, Homo sapien
ttctgtccatccttaccacgttgta

SEQ ID NO: 4256198 - DNA, 25 bp, Homo sapien
tttctgtccatccttaccacgttgt

SEQ ID NO: 4256199 - DNA, 25 bp, Homo sapien
tctgtccatccttaccacgttgtat

SEQ ID NO: 4256200 - DNA, 25 bp, Homo sapien
gagaaggagtgcgtccttccctccc

SEQ ID NO: 4256201 - DNA, 25 bp, Homo sapien
ttcctgctggcaggctagaaaacaa

SEQ ID NO: 4256202 - DNA, 25 bp, Homo sapien
ctgaaagagaaggagtgcgtccttc

SEQ ID NO: 4256203 - DNA, 25 bp, Homo sapien
aggagtgcgtccttccctcccaggt

SEQ ID NO: 4256204 - DNA, 25 bp, Homo sapien
gatgctcctttaaggggtcaccaca

SEQ ID NO: 4256205 - DNA, 25 bp, Homo sapien
tctgtcctagcagggagccagacat

SEQ ID NO: 4256206 - DNA, 25 bp, Homo sapien
catggcaggagatgcgggatgctcc

SEQ ID NO: 4256207 - DNA, 25 bp, Homo sapien
tttcagcaccgaagcacatggcagg

SEQ ID NO: 4256208 - DNA, 25 bp, Homo sapien
ctttctcttagagttatgtcatacg

SEQ ID NO: 4256209 - DNA, 25 bp, Homo sapien
ccatcacatcggatccctttgttag

SEQ ID NO: 4256210 - DNA, 25 bp, Homo sapien
tttgttagccaacagatgcctgtta

SEQ ID NO: 4256211 - DNA, 25 bp, Homo sapien
tatgtcatacgtttcactacttttc

SEQ ID NO: 4256212 - DNA, 25 bp, Homo sapien
tctgaattctgccatacacccaggc

SEQ ID NO: 4256213 - DNA, 25 bp, Homo sapien
tgcttccacatttatcctcaccctc

SEQ ID NO: 4256214 - DNA, 25 bp, Homo sapien
gcttccacatttatcctcaccctca

SEQ ID NO: 4256215 - DNA, 25 bp, Homo sapien
tgaattctgccatacacccaggctt

SEQ ID NO: 4256216 - DNA, 25 bp, Homo sapien
gacagaagtccaggatgattgcatt

SEQ ID NO: 4256217 - DNA, 25 bp, Homo sapien
gacctgcctgagacaacaggactct

SEQ ID NO: 4256218 - DNA, 25 bp, Homo sapien
cattgggaaaaggaagtcgctggac

SEQ ID NO: 4256219 - DNA, 25 bp, Homo sapien
aaaggaagtcgctggactgaaatcc

SEQ ID NO: 4256220 - DNA, 25 bp, Homo sapien
caatatctgtggaggtgtagctctc

SEQ ID NO: 4256221 - DNA, 25 bp, Homo sapien
tctctttggctcaggtctggtgtga

SEQ ID NO: 4256222 - DNA, 25 bp, Homo sapien
gctggtggtactctgtattaggttg

SEQ ID NO: 4256223 - DNA, 25 bp, Homo sapien
gcagtgccttaattcccgttttaga

SEQ ID NO: 4256224 - DNA, 25 bp, Homo sapien
gaagagttcaaccttgcccatccag

SEQ ID NO: 4256225 - DNA, 25 bp, Homo sapien
gagttcaaccttgcccatccaggtg

SEQ ID NO: 4256226 - DNA, 25 bp, Homo sapien
cagggagggaagagttcaaccttgc

SEQ ID NO: 4256227 - DNA, 25 bp, Homo sapien
aaccttgcccatccaggtggttgct

SEQ ID NO: 4256228 - DNA, 25 bp, Homo sapien
catcagcctgttttaggagaagagc

SEQ ID NO: 4256229 - DNA, 25 bp, Homo sapien
ccctcaaggcgttgattgaaaatgc

SEQ ID NO: 4256230 - DNA, 25 bp, Homo sapien
gagaagagccttgtgcatgaatgca

SEQ ID NO: 4256231 - DNA, 25 bp, Homo sapien
tagttgtcaggtgtaatctcatgtc

SEQ ID NO: 4256232 - DNA, 25 bp, Homo sapien
cgtgtgttactcaggagtctcaagt

SEQ ID NO: 4256233 - DNA, 25 bp, Homo sapien
agtctcaagttggtgtgtgaggcac

SEQ ID NO: 4256234 - DNA, 25 bp, Homo sapien
gagggactgagctttcaggtactga

SEQ ID NO: 4256235 - DNA, 25 bp, Homo sapien
tactgaccataatagctgtgtgcag

SEQ ID NO: 4256236 - DNA, 25 bp, Homo sapien
aaagtgatctctcacagttacggca

SEQ ID NO: 4256237 - DNA, 25 bp, Homo sapien
gtaacaccatgggacctatatgaag

SEQ ID NO: 4256238 - DNA, 25 bp, Homo sapien
cacttaaagcccatacatgacgtct

SEQ ID NO: 4256239 - DNA, 25 bp, Homo sapien
tcattccagtaagttgcattcacag

SEQ ID NO: 4256240 - DNA, 25 bp, Homo sapien
tctgaacctgaagattgttttcaca

SEQ ID NO: 4256241 - DNA, 25 bp, Homo sapien
ttgtcactatccctaagcagcggcg

SEQ ID NO: 4256242 - DNA, 25 bp, Homo sapien
gcggcagcagcaaccttgacaccgt

SEQ ID NO: 4256243 - DNA, 25 bp, Homo sapien
ttgacaccgtcctgaatctgccttc

SEQ ID NO: 4256244 - DNA, 25 bp, Homo sapien
gttcaactgcagtcacaggttcaca

SEQ ID NO: 4256245 - DNA, 25 bp, Homo sapien
cactgggtcatgctcctttcgcatc

SEQ ID NO: 4256246 - DNA, 25 bp, Homo sapien
ctgggtcatgctcctttcgcatccc

SEQ ID NO: 4256247 - DNA, 25 bp, Homo sapien
aacactgggtcatgctcctttcgca

SEQ ID NO: 4256248 - DNA, 25 bp, Homo sapien
caacactgggtcatgctcctttcgc

SEQ ID NO: 4256249 - DNA, 25 bp, Homo sapien
agtgggagtctcacatctcttctct

SEQ ID NO: 4256250 - DNA, 25 bp, Homo sapien
gtgggagtctcacatctcttctctt

SEQ ID NO: 4256251 - DNA, 25 bp, Homo sapien
tgggagtctcacatctcttctcttc

SEQ ID NO: 4256252 - DNA, 25 bp, Homo sapien
attagcataacaggaagtaggacca

SEQ ID NO: 4256253 - DNA, 25 bp, Homo sapien
ttagcataacaggaagtaggaccat

SEQ ID NO: 4256254 - DNA, 25 bp, Homo sapien
cttattagcataacaggaagtagga

SEQ ID NO: 4256255 - DNA, 25 bp, Homo sapien
tattagcataacaggaagtaggacc

SEQ ID NO: 4256256 - DNA, 25 bp, Homo sapien
tttgcgttctttctatccctcgtct

SEQ ID NO: 4256257 - DNA, 25 bp, Homo sapien
tccaagtccagatgctggtcccagc

SEQ ID NO: 4256258 - DNA, 25 bp, Homo sapien
taaatctgccttctgagagtccaag

SEQ ID NO: 4256259 - DNA, 25 bp, Homo sapien
gtcctcagtggagcttaaatctgcc

SEQ ID NO: 4256260 - DNA, 25 bp, Homo sapien
agtgaaccgagatacccacagctgc

SEQ ID NO: 4256261 - DNA, 25 bp, Homo sapien
tttcaacagctttaagcaacagcag

SEQ ID NO: 4256262 - DNA, 25 bp, Homo sapien
ggtctgtagtaatgtgcacctcaga

SEQ ID NO: 4256263 - DNA, 25 bp, Homo sapien
tgcttttggtaaggtttcaacagct

SEQ ID NO: 4256264 - DNA, 25 bp, Homo sapien
gtgtgggagggaaggctcatagcca

SEQ ID NO: 4256265 - DNA, 25 bp, Homo sapien
tgggagggaaggctcatagccagag

SEQ ID NO: 4256266 - DNA, 25 bp, Homo sapien
ctagctgataaagtccttcacaagg

SEQ ID NO: 4256267 - DNA, 25 bp, Homo sapien
ctgataaagtccttcacaaggcatt

SEQ ID NO: 4256268 - DNA, 25 bp, Homo sapien
gctggaatgctgacaagagggcggc

SEQ ID NO: 4256269 - DNA, 25 bp, Homo sapien
ctggaatgctgacaagagggcggcc

SEQ ID NO: 4256270 - DNA, 25 bp, Homo sapien
ctgctggaatgctgacaagagggcg

SEQ ID NO: 4256271 - DNA, 25 bp, Homo sapien
tgctggaatgctgacaagagggcgg

SEQ ID NO: 4256272 - DNA, 25 bp, Homo sapien
ctgagagagaattagtttgagcatg

SEQ ID NO: 4256273 - DNA, 25 bp, Homo sapien
gcatgaagtagccacatgcattatc

SEQ ID NO: 4256274 - DNA, 25 bp, Homo sapien
gagagagaattagtttgagcatgaa

SEQ ID NO: 4256275 - DNA, 25 bp, Homo sapien
agagaattagtttgagcatgaagta

SEQ ID NO: 4256276 - DNA, 25 bp, Homo sapien
cccattcctgccaacactctgtgta

SEQ ID NO: 4256277 - DNA, 25 bp, Homo sapien
ctgtctagccacattccacgctgag

SEQ ID NO: 4256278 - DNA, 25 bp, Homo sapien
cagtctcagccctaaggcctgaggt

SEQ ID NO: 4256279 - DNA, 25 bp, Homo sapien
acattccacgctgagtccccggagg

SEQ ID NO: 4256280 - DNA, 25 bp, Homo sapien
tctctagctcatggacctgctccat

SEQ ID NO: 4256281 - DNA, 25 bp, Homo sapien
tagatgagtaactttgcccagtgac

SEQ ID NO: 4256282 - DNA, 25 bp, Homo sapien
cagaaagtgtttgacccatacctga

SEQ ID NO: 4256283 - DNA, 25 bp, Homo sapien
tgaaggccaccggtgacaccagatt

SEQ ID NO: 4256284 - DNA, 25 bp, Homo sapien
tctggccctgcactttgacgttaac

SEQ ID NO: 4256285 - DNA, 25 bp, Homo sapien
aggaagctgtgcatggaccactggg

SEQ ID NO: 4256286 - DNA, 25 bp, Homo sapien
acagctgggtagctcaggaccaggg

SEQ ID NO: 4256287 - DNA, 25 bp, Homo sapien
gacagctgggtagctcaggaccagg

SEQ ID NO: 4256288 - DNA, 25 bp, Homo sapien
aagctgtgcatggaccactgggccc

SEQ ID NO: 4256289 - DNA, 25 bp, Homo sapien
aaagagctagtcatccctggcatgg

SEQ ID NO: 4256290 - DNA, 25 bp, Homo sapien
caggcaaggcaaatcacagggaggt

SEQ ID NO: 4256291 - DNA, 25 bp, Homo sapien
tcacaggttattcttaggaggccag

SEQ ID NO: 4256292 - DNA, 25 bp, Homo sapien
gatggaattggttggagccgccaca

SEQ ID NO: 4256293 - DNA, 25 bp, Homo sapien
tggaaatcaggatgaagtcatcgga

SEQ ID NO: 4256294 - DNA, 25 bp, Homo sapien
tccaggggactcacaatggtgaagc

SEQ ID NO: 4256295 - DNA, 25 bp, Homo sapien
ccagaggtgcttctgagggtgcgaa

SEQ ID NO: 4256296 - DNA, 25 bp, Homo sapien
tgctgctgtcgtcatcaggactgga

SEQ ID NO: 4256297 - DNA, 25 bp, Homo sapien
ccataactgggagctcatgagagca

SEQ ID NO: 4256298 - DNA, 25 bp, Homo sapien
cacttggctctcttggcgcatgttc

SEQ ID NO: 4256299 - DNA, 25 bp, Homo sapien
ggctgtggaagccttcggaacttcc

SEQ ID NO: 4256300 - DNA, 25 bp, Homo sapien
gaggaggaaaacttagccagctcca

SEQ ID NO: 4256301 - DNA, 25 bp, Homo sapien
taaaactcttttcaggagtactagc

SEQ ID NO: 4256302 - DNA, 25 bp, Homo sapien
aaaactcttttcaggagtactagct

SEQ ID NO: 4256303 - DNA, 25 bp, Homo sapien
tgttcgttctcttcggcctctagct

SEQ ID NO: 4256304 - DNA, 25 bp, Homo sapien
tctagctggctctggttaaaacgca

SEQ ID NO: 4256305 - DNA, 25 bp, Homo sapien
cagtagtggttgtccgcaatggtga

SEQ ID NO: 4256306 - DNA, 25 bp, Homo sapien
acatttgaacgctctggccttggcc

SEQ ID NO: 4256307 - DNA, 25 bp, Homo sapien
tgttttaatcctgccagggaaacca

SEQ ID NO: 4256308 - DNA, 25 bp, Homo sapien
ttcttgtaatatcacatcttgaata

SEQ ID NO: 4256309 - DNA, 25 bp, Homo sapien
ccagaatttgatcttctttttccaa

SEQ ID NO: 4256310 - DNA, 25 bp, Homo sapien
tgccagggaaaccagaatttgatct

SEQ ID NO: 4256311 - DNA, 25 bp, Homo sapien
gttgctacgggactcctagattcca

SEQ ID NO: 4256312 - DNA, 25 bp, Homo sapien
ttaagactgttccagttgctacggg

SEQ ID NO: 4256313 - DNA, 25 bp, Homo sapien
ttccagttgctacgggactcctaga

SEQ ID NO: 4256314 - DNA, 25 bp, Homo sapien
gactgttccagttgctacgggactc

SEQ ID NO: 4256315 - DNA, 25 bp, Homo sapien
catgagatgcttgtggtggctccaa

SEQ ID NO: 4256316 - DNA, 25 bp, Homo sapien
tgagatgcttgtggtggctccaaag

SEQ ID NO: 4256317 - DNA, 25 bp, Homo sapien
atgagatgcttgtggtggctccaaa

SEQ ID NO: 4256318 - DNA, 25 bp, Homo sapien
tgtagtaagcctgtttccacagacg

SEQ ID NO: 4256319 - DNA, 25 bp, Homo sapien
ggttttgtggctattggatcattag

SEQ ID NO: 4256320 - DNA, 25 bp, Homo sapien
tgtttccacagacgatgaggtagat

SEQ ID NO: 4256321 - DNA, 25 bp, Homo sapien
cacagacgatgaggtagatgggttt

SEQ ID NO: 4256322 - DNA, 25 bp, Homo sapien
ctcatcaatgaaagggcaagctgct

SEQ ID NO: 4256323 - DNA, 25 bp, Homo sapien
cagtactctcaacagaagcatggga

SEQ ID NO: 4256324 - DNA, 25 bp, Homo sapien
tggactctcgttgccagctagctgg

SEQ ID NO: 4256325 - DNA, 25 bp, Homo sapien
cagactagcgtaggttgctcaccca

SEQ ID NO: 4256326 - DNA, 25 bp, Homo sapien
ctcacaggtgggatgcatcctgatt

SEQ ID NO: 4256327 - DNA, 25 bp, Homo sapien
gggatgcatcctgatttcttataat

SEQ ID NO: 4256328 - DNA, 25 bp, Homo sapien
ggtgggatgcatcctgatttcttat

SEQ ID NO: 4256329 - DNA, 25 bp, Homo sapien
gccttggtggattctctttggtttc

SEQ ID NO: 4256330 - DNA, 25 bp, Homo sapien
caagatgagtgtccatcacctttgc

SEQ ID NO: 4256331 - DNA, 25 bp, Homo sapien
gtccatcacctttgcacagtatttg

SEQ ID NO: 4256332 - DNA, 25 bp, Homo sapien
gatgagtgtccatcacctttgcaca

SEQ ID NO: 4256333 - DNA, 25 bp, Homo sapien
gagtgtccatcacctttgcacagta

SEQ ID NO: 4256334 - DNA, 25 bp, Homo sapien
gtcattcaactgcccttgaaggaag

SEQ ID NO: 4256335 - DNA, 25 bp, Homo sapien
ggtcattcaactgcccttgaaggaa

SEQ ID NO: 4256336 - DNA, 25 bp, Homo sapien
tctagaggacgccagagcaaagcct

SEQ ID NO: 4256337 - DNA, 25 bp, Homo sapien
aatctgcagcttaactagggcccca

SEQ ID NO: 4256338 - DNA, 25 bp, Homo sapien
tctagagtgaaacgcaaggttccgc

SEQ ID NO: 4256339 - DNA, 25 bp, Homo sapien
catttgcagattacgtaggacaccc

SEQ ID NO: 4256340 - DNA, 25 bp, Homo sapien
cgtgagctcggttttaagaccctgg

SEQ ID NO: 4256341 - DNA, 25 bp, Homo sapien
gagattccgggtgcttactgccagc

SEQ ID NO: 4256342 - DNA, 25 bp, Homo sapien
ttctctaggcaaatatgaaccccag

SEQ ID NO: 4256343 - DNA, 25 bp, Homo sapien
tactgccagcaatacttccaggtgt

SEQ ID NO: 4256344 - DNA, 25 bp, Homo sapien
ttgcagataaggtggttaaaacgcc

SEQ ID NO: 4256345 - DNA, 25 bp, Homo sapien
taaatgcttgcactaaaggtgccag

SEQ ID NO: 4256346 - DNA, 25 bp, Homo sapien
agaagctgagtgtcttgccccaaga

SEQ ID NO: 4256347 - DNA, 25 bp, Homo sapien
taggtgttaaactacagtcatgtgc

SEQ ID NO: 4256348 - DNA, 25 bp, Homo sapien
cacaggctttgacaaaaaggcattt

SEQ ID NO: 4256349 - DNA, 25 bp, Homo sapien
tataaaactgggcactaacagagct

SEQ ID NO: 4256350 - DNA, 25 bp, Homo sapien
cagagctttcataaatgcagcactc

SEQ ID NO: 4256351 - DNA, 25 bp, Homo sapien
tccagtgtaatataggctacagcct

SEQ ID NO: 4256352 - DNA, 25 bp, Homo sapien
caacgcttggagatgaactgatgtt

SEQ ID NO: 4256353 - DNA, 25 bp, Homo sapien
tgagcgagaacgtgagatgttgcta

SEQ ID NO: 4256354 - DNA, 25 bp, Homo sapien
tttctgcccatagttttgctgtgtg

SEQ ID NO: 4256355 - DNA, 25 bp, Homo sapien
ggtggagagccagtgaattctcttc

SEQ ID NO: 4256356 - DNA, 25 bp, Homo sapien
actgtagagctcgaaagagggtgac

SEQ ID NO: 4256357 - DNA, 25 bp, Homo sapien
ttcactgggcatagaagttttaggg

SEQ ID NO: 4256358 - DNA, 25 bp, Homo sapien
agatacattgtgcatcctcctgtgg

SEQ ID NO: 4256359 - DNA, 25 bp, Homo sapien
caggaatagggtaagctaatatgcc

SEQ ID NO: 4256360 - DNA, 25 bp, Homo sapien
agtggagattcctgactgcaaaatg

SEQ ID NO: 4256361 - DNA, 25 bp, Homo sapien
gtggagattcctgactgcaaaatgg

SEQ ID NO: 4256362 - DNA, 25 bp, Homo sapien
ctgaatgagcttcataggcatcagt

SEQ ID NO: 4256363 - DNA, 25 bp, Homo sapien
atgagcttcataggcatcagtggag

SEQ ID NO: 4256364 - DNA, 25 bp, Homo sapien
tcataagaaacttaacaatggttac

SEQ ID NO: 4256365 - DNA, 25 bp, Homo sapien
tgtgactcccacattatgcctcaat

SEQ ID NO: 4256366 - DNA, 25 bp, Homo sapien
ggtccagagagaaagtcacctccaa

SEQ ID NO: 4256367 - DNA, 25 bp, Homo sapien
tgttctaccaacttgttgcttttca

SEQ ID NO: 4256368 - DNA, 25 bp, Homo sapien
tcagttagagtctggacaggaacag

SEQ ID NO: 4256369 - DNA, 25 bp, Homo sapien
gaacagaaacctgagcatcgcttcc

SEQ ID NO: 4256370 - DNA, 25 bp, Homo sapien
gcatcgcttcctgtaactacatcgc

SEQ ID NO: 4256371 - DNA, 25 bp, Homo sapien
cttggaggtcagttagagtctggac

SEQ ID NO: 4256372 - DNA, 25 bp, Homo sapien
tagtcatttggcttagttcctcaga

SEQ ID NO: 4256373 - DNA, 25 bp, Homo sapien
tagaattacaactgactacagcttg

SEQ ID NO: 4256374 - DNA, 25 bp, Homo sapien
gccctagtgataatcatgttccaaa

SEQ ID NO: 4256375 - DNA, 25 bp, Homo sapien
gggatcagttaaaatgccctagtga

SEQ ID NO: 4256376 - DNA, 25 bp, Homo sapien
acacactcattgaataatactcaac

SEQ ID NO: 4256377 - DNA, 25 bp, Homo sapien
cactcattgaataatactcaacatt

SEQ ID NO: 4256378 - DNA, 25 bp, Homo sapien
catttgtatcattgggaaagaaagt

SEQ ID NO: 4256379 - DNA, 25 bp, Homo sapien
aacatttgtatcattgggaaagaaa

SEQ ID NO: 4256380 - DNA, 25 bp, Homo sapien
tctagagtacagttagcagagtcct

SEQ ID NO: 4256381 - DNA, 25 bp, Homo sapien
caaactgcttgtgaggtcttaggat

SEQ ID NO: 4256382 - DNA, 25 bp, Homo sapien
cagaaattagcttacctgagtccca

SEQ ID NO: 4256383 - DNA, 25 bp, Homo sapien
gagggatccctttaagacatgaatg

SEQ ID NO: 4256384 - DNA, 25 bp, Homo sapien
caattgcacaggcatgctttctgat

SEQ ID NO: 4256385 - DNA, 25 bp, Homo sapien
ttctgatttcatcagcctctgctgc

SEQ ID NO: 4256386 - DNA, 25 bp, Homo sapien
gctttctgatttcatcagcctctgc

SEQ ID NO: 4256387 - DNA, 25 bp, Homo sapien
ctttgttcaattgcacaggcatgct

SEQ ID NO: 4256388 - DNA, 25 bp, Homo sapien
ttgctgttgcaagtgatggcttggg

SEQ ID NO: 4256389 - DNA, 25 bp, Homo sapien
tgaggtcctggtaggaattacaaca

SEQ ID NO: 4256390 - DNA, 25 bp, Homo sapien
attacaacagaggaggagctactgc

SEQ ID NO: 4256391 - DNA, 25 bp, Homo sapien
cctggtaggaattacaacagaggag

SEQ ID NO: 4256392 - DNA, 25 bp, Homo sapien
ggccacctgcactgcctggagccat

SEQ ID NO: 4256393 - DNA, 25 bp, Homo sapien
agggccacctgcactgcctggagcc

SEQ ID NO: 4256394 - DNA, 25 bp, Homo sapien
gggccacctgcactgcctggagcca

SEQ ID NO: 4256395 - DNA, 25 bp, Homo sapien
gagaccttatttatattcaggggag

SEQ ID NO: 4256396 - DNA, 25 bp, Homo sapien
gaccttatttatattcaggggagca

SEQ ID NO: 4256397 - DNA, 25 bp, Homo sapien
tagagaccttatttatattcagggg

SEQ ID NO: 4256398 - DNA, 25 bp, Homo sapien
ccttatttatattcaggggagcacc

SEQ ID NO: 4256399 - DNA, 25 bp, Homo sapien
tcaataatgttgaagttatcagttc

SEQ ID NO: 4256400 - DNA, 25 bp, Homo sapien
gttggaggactcagcctacttaaaa

SEQ ID NO: 4256401 - DNA, 25 bp, Homo sapien
tagaaattggaaagttgattgtaaa

SEQ ID NO: 4256402 - DNA, 25 bp, Homo sapien
ggaactagaatagtgaaagtaataa

SEQ ID NO: 4256403 - DNA, 25 bp, Homo sapien
gcaagtatcacaatagtgaattaca

SEQ ID NO: 4256404 - DNA, 25 bp, Homo sapien
tattattatgagttctgttctagac

SEQ ID NO: 4256405 - DNA, 25 bp, Homo sapien
gtatcacaatagtgaattacacaat

SEQ ID NO: 4256406 - DNA, 25 bp, Homo sapien
tagtgagtcttaagctttttgctga

SEQ ID NO: 4256407 - DNA, 25 bp, Homo sapien
ttcttgacctatgagctgcagaaca

SEQ ID NO: 4256408 - DNA, 25 bp, Homo sapien
ctccttgattaatgcttgggtgcaa

SEQ ID NO: 4256409 - DNA, 25 bp, Homo sapien
ggtgcattgttagtcagaagtagta

SEQ ID NO: 4256410 - DNA, 25 bp, Homo sapien
aataaggcctgtgagtcaaaattcc

SEQ ID NO: 4256411 - DNA, 25 bp, Homo sapien
cagaatggccacttaggatcttgtg

SEQ ID NO: 4256412 - DNA, 25 bp, Homo sapien
aagaggatttagcagaccatggcaa

SEQ ID NO: 4256413 - DNA, 25 bp, Homo sapien
gaactgagttgaaatcctcaaagga

SEQ ID NO: 4256414 - DNA, 25 bp, Homo sapien
gcaagagacagaatggccacttagg

SEQ ID NO: 4256415 - DNA, 25 bp, Homo sapien
cggcttttattcatgaggtctgctc

SEQ ID NO: 4256416 - DNA, 25 bp, Homo sapien
ctgctcctcgtgctttgtaataatc

SEQ ID NO: 4256417 - DNA, 25 bp, Homo sapien
gataagtcactggtcttggatttct

SEQ ID NO: 4256418 - DNA, 25 bp, Homo sapien
ggaattgataagtcactggtcttgg

SEQ ID NO: 4256419 - DNA, 25 bp, Homo sapien
agtgaagtaagtagaaggctcattt

SEQ ID NO: 4256420 - DNA, 25 bp, Homo sapien
gaagtaagtagaaggctcatttact

SEQ ID NO: 4256421 - DNA, 25 bp, Homo sapien
tgaagtaagtagaaggctcatttac

SEQ ID NO: 4256422 - DNA, 25 bp, Homo sapien
catttacttcactgtaagtgagcat

SEQ ID NO: 4256423 - DNA, 25 bp, Homo sapien
gctccggacctagccacatggagag

SEQ ID NO: 4256424 - DNA, 25 bp, Homo sapien
cactgggttggacctcgttagttca

SEQ ID NO: 4256425 - DNA, 25 bp, Homo sapien
cagatgaatcctaagtagacaggga

SEQ ID NO: 4256426 - DNA, 25 bp, Homo sapien
tcactttacttttgcagcactgggt

SEQ ID NO: 4256427 - DNA, 25 bp, Homo sapien
agtgagtgtacatccccgatgaatg

SEQ ID NO: 4256428 - DNA, 25 bp, Homo sapien
ctaaggaacagagccttaagaatca

SEQ ID NO: 4256429 - DNA, 25 bp, Homo sapien
catccccgatgaatgggtaatgcat

SEQ ID NO: 4256430 - DNA, 25 bp, Homo sapien
ccttaagaatcagtgagtgtacatc

SEQ ID NO: 4256431 - DNA, 25 bp, Homo sapien
agaaggccgagacaggtctggtagt

SEQ ID NO: 4256432 - DNA, 25 bp, Homo sapien
gaaggccgagacaggtctggtagtt

SEQ ID NO: 4256433 - DNA, 25 bp, Homo sapien
cagaaggccgagacaggtctggtag

SEQ ID NO: 4256434 - DNA, 25 bp, Homo sapien
aaggccgagacaggtctggtagtta

SEQ ID NO: 4256435 - DNA, 25 bp, Homo sapien
caggactccagacccagttcttttc

SEQ ID NO: 4256436 - DNA, 25 bp, Homo sapien
aactggattacttgtgaaagcagcc

SEQ ID NO: 4256437 - DNA, 25 bp, Homo sapien
gcctcactcacagtggataaccttg

SEQ ID NO: 4256438 - DNA, 25 bp, Homo sapien
tgtctctgtaggatcttcaacagct

SEQ ID NO: 4256439 - DNA, 25 bp, Homo sapien
atttcatcttccccattgctgctaa

SEQ ID NO: 4256440 - DNA, 25 bp, Homo sapien
tttcatcttccccattgctgctaaa

SEQ ID NO: 4256441 - DNA, 25 bp, Homo sapien
taacaagagcatctggcacaactgg

SEQ ID NO: 4256442 - DNA, 25 bp, Homo sapien
tctctattgactcacagcagcccag

SEQ ID NO: 4256443 - DNA, 25 bp, Homo sapien
aactatttgaccttcgaggcacaga

SEQ ID NO: 4256444 - DNA, 25 bp, Homo sapien
taatgtgccaaagtcaaaaaagagc

SEQ ID NO: 4256445 - DNA, 25 bp, Homo sapien
cactggctttccggttattacagac

SEQ ID NO: 4256446 - DNA, 25 bp, Homo sapien
cagaaggtggagctctaaacatatc

SEQ ID NO: 4256447 - DNA, 25 bp, Homo sapien
ttctctcaggataaaatgactcaca

SEQ ID NO: 4256448 - DNA, 25 bp, Homo sapien
caaaaattgaggtacatgcaaatca

SEQ ID NO: 4256449 - DNA, 25 bp, Homo sapien
tcaggagtacctagtcaaatgtagg

SEQ ID NO: 4256450 - DNA, 25 bp, Homo sapien
gctgaggccgtctgcaaacaaggca

SEQ ID NO: 4256451 - DNA, 25 bp, Homo sapien
ggaactctcgtccaaatagcagccg

SEQ ID NO: 4256452 - DNA, 25 bp, Homo sapien
catctcggatgtaaagtaacatggc

SEQ ID NO: 4256453 - DNA, 25 bp, Homo sapien
taatctactaaacccaggctgaggc

SEQ ID NO: 4256454 - DNA, 25 bp, Homo sapien
gctacctttcgaggagtgtttttca

SEQ ID NO: 4256455 - DNA, 25 bp, Homo sapien
tcttctaagggctctgcagaataca

SEQ ID NO: 4256456 - DNA, 25 bp, Homo sapien
cttctaagggctctgcagaatacat

SEQ ID NO: 4256457 - DNA, 25 bp, Homo sapien
caatatccaatctttgataaaacat

SEQ ID NO: 4256458 - DNA, 25 bp, Homo sapien
cttgccaatatccaatctttgataa

SEQ ID NO: 4256459 - DNA, 25 bp, Homo sapien
tatccaatctttgataaaacatagc

SEQ ID NO: 4256460 - DNA, 25 bp, Homo sapien
ccaatctttgataaaacatagcatt

SEQ ID NO: 4256461 - DNA, 25 bp, Homo sapien
gaacggttttattctgtctcaccag

SEQ ID NO: 4256462 - DNA, 25 bp, Homo sapien
caccagtttggctagaacaagaaag

SEQ ID NO: 4256463 - DNA, 25 bp, Homo sapien
cttggatccttaattgagcctcttg

SEQ ID NO: 4256464 - DNA, 25 bp, Homo sapien
gaagttaacacagcggaaatatggc

SEQ ID NO: 4256465 - DNA, 25 bp, Homo sapien
gaaaccctcttcattagaacactgt

SEQ ID NO: 4256466 - DNA, 25 bp, Homo sapien
tcttcattagaacactgtgccaagc

SEQ ID NO: 4256467 - DNA, 25 bp, Homo sapien
caagaaaccctcttcattagaacac

SEQ ID NO: 4256468 - DNA, 25 bp, Homo sapien
ttagaacactgtgccaagcacaaat

SEQ ID NO: 4256469 - DNA, 25 bp, Homo sapien
gcctgagtaaatttttcacgtggca

SEQ ID NO: 4256470 - DNA, 25 bp, Homo sapien
gtcccctgtgagcaacactagagaa

SEQ ID NO: 4256471 - DNA, 25 bp, Homo sapien
cactagagaactgtttattcctagg

SEQ ID NO: 4256472 - DNA, 25 bp, Homo sapien
gagaactgtttattcctaggagcct

SEQ ID NO: 4256473 - DNA, 25 bp, Homo sapien
ctgtgtttacaaacccttaaggcag

SEQ ID NO: 4256474 - DNA, 25 bp, Homo sapien
tctatactgggaatgggtcacaaca

SEQ ID NO: 4256475 - DNA, 25 bp, Homo sapien
tttcatgtttgggtcccctctatac

SEQ ID NO: 4256476 - DNA, 25 bp, Homo sapien
ggataagcagttacccaggtcttgc

SEQ ID NO: 4256477 - DNA, 25 bp, Homo sapien
cacaagagggagatagcaagagttc

SEQ ID NO: 4256478 - DNA, 25 bp, Homo sapien
tatagccatgggttgtcactgtaac

SEQ ID NO: 4256479 - DNA, 25 bp, Homo sapien
ttccagctactaccacaggcaggga

SEQ ID NO: 4256480 - DNA, 25 bp, Homo sapien
gaggtataaccacattgggccagtg

SEQ ID NO: 4256481 - DNA, 25 bp, Homo sapien
ggctgggcacatacagggcctctga

SEQ ID NO: 4256482 - DNA, 25 bp, Homo sapien
gagtttccaaattcttccaagggca

SEQ ID NO: 4256483 - DNA, 25 bp, Homo sapien
cttggagtttccaaattcttccaag

SEQ ID NO: 4256484 - DNA, 25 bp, Homo sapien
agtttccaaattcttccaagggcag

SEQ ID NO: 4256485 - DNA, 25 bp, Homo sapien
gcagagggattattaagagggacat

SEQ ID NO: 4256486 - DNA, 25 bp, Homo sapien
agagcagagggattattaagaggga

SEQ ID NO: 4256487 - DNA, 25 bp, Homo sapien
agcagagggattattaagagggaca

SEQ ID NO: 4256488 - DNA, 25 bp, Homo sapien
gaaagagcagagggattattaagag

SEQ ID NO: 4256489 - DNA, 25 bp, Homo sapien
gtagatgagaaactgcagcctggag

SEQ ID NO: 4256490 - DNA, 25 bp, Homo sapien
tccctcatcttgtagatgagaaact

SEQ ID NO: 4256491 - DNA, 25 bp, Homo sapien
aaccttgctcaataatctcttcttg

SEQ ID NO: 4256492 - DNA, 25 bp, Homo sapien
aataatctcttcttgcttgaaccac

SEQ ID NO: 4256493 - DNA, 25 bp, Homo sapien
ccttgctcaataatctcttcttgct

SEQ ID NO: 4256494 - DNA, 25 bp, Homo sapien
gagaactttttcaaaaccttgctca

SEQ ID NO: 4256495 - DNA, 25 bp, Homo sapien
tgaccattcttattctgacatatgt

SEQ ID NO: 4256496 - DNA, 25 bp, Homo sapien
ttatcaagaagcacagatgaccatt

SEQ ID NO: 4256497 - DNA, 25 bp, Homo sapien
ctgattatcaagaagcacagatgac

SEQ ID NO: 4256498 - DNA, 25 bp, Homo sapien
attctgacatatgtccactccattg

SEQ ID NO: 4256499 - DNA, 25 bp, Homo sapien
tgttgtattaattgtcattgcttgc

SEQ ID NO: 4256500 - DNA, 25 bp, Homo sapien
gcttgcttagcatgctcacactggt

SEQ ID NO: 4256501 - DNA, 25 bp, Homo sapien
taattgtcattgcttgcttagcatg

SEQ ID NO: 4256502 - DNA, 25 bp, Homo sapien
cattgcttgcttagcatgctcacac

SEQ ID NO: 4256503 - DNA, 25 bp, Homo sapien
gtcaaatttccagcttaccatctag

SEQ ID NO: 4256504 - DNA, 25 bp, Homo sapien
aagcatgagccacctaatttctgtt

SEQ ID NO: 4256505 - DNA, 25 bp, Homo sapien
tcgtcattggaagataggctattca

SEQ ID NO: 4256506 - DNA, 25 bp, Homo sapien
tgtactggccattgttaatttttcc

SEQ ID NO: 4256507 - DNA, 25 bp, Homo sapien
gggtctttgatatctggtgaaactg

SEQ ID NO: 4256508 - DNA, 25 bp, Homo sapien
actgtgaatattagctcaagagttc

SEQ ID NO: 4256509 - DNA, 25 bp, Homo sapien
tagtcctagtcaaattaaactgtga

SEQ ID NO: 4256510 - DNA, 25 bp, Homo sapien
gatgcctcagctttctaccacactt

SEQ ID NO: 4256511 - DNA, 25 bp, Homo sapien
taagtttgcaggtaagagaagcaca

SEQ ID NO: 4256512 - DNA, 25 bp, Homo sapien
tgcaggtaagagaagcacataggct

SEQ ID NO: 4256513 - DNA, 25 bp, Homo sapien
agtttgcaggtaagagaagcacata

SEQ ID NO: 4256514 - DNA, 25 bp, Homo sapien
tttgcaggtaagagaagcacatagg

SEQ ID NO: 4256515 - DNA, 25 bp, Homo sapien
gagcctatgcttctatctaccgtta

SEQ ID NO: 4256516 - DNA, 25 bp, Homo sapien
taaaatgtaatagaggccagttgag

SEQ ID NO: 4256517 - DNA, 25 bp, Homo sapien
ggctaactaatgattcacacaggac

SEQ ID NO: 4256518 - DNA, 25 bp, Homo sapien
tacagatggtagtacagcttaggga

SEQ ID NO: 4256519 - DNA, 25 bp, Homo sapien
tctgttcaagtgcatgtaaagctca

SEQ ID NO: 4256520 - DNA, 25 bp, Homo sapien
tctagcaaagggaatgggagtcatc

SEQ ID NO: 4256521 - DNA, 25 bp, Homo sapien
cctggatctggttgactttagtaac

SEQ ID NO: 4256522 - DNA, 25 bp, Homo sapien
ggccctaaatcttgtggtctagcaa

SEQ ID NO: 4256523 - DNA, 25 bp, Homo sapien
gcagtttccataagttgtgagaaca

SEQ ID NO: 4256524 - DNA, 25 bp, Homo sapien
aaagttgaaaaccaaggttcagcag

SEQ ID NO: 4256525 - DNA, 25 bp, Homo sapien
ggttcagcagtttccataagttgtg

SEQ ID NO: 4256526 - DNA, 25 bp, Homo sapien
gaaaaccaaggttcagcagtttcca

SEQ ID NO: 4256527 - DNA, 25 bp, Homo sapien
catgttccagatactcagggttcaa

SEQ ID NO: 4256528 - DNA, 25 bp, Homo sapien
taggcatcatgttccagatactcag

SEQ ID NO: 4256529 - DNA, 25 bp, Homo sapien
gcatcatgttccagatactcagggt

SEQ ID NO: 4256530 - DNA, 25 bp, Homo sapien
gttccagatactcagggttcaagac

SEQ ID NO: 4256531 - DNA, 25 bp, Homo sapien
taggtgctaacagttcgtgcatgcc

SEQ ID NO: 4256532 - DNA, 25 bp, Homo sapien
gtgaaggacaaagactataggtgct

SEQ ID NO: 4256533 - DNA, 25 bp, Homo sapien
gtagaaaagcttggtggtcacagtg

SEQ ID NO: 4256534 - DNA, 25 bp, Homo sapien
gactataggtgctaacagttcgtgc

SEQ ID NO: 4256535 - DNA, 25 bp, Homo sapien
tctctggcataacagaaaagaacat

SEQ ID NO: 4256536 - DNA, 25 bp, Homo sapien
gctcgttttctctggcataacagaa

SEQ ID NO: 4256537 - DNA, 25 bp, Homo sapien
caactgctcgttttctctggcataa

SEQ ID NO: 4256538 - DNA, 25 bp, Homo sapien
cgttttctctggcataacagaaaag

SEQ ID NO: 4256539 - DNA, 25 bp, Homo sapien
tctcggctgtgaacaagtgcatatg

SEQ ID NO: 4256540 - DNA, 25 bp, Homo sapien
ggttgccgacaactcttagagagcg

SEQ ID NO: 4256541 - DNA, 25 bp, Homo sapien
gagagcggcttgtgttgtagttttc

SEQ ID NO: 4256542 - DNA, 25 bp, Homo sapien
agggctggtcgtgcatgcacaagca

SEQ ID NO: 4256543 - DNA, 25 bp, Homo sapien
tcttgttcaatcattgatcgaagtt

SEQ ID NO: 4256544 - DNA, 25 bp, Homo sapien
caatcattgatcgaagttctttatc

SEQ ID NO: 4256545 - DNA, 25 bp, Homo sapien
gttcttttgacatcttgttcaatca

SEQ ID NO: 4256546 - DNA, 25 bp, Homo sapien
tcattgatcgaagttctttatcttg

SEQ ID NO: 4256547 - DNA, 25 bp, Homo sapien
aagaggattattgatcatcaaatct

SEQ ID NO: 4256548 - DNA, 25 bp, Homo sapien
ttcatcctgtgaaagaggattattg

SEQ ID NO: 4256549 - DNA, 25 bp, Homo sapien
caaccttcctcgggttggtaatatg

SEQ ID NO: 4256550 - DNA, 25 bp, Homo sapien
ggattattgatcatcaaatcttgtt

SEQ ID NO: 4256551 - DNA, 25 bp, Homo sapien
ttaatgttgctataccatgctctta

SEQ ID NO: 4256552 - DNA, 25 bp, Homo sapien
gctataccatgctcttaattcttca

SEQ ID NO: 4256553 - DNA, 25 bp, Homo sapien
tccattgacttttgtcttgaggaag

SEQ ID NO: 4256554 - DNA, 25 bp, Homo sapien
acttatccattgacttttgtcttga

SEQ ID NO: 4256555 - DNA, 25 bp, Homo sapien
ctgcccattaatccccttctgcctt

SEQ ID NO: 4256556 - DNA, 25 bp, Homo sapien
gcttctcagctgcccattaatcccc

SEQ ID NO: 4256557 - DNA, 25 bp, Homo sapien
attgttgccaagtaattgttgttta

SEQ ID NO: 4256558 - DNA, 25 bp, Homo sapien
ttgttgccaagtaattgttgtttac

SEQ ID NO: 4256559 - DNA, 25 bp, Homo sapien
ctggcaagggcttgatatctaacat

SEQ ID NO: 4256560 - DNA, 25 bp, Homo sapien
aactggcaagggcttgatatctaac

SEQ ID NO: 4256561 - DNA, 25 bp, Homo sapien
ataactggcaagggcttgatatcta

SEQ ID NO: 4256562 - DNA, 25 bp, Homo sapien
ctcacctcatttactttgatatttg

SEQ ID NO: 4256563 - DNA, 25 bp, Homo sapien
gcctcacagtctgcaaatataagcc

SEQ ID NO: 4256564 - DNA, 25 bp, Homo sapien
tataacatgataaagaatttgcctc

SEQ ID NO: 4256565 - DNA, 25 bp, Homo sapien
cacagtctgcaaatataagccaata

SEQ ID NO: 4256566 - DNA, 25 bp, Homo sapien
atgataaagaatttgcctcacagtc

SEQ ID NO: 4256567 - DNA, 25 bp, Homo sapien
gaaagaactagacccaagatttgga

SEQ ID NO: 4256568 - DNA, 25 bp, Homo sapien
ggatcacgaacgtaatataatcata

SEQ ID NO: 4256569 - DNA, 25 bp, Homo sapien
cccaagatttggatcacgaacgtaa

SEQ ID NO: 4256570 - DNA, 25 bp, Homo sapien
atgctggaaagaactagacccaaga

SEQ ID NO: 4256571 - DNA, 25 bp, Homo sapien
gaatgcattgctgaagagtggaaaa

SEQ ID NO: 4256572 - DNA, 25 bp, Homo sapien
tctaaaagaatgcattgctgaagag

SEQ ID NO: 4256573 - DNA, 25 bp, Homo sapien
tctaatatactgcaaaagaaatcta

SEQ ID NO: 4256574 - DNA, 25 bp, Homo sapien
gaaatctaaaagaatgcattgctga

SEQ ID NO: 4256575 - DNA, 25 bp, Homo sapien
gactcctacttaaatatcctgtaga

SEQ ID NO: 4256576 - DNA, 25 bp, Homo sapien
aattaactatccacttatgaacctt

SEQ ID NO: 4256577 - DNA, 25 bp, Homo sapien
gcaaatgttaaatattgactcctac

SEQ ID NO: 4256578 - DNA, 25 bp, Homo sapien
taaaggagaccaatgtgtaaataaa

SEQ ID NO: 4256579 - DNA, 25 bp, Homo sapien
gagtctaaagtagaacttgttcttc

SEQ ID NO: 4256580 - DNA, 25 bp, Homo sapien
tcagagtctaaagtagaacttgttc

SEQ ID NO: 4256581 - DNA, 25 bp, Homo sapien
tctaaagtagaacttgttcttcttc

SEQ ID NO: 4256582 - DNA, 25 bp, Homo sapien
cagagtctaaagtagaacttgttct

SEQ ID NO: 4256583 - DNA, 25 bp, Homo sapien
gacgttatagcggtaagccaaagct

SEQ ID NO: 4256584 - DNA, 25 bp, Homo sapien
agtattcaagtgctgacgttatagc

SEQ ID NO: 4256585 - DNA, 25 bp, Homo sapien
gtattcaagtgctgacgttatagcg

SEQ ID NO: 4256586 - DNA, 25 bp, Homo sapien
tagcggtaagccaaagctcaaaacc

SEQ ID NO: 4256587 - DNA, 25 bp, Homo sapien
cagacagtgagtggagaaccccaat

SEQ ID NO: 4256588 - DNA, 25 bp, Homo sapien
tgccacagtaggttggtggtagctg

SEQ ID NO: 4256589 - DNA, 25 bp, Homo sapien
tcttaataaggctacccttttgata

SEQ ID NO: 4256590 - DNA, 25 bp, Homo sapien
aaggttccctgttgtgcagacagtg

SEQ ID NO: 4256591 - DNA, 25 bp, Homo sapien
aatacttatgggacagttccaccat

SEQ ID NO: 4256592 - DNA, 25 bp, Homo sapien
gatgaccctgacatagccattctcc

SEQ ID NO: 4256593 - DNA, 25 bp, Homo sapien
gacctatctttcagctcactgcctg

SEQ ID NO: 4256594 - DNA, 25 bp, Homo sapien
tctgctgaaattaaccatctgatgt

SEQ ID NO: 4256595 - DNA, 25 bp, Homo sapien
cagttttcattgcttggatatggcc

SEQ ID NO: 4256596 - DNA, 25 bp, Homo sapien
cctcagtcttaggtgaacactgtga

SEQ ID NO: 4256597 - DNA, 25 bp, Homo sapien
gatatggccacatgtttccttctgc

SEQ ID NO: 4256598 - DNA, 25 bp, Homo sapien
tacactcagtgctctacaggctacc

SEQ ID NO: 4256599 - DNA, 25 bp, Homo sapien
tcctctagcttgatgcattcatcct

SEQ ID NO: 4256600 - DNA, 25 bp, Homo sapien
aaattcctctagcttgatgcattca

SEQ ID NO: 4256601 - DNA, 25 bp, Homo sapien
agcttgatgcattcatccttccaca

SEQ ID NO: 4256602 - DNA, 25 bp, Homo sapien
tctagcttgatgcattcatccttcc

SEQ ID NO: 4256603 - DNA, 25 bp, Homo sapien
tgtgggcttctctcaaatccaagac

SEQ ID NO: 4256604 - DNA, 25 bp, Homo sapien
ttcttatgtacatactgtgggcttc

SEQ ID NO: 4256605 - DNA, 25 bp, Homo sapien
gatttccatcattcactaacttcag

SEQ ID NO: 4256606 - DNA, 25 bp, Homo sapien
taacttcagtatctgatagttactg

SEQ ID NO: 4256607 - DNA, 25 bp, Homo sapien
taggacaggtgcaggtcaccacact

SEQ ID NO: 4256608 - DNA, 25 bp, Homo sapien
aatagctaggacaggtgcaggtcac

SEQ ID NO: 4256609 - DNA, 25 bp, Homo sapien
ctgaatagctaggacaggtgcaggt

SEQ ID NO: 4256610 - DNA, 25 bp, Homo sapien
ctaggacaggtgcaggtcaccacac

SEQ ID NO: 4256611 - DNA, 25 bp, Homo sapien
gatgttgccgcactagataaagaaa

SEQ ID NO: 4256612 - DNA, 25 bp, Homo sapien
taaagaaaagcctctggtggccaca

SEQ ID NO: 4256613 - DNA, 25 bp, Homo sapien
agaaggtgatgttgccgcactagat

SEQ ID NO: 4256614 - DNA, 25 bp, Homo sapien
tctactgtccaacaggtagcttgct

SEQ ID NO: 4256615 - DNA, 25 bp, Homo sapien
tggtgacctgagcatacaatcaaca

SEQ ID NO: 4256616 - DNA, 25 bp, Homo sapien
gagaggggaactccagaactgtgca

SEQ ID NO: 4256617 - DNA, 25 bp, Homo sapien
catacaatcaacattcacaagtgca

SEQ ID NO: 4256618 - DNA, 25 bp, Homo sapien
actgtgcactgatagcaggctcaac

SEQ ID NO: 4256619 - DNA, 25 bp, Homo sapien
aagtgatacttcctgctgttgcaaa

SEQ ID NO: 4256620 - DNA, 25 bp, Homo sapien
cagggtatatgtgctgttctccaaa

SEQ ID NO: 4256621 - DNA, 25 bp, Homo sapien
aaacaaagtcagttcagcagggcaa

SEQ ID NO: 4256622 - DNA, 25 bp, Homo sapien
tatttcaagaagcaatggatcctgt

SEQ ID NO: 4256623 - DNA, 25 bp, Homo sapien
aattgatatggacaactggtggcac

SEQ ID NO: 4256624 - DNA, 25 bp, Homo sapien
tcttgcgtggcatgaaattctaggg

SEQ ID NO: 4256625 - DNA, 25 bp, Homo sapien
tctgcctagagataccgctatagtc

SEQ ID NO: 4256626 - DNA, 25 bp, Homo sapien
cgctatagtcacacccatggaagaa

SEQ ID NO: 4256627 - DNA, 25 bp, Homo sapien
tgtactgcagtctaggaaacgggag

SEQ ID NO: 4256628 - DNA, 25 bp, Homo sapien
cgggagttccctagttaccatgaca

SEQ ID NO: 4256629 - DNA, 25 bp, Homo sapien
ggcaattcagccaaccaggatctag

SEQ ID NO: 4256630 - DNA, 25 bp, Homo sapien
tcagaggaatccagtagcaggacca

SEQ ID NO: 4256631 - DNA, 25 bp, Homo sapien
tgcagacctgcttccaagttcaaga

SEQ ID NO: 4256632 - DNA, 25 bp, Homo sapien
tcaatgaattacgatgacccgatct

SEQ ID NO: 4256633 - DNA, 25 bp, Homo sapien
gcctgcaaggcatgtttatgagtca

SEQ ID NO: 4256634 - DNA, 25 bp, Homo sapien
gacccgatcttccaaacacaatttg

SEQ ID NO: 4256635 - DNA, 25 bp, Homo sapien
ccattagtatagtgcatctgttaca

SEQ ID NO: 4256636 - DNA, 25 bp, Homo sapien
tctgttacatgaatgtgccaatggt

SEQ ID NO: 4256637 - DNA, 25 bp, Homo sapien
ggccccttggcaaccatcgatgttt

SEQ ID NO: 4256638 - DNA, 25 bp, Homo sapien
catgtgcccacattacagtaccata

SEQ ID NO: 4256639 - DNA, 25 bp, Homo sapien
tctgaatgctattagctagattttc

SEQ ID NO: 4256640 - DNA, 25 bp, Homo sapien
agttccttatagactctagatttta

SEQ ID NO: 4256641 - DNA, 25 bp, Homo sapien
tatgttctgaatgctattagctaga

SEQ ID NO: 4256642 - DNA, 25 bp, Homo sapien
tgttctgaatgctattagctagatt

SEQ ID NO: 4256643 - DNA, 25 bp, Homo sapien
tggtaataacattagatctataaat

SEQ ID NO: 4256644 - DNA, 25 bp, Homo sapien
ggtaataacattagatctataaatt

SEQ ID NO: 4256645 - DNA, 25 bp, Homo sapien
tttgattggcagactgtttactact

SEQ ID NO: 4256646 - DNA, 25 bp, Homo sapien
tctgaacttattatgggtttattaa

SEQ ID NO: 4256647 - DNA, 25 bp, Homo sapien
ttttttgattggcagactgtttact

SEQ ID NO: 4256648 - DNA, 25 bp, Homo sapien
ctgaacttattatgggtttattaag

SEQ ID NO: 4256649 - DNA, 25 bp, Homo sapien
tcaggaggcacggaatcaggaacct

SEQ ID NO: 4256650 - DNA, 25 bp, Homo sapien
tccgcagggaaagcagtctggccat

SEQ ID NO: 4256651 - DNA, 25 bp, Homo sapien
gaaattcccacagggtagctccgca

SEQ ID NO: 4256652 - DNA, 25 bp, Homo sapien
gccatgatctactacagccgctgtg

SEQ ID NO: 4256653 - DNA, 25 bp, Homo sapien
ttactccccacagatcttcacatgc

SEQ ID NO: 4256654 - DNA, 25 bp, Homo sapien
cacagatcttcacatgcttcgcctt

SEQ ID NO: 4256655 - DNA, 25 bp, Homo sapien
gatcttcacatgcttcgccttgtta

SEQ ID NO: 4256656 - DNA, 25 bp, Homo sapien
tccccacagatcttcacatgcttcg

SEQ ID NO: 4256657 - DNA, 25 bp, Homo sapien
cagaggatgtctagtttcagataag

SEQ ID NO: 4256658 - DNA, 25 bp, Homo sapien
ggacaaggggtcaatgcctacttct

SEQ ID NO: 4256659 - DNA, 25 bp, Homo sapien
ctgcagaggatgtctagtttcagat

SEQ ID NO: 4256660 - DNA, 25 bp, Homo sapien
acttgttagagtaactggacaaggg

SEQ ID NO: 4256661 - DNA, 25 bp, Homo sapien
actggacagcgtcaccaaaagtaac

SEQ ID NO: 4256662 - DNA, 25 bp, Homo sapien
ggaactggacagcgtcaccaaaagt

SEQ ID NO: 4256663 - DNA, 25 bp, Homo sapien
gaactggacagcgtcaccaaaagta

SEQ ID NO: 4256664 - DNA, 25 bp, Homo sapien
tggacagcgtcaccaaaagtaacta

SEQ ID NO: 4256665 - DNA, 25 bp, Homo sapien
tagctctcttgaatctaaaaaagca

SEQ ID NO: 4256666 - DNA, 25 bp, Homo sapien
gtttcataaacattccagtaagaga

SEQ ID NO: 4256667 - DNA, 25 bp, Homo sapien
tgggattaccttatgaaatcataac

SEQ ID NO: 4256668 - DNA, 25 bp, Homo sapien
gcaacttaagtttgtcggttactgc

SEQ ID NO: 4256669 - DNA, 25 bp, Homo sapien
ttgtgcactccagtttccacctcgt

SEQ ID NO: 4256670 - DNA, 25 bp, Homo sapien
cagacagcccattccagcacttgtg

SEQ ID NO: 4256671 - DNA, 25 bp, Homo sapien
agacagcccattccagcacttgtgc

SEQ ID NO: 4256672 - DNA, 25 bp, Homo sapien
tttccacctcgtttgctcgcaggct

SEQ ID NO: 4256673 - DNA, 25 bp, Homo sapien
tttatatgtgcacaaatccttggaa

SEQ ID NO: 4256674 - DNA, 25 bp, Homo sapien
agtttatatgtgcacaaatccttgg

SEQ ID NO: 4256675 - DNA, 25 bp, Homo sapien
atggacagaagtttatatgtgcaca

SEQ ID NO: 4256676 - DNA, 25 bp, Homo sapien
cagaagtttatatgtgcacaaatcc

SEQ ID NO: 4256677 - DNA, 25 bp, Homo sapien
ggtcagagattacgaacaaaaatta

SEQ ID NO: 4256678 - DNA, 25 bp, Homo sapien
tccaagtctttcacatatagtagtc

SEQ ID NO: 4256679 - DNA, 25 bp, Homo sapien
tggttagaacatccattactatgtt

SEQ ID NO: 4256680 - DNA, 25 bp, Homo sapien
actgacatccttccattgttcctgg

SEQ ID NO: 4256681 - DNA, 25 bp, Homo sapien
ctgggtaacatggtgagatcctgtc

SEQ ID NO: 4256682 - DNA, 25 bp, Homo sapien
gcctgggtaacatggtgagatcctg

SEQ ID NO: 4256683 - DNA, 25 bp, Homo sapien
tgggtaacatggtgagatcctgtct

SEQ ID NO: 4256684 - DNA, 25 bp, Homo sapien
gacgaccatctgcttgttagctgaa

SEQ ID NO: 4256685 - DNA, 25 bp, Homo sapien
tttgcagacaacaagctaatttggg

SEQ ID NO: 4256686 - DNA, 25 bp, Homo sapien
tttgggttcctatcatgctgatcgg

SEQ ID NO: 4256687 - DNA, 25 bp, Homo sapien
gctgatcggtcatacagcaatacaa

SEQ ID NO: 4256688 - DNA, 25 bp, Homo sapien
ctccagtgggccattgttctctgaa

SEQ ID NO: 4256689 - DNA, 25 bp, Homo sapien
aactttacaagctttctgcactcca

SEQ ID NO: 4256690 - DNA, 25 bp, Homo sapien
gccattgttctctgaacacagatgt

SEQ ID NO: 4256691 - DNA, 25 bp, Homo sapien
taatcgcagccacagaagtagttct

SEQ ID NO: 4256692 - DNA, 25 bp, Homo sapien
ttttctggttggcaattagctgaaa

SEQ ID NO: 4256693 - DNA, 25 bp, Homo sapien
gcggggcatctcaaagcaaaggggg

SEQ ID NO: 4256694 - DNA, 25 bp, Homo sapien
ggttggcaattagctgaaagagtta

SEQ ID NO: 4256695 - DNA, 25 bp, Homo sapien
ctggttggcaattagctgaaagagt

SEQ ID NO: 4256696 - DNA, 25 bp, Homo sapien
gatggaggctacaatgggctatgat

SEQ ID NO: 4256697 - DNA, 25 bp, Homo sapien
gatcccctgagtccttgagatggag

SEQ ID NO: 4256698 - DNA, 25 bp, Homo sapien
gtccttgagatggaggctacaatgg

SEQ ID NO: 4256699 - DNA, 25 bp, Homo sapien
gaggatcccctgagtccttgagatg

SEQ ID NO: 4256700 - DNA, 25 bp, Homo sapien
ttctcatagtccagccatctatctc

SEQ ID NO: 4256701 - DNA, 25 bp, Homo sapien
gcttgtctctaagcatcttataata

SEQ ID NO: 4256702 - DNA, 25 bp, Homo sapien
tctaagcatcttataatacatctcc

SEQ ID NO: 4256703 - DNA, 25 bp, Homo sapien
tgttctttcggatttattttctcat

SEQ ID NO: 4256704 - DNA, 25 bp, Homo sapien
ccagtcttggcgacagagtgaatat

SEQ ID NO: 4256705 - DNA, 25 bp, Homo sapien
gtcttggcgacagagtgaatattgc

SEQ ID NO: 4256706 - DNA, 25 bp, Homo sapien
gtgagccttaatcacaccatgcact

SEQ ID NO: 4256707 - DNA, 25 bp, Homo sapien
tggtttgagacctggaggttgatgc

SEQ ID NO: 4256708 - DNA, 25 bp, Homo sapien
atttattcaatttgtgggctcctgc

SEQ ID NO: 4256709 - DNA, 25 bp, Homo sapien
atagagaatctggatagtagcattt

SEQ ID NO: 4256710 - DNA, 25 bp, Homo sapien
cctctccttatgttgcatttattca

SEQ ID NO: 4256711 - DNA, 25 bp, Homo sapien
gcatttttgaaacaagcaacaacag

SEQ ID NO: 4256712 - DNA, 25 bp, Homo sapien
taggctcagtacaatagagttctcc

SEQ ID NO: 4256713 - DNA, 25 bp, Homo sapien
tggtccacaaatccggttgacatgt

SEQ ID NO: 4256714 - DNA, 25 bp, Homo sapien
ttgtgggagaactttactggtccac

SEQ ID NO: 4256715 - DNA, 25 bp, Homo sapien
caaactaagttctcccttaactgag

SEQ ID NO: 4256716 - DNA, 25 bp, Homo sapien
tatataaccagtgatagccttttgg

SEQ ID NO: 4256717 - DNA, 25 bp, Homo sapien
tccgtaagagctaagaaacctacta

SEQ ID NO: 4256718 - DNA, 25 bp, Homo sapien
tgaagttgtgcactcctagggagaa

SEQ ID NO: 4256719 - DNA, 25 bp, Homo sapien
tctgccaacaatagtcagactagca

SEQ ID NO: 4256720 - DNA, 25 bp, Homo sapien
gtacaaatcacaaagaccccactgg

SEQ ID NO: 4256721 - DNA, 25 bp, Homo sapien
tggcaacgaaagcaacctctggtca

SEQ ID NO: 4256722 - DNA, 25 bp, Homo sapien
gaagaacgcacaaaaaccaagatgg

SEQ ID NO: 4256723 - DNA, 25 bp, Homo sapien
gaaaactcatgaatagcccactgct

SEQ ID NO: 4256724 - DNA, 25 bp, Homo sapien
ttttgaattcaacttagtctcaggc

SEQ ID NO: 4256725 - DNA, 25 bp, Homo sapien
caatgtaactacatataactttact

SEQ ID NO: 4256726 - DNA, 25 bp, Homo sapien
caccatcaatttgctaagaaccatg

SEQ ID NO: 4256727 - DNA, 25 bp, Homo sapien
gtctcaggcttccatatccccaaaa

SEQ ID NO: 4256728 - DNA, 25 bp, Homo sapien
taaccaaaagccagtaaataatatc

SEQ ID NO: 4256729 - DNA, 25 bp, Homo sapien
tagcagcataagaaatgcttaattc

SEQ ID NO: 4256730 - DNA, 25 bp, Homo sapien
caaagaggtcatttctatactgaaa

SEQ ID NO: 4256731 - DNA, 25 bp, Homo sapien
aaagtaataatgatactggtgactt

SEQ ID NO: 4256732 - DNA, 25 bp, Homo sapien
gctgcacccctcaacaagtcattta

SEQ ID NO: 4256733 - DNA, 25 bp, Homo sapien
ctgcacccctcaacaagtcatttac

SEQ ID NO: 4256734 - DNA, 25 bp, Homo sapien
actttccagttgaggtgatgccccg

SEQ ID NO: 4256735 - DNA, 25 bp, Homo sapien
tcgaccccttgcactttccagttga

SEQ ID NO: 4256736 - DNA, 25 bp, Homo sapien
gtctgctggttactaaggccatggg

SEQ ID NO: 4256737 - DNA, 25 bp, Homo sapien
taaggccatgggaaaatcacagtat

SEQ ID NO: 4256738 - DNA, 25 bp, Homo sapien
tcagaatgtactatgctcactccaa

SEQ ID NO: 4256739 - DNA, 25 bp, Homo sapien
tttgcccaaggccaagtacagagcc

SEQ ID NO: 4256740 - DNA, 25 bp, Homo sapien
tccaataagcaactagagggcagac

SEQ ID NO: 4256741 - DNA, 25 bp, Homo sapien
tctgattgggataagttctatgctc

SEQ ID NO: 4256742 - DNA, 25 bp, Homo sapien
tgtggtataacatcacaatttcaga

SEQ ID NO: 4256743 - DNA, 25 bp, Homo sapien
cagtttgtgcacatgttaaaggaaa

SEQ ID NO: 4256744 - DNA, 25 bp, Homo sapien
aatttcagaagttgtccatatctct

SEQ ID NO: 4256745 - DNA, 25 bp, Homo sapien
gctatagtctagtaaatttgggaaa

SEQ ID NO: 4256746 - DNA, 25 bp, Homo sapien
tacatcaacatataatgggattctc

SEQ ID NO: 4256747 - DNA, 25 bp, Homo sapien
agtgctttccggatttatgtgacca

SEQ ID NO: 4256748 - DNA, 25 bp, Homo sapien
aacaaagtattcagtgctttccgga

SEQ ID NO: 4256749 - DNA, 25 bp, Homo sapien
gaccatgggatctttacactccaag

SEQ ID NO: 4256750 - DNA, 25 bp, Homo sapien
gcacactgactttcacggcagccag

SEQ ID NO: 4256751 - DNA, 25 bp, Homo sapien
tctccaattgtactgacttacaagg

SEQ ID NO: 4256752 - DNA, 25 bp, Homo sapien
aaatgcccataccaacacagaagca

SEQ ID NO: 4256753 - DNA, 25 bp, Homo sapien
tgtctttccaaatgcccataccaac

SEQ ID NO: 4256754 - DNA, 25 bp, Homo sapien
cataaaattgattaaaccaactgct

SEQ ID NO: 4256755 - DNA, 25 bp, Homo sapien
catacatgacagctgatcaaaatca

SEQ ID NO: 4256756 - DNA, 25 bp, Homo sapien
gattaaaccaactgctgtgttgggc

SEQ ID NO: 4256757 - DNA, 25 bp, Homo sapien
aactgctgtgttgggcatacatgac

SEQ ID NO: 4256758 - DNA, 25 bp, Homo sapien
aacttttatcttgatactgatatca

SEQ ID NO: 4256759 - DNA, 25 bp, Homo sapien
ttccaaacttttatcttgatactga

SEQ ID NO: 4256760 - DNA, 25 bp, Homo sapien
ccaaacttttatcttgatactgata

SEQ ID NO: 4256761 - DNA, 25 bp, Homo sapien
cccattccaaacttttatcttgata

SEQ ID NO: 4256762 - DNA, 25 bp, Homo sapien
taacaatgctgcgtgaacagccaac

SEQ ID NO: 4256763 - DNA, 25 bp, Homo sapien
ctttgcatgttacatgatgccttta

SEQ ID NO: 4256764 - DNA, 25 bp, Homo sapien
tcacaacgaaggacaaagataagcc

SEQ ID NO: 4256765 - DNA, 25 bp, Homo sapien
acacaaagatacttatttctttgca

SEQ ID NO: 4256766 - DNA, 25 bp, Homo sapien
aaaaattgccctgtgactaattcag

SEQ ID NO: 4256767 - DNA, 25 bp, Homo sapien
tacagagttgtgtaagcataaccac

SEQ ID NO: 4256768 - DNA, 25 bp, Homo sapien
gaagcaaatggaactgacttaggaa

SEQ ID NO: 4256769 - DNA, 25 bp, Homo sapien
tgaatatgccatacaagtcatccat

SEQ ID NO: 4256770 - DNA, 25 bp, Homo sapien
tgtaacatttctcggcatttgcttc

SEQ ID NO: 4256771 - DNA, 25 bp, Homo sapien
tctttccaatgtaataaggccacct

SEQ ID NO: 4256772 - DNA, 25 bp, Homo sapien
gctactaatcttctacattcttttc

SEQ ID NO: 4256773 - DNA, 25 bp, Homo sapien
taataaggccacctatgtaacattt

SEQ ID NO: 4256774 - DNA, 25 bp, Homo sapien
tgtatttagaattgtaaatttcaaa

SEQ ID NO: 4256775 - DNA, 25 bp, Homo sapien
ttgctgtatttagaattgtaaattt

SEQ ID NO: 4256776 - DNA, 25 bp, Homo sapien
tattgctgtatttagaattgtaaat

SEQ ID NO: 4256777 - DNA, 25 bp, Homo sapien
gctgtatttagaattgtaaatttca

SEQ ID NO: 4256778 - DNA, 25 bp, Homo sapien
catgcagtattttgtccaaattgtt

SEQ ID NO: 4256779 - DNA, 25 bp, Homo sapien
tcccaattttaagtagaacatgcag

SEQ ID NO: 4256780 - DNA, 25 bp, Homo sapien
aaactttacatgttctggactccaa

SEQ ID NO: 4256781 - DNA, 25 bp, Homo sapien
tgtccaaattgtttataatgggtga

SEQ ID NO: 4256782 - DNA, 25 bp, Homo sapien
tctttagctgcatcaatatagtcaa

SEQ ID NO: 4256783 - DNA, 25 bp, Homo sapien
caagtccattagtcattctgcctct

SEQ ID NO: 4256784 - DNA, 25 bp, Homo sapien
tatagtcaatcaggaaagtggccaa

SEQ ID NO: 4256785 - DNA, 25 bp, Homo sapien
atgtccggccggacaaattctttct

SEQ ID NO: 4256786 - DNA, 25 bp, Homo sapien
tgctcttagttaacagctcagcagt

SEQ ID NO: 4256787 - DNA, 25 bp, Homo sapien
gctcagcagtccgaaacaggaaaaa

SEQ ID NO: 4256788 - DNA, 25 bp, Homo sapien
tccagtagaagggagttagaacttc

SEQ ID NO: 4256789 - DNA, 25 bp, Homo sapien
gattatagcatcactctgtcctcaa

SEQ ID NO: 4256790 - DNA, 25 bp, Homo sapien
tctctagagtaggatagggtcccga

SEQ ID NO: 4256791 - DNA, 25 bp, Homo sapien
cactgcctgaccatgaactgtttaa

SEQ ID NO: 4256792 - DNA, 25 bp, Homo sapien
gaatgcctttagatagaacccaagc

SEQ ID NO: 4256793 - DNA, 25 bp, Homo sapien
tcatggctagaagttgtcacagtgc

SEQ ID NO: 4256794 - DNA, 25 bp, Homo sapien
atctgctggcccaatcacctaaaca

SEQ ID NO: 4256795 - DNA, 25 bp, Homo sapien
ggtaccttccaattatgcagtcaaa

SEQ ID NO: 4256796 - DNA, 25 bp, Homo sapien
tagacactccagctgaaatcctttt

SEQ ID NO: 4256797 - DNA, 25 bp, Homo sapien
tttgtgtgtgtgaccctttagacac

SEQ ID NO: 4256798 - DNA, 25 bp, Homo sapien
gaatgtttcccaccttctgtagacc

SEQ ID NO: 4256799 - DNA, 25 bp, Homo sapien
tgaatgtttcccaccttctgtagac

SEQ ID NO: 4256800 - DNA, 25 bp, Homo sapien
atgaatgtttcccaccttctgtaga

SEQ ID NO: 4256801 - DNA, 25 bp, Homo sapien
catgaatgtttcccaccttctgtag

SEQ ID NO: 4256802 - DNA, 25 bp, Homo sapien
tgtactaggaggttgggaggagtca

SEQ ID NO: 4256803 - DNA, 25 bp, Homo sapien
caaacagatgcaaaacatacaaaga

SEQ ID NO: 4256804 - DNA, 25 bp, Homo sapien
tttaaaggcatctttttcaaacaga

SEQ ID NO: 4256805 - DNA, 25 bp, Homo sapien
cagatgcaaaacatacaaagatttt

SEQ ID NO: 4256806 - DNA, 25 bp, Homo sapien
taaccgttgaggaataacgatggct

SEQ ID NO: 4256807 - DNA, 25 bp, Homo sapien
tccgcatggtaaatacacgtttgcc

SEQ ID NO: 4256808 - DNA, 25 bp, Homo sapien
tggtctcgatcgcatggctcaagca

SEQ ID NO: 4256809 - DNA, 25 bp, Homo sapien
tttttgcagagtgagggtttcgccg

SEQ ID NO: 4256810 - DNA, 25 bp, Homo sapien
ctagttcagccaaagtggaagacag

SEQ ID NO: 4256811 - DNA, 25 bp, Homo sapien
taaactagttcagccaaagtggaag

SEQ ID NO: 4256812 - DNA, 25 bp, Homo sapien
aggacccagaactagaaatgccatt

SEQ ID NO: 4256813 - DNA, 25 bp, Homo sapien
ctgtaaactagttcagccaaagtgg

SEQ ID NO: 4256814 - DNA, 25 bp, Homo sapien
tagtgaaacctgtctacagaggcca

SEQ ID NO: 4256815 - DNA, 25 bp, Homo sapien
aaagaccatgttgtgcatatggcac

SEQ ID NO: 4256816 - DNA, 25 bp, Homo sapien
catatggcactcacccgaatgacta

SEQ ID NO: 4256817 - DNA, 25 bp, Homo sapien
gaccacattggcattactgaagcac

SEQ ID NO: 4256818 - DNA, 25 bp, Homo sapien
aaatagaaacttcacacaagagaat

SEQ ID NO: 4256819 - DNA, 25 bp, Homo sapien
aaaatagaaacttcacacaagagaa

SEQ ID NO: 4256820 - DNA, 25 bp, Homo sapien
aaaaatagaaacttcacacaagaga

SEQ ID NO: 4256821 - DNA, 25 bp, Homo sapien
cagcagtcaaatttattcgtcaaga

SEQ ID NO: 4256822 - DNA, 25 bp, Homo sapien
tgaggtttacatgttcaatcactgt

SEQ ID NO: 4256823 - DNA, 25 bp, Homo sapien
gcctgatgttttcccaatacaaata

SEQ ID NO: 4256824 - DNA, 25 bp, Homo sapien
agacacaaagggtaatgcagactga

SEQ ID NO: 4256825 - DNA, 25 bp, Homo sapien
tataataatgctacagcctttctga

SEQ ID NO: 4256826 - DNA, 25 bp, Homo sapien
ataataatgctacagcctttctgac

SEQ ID NO: 4256827 - DNA, 25 bp, Homo sapien
aatataataatgctacagcctttct

SEQ ID NO: 4256828 - DNA, 25 bp, Homo sapien
taataatgctacagcctttctgaca

SEQ ID NO: 4256829 - DNA, 25 bp, Homo sapien
tcaaatgctctgccccctgagatat

SEQ ID NO: 4256830 - DNA, 25 bp, Homo sapien
atccagcacccggatttcaaccggg

SEQ ID NO: 4256831 - DNA, 25 bp, Homo sapien
aatccagcacccggatttcaaccgg

SEQ ID NO: 4256832 - DNA, 25 bp, Homo sapien
tgctctgccccctgagatatacccc

SEQ ID NO: 4256833 - DNA, 25 bp, Homo sapien
gcaagtcgggcttgaggcaaaggct

SEQ ID NO: 4256834 - DNA, 25 bp, Homo sapien
agcaagtcgggcttgaggcaaaggc

SEQ ID NO: 4256835 - DNA, 25 bp, Homo sapien
tccagcttgccctcgaaggtgaagt

SEQ ID NO: 4256836 - DNA, 25 bp, Homo sapien
caagtcgggcttgaggcaaaggctg

SEQ ID NO: 4256837 - DNA, 25 bp, Homo sapien
gcaggcagccgctcgaagggcctct

SEQ ID NO: 4256838 - DNA, 25 bp, Homo sapien
caggcagccgctcgaagggcctctt

SEQ ID NO: 4256839 - DNA, 25 bp, Homo sapien
cggcggccaccacattgatatttgt

SEQ ID NO: 4256840 - DNA, 25 bp, Homo sapien
gcggcggccaccacattgatatttg

SEQ ID NO: 4256841 - DNA, 25 bp, Homo sapien
gggagctaccttaatgactgatgca

SEQ ID NO: 4256842 - DNA, 25 bp, Homo sapien
tcaatgatagaaggacaatcgaccc

SEQ ID NO: 4256843 - DNA, 25 bp, Homo sapien
tccctggtacaaatggcggccttag

SEQ ID NO: 4256844 - DNA, 25 bp, Homo sapien
ccacaatgggaaagtagggagcaaa

SEQ ID NO: 4256845 - DNA, 25 bp, Homo sapien
caatatcaaaagttacactagggaa

SEQ ID NO: 4256846 - DNA, 25 bp, Homo sapien
gaccaatctatgcaagacacagtag

SEQ ID NO: 4256847 - DNA, 25 bp, Homo sapien
aaatgtcatactgcaaatctgtcac

SEQ ID NO: 4256848 - DNA, 25 bp, Homo sapien
cactagggaatactgggcattgatc

SEQ ID NO: 4256849 - DNA, 25 bp, Homo sapien
gggtccaagagagcaaagcactctt

SEQ ID NO: 4256850 - DNA, 25 bp, Homo sapien
tactctagagaatactcgatcctga

SEQ ID NO: 4256851 - DNA, 25 bp, Homo sapien
gagaatactcgatcctgattagtgg

SEQ ID NO: 4256852 - DNA, 25 bp, Homo sapien
agcactcttccagtactctagagaa

SEQ ID NO: 4256853 - DNA, 25 bp, Homo sapien
gatctatcaaagtgggacatggagg

SEQ ID NO: 4256854 - DNA, 25 bp, Homo sapien
ttcaaggagaccaagtatcagtata

SEQ ID NO: 4256855 - DNA, 25 bp, Homo sapien
catttttgtcttagagttactctga

SEQ ID NO: 4256856 - DNA, 25 bp, Homo sapien
tatgcaatttgggaacaaaaaatca

SEQ ID NO: 4256857 - DNA, 25 bp, Homo sapien
cactgcaggccaagacagctgttca

SEQ ID NO: 4256858 - DNA, 25 bp, Homo sapien
gacaaatgcaactaatcagctgaaa

SEQ ID NO: 4256859 - DNA, 25 bp, Homo sapien
actcactgccatagaatatttcagg

SEQ ID NO: 4256860 - DNA, 25 bp, Homo sapien
cctgtcagcgacttatcattcaaat

SEQ ID NO: 4256861 - DNA, 25 bp, Homo sapien
gaaaaatctaggtctatcaaatatt

SEQ ID NO: 4256862 - DNA, 25 bp, Homo sapien
tcttaaacagtaattagagttctct

SEQ ID NO: 4256863 - DNA, 25 bp, Homo sapien
ggtgtgcactacaacgcctgagtaa

SEQ ID NO: 4256864 - DNA, 25 bp, Homo sapien
ggctgttatcctaaattattgtagg

SEQ ID NO: 4256865 - DNA, 25 bp, Homo sapien
gattgcattactaagtggtggagcc

SEQ ID NO: 4256866 - DNA, 25 bp, Homo sapien
cagaacagttgtcacttgagcatga

SEQ ID NO: 4256867 - DNA, 25 bp, Homo sapien
cacctgcaaggtagtcgttatcccc

SEQ ID NO: 4256868 - DNA, 25 bp, Homo sapien
taagttgcaatatcttgggaaccca

SEQ ID NO: 4256869 - DNA, 25 bp, Homo sapien
gttattctgcttgcagttctctcag

SEQ ID NO: 4256870 - DNA, 25 bp, Homo sapien
tcagctatcattgtaactgcctcag

SEQ ID NO: 4256871 - DNA, 25 bp, Homo sapien
acacccagcctagattggcaaattt

SEQ ID NO: 4256872 - DNA, 25 bp, Homo sapien
ccagcacattgagatatcactccag

SEQ ID NO: 4256873 - DNA, 25 bp, Homo sapien
ctttgccgtcgcgaacagtgctgca

SEQ ID NO: 4256874 - DNA, 25 bp, Homo sapien
tctatatcctgtgccttgtgaggcc

SEQ ID NO: 4256875 - DNA, 25 bp, Homo sapien
taaaagctcctcagaatgtggcaaa

SEQ ID NO: 4256876 - DNA, 25 bp, Homo sapien
ggttcgctcatactctacaggcatg

SEQ ID NO: 4256877 - DNA, 25 bp, Homo sapien
taaagatgttatacgtggccctggc

SEQ ID NO: 4256878 - DNA, 25 bp, Homo sapien
tgtcacacggcagttaacaaccaga

SEQ ID NO: 4256879 - DNA, 25 bp, Homo sapien
tagaaactaccagtcatggccaggc

SEQ ID NO: 4256880 - DNA, 25 bp, Homo sapien
tatttttaacaagcacgccaccaga

SEQ ID NO: 4256881 - DNA, 25 bp, Homo sapien
gctgctgctaacaggacaaagcttt

SEQ ID NO: 4256882 - DNA, 25 bp, Homo sapien
gactgctgctgctaacaggacaaag

SEQ ID NO: 4256883 - DNA, 25 bp, Homo sapien
tcagactgctgctgctaacaggaca

SEQ ID NO: 4256884 - DNA, 25 bp, Homo sapien
ctgctgctgctaacaggacaaagct

SEQ ID NO: 4256885 - DNA, 25 bp, Homo sapien
ctggtccagtgaacaagtgcaagca

SEQ ID NO: 4256886 - DNA, 25 bp, Homo sapien
taaaacccaatgacgcatagctgag

SEQ ID NO: 4256887 - DNA, 25 bp, Homo sapien
caactgaggccgcatttgagagcac

SEQ ID NO: 4256888 - DNA, 25 bp, Homo sapien
gaaaagattacaagcactgaggcgg

SEQ ID NO: 4256889 - DNA, 25 bp, Homo sapien
gctcttatcctgaaagacctccgtt

SEQ ID NO: 4256890 - DNA, 25 bp, Homo sapien
tttgaggattcagggcccgtttcgc

SEQ ID NO: 4256891 - DNA, 25 bp, Homo sapien
gacctccgtttcttacgtgtgaata

SEQ ID NO: 4256892 - DNA, 25 bp, Homo sapien
cttaagtcgtactaaatccaggtca

SEQ ID NO: 4256893 - DNA, 25 bp, Homo sapien
ccagctcctattccctgaatcctcc

SEQ ID NO: 4256894 - DNA, 25 bp, Homo sapien
ggctccccagctcctattccctgaa

SEQ ID NO: 4256895 - DNA, 25 bp, Homo sapien
ctgtggcgcagaagggctccccagc

SEQ ID NO: 4256896 - DNA, 25 bp, Homo sapien
agaagggctccccagctcctattcc

SEQ ID NO: 4256897 - DNA, 25 bp, Homo sapien
ggccacgtgaccacgctcgcgccgt

SEQ ID NO: 4256898 - DNA, 25 bp, Homo sapien
ggtggcggcggtgaccagcggccac

SEQ ID NO: 4256899 - DNA, 25 bp, Homo sapien
gcccggcccgacctgaaagagaaca

SEQ ID NO: 4256900 - DNA, 25 bp, Homo sapien
gctcgcgccgtaacggcggccgcct

SEQ ID NO: 4256901 - DNA, 25 bp, Homo sapien
agcaccccgacaaggcagagagtgg

SEQ ID NO: 4256902 - DNA, 25 bp, Homo sapien
gcaccccgacaaggcagagagtggc

SEQ ID NO: 4256903 - DNA, 25 bp, Homo sapien
cagagcaccccgacaaggcagagag

SEQ ID NO: 4256904 - DNA, 25 bp, Homo sapien
gagcaccccgacaaggcagagagtg

SEQ ID NO: 4256905 - DNA, 25 bp, Homo sapien
aattgctatggtggcatagactgac

SEQ ID NO: 4256906 - DNA, 25 bp, Homo sapien
tagatcctgaaattgctatggtggc

SEQ ID NO: 4256907 - DNA, 25 bp, Homo sapien
ccatcattagatcctgaaattgcta

SEQ ID NO: 4256908 - DNA, 25 bp, Homo sapien
aggtaaactggccatcattagatcc

SEQ ID NO: 4256909 - DNA, 25 bp, Homo sapien
ggtgctcaaccaattgatcggtgat

SEQ ID NO: 4256910 - DNA, 25 bp, Homo sapien
gagtgtgaggtgctcaaccaattga

SEQ ID NO: 4256911 - DNA, 25 bp, Homo sapien
accaattgatcggtgatattaggga

SEQ ID NO: 4256912 - DNA, 25 bp, Homo sapien
cttgtaagtaaagagtgtgaggtgc

SEQ ID NO: 4256913 - DNA, 25 bp, Homo sapien
aatgatggctaacaagtctccaaag

SEQ ID NO: 4256914 - DNA, 25 bp, Homo sapien
ttcttactcctaaaataacatccag

SEQ ID NO: 4256915 - DNA, 25 bp, Homo sapien
tgccagtgttaatgatggctaacaa

SEQ ID NO: 4256916 - DNA, 25 bp, Homo sapien
taaagcccatttggatgccagtgtt

SEQ ID NO: 4256917 - DNA, 25 bp, Homo sapien
taggagaggacagctataactatag

SEQ ID NO: 4256918 - DNA, 25 bp, Homo sapien
gctcaggtttgcctccttccagtag

SEQ ID NO: 4256919 - DNA, 25 bp, Homo sapien
tatagctgcaggcttcttgtggcgc

SEQ ID NO: 4256920 - DNA, 25 bp, Homo sapien
tgcccctcagaggtacatgcagcag

SEQ ID NO: 4256921 - DNA, 25 bp, Homo sapien
agccatttgggagaaacgtaaactg

SEQ ID NO: 4256922 - DNA, 25 bp, Homo sapien
atggtagggcactggaacaactagg

SEQ ID NO: 4256923 - DNA, 25 bp, Homo sapien
ctgggcatcacaggaagataaagga

SEQ ID NO: 4256924 - DNA, 25 bp, Homo sapien
tatgaaactctggtgttgatggtag

SEQ ID NO: 4256925 - DNA, 25 bp, Homo sapien
tttcccatttcctgctgctggtcca

SEQ ID NO: 4256926 - DNA, 25 bp, Homo sapien
atttcctgctgctggtccactgcca

SEQ ID NO: 4256927 - DNA, 25 bp, Homo sapien
ccttttcccatttcctgctgctggt

SEQ ID NO: 4256928 - DNA, 25 bp, Homo sapien
ccatttcctgctgctggtccactgc

SEQ ID NO: 4256929 - DNA, 25 bp, Homo sapien
tgagcctaggctcggggaactcttc

SEQ ID NO: 4256930 - DNA, 25 bp, Homo sapien
aagccacaataacacctgagcctag

SEQ ID NO: 4256931 - DNA, 25 bp, Homo sapien
ggctcggggaactcttccaatgccc

SEQ ID NO: 4256932 - DNA, 25 bp, Homo sapien
atgagaagccacaataacacctgag

SEQ ID NO: 4256933 - DNA, 25 bp, Homo sapien
tgcttttagtactagcgttgttcag

SEQ ID NO: 4256934 - DNA, 25 bp, Homo sapien
agtactagcgttgttcagtttcttc

SEQ ID NO: 4256935 - DNA, 25 bp, Homo sapien
gttttgtgatataaagctggacttt

SEQ ID NO: 4256936 - DNA, 25 bp, Homo sapien
gaccacttctgtctaatgcttttag

SEQ ID NO: 4256937 - DNA, 25 bp, Homo sapien
tttgcaagggagacacaatggacac

SEQ ID NO: 4256938 - DNA, 25 bp, Homo sapien
gaaggtggcacactttcctgctgta

SEQ ID NO: 4256939 - DNA, 25 bp, Homo sapien
tagtataatgctccaaccgtggccc

SEQ ID NO: 4256940 - DNA, 25 bp, Homo sapien
cgtggcccctactaagtggtgctgg

SEQ ID NO: 4256941 - DNA, 25 bp, Homo sapien
ttatttagtagcatcagggagttgg

SEQ ID NO: 4256942 - DNA, 25 bp, Homo sapien
ttgggaactgatagctctaaaagga

SEQ ID NO: 4256943 - DNA, 25 bp, Homo sapien
ttggttctcattgggaactgatagc

SEQ ID NO: 4256944 - DNA, 25 bp, Homo sapien
agcatcagggagttggttctcattg

SEQ ID NO: 4256945 - DNA, 25 bp, Homo sapien
tgagccaactcttcatgaggttcca

SEQ ID NO: 4256946 - DNA, 25 bp, Homo sapien
tgccttctagtttggttccctcgtc

SEQ ID NO: 4256947 - DNA, 25 bp, Homo sapien
ccaactcttcatgaggttccaccat

SEQ ID NO: 4256948 - DNA, 25 bp, Homo sapien
tggttccctcgtcctgcttcaacat

SEQ ID NO: 4256949 - DNA, 25 bp, Homo sapien
tgggatagagcccaagagcttagca

SEQ ID NO: 4256950 - DNA, 25 bp, Homo sapien
catttgggatagagcccaagagctt

SEQ ID NO: 4256951 - DNA, 25 bp, Homo sapien
caggacatttgggatagagcccaag

SEQ ID NO: 4256952 - DNA, 25 bp, Homo sapien
cttttttcatggtaaaattgtgcaa

SEQ ID NO: 4256953 - DNA, 25 bp, Homo sapien
gtattgaggataaggatgttgacaa

SEQ ID NO: 4256954 - DNA, 25 bp, Homo sapien
gttgacaatagggtttaagctgcat

SEQ ID NO: 4256955 - DNA, 25 bp, Homo sapien
tgcaaattgctgttcggcccagcaa

SEQ ID NO: 4256956 - DNA, 25 bp, Homo sapien
accactggaatggttgtgtattgag

SEQ ID NO: 4256957 - DNA, 25 bp, Homo sapien
cccagtctcttggcttccggtcctt

SEQ ID NO: 4256958 - DNA, 25 bp, Homo sapien
cagtctcttggcttccggtcctttc

SEQ ID NO: 4256959 - DNA, 25 bp, Homo sapien
cctccatctcacctcttagttccat

SEQ ID NO: 4256960 - DNA, 25 bp, Homo sapien
ttccaacctccatctcacctcttag

SEQ ID NO: 4256961 - DNA, 25 bp, Homo sapien
tttgcttgaaaccacgcagtctttc

SEQ ID NO: 4256962 - DNA, 25 bp, Homo sapien
tgcttgaaaccacgcagtctttctc

SEQ ID NO: 4256963 - DNA, 25 bp, Homo sapien
ttgaaaccacgcagtctttctcctc

SEQ ID NO: 4256964 - DNA, 25 bp, Homo sapien
cttgaaaccacgcagtctttctcct

SEQ ID NO: 4256965 - DNA, 25 bp, Homo sapien
gaatacaaattctttcgatttggaa

SEQ ID NO: 4256966 - DNA, 25 bp, Homo sapien
aaattctttcgatttggaaagcatg

SEQ ID NO: 4256967 - DNA, 25 bp, Homo sapien
ggaaagcatgtcacttctgtaacac

SEQ ID NO: 4256968 - DNA, 25 bp, Homo sapien
gaaagcatgtcacttctgtaacacc

SEQ ID NO: 4256969 - DNA, 25 bp, Homo sapien
tttcccatccagatgaatacgatgc

SEQ ID NO: 4256970 - DNA, 25 bp, Homo sapien
ttttcccatccagatgaatacgatg

SEQ ID NO: 4256971 - DNA, 25 bp, Homo sapien
ctcattaagtttttctggtaatgga

SEQ ID NO: 4256972 - DNA, 25 bp, Homo sapien
gctcttggacacagttgtattcatg

SEQ ID NO: 4256973 - DNA, 25 bp, Homo sapien
tcttggacacagttgtattcatgca

SEQ ID NO: 4256974 - DNA, 25 bp, Homo sapien
ctcttggacacagttgtattcatgc

SEQ ID NO: 4256975 - DNA, 25 bp, Homo sapien
caatggtcatgagtggttttaatag

SEQ ID NO: 4256976 - DNA, 25 bp, Homo sapien
ctttccaatggtcatgagtggtttt

SEQ ID NO: 4256977 - DNA, 25 bp, Homo sapien
aattctgcattaaaagcaaactcat

SEQ ID NO: 4256978 - DNA, 25 bp, Homo sapien
gttttaatagtatcaatggcaaagt

SEQ ID NO: 4256979 - DNA, 25 bp, Homo sapien
tagttttccatcaggaaccttatac

SEQ ID NO: 4256980 - DNA, 25 bp, Homo sapien
ctagttttccatcaggaaccttata

SEQ ID NO: 4256981 - DNA, 25 bp, Homo sapien
gacagcgtggtacttccaaccacca

SEQ ID NO: 4256982 - DNA, 25 bp, Homo sapien
attagacagcgtggtacttccaacc

SEQ ID NO: 4256983 - DNA, 25 bp, Homo sapien
ttagtttcccctttgtcaatcatag

SEQ ID NO: 4256984 - DNA, 25 bp, Homo sapien
agttagtttcccctttgtcaatcat

SEQ ID NO: 4256985 - DNA, 25 bp, Homo sapien
gtgtggtgtgcacttcggtgctgaa

SEQ ID NO: 4256986 - DNA, 25 bp, Homo sapien
tggtgtgcacttcggtgctgaagcc

SEQ ID NO: 4256987 - DNA, 25 bp, Homo sapien
aagccgctcattgcgccagagtcca

SEQ ID NO: 4256988 - DNA, 25 bp, Homo sapien
gctgaagccgctcattgcgccagag

SEQ ID NO: 4256989 - DNA, 25 bp, Homo sapien
taaggcattataccaggcatcatcc

SEQ ID NO: 4256990 - DNA, 25 bp, Homo sapien
ccaggttgatgggagcagtttatag

SEQ ID NO: 4256991 - DNA, 25 bp, Homo sapien
tgtcgatcaacaaaatgggcacctg

SEQ ID NO: 4256992 - DNA, 25 bp, Homo sapien
cagtttatagacagaagaatgcctc

SEQ ID NO: 4256993 - DNA, 25 bp, Homo sapien
tggcagctgggtttgaaaatttggc

SEQ ID NO: 4256994 - DNA, 25 bp, Homo sapien
tatcacatttttgtgcgcaaatgca

SEQ ID NO: 4256995 - DNA, 25 bp, Homo sapien
ttggaaaggagcctcaagctggcct

SEQ ID NO: 4256996 - DNA, 25 bp, Homo sapien
aagctggcctctgaaattgtgtaag

SEQ ID NO: 4256997 - DNA, 25 bp, Homo sapien
tccccatggggacagagcgccgcac

SEQ ID NO: 4256998 - DNA, 25 bp, Homo sapien
tccctccccatggggacagagcgcc

SEQ ID NO: 4256999 - DNA, 25 bp, Homo sapien
cctcagaattgcagtccctccccat

SEQ ID NO: 4257000 - DNA, 25 bp, Homo sapien
cctccccatggggacagagcgccgc

SEQ ID NO: 4257001 - DNA, 25 bp, Homo sapien
cagacagtttccgctccaacttatc

SEQ ID NO: 4257002 - DNA, 25 bp, Homo sapien
ttcagacagtttccgctccaactta

SEQ ID NO: 4257003 - DNA, 25 bp, Homo sapien
attcagacagtttccgctccaactt

SEQ ID NO: 4257004 - DNA, 25 bp, Homo sapien
tcagacagtttccgctccaacttat

SEQ ID NO: 4257005 - DNA, 25 bp, Homo sapien
accgataaactgagccttgatatct

SEQ ID NO: 4257006 - DNA, 25 bp, Homo sapien
aggaccgataaactgagccttgata

SEQ ID NO: 4257007 - DNA, 25 bp, Homo sapien
ccgataaactgagccttgatatctc

SEQ ID NO: 4257008 - DNA, 25 bp, Homo sapien
cagaggaccgataaactgagccttg

SEQ ID NO: 4257009 - DNA, 25 bp, Homo sapien
ttccaagaaaacaaatattgtgggc

SEQ ID NO: 4257010 - DNA, 25 bp, Homo sapien
caagaaaacaaatattgtgggcaga

SEQ ID NO: 4257011 - DNA, 25 bp, Homo sapien
ccaagaaaacaaatattgtgggcag

SEQ ID NO: 4257012 - DNA, 25 bp, Homo sapien
agaaaacaaatattgtgggcagatt

SEQ ID NO: 4257013 - DNA, 25 bp, Homo sapien
catcaggaaacttcctggcaagtct

SEQ ID NO: 4257014 - DNA, 25 bp, Homo sapien
ttgataaatttgacatcaggaaact

SEQ ID NO: 4257015 - DNA, 25 bp, Homo sapien
aaatttgacatcaggaaacttcctg

SEQ ID NO: 4257016 - DNA, 25 bp, Homo sapien
tttgacatcaggaaacttcctggca

SEQ ID NO: 4257017 - DNA, 25 bp, Homo sapien
attccttgttggtaaaggtgcaaga

SEQ ID NO: 4257018 - DNA, 25 bp, Homo sapien
ggaattccttgttggtaaaggtgca

SEQ ID NO: 4257019 - DNA, 25 bp, Homo sapien
tggtaaaggtgcaagatgacccaga

SEQ ID NO: 4257020 - DNA, 25 bp, Homo sapien
ggtaaaggtgcaagatgacccagaa

SEQ ID NO: 4257021 - DNA, 25 bp, Homo sapien
cggctttggtagcttcttgaacata

SEQ ID NO: 4257022 - DNA, 25 bp, Homo sapien
tccttccctgagatctccaaaactt

SEQ ID NO: 4257023 - DNA, 25 bp, Homo sapien
cataatccttccctgagatctccaa

SEQ ID NO: 4257024 - DNA, 25 bp, Homo sapien
gctttggtagcttcttgaacataat

SEQ ID NO: 4257025 - DNA, 25 bp, Homo sapien
cactcaactagtctctgccgtgtgt

SEQ ID NO: 4257026 - DNA, 25 bp, Homo sapien
tttccactcaactagtctctgccgt

SEQ ID NO: 4257027 - DNA, 25 bp, Homo sapien
tttcaaagccctatctttatatgtt

SEQ ID NO: 4257028 - DNA, 25 bp, Homo sapien
ctcaactagtctctgccgtgtgtac

SEQ ID NO: 4257029 - DNA, 25 bp, Homo sapien
tttttggtaagatgtcattccactc

SEQ ID NO: 4257030 - DNA, 25 bp, Homo sapien
tgtcattccactcagtgtctgcgtt

SEQ ID NO: 4257031 - DNA, 25 bp, Homo sapien
cctttttggtaagatgtcattccac

SEQ ID NO: 4257032 - DNA, 25 bp, Homo sapien
cattccactcagtgtctgcgttggg

SEQ ID NO: 4257033 - DNA, 25 bp, Homo sapien
cttagagcgtaatctgtttttagaa

SEQ ID NO: 4257034 - DNA, 25 bp, Homo sapien
taaaacatcttagagcgtaatctgt

SEQ ID NO: 4257035 - DNA, 25 bp, Homo sapien
tttagctgtaaaacatcttagagcg

SEQ ID NO: 4257036 - DNA, 25 bp, Homo sapien
gctgtaaaacatcttagagcgtaat

SEQ ID NO: 4257037 - DNA, 25 bp, Homo sapien
tcattggcaagatagagggtgacaa

SEQ ID NO: 4257038 - DNA, 25 bp, Homo sapien
acaatggtagcagctaatgagcttc

SEQ ID NO: 4257039 - DNA, 25 bp, Homo sapien
caagatagagggtgacaatggtagc

SEQ ID NO: 4257040 - DNA, 25 bp, Homo sapien
gaaaagtcaattcattggcaagata

SEQ ID NO: 4257041 - DNA, 25 bp, Homo sapien
tgataggggtgtcatggggcagatg

SEQ ID NO: 4257042 - DNA, 25 bp, Homo sapien
catgataggggtgtcatggggcaga

SEQ ID NO: 4257043 - DNA, 25 bp, Homo sapien
accatgataggggtgtcatggggca

SEQ ID NO: 4257044 - DNA, 25 bp, Homo sapien
tccttccccggtgatttgtaccatg

SEQ ID NO: 4257045 - DNA, 25 bp, Homo sapien
ttttactgaacaggagtctgaccct

SEQ ID NO: 4257046 - DNA, 25 bp, Homo sapien
ggcctacaaataagagagcctgctg

SEQ ID NO: 4257047 - DNA, 25 bp, Homo sapien
tgtcttccatctagctcaagcctgg

SEQ ID NO: 4257048 - DNA, 25 bp, Homo sapien
gcctgagcttttgttactatgcagc

SEQ ID NO: 4257049 - DNA, 25 bp, Homo sapien
cactatacgggtaagtattattgct

SEQ ID NO: 4257050 - DNA, 25 bp, Homo sapien
caatgggcatcattatatctggatc

SEQ ID NO: 4257051 - DNA, 25 bp, Homo sapien
tattattgctgtataccggaactcc

SEQ ID NO: 4257052 - DNA, 25 bp, Homo sapien
tatatctggatccttatcaatttca

SEQ ID NO: 4257053 - DNA, 25 bp, Homo sapien
gcaaagggtttgttgacaagaacta

SEQ ID NO: 4257054 - DNA, 25 bp, Homo sapien
gaatggcaaagggtttgttgacaag

SEQ ID NO: 4257055 - DNA, 25 bp, Homo sapien
gaagaatggcaaagggtttgttgac

SEQ ID NO: 4257056 - DNA, 25 bp, Homo sapien
gggtttgttgacaagaactaagctc

SEQ ID NO: 4257057 - DNA, 25 bp, Homo sapien
aggttttgaacagttagcttccata

SEQ ID NO: 4257058 - DNA, 25 bp, Homo sapien
gttttgaacagttagcttccatatt

SEQ ID NO: 4257059 - DNA, 25 bp, Homo sapien
tttgaacagttagcttccatatttt

SEQ ID NO: 4257060 - DNA, 25 bp, Homo sapien
caggttttgaacagttagcttccat

SEQ ID NO: 4257061 - DNA, 25 bp, Homo sapien
ctggtcatatccttgagaagcctgc

SEQ ID NO: 4257062 - DNA, 25 bp, Homo sapien
tatacagtcacacgatttactagga

SEQ ID NO: 4257063 - DNA, 25 bp, Homo sapien
catcagaataataataggccttccc

SEQ ID NO: 4257064 - DNA, 25 bp, Homo sapien
gccaataaactaggtctcatcagaa

SEQ ID NO: 4257065 - DNA, 25 bp, Homo sapien
cactgaatacctgtcttggctgggc

SEQ ID NO: 4257066 - DNA, 25 bp, Homo sapien
ctcagtctggaagccacatcttgtt

SEQ ID NO: 4257067 - DNA, 25 bp, Homo sapien
ggctcagtctggaagccacatcttg

SEQ ID NO: 4257068 - DNA, 25 bp, Homo sapien
ctggctcagtctggaagccacatct

SEQ ID NO: 4257069 - DNA, 25 bp, Homo sapien
agtctggaagccacatcttgttcaa

SEQ ID NO: 4257070 - DNA, 25 bp, Homo sapien
tcctgagagaggaattagctggctc

SEQ ID NO: 4257071 - DNA, 25 bp, Homo sapien
aagtgtggtgtagtaaggaatatca

SEQ ID NO: 4257072 - DNA, 25 bp, Homo sapien
tatcagcataagtacaagtgtggtg

SEQ ID NO: 4257073 - DNA, 25 bp, Homo sapien
acctgtgctatcagcataagtacaa

SEQ ID NO: 4257074 - DNA, 25 bp, Homo sapien
gatcagggccgcatctctctggctg

SEQ ID NO: 4257075 - DNA, 25 bp, Homo sapien
agatcagggccgcatctctctggct

SEQ ID NO: 4257076 - DNA, 25 bp, Homo sapien
ttagatcagggccgcatctctctgg

SEQ ID NO: 4257077 - DNA, 25 bp, Homo sapien
tcagggccgcatctctctggctgac

SEQ ID NO: 4257078 - DNA, 25 bp, Homo sapien
ggcgcctgcctggaaatcgatgcaa

SEQ ID NO: 4257079 - DNA, 25 bp, Homo sapien
aaagtaagacttgggcctctcagga

SEQ ID NO: 4257080 - DNA, 25 bp, Homo sapien
tgtccgacccgtttcattagccaga

SEQ ID NO: 4257081 - DNA, 25 bp, Homo sapien
tgcagtctgcaagatggacccgacc

SEQ ID NO: 4257082 - DNA, 25 bp, Homo sapien
gaatattcgggttgtagaagcagcc

SEQ ID NO: 4257083 - DNA, 25 bp, Homo sapien
ctctagaatattcgggttgtagaag

SEQ ID NO: 4257084 - DNA, 25 bp, Homo sapien
gttgtagaagcagccaattagttgc

SEQ ID NO: 4257085 - DNA, 25 bp, Homo sapien
tcgggttgtagaagcagccaattag

SEQ ID NO: 4257086 - DNA, 25 bp, Homo sapien
tctgttgttttgactctccttgtgg

SEQ ID NO: 4257087 - DNA, 25 bp, Homo sapien
tctccttgtgggtagggatggtccc

SEQ ID NO: 4257088 - DNA, 25 bp, Homo sapien
taattatcatgggactgaatgtgac

SEQ ID NO: 4257089 - DNA, 25 bp, Homo sapien
gatggtcccttggtcaattgtccct

SEQ ID NO: 4257090 - DNA, 25 bp, Homo sapien
ggcaactactaaattgcaaggcagt

SEQ ID NO: 4257091 - DNA, 25 bp, Homo sapien
tactaaattgcaaggcagtataatc

SEQ ID NO: 4257092 - DNA, 25 bp, Homo sapien
caaggcagtataatcaatgcggaga

SEQ ID NO: 4257093 - DNA, 25 bp, Homo sapien
aattgcaaggcagtataatcaatgc

SEQ ID NO: 4257094 - DNA, 25 bp, Homo sapien
caagaggagccccaccacagtgaag

SEQ ID NO: 4257095 - DNA, 25 bp, Homo sapien
gacaggtctgcgcattaatttgagt

SEQ ID NO: 4257096 - DNA, 25 bp, Homo sapien
ttttctggttgacaggtctgcgcat

SEQ ID NO: 4257097 - DNA, 25 bp, Homo sapien
cattaatttgagtaaggcaagagga

SEQ ID NO: 4257098 - DNA, 25 bp, Homo sapien
tctttattttcttcttcctgcctct

SEQ ID NO: 4257099 - DNA, 25 bp, Homo sapien
ggcttctttattttcttcttcctgc

SEQ ID NO: 4257100 - DNA, 25 bp, Homo sapien
tattttcttcttcctgcctcttcat

SEQ ID NO: 4257101 - DNA, 25 bp, Homo sapien
tttattttcttcttcctgcctcttc

SEQ ID NO: 4257102 - DNA, 25 bp, Homo sapien
tctgttctgtttgtggctggtccct

SEQ ID NO: 4257103 - DNA, 25 bp, Homo sapien
gagctgggctcaggattaggcttct

SEQ ID NO: 4257104 - DNA, 25 bp, Homo sapien
cctgtgtccccgtctgcagagctgg

SEQ ID NO: 4257105 - DNA, 25 bp, Homo sapien
caaacattgtggctactcgcgaggc

SEQ ID NO: 4257106 - DNA, 25 bp, Homo sapien
cacaacttccacctttataaatatc

SEQ ID NO: 4257107 - DNA, 25 bp, Homo sapien
tcagtttcacaacttccacctttat

SEQ ID NO: 4257108 - DNA, 25 bp, Homo sapien
gctgttagatcttctagtaatacca

SEQ ID NO: 4257109 - DNA, 25 bp, Homo sapien
tttcctgctgttagatcttctagta

SEQ ID NO: 4257110 - DNA, 25 bp, Homo sapien
gtgatgggtgtcatggagttccaga

SEQ ID NO: 4257111 - DNA, 25 bp, Homo sapien
atggtgatgggtgtcatggagttcc

SEQ ID NO: 4257112 - DNA, 25 bp, Homo sapien
cctcatgcaatctggaaatgattcc

SEQ ID NO: 4257113 - DNA, 25 bp, Homo sapien
aggaggacgaactggccctcatgca

SEQ ID NO: 4257114 - DNA, 25 bp, Homo sapien
ccacaaggccttgggataggcatcc

SEQ ID NO: 4257115 - DNA, 25 bp, Homo sapien
tggtctccacaaggccttgggatag

SEQ ID NO: 4257116 - DNA, 25 bp, Homo sapien
caaggccttgggataggcatccaaa

SEQ ID NO: 4257117 - DNA, 25 bp, Homo sapien
cttgggataggcatccaaaggtgaa

SEQ ID NO: 4257118 - DNA, 25 bp, Homo sapien
cttctaaagcctgtcttcgaaataa

SEQ ID NO: 4257119 - DNA, 25 bp, Homo sapien
cacttctaaagcctgtcttcgaaat

SEQ ID NO: 4257120 - DNA, 25 bp, Homo sapien
tcccacttctaaagcctgtcttcga

SEQ ID NO: 4257121 - DNA, 25 bp, Homo sapien
ctaaagcctgtcttcgaaataacat

SEQ ID NO: 4257122 - DNA, 25 bp, Homo sapien
caaatgctgcaccaactgttaaacc

SEQ ID NO: 4257123 - DNA, 25 bp, Homo sapien
tgctgcaccaactgttaaaccaagg

SEQ ID NO: 4257124 - DNA, 25 bp, Homo sapien
tgcaccaactgttaaaccaaggatg

SEQ ID NO: 4257125 - DNA, 25 bp, Homo sapien
caactgttaaaccaaggatggaaat

SEQ ID NO: 4257126 - DNA, 25 bp, Homo sapien
agtggaatgcttgtcctctggacag

SEQ ID NO: 4257127 - DNA, 25 bp, Homo sapien
catcccccatgatgcgggagttggg

SEQ ID NO: 4257128 - DNA, 25 bp, Homo sapien
agtcactggcacagctggtcaaccg

SEQ ID NO: 4257129 - DNA, 25 bp, Homo sapien
ctccaaaagagcctctcctaactct

SEQ ID NO: 4257130 - DNA, 25 bp, Homo sapien
ttctacaagaaaatgtgaggctcct

SEQ ID NO: 4257131 - DNA, 25 bp, Homo sapien
tccccctggagtccttacagtaaca

SEQ ID NO: 4257132 - DNA, 25 bp, Homo sapien
cccagcatagggcattttcctgtaa

SEQ ID NO: 4257133 - DNA, 25 bp, Homo sapien
tgtggtggtcatggcttttccccct

SEQ ID NO: 4257134 - DNA, 25 bp, Homo sapien
gaatcctgctctggtgttatacgtc

SEQ ID NO: 4257135 - DNA, 25 bp, Homo sapien
tattgctacacgaaaatcacattgt

SEQ ID NO: 4257136 - DNA, 25 bp, Homo sapien
aaatcacattgtagactcagttccc

SEQ ID NO: 4257137 - DNA, 25 bp, Homo sapien
tacgtgggttattgctacacgaaaa

SEQ ID NO: 4257138 - DNA, 25 bp, Homo sapien
cactgtttacgtgggttattgctac

SEQ ID NO: 4257139 - DNA, 25 bp, Homo sapien
tctctgcattggaagaactgaattg

SEQ ID NO: 4257140 - DNA, 25 bp, Homo sapien
tctgcattggaagaactgaattggt

SEQ ID NO: 4257141 - DNA, 25 bp, Homo sapien
ctctgcattggaagaactgaattgg

SEQ ID NO: 4257142 - DNA, 25 bp, Homo sapien
gccagtactgtaatggagtaaaggg

SEQ ID NO: 4257143 - DNA, 25 bp, Homo sapien
gggatgcaatttcatctgttcgtcc

SEQ ID NO: 4257144 - DNA, 25 bp, Homo sapien
gcaagggagaatctggaagatgcca

SEQ ID NO: 4257145 - DNA, 25 bp, Homo sapien
tgttcgtccacagatctcttgttga

SEQ ID NO: 4257146 - DNA, 25 bp, Homo sapien
tcatcagcgagtgatgctgtctcga

SEQ ID NO: 4257147 - DNA, 25 bp, Homo sapien
cgacaatcccccatatgaatgcagt

SEQ ID NO: 4257148 - DNA, 25 bp, Homo sapien
gagtgatgctgtctcgacaatcccc

SEQ ID NO: 4257149 - DNA, 25 bp, Homo sapien
tgtaaagtcatcagcgagtgatgct

SEQ ID NO: 4257150 - DNA, 25 bp, Homo sapien
cagctggctcgtaattaaccgctgg

SEQ ID NO: 4257151 - DNA, 25 bp, Homo sapien
cataacaccagctggctcgtaatta

SEQ ID NO: 4257152 - DNA, 25 bp, Homo sapien
gctggctcgtaattaaccgctggca

SEQ ID NO: 4257153 - DNA, 25 bp, Homo sapien
caccagctggctcgtaattaaccgc

SEQ ID NO: 4257154 - DNA, 25 bp, Homo sapien
tccttggctggttgagctccaccac

SEQ ID NO: 4257155 - DNA, 25 bp, Homo sapien
ttgtctccttggctggttgagctcc

SEQ ID NO: 4257156 - DNA, 25 bp, Homo sapien
ctccttggctggttgagctccacca

SEQ ID NO: 4257157 - DNA, 25 bp, Homo sapien
gtctccttggctggttgagctccac

SEQ ID NO: 4257158 - DNA, 25 bp, Homo sapien
ccagggagtgatttagctctgtatc

SEQ ID NO: 4257159 - DNA, 25 bp, Homo sapien
gggagtgatttagctctgtatcagc

SEQ ID NO: 4257160 - DNA, 25 bp, Homo sapien
agtgatttagctctgtatcagcttc

SEQ ID NO: 4257161 - DNA, 25 bp, Homo sapien
tcttccagggagtgatttagctctg

SEQ ID NO: 4257162 - DNA, 25 bp, Homo sapien
tttctcaaaattggagacttgggtg

SEQ ID NO: 4257163 - DNA, 25 bp, Homo sapien
gaaattattctgcttaaggccaagg

SEQ ID NO: 4257164 - DNA, 25 bp, Homo sapien
tagaagttttctcaaaattggagac

SEQ ID NO: 4257165 - DNA, 25 bp, Homo sapien
gacttgggtgaaattattctgctta

SEQ ID NO: 4257166 - DNA, 25 bp, Homo sapien
cagagttgccttttcttcagtctct

SEQ ID NO: 4257167 - DNA, 25 bp, Homo sapien
ttttcttcagtctctgttgttttat

SEQ ID NO: 4257168 - DNA, 25 bp, Homo sapien
gccttttcttcagtctctgttgttt

SEQ ID NO: 4257169 - DNA, 25 bp, Homo sapien
agagttgccttttcttcagtctctg

SEQ ID NO: 4257170 - DNA, 25 bp, Homo sapien
aactatgatggactttgcctgactc

SEQ ID NO: 4257171 - DNA, 25 bp, Homo sapien
tatatatttcatgggtaaccgtgga

SEQ ID NO: 4257172 - DNA, 25 bp, Homo sapien
ggcagtatctatcaatatatatttc

SEQ ID NO: 4257173 - DNA, 25 bp, Homo sapien
gacttgaagtatccataactatgat

SEQ ID NO: 4257174 - DNA, 25 bp, Homo sapien
tgacatacaagttccaacagacatg

SEQ ID NO: 4257175 - DNA, 25 bp, Homo sapien
gctggctgcacatttcatgtctctt

SEQ ID NO: 4257176 - DNA, 25 bp, Homo sapien
ctgacatacaagttccaacagacat

SEQ ID NO: 4257177 - DNA, 25 bp, Homo sapien
tgtctctttgccaattcatggatgt

SEQ ID NO: 4257178 - DNA, 25 bp, Homo sapien
cacaagtgccgctttggaattggca

SEQ ID NO: 4257179 - DNA, 25 bp, Homo sapien
tgctgatgggactcatggcctgagg

SEQ ID NO: 4257180 - DNA, 25 bp, Homo sapien
ttttccccacaagtgccgctttgga

SEQ ID NO: 4257181 - DNA, 25 bp, Homo sapien
ctttggaattggcatataaatgctg

SEQ ID NO: 4257182 - DNA, 25 bp, Homo sapien
ttgtgacctacgatggactccccag

SEQ ID NO: 4257183 - DNA, 25 bp, Homo sapien
tgttctgagactgtccacacccttt

SEQ ID NO: 4257184 - DNA, 25 bp, Homo sapien
gactccccaggacatgtaaactgct

SEQ ID NO: 4257185 - DNA, 25 bp, Homo sapien
tgaagcaataatggccggtccaagt

SEQ ID NO: 4257186 - DNA, 25 bp, Homo sapien
accttacttgaagttggattatgtg

SEQ ID NO: 4257187 - DNA, 25 bp, Homo sapien
tgcggaatttcaaccttacttgaag

SEQ ID NO: 4257188 - DNA, 25 bp, Homo sapien
atttcaaccttacttgaagttggat

SEQ ID NO: 4257189 - DNA, 25 bp, Homo sapien
ctgcggaatttcaaccttacttgaa

SEQ ID NO: 4257190 - DNA, 25 bp, Homo sapien
tgtggttggtcttttaactctgtcc

SEQ ID NO: 4257191 - DNA, 25 bp, Homo sapien
ccaagtggttgtatgttcattgtca

SEQ ID NO: 4257192 - DNA, 25 bp, Homo sapien
gcaactacttacaccaagtggttgt

SEQ ID NO: 4257193 - DNA, 25 bp, Homo sapien
ttaaggcaactacttacaccaagtg

SEQ ID NO: 4257194 - DNA, 25 bp, Homo sapien
ataaaaaggcttccttgcagcagtc

SEQ ID NO: 4257195 - DNA, 25 bp, Homo sapien
tggtgataaaaaggcttccttgcag

SEQ ID NO: 4257196 - DNA, 25 bp, Homo sapien
gctggtgataaaaaggcttccttgc

SEQ ID NO: 4257197 - DNA, 25 bp, Homo sapien
gtgataaaaaggcttccttgcagca

SEQ ID NO: 4257198 - DNA, 25 bp, Homo sapien
tataaatacactcaagaagtagttg

SEQ ID NO: 4257199 - DNA, 25 bp, Homo sapien
gaaattatgcctgctgaagatataa

SEQ ID NO: 4257200 - DNA, 25 bp, Homo sapien
tagacatgagagagccctaatgaac

SEQ ID NO: 4257201 - DNA, 25 bp, Homo sapien
ctgcaataggcgactgcttacgctg

SEQ ID NO: 4257202 - DNA, 25 bp, Homo sapien
tgacagccccctctgaagagaactc

SEQ ID NO: 4257203 - DNA, 25 bp, Homo sapien
ggtgacagccccctctgaagagaac

SEQ ID NO: 4257204 - DNA, 25 bp, Homo sapien
gcagcagcgtcaggactgcttggag

SEQ ID NO: 4257205 - DNA, 25 bp, Homo sapien
tgcagcagcgtcaggactgcttgga

SEQ ID NO: 4257206 - DNA, 25 bp, Homo sapien
agcaaagttcagataaagctgatga

SEQ ID NO: 4257207 - DNA, 25 bp, Homo sapien
cattaaagcaaagttcagataaagc

SEQ ID NO: 4257208 - DNA, 25 bp, Homo sapien
cccattaaagcaaagttcagataaa

SEQ ID NO: 4257209 - DNA, 25 bp, Homo sapien
ttaaagcaaagttcagataaagctg

SEQ ID NO: 4257210 - DNA, 25 bp, Homo sapien
tattagtatcagaacacactttgtg

SEQ ID NO: 4257211 - DNA, 25 bp, Homo sapien
ctgagataaaaatcattgaagctgt

SEQ ID NO: 4257212 - DNA, 25 bp, Homo sapien
tgcttttatcagtattagtatcaga

SEQ ID NO: 4257213 - DNA, 25 bp, Homo sapien
ggcagatggcgccagcctttatgct

SEQ ID NO: 4257214 - DNA, 25 bp, Homo sapien
tccagccccgtagttttatcagtga

SEQ ID NO: 4257215 - DNA, 25 bp, Homo sapien
tcttccctagatgtgtccgctgcga

SEQ ID NO: 4257216 - DNA, 25 bp, Homo sapien
cgttttcgttttcacaaggctctag

SEQ ID NO: 4257217 - DNA, 25 bp, Homo sapien
tccgctgcgatagcaagcacctagt

SEQ ID NO: 4257218 - DNA, 25 bp, Homo sapien
cctcctaatactgagaggaagaagc

SEQ ID NO: 4257219 - DNA, 25 bp, Homo sapien
gaggctgtagttcattgatgtctga

SEQ ID NO: 4257220 - DNA, 25 bp, Homo sapien
taatactgagaggaagaagctttgt

SEQ ID NO: 4257221 - DNA, 25 bp, Homo sapien
gctgttgggtgtgttgaggctgtag

SEQ ID NO: 4257222 - DNA, 25 bp, Homo sapien
gcttttcatttaattcaagcagcaa

SEQ ID NO: 4257223 - DNA, 25 bp, Homo sapien
ttgcttttcatttaattcaagcagc

SEQ ID NO: 4257224 - DNA, 25 bp, Homo sapien
cgctgaaattgcttttcatttaatt

SEQ ID NO: 4257225 - DNA, 25 bp, Homo sapien
aattgcttttcatttaattcaagca

SEQ ID NO: 4257226 - DNA, 25 bp, Homo sapien
tgaagtattgccagtgagtagaagt

SEQ ID NO: 4257227 - DNA, 25 bp, Homo sapien
agcagggttgttgaagtattgccag

SEQ ID NO: 4257228 - DNA, 25 bp, Homo sapien
gaactgaacatcatcgaagattttt

SEQ ID NO: 4257229 - DNA, 25 bp, Homo sapien
ggcctaatggtgcagatgtgaggca

SEQ ID NO: 4257230 - DNA, 25 bp, Homo sapien
tcattagcctaaagattgcccctgc

SEQ ID NO: 4257231 - DNA, 25 bp, Homo sapien
taagattttacgctgtccagagggc

SEQ ID NO: 4257232 - DNA, 25 bp, Homo sapien
catttctgggactcgtgtgggtcac

SEQ ID NO: 4257233 - DNA, 25 bp, Homo sapien
cagagtttcatggtcctcagctagg

SEQ ID NO: 4257234 - DNA, 25 bp, Homo sapien
ctgcatgactgtttgtgatttggcg

SEQ ID NO: 4257235 - DNA, 25 bp, Homo sapien
cccttagtttgaagtggccacagtc

SEQ ID NO: 4257236 - DNA, 25 bp, Homo sapien
tgtgatttggcgtccccttagtttg

SEQ ID NO: 4257237 - DNA, 25 bp, Homo sapien
tggcgtccccttagtttgaagtggc

SEQ ID NO: 4257238 - DNA, 25 bp, Homo sapien
ccttttcaatatggacacatctgtc

SEQ ID NO: 4257239 - DNA, 25 bp, Homo sapien
caagtgaagtttcgtggaattctgt

SEQ ID NO: 4257240 - DNA, 25 bp, Homo sapien
gtgaagtttcgtggaattctgtgcc

SEQ ID NO: 4257241 - DNA, 25 bp, Homo sapien
ctacaagtgaagtttcgtggaattc

SEQ ID NO: 4257242 - DNA, 25 bp, Homo sapien
ctaaaggatcatggcaaatatttgc

SEQ ID NO: 4257243 - DNA, 25 bp, Homo sapien
cttctaaaggatcatggcaaatatt

SEQ ID NO: 4257244 - DNA, 25 bp, Homo sapien
tctaaaggatcatggcaaatatttg

SEQ ID NO: 4257245 - DNA, 25 bp, Homo sapien
taaaggatcatggcaaatatttgcc

SEQ ID NO: 4257246 - DNA, 25 bp, Homo sapien
caaagagcagctctgacgcatcgct

SEQ ID NO: 4257247 - DNA, 25 bp, Homo sapien
gagccaaggcattcgggcaatgcca

SEQ ID NO: 4257248 - DNA, 25 bp, Homo sapien
gatgggtgcataaataaggcatgct

SEQ ID NO: 4257249 - DNA, 25 bp, Homo sapien
cccatccgagcaacattttaccaga

SEQ ID NO: 4257250 - DNA, 25 bp, Homo sapien
aatgccgagcgaagcggggaaagcc

SEQ ID NO: 4257251 - DNA, 25 bp, Homo sapien
gagcgaagcggggaaagcctgttat

SEQ ID NO: 4257252 - DNA, 25 bp, Homo sapien
gcgaagcggggaaagcctgttataa

SEQ ID NO: 4257253 - DNA, 25 bp, Homo sapien
gagagaaatgccgagcgaagcgggg

SEQ ID NO: 4257254 - DNA, 25 bp, Homo sapien
taaaagtgccagagtgtgttacaca

SEQ ID NO: 4257255 - DNA, 25 bp, Homo sapien
gaaagggctgcatgagaggtaaacc

SEQ ID NO: 4257256 - DNA, 25 bp, Homo sapien
ttaccttctaatgggtgaggccaag

SEQ ID NO: 4257257 - DNA, 25 bp, Homo sapien
cctagaatgggtgatcagaggcatc

SEQ ID NO: 4257258 - DNA, 25 bp, Homo sapien
tataatcggccctctgaagtccact

SEQ ID NO: 4257259 - DNA, 25 bp, Homo sapien
tgaggacaccgaaaagagctttggg

SEQ ID NO: 4257260 - DNA, 25 bp, Homo sapien
ggcctgcattctcttgggttcccac

SEQ ID NO: 4257261 - DNA, 25 bp, Homo sapien
ggaagagatgtgtataatcggccct

SEQ ID NO: 4257262 - DNA, 25 bp, Homo sapien
tcaccaatctttcagactcccttca

SEQ ID NO: 4257263 - DNA, 25 bp, Homo sapien
tggtgggaatccgactggtgtttcc

SEQ ID NO: 4257264 - DNA, 25 bp, Homo sapien
ggaatccgactggtgtttcccaagc

SEQ ID NO: 4257265 - DNA, 25 bp, Homo sapien
ctggtgggaatccgactggtgtttc

SEQ ID NO: 4257266 - DNA, 25 bp, Homo sapien
tgggaatccgactggtgtttcccaa

SEQ ID NO: 4257267 - DNA, 25 bp, Homo sapien
tctgcaggtcggaataagcctcgaa

SEQ ID NO: 4257268 - DNA, 25 bp, Homo sapien
caggtcggaataagcctcgaatatt

SEQ ID NO: 4257269 - DNA, 25 bp, Homo sapien
ccagaactatctgcaggtcggaata

SEQ ID NO: 4257270 - DNA, 25 bp, Homo sapien
gcctcgaatattttggctgccccac

SEQ ID NO: 4257271 - DNA, 25 bp, Homo sapien
tccctctgccgctatgagatcatgc

SEQ ID NO: 4257272 - DNA, 25 bp, Homo sapien
gatcatgcccactagagtcagggaa

SEQ ID NO: 4257273 - DNA, 25 bp, Homo sapien
cctattatggttggcatctgttccc

SEQ ID NO: 4257274 - DNA, 25 bp, Homo sapien
gcagtcctttccacgagtgttgcca

SEQ ID NO: 4257275 - DNA, 25 bp, Homo sapien
tctggggccttgataaaagaatttc

SEQ ID NO: 4257276 - DNA, 25 bp, Homo sapien
taacctttttctatatgaggcatgg

SEQ ID NO: 4257277 - DNA, 25 bp, Homo sapien
gaggcatggtcaggacagtctctga

SEQ ID NO: 4257278 - DNA, 25 bp, Homo sapien
cttgataaaagaatttccctattct

SEQ ID NO: 4257279 - DNA, 25 bp, Homo sapien
gccttcaacagttcatcatacgttt

SEQ ID NO: 4257280 - DNA, 25 bp, Homo sapien
agccttcaacagttcatcatacgtt

SEQ ID NO: 4257281 - DNA, 25 bp, Homo sapien
aaaaatgcagaataagttcctagaa

SEQ ID NO: 4257282 - DNA, 25 bp, Homo sapien
aaaatgcagaataagttcctagaaa

SEQ ID NO: 4257283 - DNA, 25 bp, Homo sapien
caaaaatgcagaataagttcctaga

SEQ ID NO: 4257284 - DNA, 25 bp, Homo sapien
gcaaaaatgcagaataagttcctag

SEQ ID NO: 4257285 - DNA, 25 bp, Homo sapien
gtctctagaagaaaagcgttcagcg

SEQ ID NO: 4257286 - DNA, 25 bp, Homo sapien
gaaaagcgttcagcgttataattca

SEQ ID NO: 4257287 - DNA, 25 bp, Homo sapien
tctagaagaaaagcgttcagcgtta

SEQ ID NO: 4257288 - DNA, 25 bp, Homo sapien
tagtacatgattgattcatctaaga

SEQ ID NO: 4257289 - DNA, 25 bp, Homo sapien
ctcgcaatgaaggaaaggagcatgg

SEQ ID NO: 4257290 - DNA, 25 bp, Homo sapien
gagaatgggatgcctgacagttaaa

SEQ ID NO: 4257291 - DNA, 25 bp, Homo sapien
ctactcgcaatgaaggaaaggagca

SEQ ID NO: 4257292 - DNA, 25 bp, Homo sapien
gggatgcctgacagttaaaacaaca

SEQ ID NO: 4257293 - DNA, 25 bp, Homo sapien
tcacttgggtctataaggttcttca

SEQ ID NO: 4257294 - DNA, 25 bp, Homo sapien
gctttacttcccctgattctgaaat

SEQ ID NO: 4257295 - DNA, 25 bp, Homo sapien
ttcattctttcaggctttacttccc

SEQ ID NO: 4257296 - DNA, 25 bp, Homo sapien
tcttcgatactcttctatcaggcct

SEQ ID NO: 4257297 - DNA, 25 bp, Homo sapien
tcctactccccttaccatatttcat

SEQ ID NO: 4257298 - DNA, 25 bp, Homo sapien
gtcttcctatcatctctccaacaca

SEQ ID NO: 4257299 - DNA, 25 bp, Homo sapien
aagtcttcctatcatctctccaaca

SEQ ID NO: 4257300 - DNA, 25 bp, Homo sapien
ttcctatcatctctccaacacaccc

SEQ ID NO: 4257301 - DNA, 25 bp, Homo sapien
cattggtttccacactatcatgcaa

SEQ ID NO: 4257302 - DNA, 25 bp, Homo sapien
cagttctatcagctgtattagaggg

SEQ ID NO: 4257303 - DNA, 25 bp, Homo sapien
taaacaggtatagtattcaggacat

SEQ ID NO: 4257304 - DNA, 25 bp, Homo sapien
ggattgcctcagaagaaacattgaa

SEQ ID NO: 4257305 - DNA, 25 bp, Homo sapien
gcaagtattatatggccacagagtg

SEQ ID NO: 4257306 - DNA, 25 bp, Homo sapien
ctaccaataagctcatcagggcctg

SEQ ID NO: 4257307 - DNA, 25 bp, Homo sapien
tgcacctaaatgagagggccatcct

SEQ ID NO: 4257308 - DNA, 25 bp, Homo sapien
caagttcaacactaaagcagcccag

SEQ ID NO: 4257309 - DNA, 25 bp, Homo sapien
tgtgtagttacagtcaataaccact

SEQ ID NO: 4257310 - DNA, 25 bp, Homo sapien
gcaggatctacaaataaataatgag

SEQ ID NO: 4257311 - DNA, 25 bp, Homo sapien
tcagtatggtaacaagagaagcaat

SEQ ID NO: 4257312 - DNA, 25 bp, Homo sapien
accactcctagtcagaacatttctg

SEQ ID NO: 4257313 - DNA, 25 bp, Homo sapien
ccagtggcactgttgaacgaaacaa

SEQ ID NO: 4257314 - DNA, 25 bp, Homo sapien
cacactttggtgcatcccgtgaaca

SEQ ID NO: 4257315 - DNA, 25 bp, Homo sapien
tttgaggctccggaataagaactaa

SEQ ID NO: 4257316 - DNA, 25 bp, Homo sapien
acaaatttgaattacggcagtgcca

SEQ ID NO: 4257317 - DNA, 25 bp, Homo sapien
tgccacatcgacctctaaaccggaa

SEQ ID NO: 4257318 - DNA, 25 bp, Homo sapien
ccgtggtgcttgagatagtaccgct

SEQ ID NO: 4257319 - DNA, 25 bp, Homo sapien
cacgtcttgtatgaaactctggagg

SEQ ID NO: 4257320 - DNA, 25 bp, Homo sapien
gatggcctcttcgtcagggtacagg

SEQ ID NO: 4257321 - DNA, 25 bp, Homo sapien
gctgttgctgttgctgctgctgttg

SEQ ID NO: 4257322 - DNA, 25 bp, Homo sapien
gtggaggcggcggtgcctgctgctg

SEQ ID NO: 4257323 - DNA, 25 bp, Homo sapien
ctgtggaggcggcggtgcctgctgc

SEQ ID NO: 4257324 - DNA, 25 bp, Homo sapien
ctgctgttgctgttgctgctgctgt

SEQ ID NO: 4257325 - DNA, 25 bp, Homo sapien
tcaggaaaaatgtggtcccggatcc

SEQ ID NO: 4257326 - DNA, 25 bp, Homo sapien
cgtggagttccacacaaagccgtct

SEQ ID NO: 4257327 - DNA, 25 bp, Homo sapien
gcataaggctgcatctgctggcaca

SEQ ID NO: 4257328 - DNA, 25 bp, Homo sapien
gcgctaatgactacctgatcccaga

SEQ ID NO: 4257329 - DNA, 25 bp, Homo sapien
gtaagaaaacgcctctagactctcc

SEQ ID NO: 4257330 - DNA, 25 bp, Homo sapien
gaggagcagcaccgagccatggtgc

SEQ ID NO: 4257331 - DNA, 25 bp, Homo sapien
caggggtcggcaggcctggtaagaa

SEQ ID NO: 4257332 - DNA, 25 bp, Homo sapien
aggagcagcaccgagccatggtgca

SEQ ID NO: 4257333 - DNA, 25 bp, Homo sapien
aaaagcctatggttagactggcagg

SEQ ID NO: 4257334 - DNA, 25 bp, Homo sapien
cccctgagcaagatggcagtgtatt

SEQ ID NO: 4257335 - DNA, 25 bp, Homo sapien
gaggaacacgatacatacgctggaa

SEQ ID NO: 4257336 - DNA, 25 bp, Homo sapien
ccaaggactgtaaggcaagattcca

SEQ ID NO: 4257337 - DNA, 25 bp, Homo sapien
gactgaggaaccttcggatcatgga

SEQ ID NO: 4257338 - DNA, 25 bp, Homo sapien
gcgttgctctcctgttcataaatgg

SEQ ID NO: 4257339 - DNA, 25 bp, Homo sapien
taaatggcatcacgttctggctgag

SEQ ID NO: 4257340 - DNA, 25 bp, Homo sapien
agaggttctcccacagggttctgtt

SEQ ID NO: 4257341 - DNA, 25 bp, Homo sapien
agggcataataggtcagtttgtgcc

SEQ ID NO: 4257342 - DNA, 25 bp, Homo sapien
cttagagacaagggcataataggtc

SEQ ID NO: 4257343 - DNA, 25 bp, Homo sapien
gacaagggcataataggtcagtttg

SEQ ID NO: 4257344 - DNA, 25 bp, Homo sapien
tagagacaagggcataataggtcag

SEQ ID NO: 4257345 - DNA, 25 bp, Homo sapien
tttgctatctgacgagtggctggcc

SEQ ID NO: 4257346 - DNA, 25 bp, Homo sapien
gagtcctatttttccgcctgctgca

SEQ ID NO: 4257347 - DNA, 25 bp, Homo sapien
gaaaggacaggtgcaattacaccag

SEQ ID NO: 4257348 - DNA, 25 bp, Homo sapien
cagatttgcatctcaaaggagggac

SEQ ID NO: 4257349 - DNA, 25 bp, Homo sapien
ggacactaaacaatggagtgaaggg

SEQ ID NO: 4257350 - DNA, 25 bp, Homo sapien
gaaggggaagagtaagggtgtctga

SEQ ID NO: 4257351 - DNA, 25 bp, Homo sapien
tgaaggggaagagtaagggtgtctg

SEQ ID NO: 4257352 - DNA, 25 bp, Homo sapien
gatggacactaaacaatggagtgaa

SEQ ID NO: 4257353 - DNA, 25 bp, Homo sapien
gacattttgacacattagctctctg

SEQ ID NO: 4257354 - DNA, 25 bp, Homo sapien
gcagagatcagttagcacttggata

SEQ ID NO: 4257355 - DNA, 25 bp, Homo sapien
aattataagtcgaagcatgtctccg

SEQ ID NO: 4257356 - DNA, 25 bp, Homo sapien
tagaaataaattggctcattcccag

SEQ ID NO: 4257357 - DNA, 25 bp, Homo sapien
aaactggcatggacgctgaataagc

SEQ ID NO: 4257358 - DNA, 25 bp, Homo sapien
gaatgagaacccctaacaaggcctg

SEQ ID NO: 4257359 - DNA, 25 bp, Homo sapien
taaagctgtcggcactcaagggtaa

SEQ ID NO: 4257360 - DNA, 25 bp, Homo sapien
tttatagtaaccaagaaccatgtgc

SEQ ID NO: 4257361 - DNA, 25 bp, Homo sapien
catcccatcatgtcctgtaataaaa

SEQ ID NO: 4257362 - DNA, 25 bp, Homo sapien
atcccatcatgtcctgtaataaaaa

SEQ ID NO: 4257363 - DNA, 25 bp, Homo sapien
aagaagttaaacacctctaccagag

SEQ ID NO: 4257364 - DNA, 25 bp, Homo sapien
tatcaaatgacaacctggccagagc

SEQ ID NO: 4257365 - DNA, 25 bp, Homo sapien
ctaaaccagttagcaaaaagaggag

SEQ ID NO: 4257366 - DNA, 25 bp, Homo sapien
aaggaatactcacagtcactggtaa

SEQ ID NO: 4257367 - DNA, 25 bp, Homo sapien
tattaccacatacccaatcacctag

SEQ ID NO: 4257368 - DNA, 25 bp, Homo sapien
ggctgaaagactgttatttgaagca

SEQ ID NO: 4257369 - DNA, 25 bp, Homo sapien
cagttataatattccagtctgaacc

SEQ ID NO: 4257370 - DNA, 25 bp, Homo sapien
agtctgaaccaagcatcttccccta

SEQ ID NO: 4257371 - DNA, 25 bp, Homo sapien
aaaatgcggcaaaggattcaccaca

SEQ ID NO: 4257372 - DNA, 25 bp, Homo sapien
tcaccacaacaaattcaagcggcag

SEQ ID NO: 4257373 - DNA, 25 bp, Homo sapien
tcttaacccaaatgagtatgtgctc

SEQ ID NO: 4257374 - DNA, 25 bp, Homo sapien
caagcggcagcaaatgcgggtacac

SEQ ID NO: 4257375 - DNA, 25 bp, Homo sapien
tcaatgtctgagaggttaaacggct

SEQ ID NO: 4257376 - DNA, 25 bp, Homo sapien
gaactgggactaccactctttgcag

SEQ ID NO: 4257377 - DNA, 25 bp, Homo sapien
tatactgtactgatgctgctaggtc

SEQ ID NO: 4257378 - DNA, 25 bp, Homo sapien
ctacagcagggatgggtttatctcc

SEQ ID NO: 4257379 - DNA, 25 bp, Homo sapien
ctggttccaggacgtatgattcaaa

SEQ ID NO: 4257380 - DNA, 25 bp, Homo sapien
tctctcagttggacagcaggaatca

SEQ ID NO: 4257381 - DNA, 25 bp, Homo sapien
cataatacggcatagaatcaaggga

SEQ ID NO: 4257382 - DNA, 25 bp, Homo sapien
tccgagactggtgataactttagcc

SEQ ID NO: 4257383 - DNA, 25 bp, Homo sapien
gattaagccggagtgccacaagctc

SEQ ID NO: 4257384 - DNA, 25 bp, Homo sapien
gctggtagcggcagttaaattgaaa

SEQ ID NO: 4257385 - DNA, 25 bp, Homo sapien
gaaatatttcacagcgtgtgtcaga

SEQ ID NO: 4257386 - DNA, 25 bp, Homo sapien
catgcagaatggtaattatgacaga

SEQ ID NO: 4257387 - DNA, 25 bp, Homo sapien
tcacaaagcggagaaactcccaagg

SEQ ID NO: 4257388 - DNA, 25 bp, Homo sapien
gcgctggacttttactatagcaaaa

SEQ ID NO: 4257389 - DNA, 25 bp, Homo sapien
tttggaatgataagcagcgctggac

SEQ ID NO: 4257390 - DNA, 25 bp, Homo sapien
taactgacaatatgggacaactgag

SEQ ID NO: 4257391 - DNA, 25 bp, Homo sapien
ggaatatgccaagcgctgtcacaga

SEQ ID NO: 4257392 - DNA, 25 bp, Homo sapien
gcctcatcaagaaaagggccatttg

SEQ ID NO: 4257393 - DNA, 25 bp, Homo sapien
tgagcatgctctaccttgccactgg

SEQ ID NO: 4257394 - DNA, 25 bp, Homo sapien
tcaaaatgggtttagcataggacag

SEQ ID NO: 4257395 - DNA, 25 bp, Homo sapien
cagcacaagatcagtgacattctgt

SEQ ID NO: 4257396 - DNA, 25 bp, Homo sapien
ttcccatccgtagcgtcgatactcg

SEQ ID NO: 4257397 - DNA, 25 bp, Homo sapien
tcgatactcgacagttcagcacaag

SEQ ID NO: 4257398 - DNA, 25 bp, Homo sapien
gaaccacgctaattatcacagctag

SEQ ID NO: 4257399 - DNA, 25 bp, Homo sapien
gagtctgtgcatcaacaaactggta

SEQ ID NO: 4257400 - DNA, 25 bp, Homo sapien
ggagtctgtgcatcaacaaactggt

SEQ ID NO: 4257401 - DNA, 25 bp, Homo sapien
ctggtaataaggatcagacacctta

SEQ ID NO: 4257402 - DNA, 25 bp, Homo sapien
taataaggatcagacaccttattat

SEQ ID NO: 4257403 - DNA, 25 bp, Homo sapien
ccatcgatattcttggcagggcaga

SEQ ID NO: 4257404 - DNA, 25 bp, Homo sapien
cgaggaggctggcagtttatgaaac

SEQ ID NO: 4257405 - DNA, 25 bp, Homo sapien
taatggtacagtttcttccacagct

SEQ ID NO: 4257406 - DNA, 25 bp, Homo sapien
tacacaaaggcaactggaataggtg

SEQ ID NO: 4257407 - DNA, 25 bp, Homo sapien
gatgctgccttgaaccctgaagaca

SEQ ID NO: 4257408 - DNA, 25 bp, Homo sapien
tgctgccttgaaccctgaagacagt

SEQ ID NO: 4257409 - DNA, 25 bp, Homo sapien
tcagggtagtacttcagtgatgatg

SEQ ID NO: 4257410 - DNA, 25 bp, Homo sapien
gggtagtacttcagtgatgatgctg

SEQ ID NO: 4257411 - DNA, 25 bp, Homo sapien
tgtatttaatagttgcagccagctg

SEQ ID NO: 4257412 - DNA, 25 bp, Homo sapien
acagccaggctgttttaggattcat

SEQ ID NO: 4257413 - DNA, 25 bp, Homo sapien
tcagctgtaattcagggttggacaa

SEQ ID NO: 4257414 - DNA, 25 bp, Homo sapien
taatttttacagtccacagcttgag

SEQ ID NO: 4257415 - DNA, 25 bp, Homo sapien
gaaataatcctagacacagaggcct

SEQ ID NO: 4257416 - DNA, 25 bp, Homo sapien
taaaatccttggtctgaggagtggc

SEQ ID NO: 4257417 - DNA, 25 bp, Homo sapien
taagtgcctataacctgaatttgaa

SEQ ID NO: 4257418 - DNA, 25 bp, Homo sapien
gactgagaaactgactatccattat

SEQ ID NO: 4257419 - DNA, 25 bp, Homo sapien
gtgcttgagacactttagcacgctt

SEQ ID NO: 4257420 - DNA, 25 bp, Homo sapien
tggttgctgcaacctttgcaaacag

SEQ ID NO: 4257421 - DNA, 25 bp, Homo sapien
cctgctgaatctcatcataaatgga

SEQ ID NO: 4257422 - DNA, 25 bp, Homo sapien
aaacagtgcttgagacactttagca

SEQ ID NO: 4257423 - DNA, 25 bp, Homo sapien
tgggtgcccggtgcctaatagacaa

SEQ ID NO: 4257424 - DNA, 25 bp, Homo sapien
catccatgaagcaggtagagtgcct

SEQ ID NO: 4257425 - DNA, 25 bp, Homo sapien
taagggaagtcacattgtcacaggt

SEQ ID NO: 4257426 - DNA, 25 bp, Homo sapien
ttacacgtgcatgtccaagctgttc

SEQ ID NO: 4257427 - DNA, 25 bp, Homo sapien
cactctagtaagcaagggcactcat

SEQ ID NO: 4257428 - DNA, 25 bp, Homo sapien
cactagaacacatacagggctttga

SEQ ID NO: 4257429 - DNA, 25 bp, Homo sapien
tatattaatgactggaggccactag

SEQ ID NO: 4257430 - DNA, 25 bp, Homo sapien
caggtaaggcaggacaggtgaccaa

SEQ ID NO: 4257431 - DNA, 25 bp, Homo sapien
attataatcaagcacaaattctaaa

SEQ ID NO: 4257432 - DNA, 25 bp, Homo sapien
tactccattattaaggcggcgccgg

SEQ ID NO: 4257433 - DNA, 25 bp, Homo sapien
gctcttctccgcaaatagcacagga

SEQ ID NO: 4257434 - DNA, 25 bp, Homo sapien
tcactaaaattgtgccgcaggacac

SEQ ID NO: 4257435 - DNA, 25 bp, Homo sapien
ctctgatgcatgaagaattgcctgc

SEQ ID NO: 4257436 - DNA, 25 bp, Homo sapien
ctcttttatggatgcttattagtga

SEQ ID NO: 4257437 - DNA, 25 bp, Homo sapien
ttggtggccctttgataaatctagc

SEQ ID NO: 4257438 - DNA, 25 bp, Homo sapien
tagagttcatgacattacctgcacc

SEQ ID NO: 4257439 - DNA, 25 bp, Homo sapien
caatttgttggtggagcaatgctga

SEQ ID NO: 4257440 - DNA, 25 bp, Homo sapien
taccagcaaagactgggatgcagtc

SEQ ID NO: 4257441 - DNA, 25 bp, Homo sapien
catggccgaggcagcattcaagctc

SEQ ID NO: 4257442 - DNA, 25 bp, Homo sapien
tcagcttccggtaactgcaagaaat

SEQ ID NO: 4257443 - DNA, 25 bp, Homo sapien
caagaaattctgcatagcccgaagg

SEQ ID NO: 4257444 - DNA, 25 bp, Homo sapien
atttgtagtactgcccacacagtgg

SEQ ID NO: 4257445 - DNA, 25 bp, Homo sapien
gactgctatcagatcccagatatgg

SEQ ID NO: 4257446 - DNA, 25 bp, Homo sapien
cacagtggacagtaagcgtgacctt

SEQ ID NO: 4257447 - DNA, 25 bp, Homo sapien
gacatagtacagacttgccaaggtc

SEQ ID NO: 4257448 - DNA, 25 bp, Homo sapien
taagtggattattgcttccaaggtg

SEQ ID NO: 4257449 - DNA, 25 bp, Homo sapien
tcaaaatggctgcttagaattaagt

SEQ ID NO: 4257450 - DNA, 25 bp, Homo sapien
acaatagcatgagggagcgcacaca

SEQ ID NO: 4257451 - DNA, 25 bp, Homo sapien
gctgatgcctggtctagacaatgaa

SEQ ID NO: 4257452 - DNA, 25 bp, Homo sapien
gagtggtaaaattgaggctccacca

SEQ ID NO: 4257453 - DNA, 25 bp, Homo sapien
cacataggttcccttgattcagaag

SEQ ID NO: 4257454 - DNA, 25 bp, Homo sapien
caaaggccctgaattgggatcaatc

SEQ ID NO: 4257455 - DNA, 25 bp, Homo sapien
ggaatcctgccaatagccttgactg

SEQ ID NO: 4257456 - DNA, 25 bp, Homo sapien
tacccactggtagatttcggaagac

SEQ ID NO: 4257457 - DNA, 25 bp, Homo sapien
gcgccttgctgggatagctcagaaa

SEQ ID NO: 4257458 - DNA, 25 bp, Homo sapien
cacgtgcaaataccgcctgggagat

SEQ ID NO: 4257459 - DNA, 25 bp, Homo sapien
gacacctctgtgttggtcgaaacct

SEQ ID NO: 4257460 - DNA, 25 bp, Homo sapien
aaagtaggtgaaagagaacagtaat

SEQ ID NO: 4257461 - DNA, 25 bp, Homo sapien
taaaacaggacataatgcccattcc

SEQ ID NO: 4257462 - DNA, 25 bp, Homo sapien
tctaaatgcttaggtaccatacaca

SEQ ID NO: 4257463 - DNA, 25 bp, Homo sapien
cctaaagttatgtgttaagatagaa

SEQ ID NO: 4257464 - DNA, 25 bp, Homo sapien
tgagacatttgcatagtaagtactg

SEQ ID NO: 4257465 - DNA, 25 bp, Homo sapien
catttgcatagtaagtactgttcac

SEQ ID NO: 4257466 - DNA, 25 bp, Homo sapien
gctgctgagacatttgcatagtaag

SEQ ID NO: 4257467 - DNA, 25 bp, Homo sapien
gctgagacatttgcatagtaagtac

SEQ ID NO: 4257468 - DNA, 25 bp, Homo sapien
aatctgttatcactgattgctcagc

SEQ ID NO: 4257469 - DNA, 25 bp, Homo sapien
ccccaaaacaatgctaatcaggtta

SEQ ID NO: 4257470 - DNA, 25 bp, Homo sapien
gctcagcttccagtcaaaaaacagt

SEQ ID NO: 4257471 - DNA, 25 bp, Homo sapien
taaagggtaattggagtgctgtacc

SEQ ID NO: 4257472 - DNA, 25 bp, Homo sapien
tgcatggtgatgtataaagccctac

SEQ ID NO: 4257473 - DNA, 25 bp, Homo sapien
tattctcttgggagatacaactggg

SEQ ID NO: 4257474 - DNA, 25 bp, Homo sapien
taatggcgcaaaggcattaagcacc

SEQ ID NO: 4257475 - DNA, 25 bp, Homo sapien
tactacaaacaagctctaagaggca

SEQ ID NO: 4257476 - DNA, 25 bp, Homo sapien
taggaaggttacgaccccattggca

SEQ ID NO: 4257477 - DNA, 25 bp, Homo sapien
caaattaactgcacacagaagctgt

SEQ ID NO: 4257478 - DNA, 25 bp, Homo sapien
tctcaggtactcactgtgcaaatgt

SEQ ID NO: 4257479 - DNA, 25 bp, Homo sapien
cagaagctgtaacatgaagggaact

SEQ ID NO: 4257480 - DNA, 25 bp, Homo sapien
tacagagagctaacatcaagctacg

SEQ ID NO: 4257481 - DNA, 25 bp, Homo sapien
catgacttgttcaaaagacgaggca

SEQ ID NO: 4257482 - DNA, 25 bp, Homo sapien
gcatttaataggctttctctcaggc

SEQ ID NO: 4257483 - DNA, 25 bp, Homo sapien
tgttcatggtttgcccaaatctggc

SEQ ID NO: 4257484 - DNA, 25 bp, Homo sapien
gagagcagtactgaagctaagcttc

SEQ ID NO: 4257485 - DNA, 25 bp, Homo sapien
gcttcaggagcacgaggtagtttct

SEQ ID NO: 4257486 - DNA, 25 bp, Homo sapien
aattcctacggaaatgactgtcatg

SEQ ID NO: 4257487 - DNA, 25 bp, Homo sapien
tgtccaacatatttgagatctcagg

SEQ ID NO: 4257488 - DNA, 25 bp, Homo sapien
ctgtctataagcaggtaggcagtct

SEQ ID NO: 4257489 - DNA, 25 bp, Homo sapien
ttttctgtctataagcaggtaggca

SEQ ID NO: 4257490 - DNA, 25 bp, Homo sapien
tctgtctataagcaggtaggcagtc

SEQ ID NO: 4257491 - DNA, 25 bp, Homo sapien
ctataagcaggtaggcagtctctat

SEQ ID NO: 4257492 - DNA, 25 bp, Homo sapien
ttagctgccctccaccaaatttatt

SEQ ID NO: 4257493 - DNA, 25 bp, Homo sapien
ttttagctgccctccaccaaattta

SEQ ID NO: 4257494 - DNA, 25 bp, Homo sapien
gagttttagctgccctccaccaaat

SEQ ID NO: 4257495 - DNA, 25 bp, Homo sapien
ctagagttttagctgccctccacca

SEQ ID NO: 4257496 - DNA, 25 bp, Homo sapien
ccctgatggtataacaggcatctca

SEQ ID NO: 4257497 - DNA, 25 bp, Homo sapien
gtcacaaaatcctaatgaattaact

SEQ ID NO: 4257498 - DNA, 25 bp, Homo sapien
aaaaatccctgatggtataacaggc

SEQ ID NO: 4257499 - DNA, 25 bp, Homo sapien
aatccctgatggtataacaggcatc

SEQ ID NO: 4257500 - DNA, 25 bp, Homo sapien
tcaccagtggtcaagtcactttgca

SEQ ID NO: 4257501 - DNA, 25 bp, Homo sapien
gcagattcttgcttcagataccagt

SEQ ID NO: 4257502 - DNA, 25 bp, Homo sapien
gataccagttgctttaaaccaggga

SEQ ID NO: 4257503 - DNA, 25 bp, Homo sapien
cagggttgcccatgatgtcttatta

SEQ ID NO: 4257504 - DNA, 25 bp, Homo sapien
agtaagtccttcagagcattcctca

SEQ ID NO: 4257505 - DNA, 25 bp, Homo sapien
cctcactgtggtgtgcgaccattgt

SEQ ID NO: 4257506 - DNA, 25 bp, Homo sapien
aagtccttcagagcattcctcactg

SEQ ID NO: 4257507 - DNA, 25 bp, Homo sapien
tgttcgggaggcaagtcttctagtt

SEQ ID NO: 4257508 - DNA, 25 bp, Homo sapien
catcttgaagcatatctgctactgt

SEQ ID NO: 4257509 - DNA, 25 bp, Homo sapien
actgaattttcaatgtgaccacatg

SEQ ID NO: 4257510 - DNA, 25 bp, Homo sapien
cagtggaactggattccactttcca

SEQ ID NO: 4257511 - DNA, 25 bp, Homo sapien
catcaggggcatctgtcacgtaaga

SEQ ID NO: 4257512 - DNA, 25 bp, Homo sapien
gatcagctggttgaaaagcatatcc

SEQ ID NO: 4257513 - DNA, 25 bp, Homo sapien
gcaatcatattcaatggcgttttca

SEQ ID NO: 4257514 - DNA, 25 bp, Homo sapien
taacctagagacagcaatgccattt

SEQ ID NO: 4257515 - DNA, 25 bp, Homo sapien
gttttcataatgttccaccacacag

SEQ ID NO: 4257516 - DNA, 25 bp, Homo sapien
tactcaaggtgtttatgcagcgcac

SEQ ID NO: 4257517 - DNA, 25 bp, Homo sapien
cggccacactactattagaaagagg

SEQ ID NO: 4257518 - DNA, 25 bp, Homo sapien
gatgattaataagcaccggccacac

SEQ ID NO: 4257519 - DNA, 25 bp, Homo sapien
gagagcacggtacccataagtcttt

SEQ ID NO: 4257520 - DNA, 25 bp, Homo sapien
tactaatgcctctataagctctgtc

SEQ ID NO: 4257521 - DNA, 25 bp, Homo sapien
gggcacccaggatccacaattagtc

SEQ ID NO: 4257522 - DNA, 25 bp, Homo sapien
gcatctgaattgtactgtggcaaac

SEQ ID NO: 4257523 - DNA, 25 bp, Homo sapien
tggcaaactgccagaagggtatcat

SEQ ID NO: 4257524 - DNA, 25 bp, Homo sapien
acagaatcctaccaacttctgaaga

SEQ ID NO: 4257525 - DNA, 25 bp, Homo sapien
tgaagatgacttagtgcacaccaac

SEQ ID NO: 4257526 - DNA, 25 bp, Homo sapien
aatcctaccaacttctgaagatgac

SEQ ID NO: 4257527 - DNA, 25 bp, Homo sapien
gatgacttagtgcacaccaaccgta

SEQ ID NO: 4257528 - DNA, 25 bp, Homo sapien
tagcaaactgttgcggttaccctcc

SEQ ID NO: 4257529 - DNA, 25 bp, Homo sapien
cgtgctagtgtttggcgagagttcc

SEQ ID NO: 4257530 - DNA, 25 bp, Homo sapien
tgaaggcagtcttagaagcttttgc

SEQ ID NO: 4257531 - DNA, 25 bp, Homo sapien
cccgtttctgggagtaatgctgaac

SEQ ID NO: 4257532 - DNA, 25 bp, Homo sapien
aaactgtcctggcattaaagtttgc

SEQ ID NO: 4257533 - DNA, 25 bp, Homo sapien
gtctaaaactgtcctggcattaaag

SEQ ID NO: 4257534 - DNA, 25 bp, Homo sapien
actgtcctggcattaaagtttgctg

SEQ ID NO: 4257535 - DNA, 25 bp, Homo sapien
ctaaaactgtcctggcattaaagtt

SEQ ID NO: 4257536 - DNA, 25 bp, Homo sapien
gcactctgtttgaaaagccgtaata

SEQ ID NO: 4257537 - DNA, 25 bp, Homo sapien
ggaacttacatgtttgcaggcgtca

SEQ ID NO: 4257538 - DNA, 25 bp, Homo sapien
gtacaatattaatgcactctgtttg

SEQ ID NO: 4257539 - DNA, 25 bp, Homo sapien
tatttaggaatttatggaacttaca

SEQ ID NO: 4257540 - DNA, 25 bp, Homo sapien
taaatagggtaatcatgagtagagg

SEQ ID NO: 4257541 - DNA, 25 bp, Homo sapien
taatcatgagtagaggccaaagaat

SEQ ID NO: 4257542 - DNA, 25 bp, Homo sapien
gatctaacaatacggactgctgtgt

SEQ ID NO: 4257543 - DNA, 25 bp, Homo sapien
tagataaagatctaacaatacggac

SEQ ID NO: 4257544 - DNA, 25 bp, Homo sapien
caacgtgattgatactaaggaccca

SEQ ID NO: 4257545 - DNA, 25 bp, Homo sapien
tacaacaccttttgaatggaccctg

SEQ ID NO: 4257546 - DNA, 25 bp, Homo sapien
ggcacatgcattacacccagggtag

SEQ ID NO: 4257547 - DNA, 25 bp, Homo sapien
gtagaacgctccacccaagcatgga

SEQ ID NO: 4257548 - DNA, 25 bp, Homo sapien
ggcaatcttggctggtggacccttc

SEQ ID NO: 4257549 - DNA, 25 bp, Homo sapien
tggacccttcggatcactcacattg

SEQ ID NO: 4257550 - DNA, 25 bp, Homo sapien
tcagatggcccgagtgttttaaagg

SEQ ID NO: 4257551 - DNA, 25 bp, Homo sapien
gagttgcctcgttcaaatgatccat

SEQ ID NO: 4257552 - DNA, 25 bp, Homo sapien
gatacagatgttactatatttctag

SEQ ID NO: 4257553 - DNA, 25 bp, Homo sapien
aatggcctatctagatatgatacag

SEQ ID NO: 4257554 - DNA, 25 bp, Homo sapien
aaagaagacacgttatagttgggcg

SEQ ID NO: 4257555 - DNA, 25 bp, Homo sapien
tatgtgtcctatgtaaatgttttag

SEQ ID NO: 4257556 - DNA, 25 bp, Homo sapien
cacattaggttgaagtgccaagctc

SEQ ID NO: 4257557 - DNA, 25 bp, Homo sapien
gattggatcagtttacccctaaaga

SEQ ID NO: 4257558 - DNA, 25 bp, Homo sapien
gagttatgtgacagacctagtcaag

SEQ ID NO: 4257559 - DNA, 25 bp, Homo sapien
gaaataacctcagcatgcaatggca

SEQ ID NO: 4257560 - DNA, 25 bp, Homo sapien
tacactggagctatttaaatctgga

SEQ ID NO: 4257561 - DNA, 25 bp, Homo sapien
cgtttcatgtggataacacagagct

SEQ ID NO: 4257562 - DNA, 25 bp, Homo sapien
tatctttgtactccagagtggcaca

SEQ ID NO: 4257563 - DNA, 25 bp, Homo sapien
ttaccgttgatagaggtcccatctg

SEQ ID NO: 4257564 - DNA, 25 bp, Homo sapien
aacgacgtggtgactgaggattctc

SEQ ID NO: 4257565 - DNA, 25 bp, Homo sapien
tgcagcccgggttcttgaagagaag

SEQ ID NO: 4257566 - DNA, 25 bp, Homo sapien
cgaataacgcgcattgggaaggcca

SEQ ID NO: 4257567 - DNA, 25 bp, Homo sapien
gacctgaaggcgacttcccctgaaa

SEQ ID NO: 4257568 - DNA, 25 bp, Homo sapien
tgattctgccctcgctgacaacagc

SEQ ID NO: 4257569 - DNA, 25 bp, Homo sapien
ccacttttgattctgccctcgctga

SEQ ID NO: 4257570 - DNA, 25 bp, Homo sapien
gccccggaaaggcactaaaatgcca

SEQ ID NO: 4257571 - DNA, 25 bp, Homo sapien
acaacagccgcaaggaccctctccc

SEQ ID NO: 4257572 - DNA, 25 bp, Homo sapien
agaaaccccgacaaaactgatcagg

SEQ ID NO: 4257573 - DNA, 25 bp, Homo sapien
ccagagtccgaggtaaacaacgagc

SEQ ID NO: 4257574 - DNA, 25 bp, Homo sapien
gcaccacaatggcactaggactttg

SEQ ID NO: 4257575 - DNA, 25 bp, Homo sapien
caggagtttcccgaaatgaaagagg

SEQ ID NO: 4257576 - DNA, 25 bp, Homo sapien
aattattagttgactcatcccggcc

SEQ ID NO: 4257577 - DNA, 25 bp, Homo sapien
ttaaattattagttgactcatcccg

SEQ ID NO: 4257578 - DNA, 25 bp, Homo sapien
ttattagttgactcatcccggccgc

SEQ ID NO: 4257579 - DNA, 25 bp, Homo sapien
tagttgactcatcccggccgctgtc

SEQ ID NO: 4257580 - DNA, 25 bp, Homo sapien
ttaatacaaaatcaccccgctcgca

SEQ ID NO: 4257581 - DNA, 25 bp, Homo sapien
ccgccgcccggagccttccccagcg

SEQ ID NO: 4257582 - DNA, 25 bp, Homo sapien
acaaaatcaccccgctcgcagcccc

SEQ ID NO: 4257583 - DNA, 25 bp, Homo sapien
aaaatcaccccgctcgcagccccag

SEQ ID NO: 4257584 - DNA, 25 bp, Homo sapien
tcgaaacgctcggaatgtttatcct

SEQ ID NO: 4257585 - DNA, 25 bp, Homo sapien
agaaacgtgtacagcaataaaggcc

SEQ ID NO: 4257586 - DNA, 25 bp, Homo sapien
aggccaggagcctcgaaacgctcgg

SEQ ID NO: 4257587 - DNA, 25 bp, Homo sapien
tacgcaggtgacaggcgctgaggaa

SEQ ID NO: 4257588 - DNA, 25 bp, Homo sapien
gttttttggctttagctgcaggtgg

SEQ ID NO: 4257589 - DNA, 25 bp, Homo sapien
catataaggatgtgtgtctgagcca

SEQ ID NO: 4257590 - DNA, 25 bp, Homo sapien
gtctgagccatatgttttgctgtca

SEQ ID NO: 4257591 - DNA, 25 bp, Homo sapien
tctgggaatatggttctctgttggc

SEQ ID NO: 4257592 - DNA, 25 bp, Homo sapien
tccccttgtcagtccgaagccttct

SEQ ID NO: 4257593 - DNA, 25 bp, Homo sapien
tgaggacctcctttctgctatcttc

SEQ ID NO: 4257594 - DNA, 25 bp, Homo sapien
cttctccagttgttagttatttcct

SEQ ID NO: 4257595 - DNA, 25 bp, Homo sapien
tatcttctttaacgtgcagcttgat

SEQ ID NO: 4257596 - DNA, 25 bp, Homo sapien
tggaagtacagttctcaaaccagtc

SEQ ID NO: 4257597 - DNA, 25 bp, Homo sapien
cataataaactagcatttgggcact

SEQ ID NO: 4257598 - DNA, 25 bp, Homo sapien
cctggagtcacttggaaaagctaac

SEQ ID NO: 4257599 - DNA, 25 bp, Homo sapien
tgaaccagcagtagaccaaaatttg

SEQ ID NO: 4257600 - DNA, 25 bp, Homo sapien
taaggctagactgctttaaaggtca

SEQ ID NO: 4257601 - DNA, 25 bp, Homo sapien
aggctagactgctttaaaggtcaat

SEQ ID NO: 4257602 - DNA, 25 bp, Homo sapien
aaggctagactgctttaaaggtcaa

SEQ ID NO: 4257603 - DNA, 25 bp, Homo sapien
ttaaggctagactgctttaaaggtc

SEQ ID NO: 4257604 - DNA, 25 bp, Homo sapien
tccatctgttacatctgaattcatg

SEQ ID NO: 4257605 - DNA, 25 bp, Homo sapien
cagattccatctgttacatctgaat

SEQ ID NO: 4257606 - DNA, 25 bp, Homo sapien
tctgttacatctgaattcatgcata

SEQ ID NO: 4257607 - DNA, 25 bp, Homo sapien
gaattcatgcataattgattatcca

SEQ ID NO: 4257608 - DNA, 25 bp, Homo sapien
tagaagccatagtgaaaatccaggt

SEQ ID NO: 4257609 - DNA, 25 bp, Homo sapien
gaactacctctgtgattaactgctg

SEQ ID NO: 4257610 - DNA, 25 bp, Homo sapien
gaatactagtgcgtttttaagagcc

SEQ ID NO: 4257611 - DNA, 25 bp, Homo sapien
caagcagccgcttgtatgttaagag

SEQ ID NO: 4257612 - DNA, 25 bp, Homo sapien
cacatagccttgttgttaatcccca

SEQ ID NO: 4257613 - DNA, 25 bp, Homo sapien
tacatgcctagcttccaggaaaact

SEQ ID NO: 4257614 - DNA, 25 bp, Homo sapien
cctgggaacttgctactgtatctca

SEQ ID NO: 4257615 - DNA, 25 bp, Homo sapien
tctggtcccaaattttctagagctg

SEQ ID NO: 4257616 - DNA, 25 bp, Homo sapien
ggcgggcagcttaagtccacatagg

SEQ ID NO: 4257617 - DNA, 25 bp, Homo sapien
gatgaagttctctctggcactgcta

SEQ ID NO: 4257618 - DNA, 25 bp, Homo sapien
agttgcctgtgaagcagctggacca

SEQ ID NO: 4257619 - DNA, 25 bp, Homo sapien
gggtgcgtcacaaatcaggtcatag

SEQ ID NO: 4257620 - DNA, 25 bp, Homo sapien
tccacacgaggaacagattactgaa

SEQ ID NO: 4257621 - DNA, 25 bp, Homo sapien
ccaaccaggaagagtctgaagccct

SEQ ID NO: 4257622 - DNA, 25 bp, Homo sapien
taaacagtaggtgcctgctagctcg

SEQ ID NO: 4257623 - DNA, 25 bp, Homo sapien
gctagctcgaagtaggaagtgttca

SEQ ID NO: 4257624 - DNA, 25 bp, Homo sapien
gagcaaaatatttcgtggcagcatt

SEQ ID NO: 4257625 - DNA, 25 bp, Homo sapien
tctgatttactcgagatagtcctca

SEQ ID NO: 4257626 - DNA, 25 bp, Homo sapien
tatgtatgccacaaagctatgacag

SEQ ID NO: 4257627 - DNA, 25 bp, Homo sapien
tctcctgagagaagcggcaagtttg

SEQ ID NO: 4257628 - DNA, 25 bp, Homo sapien
ccgggagccttagcactggagcaat

SEQ ID NO: 4257629 - DNA, 25 bp, Homo sapien
caaccaggacactttgagagaggac

SEQ ID NO: 4257630 - DNA, 25 bp, Homo sapien
gaatgccactgagaaagttcgccaa

SEQ ID NO: 4257631 - DNA, 25 bp, Homo sapien
tgcgtttccccagtaagcacgtggc

SEQ ID NO: 4257632 - DNA, 25 bp, Homo sapien
ccctgctaagaggacggccctttct

SEQ ID NO: 4257633 - DNA, 25 bp, Homo sapien
ctgctaagaggacggccctttcttc

SEQ ID NO: 4257634 - DNA, 25 bp, Homo sapien
ccacattcacgccagcagcctctcc

SEQ ID NO: 4257635 - DNA, 25 bp, Homo sapien
caaacccacattcacgccagcagcc

SEQ ID NO: 4257636 - DNA, 25 bp, Homo sapien
atgctgagcagactcgcgatccggt

SEQ ID NO: 4257637 - DNA, 25 bp, Homo sapien
tgggggaacattaccactcccgcag

SEQ ID NO: 4257638 - DNA, 25 bp, Homo sapien
agaacgcaccgagaggctccccttt

SEQ ID NO: 4257639 - DNA, 25 bp, Homo sapien
gaggcggagatggaccgggaaagga

SEQ ID NO: 4257640 - DNA, 25 bp, Homo sapien
aaacgaatggcatcttcaaatcccc

SEQ ID NO: 4257641 - DNA, 25 bp, Homo sapien
ccacacccagacagaaaacgaatgg

SEQ ID NO: 4257642 - DNA, 25 bp, Homo sapien
cagccagggtctattgggcaggtgt

SEQ ID NO: 4257643 - DNA, 25 bp, Homo sapien
cggtgacctgaaggagtttgttcag

SEQ ID NO: 4257644 - DNA, 25 bp, Homo sapien
ctgcgtgagaaaaggggctcggaag

SEQ ID NO: 4257645 - DNA, 25 bp, Homo sapien
tctgcgtgagaaaaggggctcggaa

SEQ ID NO: 4257646 - DNA, 25 bp, Homo sapien
ctccaaggtccgtctgcgtgagaaa

SEQ ID NO: 4257647 - DNA, 25 bp, Homo sapien
ccctccaaggtccgtctgcgtgaga

SEQ ID NO: 4257648 - DNA, 25 bp, Homo sapien
cggcgtcggacttccgaggcggcgg

SEQ ID NO: 4257649 - DNA, 25 bp, Homo sapien
tgcaacttgacttcaagttgtcctc

SEQ ID NO: 4257650 - DNA, 25 bp, Homo sapien
cggctgccgcggaagttaattgcaa

SEQ ID NO: 4257651 - DNA, 25 bp, Homo sapien
tgcgggcctgaaaccaagaacggct

SEQ ID NO: 4257652 - DNA, 25 bp, Homo sapien
ggcgtcccccgcgggagcccgcagc

SEQ ID NO: 4257653 - DNA, 25 bp, Homo sapien
agcccgcagccacccgggacgcgca

SEQ ID NO: 4257654 - DNA, 25 bp, Homo sapien
ggagcccgcagccacccgggacgcg

SEQ ID NO: 4257655 - DNA, 25 bp, Homo sapien
cgtcccccgcgggagcccgcagcca

SEQ ID NO: 4257656 - DNA, 25 bp, Homo sapien
gacgtggcgcttcggaccgggcacg

SEQ ID NO: 4257657 - DNA, 25 bp, Homo sapien
tggcgcttcggaccgggcacgctgc

SEQ ID NO: 4257658 - DNA, 25 bp, Homo sapien
ggctcggcggaccccgcgtagccgc

SEQ ID NO: 4257659 - DNA, 25 bp, Homo sapien
gctcggcggaccccgcgtagccgcc

SEQ ID NO: 4257660 - DNA, 25 bp, Homo sapien
tcctcctcttgtcgcctgcggcttc

SEQ ID NO: 4257661 - DNA, 25 bp, Homo sapien
cgcgcactcctcctcttgtcgcctg

SEQ ID NO: 4257662 - DNA, 25 bp, Homo sapien
gcactcctcctcttgtcgcctgcgg

SEQ ID NO: 4257663 - DNA, 25 bp, Homo sapien
ccaacacgcgcactcctcctcttgt

SEQ ID NO: 4257664 - DNA, 25 bp, Homo sapien
ctcgtccgtcttagccccttgtcca

SEQ ID NO: 4257665 - DNA, 25 bp, Homo sapien
ccgtcttagccccttgtccaggagc

SEQ ID NO: 4257666 - DNA, 25 bp, Homo sapien
caccctcgtccgtcttagccccttg

SEQ ID NO: 4257667 - DNA, 25 bp, Homo sapien
gtccgtcttagccccttgtccagga

SEQ ID NO: 4257668 - DNA, 25 bp, Homo sapien
gcctaggcaaggtccaatttcccca

SEQ ID NO: 4257669 - DNA, 25 bp, Homo sapien
gacgcctaggcaaggtccaatttcc

SEQ ID NO: 4257670 - DNA, 25 bp, Homo sapien
ccactggaacaagacgcctaggcaa

SEQ ID NO: 4257671 - DNA, 25 bp, Homo sapien
gaacaagacgcctaggcaaggtcca

SEQ ID NO: 4257672 - DNA, 25 bp, Homo sapien
cccaggcaggatgagaatgtttatg

SEQ ID NO: 4257673 - DNA, 25 bp, Homo sapien
gagcaagcattgctcccaggcactg

SEQ ID NO: 4257674 - DNA, 25 bp, Homo sapien
actggggaaacccacttggtctgca

SEQ ID NO: 4257675 - DNA, 25 bp, Homo sapien
gagagcggactgtcaaatacggccc

SEQ ID NO: 4257676 - DNA, 25 bp, Homo sapien
agtcaaaggggctacagaagtcagt

SEQ ID NO: 4257677 - DNA, 25 bp, Homo sapien
aaagtcaaaggggctacagaagtca

SEQ ID NO: 4257678 - DNA, 25 bp, Homo sapien
aagtcaaaggggctacagaagtcag

SEQ ID NO: 4257679 - DNA, 25 bp, Homo sapien
tgaggtgctaattcactaaacaaac

SEQ ID NO: 4257680 - DNA, 25 bp, Homo sapien
taattcactaaacaaacagtacatg

SEQ ID NO: 4257681 - DNA, 25 bp, Homo sapien
aattcactaaacaaacagtacatgt

SEQ ID NO: 4257682 - DNA, 25 bp, Homo sapien
attcactaaacaaacagtacatgtt

SEQ ID NO: 4257683 - DNA, 25 bp, Homo sapien
tgccaaagaattatgcacgaataaa

SEQ ID NO: 4257684 - DNA, 25 bp, Homo sapien
ggtgccaaagaattatgcacgaata

SEQ ID NO: 4257685 - DNA, 25 bp, Homo sapien
caaagaattatgcacgaataaaacc

SEQ ID NO: 4257686 - DNA, 25 bp, Homo sapien
gggtgccaaagaattatgcacgaat

SEQ ID NO: 4257687 - DNA, 25 bp, Homo sapien
cattgacctcactgtactccttggc

SEQ ID NO: 4257688 - DNA, 25 bp, Homo sapien
gcagataacatgtgaaggaggcttc

SEQ ID NO: 4257689 - DNA, 25 bp, Homo sapien
acaccctaacactgaagaggagtcc

SEQ ID NO: 4257690 - DNA, 25 bp, Homo sapien
gaggagtccccgaaacatttcagcc

SEQ ID NO: 4257691 - DNA, 25 bp, Homo sapien
tctgtatccaaccactcccagtgtt

SEQ ID NO: 4257692 - DNA, 25 bp, Homo sapien
tatcagtaatagcatatttcctctg

SEQ ID NO: 4257693 - DNA, 25 bp, Homo sapien
tttcctctgggagatatgaatacag

SEQ ID NO: 4257694 - DNA, 25 bp, Homo sapien
cactcccagtgtttcagtgatcata

SEQ ID NO: 4257695 - DNA, 25 bp, Homo sapien
ctttgtaatgcccttgagtgatcca

SEQ ID NO: 4257696 - DNA, 25 bp, Homo sapien
aacagtttgaattcactaaggtcac

SEQ ID NO: 4257697 - DNA, 25 bp, Homo sapien
cagaaaacataatagaccgagagag

SEQ ID NO: 4257698 - DNA, 25 bp, Homo sapien
ccaggcctttgctctgaagttaaag

SEQ ID NO: 4257699 - DNA, 25 bp, Homo sapien
tatatttgacaccatctggcactcc

SEQ ID NO: 4257700 - DNA, 25 bp, Homo sapien
cacctggtagtccttagggtctcca

SEQ ID NO: 4257701 - DNA, 25 bp, Homo sapien
cctggaatggtgagctctgaagtat

SEQ ID NO: 4257702 - DNA, 25 bp, Homo sapien
gtataactaattccatccctgctgg

SEQ ID NO: 4257703 - DNA, 25 bp, Homo sapien
ccattgtgtgcaatcaagcttatca

SEQ ID NO: 4257704 - DNA, 25 bp, Homo sapien
tgcccattgtgtgcaatcaagctta

SEQ ID NO: 4257705 - DNA, 25 bp, Homo sapien
cttctgcccattgtgtgcaatcaag

SEQ ID NO: 4257706 - DNA, 25 bp, Homo sapien
tctgcccattgtgtgcaatcaagct

SEQ ID NO: 4257707 - DNA, 25 bp, Homo sapien
ctgcttttgatagcatcggcaatgg

SEQ ID NO: 4257708 - DNA, 25 bp, Homo sapien
tgttgatgccactttcactgtaggt

SEQ ID NO: 4257709 - DNA, 25 bp, Homo sapien
cagattcaaaatactggttgggttc

SEQ ID NO: 4257710 - DNA, 25 bp, Homo sapien
gctgcagacattggcattgtgtatg

SEQ ID NO: 4257711 - DNA, 25 bp, Homo sapien
tccttgctagagatgttaccgcctc

SEQ ID NO: 4257712 - DNA, 25 bp, Homo sapien
atgttaccgcctccagcaaagtctg

SEQ ID NO: 4257713 - DNA, 25 bp, Homo sapien
ttgctagagatgttaccgcctccag

SEQ ID NO: 4257714 - DNA, 25 bp, Homo sapien
ctagagatgttaccgcctccagcaa

SEQ ID NO: 4257715 - DNA, 25 bp, Homo sapien
tatcctcccaacttttggaagttgc

SEQ ID NO: 4257716 - DNA, 25 bp, Homo sapien
cagtggtatcctcccaacttttgga

SEQ ID NO: 4257717 - DNA, 25 bp, Homo sapien
tctcagtggtatcctcccaactttt

SEQ ID NO: 4257718 - DNA, 25 bp, Homo sapien
ctttctcagtggtatcctcccaact

SEQ ID NO: 4257719 - DNA, 25 bp, Homo sapien
tagcatttatcaccttctgtactcc

SEQ ID NO: 4257720 - DNA, 25 bp, Homo sapien
cattgcaacatttcaaagatgatac

SEQ ID NO: 4257721 - DNA, 25 bp, Homo sapien
catttcaaagatgatacgggcaatc

SEQ ID NO: 4257722 - DNA, 25 bp, Homo sapien
cttttttatctagatagcatttatc

SEQ ID NO: 4257723 - DNA, 25 bp, Homo sapien
caactatttatagcaatcagctggc

SEQ ID NO: 4257724 - DNA, 25 bp, Homo sapien
aatcatggccattgtcttacagttg

SEQ ID NO: 4257725 - DNA, 25 bp, Homo sapien
tgggaaatcgttacaggtggaagaa

SEQ ID NO: 4257726 - DNA, 25 bp, Homo sapien
ccagtccctcattagatcaatcatg

SEQ ID NO: 4257727 - DNA, 25 bp, Homo sapien
tactgacacgctcatatttggcggg

SEQ ID NO: 4257728 - DNA, 25 bp, Homo sapien
gaaatgctgcttggtactgacacgc

SEQ ID NO: 4257729 - DNA, 25 bp, Homo sapien
gctgcttggtactgacacgctcata

SEQ ID NO: 4257730 - DNA, 25 bp, Homo sapien
agtctggtgttggacttccagcatt

SEQ ID NO: 4257731 - DNA, 25 bp, Homo sapien
agctctatgatctctctggattctg

SEQ ID NO: 4257732 - DNA, 25 bp, Homo sapien
ccttccagatattctgtggcagaaa

SEQ ID NO: 4257733 - DNA, 25 bp, Homo sapien
gggccccgtcttctggtataatgtg

SEQ ID NO: 4257734 - DNA, 25 bp, Homo sapien
ccccgtcttctggtataatgtggaa

SEQ ID NO: 4257735 - DNA, 25 bp, Homo sapien
ggctgaaggttcagaggattggaca

SEQ ID NO: 4257736 - DNA, 25 bp, Homo sapien
tcctgttccccaatgatggtggctg

SEQ ID NO: 4257737 - DNA, 25 bp, Homo sapien
ccaaaagaccttatgtgatttatca

SEQ ID NO: 4257738 - DNA, 25 bp, Homo sapien
cccactacccaaaagaccttatgtg

SEQ ID NO: 4257739 - DNA, 25 bp, Homo sapien
ggaataaccatcaaaattatcccaa

SEQ ID NO: 4257740 - DNA, 25 bp, Homo sapien
gaaagggataggctggaataaccat

SEQ ID NO: 4257741 - DNA, 25 bp, Homo sapien
aagggttctaagtcttgctgcttag

SEQ ID NO: 4257742 - DNA, 25 bp, Homo sapien
gggataggctggaataaccatcaaa

SEQ ID NO: 4257743 - DNA, 25 bp, Homo sapien
tgggaagcaggcattcccttcctag

SEQ ID NO: 4257744 - DNA, 25 bp, Homo sapien
gtccatcacagggaggcttctcatg

SEQ ID NO: 4257745 - DNA, 25 bp, Homo sapien
cacagggaggcttctcatggtggtt

SEQ ID NO: 4257746 - DNA, 25 bp, Homo sapien
gaggccacatcaaactgggaagcag

SEQ ID NO: 4257747 - DNA, 25 bp, Homo sapien
gaatctcggtaccagccagtctctc

SEQ ID NO: 4257748 - DNA, 25 bp, Homo sapien
agaatctcggtaccagccagtctct

SEQ ID NO: 4257749 - DNA, 25 bp, Homo sapien
gcagaatctcggtaccagccagtct

SEQ ID NO: 4257750 - DNA, 25 bp, Homo sapien
aggcagaatctcggtaccagccagt

SEQ ID NO: 4257751 - DNA, 25 bp, Homo sapien
tgagaagggccaaaaaacacactaa

SEQ ID NO: 4257752 - DNA, 25 bp, Homo sapien
gttccattacttttcgtgagtcatg

SEQ ID NO: 4257753 - DNA, 25 bp, Homo sapien
atttgtgcattgcttggatagcacc

SEQ ID NO: 4257754 - DNA, 25 bp, Homo sapien
gcttggatagcacctgctttcctga

SEQ ID NO: 4257755 - DNA, 25 bp, Homo sapien
caagaagggccgctgagatatcatc

SEQ ID NO: 4257756 - DNA, 25 bp, Homo sapien
tctgcttgactcttttgactggaaa

SEQ ID NO: 4257757 - DNA, 25 bp, Homo sapien
aatctcttgaatgggcaggtttggt

SEQ ID NO: 4257758 - DNA, 25 bp, Homo sapien
gatgtcattgccagggtctgcttga

SEQ ID NO: 4257759 - DNA, 25 bp, Homo sapien
ccagcaggattttgatgtgtttatt

SEQ ID NO: 4257760 - DNA, 25 bp, Homo sapien
tttgatgtgtttattgatgtagtta

SEQ ID NO: 4257761 - DNA, 25 bp, Homo sapien
gcaggattttgatgtgtttattgat

SEQ ID NO: 4257762 - DNA, 25 bp, Homo sapien
ttgatgtgtttattgatgtagttac

SEQ ID NO: 4257763 - DNA, 25 bp, Homo sapien
cctcctctagtgataaaagcccgtt

SEQ ID NO: 4257764 - DNA, 25 bp, Homo sapien
caccaaggagggctaaaagcttcta

SEQ ID NO: 4257765 - DNA, 25 bp, Homo sapien
tatatcatcaggcaaacctcctcct

SEQ ID NO: 4257766 - DNA, 25 bp, Homo sapien
gattaaattggcatctgaacagagc

SEQ ID NO: 4257767 - DNA, 25 bp, Homo sapien
gagcttgagtaagccagaagaaata

SEQ ID NO: 4257768 - DNA, 25 bp, Homo sapien
aggaatagccttgaggaatcataga

SEQ ID NO: 4257769 - DNA, 25 bp, Homo sapien
atagagcttgagtaagccagaagaa

SEQ ID NO: 4257770 - DNA, 25 bp, Homo sapien
attcaaggaatagccttgaggaatc

SEQ ID NO: 4257771 - DNA, 25 bp, Homo sapien
catcacttctaccatcatctggcat

SEQ ID NO: 4257772 - DNA, 25 bp, Homo sapien
tcaacatcacttctaccatcatctg

SEQ ID NO: 4257773 - DNA, 25 bp, Homo sapien
caacatcacttctaccatcatctgg

SEQ ID NO: 4257774 - DNA, 25 bp, Homo sapien
aacatcacttctaccatcatctggc

SEQ ID NO: 4257775 - DNA, 25 bp, Homo sapien
attgaaatgtatggctccaactgtg

SEQ ID NO: 4257776 - DNA, 25 bp, Homo sapien
tctccttccttgatataacatgcaa

SEQ ID NO: 4257777 - DNA, 25 bp, Homo sapien
tccaactgtgagtgttcctcgactc

SEQ ID NO: 4257778 - DNA, 25 bp, Homo sapien
tataacatgcaacccttctgtgtgt

SEQ ID NO: 4257779 - DNA, 25 bp, Homo sapien
cagtctgagagtgggttggcccctc

SEQ ID NO: 4257780 - DNA, 25 bp, Homo sapien
ggcccctctcctgatttatgagcaa

SEQ ID NO: 4257781 - DNA, 25 bp, Homo sapien
tatgagcaatttgttgcgctactga

SEQ ID NO: 4257782 - DNA, 25 bp, Homo sapien
ttgttgcgctactgaaacagcagtc

SEQ ID NO: 4257783 - DNA, 25 bp, Homo sapien
acattgacacgatgcaggcagctca

SEQ ID NO: 4257784 - DNA, 25 bp, Homo sapien
tgacacgatgcaggcagctcagtgc

SEQ ID NO: 4257785 - DNA, 25 bp, Homo sapien
cacgatgcaggcagctcagtgcaga

SEQ ID NO: 4257786 - DNA, 25 bp, Homo sapien
cacagcaaacattgacacgatgcag

SEQ ID NO: 4257787 - DNA, 25 bp, Homo sapien
tgggaacagacagtgacttatgttg

SEQ ID NO: 4257788 - DNA, 25 bp, Homo sapien
ttatgttgatcaggatctctcctgc

SEQ ID NO: 4257789 - DNA, 25 bp, Homo sapien
tgggaagcaggccccttggcccaca

SEQ ID NO: 4257790 - DNA, 25 bp, Homo sapien
tgggtaatggtgacaatctgggaac

SEQ ID NO: 4257791 - DNA, 25 bp, Homo sapien
agcaccagaaactctacacattcct

SEQ ID NO: 4257792 - DNA, 25 bp, Homo sapien
accagaaactctacacattcctttg

SEQ ID NO: 4257793 - DNA, 25 bp, Homo sapien
gcaccagaaactctacacattcctt

SEQ ID NO: 4257794 - DNA, 25 bp, Homo sapien
ccagaaactctacacattcctttgg

SEQ ID NO: 4257795 - DNA, 25 bp, Homo sapien
atgtagttcctcagtggggggccac

SEQ ID NO: 4257796 - DNA, 25 bp, Homo sapien
ttcctcagtggggggccactggcac

SEQ ID NO: 4257797 - DNA, 25 bp, Homo sapien
ctggatgtagttcctcagtgggggg

SEQ ID NO: 4257798 - DNA, 25 bp, Homo sapien
ggatgtagttcctcagtggggggcc

SEQ ID NO: 4257799 - DNA, 25 bp, Homo sapien
tcttataggtagcttgaaatctgcc

SEQ ID NO: 4257800 - DNA, 25 bp, Homo sapien
cagaggcagtggtttgctagtgtca

SEQ ID NO: 4257801 - DNA, 25 bp, Homo sapien
ctcgtgagaaccaactgtgcgtatc

SEQ ID NO: 4257802 - DNA, 25 bp, Homo sapien
taaaagtttgccagtacacatgtgg

SEQ ID NO: 4257803 - DNA, 25 bp, Homo sapien
actatgcacatcaccttgcacagtc

SEQ ID NO: 4257804 - DNA, 25 bp, Homo sapien
ctatgcacatcaccttgcacagtca

SEQ ID NO: 4257805 - DNA, 25 bp, Homo sapien
tgtttccagtatgactatgcacatc

SEQ ID NO: 4257806 - DNA, 25 bp, Homo sapien
tttccagtatgactatgcacatcac

SEQ ID NO: 4257807 - DNA, 25 bp, Homo sapien
gatgtctgaagatacgttataacct

SEQ ID NO: 4257808 - DNA, 25 bp, Homo sapien
taatcatctgagaaagttgttgtct

SEQ ID NO: 4257809 - DNA, 25 bp, Homo sapien
tataaccttcccaagtatgataatc

SEQ ID NO: 4257810 - DNA, 25 bp, Homo sapien
ccaccatgattagaatgaaataaat

SEQ ID NO: 4257811 - DNA, 25 bp, Homo sapien
gattgcagagccgttgatgcagcgt

SEQ ID NO: 4257812 - DNA, 25 bp, Homo sapien
caatgcccttggctgattgcagagc

SEQ ID NO: 4257813 - DNA, 25 bp, Homo sapien
gccagctcggttctcaaaacggaga

SEQ ID NO: 4257814 - DNA, 25 bp, Homo sapien
gatgcagcgtctgataatgatcata

SEQ ID NO: 4257815 - DNA, 25 bp, Homo sapien
ctgaagcgcaaagggtgttaattca

SEQ ID NO: 4257816 - DNA, 25 bp, Homo sapien
gccgtaagtgggatagagagtacct

SEQ ID NO: 4257817 - DNA, 25 bp, Homo sapien
aaggtgccgtaagtgggatagagag

SEQ ID NO: 4257818 - DNA, 25 bp, Homo sapien
acaaaggtgccgtaagtgggataga

SEQ ID NO: 4257819 - DNA, 25 bp, Homo sapien
ggtgccgtaagtgggatagagagta

SEQ ID NO: 4257820 - DNA, 25 bp, Homo sapien
ttttgtgtaactcatggcaacagaa

SEQ ID NO: 4257821 - DNA, 25 bp, Homo sapien
tttgtgtaactcatggcaacagaat

SEQ ID NO: 4257822 - DNA, 25 bp, Homo sapien
ctgaagcttttccccatatccttac

SEQ ID NO: 4257823 - DNA, 25 bp, Homo sapien
cctgaagcttttccccatatcctta

SEQ ID NO: 4257824 - DNA, 25 bp, Homo sapien
tcttggaatgacatcctacctccat

SEQ ID NO: 4257825 - DNA, 25 bp, Homo sapien
ggaatgacatcctacctccatctgg

SEQ ID NO: 4257826 - DNA, 25 bp, Homo sapien
ctgtctcttggaatgacatcctacc

SEQ ID NO: 4257827 - DNA, 25 bp, Homo sapien
atgacatcctacctccatctggctg

SEQ ID NO: 4257828 - DNA, 25 bp, Homo sapien
gttaataaaggattggatgcatcca

SEQ ID NO: 4257829 - DNA, 25 bp, Homo sapien
taataaaggattggatgcatccata

SEQ ID NO: 4257830 - DNA, 25 bp, Homo sapien
gggttaataaaggattggatgcatc

SEQ ID NO: 4257831 - DNA, 25 bp, Homo sapien
ataaaggattggatgcatccatagg

SEQ ID NO: 4257832 - DNA, 25 bp, Homo sapien
ctgtgaagcacaaaaagtacagtgc

SEQ ID NO: 4257833 - DNA, 25 bp, Homo sapien
cacaaaaagtacagtgccaacaaaa

SEQ ID NO: 4257834 - DNA, 25 bp, Homo sapien
tgaagcacaaaaagtacagtgccaa

SEQ ID NO: 4257835 - DNA, 25 bp, Homo sapien
agcacaaaaagtacagtgccaacaa

SEQ ID NO: 4257836 - DNA, 25 bp, Homo sapien
cctggagagtctgcaagaatctggt

SEQ ID NO: 4257837 - DNA, 25 bp, Homo sapien
gcaaaatggtgggtcccaagccatt

SEQ ID NO: 4257838 - DNA, 25 bp, Homo sapien
gcctatagttagtatcctctttaaa

SEQ ID NO: 4257839 - DNA, 25 bp, Homo sapien
gcattcagtgaccaaatgttcagag

SEQ ID NO: 4257840 - DNA, 25 bp, Homo sapien
tgagctattacacccaagatccaaa

SEQ ID NO: 4257841 - DNA, 25 bp, Homo sapien
cagtagaacctgagctattacaccc

SEQ ID NO: 4257842 - DNA, 25 bp, Homo sapien
ggctcagtagaacctgagctattac

SEQ ID NO: 4257843 - DNA, 25 bp, Homo sapien
gaacctgagctattacacccaagat

SEQ ID NO: 4257844 - DNA, 25 bp, Homo sapien
tcctgtctgtattttcccggagtat

SEQ ID NO: 4257845 - DNA, 25 bp, Homo sapien
gtattttcccggagtatgagttcat

SEQ ID NO: 4257846 - DNA, 25 bp, Homo sapien
cagatccctcctgtctgtattttcc

SEQ ID NO: 4257847 - DNA, 25 bp, Homo sapien
gatccctcctgtctgtattttcccg

SEQ ID NO: 4257848 - DNA, 25 bp, Homo sapien
taatttctcttctgccgctaaccct

SEQ ID NO: 4257849 - DNA, 25 bp, Homo sapien
aatcggcattggcttttgtcttctc

SEQ ID NO: 4257850 - DNA, 25 bp, Homo sapien
caattttcagtgacttactgttctc

SEQ ID NO: 4257851 - DNA, 25 bp, Homo sapien
tcttctgccgctaaccctctgtttt

SEQ ID NO: 4257852 - DNA, 25 bp, Homo sapien
caaggctgtcaacgtagttgtacag

SEQ ID NO: 4257853 - DNA, 25 bp, Homo sapien
tgtacagccccttgaaaccacagct

SEQ ID NO: 4257854 - DNA, 25 bp, Homo sapien
caacgtagttgtacagccccttgaa

SEQ ID NO: 4257855 - DNA, 25 bp, Homo sapien
ttcactagacaaggctgtcaacgta

SEQ ID NO: 4257856 - DNA, 25 bp, Homo sapien
cccatttgactaattgctgtgacac

SEQ ID NO: 4257857 - DNA, 25 bp, Homo sapien
tgcacaagtggaggccaccgcaact

SEQ ID NO: 4257858 - DNA, 25 bp, Homo sapien
gtttcctccacacaagtgcacaagt

SEQ ID NO: 4257859 - DNA, 25 bp, Homo sapien
tcaagtacagtgtccctgaacatcc

SEQ ID NO: 4257860 - DNA, 25 bp, Homo sapien
aagtcacatacacgcactgtctcca

SEQ ID NO: 4257861 - DNA, 25 bp, Homo sapien
ggtctgcaatcttttcctagaacca

SEQ ID NO: 4257862 - DNA, 25 bp, Homo sapien
ttcctagaaccaggattccctcatc

SEQ ID NO: 4257863 - DNA, 25 bp, Homo sapien
tactccacccaaagtcacatacacg

SEQ ID NO: 4257864 - DNA, 25 bp, Homo sapien
ctctggatgtacaccgatgccccta

SEQ ID NO: 4257865 - DNA, 25 bp, Homo sapien
taacattgttgtcccgtgcaaccac

SEQ ID NO: 4257866 - DNA, 25 bp, Homo sapien
tgttgtcccgtgcaaccacattttc

SEQ ID NO: 4257867 - DNA, 25 bp, Homo sapien
caccgatgcccctaacattgttgtc

SEQ ID NO: 4257868 - DNA, 25 bp, Homo sapien
tctaggggaaatctggctgctgatg

SEQ ID NO: 4257869 - DNA, 25 bp, Homo sapien
ctgtagtgaacaatatctggactta

SEQ ID NO: 4257870 - DNA, 25 bp, Homo sapien
aagctgtagtgaacaatatctggac

SEQ ID NO: 4257871 - DNA, 25 bp, Homo sapien
ctaggggaaatctggctgctgatgg

SEQ ID NO: 4257872 - DNA, 25 bp, Homo sapien
aggaactaatgatgataaacagtca

SEQ ID NO: 4257873 - DNA, 25 bp, Homo sapien
tagatcattgcttggaggaactaat

SEQ ID NO: 4257874 - DNA, 25 bp, Homo sapien
atgtagatcattgcttggaggaact

SEQ ID NO: 4257875 - DNA, 25 bp, Homo sapien
ggaactaatgatgataaacagtcat

SEQ ID NO: 4257876 - DNA, 25 bp, Homo sapien
ggaatgacatcaagttctccctgcg

SEQ ID NO: 4257877 - DNA, 25 bp, Homo sapien
tgtccgtcacacttgctaagtaggg

SEQ ID NO: 4257878 - DNA, 25 bp, Homo sapien
tgtgcctcagaatggtacaagaaga

SEQ ID NO: 4257879 - DNA, 25 bp, Homo sapien
tctccctgcgttgagtgtccgtcac

SEQ ID NO: 4257880 - DNA, 25 bp, Homo sapien
caataaggataatggtctagccgaa

SEQ ID NO: 4257881 - DNA, 25 bp, Homo sapien
gaaaaactcataagcatccagcatg

SEQ ID NO: 4257882 - DNA, 25 bp, Homo sapien
tattactcatcggagacaggctgac

SEQ ID NO: 4257883 - DNA, 25 bp, Homo sapien
tagggccaaccaagcacatcagttg

SEQ ID NO: 4257884 - DNA, 25 bp, Homo sapien
tcctgagggtgtttcattaagaacc

SEQ ID NO: 4257885 - DNA, 25 bp, Homo sapien
tactcgaaatagaagcctattagtg

SEQ ID NO: 4257886 - DNA, 25 bp, Homo sapien
tttgtttaaacatttgctcttggta

SEQ ID NO: 4257887 - DNA, 25 bp, Homo sapien
gctcttggtaaatgtacttgtattg

SEQ ID NO: 4257888 - DNA, 25 bp, Homo sapien
gtgagttctctgtttagcatcaaag

SEQ ID NO: 4257889 - DNA, 25 bp, Homo sapien
gagttctctgtttagcatcaaagtc

SEQ ID NO: 4257890 - DNA, 25 bp, Homo sapien
tgagttctctgtttagcatcaaagt

SEQ ID NO: 4257891 - DNA, 25 bp, Homo sapien
cgtgagttctctgtttagcatcaaa

SEQ ID NO: 4257892 - DNA, 25 bp, Homo sapien
gccttctgagaacaatcttttggct

SEQ ID NO: 4257893 - DNA, 25 bp, Homo sapien
ccttctgagaacaatcttttggctt

SEQ ID NO: 4257894 - DNA, 25 bp, Homo sapien
tgccttctgagaacaatcttttggc

SEQ ID NO: 4257895 - DNA, 25 bp, Homo sapien
cacgggtccctccatcgggggatgg

SEQ ID NO: 4257896 - DNA, 25 bp, Homo sapien
gatggatgcggccgccagtgtattc

SEQ ID NO: 4257897 - DNA, 25 bp, Homo sapien
atgcggccgccagtgtattcccttc

SEQ ID NO: 4257898 - DNA, 25 bp, Homo sapien
tgggtcaccacatggccccctccca

SEQ ID NO: 4257899 - DNA, 25 bp, Homo sapien
tagattactgcagtttgcagacagc

SEQ ID NO: 4257900 - DNA, 25 bp, Homo sapien
gattagaggttctaacttcttgatt

SEQ ID NO: 4257901 - DNA, 25 bp, Homo sapien
gcaagattagaggttctaacttctt

SEQ ID NO: 4257902 - DNA, 25 bp, Homo sapien
tgtcctcattccatatagattactg

SEQ ID NO: 4257903 - DNA, 25 bp, Homo sapien
tgcaaagcttcctgcttattcttag

SEQ ID NO: 4257904 - DNA, 25 bp, Homo sapien
cactctatcatgagagcatatgttg

SEQ ID NO: 4257905 - DNA, 25 bp, Homo sapien
tagacggtccatattgtctaatggc

SEQ ID NO: 4257906 - DNA, 25 bp, Homo sapien
tctaactcccactctatcatgagag

SEQ ID NO: 4257907 - DNA, 25 bp, Homo sapien
ttaaaaattactgccgcataactcc

SEQ ID NO: 4257908 - DNA, 25 bp, Homo sapien
aattactgccgcataactccccaga

SEQ ID NO: 4257909 - DNA, 25 bp, Homo sapien
aaattactgccgcataactccccag

SEQ ID NO: 4257910 - DNA, 25 bp, Homo sapien
tactgccgcataactccccagattt

SEQ ID NO: 4257911 - DNA, 25 bp, Homo sapien
cagaccccaggtctaatgtaagaac

SEQ ID NO: 4257912 - DNA, 25 bp, Homo sapien
cttgaatggtgattggtgcttctcc

SEQ ID NO: 4257913 - DNA, 25 bp, Homo sapien
caggtgtgatgacaggccagtgatc

SEQ ID NO: 4257914 - DNA, 25 bp, Homo sapien
tagccccaccaaaagatgaagtggc

SEQ ID NO: 4257915 - DNA, 25 bp, Homo sapien
tcagggatagaagtaggacctttaa

SEQ ID NO: 4257916 - DNA, 25 bp, Homo sapien
tctcttcatcagggatagaagtagg

SEQ ID NO: 4257917 - DNA, 25 bp, Homo sapien
ttcatcagggatagaagtaggacct

SEQ ID NO: 4257918 - DNA, 25 bp, Homo sapien
catcagggatagaagtaggaccttt

SEQ ID NO: 4257919 - DNA, 25 bp, Homo sapien
tctttgccttgatcattgtcttaga

SEQ ID NO: 4257920 - DNA, 25 bp, Homo sapien
gaaatagtgagagaacatctttgcc

SEQ ID NO: 4257921 - DNA, 25 bp, Homo sapien
tctcatttaatgtagagtagaaata

SEQ ID NO: 4257922 - DNA, 25 bp, Homo sapien
ttgccttgatcattgtcttagaagg

SEQ ID NO: 4257923 - DNA, 25 bp, Homo sapien
tccttgtacagtattcatgttagtc

SEQ ID NO: 4257924 - DNA, 25 bp, Homo sapien
catgttagtcatctctgtactgttc

SEQ ID NO: 4257925 - DNA, 25 bp, Homo sapien
cagtattcatgttagtcatctctgt

SEQ ID NO: 4257926 - DNA, 25 bp, Homo sapien
gtacagtattcatgttagtcatctc

SEQ ID NO: 4257927 - DNA, 25 bp, Homo sapien
cctaggaccctattttccagaggat

SEQ ID NO: 4257928 - DNA, 25 bp, Homo sapien
tagtctatgcacctagcataacgcc

SEQ ID NO: 4257929 - DNA, 25 bp, Homo sapien
gatttaccgacataacagagtagac

SEQ ID NO: 4257930 - DNA, 25 bp, Homo sapien
gcataacgccccaaacatgcaagaa

SEQ ID NO: 4257931 - DNA, 25 bp, Homo sapien
gcaatggtaacgtcagtggctgctg

SEQ ID NO: 4257932 - DNA, 25 bp, Homo sapien
gatggaagcatccttaccctgaggg

SEQ ID NO: 4257933 - DNA, 25 bp, Homo sapien
caaatgtggcaatggtaacgtcagt

SEQ ID NO: 4257934 - DNA, 25 bp, Homo sapien
gctgcttggatggaagcatccttac

SEQ ID NO: 4257935 - DNA, 25 bp, Homo sapien
gaagttgtggcaacaactaggaatg

SEQ ID NO: 4257936 - DNA, 25 bp, Homo sapien
gaatttctgacggtctccttgtcct

SEQ ID NO: 4257937 - DNA, 25 bp, Homo sapien
tagctcctcctttccgatgtttgct

SEQ ID NO: 4257938 - DNA, 25 bp, Homo sapien
tggcaacaactaggaatgtgagaat

SEQ ID NO: 4257939 - DNA, 25 bp, Homo sapien
gtagtactctgggtctcggtccctg

SEQ ID NO: 4257940 - DNA, 25 bp, Homo sapien
gacatctgagggcacgtagtactct

SEQ ID NO: 4257941 - DNA, 25 bp, Homo sapien
ctgctgcaaacccagtgaggagtta

SEQ ID NO: 4257942 - DNA, 25 bp, Homo sapien
gagaagccagtagcgattggagaca

SEQ ID NO: 4257943 - DNA, 25 bp, Homo sapien
catcataatcgccagcaataattgc

SEQ ID NO: 4257944 - DNA, 25 bp, Homo sapien
gctctgcataactcattaacatcat

SEQ ID NO: 4257945 - DNA, 25 bp, Homo sapien
tcattaacatcataatcgccagcaa

SEQ ID NO: 4257946 - DNA, 25 bp, Homo sapien
ctgctctgcataactcattaacatc

SEQ ID NO: 4257947 - DNA, 25 bp, Homo sapien
tttttgaaaaattctgataacattc

SEQ ID NO: 4257948 - DNA, 25 bp, Homo sapien
cattgcaaaccagttggcttttctc

SEQ ID NO: 4257949 - DNA, 25 bp, Homo sapien
tcattgcaaaccagttggcttttct

SEQ ID NO: 4257950 - DNA, 25 bp, Homo sapien
aaattctgataacattcatgcttcc

SEQ ID NO: 4257951 - DNA, 25 bp, Homo sapien
atgcaatttttcagcgcagaaaaca

SEQ ID NO: 4257952 - DNA, 25 bp, Homo sapien
gcagaaaacaaggccgcttctttgg

SEQ ID NO: 4257953 - DNA, 25 bp, Homo sapien
aaatgcaatttttcagcgcagaaaa

SEQ ID NO: 4257954 - DNA, 25 bp, Homo sapien
gcattgatccttgaaatgcaatttt

SEQ ID NO: 4257955 - DNA, 25 bp, Homo sapien
cccagaaatgattcctctaatcttt

SEQ ID NO: 4257956 - DNA, 25 bp, Homo sapien
catcccagaaatgattcctctaatc

SEQ ID NO: 4257957 - DNA, 25 bp, Homo sapien
tcccagaaatgattcctctaatctt

SEQ ID NO: 4257958 - DNA, 25 bp, Homo sapien
atcccagaaatgattcctctaatct

SEQ ID NO: 4257959 - DNA, 25 bp, Homo sapien
catacccgaatcttccagttagcat

SEQ ID NO: 4257960 - DNA, 25 bp, Homo sapien
aaatgttgcatacccgaatcttcca

SEQ ID NO: 4257961 - DNA, 25 bp, Homo sapien
aattcagttcaagagcaaatgttgc

SEQ ID NO: 4257962 - DNA, 25 bp, Homo sapien
gagcaaatgttgcatacccgaatct

SEQ ID NO: 4257963 - DNA, 25 bp, Homo sapien
agttcagagtttatcatcattgctg

SEQ ID NO: 4257964 - DNA, 25 bp, Homo sapien
gaagttcagagtttatcatcattgc

SEQ ID NO: 4257965 - DNA, 25 bp, Homo sapien
caaagaagttcagagtttatcatca

SEQ ID NO: 4257966 - DNA, 25 bp, Homo sapien
agaagttcagagtttatcatcattg

SEQ ID NO: 4257967 - DNA, 25 bp, Homo sapien
cggcatttggcatccacaggaaact

SEQ ID NO: 4257968 - DNA, 25 bp, Homo sapien
ccctgaggttgaagtggtaatagcc

SEQ ID NO: 4257969 - DNA, 25 bp, Homo sapien
gctctctcagcaggctttcggcatt

SEQ ID NO: 4257970 - DNA, 25 bp, Homo sapien
tgtttccagagtatgatcattttca

SEQ ID NO: 4257971 - DNA, 25 bp, Homo sapien
caacctcaaaccttggatgactcat

SEQ ID NO: 4257972 - DNA, 25 bp, Homo sapien
gtattctgggtccaagacagacaac

SEQ ID NO: 4257973 - DNA, 25 bp, Homo sapien
acagacaacctcaaaccttggatga

SEQ ID NO: 4257974 - DNA, 25 bp, Homo sapien
tattctgggtccaagacagacaacc

SEQ ID NO: 4257975 - DNA, 25 bp, Homo sapien
atcagggttgtatttccaaccctct

SEQ ID NO: 4257976 - DNA, 25 bp, Homo sapien
tctcgttctgagttacatctagaat

SEQ ID NO: 4257977 - DNA, 25 bp, Homo sapien
tcgttctgagttacatctagaatac

SEQ ID NO: 4257978 - DNA, 25 bp, Homo sapien
tctgagttacatctagaatactttc

SEQ ID NO: 4257979 - DNA, 25 bp, Homo sapien
cgttctgagttacatctagaatact

SEQ ID NO: 4257980 - DNA, 25 bp, Homo sapien
tctttgctgtttacttgccaataat

SEQ ID NO: 4257981 - DNA, 25 bp, Homo sapien
aataattgaggtataacaatagcag

SEQ ID NO: 4257982 - DNA, 25 bp, Homo sapien
tacttgccaataattgaggtataac

SEQ ID NO: 4257983 - DNA, 25 bp, Homo sapien
tgccactgatgaacactctttgctg

SEQ ID NO: 4257984 - DNA, 25 bp, Homo sapien
gaattttctgggacacgatgcgcca

SEQ ID NO: 4257985 - DNA, 25 bp, Homo sapien
cacccgcgtgagctcggtttccgaa

SEQ ID NO: 4257986 - DNA, 25 bp, Homo sapien
gttttacatcggcagcaacagcctg

SEQ ID NO: 4257987 - DNA, 25 bp, Homo sapien
atgcgccacccaaacaacagggact

SEQ ID NO: 4257988 - DNA, 25 bp, Homo sapien
tgggacacaaggattgaggggagga

SEQ ID NO: 4257989 - DNA, 25 bp, Homo sapien
ctggggtgggacacaaggattgagg

SEQ ID NO: 4257990 - DNA, 25 bp, Homo sapien
cacaaggattgaggggaggacaggg

SEQ ID NO: 4257991 - DNA, 25 bp, Homo sapien
gacacaaggattgaggggaggacag

SEQ ID NO: 4257992 - DNA, 25 bp, Homo sapien
gactgatttttctcgtacacattac

SEQ ID NO: 4257993 - DNA, 25 bp, Homo sapien
tttttctcgtacacattacttttgc

SEQ ID NO: 4257994 - DNA, 25 bp, Homo sapien
agactgatttttctcgtacacatta

SEQ ID NO: 4257995 - DNA, 25 bp, Homo sapien
tgatttttctcgtacacattacttt

SEQ ID NO: 4257996 - DNA, 25 bp, Homo sapien
ccaaggtatcttttgtgcggagaaa

SEQ ID NO: 4257997 - DNA, 25 bp, Homo sapien
gactgaaacgcagcctgaggaaaga

SEQ ID NO: 4257998 - DNA, 25 bp, Homo sapien
tcccttttgcaccagcggagtgaat

SEQ ID NO: 4257999 - DNA, 25 bp, Homo sapien
agaccgacgcccgtattcactgtgg

SEQ ID NO: 4258000 - DNA, 25 bp, Homo sapien
gagctgccatggtatacagatcacc

SEQ ID NO: 4258001 - DNA, 25 bp, Homo sapien
ccagggaatgttactctgcatccta

SEQ ID NO: 4258002 - DNA, 25 bp, Homo sapien
cagaggatcattgaaaagatagagc

SEQ ID NO: 4258003 - DNA, 25 bp, Homo sapien
gatagagccataagtcagacattaa

SEQ ID NO: 4258004 - DNA, 25 bp, Homo sapien
gacttatttgccaagcagctttggg

SEQ ID NO: 4258005 - DNA, 25 bp, Homo sapien
gctttgggtattccagggaacattc

SEQ ID NO: 4258006 - DNA, 25 bp, Homo sapien
cgatgctgtagagacttatttgcca

SEQ ID NO: 4258007 - DNA, 25 bp, Homo sapien
gctggtgacgatgctgtagagactt

SEQ ID NO: 4258008 - DNA, 25 bp, Homo sapien
cattcccgtattttctagtcccttg

SEQ ID NO: 4258009 - DNA, 25 bp, Homo sapien
caaacagtgaaaagccgtcaggtgt

SEQ ID NO: 4258010 - DNA, 25 bp, Homo sapien
ttaatcgggatcctgtattgtcaaa

SEQ ID NO: 4258011 - DNA, 25 bp, Homo sapien
tgtcaaaggttgttggcagtagcat

SEQ ID NO: 4258012 - DNA, 25 bp, Homo sapien
caatgggccagtatgagaacttgaa

SEQ ID NO: 4258013 - DNA, 25 bp, Homo sapien
tgcttatcaagctctccagaagtac

SEQ ID NO: 4258014 - DNA, 25 bp, Homo sapien
cagtcaagtgatttcattggcagca

SEQ ID NO: 4258015 - DNA, 25 bp, Homo sapien
cagaagtaccgctggctagccattt

SEQ ID NO: 4258016 - DNA, 25 bp, Homo sapien
aaaacactcttgttctagcctaagt

SEQ ID NO: 4258017 - DNA, 25 bp, Homo sapien
tttgtcacatgcagtattaccagcc

SEQ ID NO: 4258018 - DNA, 25 bp, Homo sapien
cagagccagtgaacattcagtgtgt

SEQ ID NO: 4258019 - DNA, 25 bp, Homo sapien
ctagcctaagttcttgaaattgaag

SEQ ID NO: 4258020 - DNA, 25 bp, Homo sapien
ctgatcaattggaccatatttctgg

SEQ ID NO: 4258021 - DNA, 25 bp, Homo sapien
aatgaagatcaggttaggattctga

SEQ ID NO: 4258022 - DNA, 25 bp, Homo sapien
tcaggttaggattctgatcaattgg

SEQ ID NO: 4258023 - DNA, 25 bp, Homo sapien
ttctgatcaattggaccatatttct

SEQ ID NO: 4258024 - DNA, 25 bp, Homo sapien
ttgacctgatggcaattgaaatctt

SEQ ID NO: 4258025 - DNA, 25 bp, Homo sapien
cattgacctgatggcaattgaaatc

SEQ ID NO: 4258026 - DNA, 25 bp, Homo sapien
tcattgacctgatggcaattgaaat

SEQ ID NO: 4258027 - DNA, 25 bp, Homo sapien
cttcattgacctgatggcaattgaa

SEQ ID NO: 4258028 - DNA, 25 bp, Homo sapien
gtctttgctcctcgaccctatctta

SEQ ID NO: 4258029 - DNA, 25 bp, Homo sapien
tcttcagattttagccctcggtcat

SEQ ID NO: 4258030 - DNA, 25 bp, Homo sapien
tattaacaactattgattcttcaga

SEQ ID NO: 4258031 - DNA, 25 bp, Homo sapien
cagattttagccctcggtcatccat

SEQ ID NO: 4258032 - DNA, 25 bp, Homo sapien
tctgtggaacaggaatatatgcttc

SEQ ID NO: 4258033 - DNA, 25 bp, Homo sapien
gaacaggaatatatgcttcagccat

SEQ ID NO: 4258034 - DNA, 25 bp, Homo sapien
tgtggaacaggaatatatgcttcag

SEQ ID NO: 4258035 - DNA, 25 bp, Homo sapien
tggaacaggaatatatgcttcagcc

SEQ ID NO: 4258036 - DNA, 25 bp, Homo sapien
cattcacaatggcttcaaagacagt

SEQ ID NO: 4258037 - DNA, 25 bp, Homo sapien
tcacaatggcttcaaagacagtaaa

SEQ ID NO: 4258038 - DNA, 25 bp, Homo sapien
actgctcatcgaagtaaaagaggac

SEQ ID NO: 4258039 - DNA, 25 bp, Homo sapien
tggcttcaaagacagtaaaatacct

SEQ ID NO: 4258040 - DNA, 25 bp, Homo sapien
catttgatcagcactcaggaggacc

SEQ ID NO: 4258041 - DNA, 25 bp, Homo sapien
tgctatatgtcaaaagtccagggat

SEQ ID NO: 4258042 - DNA, 25 bp, Homo sapien
tgttggaaactcacacggatgtcat

SEQ ID NO: 4258043 - DNA, 25 bp, Homo sapien
gcttagttggatcctccgatcagga

SEQ ID NO: 4258044 - DNA, 25 bp, Homo sapien
ataccacaagtacccgctggatctc

SEQ ID NO: 4258045 - DNA, 25 bp, Homo sapien
accacaagtacccgctggatctcag

SEQ ID NO: 4258046 - DNA, 25 bp, Homo sapien
acataccacaagtacccgctggatc

SEQ ID NO: 4258047 - DNA, 25 bp, Homo sapien
cataccacaagtacccgctggatct

SEQ ID NO: 4258048 - DNA, 25 bp, Homo sapien
ggtcggctttatgggaatcatcaaa

SEQ ID NO: 4258049 - DNA, 25 bp, Homo sapien
ggatgagccacagactagaacccct

SEQ ID NO: 4258050 - DNA, 25 bp, Homo sapien
tagaacccctcagacaacaatttgt

SEQ ID NO: 4258051 - DNA, 25 bp, Homo sapien
tgcatcatgagctatttgggtcggc

SEQ ID NO: 4258052 - DNA, 25 bp, Homo sapien
actgatcagtagtggtcctagagga

SEQ ID NO: 4258053 - DNA, 25 bp, Homo sapien
cctatgagcgttcaggcaaaaagag

SEQ ID NO: 4258054 - DNA, 25 bp, Homo sapien
tgtccacagggattaccacagtgag

SEQ ID NO: 4258055 - DNA, 25 bp, Homo sapien
tggaacagaaaggatagctcatgcc

SEQ ID NO: 4258056 - DNA, 25 bp, Homo sapien
cagtggcttcctctacagttgaagt

SEQ ID NO: 4258057 - DNA, 25 bp, Homo sapien
caaatgtcttctgtttgtcagtcca

SEQ ID NO: 4258058 - DNA, 25 bp, Homo sapien
ggagggcagtatgctatattcagtc

SEQ ID NO: 4258059 - DNA, 25 bp, Homo sapien
catgacccagtcaagctggcataca

SEQ ID NO: 4258060 - DNA, 25 bp, Homo sapien
tagtagagtataggcaaaccacaag

SEQ ID NO: 4258061 - DNA, 25 bp, Homo sapien
gaagttcaccacaactcctaggtca

SEQ ID NO: 4258062 - DNA, 25 bp, Homo sapien
tggaaaaggtcggttgtcagaagct

SEQ ID NO: 4258063 - DNA, 25 bp, Homo sapien
gaaccacccctcttgataataacag

SEQ ID NO: 4258064 - DNA, 25 bp, Homo sapien
gacaatcagtcaaatagagctggtg

SEQ ID NO: 4258065 - DNA, 25 bp, Homo sapien
taacaagaaatgcactactgttgtg

SEQ ID NO: 4258066 - DNA, 25 bp, Homo sapien
tggccagtggttagctattcgcacg

SEQ ID NO: 4258067 - DNA, 25 bp, Homo sapien
gcatgtcatctcctagacaatcagt

SEQ ID NO: 4258068 - DNA, 25 bp, Homo sapien
ccaatgtgaaagtggaatcttgaag

SEQ ID NO: 4258069 - DNA, 25 bp, Homo sapien
ataagtagggacttactcctgcctc

SEQ ID NO: 4258070 - DNA, 25 bp, Homo sapien
tatagcctcttgttaagctgacccc

SEQ ID NO: 4258071 - DNA, 25 bp, Homo sapien
tctatagtacacattaagtctgatg

SEQ ID NO: 4258072 - DNA, 25 bp, Homo sapien
ccgaccccacaagaggccctggtgt

SEQ ID NO: 4258073 - DNA, 25 bp, Homo sapien
cccgaccccacaagaggccctggtg

SEQ ID NO: 4258074 - DNA, 25 bp, Homo sapien
gaccccacaagaggccctggtgtgt

SEQ ID NO: 4258075 - DNA, 25 bp, Homo sapien
cgaccccacaagaggccctggtgtg

SEQ ID NO: 4258076 - DNA, 25 bp, Homo sapien
tgaaagcagttttggacccagcgtt

SEQ ID NO: 4258077 - DNA, 25 bp, Homo sapien
tcagcagaatggactaaaggaccat

SEQ ID NO: 4258078 - DNA, 25 bp, Homo sapien
gactaaaggaccattatcaatatcc

SEQ ID NO: 4258079 - DNA, 25 bp, Homo sapien
gttttggacccagcgttcagccata

SEQ ID NO: 4258080 - DNA, 25 bp, Homo sapien
tgagttcccgtttccctaggtgtga

SEQ ID NO: 4258081 - DNA, 25 bp, Homo sapien
cagaagggctacattgtgccaaggt

SEQ ID NO: 4258082 - DNA, 25 bp, Homo sapien
tcccaactgttctctggtcgtcagt

SEQ ID NO: 4258083 - DNA, 25 bp, Homo sapien
tcagtttcacttgtgcccatagtcc

SEQ ID NO: 4258084 - DNA, 25 bp, Homo sapien
aactccaatatggctggtgccctcc

SEQ ID NO: 4258085 - DNA, 25 bp, Homo sapien
atgccgcctccgatgagatattttg

SEQ ID NO: 4258086 - DNA, 25 bp, Homo sapien
gtctgctgaagtcatgccgtgctca

SEQ ID NO: 4258087 - DNA, 25 bp, Homo sapien
cgtgctcatatggtgctttgctgaa

SEQ ID NO: 4258088 - DNA, 25 bp, Homo sapien
gaaacatacagtgttaggagaagca

SEQ ID NO: 4258089 - DNA, 25 bp, Homo sapien
tgactgagaagcctcctagccagaa

SEQ ID NO: 4258090 - DNA, 25 bp, Homo sapien
acagaggtcttttgggagggcagac

SEQ ID NO: 4258091 - DNA, 25 bp, Homo sapien
gctcacccactacgtggaaacagac

SEQ ID NO: 4258092 - DNA, 25 bp, Homo sapien
tattgtattgatccagacttaaaac

SEQ ID NO: 4258093 - DNA, 25 bp, Homo sapien
cagacttaaaacttggactcttctc

SEQ ID NO: 4258094 - DNA, 25 bp, Homo sapien
attgatccagacttaaaacttggac

SEQ ID NO: 4258095 - DNA, 25 bp, Homo sapien
aaacttggactcttctcttgatttc

SEQ ID NO: 4258096 - DNA, 25 bp, Homo sapien
ctgggctggcggaagccagagccgg

SEQ ID NO: 4258097 - DNA, 25 bp, Homo sapien
tatggagacccatgaaagtgagaga

SEQ ID NO: 4258098 - DNA, 25 bp, Homo sapien
cgcccacgcttgaggaggccttcag

SEQ ID NO: 4258099 - DNA, 25 bp, Homo sapien
ctggagacataattgaagtcctttc

SEQ ID NO: 4258100 - DNA, 25 bp, Homo sapien
cattgctgactgtgagcattgtact

SEQ ID NO: 4258101 - DNA, 25 bp, Homo sapien
ctgactgtgagcattgtactttctt

SEQ ID NO: 4258102 - DNA, 25 bp, Homo sapien
ttgctgactgtgagcattgtacttt

SEQ ID NO: 4258103 - DNA, 25 bp, Homo sapien
caaacagaacaaattctggaatgct

SEQ ID NO: 4258104 - DNA, 25 bp, Homo sapien
atgtggcactcatggggagctgcct

SEQ ID NO: 4258105 - DNA, 25 bp, Homo sapien
aaccatcctgattgcacacagccgg

SEQ ID NO: 4258106 - DNA, 25 bp, Homo sapien
tggctctggatgtggcactcatggg

SEQ ID NO: 4258107 - DNA, 25 bp, Homo sapien
caaaagcctgctccacattcacaac

SEQ ID NO: 4258108 - DNA, 25 bp, Homo sapien
ctaaatcccagtcctttagttggag

SEQ ID NO: 4258109 - DNA, 25 bp, Homo sapien
tatctaaatcccagtcctttagttg

SEQ ID NO: 4258110 - DNA, 25 bp, Homo sapien
ttagttggaggttgagaggactcac

SEQ ID NO: 4258111 - DNA, 25 bp, Homo sapien
ccagtcctttagttggaggttgaga

SEQ ID NO: 4258112 - DNA, 25 bp, Homo sapien
tttttccggtcaaggccataacatc

SEQ ID NO: 4258113 - DNA, 25 bp, Homo sapien
ggtcaaggccataacatctttctag

SEQ ID NO: 4258114 - DNA, 25 bp, Homo sapien
tgatgaataattcagaaccaaagct

SEQ ID NO: 4258115 - DNA, 25 bp, Homo sapien
aaccaaagcttgtccacttggggct

SEQ ID NO: 4258116 - DNA, 25 bp, Homo sapien
tgagttgagctgatagttactagag

SEQ ID NO: 4258117 - DNA, 25 bp, Homo sapien
ctggaaatcaccagataattccaaa

SEQ ID NO: 4258118 - DNA, 25 bp, Homo sapien
gttgagttgagctgatagttactag

SEQ ID NO: 4258119 - DNA, 25 bp, Homo sapien
tctgttgagttgagctgatagttac

SEQ ID NO: 4258120 - DNA, 25 bp, Homo sapien
ggtggtcagctggttggctccgcca

SEQ ID NO: 4258121 - DNA, 25 bp, Homo sapien
gatacagatagctttaaggtctctc

SEQ ID NO: 4258122 - DNA, 25 bp, Homo sapien
ccccagggaaactggtcaggtgcca

SEQ ID NO: 4258123 - DNA, 25 bp, Homo sapien
tgttctcccatgtggcagtgctgct

SEQ ID NO: 4258124 - DNA, 25 bp, Homo sapien
cccttgttgcaataaggaattcgga

SEQ ID NO: 4258125 - DNA, 25 bp, Homo sapien
ggaattcggattttgaacttcaaga

SEQ ID NO: 4258126 - DNA, 25 bp, Homo sapien
tgctctctgaggtctataagttgta

SEQ ID NO: 4258127 - DNA, 25 bp, Homo sapien
taagggaagcttctgcaccttctcc

SEQ ID NO: 4258128 - DNA, 25 bp, Homo sapien
ggtattggtgacactaagcctagta

SEQ ID NO: 4258129 - DNA, 25 bp, Homo sapien
caatatcatttgcagtacctaagac

SEQ ID NO: 4258130 - DNA, 25 bp, Homo sapien
cacattagaggtgtttcagtatctc

SEQ ID NO: 4258131 - DNA, 25 bp, Homo sapien
aattatgaatacaggcaacacacct

SEQ ID NO: 4258132 - DNA, 25 bp, Homo sapien
gatggcttatctcctcccttaaggg

SEQ ID NO: 4258133 - DNA, 25 bp, Homo sapien
caaaatataaagaacccaccagtgg

SEQ ID NO: 4258134 - DNA, 25 bp, Homo sapien
ccaaacgtgttaagaaagcatgagt

SEQ ID NO: 4258135 - DNA, 25 bp, Homo sapien
gaccatagtttgatgacttaagcca

SEQ ID NO: 4258136 - DNA, 25 bp, Homo sapien
tatctaaaaccagaatggattcaac

SEQ ID NO: 4258137 - DNA, 25 bp, Homo sapien
taatttattagcaacacatacaggc

SEQ ID NO: 4258138 - DNA, 25 bp, Homo sapien
tggattcaacattttagataaacac

SEQ ID NO: 4258139 - DNA, 25 bp, Homo sapien
catacaggcatatgagtcttaccac

SEQ ID NO: 4258140 - DNA, 25 bp, Homo sapien
tgacaccaatgttacacaatatctc

SEQ ID NO: 4258141 - DNA, 25 bp, Homo sapien
catgagtgttttacacttgatccgg

SEQ ID NO: 4258142 - DNA, 25 bp, Homo sapien
ttcatcagacagtttgacaccaatg

SEQ ID NO: 4258143 - DNA, 25 bp, Homo sapien
ggtctgcatgccgtagctcatctag

SEQ ID NO: 4258144 - DNA, 25 bp, Homo sapien
gaagacttgctaggtttgagttcca

SEQ ID NO: 4258145 - DNA, 25 bp, Homo sapien
cattattttaaggagaggtagcaaa

SEQ ID NO: 4258146 - DNA, 25 bp, Homo sapien
catctaagactatggatatttttcc

SEQ ID NO: 4258147 - DNA, 25 bp, Homo sapien
gggtgttcaaatacactagccaata

SEQ ID NO: 4258148 - DNA, 25 bp, Homo sapien
tctgtcactgatgcgacgaattcgg

SEQ ID NO: 4258149 - DNA, 25 bp, Homo sapien
gagcaggaatgtcagatcgaatggt

SEQ ID NO: 4258150 - DNA, 25 bp, Homo sapien
tccgggcaaaaatggtaggatatag

SEQ ID NO: 4258151 - DNA, 25 bp, Homo sapien
gaatggttggaacaccacaaatggg

SEQ ID NO: 4258152 - DNA, 25 bp, Homo sapien
cattgatctcagaagaagttgtctt

SEQ ID NO: 4258153 - DNA, 25 bp, Homo sapien
tagaaggaatggctcctacaattgc

SEQ ID NO: 4258154 - DNA, 25 bp, Homo sapien
cagaagtgtccggagagtcttttct

SEQ ID NO: 4258155 - DNA, 25 bp, Homo sapien
ggaaactttatcacttggtctcaga

SEQ ID NO: 4258156 - DNA, 25 bp, Homo sapien
cagtagggtttacacaatctggttt

SEQ ID NO: 4258157 - DNA, 25 bp, Homo sapien
ctggctttatgaggagagtttgttc

SEQ ID NO: 4258158 - DNA, 25 bp, Homo sapien
tcttcaacattagcctcagtagggt

SEQ ID NO: 4258159 - DNA, 25 bp, Homo sapien
ttatgaggagagtttgttcaggttc

SEQ ID NO: 4258160 - DNA, 25 bp, Homo sapien
taatgaagccatcattatccacatc

SEQ ID NO: 4258161 - DNA, 25 bp, Homo sapien
tcctgcagctcgtctttatctatca

SEQ ID NO: 4258162 - DNA, 25 bp, Homo sapien
cagttaagaaaatttgcgaattcca

SEQ ID NO: 4258163 - DNA, 25 bp, Homo sapien
catctaaactcaagttggcctggtc

SEQ ID NO: 4258164 - DNA, 25 bp, Homo sapien
taaatgtggcatccaataatataag

SEQ ID NO: 4258165 - DNA, 25 bp, Homo sapien
cagctgtactagacccacatcttat

SEQ ID NO: 4258166 - DNA, 25 bp, Homo sapien
gactgaatgctacattgtgcatatt

SEQ ID NO: 4258167 - DNA, 25 bp, Homo sapien
cacatcttattaccctctcagaaaa

SEQ ID NO: 4258168 - DNA, 25 bp, Homo sapien
gtttcaatggcagtttcttatagtg

SEQ ID NO: 4258169 - DNA, 25 bp, Homo sapien
gccacgtttcaatggcagtttctta

SEQ ID NO: 4258170 - DNA, 25 bp, Homo sapien
aaaatatgccacgtttcaatggcag

SEQ ID NO: 4258171 - DNA, 25 bp, Homo sapien
ttcttatagtgctcctcagcataag

SEQ ID NO: 4258172 - DNA, 25 bp, Homo sapien
ctaaaggcagtgcagctcggtaaaa

SEQ ID NO: 4258173 - DNA, 25 bp, Homo sapien
tcggtaaaagcaattctgtgatggc

SEQ ID NO: 4258174 - DNA, 25 bp, Homo sapien
gcagctcggtaaaagcaattctgtg

SEQ ID NO: 4258175 - DNA, 25 bp, Homo sapien
ggcagtgcagctcggtaaaagcaat

SEQ ID NO: 4258176 - DNA, 25 bp, Homo sapien
agcaaagtgtcaaacttttggtaat

SEQ ID NO: 4258177 - DNA, 25 bp, Homo sapien
tttcttcaggtgatgccgaactgct

SEQ ID NO: 4258178 - DNA, 25 bp, Homo sapien
tatccttgcctcgaagatattcatc

SEQ ID NO: 4258179 - DNA, 25 bp, Homo sapien
gcctcgaagatattcatccggaagt

SEQ ID NO: 4258180 - DNA, 25 bp, Homo sapien
tcagggctcgctgtctatccttgcc

SEQ ID NO: 4258181 - DNA, 25 bp, Homo sapien
ctcaggacggagacaagctccaaat

SEQ ID NO: 4258182 - DNA, 25 bp, Homo sapien
acaagctccaaatgtgcagtctggg

SEQ ID NO: 4258183 - DNA, 25 bp, Homo sapien
cttttggatacaaacttagctcctc

SEQ ID NO: 4258184 - DNA, 25 bp, Homo sapien
catctgctcttttggatacaaactt

SEQ ID NO: 4258185 - DNA, 25 bp, Homo sapien
gatctaaaactcttccaagtttatg

SEQ ID NO: 4258186 - DNA, 25 bp, Homo sapien
actcttccaagtttatgttgaaact

SEQ ID NO: 4258187 - DNA, 25 bp, Homo sapien
tgtagttcatggagccaatatagag

SEQ ID NO: 4258188 - DNA, 25 bp, Homo sapien
tacacactacacctatggaaacttg

SEQ ID NO: 4258189 - DNA, 25 bp, Homo sapien
ggtgttggtactccatacacactac

SEQ ID NO: 4258190 - DNA, 25 bp, Homo sapien
tggctcgtccatcattaaaatgtgg

SEQ ID NO: 4258191 - DNA, 25 bp, Homo sapien
ttggtggattcaccacatctttagc

SEQ ID NO: 4258192 - DNA, 25 bp, Homo sapien
cataggattttggtggattcaccac

SEQ ID NO: 4258193 - DNA, 25 bp, Homo sapien
ttgtgagaaacaacatacaaatcat

SEQ ID NO: 4258194 - DNA, 25 bp, Homo sapien
tgtgagaaacaacatacaaatcatg

SEQ ID NO: 4258195 - DNA, 25 bp, Homo sapien
tttcctaatggtgctcgtcgattgc

SEQ ID NO: 4258196 - DNA, 25 bp, Homo sapien
taatcctggtgcttgatcgtgagat

SEQ ID NO: 4258197 - DNA, 25 bp, Homo sapien
ttgatgactgctgtcccaaatgtcg

SEQ ID NO: 4258198 - DNA, 25 bp, Homo sapien
tgtccatgccttttggtaatcctgg

SEQ ID NO: 4258199 - DNA, 25 bp, Homo sapien
tgtggtaataggctgtgggtttatc

SEQ ID NO: 4258200 - DNA, 25 bp, Homo sapien
atgtggtaataggctgtgggtttat

SEQ ID NO: 4258201 - DNA, 25 bp, Homo sapien
aaatgtggtaataggctgtgggttt

SEQ ID NO: 4258202 - DNA, 25 bp, Homo sapien
aatgtggtaataggctgtgggttta

SEQ ID NO: 4258203 - DNA, 25 bp, Homo sapien
tgtgtcaaataaggtgcaatctggg

SEQ ID NO: 4258204 - DNA, 25 bp, Homo sapien
gggatcatttgctcttccgtaaaat

SEQ ID NO: 4258205 - DNA, 25 bp, Homo sapien
tcatttgctcttccgtaaaatactc

SEQ ID NO: 4258206 - DNA, 25 bp, Homo sapien
aattccatgtgtcaaataaggtgca

SEQ ID NO: 4258207 - DNA, 25 bp, Homo sapien
tcagtcaagcaggttgcaactctgt

SEQ ID NO: 4258208 - DNA, 25 bp, Homo sapien
caagcaggttgcaactctgtaacca

SEQ ID NO: 4258209 - DNA, 25 bp, Homo sapien
caggttgcaactctgtaaccaactg

SEQ ID NO: 4258210 - DNA, 25 bp, Homo sapien
gtcaagcaggttgcaactctgtaac

SEQ ID NO: 4258211 - DNA, 25 bp, Homo sapien
tctccttaggccagtatttcttgga

SEQ ID NO: 4258212 - DNA, 25 bp, Homo sapien
ctctccttaggccagtatttcttgg

SEQ ID NO: 4258213 - DNA, 25 bp, Homo sapien
tccttaggccagtatttcttggaaa

SEQ ID NO: 4258214 - DNA, 25 bp, Homo sapien
cttaggccagtatttcttggaaact

SEQ ID NO: 4258215 - DNA, 25 bp, Homo sapien
ccatctcttctaaacagaattgtgc

SEQ ID NO: 4258216 - DNA, 25 bp, Homo sapien
catctcttctaaacagaattgtgca

SEQ ID NO: 4258217 - DNA, 25 bp, Homo sapien
gcaatctttacactgagctctgtat

SEQ ID NO: 4258218 - DNA, 25 bp, Homo sapien
cccatctcttctaaacagaattgtg

SEQ ID NO: 4258219 - DNA, 25 bp, Homo sapien
tctctgttcatgttgttgggcaaac

SEQ ID NO: 4258220 - DNA, 25 bp, Homo sapien
tcccagagtatatgggtctgatgcg

SEQ ID NO: 4258221 - DNA, 25 bp, Homo sapien
gtctgatgcgatctggaggttccac

SEQ ID NO: 4258222 - DNA, 25 bp, Homo sapien
tcatctggcccctcggcttgggtta

SEQ ID NO: 4258223 - DNA, 25 bp, Homo sapien
tgtgttgggtttcattaaaacacag

SEQ ID NO: 4258224 - DNA, 25 bp, Homo sapien
gcccaaaggaggctgtattatccgt

SEQ ID NO: 4258225 - DNA, 25 bp, Homo sapien
ttatccgttcatgggtatatcctgc

SEQ ID NO: 4258226 - DNA, 25 bp, Homo sapien
gccactagccaaaggagctctcctg

SEQ ID NO: 4258227 - DNA, 25 bp, Homo sapien
ccctgtgaagctgagacactgtcga

SEQ ID NO: 4258228 - DNA, 25 bp, Homo sapien
catttctccaagagcgctcatctct

SEQ ID NO: 4258229 - DNA, 25 bp, Homo sapien
tcttaacacctagccgagttcacag

SEQ ID NO: 4258230 - DNA, 25 bp, Homo sapien
gaaagagcacaacctcactcggact

SEQ ID NO: 4258231 - DNA, 25 bp, Homo sapien
tgtacctggctacaaagacgcctcc

SEQ ID NO: 4258232 - DNA, 25 bp, Homo sapien
ggtctatgcggcagtgagccatcat

SEQ ID NO: 4258233 - DNA, 25 bp, Homo sapien
aggtctatgcggcagtgagccatca

SEQ ID NO: 4258234 - DNA, 25 bp, Homo sapien
agaagaattgcttaacgccaagaat

SEQ ID NO: 4258235 - DNA, 25 bp, Homo sapien
ccaagaattcaattagcccagcgtg

SEQ ID NO: 4258236 - DNA, 25 bp, Homo sapien
ctggagagggagccacctaggttcc

SEQ ID NO: 4258237 - DNA, 25 bp, Homo sapien
cacacattccaaactcaaggccaac

SEQ ID NO: 4258238 - DNA, 25 bp, Homo sapien
ttcacacattccaaactcaaggcca

SEQ ID NO: 4258239 - DNA, 25 bp, Homo sapien
tggagagggagccacctaggttccc

SEQ ID NO: 4258240 - DNA, 25 bp, Homo sapien
tagagctttgtaatgatgggattgc

SEQ ID NO: 4258241 - DNA, 25 bp, Homo sapien
ctagagctttgtaatgatgggattg

SEQ ID NO: 4258242 - DNA, 25 bp, Homo sapien
agagctttgtaatgatgggattgca

SEQ ID NO: 4258243 - DNA, 25 bp, Homo sapien
tttcattacgcctgacaagaatctt

SEQ ID NO: 4258244 - DNA, 25 bp, Homo sapien
gcctgattcttatctatccagttaa

SEQ ID NO: 4258245 - DNA, 25 bp, Homo sapien
agcctgattcttatctatccagtta

SEQ ID NO: 4258246 - DNA, 25 bp, Homo sapien
cagttaataatttcattacgcctga

SEQ ID NO: 4258247 - DNA, 25 bp, Homo sapien
tgaattcataggattcaagggaatt

SEQ ID NO: 4258248 - DNA, 25 bp, Homo sapien
ttgaattcataggattcaagggaat

SEQ ID NO: 4258249 - DNA, 25 bp, Homo sapien
gttgaattcataggattcaagggaa

SEQ ID NO: 4258250 - DNA, 25 bp, Homo sapien
ctttgatgacacctgtctctgcttc

SEQ ID NO: 4258251 - DNA, 25 bp, Homo sapien
tttgatgacacctgtctctgcttct

SEQ ID NO: 4258252 - DNA, 25 bp, Homo sapien
acctgtctctgcttctcatcttcag

SEQ ID NO: 4258253 - DNA, 25 bp, Homo sapien
gacacctgtctctgcttctcatctt

SEQ ID NO: 4258254 - DNA, 25 bp, Homo sapien
taatgtctttcttgctaaaatggcc

SEQ ID NO: 4258255 - DNA, 25 bp, Homo sapien
ttaatgtctttcttgctaaaatggc

SEQ ID NO: 4258256 - DNA, 25 bp, Homo sapien
ttggagtgccaaaggtatgcctgtg

SEQ ID NO: 4258257 - DNA, 25 bp, Homo sapien
aatgtgaggaacaccttggagtgcc

SEQ ID NO: 4258258 - DNA, 25 bp, Homo sapien
gaggaacaccttggagtgccaaagg

SEQ ID NO: 4258259 - DNA, 25 bp, Homo sapien
acaccttggagtgccaaaggtatgc

SEQ ID NO: 4258260 - DNA, 25 bp, Homo sapien
gtcagagtaggtagtgaaggtctgt

SEQ ID NO: 4258261 - DNA, 25 bp, Homo sapien
ctgtcagagtaggtagtgaaggtct

SEQ ID NO: 4258262 - DNA, 25 bp, Homo sapien
tgtcagagtaggtagtgaaggtctg

SEQ ID NO: 4258263 - DNA, 25 bp, Homo sapien
tcatgactacaccatcggtttcaat

SEQ ID NO: 4258264 - DNA, 25 bp, Homo sapien
catgactacaccatcggtttcaata

SEQ ID NO: 4258265 - DNA, 25 bp, Homo sapien
gtcatgactacaccatcggtttcaa

SEQ ID NO: 4258266 - DNA, 25 bp, Homo sapien
atgactacaccatcggtttcaatac

SEQ ID NO: 4258267 - DNA, 25 bp, Homo sapien
ttttcagatttgttgccagacagaa

SEQ ID NO: 4258268 - DNA, 25 bp, Homo sapien
tttcagatttgttgccagacagaat

SEQ ID NO: 4258269 - DNA, 25 bp, Homo sapien
ttcagatttgttgccagacagaatg

SEQ ID NO: 4258270 - DNA, 25 bp, Homo sapien
ggataaaagtagaaccaccatccag

SEQ ID NO: 4258271 - DNA, 25 bp, Homo sapien
gggataaaagtagaaccaccatcca

SEQ ID NO: 4258272 - DNA, 25 bp, Homo sapien
gataaaagtagaaccaccatccagg

SEQ ID NO: 4258273 - DNA, 25 bp, Homo sapien
tctcagtacattgagataagcaata

SEQ ID NO: 4258274 - DNA, 25 bp, Homo sapien
ttgcctaaggcataagcaatagaag

SEQ ID NO: 4258275 - DNA, 25 bp, Homo sapien
taattctcagtacattgagataagc

SEQ ID NO: 4258276 - DNA, 25 bp, Homo sapien
tttgcctaaggcataagcaatagaa

SEQ ID NO: 4258277 - DNA, 25 bp, Homo sapien
caagctgatattgtgaccacagcat

SEQ ID NO: 4258278 - DNA, 25 bp, Homo sapien
ccaagctgatattgtgaccacagca

SEQ ID NO: 4258279 - DNA, 25 bp, Homo sapien
taaaccaagctgatattgtgaccac

SEQ ID NO: 4258280 - DNA, 25 bp, Homo sapien
aaccaagctgatattgtgaccacag

SEQ ID NO: 4258281 - DNA, 25 bp, Homo sapien
tatataaacactaccatggaccagg

SEQ ID NO: 4258282 - DNA, 25 bp, Homo sapien
cattctttagctacacaagggagga

SEQ ID NO: 4258283 - DNA, 25 bp, Homo sapien
tctgaagaaagacataggaacccca

SEQ ID NO: 4258284 - DNA, 25 bp, Homo sapien
tcctgtgaatggtagagagacacct

SEQ ID NO: 4258285 - DNA, 25 bp, Homo sapien
caacaactcacgttctggagccaac

SEQ ID NO: 4258286 - DNA, 25 bp, Homo sapien
tgaagcctcgccagagactgaatgt

SEQ ID NO: 4258287 - DNA, 25 bp, Homo sapien
cacacagccgtgatctcggacaagt

SEQ ID NO: 4258288 - DNA, 25 bp, Homo sapien
cccgtggagggtaacgaacatcttg

SEQ ID NO: 4258289 - DNA, 25 bp, Homo sapien
aatgcgatttagcagcctttaccga

SEQ ID NO: 4258290 - DNA, 25 bp, Homo sapien
gatttacagcggtgaggaccaccaa

SEQ ID NO: 4258291 - DNA, 25 bp, Homo sapien
gaagcgacttcttattgtcaggcgc

SEQ ID NO: 4258292 - DNA, 25 bp, Homo sapien
taaaattcgaatgtagggaacagac

SEQ ID NO: 4258293 - DNA, 25 bp, Homo sapien
taataaagccccttagccgagatgc

SEQ ID NO: 4258294 - DNA, 25 bp, Homo sapien
ggaggaggttctctcgtgctagaca

SEQ ID NO: 4258295 - DNA, 25 bp, Homo sapien
ccttagccgagatgccaggattggg

SEQ ID NO: 4258296 - DNA, 25 bp, Homo sapien
cgtgctagacaagttccctctaata

SEQ ID NO: 4258297 - DNA, 25 bp, Homo sapien
agaccccccagcctaaataacaatg

SEQ ID NO: 4258298 - DNA, 25 bp, Homo sapien
ccccagcctaaataacaatggcgct

SEQ ID NO: 4258299 - DNA, 25 bp, Homo sapien
cagcctaaataacaatggcgctgga

SEQ ID NO: 4258300 - DNA, 25 bp, Homo sapien
ctaaataacaatggcgctggagagg

SEQ ID NO: 4258301 - DNA, 25 bp, Homo sapien
agaaaggcggccagttcggatctga

SEQ ID NO: 4258302 - DNA, 25 bp, Homo sapien
ggccagttcggatctgagccactcg

SEQ ID NO: 4258303 - DNA, 25 bp, Homo sapien
ggatctgagccactcgcagggtcac

SEQ ID NO: 4258304 - DNA, 25 bp, Homo sapien
gttcggatctgagccactcgcaggg

SEQ ID NO: 4258305 - DNA, 25 bp, Homo sapien
tgcctcgccccgccccgcgaacaaa

SEQ ID NO: 4258306 - DNA, 25 bp, Homo sapien
atcctgcctcgccccgccccgcgaa

SEQ ID NO: 4258307 - DNA, 25 bp, Homo sapien
ctgcctcgccccgccccgcgaacaa

SEQ ID NO: 4258308 - DNA, 25 bp, Homo sapien
gacatcctgcctcgccccgccccgc

SEQ ID NO: 4258309 - DNA, 25 bp, Homo sapien
ttgtgttttggttcgtgaaggagcc

SEQ ID NO: 4258310 - DNA, 25 bp, Homo sapien
ctccggcggtgggacttgagtgttt

SEQ ID NO: 4258311 - DNA, 25 bp, Homo sapien
aagtgacgaagtggcgcagttcgct

SEQ ID NO: 4258312 - DNA, 25 bp, Homo sapien
actggcgatgatgggaagtgacgaa

SEQ ID NO: 4258313 - DNA, 25 bp, Homo sapien
tgaggggagcggcgctaagagcagg

SEQ ID NO: 4258314 - DNA, 25 bp, Homo sapien
ggggagcggcgctaagagcaggcga

SEQ ID NO: 4258315 - DNA, 25 bp, Homo sapien
gtgaggggagcggcgctaagagcag

SEQ ID NO: 4258316 - DNA, 25 bp, Homo sapien
gagcggcgctaagagcaggcgacgc

SEQ ID NO: 4258317 - DNA, 25 bp, Homo sapien
cccattctagtaagataagttacag

SEQ ID NO: 4258318 - DNA, 25 bp, Homo sapien
cctggcctttgtatatcttgttaaa

SEQ ID NO: 4258319 - DNA, 25 bp, Homo sapien
gaatgttattcataatcttagaccc

SEQ ID NO: 4258320 - DNA, 25 bp, Homo sapien
taagttacagaagtctactacctcc

SEQ ID NO: 4258321 - DNA, 25 bp, Homo sapien
gctgttagtactcattttcccagtg

SEQ ID NO: 4258322 - DNA, 25 bp, Homo sapien
taaaggtactcaaatatgacagtct

SEQ ID NO: 4258323 - DNA, 25 bp, Homo sapien
tgttatgtcggattactgctgttag

SEQ ID NO: 4258324 - DNA, 25 bp, Homo sapien
ttatactctagccaaactacccagt

SEQ ID NO: 4258325 - DNA, 25 bp, Homo sapien
taatggtacttcattcgaaatggga

SEQ ID NO: 4258326 - DNA, 25 bp, Homo sapien
agtttgctagggaagtgctggcaca

SEQ ID NO: 4258327 - DNA, 25 bp, Homo sapien
cacagttgcgaaggattgtgtgata

SEQ ID NO: 4258328 - DNA, 25 bp, Homo sapien
actaggtgacagagtttaatggtac

SEQ ID NO: 4258329 - DNA, 25 bp, Homo sapien
caggagttggtcaggaaacaagccg

SEQ ID NO: 4258330 - DNA, 25 bp, Homo sapien
taccatagtggtctgtccccaagat

SEQ ID NO: 4258331 - DNA, 25 bp, Homo sapien
taggcaatccgatctcaaagcagag

SEQ ID NO: 4258332 - DNA, 25 bp, Homo sapien
tactacgggattacatacagaaacc

SEQ ID NO: 4258333 - DNA, 25 bp, Homo sapien
tcatcactaggaatatagacaaatg

SEQ ID NO: 4258334 - DNA, 25 bp, Homo sapien
gacaaatgactgtctgggcccacac

SEQ ID NO: 4258335 - DNA, 25 bp, Homo sapien
cactggtacagtagtcacctgtgaa

SEQ ID NO: 4258336 - DNA, 25 bp, Homo sapien
cacttgtttcattggaaggttaggg

SEQ ID NO: 4258337 - DNA, 25 bp, Homo sapien
tagaaggagattctaaagttattta

SEQ ID NO: 4258338 - DNA, 25 bp, Homo sapien
ccatagtattcaggcaaatgttcat

SEQ ID NO: 4258339 - DNA, 25 bp, Homo sapien
taaagttatttatgatgcttagcca

SEQ ID NO: 4258340 - DNA, 25 bp, Homo sapien
tttatgatgcttagccatagtattc

SEQ ID NO: 4258341 - DNA, 25 bp, Homo sapien
taagtgttggactgctaggagaact

SEQ ID NO: 4258342 - DNA, 25 bp, Homo sapien
tgcagaattaggaaaacggttcacc

SEQ ID NO: 4258343 - DNA, 25 bp, Homo sapien
aatagggtactgcattgtagtctcc

SEQ ID NO: 4258344 - DNA, 25 bp, Homo sapien
tcaccgctggccattacacaggttt

SEQ ID NO: 4258345 - DNA, 25 bp, Homo sapien
tgtagttgacacacgtacttcagat

SEQ ID NO: 4258346 - DNA, 25 bp, Homo sapien
aactgtaatgttgtctctggagcca

SEQ ID NO: 4258347 - DNA, 25 bp, Homo sapien
tcactgcaaggtttacgatgagtcg

SEQ ID NO: 4258348 - DNA, 25 bp, Homo sapien
tctggagccagccagtaaagcagca

SEQ ID NO: 4258349 - DNA, 25 bp, Homo sapien
ccatgaaatccaagtcctcgtgtag

SEQ ID NO: 4258350 - DNA, 25 bp, Homo sapien
catttctgcataagactgcttgcac

SEQ ID NO: 4258351 - DNA, 25 bp, Homo sapien
caagcccgtatggttcatttgaact

SEQ ID NO: 4258352 - DNA, 25 bp, Homo sapien
tcccaaagtccattagtagctacaa

SEQ ID NO: 4258353 - DNA, 25 bp, Homo sapien
tttgcaacatgtaatattccagaaa

SEQ ID NO: 4258354 - DNA, 25 bp, Homo sapien
gtgtttgcaacatgtaatattccag

SEQ ID NO: 4258355 - DNA, 25 bp, Homo sapien
tgtttgcaacatgtaatattccaga

SEQ ID NO: 4258356 - DNA, 25 bp, Homo sapien
cagtgtttgcaacatgtaatattcc

SEQ ID NO: 4258357 - DNA, 25 bp, Homo sapien
tcttatgagcataaggacttttagg

SEQ ID NO: 4258358 - DNA, 25 bp, Homo sapien
tcttttccaattcttatgagcataa

SEQ ID NO: 4258359 - DNA, 25 bp, Homo sapien
gagcataaggacttttaggtttgcc

SEQ ID NO: 4258360 - DNA, 25 bp, Homo sapien
gctctctgccaacccatcatgggta

SEQ ID NO: 4258361 - DNA, 25 bp, Homo sapien
tgaaccctggacacttcttttcttc

SEQ ID NO: 4258362 - DNA, 25 bp, Homo sapien
aagacctaaaagcctatccattctc

SEQ ID NO: 4258363 - DNA, 25 bp, Homo sapien
agagcagccactccattgaaccctg

SEQ ID NO: 4258364 - DNA, 25 bp, Homo sapien
tccattgaaccctggacacttcttt

SEQ ID NO: 4258365 - DNA, 25 bp, Homo sapien
ttgatgtcaactctgccgctgaggc

SEQ ID NO: 4258366 - DNA, 25 bp, Homo sapien
gcgtggccagagctacatgttgctt

SEQ ID NO: 4258367 - DNA, 25 bp, Homo sapien
cgtgcttgcatatggaacagggtaa

SEQ ID NO: 4258368 - DNA, 25 bp, Homo sapien
gctgaggcaccgtgatgtccatcaa

SEQ ID NO: 4258369 - DNA, 25 bp, Homo sapien
tccattctcttgatttccaaaacac

SEQ ID NO: 4258370 - DNA, 25 bp, Homo sapien
ttccattctcttgatttccaaaaca

SEQ ID NO: 4258371 - DNA, 25 bp, Homo sapien
ccattctcttgatttccaaaacact

SEQ ID NO: 4258372 - DNA, 25 bp, Homo sapien
attccattctcttgatttccaaaac

SEQ ID NO: 4258373 - DNA, 25 bp, Homo sapien
tatccaagtgtaggtcgccagcacg

SEQ ID NO: 4258374 - DNA, 25 bp, Homo sapien
cggagaactcgaccattcggtggcg

SEQ ID NO: 4258375 - DNA, 25 bp, Homo sapien
atctatccaagtgtaggtcgccagc

SEQ ID NO: 4258376 - DNA, 25 bp, Homo sapien
ccagcacgctggacggtatgtttca

SEQ ID NO: 4258377 - DNA, 25 bp, Homo sapien
agccatctttctcctacggtctcag

SEQ ID NO: 4258378 - DNA, 25 bp, Homo sapien
gccatctttctcctacggtctcaga

SEQ ID NO: 4258379 - DNA, 25 bp, Homo sapien
ttccttctgggtaatgtgcgactcc

SEQ ID NO: 4258380 - DNA, 25 bp, Homo sapien
ggtaatgtgcgactccacagccatc

SEQ ID NO: 4258381 - DNA, 25 bp, Homo sapien
gaatgttcactacatcacctggaac

SEQ ID NO: 4258382 - DNA, 25 bp, Homo sapien
cttgatggtagagctccctgtgtgg

SEQ ID NO: 4258383 - DNA, 25 bp, Homo sapien
tgatagcgatggtgggcattcccct

SEQ ID NO: 4258384 - DNA, 25 bp, Homo sapien
aacctcagtcagaactcactttatg

SEQ ID NO: 4258385 - DNA, 25 bp, Homo sapien
gatctgtacccttacagtctgtgcc

SEQ ID NO: 4258386 - DNA, 25 bp, Homo sapien
catatccaactgctgtttctaaaag

SEQ ID NO: 4258387 - DNA, 25 bp, Homo sapien
tgtcagtcatggtccatgtactggg

SEQ ID NO: 4258388 - DNA, 25 bp, Homo sapien
gtctctttattttacactcatatcc

SEQ ID NO: 4258389 - DNA, 25 bp, Homo sapien
tcttcttggataagagtcctgctgg

SEQ ID NO: 4258390 - DNA, 25 bp, Homo sapien
aaaggagtagcttcggcatccgagc

SEQ ID NO: 4258391 - DNA, 25 bp, Homo sapien
ggatcactaagacggagagcccttc

SEQ ID NO: 4258392 - DNA, 25 bp, Homo sapien
taggagctcgctggagtcactttcc

SEQ ID NO: 4258393 - DNA, 25 bp, Homo sapien
cagatctttgaactgtgtcctggta

SEQ ID NO: 4258394 - DNA, 25 bp, Homo sapien
cctggtaaaggttgcttcagagtca

SEQ ID NO: 4258395 - DNA, 25 bp, Homo sapien
cagagtcattttggttctgtgttca

SEQ ID NO: 4258396 - DNA, 25 bp, Homo sapien
aaacttgtttcgcaggatccagatc

SEQ ID NO: 4258397 - DNA, 25 bp, Homo sapien
tccagaagtacaaggatgagacctg

SEQ ID NO: 4258398 - DNA, 25 bp, Homo sapien
gcagtgccaatttgcatcagctctg

SEQ ID NO: 4258399 - DNA, 25 bp, Homo sapien
cagaatgccaaagatgccaaggtca

SEQ ID NO: 4258400 - DNA, 25 bp, Homo sapien
taatcagtccccatgcgttgtgtac

SEQ ID NO: 4258401 - DNA, 25 bp, Homo sapien
gggttgtgactacttgtttatccag

SEQ ID NO: 4258402 - DNA, 25 bp, Homo sapien
ctgtaatctgggttgtgactacttg

SEQ ID NO: 4258403 - DNA, 25 bp, Homo sapien
aatctgggttgtgactacttgttta

SEQ ID NO: 4258404 - DNA, 25 bp, Homo sapien
tgtgactacttgtttatccagttta

SEQ ID NO: 4258405 - DNA, 25 bp, Homo sapien
tttcaacacgtctttacccactgcg

SEQ ID NO: 4258406 - DNA, 25 bp, Homo sapien
tactttctgttgagcaagccaggca

SEQ ID NO: 4258407 - DNA, 25 bp, Homo sapien
cactgcgctgtagccacattggcct

SEQ ID NO: 4258408 - DNA, 25 bp, Homo sapien
gctctaaggtcatctcaaaaagtcc

SEQ ID NO: 4258409 - DNA, 25 bp, Homo sapien
tcctccaaggcttgactgcagaact

SEQ ID NO: 4258410 - DNA, 25 bp, Homo sapien
ttttctgccagggaattctgcttat

SEQ ID NO: 4258411 - DNA, 25 bp, Homo sapien
cattttctgccagggaattctgctt

SEQ ID NO: 4258412 - DNA, 25 bp, Homo sapien
ctgcttatcctccaaggcttgactg

SEQ ID NO: 4258413 - DNA, 25 bp, Homo sapien
ttagtgagggtcacggcacacagtg

SEQ ID NO: 4258414 - DNA, 25 bp, Homo sapien
caaggttgacagctgcaccgtgatt

SEQ ID NO: 4258415 - DNA, 25 bp, Homo sapien
gtcacacggcgggtcactctctggc

SEQ ID NO: 4258416 - DNA, 25 bp, Homo sapien
gtgacagtgtgcttcctgttctcag

SEQ ID NO: 4258417 - DNA, 25 bp, Homo sapien
tcttctgggaaactgttgctgcttt

SEQ ID NO: 4258418 - DNA, 25 bp, Homo sapien
ttctgggaaactgttgctgctttat

SEQ ID NO: 4258419 - DNA, 25 bp, Homo sapien
ttctcttctgggaaactgttgctgc

SEQ ID NO: 4258420 - DNA, 25 bp, Homo sapien
cctttgtacaggggagcctctttct

SEQ ID NO: 4258421 - DNA, 25 bp, Homo sapien
ggaaagcacccatctagatcagcct

SEQ ID NO: 4258422 - DNA, 25 bp, Homo sapien
gcacccatctagatcagccttgtca

SEQ ID NO: 4258423 - DNA, 25 bp, Homo sapien
tcaaaattaaggcatgctgtaagta

SEQ ID NO: 4258424 - DNA, 25 bp, Homo sapien
tggttagtcaaaattaaggcatgct

SEQ ID NO: 4258425 - DNA, 25 bp, Homo sapien
tgacataatagcaaccatatcattg

SEQ ID NO: 4258426 - DNA, 25 bp, Homo sapien
actttattacatgtgccctctggca

SEQ ID NO: 4258427 - DNA, 25 bp, Homo sapien
tgtggtggaaatcatataccttgtt

SEQ ID NO: 4258428 - DNA, 25 bp, Homo sapien
ccctctggcagatcttacttttatg

SEQ ID NO: 4258429 - DNA, 25 bp, Homo sapien
caaatgtgccaatatcctggagaaa

SEQ ID NO: 4258430 - DNA, 25 bp, Homo sapien
caccaagcagtgtgcctaaagcaag

SEQ ID NO: 4258431 - DNA, 25 bp, Homo sapien
gaaaaccatgagtgaacgcctcaag

SEQ ID NO: 4258432 - DNA, 25 bp, Homo sapien
tacagcgagtctttaccaattgcaa

SEQ ID NO: 4258433 - DNA, 25 bp, Homo sapien
cctgtaagaggtgaaatatgtgatg

SEQ ID NO: 4258434 - DNA, 25 bp, Homo sapien
tgaaaaatgcagttccaggaaagca

SEQ ID NO: 4258435 - DNA, 25 bp, Homo sapien
aggtaaattttctatggcatgtcca

SEQ ID NO: 4258436 - DNA, 25 bp, Homo sapien
aacctgtgtgtgaggaaattgcaca

SEQ ID NO: 4258437 - DNA, 25 bp, Homo sapien
taaacagtgctttgtaccggatctg

SEQ ID NO: 4258438 - DNA, 25 bp, Homo sapien
acagtttggattaagtatcttggac

SEQ ID NO: 4258439 - DNA, 25 bp, Homo sapien
tctgtccagctggtatcctgtgaaa

SEQ ID NO: 4258440 - DNA, 25 bp, Homo sapien
tcacactgaaaatgcctcaactttt

SEQ ID NO: 4258441 - DNA, 25 bp, Homo sapien
taaaaggattctaagtgccgcacaa

SEQ ID NO: 4258442 - DNA, 25 bp, Homo sapien
actggtggcagctcttgtcgttaga

SEQ ID NO: 4258443 - DNA, 25 bp, Homo sapien
gatcagactgaggtactgtggacca

SEQ ID NO: 4258444 - DNA, 25 bp, Homo sapien
tgccgcacaaggaagggtaactggt

SEQ ID NO: 4258445 - DNA, 25 bp, Homo sapien
gggattggagaatttcgcttacaca

SEQ ID NO: 4258446 - DNA, 25 bp, Homo sapien
tgtaggctgagtgaaacagactgtc

SEQ ID NO: 4258447 - DNA, 25 bp, Homo sapien
ggttcaacacgtactgattcctcgg

SEQ ID NO: 4258448 - DNA, 25 bp, Homo sapien
tcctcggtcaccctgggaaagttgc

SEQ ID NO: 4258449 - DNA, 25 bp, Homo sapien
gggaatctcgaaacaaattctcgaa

SEQ ID NO: 4258450 - DNA, 25 bp, Homo sapien
taaaaattgcttctttggcaggtga

SEQ ID NO: 4258451 - DNA, 25 bp, Homo sapien
catttcctacagtctgggaatctcg

SEQ ID NO: 4258452 - DNA, 25 bp, Homo sapien
ctttggcaggtgatacctccagggc

SEQ ID NO: 4258453 - DNA, 25 bp, Homo sapien
gaggaaccaaattgtagcagatata

SEQ ID NO: 4258454 - DNA, 25 bp, Homo sapien
gagaagtggcactaggctcttttaa

SEQ ID NO: 4258455 - DNA, 25 bp, Homo sapien
tacacttaacaattcccaagggaga

SEQ ID NO: 4258456 - DNA, 25 bp, Homo sapien
cagctgtcttgggaactaaatgagt

SEQ ID NO: 4258457 - DNA, 25 bp, Homo sapien
ggtgcaatttgtttccacagagcaa

SEQ ID NO: 4258458 - DNA, 25 bp, Homo sapien
gccttgataccgaaaataggtgtat

SEQ ID NO: 4258459 - DNA, 25 bp, Homo sapien
ggtgtcaagttcaccaaaccctcaa

SEQ ID NO: 4258460 - DNA, 25 bp, Homo sapien
ggcaaattttactcatgatcataga

SEQ ID NO: 4258461 - DNA, 25 bp, Homo sapien
ttgaaaggtggttacatggactgag

SEQ ID NO: 4258462 - DNA, 25 bp, Homo sapien
tattcttaggttgaagaccatccag

SEQ ID NO: 4258463 - DNA, 25 bp, Homo sapien
ttgaagaccatccagaagcaggtgg

SEQ ID NO: 4258464 - DNA, 25 bp, Homo sapien
tttggcccatagtccaactgtactt

SEQ ID NO: 4258465 - DNA, 25 bp, Homo sapien
gtccaaggatgagaatagtgaagac

SEQ ID NO: 4258466 - DNA, 25 bp, Homo sapien
aagacagagagatactctatttttg

SEQ ID NO: 4258467 - DNA, 25 bp, Homo sapien
gggagaggaaatgtccaaggatgag

SEQ ID NO: 4258468 - DNA, 25 bp, Homo sapien
ccaaggatgagaatagtgaagacag

SEQ ID NO: 4258469 - DNA, 25 bp, Homo sapien
tctgaacatacaattagagcttggg

SEQ ID NO: 4258470 - DNA, 25 bp, Homo sapien
taaggagctaccctgaaagtacatg

SEQ ID NO: 4258471 - DNA, 25 bp, Homo sapien
tatcttgtccctgagcctaaaaaag

SEQ ID NO: 4258472 - DNA, 25 bp, Homo sapien
gggtgtaccctactgtaaatgtcaa

SEQ ID NO: 4258473 - DNA, 25 bp, Homo sapien
gaaatgtttatgagctagggtcctg

SEQ ID NO: 4258474 - DNA, 25 bp, Homo sapien
tagggtcctgtcaagagaatattct

SEQ ID NO: 4258475 - DNA, 25 bp, Homo sapien
tcactctgtttgtgtactcttacag

SEQ ID NO: 4258476 - DNA, 25 bp, Homo sapien
catcccatttgaagtatagttctga

SEQ ID NO: 4258477 - DNA, 25 bp, Homo sapien
tgaaaataggagaattcaaaaaaca

SEQ ID NO: 4258478 - DNA, 25 bp, Homo sapien
ttctgcttgaaaataggagaattca

SEQ ID NO: 4258479 - DNA, 25 bp, Homo sapien
gcttgaaaataggagaattcaaaaa

SEQ ID NO: 4258480 - DNA, 25 bp, Homo sapien
ctgcttgaaaataggagaattcaaa

SEQ ID NO: 4258481 - DNA, 25 bp, Homo sapien
tggctgtgcacctacgtttaggcag

SEQ ID NO: 4258482 - DNA, 25 bp, Homo sapien
ggtgggctccttatagttcacgctg

SEQ ID NO: 4258483 - DNA, 25 bp, Homo sapien
gctccttatagttcacgctggctgt

SEQ ID NO: 4258484 - DNA, 25 bp, Homo sapien
cacctacgtttaggcagagccactg

SEQ ID NO: 4258485 - DNA, 25 bp, Homo sapien
gacattggtgatatccttcaggcta

SEQ ID NO: 4258486 - DNA, 25 bp, Homo sapien
tgatatccttcaggctaagatgagg

SEQ ID NO: 4258487 - DNA, 25 bp, Homo sapien
cttctgattttcacaacaggataca

SEQ ID NO: 4258488 - DNA, 25 bp, Homo sapien
caggctaagatgaggtgactgctga

SEQ ID NO: 4258489 - DNA, 25 bp, Homo sapien
caagtgggcaaatagaggtcatcgg

SEQ ID NO: 4258490 - DNA, 25 bp, Homo sapien
tgttggcttagaaccctccgtctct

SEQ ID NO: 4258491 - DNA, 25 bp, Homo sapien
tggtctatctgaattgctcgtggga

SEQ ID NO: 4258492 - DNA, 25 bp, Homo sapien
ttagtaaacgttcctggctgaatca

SEQ ID NO: 4258493 - DNA, 25 bp, Homo sapien
tcccagtgtgtcttgaggaatagta

SEQ ID NO: 4258494 - DNA, 25 bp, Homo sapien
cagtgtgtcttgaggaatagtaggt

SEQ ID NO: 4258495 - DNA, 25 bp, Homo sapien
tgaatcaaaatcaactcccagtgtg

SEQ ID NO: 4258496 - DNA, 25 bp, Homo sapien
tcaaaatcaactcccagtgtgtctt

SEQ ID NO: 4258497 - DNA, 25 bp, Homo sapien
ctggaagttcagtttcttcaagagg

SEQ ID NO: 4258498 - DNA, 25 bp, Homo sapien
ccttgtcctggaagttcagtttctt

SEQ ID NO: 4258499 - DNA, 25 bp, Homo sapien
gaaatgattctccttgtcctggaag

SEQ ID NO: 4258500 - DNA, 25 bp, Homo sapien
gttcagtttcttcaagaggaatttg

SEQ ID NO: 4258501 - DNA, 25 bp, Homo sapien
tcatgataaagaatttgatactaac

SEQ ID NO: 4258502 - DNA, 25 bp, Homo sapien
gtcatcactattggggtccattcca

SEQ ID NO: 4258503 - DNA, 25 bp, Homo sapien
cattccagaggaacatatttcctgg

SEQ ID NO: 4258504 - DNA, 25 bp, Homo sapien
caaataaatttctggagctgtcatc

SEQ ID NO: 4258505 - DNA, 25 bp, Homo sapien
tccttcacaaataaatttctggagc

SEQ ID NO: 4258506 - DNA, 25 bp, Homo sapien
ctgttatattttggctagcaggacc

SEQ ID NO: 4258507 - DNA, 25 bp, Homo sapien
cacaatggtatagccagacacaaag

SEQ ID NO: 4258508 - DNA, 25 bp, Homo sapien
agacacaaagaatatcctaaagcaa

SEQ ID NO: 4258509 - DNA, 25 bp, Homo sapien
ggaccatatttgaacaccttcttta

SEQ ID NO: 4258510 - DNA, 25 bp, Homo sapien
tttcttctggatcctgttttgctac

SEQ ID NO: 4258511 - DNA, 25 bp, Homo sapien
actatttcttctggatcctgttttg

SEQ ID NO: 4258512 - DNA, 25 bp, Homo sapien
tatttcttctggatcctgttttgct

SEQ ID NO: 4258513 - DNA, 25 bp, Homo sapien
ctaaactatttcttctggatcctgt

SEQ ID NO: 4258514 - DNA, 25 bp, Homo sapien
actaagaaattcggccttagtaatg

SEQ ID NO: 4258515 - DNA, 25 bp, Homo sapien
ctaagaaattcggccttagtaatga

SEQ ID NO: 4258516 - DNA, 25 bp, Homo sapien
taagaaattcggccttagtaatgaa

SEQ ID NO: 4258517 - DNA, 25 bp, Homo sapien
gagcaggttctactgtttgttgtga

SEQ ID NO: 4258518 - DNA, 25 bp, Homo sapien
tttcaatgcatatagctgacatgtg

SEQ ID NO: 4258519 - DNA, 25 bp, Homo sapien
gctgacatgtgagatagtaacattc

SEQ ID NO: 4258520 - DNA, 25 bp, Homo sapien
tgcatatagctgacatgtgagatag

SEQ ID NO: 4258521 - DNA, 25 bp, Homo sapien
tatcagttattaaatctaaacttaa

SEQ ID NO: 4258522 - DNA, 25 bp, Homo sapien
aagtgatataaaaggacaacataaa

SEQ ID NO: 4258523 - DNA, 25 bp, Homo sapien
ttaaaagtgatataaaaggacaaca

SEQ ID NO: 4258524 - DNA, 25 bp, Homo sapien
ataaaaggacaacataaaaatctct

SEQ ID NO: 4258525 - DNA, 25 bp, Homo sapien
tggtgcagctataaaagacctgcgt

SEQ ID NO: 4258526 - DNA, 25 bp, Homo sapien
taaaagacctgcgtttgccaatctc

SEQ ID NO: 4258527 - DNA, 25 bp, Homo sapien
tcttcaagactatcttgaaaggact

SEQ ID NO: 4258528 - DNA, 25 bp, Homo sapien
ttatttggcatggtgcagctataaa

SEQ ID NO: 4258529 - DNA, 25 bp, Homo sapien
cctcctgccgcaggcgcgtccagaa

SEQ ID NO: 4258530 - DNA, 25 bp, Homo sapien
agtggacgcggcgaccctcctgccg

SEQ ID NO: 4258531 - DNA, 25 bp, Homo sapien
ctggcggaagtggacgcggcgaccc

SEQ ID NO: 4258532 - DNA, 25 bp, Homo sapien
gccgcaggcgcgtccagaacgatac

SEQ ID NO: 4258533 - DNA, 25 bp, Homo sapien
gtccgccgtcgcctggaactaccgc

SEQ ID NO: 4258534 - DNA, 25 bp, Homo sapien
cttggccactacttctgcaacagct

SEQ ID NO: 4258535 - DNA, 25 bp, Homo sapien
ttcgaagctctccagccacggctag

SEQ ID NO: 4258536 - DNA, 25 bp, Homo sapien
aactaccgccgccacattcgaaatt

SEQ ID NO: 4258537 - DNA, 25 bp, Homo sapien
ataacccactaccatcagaccagcc

SEQ ID NO: 4258538 - DNA, 25 bp, Homo sapien
tctgataacccactaccatcagacc

SEQ ID NO: 4258539 - DNA, 25 bp, Homo sapien
cttagtgacactaatattaataagt

SEQ ID NO: 4258540 - DNA, 25 bp, Homo sapien
gggttatatatcaaccttagtgaca

SEQ ID NO: 4258541 - DNA, 25 bp, Homo sapien
ctgtaacccagcagaaaagtgatgg

SEQ ID NO: 4258542 - DNA, 25 bp, Homo sapien
tggacatctccttcctgtaacccag

SEQ ID NO: 4258543 - DNA, 25 bp, Homo sapien
gcctccttcctgaggctggacatct

SEQ ID NO: 4258544 - DNA, 25 bp, Homo sapien
aaaagtgatggtctgacttcatctt

SEQ ID NO: 4258545 - DNA, 25 bp, Homo sapien
tagcagatagtctcttagattttgg

SEQ ID NO: 4258546 - DNA, 25 bp, Homo sapien
tccacagcggcagagatccatattc

SEQ ID NO: 4258547 - DNA, 25 bp, Homo sapien
tcctggtaatatgtgctcagtcagt

SEQ ID NO: 4258548 - DNA, 25 bp, Homo sapien
tattcctggtaatatgtgctcagtc

SEQ ID NO: 4258549 - DNA, 25 bp, Homo sapien
tagacaagaaccttgaccagagcag

SEQ ID NO: 4258550 - DNA, 25 bp, Homo sapien
catttctaggcctggttgccatagg

SEQ ID NO: 4258551 - DNA, 25 bp, Homo sapien
gggtgtgctcaggactcttcttcac

SEQ ID NO: 4258552 - DNA, 25 bp, Homo sapien
cactatcattggttgtgtctgagac

SEQ ID NO: 4258553 - DNA, 25 bp, Homo sapien
gtggggactcatctggggcacccat

SEQ ID NO: 4258554 - DNA, 25 bp, Homo sapien
tgaatttgtgtatcttccttgtgca

SEQ ID NO: 4258555 - DNA, 25 bp, Homo sapien
catgaatttgtgtatcttccttgtg

SEQ ID NO: 4258556 - DNA, 25 bp, Homo sapien
cttgtgcaggggccgtggtaatctt

SEQ ID NO: 4258557 - DNA, 25 bp, Homo sapien
ttcatgaatttgtgtatcttccttg

SEQ ID NO: 4258558 - DNA, 25 bp, Homo sapien
gtaaagaacaacctgtttgaatcag

SEQ ID NO: 4258559 - DNA, 25 bp, Homo sapien
catcagatcatgatagttatgtggg

SEQ ID NO: 4258560 - DNA, 25 bp, Homo sapien
ttctgtttgcaatctcctttttgtc

SEQ ID NO: 4258561 - DNA, 25 bp, Homo sapien
tccaatgtattgctaaaggtggtcg

SEQ ID NO: 4258562 - DNA, 25 bp, Homo sapien
tgcttttggtttaaggcggtcaaga

SEQ ID NO: 4258563 - DNA, 25 bp, Homo sapien
tgagttgagcaaggaaacaagcttt

SEQ ID NO: 4258564 - DNA, 25 bp, Homo sapien
gttgctgaagttgtggactgctaag

SEQ ID NO: 4258565 - DNA, 25 bp, Homo sapien
gctaagcaagctagtacactcactt

SEQ ID NO: 4258566 - DNA, 25 bp, Homo sapien
aatctcacagataaaattctaaccc

SEQ ID NO: 4258567 - DNA, 25 bp, Homo sapien
ctaaatgacaagatagtttctggtt

SEQ ID NO: 4258568 - DNA, 25 bp, Homo sapien
gttaaatctcacagataaaattcta

SEQ ID NO: 4258569 - DNA, 25 bp, Homo sapien
gtttctggttaaatctcacagataa

SEQ ID NO: 4258570 - DNA, 25 bp, Homo sapien
tgatttcctcaaggatataaagtgg

SEQ ID NO: 4258571 - DNA, 25 bp, Homo sapien
ttcctgatttcctcaaggatataaa

SEQ ID NO: 4258572 - DNA, 25 bp, Homo sapien
cctgatttcctcaaggatataaagt

SEQ ID NO: 4258573 - DNA, 25 bp, Homo sapien
tcctgatttcctcaaggatataaag

SEQ ID NO: 4258574 - DNA, 25 bp, Homo sapien
ttcactttcgatgttttcaatgtta

SEQ ID NO: 4258575 - DNA, 25 bp, Homo sapien
ctgtgcgttttcactttcgatgttt

SEQ ID NO: 4258576 - DNA, 25 bp, Homo sapien
cactttcgatgttttcaatgttaat

SEQ ID NO: 4258577 - DNA, 25 bp, Homo sapien
tgcgttttcactttcgatgttttca

SEQ ID NO: 4258578 - DNA, 25 bp, Homo sapien
ctctttctctccactcaaatatttt

SEQ ID NO: 4258579 - DNA, 25 bp, Homo sapien
tctttctctccactcaaatatttta

SEQ ID NO: 4258580 - DNA, 25 bp, Homo sapien
ttctctccactcaaatattttaata

SEQ ID NO: 4258581 - DNA, 25 bp, Homo sapien
ctttctctccactcaaatattttaa

SEQ ID NO: 4258582 - DNA, 25 bp, Homo sapien
gtctcttcccattcgtcttccagag

SEQ ID NO: 4258583 - DNA, 25 bp, Homo sapien
cttcccattcgtcttccagagcact

SEQ ID NO: 4258584 - DNA, 25 bp, Homo sapien
ctcttcccattcgtcttccagagca

SEQ ID NO: 4258585 - DNA, 25 bp, Homo sapien
tgtctcttcccattcgtcttccaga

SEQ ID NO: 4258586 - DNA, 25 bp, Homo sapien
tgaacccatttgtttctgcagaaag

SEQ ID NO: 4258587 - DNA, 25 bp, Homo sapien
cacatttgtgtcaaaccaggtcatt

SEQ ID NO: 4258588 - DNA, 25 bp, Homo sapien
ggcccttgggagtctgccattcgaa

SEQ ID NO: 4258589 - DNA, 25 bp, Homo sapien
gccattcgaatgcttgtccagctga

SEQ ID NO: 4258590 - DNA, 25 bp, Homo sapien
tgcctggtatatcatcaatccagga

SEQ ID NO: 4258591 - DNA, 25 bp, Homo sapien
gatggaaatgccagaagcatatgtt

SEQ ID NO: 4258592 - DNA, 25 bp, Homo sapien
aattgggctgcctggtatatcatca

SEQ ID NO: 4258593 - DNA, 25 bp, Homo sapien
gggaaaattgggctgcctggtatat

SEQ ID NO: 4258594 - DNA, 25 bp, Homo sapien
attgaattttgtggaagccccaggg

SEQ ID NO: 4258595 - DNA, 25 bp, Homo sapien
agccccaggggtttgtgaatttcag

SEQ ID NO: 4258596 - DNA, 25 bp, Homo sapien
tgaatttcagagggacagggtttta

SEQ ID NO: 4258597 - DNA, 25 bp, Homo sapien
tgttcctccctagcaacttttctga

SEQ ID NO: 4258598 - DNA, 25 bp, Homo sapien
tccctgatctttcatttgggttgtg

SEQ ID NO: 4258599 - DNA, 25 bp, Homo sapien
tgggttgtgttcctccctagcaact

SEQ ID NO: 4258600 - DNA, 25 bp, Homo sapien
cttttctgatgtgttaatgtcattc

SEQ ID NO: 4258601 - DNA, 25 bp, Homo sapien
cttatatagtccaccccttgcaaca

SEQ ID NO: 4258602 - DNA, 25 bp, Homo sapien
agtccaccccttgcaacattcggat

SEQ ID NO: 4258603 - DNA, 25 bp, Homo sapien
tatagtccaccccttgcaacattcg

SEQ ID NO: 4258604 - DNA, 25 bp, Homo sapien
caccccttgcaacattcggatccat

SEQ ID NO: 4258605 - DNA, 25 bp, Homo sapien
tggtattcctcatcggactccagtt

SEQ ID NO: 4258606 - DNA, 25 bp, Homo sapien
cagttgtgtctaaatagagatgaga

SEQ ID NO: 4258607 - DNA, 25 bp, Homo sapien
gactccagttgtgtctaaatagaga

SEQ ID NO: 4258608 - DNA, 25 bp, Homo sapien
tattcctcatcggactccagttgtg

SEQ ID NO: 4258609 - DNA, 25 bp, Homo sapien
tcatcaagttttgaaccataatact

SEQ ID NO: 4258610 - DNA, 25 bp, Homo sapien
ctgtgtcatcaagttttgaaccata

SEQ ID NO: 4258611 - DNA, 25 bp, Homo sapien
tgtcatcaagttttgaaccataata

SEQ ID NO: 4258612 - DNA, 25 bp, Homo sapien
caagttttgaaccataatacttcat

SEQ ID NO: 4258613 - DNA, 25 bp, Homo sapien
agcactttgtgaccgctagatgtgg

SEQ ID NO: 4258614 - DNA, 25 bp, Homo sapien
acaccaaggaggttgggagactgtt

SEQ ID NO: 4258615 - DNA, 25 bp, Homo sapien
gccttgaagcactttgtgaccgcta

SEQ ID NO: 4258616 - DNA, 25 bp, Homo sapien
caccaaggaggttgggagactgtta

SEQ ID NO: 4258617 - DNA, 25 bp, Homo sapien
gtctgaacaaatggtcaaaggtcat

SEQ ID NO: 4258618 - DNA, 25 bp, Homo sapien
caaacttaggatccatactgtgtct

SEQ ID NO: 4258619 - DNA, 25 bp, Homo sapien
taggatccatactgtgtctgaacaa

SEQ ID NO: 4258620 - DNA, 25 bp, Homo sapien
tactgtgtctgaacaaatggtcaaa

SEQ ID NO: 4258621 - DNA, 25 bp, Homo sapien
cagttgtggccccttgattgtggac

SEQ ID NO: 4258622 - DNA, 25 bp, Homo sapien
caattgtatggtgtgtcctcagaaa

SEQ ID NO: 4258623 - DNA, 25 bp, Homo sapien
taccctcatgaaaaggactaatgtc

SEQ ID NO: 4258624 - DNA, 25 bp, Homo sapien
tataaaagtaagtgtgatcccctct

SEQ ID NO: 4258625 - DNA, 25 bp, Homo sapien
ttggagggaaggacccgagttcatc

SEQ ID NO: 4258626 - DNA, 25 bp, Homo sapien
tcatgtgatggtcgtttggagggaa

SEQ ID NO: 4258627 - DNA, 25 bp, Homo sapien
gggctccccagatcatgtgaaaatt

SEQ ID NO: 4258628 - DNA, 25 bp, Homo sapien
actcatgaagcttgatatttctctg

SEQ ID NO: 4258629 - DNA, 25 bp, Homo sapien
tggaactctgattgaccaagttggt

SEQ ID NO: 4258630 - DNA, 25 bp, Homo sapien
gagttttgatgttcttggaactctg

SEQ ID NO: 4258631 - DNA, 25 bp, Homo sapien
gatgttcttggaactctgattgacc

SEQ ID NO: 4258632 - DNA, 25 bp, Homo sapien
gactccattgaggatgttacaaggg

SEQ ID NO: 4258633 - DNA, 25 bp, Homo sapien
tggtactcagcaggattttggacca

SEQ ID NO: 4258634 - DNA, 25 bp, Homo sapien
gtagtctgcacaactctgacttcaa

SEQ ID NO: 4258635 - DNA, 25 bp, Homo sapien
tcttttctggggtgtagtctgcaca

SEQ ID NO: 4258636 - DNA, 25 bp, Homo sapien
tactcagcaggattttggaccaggt

SEQ ID NO: 4258637 - DNA, 25 bp, Homo sapien
agaaagtatcttcaataaggttaga

SEQ ID NO: 4258638 - DNA, 25 bp, Homo sapien
ctagaaagtatcttcaataaggtta

SEQ ID NO: 4258639 - DNA, 25 bp, Homo sapien
gaaagtatcttcaataaggttagaa

SEQ ID NO: 4258640 - DNA, 25 bp, Homo sapien
tagaaagtatcttcaataaggttag

SEQ ID NO: 4258641 - DNA, 25 bp, Homo sapien
taactacaagatactgggtgaggtc

SEQ ID NO: 4258642 - DNA, 25 bp, Homo sapien
tttggctaaggtaactacaagatac

SEQ ID NO: 4258643 - DNA, 25 bp, Homo sapien
ttttggctaaggtaactacaagata

SEQ ID NO: 4258644 - DNA, 25 bp, Homo sapien
ggccttcataagactgtggatggat

SEQ ID NO: 4258645 - DNA, 25 bp, Homo sapien
ttaataactagggtacagcagtagc

SEQ ID NO: 4258646 - DNA, 25 bp, Homo sapien
aaatccattgcactgtctttgttga

SEQ ID NO: 4258647 - DNA, 25 bp, Homo sapien
aaacagttgatttgtggccttcata

SEQ ID NO: 4258648 - DNA, 25 bp, Homo sapien
tttttccaatgttattaatagtata

SEQ ID NO: 4258649 - DNA, 25 bp, Homo sapien
ttccaatgttattaatagtatatgt

SEQ ID NO: 4258650 - DNA, 25 bp, Homo sapien
atcctcacacaggggccatgctgac

SEQ ID NO: 4258651 - DNA, 25 bp, Homo sapien
ccatgctgaccttctctgtattttt

SEQ ID NO: 4258652 - DNA, 25 bp, Homo sapien
agaaaggcaaacgtttagacacagt

SEQ ID NO: 4258653 - DNA, 25 bp, Homo sapien
tttactgaaagacttgagaacctct

SEQ ID NO: 4258654 - DNA, 25 bp, Homo sapien
ggcccatggactgtgaaatttgtgt

SEQ ID NO: 4258655 - DNA, 25 bp, Homo sapien
tattcacaaagacagctaacacgga

SEQ ID NO: 4258656 - DNA, 25 bp, Homo sapien
gggctagagtaacagcactggtggg

SEQ ID NO: 4258657 - DNA, 25 bp, Homo sapien
gattttatcatttgcccaggtcttt

SEQ ID NO: 4258658 - DNA, 25 bp, Homo sapien
tctttttggctagtgttaccctggc

SEQ ID NO: 4258659 - DNA, 25 bp, Homo sapien
ccctggcttgtgtggctatgcgtgt

SEQ ID NO: 4258660 - DNA, 25 bp, Homo sapien
ttcactatgcccactctctgaaaat

SEQ ID NO: 4258661 - DNA, 25 bp, Homo sapien
tctcgtttttaacatctgccccagc

SEQ ID NO: 4258662 - DNA, 25 bp, Homo sapien
atgatttggtagtttccctcttggt

SEQ ID NO: 4258663 - DNA, 25 bp, Homo sapien
tgatccgtagaatgaaggtaaataa

SEQ ID NO: 4258664 - DNA, 25 bp, Homo sapien
cagcatcatcaaatttgccttcata

SEQ ID NO: 4258665 - DNA, 25 bp, Homo sapien
cttctttgtaaagtctccgacaact

SEQ ID NO: 4258666 - DNA, 25 bp, Homo sapien
aacaactctttctccataacagtta

SEQ ID NO: 4258667 - DNA, 25 bp, Homo sapien
gcacctgaactgcgttattttccat

SEQ ID NO: 4258668 - DNA, 25 bp, Homo sapien
gctgtcattggagaacagacggtca

SEQ ID NO: 4258669 - DNA, 25 bp, Homo sapien
aaaacgctgccatactccattttct

SEQ ID NO: 4258670 - DNA, 25 bp, Homo sapien
tttctgagaggcaaaaacgctgcca

SEQ ID NO: 4258671 - DNA, 25 bp, Homo sapien
gtctttgaacttcggctcaggtgga

SEQ ID NO: 4258672 - DNA, 25 bp, Homo sapien
atgtggctggcatttgcttttctcc

SEQ ID NO: 4258673 - DNA, 25 bp, Homo sapien
tctttttcatgtggctggcatttgc

SEQ ID NO: 4258674 - DNA, 25 bp, Homo sapien
gcatcctgataccctatcattaatt

SEQ ID NO: 4258675 - DNA, 25 bp, Homo sapien
cagacttgcagggtttttgcatcct

SEQ ID NO: 4258676 - DNA, 25 bp, Homo sapien
gcatcagatgtgcaccaaattggct

SEQ ID NO: 4258677 - DNA, 25 bp, Homo sapien
aaaacagttggtactaacgtcatcg

SEQ ID NO: 4258678 - DNA, 25 bp, Homo sapien
cgtcatcgtttatgccttccaaaag

SEQ ID NO: 4258679 - DNA, 25 bp, Homo sapien
gcaggcagatttgcttggtgtctat

SEQ ID NO: 4258680 - DNA, 25 bp, Homo sapien
tctgactgagctaggcctcaggacc

SEQ ID NO: 4258681 - DNA, 25 bp, Homo sapien
tctggctgctgccttaaaacttcag

SEQ ID NO: 4258682 - DNA, 25 bp, Homo sapien
tctcttgacatcgaacttggttaga

SEQ ID NO: 4258683 - DNA, 25 bp, Homo sapien
cctggaatcaggtccaaatgatgct

SEQ ID NO: 4258684 - DNA, 25 bp, Homo sapien
aacagaaattcttctccgattggca

SEQ ID NO: 4258685 - DNA, 25 bp, Homo sapien
acagcatcaaaaacagaaattcttc

SEQ ID NO: 4258686 - DNA, 25 bp, Homo sapien
ctttctgctcacataaacagcatca

SEQ ID NO: 4258687 - DNA, 25 bp, Homo sapien
tcttctccgattggcattggtgttc

SEQ ID NO: 4258688 - DNA, 25 bp, Homo sapien
ctagtatttacattgaattccggta

SEQ ID NO: 4258689 - DNA, 25 bp, Homo sapien
ccggtaaagactgagttgaccacac

SEQ ID NO: 4258690 - DNA, 25 bp, Homo sapien
gaccacactactccaggtactaaaa

SEQ ID NO: 4258691 - DNA, 25 bp, Homo sapien
cattgaattccggtaaagactgagt

SEQ ID NO: 4258692 - DNA, 25 bp, Homo sapien
gatgttaggtatttctgctgtggaa

SEQ ID NO: 4258693 - DNA, 25 bp, Homo sapien
cagtaaaggggattcaagatgttag

SEQ ID NO: 4258694 - DNA, 25 bp, Homo sapien
tgttgcttatctgaacagtaaaggg

SEQ ID NO: 4258695 - DNA, 25 bp, Homo sapien
gggattcaagatgttaggtatttct

SEQ ID NO: 4258696 - DNA, 25 bp, Homo sapien
gctcaatggattgggtgtagtaggt

SEQ ID NO: 4258697 - DNA, 25 bp, Homo sapien
taagctcaatggattgggtgtagta

SEQ ID NO: 4258698 - DNA, 25 bp, Homo sapien
tcaatggattgggtgtagtaggtat

SEQ ID NO: 4258699 - DNA, 25 bp, Homo sapien
aagctcaatggattgggtgtagtag

SEQ ID NO: 4258700 - DNA, 25 bp, Homo sapien
ctagtcatacagcaggtctacatca

SEQ ID NO: 4258701 - DNA, 25 bp, Homo sapien
taagtatacaggtagtaagctaaag

SEQ ID NO: 4258702 - DNA, 25 bp, Homo sapien
ctggccaacagttttcaacgagtgt

SEQ ID NO: 4258703 - DNA, 25 bp, Homo sapien
tacagcaggtctacatcaactggcc

SEQ ID NO: 4258704 - DNA, 25 bp, Homo sapien
gcacttgtctgaagactgaagagca

SEQ ID NO: 4258705 - DNA, 25 bp, Homo sapien
tactgtagaggctggatacgtgata

SEQ ID NO: 4258706 - DNA, 25 bp, Homo sapien
aagctccagaagctggcaatctggc

SEQ ID NO: 4258707 - DNA, 25 bp, Homo sapien
gaaggtctgagaaagattttctgtg

SEQ ID NO: 4258708 - DNA, 25 bp, Homo sapien
gaaaaactgtagagaggttcctcaa

SEQ ID NO: 4258709 - DNA, 25 bp, Homo sapien
tatcacctgacaactgtcagaatgg

SEQ ID NO: 4258710 - DNA, 25 bp, Homo sapien
tgatccatcaatctcacttctgagt

SEQ ID NO: 4258711 - DNA, 25 bp, Homo sapien
tgcaacagtattcacaatatcgaag

SEQ ID NO: 4258712 - DNA, 25 bp, Homo sapien
caaagagagtgcttctcacaaagcc

SEQ ID NO: 4258713 - DNA, 25 bp, Homo sapien
ttaataggccactagaggattctga

SEQ ID NO: 4258714 - DNA, 25 bp, Homo sapien
caaatatcaccctttcagatgatgc

SEQ ID NO: 4258715 - DNA, 25 bp, Homo sapien
gatgatgcacaaactgataagcgac

SEQ ID NO: 4258716 - DNA, 25 bp, Homo sapien
catcaatcaggatgagcagtgaccc

SEQ ID NO: 4258717 - DNA, 25 bp, Homo sapien
tccatcaatcaggatgagcagtgac

SEQ ID NO: 4258718 - DNA, 25 bp, Homo sapien
caatcaggatgagcagtgaccctcc

SEQ ID NO: 4258719 - DNA, 25 bp, Homo sapien
aggatgagcagtgaccctccattgg

SEQ ID NO: 4258720 - DNA, 25 bp, Homo sapien
catcttaagggattgaccgttgaaa

SEQ ID NO: 4258721 - DNA, 25 bp, Homo sapien
ttcatcttaagggattgaccgttga

SEQ ID NO: 4258722 - DNA, 25 bp, Homo sapien
ggattgaccgttgaaaacagtaagc

SEQ ID NO: 4258723 - DNA, 25 bp, Homo sapien
attgaccgttgaaaacagtaagcat

SEQ ID NO: 4258724 - DNA, 25 bp, Homo sapien
tgcataatgctacatgctttagctt

SEQ ID NO: 4258725 - DNA, 25 bp, Homo sapien
ggcaatatggagcatctatagccat

SEQ ID NO: 4258726 - DNA, 25 bp, Homo sapien
tccttggcaatatggagcatctata

SEQ ID NO: 4258727 - DNA, 25 bp, Homo sapien
ataatgctacatgctttagctttgg

SEQ ID NO: 4258728 - DNA, 25 bp, Homo sapien
aaggcctcaacagaattcatcacat

SEQ ID NO: 4258729 - DNA, 25 bp, Homo sapien
aggaaggcctcaacagaattcatca

SEQ ID NO: 4258730 - DNA, 25 bp, Homo sapien
tcacagcaggaaggcctcaacagaa

SEQ ID NO: 4258731 - DNA, 25 bp, Homo sapien
acagcaggaaggcctcaacagaatt

SEQ ID NO: 4258732 - DNA, 25 bp, Homo sapien
ctggagaagttttccggtgctgcct

SEQ ID NO: 4258733 - DNA, 25 bp, Homo sapien
gacattatggtggactatcacttca

SEQ ID NO: 4258734 - DNA, 25 bp, Homo sapien
cacaaatttaattgctgcgtatggt

SEQ ID NO: 4258735 - DNA, 25 bp, Homo sapien
ggtgctgcctaactagaaggctgtc

SEQ ID NO: 4258736 - DNA, 25 bp, Homo sapien
atcatcaatcattgtgcttgcagtt

SEQ ID NO: 4258737 - DNA, 25 bp, Homo sapien
cagttccagaatggatcaatatatt

SEQ ID NO: 4258738 - DNA, 25 bp, Homo sapien
catcaatcattgtgcttgcagttcc

SEQ ID NO: 4258739 - DNA, 25 bp, Homo sapien
tgcagttccagaatggatcaatata

SEQ ID NO: 4258740 - DNA, 25 bp, Homo sapien
gcacagttcgcaaatatgctgcttg

SEQ ID NO: 4258741 - DNA, 25 bp, Homo sapien
ggcagcaatgttctcacatgaatgg

SEQ ID NO: 4258742 - DNA, 25 bp, Homo sapien
caagtatgaccaggagcacagttcg

SEQ ID NO: 4258743 - DNA, 25 bp, Homo sapien
catgggtgagccatttggtgcttcc

SEQ ID NO: 4258744 - DNA, 25 bp, Homo sapien
gaagaaccttggtgtagatcagctc

SEQ ID NO: 4258745 - DNA, 25 bp, Homo sapien
gcagatttccatggcaatagtctac

SEQ ID NO: 4258746 - DNA, 25 bp, Homo sapien
ttggcaataagggatcgttttcact

SEQ ID NO: 4258747 - DNA, 25 bp, Homo sapien
aatgtatagattgctgggaagaacc

SEQ ID NO: 4258748 - DNA, 25 bp, Homo sapien
taagtctgttgccaggaataccaat

SEQ ID NO: 4258749 - DNA, 25 bp, Homo sapien
gttgccaggaataccaataatctct

SEQ ID NO: 4258750 - DNA, 25 bp, Homo sapien
attgtaagtctgttgccaggaatac

SEQ ID NO: 4258751 - DNA, 25 bp, Homo sapien
gaataccaataatctcttctgactg

SEQ ID NO: 4258752 - DNA, 25 bp, Homo sapien
gttggtaatgaagatgcatgggtca

SEQ ID NO: 4258753 - DNA, 25 bp, Homo sapien
tgaagtgcgttgaagacattattgc

SEQ ID NO: 4258754 - DNA, 25 bp, Homo sapien
gggtcacttgattcctcttcaggga

SEQ ID NO: 4258755 - DNA, 25 bp, Homo sapien
cctacgaagagaagatgtgtagtga

SEQ ID NO: 4258756 - DNA, 25 bp, Homo sapien
ttgggaattctaagggtcacttgat

SEQ ID NO: 4258757 - DNA, 25 bp, Homo sapien
ccttctttcttaaccagtgactggc

SEQ ID NO: 4258758 - DNA, 25 bp, Homo sapien
gcagcatgtactccgcaaaagaatg

SEQ ID NO: 4258759 - DNA, 25 bp, Homo sapien
ttttagatggagcagcatgaactcc

SEQ ID NO: 4258760 - DNA, 25 bp, Homo sapien
tccatgtcagaatgtaaccttgaac

SEQ ID NO: 4258761 - DNA, 25 bp, Homo sapien
ttttgaaggcccgttattgcaggca

SEQ ID NO: 4258762 - DNA, 25 bp, Homo sapien
tgaaggcccgttattgcaggcaggg

SEQ ID NO: 4258763 - DNA, 25 bp, Homo sapien
aaggcccgttattgcaggcagggaa

SEQ ID NO: 4258764 - DNA, 25 bp, Homo sapien
ggcccgttattgcaggcagggaagt

SEQ ID NO: 4258765 - DNA, 25 bp, Homo sapien
tctgtggcatagtgatgcccgcatc

SEQ ID NO: 4258766 - DNA, 25 bp, Homo sapien
tctttcttctgtggcatagtgatgc

SEQ ID NO: 4258767 - DNA, 25 bp, Homo sapien
tcttctgtggcatagtgatgcccgc

SEQ ID NO: 4258768 - DNA, 25 bp, Homo sapien
gtggcatagtgatgcccgcatcctg

SEQ ID NO: 4258769 - DNA, 25 bp, Homo sapien
atgatgatggtaatgacagagcaga

SEQ ID NO: 4258770 - DNA, 25 bp, Homo sapien
ttgcagctgtataattcctccctta

SEQ ID NO: 4258771 - DNA, 25 bp, Homo sapien
agagcagagccctgtctttgcagct

SEQ ID NO: 4258772 - DNA, 25 bp, Homo sapien
gataaatattaaaggatgatgatgg

SEQ ID NO: 4258773 - DNA, 25 bp, Homo sapien
gaatctaatcttcccatgagcaggt

SEQ ID NO: 4258774 - DNA, 25 bp, Homo sapien
agcaggttaaatgccctcttggtca

SEQ ID NO: 4258775 - DNA, 25 bp, Homo sapien
gatgatgagataaaggcctattaaa

SEQ ID NO: 4258776 - DNA, 25 bp, Homo sapien
caagggtaaggatgtaatgggcaat

SEQ ID NO: 4258777 - DNA, 25 bp, Homo sapien
ggtgacttggagtctagcaagtttc

SEQ ID NO: 4258778 - DNA, 25 bp, Homo sapien
gcaagtttccagtagttggtgtagc

SEQ ID NO: 4258779 - DNA, 25 bp, Homo sapien
tgacttggagtctagcaagtttcca

SEQ ID NO: 4258780 - DNA, 25 bp, Homo sapien
tccagtagttggtgtagccagtgtt

SEQ ID NO: 4258781 - DNA, 25 bp, Homo sapien
tctaagaaacagatcccaatatttt

SEQ ID NO: 4258782 - DNA, 25 bp, Homo sapien
taatgaaggaacacacggagaacta

SEQ ID NO: 4258783 - DNA, 25 bp, Homo sapien
gaagcgtaacaactgtgtatttccc

SEQ ID NO: 4258784 - DNA, 25 bp, Homo sapien
ccttgggtgttgagctgaaggtcac

SEQ ID NO: 4258785 - DNA, 25 bp, Homo sapien
catacaagccaaagaccttgggtgt

SEQ ID NO: 4258786 - DNA, 25 bp, Homo sapien
ctgtccgggcttcccagattcaata

SEQ ID NO: 4258787 - DNA, 25 bp, Homo sapien
caatattagcgtggctctgcttgct

SEQ ID NO: 4258788 - DNA, 25 bp, Homo sapien
cttggtgagtgcgtgattcaccttc

SEQ ID NO: 4258789 - DNA, 25 bp, Homo sapien
tcccagattcaatattagcgtggct

SEQ ID NO: 4258790 - DNA, 25 bp, Homo sapien
cctccatccttcaaattacaattct

SEQ ID NO: 4258791 - DNA, 25 bp, Homo sapien
tcagggctctgccaacatcgtctct

SEQ ID NO: 4258792 - DNA, 25 bp, Homo sapien
ttcactttcatagctggccaatgtg

SEQ ID NO: 4258793 - DNA, 25 bp, Homo sapien
tctgccaacatcgtctctgagcttt

SEQ ID NO: 4258794 - DNA, 25 bp, Homo sapien
gctggccaatgtgttctctcttcag

SEQ ID NO: 4258795 - DNA, 25 bp, Homo sapien
agatgattttccagacatatgcatt

SEQ ID NO: 4258796 - DNA, 25 bp, Homo sapien
aagatgattttccagacatatgcat

SEQ ID NO: 4258797 - DNA, 25 bp, Homo sapien
ctttgcaccttcactcacgttgcag

SEQ ID NO: 4258798 - DNA, 25 bp, Homo sapien
taagatgattttccagacatatgca

SEQ ID NO: 4258799 - DNA, 25 bp, Homo sapien
caagttcacgttggatacaggggta

SEQ ID NO: 4258800 - DNA, 25 bp, Homo sapien
gggtaaataaggcttcaatgcgatc

SEQ ID NO: 4258801 - DNA, 25 bp, Homo sapien
gcttcaatgcgatcagtgaatactg

SEQ ID NO: 4258802 - DNA, 25 bp, Homo sapien
gaatactgtagtgcccagggagagc

SEQ ID NO: 4258803 - DNA, 25 bp, Homo sapien
tgaataaaagcctttgctgttgcca

SEQ ID NO: 4258804 - DNA, 25 bp, Homo sapien
gtgaataaaagcctttgctgttgcc

SEQ ID NO: 4258805 - DNA, 25 bp, Homo sapien
gaataaaagcctttgctgttgccat

SEQ ID NO: 4258806 - DNA, 25 bp, Homo sapien
tataaggaactcaattaaggagcaa

SEQ ID NO: 4258807 - DNA, 25 bp, Homo sapien
agagaaggaacgagagccaagtgaa

SEQ ID NO: 4258808 - DNA, 25 bp, Homo sapien
gagaaggaacgagagccaagtgaaa

SEQ ID NO: 4258809 - DNA, 25 bp, Homo sapien
atataaggaactcaattaaggagca

SEQ ID NO: 4258810 - DNA, 25 bp, Homo sapien
ttagagtctgcagtatagtggcttg

SEQ ID NO: 4258811 - DNA, 25 bp, Homo sapien
tggtgactctcagagcgcctgcctt

SEQ ID NO: 4258812 - DNA, 25 bp, Homo sapien
ctctcagagcgcctgccttttggag

SEQ ID NO: 4258813 - DNA, 25 bp, Homo sapien
tttggaggcacatttactatggcac

SEQ ID NO: 4258814 - DNA, 25 bp, Homo sapien
cttttgatttgctagggttactggg

SEQ ID NO: 4258815 - DNA, 25 bp, Homo sapien
tgaggaatattgagttcatcgccat

SEQ ID NO: 4258816 - DNA, 25 bp, Homo sapien
ccagtagggatgtctatcagtgagg

SEQ ID NO: 4258817 - DNA, 25 bp, Homo sapien
ccaactatttggtgccaaccatagt

SEQ ID NO: 4258818 - DNA, 25 bp, Homo sapien
caagtccctaccggattaaatagat

SEQ ID NO: 4258819 - DNA, 25 bp, Homo sapien
cctaccggattaaatagatacagag

SEQ ID NO: 4258820 - DNA, 25 bp, Homo sapien
gtccctaccggattaaatagataca

SEQ ID NO: 4258821 - DNA, 25 bp, Homo sapien
taccggattaaatagatacagagtg

SEQ ID NO: 4258822 - DNA, 25 bp, Homo sapien
gtgcctagattgctgcaatgtcatg

SEQ ID NO: 4258823 - DNA, 25 bp, Homo sapien
taaaagtagaccctgaagatgtgcc

SEQ ID NO: 4258824 - DNA, 25 bp, Homo sapien
cctactcttggtgaaaatgccggga

SEQ ID NO: 4258825 - DNA, 25 bp, Homo sapien
gaaatacgtgttgaagccttttaga

SEQ ID NO: 4258826 - DNA, 25 bp, Homo sapien
cacaggtctattatatttgctccct

SEQ ID NO: 4258827 - DNA, 25 bp, Homo sapien
ttcccatgacagagtagcagggcta

SEQ ID NO: 4258828 - DNA, 25 bp, Homo sapien
tagcagtagcagcagatttaggcca

SEQ ID NO: 4258829 - DNA, 25 bp, Homo sapien
ccaaatgagaagtctgttacacagg

SEQ ID NO: 4258830 - DNA, 25 bp, Homo sapien
ggaagtggtgcgcataagctgggac

SEQ ID NO: 4258831 - DNA, 25 bp, Homo sapien
acaaatggatcaagaggccctggcc

SEQ ID NO: 4258832 - DNA, 25 bp, Homo sapien
ctcccagctaaacggccccttatcg

SEQ ID NO: 4258833 - DNA, 25 bp, Homo sapien
ccccacgcccaggaagtggtgcgca

SEQ ID NO: 4258834 - DNA, 25 bp, Homo sapien
caatgggatttggtgtggctagcaa

SEQ ID NO: 4258835 - DNA, 25 bp, Homo sapien
tatgagactagcctgaaactggacg

SEQ ID NO: 4258836 - DNA, 25 bp, Homo sapien
cagggccctgttttgcttgcctgca

SEQ ID NO: 4258837 - DNA, 25 bp, Homo sapien
gaggacctaacctaagacaatggga

SEQ ID NO: 4258838 - DNA, 25 bp, Homo sapien
ttttgattccacaaaccaagcgaag

SEQ ID NO: 4258839 - DNA, 25 bp, Homo sapien
ggtttaccataactctcagaacagg

SEQ ID NO: 4258840 - DNA, 25 bp, Homo sapien
gagacgtgttctgtgagtcactaca

SEQ ID NO: 4258841 - DNA, 25 bp, Homo sapien
gtttaacttagtacaggaccacaga

SEQ ID NO: 4258842 - DNA, 25 bp, Homo sapien
tatcatgtagggtgagaaattgatg

SEQ ID NO: 4258843 - DNA, 25 bp, Homo sapien
tgtttggggagatgttatcacatga

SEQ ID NO: 4258844 - DNA, 25 bp, Homo sapien
atcacatgacttaaaacagaagact

SEQ ID NO: 4258845 - DNA, 25 bp, Homo sapien
tggcatatgggggattttatcacat

SEQ ID NO: 4258846 - DNA, 25 bp, Homo sapien
ggtggcacaaattagcattctgagc

SEQ ID NO: 4258847 - DNA, 25 bp, Homo sapien
cagggtcacaagcatgtagagcaaa

SEQ ID NO: 4258848 - DNA, 25 bp, Homo sapien
tttatttaccgaacacatgggccat

SEQ ID NO: 4258849 - DNA, 25 bp, Homo sapien
tagttaagtcaatgctttgccaccc

SEQ ID NO: 4258850 - DNA, 25 bp, Homo sapien
ggtagtgaagccaacaactgtgttc

SEQ ID NO: 4258851 - DNA, 25 bp, Homo sapien
caaaatgtcaagtgaattggcccag

SEQ ID NO: 4258852 - DNA, 25 bp, Homo sapien
ttggcccagtttcctcgtagatgat

SEQ ID NO: 4258853 - DNA, 25 bp, Homo sapien
tgtgatgctcgatcttgtgcccaga

SEQ ID NO: 4258854 - DNA, 25 bp, Homo sapien
actctgtgactcttcatgacctgca

SEQ ID NO: 4258855 - DNA, 25 bp, Homo sapien
cagtcccttgacatctgaacattga

SEQ ID NO: 4258856 - DNA, 25 bp, Homo sapien
tgaacattgatgacccaaccagaga

SEQ ID NO: 4258857 - DNA, 25 bp, Homo sapien
gaagaccctcaaattgaaggtaatg

SEQ ID NO: 4258858 - DNA, 25 bp, Homo sapien
cattcctggcagtaacaacctttag

SEQ ID NO: 4258859 - DNA, 25 bp, Homo sapien
ggtaagttgtaagtccattcctggc

SEQ ID NO: 4258860 - DNA, 25 bp, Homo sapien
cagagtagaacctgccttttgtcac

SEQ ID NO: 4258861 - DNA, 25 bp, Homo sapien
acctttaggccaaatgagcatgaca

SEQ ID NO: 4258862 - DNA, 25 bp, Homo sapien
tatgggcaactatccacctggctga

SEQ ID NO: 4258863 - DNA, 25 bp, Homo sapien
gacactgtgtatcccataggccctg

SEQ ID NO: 4258864 - DNA, 25 bp, Homo sapien
tggtcacatgggatacagacagagc

SEQ ID NO: 4258865 - DNA, 25 bp, Homo sapien
tcaaaatggttagaagctggtcaca

SEQ ID NO: 4258866 - DNA, 25 bp, Homo sapien
ctatagctagatggtggagaagaac

SEQ ID NO: 4258867 - DNA, 25 bp, Homo sapien
tgtttaatgttgagcaccaagcacg

SEQ ID NO: 4258868 - DNA, 25 bp, Homo sapien
taattgtcgagtggaacttaccagt

SEQ ID NO: 4258869 - DNA, 25 bp, Homo sapien
ccaagggttacaacactttgagagc

SEQ ID NO: 4258870 - DNA, 25 bp, Homo sapien
taattgccgtcatagcaagaggacc

SEQ ID NO: 4258871 - DNA, 25 bp, Homo sapien
tagtggcatagattgagacacagca

SEQ ID NO: 4258872 - DNA, 25 bp, Homo sapien
tttcttaacactcatgatgcatggg

SEQ ID NO: 4258873 - DNA, 25 bp, Homo sapien
gtttccagcaatatatcttcagggt

SEQ ID NO: 4258874 - DNA, 25 bp, Homo sapien
gcttcagaaggtctagataccacta

SEQ ID NO: 4258875 - DNA, 25 bp, Homo sapien
taaagcaggacagacaatgcagagg

SEQ ID NO: 4258876 - DNA, 25 bp, Homo sapien
tatacattggaaccagttaatgccc

SEQ ID NO: 4258877 - DNA, 25 bp, Homo sapien
gctggagatcacttctaaaacaatc

SEQ ID NO: 4258878 - DNA, 25 bp, Homo sapien
gaggaatgctttaatttggagaaaa

SEQ ID NO: 4258879 - DNA, 25 bp, Homo sapien
tgaaaaattattgcagtacaattac

SEQ ID NO: 4258880 - DNA, 25 bp, Homo sapien
agtcctggctcttcagatatacttt

SEQ ID NO: 4258881 - DNA, 25 bp, Homo sapien
taaataaacactgcatagttctctt

SEQ ID NO: 4258882 - DNA, 25 bp, Homo sapien
tgggcggtccgaatgggtccaggag

SEQ ID NO: 4258883 - DNA, 25 bp, Homo sapien
cagcacaggagtgtgggcggtccga

SEQ ID NO: 4258884 - DNA, 25 bp, Homo sapien
ggtccaggagctggccgcaggagtg

SEQ ID NO: 4258885 - DNA, 25 bp, Homo sapien
cgcggaagtctggaacagtgttgct

SEQ ID NO: 4258886 - DNA, 25 bp, Homo sapien
tttggtagaattcgtggagccaatg

SEQ ID NO: 4258887 - DNA, 25 bp, Homo sapien
gctgcagctgctagaggatttggta

SEQ ID NO: 4258888 - DNA, 25 bp, Homo sapien
tgaagggggaactcactgccactgc

SEQ ID NO: 4258889 - DNA, 25 bp, Homo sapien
tagaattcgtggagccaatggcttt

SEQ ID NO: 4258890 - DNA, 25 bp, Homo sapien
gtctttgtgccttctactgctaatg

SEQ ID NO: 4258891 - DNA, 25 bp, Homo sapien
tgtcttctgtagtttgttgtaagga

SEQ ID NO: 4258892 - DNA, 25 bp, Homo sapien
gctgtcttctgtagtttgttgtaag

SEQ ID NO: 4258893 - DNA, 25 bp, Homo sapien
ctttgtgccttctactgctaatgtg

SEQ ID NO: 4258894 - DNA, 25 bp, Homo sapien
ttgttggttttcattcctagaatac

SEQ ID NO: 4258895 - DNA, 25 bp, Homo sapien
tcccttgttggttttcattcctaga

SEQ ID NO: 4258896 - DNA, 25 bp, Homo sapien
aaggctgtcccttgttggttttcat

SEQ ID NO: 4258897 - DNA, 25 bp, Homo sapien
taaggctgtcccttgttggttttca

SEQ ID NO: 4258898 - DNA, 25 bp, Homo sapien
cgagttgacgtgcacatcacagatt

SEQ ID NO: 4258899 - DNA, 25 bp, Homo sapien
tgtttaagttgcgtttccgagttga

SEQ ID NO: 4258900 - DNA, 25 bp, Homo sapien
taagttgcgtttccgagttgacgtg

SEQ ID NO: 4258901 - DNA, 25 bp, Homo sapien
cgtttccgagttgacgtgcacatca

SEQ ID NO: 4258902 - DNA, 25 bp, Homo sapien
tgccacttccattccgggcttctaa

SEQ ID NO: 4258903 - DNA, 25 bp, Homo sapien
ggaaaggctttgatagtgccacttc

SEQ ID NO: 4258904 - DNA, 25 bp, Homo sapien
tttgcctttcactcctgccctagga

SEQ ID NO: 4258905 - DNA, 25 bp, Homo sapien
tgcctttcactcctgccctaggaaa

SEQ ID NO: 4258906 - DNA, 25 bp, Homo sapien
taatgactgtgatgcttcacgggag

SEQ ID NO: 4258907 - DNA, 25 bp, Homo sapien
cacctcctttgcaatatagtgagca

SEQ ID NO: 4258908 - DNA, 25 bp, Homo sapien
tgaaacgtggaaccagagaactgct

SEQ ID NO: 4258909 - DNA, 25 bp, Homo sapien
gaaaaagtcaatatctcgcaggaag

SEQ ID NO: 4258910 - DNA, 25 bp, Homo sapien
ctcttaaccacttgagatgagggca

SEQ ID NO: 4258911 - DNA, 25 bp, Homo sapien
tatgccctgtatggccatgtggagc

SEQ ID NO: 4258912 - DNA, 25 bp, Homo sapien
gccattttagatagtacagctccaa

SEQ ID NO: 4258913 - DNA, 25 bp, Homo sapien
tagtaaaccctaaatgctcacagtg

SEQ ID NO: 4258914 - DNA, 25 bp, Homo sapien
caccactagttagctcaaaagaggt

SEQ ID NO: 4258915 - DNA, 25 bp, Homo sapien
tatagcatataggtcaagggaaggg

SEQ ID NO: 4258916 - DNA, 25 bp, Homo sapien
ggaaagcgaatgaaagaacacaatt

SEQ ID NO: 4258917 - DNA, 25 bp, Homo sapien
taagcagagcactacctactaggat

SEQ ID NO: 4258918 - DNA, 25 bp, Homo sapien
ctgctcttgagggagtccaaactga

SEQ ID NO: 4258919 - DNA, 25 bp, Homo sapien
taaatcatgcattccgtttgggctg

SEQ ID NO: 4258920 - DNA, 25 bp, Homo sapien
taacacagtgaaacggagtgcaggc

SEQ ID NO: 4258921 - DNA, 25 bp, Homo sapien
tggtcagccccaattgttcaacttg

SEQ ID NO: 4258922 - DNA, 25 bp, Homo sapien
ctagattttctcttctttattttgt

SEQ ID NO: 4258923 - DNA, 25 bp, Homo sapien
ttgttccctggatttccccatacca

SEQ ID NO: 4258924 - DNA, 25 bp, Homo sapien
tctcttctttattttgttccctgga

SEQ ID NO: 4258925 - DNA, 25 bp, Homo sapien
ttccctggatttccccataccacac

SEQ ID NO: 4258926 - DNA, 25 bp, Homo sapien
ttgttataatagttctcagctctgc

SEQ ID NO: 4258927 - DNA, 25 bp, Homo sapien
gagaacactcttataagggaattca

SEQ ID NO: 4258928 - DNA, 25 bp, Homo sapien
agggaattcaagtaaagggtgacag

SEQ ID NO: 4258929 - DNA, 25 bp, Homo sapien
tcacctccttaaactcttggataag

SEQ ID NO: 4258930 - DNA, 25 bp, Homo sapien
tgtgtttatctgtcaagattgatgc

SEQ ID NO: 4258931 - DNA, 25 bp, Homo sapien
ccaaaattcttgataaactctagtc

SEQ ID NO: 4258932 - DNA, 25 bp, Homo sapien
ctctagtctcaaaggacatggtgtg

SEQ ID NO: 4258933 - DNA, 25 bp, Homo sapien
tctcagtcactatgcggaatgacca

SEQ ID NO: 4258934 - DNA, 25 bp, Homo sapien
tgagaattagtgttgaagtcagaca

SEQ ID NO: 4258935 - DNA, 25 bp, Homo sapien
ccaggttccatagatttagcccaaa

SEQ ID NO: 4258936 - DNA, 25 bp, Homo sapien
ggagagcattttatcccggcttgtc

SEQ ID NO: 4258937 - DNA, 25 bp, Homo sapien
ccggcttgtcagtattccagtattt

SEQ ID NO: 4258938 - DNA, 25 bp, Homo sapien
ccctgctgcaaaagatctaatctat

SEQ ID NO: 4258939 - DNA, 25 bp, Homo sapien
ggaagataattgcagagctgttgaa

SEQ ID NO: 4258940 - DNA, 25 bp, Homo sapien
aaagatctaatctattcagaggaag

SEQ ID NO: 4258941 - DNA, 25 bp, Homo sapien
caaaaaagaaatcgctgcatctcac

SEQ ID NO: 4258942 - DNA, 25 bp, Homo sapien
gagttgacagcaaccttgcatagcg

SEQ ID NO: 4258943 - DNA, 25 bp, Homo sapien
cagctgcgaggcagagttgacagca

SEQ ID NO: 4258944 - DNA, 25 bp, Homo sapien
gcgaacagtaaagaagccgttttgc

SEQ ID NO: 4258945 - DNA, 25 bp, Homo sapien
gcatagcgaacagtaaagaagccgt

SEQ ID NO: 4258946 - DNA, 25 bp, Homo sapien
taacactgcttttgcggatttccac

SEQ ID NO: 4258947 - DNA, 25 bp, Homo sapien
ggatttccacagttgtcgtcgttga

SEQ ID NO: 4258948 - DNA, 25 bp, Homo sapien
gaaggacatgagctattgccagtgg

SEQ ID NO: 4258949 - DNA, 25 bp, Homo sapien
tccactttagaggtgatctcagttg

SEQ ID NO: 4258950 - DNA, 25 bp, Homo sapien
taaataattattgtccacacattaa

SEQ ID NO: 4258951 - DNA, 25 bp, Homo sapien
gcattatgacttattcaaagaaagt

SEQ ID NO: 4258952 - DNA, 25 bp, Homo sapien
tgttaacagcagcatatacccttga

SEQ ID NO: 4258953 - DNA, 25 bp, Homo sapien
ttgactccataaagataggaatact

SEQ ID NO: 4258954 - DNA, 25 bp, Homo sapien
cttgtgcagaatggtaagaataaac

SEQ ID NO: 4258955 - DNA, 25 bp, Homo sapien
ctcttgtgcagaatggtaagaataa

SEQ ID NO: 4258956 - DNA, 25 bp, Homo sapien
tcttgtgcagaatggtaagaataaa

SEQ ID NO: 4258957 - DNA, 25 bp, Homo sapien
tgacttgggtcaggcaactgagggt

SEQ ID NO: 4258958 - DNA, 25 bp, Homo sapien
acttgggtcaggcaactgagggtta

SEQ ID NO: 4258959 - DNA, 25 bp, Homo sapien
cttgggtcaggcaactgagggttaa

SEQ ID NO: 4258960 - DNA, 25 bp, Homo sapien
cttgacttgggtcaggcaactgagg

SEQ ID NO: 4258961 - DNA, 25 bp, Homo sapien
taaccgatatgcacttgccacaaca

SEQ ID NO: 4258962 - DNA, 25 bp, Homo sapien
cgatatgcacttgccacaacacatt

SEQ ID NO: 4258963 - DNA, 25 bp, Homo sapien
tgcacttgccacaacacattgctca

SEQ ID NO: 4258964 - DNA, 25 bp, Homo sapien
catgatgtaaccgatatgcacttgc

SEQ ID NO: 4258965 - DNA, 25 bp, Homo sapien
tcaaggttttattgaggagggtgct

SEQ ID NO: 4258966 - DNA, 25 bp, Homo sapien
ttgggcagggctgtcaaggttttat

SEQ ID NO: 4258967 - DNA, 25 bp, Homo sapien
aaggttttattgaggagggtgctca

SEQ ID NO: 4258968 - DNA, 25 bp, Homo sapien
ccttgggcagggctgtcaaggtttt

SEQ ID NO: 4258969 - DNA, 25 bp, Homo sapien
gagtccgtgagaatgttctgaacca

SEQ ID NO: 4258970 - DNA, 25 bp, Homo sapien
ggccagaacctaattctccaccaaa

SEQ ID NO: 4258971 - DNA, 25 bp, Homo sapien
cagagagtctcatcggtatccatac

SEQ ID NO: 4258972 - DNA, 25 bp, Homo sapien
gattctgaggtgaatatactcctgc

SEQ ID NO: 4258973 - DNA, 25 bp, Homo sapien
aaagctttagaggagtctagagctc

SEQ ID NO: 4258974 - DNA, 25 bp, Homo sapien
tatctttccgtgtaatttcatccag

SEQ ID NO: 4258975 - DNA, 25 bp, Homo sapien
catccaggatacacttgagaaattt

SEQ ID NO: 4258976 - DNA, 25 bp, Homo sapien
tttggttcaatattcaggcaggaaa

SEQ ID NO: 4258977 - DNA, 25 bp, Homo sapien
gcatctgcagacaaagctactggga

SEQ ID NO: 4258978 - DNA, 25 bp, Homo sapien
cttaggtgttcagcttttcaggtac

SEQ ID NO: 4258979 - DNA, 25 bp, Homo sapien
tgtttccagaagtgtggcatctgca

SEQ ID NO: 4258980 - DNA, 25 bp, Homo sapien
catgcatatgcactgaaggagttca

SEQ ID NO: 4258981 - DNA, 25 bp, Homo sapien
tggtgcttcaactcctgtgccaaga

SEQ ID NO: 4258982 - DNA, 25 bp, Homo sapien
tgccaagacgtatgcagtgggtctt

SEQ ID NO: 4258983 - DNA, 25 bp, Homo sapien
gaccccaggagttagcacaatttcc

SEQ ID NO: 4258984 - DNA, 25 bp, Homo sapien
tctctaaagatctgctaccagcaca

SEQ ID NO: 4258985 - DNA, 25 bp, Homo sapien
gcctttgtagtgggccgcagcctgg

SEQ ID NO: 4258986 - DNA, 25 bp, Homo sapien
ttttgtcagagctggtattgatggt

SEQ ID NO: 4258987 - DNA, 25 bp, Homo sapien
cagagctggtattgatggtattggt

SEQ ID NO: 4258988 - DNA, 25 bp, Homo sapien
tattgatggtattggtagtgatgga

SEQ ID NO: 4258989 - DNA, 25 bp, Homo sapien
attttttcagcgcatggatctttca

SEQ ID NO: 4258990 - DNA, 25 bp, Homo sapien
tgtttgtactacctaatggggccaa

SEQ ID NO: 4258991 - DNA, 25 bp, Homo sapien
gcatggatctttcatgccccagtcc

SEQ ID NO: 4258992 - DNA, 25 bp, Homo sapien
tgagaagttcaacttagtgtcattt

SEQ ID NO: 4258993 - DNA, 25 bp, Homo sapien
ttctccatgtagtcttaggtatgtc

SEQ ID NO: 4258994 - DNA, 25 bp, Homo sapien
cttctccatgtagtcttaggtatgt

SEQ ID NO: 4258995 - DNA, 25 bp, Homo sapien
cataagaagggttaaatgcctgttt

SEQ ID NO: 4258996 - DNA, 25 bp, Homo sapien
agcacttatgtcactgccataagaa

SEQ ID NO: 4258997 - DNA, 25 bp, Homo sapien
cgtagcacttatgtcactgccataa

SEQ ID NO: 4258998 - DNA, 25 bp, Homo sapien
tgtcactgccataagaagggttaaa

SEQ ID NO: 4258999 - DNA, 25 bp, Homo sapien
cacagttctccgaggcactttggtt

SEQ ID NO: 4259000 - DNA, 25 bp, Homo sapien
aatgttttgccagtgttagaataaa

SEQ ID NO: 4259001 - DNA, 25 bp, Homo sapien
gaataaacatcgtcacagttctccg

SEQ ID NO: 4259002 - DNA, 25 bp, Homo sapien
cgaggcactttggttacattgagaa

SEQ ID NO: 4259003 - DNA, 25 bp, Homo sapien
catttatgggacaacatatttccaa

SEQ ID NO: 4259004 - DNA, 25 bp, Homo sapien
tttatgggacaacatatttccaaat

SEQ ID NO: 4259005 - DNA, 25 bp, Homo sapien
atttatgggacaacatatttccaaa

SEQ ID NO: 4259006 - DNA, 25 bp, Homo sapien
tgcacacaaacttccaagcagaagg

SEQ ID NO: 4259007 - DNA, 25 bp, Homo sapien
agaagggctacacaggtgcctctgc

SEQ ID NO: 4259008 - DNA, 25 bp, Homo sapien
cacacaaacttccaagcagaagggc

SEQ ID NO: 4259009 - DNA, 25 bp, Homo sapien
agcagaagggctacacaggtgcctc

SEQ ID NO: 4259010 - DNA, 25 bp, Homo sapien
ctccttcggatgtggttaggtctgc

SEQ ID NO: 4259011 - DNA, 25 bp, Homo sapien
ttcggatgtggttaggtctgcctgt

SEQ ID NO: 4259012 - DNA, 25 bp, Homo sapien
ggatgtggttaggtctgcctgtgat

SEQ ID NO: 4259013 - DNA, 25 bp, Homo sapien
ccttcggatgtggttaggtctgcct

SEQ ID NO: 4259014 - DNA, 25 bp, Homo sapien
caacatctacaaagatcacatcgca

SEQ ID NO: 4259015 - DNA, 25 bp, Homo sapien
catctacaaagatcacatcgcatgg

SEQ ID NO: 4259016 - DNA, 25 bp, Homo sapien
tctacaaagatcacatcgcatggca

SEQ ID NO: 4259017 - DNA, 25 bp, Homo sapien
ctacaaagatcacatcgcatggcaa

SEQ ID NO: 4259018 - DNA, 25 bp, Homo sapien
gagctgcgtggcctatgaaatctaa

SEQ ID NO: 4259019 - DNA, 25 bp, Homo sapien
tcccagaggccatgtttcatagagc

SEQ ID NO: 4259020 - DNA, 25 bp, Homo sapien
agcaccattagaagattttcaacag

SEQ ID NO: 4259021 - DNA, 25 bp, Homo sapien
ttaatctaagtgaaatgcagcacca

SEQ ID NO: 4259022 - DNA, 25 bp, Homo sapien
ccctagccccctgacccttcgacag

SEQ ID NO: 4259023 - DNA, 25 bp, Homo sapien
ccccctgacccttcgacaggccctg

SEQ ID NO: 4259024 - DNA, 25 bp, Homo sapien
ccctgacccttcgacaggccctggt

SEQ ID NO: 4259025 - DNA, 25 bp, Homo sapien
ctagccccctgacccttcgacaggc

SEQ ID NO: 4259026 - DNA, 25 bp, Homo sapien
tatgtgataggttacgtatatttat

SEQ ID NO: 4259027 - DNA, 25 bp, Homo sapien
tatcagtgttaggagatgttgggct

SEQ ID NO: 4259028 - DNA, 25 bp, Homo sapien
gataggttacgtatatttatttgca

SEQ ID NO: 4259029 - DNA, 25 bp, Homo sapien
atgttgggctgagacaattgggtta

SEQ ID NO: 4259030 - DNA, 25 bp, Homo sapien
aattgtttaattatgacccaaagtg

SEQ ID NO: 4259031 - DNA, 25 bp, Homo sapien
aatcatctggtaaatggtcaagcct

SEQ ID NO: 4259032 - DNA, 25 bp, Homo sapien
tggtaaatggtcaagcctgcaattg

SEQ ID NO: 4259033 - DNA, 25 bp, Homo sapien
aatggtcaagcctgcaattgtttaa

SEQ ID NO: 4259034 - DNA, 25 bp, Homo sapien
catgttccttttacgacatgccaca

SEQ ID NO: 4259035 - DNA, 25 bp, Homo sapien
tccttttacgacatgccacacagac

SEQ ID NO: 4259036 - DNA, 25 bp, Homo sapien
tggccatgttccttttacgacatgc

SEQ ID NO: 4259037 - DNA, 25 bp, Homo sapien
ttagtccatatctccaaataccttg

SEQ ID NO: 4259038 - DNA, 25 bp, Homo sapien
accccgaatgtatggtttattacag

SEQ ID NO: 4259039 - DNA, 25 bp, Homo sapien
catgatatgatttgctttcttcggt

SEQ ID NO: 4259040 - DNA, 25 bp, Homo sapien
gatatgatttgctttcttcggtggg

SEQ ID NO: 4259041 - DNA, 25 bp, Homo sapien
agaattaaatctcaactggcaaatg

SEQ ID NO: 4259042 - DNA, 25 bp, Homo sapien
ttgggtacgaggtacatgtagttta

SEQ ID NO: 4259043 - DNA, 25 bp, Homo sapien
ggtacgaggtacatgtagtttatat

SEQ ID NO: 4259044 - DNA, 25 bp, Homo sapien
ttaagttgggtacgaggtacatgta

SEQ ID NO: 4259045 - DNA, 25 bp, Homo sapien
cgaggtacatgtagtttatattaca

SEQ ID NO: 4259046 - DNA, 25 bp, Homo sapien
tatggctctaccatctgcattcttt

SEQ ID NO: 4259047 - DNA, 25 bp, Homo sapien
tggctctaccatctgcattctttcc

SEQ ID NO: 4259048 - DNA, 25 bp, Homo sapien
atggctctaccatctgcattctttc

SEQ ID NO: 4259049 - DNA, 25 bp, Homo sapien
tatcttcttggaaaactaccccatc

SEQ ID NO: 4259050 - DNA, 25 bp, Homo sapien
catcctttggttcttgaagagacct

SEQ ID NO: 4259051 - DNA, 25 bp, Homo sapien
cctttggttcttgaagagacctcac

SEQ ID NO: 4259052 - DNA, 25 bp, Homo sapien
tcctttggttcttgaagagacctca

SEQ ID NO: 4259053 - DNA, 25 bp, Homo sapien
gttttgcagatactggtttaggttc

SEQ ID NO: 4259054 - DNA, 25 bp, Homo sapien
ttagttcttggatgaaagcatcctg

SEQ ID NO: 4259055 - DNA, 25 bp, Homo sapien
ggaagcttaggctgcagcccagcat

SEQ ID NO: 4259056 - DNA, 25 bp, Homo sapien
tttaggttctgttagttcttggatg

SEQ ID NO: 4259057 - DNA, 25 bp, Homo sapien
ttttcccacctgtgccaaatagaat

SEQ ID NO: 4259058 - DNA, 25 bp, Homo sapien
gccaaatagaattgtgctaaataac

SEQ ID NO: 4259059 - DNA, 25 bp, Homo sapien
tcccacctgtgccaaatagaattgt

SEQ ID NO: 4259060 - DNA, 25 bp, Homo sapien
cctgtgccaaatagaattgtgctaa

SEQ ID NO: 4259061 - DNA, 25 bp, Homo sapien
tgaacttaacccctgaaatgtcttc

SEQ ID NO: 4259062 - DNA, 25 bp, Homo sapien
cggtgattgccagtgaacttaaccc

SEQ ID NO: 4259063 - DNA, 25 bp, Homo sapien
ggtagttgtgatacggtgattgcca

SEQ ID NO: 4259064 - DNA, 25 bp, Homo sapien
cgaacaggaacaagggtagttgtga

SEQ ID NO: 4259065 - DNA, 25 bp, Homo sapien
ctaaaccagcggtgctaaagatttt

SEQ ID NO: 4259066 - DNA, 25 bp, Homo sapien
accagcggtgctaaagatttttggc

SEQ ID NO: 4259067 - DNA, 25 bp, Homo sapien
tcctcttaaacaagaatacttagca

SEQ ID NO: 4259068 - DNA, 25 bp, Homo sapien
tcacacaatctttgtctgaatccag

SEQ ID NO: 4259069 - DNA, 25 bp, Homo sapien
gcagacttggtcacacagattaaga

SEQ ID NO: 4259070 - DNA, 25 bp, Homo sapien
cagacttggtcacacagattaagag

SEQ ID NO: 4259071 - DNA, 25 bp, Homo sapien
atggtttaatatccagcgatggttg

SEQ ID NO: 4259072 - DNA, 25 bp, Homo sapien
gctggtggacggacaagggccggga

SEQ ID NO: 4259073 - DNA, 25 bp, Homo sapien
agagcaggactctggcatgtaccac

SEQ ID NO: 4259074 - DNA, 25 bp, Homo sapien
ttaatatccagcgatggttgcaaag

SEQ ID NO: 4259075 - DNA, 25 bp, Homo sapien
tgtctgtcaaagcttgcccaggtta

SEQ ID NO: 4259076 - DNA, 25 bp, Homo sapien
gaaattctgtaagaagcacggcttc

SEQ ID NO: 4259077 - DNA, 25 bp, Homo sapien
cagtagaagttcgtgaagtgaccta

SEQ ID NO: 4259078 - DNA, 25 bp, Homo sapien
gagattcgctcatgattccaatgtg

SEQ ID NO: 4259079 - DNA, 25 bp, Homo sapien
taaagtccagttaaggatgtgtgtc

SEQ ID NO: 4259080 - DNA, 25 bp, Homo sapien
tgtgtgtctctaggcatatttagca

SEQ ID NO: 4259081 - DNA, 25 bp, Homo sapien
gcgacgtgatacagttgacttcaaa

SEQ ID NO: 4259082 - DNA, 25 bp, Homo sapien
gatgctattggtacatgatccacaa

SEQ ID NO: 4259083 - DNA, 25 bp, Homo sapien
gatttagaatcatctgtcctgcccc

SEQ ID NO: 4259084 - DNA, 25 bp, Homo sapien
tctcagagcagttaagccaagctgc

SEQ ID NO: 4259085 - DNA, 25 bp, Homo sapien
gagagacagtccttaaccaagaaga

SEQ ID NO: 4259086 - DNA, 25 bp, Homo sapien
tgtgcatcaccagctttaatggacc

SEQ ID NO: 4259087 - DNA, 25 bp, Homo sapien
gattcacctctagtgtctggaacag

SEQ ID NO: 4259088 - DNA, 25 bp, Homo sapien
tgtataataactggcgcttcctaag

SEQ ID NO: 4259089 - DNA, 25 bp, Homo sapien
gcttccccaatgtactcagctagtg

SEQ ID NO: 4259090 - DNA, 25 bp, Homo sapien
gaacagtgtttggagcatggcagaa

SEQ ID NO: 4259091 - DNA, 25 bp, Homo sapien
gatcatgcctttgggactcgtgtgg

SEQ ID NO: 4259092 - DNA, 25 bp, Homo sapien
tctgtagctataccatgggacagcc

SEQ ID NO: 4259093 - DNA, 25 bp, Homo sapien
tggacaacatgaggtaaagacacag

SEQ ID NO: 4259094 - DNA, 25 bp, Homo sapien
ggaccccacgtgtcaggaaataaga

SEQ ID NO: 4259095 - DNA, 25 bp, Homo sapien
taagtgcagtgattgaccgctttcc

SEQ ID NO: 4259096 - DNA, 25 bp, Homo sapien
gattgaccgctttccttcacttaat

SEQ ID NO: 4259097 - DNA, 25 bp, Homo sapien
acttaatttttgttgcttcgacatc

SEQ ID NO: 4259098 - DNA, 25 bp, Homo sapien
tttgttgcttcgacatctctgggaa

SEQ ID NO: 4259099 - DNA, 25 bp, Homo sapien
gaagtggcccaagaattgtgtgctg

SEQ ID NO: 4259100 - DNA, 25 bp, Homo sapien
ggcactcaagttgtctactcagaaa

SEQ ID NO: 4259101 - DNA, 25 bp, Homo sapien
tactaccaagattccacagaagtgg

SEQ ID NO: 4259102 - DNA, 25 bp, Homo sapien
tggtgacatcatcgctgcttggaaa

SEQ ID NO: 4259103 - DNA, 25 bp, Homo sapien
gctgcttggcttgtacactgagagg

SEQ ID NO: 4259104 - DNA, 25 bp, Homo sapien
ctattggaatggtgagaatacgctc

SEQ ID NO: 4259105 - DNA, 25 bp, Homo sapien
tcttgtgagtttgttgccttcttca

SEQ ID NO: 4259106 - DNA, 25 bp, Homo sapien
gagttttgtttgtgcattggttctc

SEQ ID NO: 4259107 - DNA, 25 bp, Homo sapien
tttctaacacactagtttggaggtg

SEQ ID NO: 4259108 - DNA, 25 bp, Homo sapien
gctttctgatcgtttccttcctcat

SEQ ID NO: 4259109 - DNA, 25 bp, Homo sapien
tttggaggtgaacttgatggtccag

SEQ ID NO: 4259110 - DNA, 25 bp, Homo sapien
gctgctttctgatcgtttccttcct

SEQ ID NO: 4259111 - DNA, 25 bp, Homo sapien
taacaaaagtgtccacggtgactga

SEQ ID NO: 4259112 - DNA, 25 bp, Homo sapien
tgagacagcacactacaaacatgag

SEQ ID NO: 4259113 - DNA, 25 bp, Homo sapien
tgactccaactaagcaagggcaggg

SEQ ID NO: 4259114 - DNA, 25 bp, Homo sapien
taaccaaactgtaactgggcagctc

SEQ ID NO: 4259115 - DNA, 25 bp, Homo sapien
gcggtgtcttcagcatcagctctca

SEQ ID NO: 4259116 - DNA, 25 bp, Homo sapien
cggtgtcttcagcatcagctctcac

SEQ ID NO: 4259117 - DNA, 25 bp, Homo sapien
cgcggtgtcttcagcatcagctctc

SEQ ID NO: 4259118 - DNA, 25 bp, Homo sapien
actgcccatccttactgtaatccga

SEQ ID NO: 4259119 - DNA, 25 bp, Homo sapien
ctaagatccccggcggctggagagt

SEQ ID NO: 4259120 - DNA, 25 bp, Homo sapien
cattcggtggaaatgtccccggcgt

SEQ ID NO: 4259121 - DNA, 25 bp, Homo sapien
tgtaatccgactcctccttgcgatg

SEQ ID NO: 4259122 - DNA, 25 bp, Homo sapien
tgcctggaccaaccatggctctcgg

SEQ ID NO: 4259123 - DNA, 25 bp, Homo sapien
gaccaaccatggctctcgggaagct

SEQ ID NO: 4259124 - DNA, 25 bp, Homo sapien
accctgggttagcagccgctccacg

SEQ ID NO: 4259125 - DNA, 25 bp, Homo sapien
aggtgctccgactgcctgcctggac

SEQ ID NO: 4259126 - DNA, 25 bp, Homo sapien
taatgagctcccaaacactgtttgt

SEQ ID NO: 4259127 - DNA, 25 bp, Homo sapien
ggtgcttcctactgttcctactgag

SEQ ID NO: 4259128 - DNA, 25 bp, Homo sapien
gttcatgctataaccaatgcctcag

SEQ ID NO: 4259129 - DNA, 25 bp, Homo sapien
taagttgttgctatccctccagaag

SEQ ID NO: 4259130 - DNA, 25 bp, Homo sapien
gattcagctgctccgtccattcttc

SEQ ID NO: 4259131 - DNA, 25 bp, Homo sapien
tattcgaagttctctcctgttggat

SEQ ID NO: 4259132 - DNA, 25 bp, Homo sapien
tgagtcgctgtgctcagtctgtctt

SEQ ID NO: 4259133 - DNA, 25 bp, Homo sapien
aatatcttgaggataatattcgaag

SEQ ID NO: 4259134 - DNA, 25 bp, Homo sapien
gtgatccctggagagtcacatacca

SEQ ID NO: 4259135 - DNA, 25 bp, Homo sapien
tgtgcacctaaagaccgagagcgca

SEQ ID NO: 4259136 - DNA, 25 bp, Homo sapien
gccttacaccggactgcaaatctct

SEQ ID NO: 4259137 - DNA, 25 bp, Homo sapien
cacacaatgatctttatgggtcagc

SEQ ID NO: 4259138 - DNA, 25 bp, Homo sapien
tgaatccagccgttatgaattgaat

SEQ ID NO: 4259139 - DNA, 25 bp, Homo sapien
catcacagatactcatggcaatgct

SEQ ID NO: 4259140 - DNA, 25 bp, Homo sapien
taatcatgaaagatgacttcaagcc

SEQ ID NO: 4259141 - DNA, 25 bp, Homo sapien
gccccatttggtcgacacaggctct

SEQ ID NO: 4259142 - DNA, 25 bp, Homo sapien
cacattttggctagtcagtagtgct

SEQ ID NO: 4259143 - DNA, 25 bp, Homo sapien
acatgggagtggtcatatctctttg

SEQ ID NO: 4259144 - DNA, 25 bp, Homo sapien
tatttcgatctatgtgtataccaca

SEQ ID NO: 4259145 - DNA, 25 bp, Homo sapien
tcagcctctggtgactaacattcta

SEQ ID NO: 4259146 - DNA, 25 bp, Homo sapien
tcatcacgatgagtgaatttcctca

SEQ ID NO: 4259147 - DNA, 25 bp, Homo sapien
tatggcagattggactattgacgga

SEQ ID NO: 4259148 - DNA, 25 bp, Homo sapien
ttattacgtgttaatgtgactcttg

SEQ ID NO: 4259149 - DNA, 25 bp, Homo sapien
ttttgagcctcgattttattacgtg

SEQ ID NO: 4259150 - DNA, 25 bp, Homo sapien
gtaacagtgatatggccagctaagg

SEQ ID NO: 4259151 - DNA, 25 bp, Homo sapien
ggctggcactcacatctatacaaca

SEQ ID NO: 4259152 - DNA, 25 bp, Homo sapien
tgttgactgatagattaactgacct

SEQ ID NO: 4259153 - DNA, 25 bp, Homo sapien
ccagctaaggaatgatgacaggttt

SEQ ID NO: 4259154 - DNA, 25 bp, Homo sapien
tcactagctgaagcataagtcaaca

SEQ ID NO: 4259155 - DNA, 25 bp, Homo sapien
gaactggatgaaatctgtctatcaa

SEQ ID NO: 4259156 - DNA, 25 bp, Homo sapien
tcaacaactaaagtgcagacactgg

SEQ ID NO: 4259157 - DNA, 25 bp, Homo sapien
tggtagctaataacaacatgctgcc

SEQ ID NO: 4259158 - DNA, 25 bp, Homo sapien
agtgccagtgaatccgataacaggt

SEQ ID NO: 4259159 - DNA, 25 bp, Homo sapien
aacaggtccaatctgtaaatgccac

SEQ ID NO: 4259160 - DNA, 25 bp, Homo sapien
gataacaggtccaatctgtaaatgc

SEQ ID NO: 4259161 - DNA, 25 bp, Homo sapien
tgaatccgataacaggtccaatctg

SEQ ID NO: 4259162 - DNA, 25 bp, Homo sapien
aaaactgcgctttataccctgcccg

SEQ ID NO: 4259163 - DNA, 25 bp, Homo sapien
gcgctttataccctgcccgcagatt

SEQ ID NO: 4259164 - DNA, 25 bp, Homo sapien
tcagcaaaactgcgctttataccct

SEQ ID NO: 4259165 - DNA, 25 bp, Homo sapien
gctttataccctgcccgcagattca

SEQ ID NO: 4259166 - DNA, 25 bp, Homo sapien
atatattaatttcagccactgatac

SEQ ID NO: 4259167 - DNA, 25 bp, Homo sapien
catatattaatttcagccactgata

SEQ ID NO: 4259168 - DNA, 25 bp, Homo sapien
tcatatattaatttcagccactgat

SEQ ID NO: 4259169 - DNA, 25 bp, Homo sapien
ggaaggccaggataaggaatctgaa

SEQ ID NO: 4259170 - DNA, 25 bp, Homo sapien
ccaccagagtctctacttggagatt

SEQ ID NO: 4259171 - DNA, 25 bp, Homo sapien
gaacatatgcctgtagcaactccac

SEQ ID NO: 4259172 - DNA, 25 bp, Homo sapien
gccaggataaggaatctgaacatat

SEQ ID NO: 4259173 - DNA, 25 bp, Homo sapien
tgtatagcattccagcataaagacg

SEQ ID NO: 4259174 - DNA, 25 bp, Homo sapien
tctttttctgttagcacggtccctg

SEQ ID NO: 4259175 - DNA, 25 bp, Homo sapien
gttagctcagttacaagtggtctca

SEQ ID NO: 4259176 - DNA, 25 bp, Homo sapien
catggaatgtcgaccagcctgagat

SEQ ID NO: 4259177 - DNA, 25 bp, Homo sapien
caaatagtcaaacatcgttagtgtg

SEQ ID NO: 4259178 - DNA, 25 bp, Homo sapien
aaatagtcaaacatcgttagtgtga

SEQ ID NO: 4259179 - DNA, 25 bp, Homo sapien
agtcaaacatcgttagtgtgatcat

SEQ ID NO: 4259180 - DNA, 25 bp, Homo sapien
atagtcaaacatcgttagtgtgatc

SEQ ID NO: 4259181 - DNA, 25 bp, Homo sapien
gtttatcaccaacactgctatcagt

SEQ ID NO: 4259182 - DNA, 25 bp, Homo sapien
gggatagagtatgtttatcaccaac

SEQ ID NO: 4259183 - DNA, 25 bp, Homo sapien
gcagatcttccttaactatattgtc

SEQ ID NO: 4259184 - DNA, 25 bp, Homo sapien
taaggcattttgaatgggtccaggg

SEQ ID NO: 4259185 - DNA, 25 bp, Homo sapien
ggcagccgtgtcattgccaccactg

SEQ ID NO: 4259186 - DNA, 25 bp, Homo sapien
ccaggccagcctttgatatcaaact

SEQ ID NO: 4259187 - DNA, 25 bp, Homo sapien
ctagagggttgtaactaccatggga

SEQ ID NO: 4259188 - DNA, 25 bp, Homo sapien
ggttgtaactaccatgggatcaggt

SEQ ID NO: 4259189 - DNA, 25 bp, Homo sapien
catgggatcaggtttattcgcctgc

SEQ ID NO: 4259190 - DNA, 25 bp, Homo sapien
ggtttattcgcctgccctaagtgac

SEQ ID NO: 4259191 - DNA, 25 bp, Homo sapien
ctgagactcgataaacaaggtcatt

SEQ ID NO: 4259192 - DNA, 25 bp, Homo sapien
ctttctgtttgcataggaatgggca

SEQ ID NO: 4259193 - DNA, 25 bp, Homo sapien
tactctttctgtttgcataggaatg

SEQ ID NO: 4259194 - DNA, 25 bp, Homo sapien
acaccaaaacactgagactcgataa

SEQ ID NO: 4259195 - DNA, 25 bp, Homo sapien
tagtaactgatgcaatcctctaggc

SEQ ID NO: 4259196 - DNA, 25 bp, Homo sapien
tattaagtgctatttgtaagtacct

SEQ ID NO: 4259197 - DNA, 25 bp, Homo sapien
tgcatcttcgaactgatgacatctt

SEQ ID NO: 4259198 - DNA, 25 bp, Homo sapien
ggtgtatcataacattgcatcttcg

SEQ ID NO: 4259199 - DNA, 25 bp, Homo sapien
ccaggaatatgctggctcagcacag

SEQ ID NO: 4259200 - DNA, 25 bp, Homo sapien
gcacagctttgaaagcgctacagtg

SEQ ID NO: 4259201 - DNA, 25 bp, Homo sapien
gaatatgctggctcagcacagaaac

SEQ ID NO: 4259202 - DNA, 25 bp, Homo sapien
tttgaaagcgctacagtgccaggaa

SEQ ID NO: 4259203 - DNA, 25 bp, Homo sapien
gtatataatccatttgttcgtgcac

SEQ ID NO: 4259204 - DNA, 25 bp, Homo sapien
aagaggtatataatccatttgttcg

SEQ ID NO: 4259205 - DNA, 25 bp, Homo sapien
ttaagaggtatataatccatttgtt

SEQ ID NO: 4259206 - DNA, 25 bp, Homo sapien
gaggtatataatccatttgttcgtg

SEQ ID NO: 4259207 - DNA, 25 bp, Homo sapien
ttacaaatatgcttgttcgttttca

SEQ ID NO: 4259208 - DNA, 25 bp, Homo sapien
tcatggttagaattgatattaacca

SEQ ID NO: 4259209 - DNA, 25 bp, Homo sapien
tatgcttgttcgttttcatagctat

SEQ ID NO: 4259210 - DNA, 25 bp, Homo sapien
ctattttcatggttagaattgatat

SEQ ID NO: 4259211 - DNA, 25 bp, Homo sapien
taggagatcgcaaagctagagcagg

SEQ ID NO: 4259212 - DNA, 25 bp, Homo sapien
tcctgaatcttggagctctgggcag

SEQ ID NO: 4259213 - DNA, 25 bp, Homo sapien
ccaagagagacagcggaaaacttcc

SEQ ID NO: 4259214 - DNA, 25 bp, Homo sapien
tactgaaattggctactgggatagg

SEQ ID NO: 4259215 - DNA, 25 bp, Homo sapien
tagcaaagttgcctggtgcattgtt

SEQ ID NO: 4259216 - DNA, 25 bp, Homo sapien
gataatgcataaaaggtacttagca

SEQ ID NO: 4259217 - DNA, 25 bp, Homo sapien
gcattgttgcctctcaattagtcac

SEQ ID NO: 4259218 - DNA, 25 bp, Homo sapien
taagactgccaggaacattggatca

SEQ ID NO: 4259219 - DNA, 25 bp, Homo sapien
ttgataatgcaacaagagggactct

SEQ ID NO: 4259220 - DNA, 25 bp, Homo sapien
cagatgagcttgttttgccagcaaa

SEQ ID NO: 4259221 - DNA, 25 bp, Homo sapien
tgacctcttctagcaatcacatatg

SEQ ID NO: 4259222 - DNA, 25 bp, Homo sapien
cagcttgactgtactaacagatgag

SEQ ID NO: 4259223 - DNA, 25 bp, Homo sapien
cccagttattagcatagtttagagc

SEQ ID NO: 4259224 - DNA, 25 bp, Homo sapien
ttaagtgaagacataaacttcatct

SEQ ID NO: 4259225 - DNA, 25 bp, Homo sapien
gttactagccctactctgtgagata

SEQ ID NO: 4259226 - DNA, 25 bp, Homo sapien
ttttacagccatgtatacccagtta

SEQ ID NO: 4259227 - DNA, 25 bp, Homo sapien
cataccaaaacctagtgaaccatgg

SEQ ID NO: 4259228 - DNA, 25 bp, Homo sapien
aactaagcctgaaaacactgatgca

SEQ ID NO: 4259229 - DNA, 25 bp, Homo sapien
aatcttcttaagtctcctgtggcaa

SEQ ID NO: 4259230 - DNA, 25 bp, Homo sapien
cctggcagtttaatggaatggccaa

SEQ ID NO: 4259231 - DNA, 25 bp, Homo sapien
tattgttgggcctctcagtggagtg

SEQ ID NO: 4259232 - DNA, 25 bp, Homo sapien
gatgagtgctttctgagttcggcct

SEQ ID NO: 4259233 - DNA, 25 bp, Homo sapien
gtatttgaatgctattgagctcaag

SEQ ID NO: 4259234 - DNA, 25 bp, Homo sapien
gctcaagtgttttagggtagtctaa

SEQ ID NO: 4259235 - DNA, 25 bp, Homo sapien
tgttggtgcacctacatggtcttta

SEQ ID NO: 4259236 - DNA, 25 bp, Homo sapien
cgttgaataagaccctattttctga

SEQ ID NO: 4259237 - DNA, 25 bp, Homo sapien
tctgaattagggttcttccactgtc

SEQ ID NO: 4259238 - DNA, 25 bp, Homo sapien
gagacgatcgggtattctaaataaa

SEQ ID NO: 4259239 - DNA, 25 bp, Homo sapien
gataaatgcatatctcctcctttgg

SEQ ID NO: 4259240 - DNA, 25 bp, Homo sapien
ttgtggacaaaggacagacagaact

SEQ ID NO: 4259241 - DNA, 25 bp, Homo sapien
ttccttgtggacaaaggacagacag

SEQ ID NO: 4259242 - DNA, 25 bp, Homo sapien
agacagaactcaaagtcatccttct

SEQ ID NO: 4259243 - DNA, 25 bp, Homo sapien
ttttatctctataagcagatgtggg

SEQ ID NO: 4259244 - DNA, 25 bp, Homo sapien
atttttatctctataagcagatgtg

SEQ ID NO: 4259245 - DNA, 25 bp, Homo sapien
tttttatctctataagcagatgtgg

SEQ ID NO: 4259246 - DNA, 25 bp, Homo sapien
ttatttagcacggaaggcaaatatg

SEQ ID NO: 4259247 - DNA, 25 bp, Homo sapien
tagcacggaaggcaaatatggttgg

SEQ ID NO: 4259248 - DNA, 25 bp, Homo sapien
gcacggaaggcaaatatggttggcc

SEQ ID NO: 4259249 - DNA, 25 bp, Homo sapien
tttagcacggaaggcaaatatggtt

SEQ ID NO: 4259250 - DNA, 25 bp, Homo sapien
tggggatcagggaagaggcaaagtc

SEQ ID NO: 4259251 - DNA, 25 bp, Homo sapien
tgtggggatcagggaagaggcaaag

SEQ ID NO: 4259252 - DNA, 25 bp, Homo sapien
ctgtggggatcagggaagaggcaaa

SEQ ID NO: 4259253 - DNA, 25 bp, Homo sapien
gtggggatcagggaagaggcaaagt

SEQ ID NO: 4259254 - DNA, 25 bp, Homo sapien
taatcatccaggtccaatttttggc

SEQ ID NO: 4259255 - DNA, 25 bp, Homo sapien
taaaggatcaaaagtctgagtcttc

SEQ ID NO: 4259256 - DNA, 25 bp, Homo sapien
ttttggcaaagctatcaagctctgg

SEQ ID NO: 4259257 - DNA, 25 bp, Homo sapien
gctgggaaagcccataaaacaccca

SEQ ID NO: 4259258 - DNA, 25 bp, Homo sapien
gaatgggaccagtcgtctttggaaa

SEQ ID NO: 4259259 - DNA, 25 bp, Homo sapien
aaactggcctagatctgagcaccct

SEQ ID NO: 4259260 - DNA, 25 bp, Homo sapien
ggatagagttcctagagcaaggcaa

SEQ ID NO: 4259261 - DNA, 25 bp, Homo sapien
tgtgattgtacagaacagcctgcat

SEQ ID NO: 4259262 - DNA, 25 bp, Homo sapien
taacagcacccgcatagtgtagaca

SEQ ID NO: 4259263 - DNA, 25 bp, Homo sapien
gctggtcttccacagaattgggaac

SEQ ID NO: 4259264 - DNA, 25 bp, Homo sapien
gggctcttgagaaatacgaatggga

SEQ ID NO: 4259265 - DNA, 25 bp, Homo sapien
gaagagagtcctataagctcccact

SEQ ID NO: 4259266 - DNA, 25 bp, Homo sapien
ttggtgtcttctcttaatccaaatc

SEQ ID NO: 4259267 - DNA, 25 bp, Homo sapien
ccacctccatagcaagaagtttggt

SEQ ID NO: 4259268 - DNA, 25 bp, Homo sapien
ttagtggggaccactatccacctcc

SEQ ID NO: 4259269 - DNA, 25 bp, Homo sapien
ttttcctctttacatgatcttcagg

SEQ ID NO: 4259270 - DNA, 25 bp, Homo sapien
tcttgcagcaatcatgaaagttgtt

SEQ ID NO: 4259271 - DNA, 25 bp, Homo sapien
aattacagccgtgagtcacttgcgc

SEQ ID NO: 4259272 - DNA, 25 bp, Homo sapien
tataaaggacttgcttcttgcagca

SEQ ID NO: 4259273 - DNA, 25 bp, Homo sapien
caggcggacttaaactctcgggatc

SEQ ID NO: 4259274 - DNA, 25 bp, Homo sapien
tttaccgcctgtcccttcatgagca

SEQ ID NO: 4259275 - DNA, 25 bp, Homo sapien
gaggatttctcctagcagttggatc

SEQ ID NO: 4259276 - DNA, 25 bp, Homo sapien
cccgagatactgtccttaagtccta

SEQ ID NO: 4259277 - DNA, 25 bp, Homo sapien
ttagttccagcttaacactctgagc

SEQ ID NO: 4259278 - DNA, 25 bp, Homo sapien
cagccacgtaggaaaaccccactgt

SEQ ID NO: 4259279 - DNA, 25 bp, Homo sapien
tcagtgataagtcaactgggactcc

SEQ ID NO: 4259280 - DNA, 25 bp, Homo sapien
tgtgaaggtaataagtgcacatcag

SEQ ID NO: 4259281 - DNA, 25 bp, Homo sapien
cccactgtaggcaggtaccttcctt

SEQ ID NO: 4259282 - DNA, 25 bp, Homo sapien
aagacatctagagggaacttcccaa

SEQ ID NO: 4259283 - DNA, 25 bp, Homo sapien
aaacaagtgtcaacagctgtgcaat

SEQ ID NO: 4259284 - DNA, 25 bp, Homo sapien
atgaagacatctagagggaacttcc

SEQ ID NO: 4259285 - DNA, 25 bp, Homo sapien
cagctgtgcaatttgtctgtgccag

SEQ ID NO: 4259286 - DNA, 25 bp, Homo sapien
ggtcttcccgacactgttcaatctt

SEQ ID NO: 4259287 - DNA, 25 bp, Homo sapien
tcccgacactgttcaatcttacttg

SEQ ID NO: 4259288 - DNA, 25 bp, Homo sapien
gacactgttcaatcttacttgttcc

SEQ ID NO: 4259289 - DNA, 25 bp, Homo sapien
cctggtcttcccgacactgttcaat

SEQ ID NO: 4259290 - DNA, 25 bp, Homo sapien
aggttaaggatatccagcacttgaa

SEQ ID NO: 4259291 - DNA, 25 bp, Homo sapien
agcaagtccctagcaacctacaaag

SEQ ID NO: 4259292 - DNA, 25 bp, Homo sapien
aagcaagtccctagcaacctacaaa

SEQ ID NO: 4259293 - DNA, 25 bp, Homo sapien
tcctttgtagggacacggacgaagc

SEQ ID NO: 4259294 - DNA, 25 bp, Homo sapien
gaaaccatcattctcagcaaactat

SEQ ID NO: 4259295 - DNA, 25 bp, Homo sapien
ctttgtagggacacggacgaagctg

SEQ ID NO: 4259296 - DNA, 25 bp, Homo sapien
tatcacaaggacaaaaaaccaaaca

SEQ ID NO: 4259297 - DNA, 25 bp, Homo sapien
ggtacgcacatggtgacgcgatcat

SEQ ID NO: 4259298 - DNA, 25 bp, Homo sapien
gaaagtgagccctaccacagggatt

SEQ ID NO: 4259299 - DNA, 25 bp, Homo sapien
tacgctgtcttcgtagatggcaggc

SEQ ID NO: 4259300 - DNA, 25 bp, Homo sapien
gactcttgtgaaaccctgaacagtg

SEQ ID NO: 4259301 - DNA, 25 bp, Homo sapien
ttacttgagcactgataaagagcag

SEQ ID NO: 4259302 - DNA, 25 bp, Homo sapien
cagtcatagtcctccaaccatcaga

SEQ ID NO: 4259303 - DNA, 25 bp, Homo sapien
tgacagcggtgggtgacagcattac

SEQ ID NO: 4259304 - DNA, 25 bp, Homo sapien
ctatacctgattagctttagctgcg

SEQ ID NO: 4259305 - DNA, 25 bp, Homo sapien
ttactcagggaatgaactgtcaccc

SEQ ID NO: 4259306 - DNA, 25 bp, Homo sapien
ctcagggaatgaactgtcacccttc

SEQ ID NO: 4259307 - DNA, 25 bp, Homo sapien
tactcagggaatgaactgtcaccct

SEQ ID NO: 4259308 - DNA, 25 bp, Homo sapien
actcagggaatgaactgtcaccctt

SEQ ID NO: 4259309 - DNA, 25 bp, Homo sapien
cagctttgagttcagaccaccatag

SEQ ID NO: 4259310 - DNA, 25 bp, Homo sapien
gaagtcctagtctcaaagcactcaa

SEQ ID NO: 4259311 - DNA, 25 bp, Homo sapien
gagttctatcctcaaatagtgtcac

SEQ ID NO: 4259312 - DNA, 25 bp, Homo sapien
tcatgttggattaaggactataccc

SEQ ID NO: 4259313 - DNA, 25 bp, Homo sapien
aaggtcacatttcttgtcactctga

SEQ ID NO: 4259314 - DNA, 25 bp, Homo sapien
gagaaggttttccatgtattgaaag

SEQ ID NO: 4259315 - DNA, 25 bp, Homo sapien
tatgctgttgagagactctgttgca

SEQ ID NO: 4259316 - DNA, 25 bp, Homo sapien
tgcagtctaggcttgtctatacctg

SEQ ID NO: 4259317 - DNA, 25 bp, Homo sapien
caagctggccaaatctgctccgtgt

SEQ ID NO: 4259318 - DNA, 25 bp, Homo sapien
catttgacactgctgggagatagga

SEQ ID NO: 4259319 - DNA, 25 bp, Homo sapien
tgtgatgggtacagctagaactcca

SEQ ID NO: 4259320 - DNA, 25 bp, Homo sapien
tatgtacccaacgtccaatggcttc

SEQ ID NO: 4259321 - DNA, 25 bp, Homo sapien
gtaagactacacagagacctcagta

SEQ ID NO: 4259322 - DNA, 25 bp, Homo sapien
ctcagtactcaaggaatggcttcga

SEQ ID NO: 4259323 - DNA, 25 bp, Homo sapien
ggcttcgaagccattccttgctctg

SEQ ID NO: 4259324 - DNA, 25 bp, Homo sapien
tctgaacagctccatgagtggtcca

SEQ ID NO: 4259325 - DNA, 25 bp, Homo sapien
atatgtccctaccatggaacttcca

SEQ ID NO: 4259326 - DNA, 25 bp, Homo sapien
gtccctaccatggaacttccaaatg

SEQ ID NO: 4259327 - DNA, 25 bp, Homo sapien
gatataatgctaaatggatatgtcc

SEQ ID NO: 4259328 - DNA, 25 bp, Homo sapien
atataatgctaaatggatatgtccc

SEQ ID NO: 4259329 - DNA, 25 bp, Homo sapien
tggcaagaattaggttaagaaccaa

SEQ ID NO: 4259330 - DNA, 25 bp, Homo sapien
ttgtggtggcaagaattaggttaag

SEQ ID NO: 4259331 - DNA, 25 bp, Homo sapien
gtggcaagaattaggttaagaacca

SEQ ID NO: 4259332 - DNA, 25 bp, Homo sapien
tggtggcaagaattaggttaagaac

SEQ ID NO: 4259333 - DNA, 25 bp, Homo sapien
catttggatatgctggctgacggtg

SEQ ID NO: 4259334 - DNA, 25 bp, Homo sapien
tatgctggctgacggtggtagcact

SEQ ID NO: 4259335 - DNA, 25 bp, Homo sapien
ctatgctggcagctaaacaagactt

SEQ ID NO: 4259336 - DNA, 25 bp, Homo sapien
ctgacggtggtagcactatgctggc

SEQ ID NO: 4259337 - DNA, 25 bp, Homo sapien
agccttatgtgaattgggagtaagg

SEQ ID NO: 4259338 - DNA, 25 bp, Homo sapien
tatgtgaattgggagtaaggatcat

SEQ ID NO: 4259339 - DNA, 25 bp, Homo sapien
tttggtatatggaataagccttatg

SEQ ID NO: 4259340 - DNA, 25 bp, Homo sapien
tggtatatggaataagccttatgtg

SEQ ID NO: 4259341 - DNA, 25 bp, Homo sapien
tgcaaaagacagtgcccttcaatgg

SEQ ID NO: 4259342 - DNA, 25 bp, Homo sapien
ctagtacacagggtttctcagggac

SEQ ID NO: 4259343 - DNA, 25 bp, Homo sapien
gagaaaagtatgaggaaagcgccac

SEQ ID NO: 4259344 - DNA, 25 bp, Homo sapien
gatggattccagacaggagtcggtc

SEQ ID NO: 4259345 - DNA, 25 bp, Homo sapien
gtagacctgggcagttctgaagaca

SEQ ID NO: 4259346 - DNA, 25 bp, Homo sapien
gccagggagattaatgagttgtcaa

SEQ ID NO: 4259347 - DNA, 25 bp, Homo sapien
gaagacaaacagctttactggcaag

SEQ ID NO: 4259348 - DNA, 25 bp, Homo sapien
tgacagtagaatataagtttgccag

SEQ ID NO: 4259349 - DNA, 25 bp, Homo sapien
gatatagccataggacctcatgtgg

SEQ ID NO: 4259350 - DNA, 25 bp, Homo sapien
gacacagagaaaagttacatgcata

SEQ ID NO: 4259351 - DNA, 25 bp, Homo sapien
ttaattacaacaccctttcacctga

SEQ ID NO: 4259352 - DNA, 25 bp, Homo sapien
caggatagttcgatgctaaaaaagg

SEQ ID NO: 4259353 - DNA, 25 bp, Homo sapien
aatgtacaacaccaatggtaaacac

SEQ ID NO: 4259354 - DNA, 25 bp, Homo sapien
aagatcagtggttatgagggaggga

SEQ ID NO: 4259355 - DNA, 25 bp, Homo sapien
ggtaaacactcatgtaaactataga

SEQ ID NO: 4259356 - DNA, 25 bp, Homo sapien
aaccatggggaccataaaaagatca

SEQ ID NO: 4259357 - DNA, 25 bp, Homo sapien
taccaaccaattgaatcctgaatat

SEQ ID NO: 4259358 - DNA, 25 bp, Homo sapien
ttaccaaccaattgaatcctgaata

SEQ ID NO: 4259359 - DNA, 25 bp, Homo sapien
tgcaggtcacaaccctaatacaatt

SEQ ID NO: 4259360 - DNA, 25 bp, Homo sapien
cataactatactgaaggcacacatc

SEQ ID NO: 4259361 - DNA, 25 bp, Homo sapien
ctgaaggcacacatcaagaaactct

SEQ ID NO: 4259362 - DNA, 25 bp, Homo sapien
taatgtactctgctgataaaaattt

SEQ ID NO: 4259363 - DNA, 25 bp, Homo sapien
ggtattaattcagcctcactctcgc

SEQ ID NO: 4259364 - DNA, 25 bp, Homo sapien
tggatttgtgcttgagcggctgaat

SEQ ID NO: 4259365 - DNA, 25 bp, Homo sapien
ttgtcatttttcagcgtcccattgc

SEQ ID NO: 4259366 - DNA, 25 bp, Homo sapien
tcactctcgccatcgtgtacacagg

SEQ ID NO: 4259367 - DNA, 25 bp, Homo sapien
ggtatcaagactgccctgagaagtg

SEQ ID NO: 4259368 - DNA, 25 bp, Homo sapien
aggaccagctgttggtatcaagact

SEQ ID NO: 4259369 - DNA, 25 bp, Homo sapien
gaccagctgttggtatcaagactgc

SEQ ID NO: 4259370 - DNA, 25 bp, Homo sapien
caagactgccctgagaagtgctcat

SEQ ID NO: 4259371 - DNA, 25 bp, Homo sapien
gacttagagagagtagaaactcatt

SEQ ID NO: 4259372 - DNA, 25 bp, Homo sapien
tgtatcactatcgaatttgacttag

SEQ ID NO: 4259373 - DNA, 25 bp, Homo sapien
aaaaatgtactgcagggtagtaaat

SEQ ID NO: 4259374 - DNA, 25 bp, Homo sapien
gtttgtagaactaagtctagactgt

SEQ ID NO: 4259375 - DNA, 25 bp, Homo sapien
gatttcatgaccatcatgcaacctt

SEQ ID NO: 4259376 - DNA, 25 bp, Homo sapien
tgatttcatgaccatcatgcaacct

SEQ ID NO: 4259377 - DNA, 25 bp, Homo sapien
ccagccaattctacattgccttgtg

SEQ ID NO: 4259378 - DNA, 25 bp, Homo sapien
gccaattctacattgccttgtgtcc

SEQ ID NO: 4259379 - DNA, 25 bp, Homo sapien
agacacagacatgggcccagccaat

SEQ ID NO: 4259380 - DNA, 25 bp, Homo sapien
tcctgttgttcattaagcacaagca

SEQ ID NO: 4259381 - DNA, 25 bp, Homo sapien
cttttggtttcctttcctctagcat

SEQ ID NO: 4259382 - DNA, 25 bp, Homo sapien
agtgagagcattttctaggaagtgt

SEQ ID NO: 4259383 - DNA, 25 bp, Homo sapien
gtgagagcattttctaggaagtgtt

SEQ ID NO: 4259384 - DNA, 25 bp, Homo sapien
aagtgagagcattttctaggaagtg

SEQ ID NO: 4259385 - DNA, 25 bp, Homo sapien
catggtgtatataggaatcaaagct

SEQ ID NO: 4259386 - DNA, 25 bp, Homo sapien
agtgcccactcttcttatccatatg

SEQ ID NO: 4259387 - DNA, 25 bp, Homo sapien
tacatactcagcactaaaagggaac

SEQ ID NO: 4259388 - DNA, 25 bp, Homo sapien
gggaacagattaagacacatacaac

SEQ ID NO: 4259389 - DNA, 25 bp, Homo sapien
gatatgtcaagggtggagctcagca

SEQ ID NO: 4259390 - DNA, 25 bp, Homo sapien
tatggcccttaagctcaggatacag

SEQ ID NO: 4259391 - DNA, 25 bp, Homo sapien
caattgacagctggaaatatggccc

SEQ ID NO: 4259392 - DNA, 25 bp, Homo sapien
gaaatgccatgaatcaggaccaggt

SEQ ID NO: 4259393 - DNA, 25 bp, Homo sapien
cactgatttcctcagggagcagaaa

SEQ ID NO: 4259394 - DNA, 25 bp, Homo sapien
cctgtgatttagtttaggtatgggc

SEQ ID NO: 4259395 - DNA, 25 bp, Homo sapien
tgcattcactgatttcctcagggag

SEQ ID NO: 4259396 - DNA, 25 bp, Homo sapien
tcctcagggagcagaaacctctgct

SEQ ID NO: 4259397 - DNA, 25 bp, Homo sapien
caggctaggcttactggatttgtac

SEQ ID NO: 4259398 - DNA, 25 bp, Homo sapien
gcaatcatgctaaggctgaccagga

SEQ ID NO: 4259399 - DNA, 25 bp, Homo sapien
tagcatgagaattgtcagagagttg

SEQ ID NO: 4259400 - DNA, 25 bp, Homo sapien
taatcaagagaacaagacactgccg

SEQ ID NO: 4259401 - DNA, 25 bp, Homo sapien
gaatccccttggttgctaggcttat

SEQ ID NO: 4259402 - DNA, 25 bp, Homo sapien
gaaggacttggtctacctgtatggc

SEQ ID NO: 4259403 - DNA, 25 bp, Homo sapien
cacactcagggccacaagtttcagt

SEQ ID NO: 4259404 - DNA, 25 bp, Homo sapien
gaaatgcgtaaaagtcctctgcaga

SEQ ID NO: 4259405 - DNA, 25 bp, Homo sapien
ccccgtctgctgtgatatgacagat

SEQ ID NO: 4259406 - DNA, 25 bp, Homo sapien
gattagaaggtcagaaaccctgcag

SEQ ID NO: 4259407 - DNA, 25 bp, Homo sapien
tatggctatgtccaccttattgtgc

SEQ ID NO: 4259408 - DNA, 25 bp, Homo sapien
tctgtggaataaggccagggacatt

SEQ ID NO: 4259409 - DNA, 25 bp, Homo sapien
tttcaggtgaccttgggtggaagct

SEQ ID NO: 4259410 - DNA, 25 bp, Homo sapien
gagactatttttgcactcctccacc

SEQ ID NO: 4259411 - DNA, 25 bp, Homo sapien
ccactgctgcactgaaaggagacta

SEQ ID NO: 4259412 - DNA, 25 bp, Homo sapien
gagaaataggcaaattcactgccaa

SEQ ID NO: 4259413 - DNA, 25 bp, Homo sapien
ctcctgtacgctgccttgctaataa

SEQ ID NO: 4259414 - DNA, 25 bp, Homo sapien
tagagagatgataggcacattataa

SEQ ID NO: 4259415 - DNA, 25 bp, Homo sapien
gcatgttttaaagcatgtgctcctg

SEQ ID NO: 4259416 - DNA, 25 bp, Homo sapien
aataaactactcctccctgctagtt

SEQ ID NO: 4259417 - DNA, 25 bp, Homo sapien
gagatctgaattgcttgccctccac

SEQ ID NO: 4259418 - DNA, 25 bp, Homo sapien
cataattactgaaatacttggccca

SEQ ID NO: 4259419 - DNA, 25 bp, Homo sapien
tccagtgcaaacaagcctacaatga

SEQ ID NO: 4259420 - DNA, 25 bp, Homo sapien
caacacaggcttcaagtaatagtac

SEQ ID NO: 4259421 - DNA, 25 bp, Homo sapien
gcctgccagagcttcttgctactgg

SEQ ID NO: 4259422 - DNA, 25 bp, Homo sapien
ttagcttaaatccacaggcctgcca

SEQ ID NO: 4259423 - DNA, 25 bp, Homo sapien
tagcttaaatccacaggcctgccag

SEQ ID NO: 4259424 - DNA, 25 bp, Homo sapien
aggcctgccagagcttcttgctact

SEQ ID NO: 4259425 - DNA, 25 bp, Homo sapien
ctgggctgagctttcggcgccccca

SEQ ID NO: 4259426 - DNA, 25 bp, Homo sapien
tgggctgagctttcggcgcccccag

SEQ ID NO: 4259427 - DNA, 25 bp, Homo sapien
agctttcggcgcccccaggagcttt

SEQ ID NO: 4259428 - DNA, 25 bp, Homo sapien
gctgagctttcggcgcccccaggag

SEQ ID NO: 4259429 - DNA, 25 bp, Homo sapien
tctccgttgcgcagcgcgtgctgtc

SEQ ID NO: 4259430 - DNA, 25 bp, Homo sapien
aggtggcagtcagcgcgcctctgcc

SEQ ID NO: 4259431 - DNA, 25 bp, Homo sapien
cggccaaggagaacggtctccgttg

SEQ ID NO: 4259432 - DNA, 25 bp, Homo sapien
ctgcagcttcaacggcggtggtcgc

SEQ ID NO: 4259433 - DNA, 25 bp, Homo sapien
taactataaataacgctaacctcaa

SEQ ID NO: 4259434 - DNA, 25 bp, Homo sapien
gtgcagtaccagacaacaacttccc

SEQ ID NO: 4259435 - DNA, 25 bp, Homo sapien
ccacactctcaactctcatatttaa

SEQ ID NO: 4259436 - DNA, 25 bp, Homo sapien
caacaatcttggacagcagacgcaa

SEQ ID NO: 4259437 - DNA, 25 bp, Homo sapien
acttgggaaagggaaatgcaccagt

SEQ ID NO: 4259438 - DNA, 25 bp, Homo sapien
agaagctcttggcagtacattgagc

SEQ ID NO: 4259439 - DNA, 25 bp, Homo sapien
aagggaaatgcaccagtgtaaaaga

SEQ ID NO: 4259440 - DNA, 25 bp, Homo sapien
tgcaccagtgtaaaagaagctcttg

SEQ ID NO: 4259441 - DNA, 25 bp, Homo sapien
agagacagcgccggggcaagtgaga

SEQ ID NO: 4259442 - DNA, 25 bp, Homo sapien
gggcaagtgagagccggacgggcac

SEQ ID NO: 4259443 - DNA, 25 bp, Homo sapien
ccatagagacagcgccggggcaagt

SEQ ID NO: 4259444 - DNA, 25 bp, Homo sapien
cggacgggcactgggcgactctgtg

SEQ ID NO: 4259445 - DNA, 25 bp, Homo sapien
aacatgggcaaaggagatcctaaga

SEQ ID NO: 4259446 - DNA, 25 bp, Homo sapien
gggaggagcataagaagaagcaccc

SEQ ID NO: 4259447 - DNA, 25 bp, Homo sapien
gccgagaggcaaaatgtcatcatat

SEQ ID NO: 4259448 - DNA, 25 bp, Homo sapien
tcctaagaagccgagaggcaaaatg

SEQ ID NO: 4259449 - DNA, 25 bp, Homo sapien
agaggcttccttcggccttcttcct

SEQ ID NO: 4259450 - DNA, 25 bp, Homo sapien
gaaagcctgatgcagcaaaaaaggg

SEQ ID NO: 4259451 - DNA, 25 bp, Homo sapien
caatgcacccaagaggcttccttcg

SEQ ID NO: 4259452 - DNA, 25 bp, Homo sapien
cttatgaaaagaaggctgcgaagct

SEQ ID NO: 4259453 - DNA, 25 bp, Homo sapien
aaattgaaatgtaaggcggtgtaag

SEQ ID NO: 4259454 - DNA, 25 bp, Homo sapien
attgttgttctgttaactgaatacc

SEQ ID NO: 4259455 - DNA, 25 bp, Homo sapien
gtatagttaacacactaccgaatgt

SEQ ID NO: 4259456 - DNA, 25 bp, Homo sapien
tagccactaactttgcctggtacag

SEQ ID NO: 4259457 - DNA, 25 bp, Homo sapien
aaaagttgcagctgttttgttgaca

SEQ ID NO: 4259458 - DNA, 25 bp, Homo sapien
tgcagctgttttgttgacattctga

SEQ ID NO: 4259459 - DNA, 25 bp, Homo sapien
aagttgcagctgttttgttgacatt

SEQ ID NO: 4259460 - DNA, 25 bp, Homo sapien
gttgcagctgttttgttgacattct

SEQ ID NO: 4259461 - DNA, 25 bp, Homo sapien
ggactcactattgaagccctctgta

SEQ ID NO: 4259462 - DNA, 25 bp, Homo sapien
aaggaaaacccatagcccgctgtga

SEQ ID NO: 4259463 - DNA, 25 bp, Homo sapien
tcaagaactggtatcaggactcact

SEQ ID NO: 4259464 - DNA, 25 bp, Homo sapien
caaaatagttgatagactcgtggag

SEQ ID NO: 4259465 - DNA, 25 bp, Homo sapien
cagcagtagaggactgagttatcca

SEQ ID NO: 4259466 - DNA, 25 bp, Homo sapien
cactaggggatccaggggcataagc

SEQ ID NO: 4259467 - DNA, 25 bp, Homo sapien
aatactaagtcatgacgggtaggag

SEQ ID NO: 4259468 - DNA, 25 bp, Homo sapien
cgggtaggagcttggattccagatt

SEQ ID NO: 4259469 - DNA, 25 bp, Homo sapien
cgagcaaattccataccaaacctag

SEQ ID NO: 4259470 - DNA, 25 bp, Homo sapien
caaaaccgagcaaattccataccaa

SEQ ID NO: 4259471 - DNA, 25 bp, Homo sapien
agcaaattccataccaaacctagtc

SEQ ID NO: 4259472 - DNA, 25 bp, Homo sapien
accgagcaaattccataccaaacct

SEQ ID NO: 4259473 - DNA, 25 bp, Homo sapien
catgtagcattgcaaggttgcatgc

SEQ ID NO: 4259474 - DNA, 25 bp, Homo sapien
ggttgcatgcagaacaatcacttac

SEQ ID NO: 4259475 - DNA, 25 bp, Homo sapien
gcattgcaaggttgcatgcagaaca

SEQ ID NO: 4259476 - DNA, 25 bp, Homo sapien
atccacatgtagcattgcaaggttg

SEQ ID NO: 4259477 - DNA, 25 bp, Homo sapien
tggtttctgacctattccactccat

SEQ ID NO: 4259478 - DNA, 25 bp, Homo sapien
cttctttgattccttgtctctggtt

SEQ ID NO: 4259479 - DNA, 25 bp, Homo sapien
ctttgattccttgtctctggtttct

SEQ ID NO: 4259480 - DNA, 25 bp, Homo sapien
gtctctggtttctgacctattccac

SEQ ID NO: 4259481 - DNA, 25 bp, Homo sapien
ttcccagggtcagacctacaaacac

SEQ ID NO: 4259482 - DNA, 25 bp, Homo sapien
cattcccagggtcagacctacaaac

SEQ ID NO: 4259483 - DNA, 25 bp, Homo sapien
aggcagtccttaaacattcccaggg

SEQ ID NO: 4259484 - DNA, 25 bp, Homo sapien
tctgatgtaaggcagtccttaaaca

SEQ ID NO: 4259485 - DNA, 25 bp, Homo sapien
cctttattcttctgtacctgggtat

SEQ ID NO: 4259486 - DNA, 25 bp, Homo sapien
ctcctttattcttctgtacctgggt

SEQ ID NO: 4259487 - DNA, 25 bp, Homo sapien
acctgggtattcatttcatgtccac

SEQ ID NO: 4259488 - DNA, 25 bp, Homo sapien
tattcatttcatgtccaccctcatc

SEQ ID NO: 4259489 - DNA, 25 bp, Homo sapien
gcgagttatgactgctacatctgta

SEQ ID NO: 4259490 - DNA, 25 bp, Homo sapien
tccacgagggcagaaaattgtgcga

SEQ ID NO: 4259491 - DNA, 25 bp, Homo sapien
tctatcacttttccacgagggcaga

SEQ ID NO: 4259492 - DNA, 25 bp, Homo sapien
agaaaattgtgcgagttatgactgc

SEQ ID NO: 4259493 - DNA, 25 bp, Homo sapien
gcaatgtcagggcagacacccatca

SEQ ID NO: 4259494 - DNA, 25 bp, Homo sapien
gggcagacacccatcagtgacgatt

SEQ ID NO: 4259495 - DNA, 25 bp, Homo sapien
ccatcagtgacgattctgtggccat

SEQ ID NO: 4259496 - DNA, 25 bp, Homo sapien
gacacccatcagtgacgattctgtg

SEQ ID NO: 4259497 - DNA, 25 bp, Homo sapien
agatcaccagcactactactccttg

SEQ ID NO: 4259498 - DNA, 25 bp, Homo sapien
gatcaccagcactactactccttgt

SEQ ID NO: 4259499 - DNA, 25 bp, Homo sapien
ggtccaatctattttcacccgtcag

SEQ ID NO: 4259500 - DNA, 25 bp, Homo sapien
tattttcacccgtcagatcaccagc

SEQ ID NO: 4259501 - DNA, 25 bp, Homo sapien
gggacataagtagcatcaaccagtt

SEQ ID NO: 4259502 - DNA, 25 bp, Homo sapien
gataatggtgtactagataatcccg

SEQ ID NO: 4259503 - DNA, 25 bp, Homo sapien
tcaaatggcaccttgataaattccc

SEQ ID NO: 4259504 - DNA, 25 bp, Homo sapien
tgtaaaattcgagtgttggacacca

SEQ ID NO: 4259505 - DNA, 25 bp, Homo sapien
gcacaggtttaaggtctgcatgaca

SEQ ID NO: 4259506 - DNA, 25 bp, Homo sapien
cactactggaaaatgaggtagtctc

SEQ ID NO: 4259507 - DNA, 25 bp, Homo sapien
gggacaagaatcagcacaggtttaa

SEQ ID NO: 4259508 - DNA, 25 bp, Homo sapien
cacttgagtcttacaaccagtgttt

SEQ ID NO: 4259509 - DNA, 25 bp, Homo sapien
tgaagtacttgccctgaccacacga

SEQ ID NO: 4259510 - DNA, 25 bp, Homo sapien
tacttgccctgaccacacgatccat

SEQ ID NO: 4259511 - DNA, 25 bp, Homo sapien
aagtacttgccctgaccacacgatc

SEQ ID NO: 4259512 - DNA, 25 bp, Homo sapien
tgctgaagtacttgccctgaccaca

SEQ ID NO: 4259513 - DNA, 25 bp, Homo sapien
gatggaaatcaggaccacggagagc

SEQ ID NO: 4259514 - DNA, 25 bp, Homo sapien
cagatggaaatcaggaccacggaga

SEQ ID NO: 4259515 - DNA, 25 bp, Homo sapien
agatggaaatcaggaccacggagag

SEQ ID NO: 4259516 - DNA, 25 bp, Homo sapien
gcagatggaaatcaggaccacggag

SEQ ID NO: 4259517 - DNA, 25 bp, Homo sapien
ggctcatggcttggttcgaggtatc

SEQ ID NO: 4259518 - DNA, 25 bp, Homo sapien
ggttcgaggtatccctcaggatgga

SEQ ID NO: 4259519 - DNA, 25 bp, Homo sapien
catggcttggttcgaggtatccctc

SEQ ID NO: 4259520 - DNA, 25 bp, Homo sapien
gaggtatccctcaggatggagttct

SEQ ID NO: 4259521 - DNA, 25 bp, Homo sapien
tctgacctccctgaatacttctttc

SEQ ID NO: 4259522 - DNA, 25 bp, Homo sapien
tttgttctcttacttccagctccat

SEQ ID NO: 4259523 - DNA, 25 bp, Homo sapien
ccttagaacatgacaatagtttcct

SEQ ID NO: 4259524 - DNA, 25 bp, Homo sapien
gaacatgacaatagtttcctgtctc

SEQ ID NO: 4259525 - DNA, 25 bp, Homo sapien
catctccaaggctttgttctcttac

SEQ ID NO: 4259526 - DNA, 25 bp, Homo sapien
gcacaagtgagcagtggctggtaac

SEQ ID NO: 4259527 - DNA, 25 bp, Homo sapien
ccagggctggtccagtgttgttaga

SEQ ID NO: 4259528 - DNA, 25 bp, Homo sapien
tggtccagtgttgttagaaaagcag

SEQ ID NO: 4259529 - DNA, 25 bp, Homo sapien
cacaagtgagcagtggctggtaact

SEQ ID NO: 4259530 - DNA, 25 bp, Homo sapien
aatgcagggggctgagaatagcact

SEQ ID NO: 4259531 - DNA, 25 bp, Homo sapien
ctggaagggcctgaaaaataaacat

SEQ ID NO: 4259532 - DNA, 25 bp, Homo sapien
caggaacactgcaagggaagctgga

SEQ ID NO: 4259533 - DNA, 25 bp, Homo sapien
ctgagaatagcactggtctcctgga

SEQ ID NO: 4259534 - DNA, 25 bp, Homo sapien
agaggtggaaacctgtttcgaagtg

SEQ ID NO: 4259535 - DNA, 25 bp, Homo sapien
tccaactctctaaacaggggagcat

SEQ ID NO: 4259536 - DNA, 25 bp, Homo sapien
ttgtgaaatgaagtatgcgcaccat

SEQ ID NO: 4259537 - DNA, 25 bp, Homo sapien
acctgtttcgaagtggggactagag

SEQ ID NO: 4259538 - DNA, 25 bp, Homo sapien
gggccaccaaagacgatgtttacag

SEQ ID NO: 4259539 - DNA, 25 bp, Homo sapien
tacagtgggagttagatgacgaagc

SEQ ID NO: 4259540 - DNA, 25 bp, Homo sapien
ggagaaaccatacaacatgggtggg

SEQ ID NO: 4259541 - DNA, 25 bp, Homo sapien
tggcaaactggcaccatacagtggg

SEQ ID NO: 4259542 - DNA, 25 bp, Homo sapien
aatctccgagcaagcacgaactgac

SEQ ID NO: 4259543 - DNA, 25 bp, Homo sapien
cttcaatctccgagcaagcacgaac

SEQ ID NO: 4259544 - DNA, 25 bp, Homo sapien
agcacgaactgaccctgggccgact

SEQ ID NO: 4259545 - DNA, 25 bp, Homo sapien
actgacctccatatgcactttcctt

SEQ ID NO: 4259546 - DNA, 25 bp, Homo sapien
aaaaatgcagaagcagtcctaccac

SEQ ID NO: 4259547 - DNA, 25 bp, Homo sapien
cagaatttccgctaatgggcagggc

SEQ ID NO: 4259548 - DNA, 25 bp, Homo sapien
gacaaatagagaacaaccagcatga

SEQ ID NO: 4259549 - DNA, 25 bp, Homo sapien
aaaggatggagaacagaacctgagc

SEQ ID NO: 4259550 - DNA, 25 bp, Homo sapien
tgatgtctgcttatccagatgacct

SEQ ID NO: 4259551 - DNA, 25 bp, Homo sapien
aaacaaggtaggcaatctccactga

SEQ ID NO: 4259552 - DNA, 25 bp, Homo sapien
cctctggttcccatggaggattggg

SEQ ID NO: 4259553 - DNA, 25 bp, Homo sapien
gggtgaccgcaagaataaaagactg

SEQ ID NO: 4259554 - DNA, 25 bp, Homo sapien
tctccacttgattctgatgtgtctt

SEQ ID NO: 4259555 - DNA, 25 bp, Homo sapien
ccagaaaggcacaagtgaaaaacct

SEQ ID NO: 4259556 - DNA, 25 bp, Homo sapien
tctgggaggcacctctaacgtgccc

SEQ ID NO: 4259557 - DNA, 25 bp, Homo sapien
tcgggatcaacctctcctctgggag

SEQ ID NO: 4259558 - DNA, 25 bp, Homo sapien
catcaagtatgatggccggcttgtg

SEQ ID NO: 4259559 - DNA, 25 bp, Homo sapien
tggtctcagcatattgcttctgacc

SEQ ID NO: 4259560 - DNA, 25 bp, Homo sapien
tcatcaagtatgatggccggcttgt

SEQ ID NO: 4259561 - DNA, 25 bp, Homo sapien
cctggtctcagcatattgcttctga

SEQ ID NO: 4259562 - DNA, 25 bp, Homo sapien
taaattggagtatcctctacagaag

SEQ ID NO: 4259563 - DNA, 25 bp, Homo sapien
tacgggtgcgtctcttgctgacatc

SEQ ID NO: 4259564 - DNA, 25 bp, Homo sapien
ttccagatagccatttacgggtgcg

SEQ ID NO: 4259565 - DNA, 25 bp, Homo sapien
caagccgtgcagtttcagcaggtac

SEQ ID NO: 4259566 - DNA, 25 bp, Homo sapien
tggcccataggtacaagttccaacc

SEQ ID NO: 4259567 - DNA, 25 bp, Homo sapien
cagacccagagaagttcaagcagtt

SEQ ID NO: 4259568 - DNA, 25 bp, Homo sapien
gagctgtgcgcaccagtaaaactgt

SEQ ID NO: 4259569 - DNA, 25 bp, Homo sapien
gcaacggtacaaatagaaatcccag

SEQ ID NO: 4259570 - DNA, 25 bp, Homo sapien
tatttcctacaagccttaggagcgg

SEQ ID NO: 4259571 - DNA, 25 bp, Homo sapien
gaaaagcagtatccccatgcagcat

SEQ ID NO: 4259572 - DNA, 25 bp, Homo sapien
tagcagctggaatggaagattcctg

SEQ ID NO: 4259573 - DNA, 25 bp, Homo sapien
gcggtgggtgcatgctaatttgata

SEQ ID NO: 4259574 - DNA, 25 bp, Homo sapien
taaaagtagcttgttaccagtgtcc

SEQ ID NO: 4259575 - DNA, 25 bp, Homo sapien
catctgaactttccgtagaggtgca

SEQ ID NO: 4259576 - DNA, 25 bp, Homo sapien
tgtgggtcaagtgatactctccaac

SEQ ID NO: 4259577 - DNA, 25 bp, Homo sapien
tgtccctggcaaagttatgctgagg

SEQ ID NO: 4259578 - DNA, 25 bp, Homo sapien
tacaacggaacctaatgttccctca

SEQ ID NO: 4259579 - DNA, 25 bp, Homo sapien
ggaacctaatgttccctcatgccac

SEQ ID NO: 4259580 - DNA, 25 bp, Homo sapien
ggatgaggagtacaacggaacctaa

SEQ ID NO: 4259581 - DNA, 25 bp, Homo sapien
tgccacctacagcactgctactgtt

SEQ ID NO: 4259582 - DNA, 25 bp, Homo sapien
cagggctaaacggcccgaagctcct

SEQ ID NO: 4259583 - DNA, 25 bp, Homo sapien
tgtcttgggtacatgcgagccccac

SEQ ID NO: 4259584 - DNA, 25 bp, Homo sapien
tactttgcgaaagcttcgaggcgag

SEQ ID NO: 4259585 - DNA, 25 bp, Homo sapien
cacgcgtctgcgagtttgggttagt

SEQ ID NO: 4259586 - DNA, 25 bp, Homo sapien
gttagtgtgtcaacagggtcagtcc

SEQ ID NO: 4259587 - DNA, 25 bp, Homo sapien
cttagatatgtacctagcagtggaa

SEQ ID NO: 4259588 - DNA, 25 bp, Homo sapien
acactgaattgtcttgatacccttg

SEQ ID NO: 4259589 - DNA, 25 bp, Homo sapien
catcacgtaatctgggaacaaggct

SEQ ID NO: 4259590 - DNA, 25 bp, Homo sapien
ccttttggcttgtgtagacccagtg

SEQ ID NO: 4259591 - DNA, 25 bp, Homo sapien
cacactttcgcctatttggaagatg

SEQ ID NO: 4259592 - DNA, 25 bp, Homo sapien
aagatttctgcctgagtatcgacca

SEQ ID NO: 4259593 - DNA, 25 bp, Homo sapien
tttgaaatgaccaaaggagaggcag

SEQ ID NO: 4259594 - DNA, 25 bp, Homo sapien
gagaggcagaactcttacaccagag

SEQ ID NO: 4259595 - DNA, 25 bp, Homo sapien
tagttggtgagtaagggagactgta

SEQ ID NO: 4259596 - DNA, 25 bp, Homo sapien
tgagggagttggcaatagcctgagc

SEQ ID NO: 4259597 - DNA, 25 bp, Homo sapien
gattctaggtggctggttagttggt

SEQ ID NO: 4259598 - DNA, 25 bp, Homo sapien
aagttagcaggcgaatgtagccctg

SEQ ID NO: 4259599 - DNA, 25 bp, Homo sapien
catcagctgggaatccagctggaga

SEQ ID NO: 4259600 - DNA, 25 bp, Homo sapien
agtttacatgtgtctagctcccatc

SEQ ID NO: 4259601 - DNA, 25 bp, Homo sapien
agttattgctggtagcatgtcagtt

SEQ ID NO: 4259602 - DNA, 25 bp, Homo sapien
tattgcctttctcttactatagatt

SEQ ID NO: 4259603 - DNA, 25 bp, Homo sapien
atagattatttctcacaggagaaga

SEQ ID NO: 4259604 - DNA, 25 bp, Homo sapien
tttgcttctaagaattcaaatgtca

SEQ ID NO: 4259605 - DNA, 25 bp, Homo sapien
taaaagctttcaccattttaccaga

SEQ ID NO: 4259606 - DNA, 25 bp, Homo sapien
cttctaagaattcaaatgtcacagg

SEQ ID NO: 4259607 - DNA, 25 bp, Homo sapien
caaatgtcacaggaataaaagcttt

SEQ ID NO: 4259608 - DNA, 25 bp, Homo sapien
tattcattttcacactcgggagttt

SEQ ID NO: 4259609 - DNA, 25 bp, Homo sapien
ggcacagccatgatgatttttccct

SEQ ID NO: 4259610 - DNA, 25 bp, Homo sapien
cacactcgggagttttagttgccac

SEQ ID NO: 4259611 - DNA, 25 bp, Homo sapien
tgccactccatatcagtggcacagc

SEQ ID NO: 4259612 - DNA, 25 bp, Homo sapien
gaatgtgggaacactccttagacaa

SEQ ID NO: 4259613 - DNA, 25 bp, Homo sapien
caaaaaagcaattagtgtcctgatg

SEQ ID NO: 4259614 - DNA, 25 bp, Homo sapien
aaaagtgtagatcatgatgcccatc

SEQ ID NO: 4259615 - DNA, 25 bp, Homo sapien
gatgcccatcttttttgtagtcgag

SEQ ID NO: 4259616 - DNA, 25 bp, Homo sapien
gtatttggtaagcagtgtaactgtg

SEQ ID NO: 4259617 - DNA, 25 bp, Homo sapien
tatttggtaagcagtgtaactgtgg

SEQ ID NO: 4259618 - DNA, 25 bp, Homo sapien
tttaaagcttaggaattacatctga

SEQ ID NO: 4259619 - DNA, 25 bp, Homo sapien
aaaatccttgccgagaaaaatgtca

SEQ ID NO: 4259620 - DNA, 25 bp, Homo sapien
tgctgttacagaacaagagatggag

SEQ ID NO: 4259621 - DNA, 25 bp, Homo sapien
tcagggtacaatgtttaagccttac

SEQ ID NO: 4259622 - DNA, 25 bp, Homo sapien
gagccattctgactgctcaacggaa

SEQ ID NO: 4259623 - DNA, 25 bp, Homo sapien
cacgggcctgggttattctgtacct

SEQ ID NO: 4259624 - DNA, 25 bp, Homo sapien
caactgagtgtttcggtctctgaag

SEQ ID NO: 4259625 - DNA, 25 bp, Homo sapien
ggaaacactcgttctggctcacaga

SEQ ID NO: 4259626 - DNA, 25 bp, Homo sapien
ggttctgatacaggtaccaactgag

SEQ ID NO: 4259627 - DNA, 25 bp, Homo sapien
ccttctgagtaactggaattacaga

SEQ ID NO: 4259628 - DNA, 25 bp, Homo sapien
cttctgagtaactggaattacagat

SEQ ID NO: 4259629 - DNA, 25 bp, Homo sapien
acagatgtgtgccaccatgcccggc

SEQ ID NO: 4259630 - DNA, 25 bp, Homo sapien
ggctgagacagcgggattttctaga

SEQ ID NO: 4259631 - DNA, 25 bp, Homo sapien
gagacagcgggattttctagatata

SEQ ID NO: 4259632 - DNA, 25 bp, Homo sapien
ctgagacagcgggattttctagata

SEQ ID NO: 4259633 - DNA, 25 bp, Homo sapien
gacagcgggattttctagatataca

SEQ ID NO: 4259634 - DNA, 25 bp, Homo sapien
ggtgtgctttacttccacctatgtg

SEQ ID NO: 4259635 - DNA, 25 bp, Homo sapien
acctatgtggtcagttttggagtag

SEQ ID NO: 4259636 - DNA, 25 bp, Homo sapien
tccacctatgtggtcagttttggag

SEQ ID NO: 4259637 - DNA, 25 bp, Homo sapien
gaggtgtgctttacttccacctatg

SEQ ID NO: 4259638 - DNA, 25 bp, Homo sapien
gaggaatggcaagtaaataaaccag

SEQ ID NO: 4259639 - DNA, 25 bp, Homo sapien
tcctggttggctttcttatagtacc

SEQ ID NO: 4259640 - DNA, 25 bp, Homo sapien
tgaggaatggcaagtaaataaacca

SEQ ID NO: 4259641 - DNA, 25 bp, Homo sapien
ttcttatagtaccattcttccatga

SEQ ID NO: 4259642 - DNA, 25 bp, Homo sapien
gcatccttgggtggcttatttgagt

SEQ ID NO: 4259643 - DNA, 25 bp, Homo sapien
taagatgcatccttgggtggcttat

SEQ ID NO: 4259644 - DNA, 25 bp, Homo sapien
tagttaagatgcatccttgggtggc

SEQ ID NO: 4259645 - DNA, 25 bp, Homo sapien
tgctttcctagttaagatgcatcct

SEQ ID NO: 4259646 - DNA, 25 bp, Homo sapien
tgaagacgatagaaactgatgttgc

SEQ ID NO: 4259647 - DNA, 25 bp, Homo sapien
gagcaggacctgtgtgtatacttgt

SEQ ID NO: 4259648 - DNA, 25 bp, Homo sapien
tgatgttgccatccaactcccggca

SEQ ID NO: 4259649 - DNA, 25 bp, Homo sapien
tgtgccacttggatctaccctgcag

SEQ ID NO: 4259650 - DNA, 25 bp, Homo sapien
cagttggtgcttagccagtttattc

SEQ ID NO: 4259651 - DNA, 25 bp, Homo sapien
tgcttagccagtttattcctgttcc

SEQ ID NO: 4259652 - DNA, 25 bp, Homo sapien
tatcttcagttggtgcttagccagt

SEQ ID NO: 4259653 - DNA, 25 bp, Homo sapien
taaatattctgatatcttcagttgg

SEQ ID NO: 4259654 - DNA, 25 bp, Homo sapien
ttgcacatgcactatttaaattgag

SEQ ID NO: 4259655 - DNA, 25 bp, Homo sapien
ttctccctggatcttatttgctaaa

SEQ ID NO: 4259656 - DNA, 25 bp, Homo sapien
gcccggcctaaaatgccttaatctc

SEQ ID NO: 4259657 - DNA, 25 bp, Homo sapien
aatctcgataggctttttgcacatg

SEQ ID NO: 4259658 - DNA, 25 bp, Homo sapien
tcctaaagaaatgaattttcagccc

SEQ ID NO: 4259659 - DNA, 25 bp, Homo sapien
aatgaattttcagcccataatttca

SEQ ID NO: 4259660 - DNA, 25 bp, Homo sapien
aagaaatgaattttcagcccataat

SEQ ID NO: 4259661 - DNA, 25 bp, Homo sapien
gaaatgaattttcagcccataattt

SEQ ID NO: 4259662 - DNA, 25 bp, Homo sapien
taagtacgtttgcaaaaaactgagc

SEQ ID NO: 4259663 - DNA, 25 bp, Homo sapien
aattagtttctaacagctgcatcaa

SEQ ID NO: 4259664 - DNA, 25 bp, Homo sapien
gctgcatcaaatatcaataagtacg

SEQ ID NO: 4259665 - DNA, 25 bp, Homo sapien
gaattaaattcatatactggtctac

SEQ ID NO: 4259666 - DNA, 25 bp, Homo sapien
gattagctggaatgatgttgccctg

SEQ ID NO: 4259667 - DNA, 25 bp, Homo sapien
tggagaacatgtagcttgccacagt

SEQ ID NO: 4259668 - DNA, 25 bp, Homo sapien
ggcaggcaaggcttcagagattagc

SEQ ID NO: 4259669 - DNA, 25 bp, Homo sapien
gttgccctgtggcaatgtcacagca

SEQ ID NO: 4259670 - DNA, 25 bp, Homo sapien
caaactaaggtgatttacactactc

SEQ ID NO: 4259671 - DNA, 25 bp, Homo sapien
aaattctgttagttggtcttcatga

SEQ ID NO: 4259672 - DNA, 25 bp, Homo sapien
gattattctcgcaacccacttttta

SEQ ID NO: 4259673 - DNA, 25 bp, Homo sapien
tactatatgagcgtattaatggcat

SEQ ID NO: 4259674 - DNA, 25 bp, Homo sapien
gcctcagttgcagttcccagttcaa

SEQ ID NO: 4259675 - DNA, 25 bp, Homo sapien
tgggcaagtcagatccactagaggg

SEQ ID NO: 4259676 - DNA, 25 bp, Homo sapien
tgaacagctgcttcttcgattccag

SEQ ID NO: 4259677 - DNA, 25 bp, Homo sapien
gtaggtgcactggatacccacttct

SEQ ID NO: 4259678 - DNA, 25 bp, Homo sapien
tttttgcatagctttttgttcatca

SEQ ID NO: 4259679 - DNA, 25 bp, Homo sapien
ttgttcatcagcattttttgcaatt

SEQ ID NO: 4259680 - DNA, 25 bp, Homo sapien
tgttcatcagcattttttgcaattt

SEQ ID NO: 4259681 - DNA, 25 bp, Homo sapien
ttctttttgcatagctttttgttca

SEQ ID NO: 4259682 - DNA, 25 bp, Homo sapien
tgatagctagtgctttaactaaagc

SEQ ID NO: 4259683 - DNA, 25 bp, Homo sapien
taactaaagctagttgtgttcgagt

SEQ ID NO: 4259684 - DNA, 25 bp, Homo sapien
tattctcccaactgcgcataaaacg

SEQ ID NO: 4259685 - DNA, 25 bp, Homo sapien
aagctagttgtgttcgagttctaac

SEQ ID NO: 4259686 - DNA, 25 bp, Homo sapien
tccaaatttggtagtggttttctca

SEQ ID NO: 4259687 - DNA, 25 bp, Homo sapien
tttctcgtctcaagttcattagttg

SEQ ID NO: 4259688 - DNA, 25 bp, Homo sapien
gagaaggatgcttactattactctg

SEQ ID NO: 4259689 - DNA, 25 bp, Homo sapien
tcaagttcattagttgagaaggatg

SEQ ID NO: 4259690 - DNA, 25 bp, Homo sapien
gtaacaataggataaggaatattaa

SEQ ID NO: 4259691 - DNA, 25 bp, Homo sapien
acattagtaacaataggataaggaa

SEQ ID NO: 4259692 - DNA, 25 bp, Homo sapien
cattagtaacaataggataaggaat

SEQ ID NO: 4259693 - DNA, 25 bp, Homo sapien
ttagtaacaataggataaggaatat

SEQ ID NO: 4259694 - DNA, 25 bp, Homo sapien
cacaataacaacagtactttccagt

SEQ ID NO: 4259695 - DNA, 25 bp, Homo sapien
tactaaactccctcacaataacaac

SEQ ID NO: 4259696 - DNA, 25 bp, Homo sapien
ctgtgtcccctactaaactccctca

SEQ ID NO: 4259697 - DNA, 25 bp, Homo sapien
tccctcacaataacaacagtacttt

SEQ ID NO: 4259698 - DNA, 25 bp, Homo sapien
ccaagtgttaggtcttcttctcttt

SEQ ID NO: 4259699 - DNA, 25 bp, Homo sapien
ccattatccctctcgtggccattaa

SEQ ID NO: 4259700 - DNA, 25 bp, Homo sapien
ttcttttctggccattatccctctc

SEQ ID NO: 4259701 - DNA, 25 bp, Homo sapien
tggccattaatggaccaagtgttag

SEQ ID NO: 4259702 - DNA, 25 bp, Homo sapien
cactaaaagttgctgacatcataaa

SEQ ID NO: 4259703 - DNA, 25 bp, Homo sapien
gagcaacatagcctctcctcttaaa

SEQ ID NO: 4259704 - DNA, 25 bp, Homo sapien
tggtgcacacttgtattggaggctg

SEQ ID NO: 4259705 - DNA, 25 bp, Homo sapien
aattgctcatgtcaaatttgtcctg

SEQ ID NO: 4259706 - DNA, 25 bp, Homo sapien
tcatagtctctcaacaagaaatctc

SEQ ID NO: 4259707 - DNA, 25 bp, Homo sapien
gagcgaggaatatgttcatagtctc

SEQ ID NO: 4259708 - DNA, 25 bp, Homo sapien
tagagcagtacctaaagggtaagag

SEQ ID NO: 4259709 - DNA, 25 bp, Homo sapien
tatgcttccctaagatagtggccaa

SEQ ID NO: 4259710 - DNA, 25 bp, Homo sapien
gccttaattatgtgcccatacagat

SEQ ID NO: 4259711 - DNA, 25 bp, Homo sapien
gaactagatctccatttgtgttcaa

SEQ ID NO: 4259712 - DNA, 25 bp, Homo sapien
tggctcctaagagatagtttttgga

SEQ ID NO: 4259713 - DNA, 25 bp, Homo sapien
caaggcagatgtgactaaaagagat

SEQ ID NO: 4259714 - DNA, 25 bp, Homo sapien
gataaacctatgtcatgctgcccac

SEQ ID NO: 4259715 - DNA, 25 bp, Homo sapien
tgtcttcctaacctttgctgatgga

SEQ ID NO: 4259716 - DNA, 25 bp, Homo sapien
ccatcacttttctgtggaacagaaa

SEQ ID NO: 4259717 - DNA, 25 bp, Homo sapien
aggaagataaacctatgtcatgctg

SEQ ID NO: 4259718 - DNA, 25 bp, Homo sapien
ctgtcctttcgcaggtgtggtgcag

SEQ ID NO: 4259719 - DNA, 25 bp, Homo sapien
taggaccacctgtcctttcgcaggt

SEQ ID NO: 4259720 - DNA, 25 bp, Homo sapien
ttgatgaattagagaagataggacc

SEQ ID NO: 4259721 - DNA, 25 bp, Homo sapien
ttagagaagataggaccacctgtcc

SEQ ID NO: 4259722 - DNA, 25 bp, Homo sapien
tgaaaattcttaattcctgggccat

SEQ ID NO: 4259723 - DNA, 25 bp, Homo sapien
cactgaaaattcttaattcctgggc

SEQ ID NO: 4259724 - DNA, 25 bp, Homo sapien
ctgaaaattcttaattcctgggcca

SEQ ID NO: 4259725 - DNA, 25 bp, Homo sapien
tttcacactgttatctggtacactt

SEQ ID NO: 4259726 - DNA, 25 bp, Homo sapien
ttatttcacactgttatctggtaca

SEQ ID NO: 4259727 - DNA, 25 bp, Homo sapien
tatttcacactgttatctggtacac

SEQ ID NO: 4259728 - DNA, 25 bp, Homo sapien
cacactgttatctggtacactttca

SEQ ID NO: 4259729 - DNA, 25 bp, Homo sapien
gtataggtctgtatatcatctagca

SEQ ID NO: 4259730 - DNA, 25 bp, Homo sapien
tttccttcttgagacgtgtataggt

SEQ ID NO: 4259731 - DNA, 25 bp, Homo sapien
gagacgtgtataggtctgtatatca

SEQ ID NO: 4259732 - DNA, 25 bp, Homo sapien
tcttgagacgtgtataggtctgtat

SEQ ID NO: 4259733 - DNA, 25 bp, Homo sapien
cgtgactctttacaccagtgaggta

SEQ ID NO: 4259734 - DNA, 25 bp, Homo sapien
acgtgactctttacaccagtgaggt

SEQ ID NO: 4259735 - DNA, 25 bp, Homo sapien
tgactctttacaccagtgaggtaaa

SEQ ID NO: 4259736 - DNA, 25 bp, Homo sapien
gacgtgactctttacaccagtgagg

SEQ ID NO: 4259737 - DNA, 25 bp, Homo sapien
ttttgtgctttaagaacctccgtca

SEQ ID NO: 4259738 - DNA, 25 bp, Homo sapien
catgagatcgttttcttctttctga

SEQ ID NO: 4259739 - DNA, 25 bp, Homo sapien
ttagtgtgttcgcagatcactttga

SEQ ID NO: 4259740 - DNA, 25 bp, Homo sapien
gataagcgcttctgccacctctttt

SEQ ID NO: 4259741 - DNA, 25 bp, Homo sapien
tgtggacagaatttcgtcaggtggt

SEQ ID NO: 4259742 - DNA, 25 bp, Homo sapien
gacagaatttcgtcaggtggtagaa

SEQ ID NO: 4259743 - DNA, 25 bp, Homo sapien
cagaatttcgtcaggtggtagaaca

SEQ ID NO: 4259744 - DNA, 25 bp, Homo sapien
tgtgtgtggacagaatttcgtcagg

SEQ ID NO: 4259745 - DNA, 25 bp, Homo sapien
gctgtagccctacgtgcagtgaggc

SEQ ID NO: 4259746 - DNA, 25 bp, Homo sapien
tgtccctcccgcagaagactgttgg

SEQ ID NO: 4259747 - DNA, 25 bp, Homo sapien
tggaatttctccagctgtcagtagc

SEQ ID NO: 4259748 - DNA, 25 bp, Homo sapien
tgtaaatttcttagggacctgccac

SEQ ID NO: 4259749 - DNA, 25 bp, Homo sapien
cacttctgttgacggacagtctgca

SEQ ID NO: 4259750 - DNA, 25 bp, Homo sapien
gagtaggtggccttgcatctgagaa

SEQ ID NO: 4259751 - DNA, 25 bp, Homo sapien
tttcagggccagacaagcgagtgtg

SEQ ID NO: 4259752 - DNA, 25 bp, Homo sapien
gaactcgctgtagtgcctaagccta

SEQ ID NO: 4259753 - DNA, 25 bp, Homo sapien
cctcctctggtcagggtagacttcc

SEQ ID NO: 4259754 - DNA, 25 bp, Homo sapien
tcctctggtcagggtagacttccat

SEQ ID NO: 4259755 - DNA, 25 bp, Homo sapien
ccctcctctggtcagggtagacttc

SEQ ID NO: 4259756 - DNA, 25 bp, Homo sapien
ctcctctggtcagggtagacttcca

SEQ ID NO: 4259757 - DNA, 25 bp, Homo sapien
gaacatggactgctgcacgaattgt

SEQ ID NO: 4259758 - DNA, 25 bp, Homo sapien
catggactgctgcacgaattgtgtg

SEQ ID NO: 4259759 - DNA, 25 bp, Homo sapien
tggactgctgcacgaattgtgtgtc

SEQ ID NO: 4259760 - DNA, 25 bp, Homo sapien
gactgctgcacgaattgtgtgtcat

SEQ ID NO: 4259761 - DNA, 25 bp, Homo sapien
agagtgccaaccctgcaccagtgtc

SEQ ID NO: 4259762 - DNA, 25 bp, Homo sapien
taagacgcatgttaagactctccca

SEQ ID NO: 4259763 - DNA, 25 bp, Homo sapien
ccggtaggagcagacaggctcttgg

SEQ ID NO: 4259764 - DNA, 25 bp, Homo sapien
agtgtccatctcctccgtaagacgc

SEQ ID NO: 4259765 - DNA, 25 bp, Homo sapien
caatgacacgagctcactgtcagag

SEQ ID NO: 4259766 - DNA, 25 bp, Homo sapien
cacgagctcactgtcagagttgaga

SEQ ID NO: 4259767 - DNA, 25 bp, Homo sapien
tgacacgagctcactgtcagagttg

SEQ ID NO: 4259768 - DNA, 25 bp, Homo sapien
gggccaatgacacgagctcactgtc

SEQ ID NO: 4259769 - DNA, 25 bp, Homo sapien
gtgttctgagaaagtggcggtaaat

SEQ ID NO: 4259770 - DNA, 25 bp, Homo sapien
tcttccgtgtaaccagagaaagtgc

SEQ ID NO: 4259771 - DNA, 25 bp, Homo sapien
ttctgagaaagtggcggtaaatcga

SEQ ID NO: 4259772 - DNA, 25 bp, Homo sapien
atgttttcttccgtgtaaccagaga

SEQ ID NO: 4259773 - DNA, 25 bp, Homo sapien
gctaaggttttcaatctcatgcgtg

SEQ ID NO: 4259774 - DNA, 25 bp, Homo sapien
tatcacctgctaaggttttcaatct

SEQ ID NO: 4259775 - DNA, 25 bp, Homo sapien
gttttcaatctcatgcgtgtgcgca

SEQ ID NO: 4259776 - DNA, 25 bp, Homo sapien
tgcgtgtgcgcagaacaccaaggct

SEQ ID NO: 4259777 - DNA, 25 bp, Homo sapien
aatttgcatgttatccttgcatggg

SEQ ID NO: 4259778 - DNA, 25 bp, Homo sapien
tgcatgttatccttgcatgggggcc

SEQ ID NO: 4259779 - DNA, 25 bp, Homo sapien
gccatgctaatctttcatttattcc

SEQ ID NO: 4259780 - DNA, 25 bp, Homo sapien
aaatttaaatcacttcatgaatttg

SEQ ID NO: 4259781 - DNA, 25 bp, Homo sapien
aaattctacaggtaaggcttgtccg

SEQ ID NO: 4259782 - DNA, 25 bp, Homo sapien
agtccgagcctgttgtagagagatc

SEQ ID NO: 4259783 - DNA, 25 bp, Homo sapien
aagaggctgtttgagagtccgagcc

SEQ ID NO: 4259784 - DNA, 25 bp, Homo sapien
ggaaatgatctggtagtagttcttc

SEQ ID NO: 4259785 - DNA, 25 bp, Homo sapien
gacagtgtgtaggagcctgcagtct

SEQ ID NO: 4259786 - DNA, 25 bp, Homo sapien
ggacagtgtgtaggagcctgcagtc

SEQ ID NO: 4259787 - DNA, 25 bp, Homo sapien
gggacagtgtgtaggagcctgcagt

SEQ ID NO: 4259788 - DNA, 25 bp, Homo sapien
tctcattgaccacacagctggagca

SEQ ID NO: 4259789 - DNA, 25 bp, Homo sapien
tgggtctcattgaccacacagctgg

SEQ ID NO: 4259790 - DNA, 25 bp, Homo sapien
attgaccacacagctggagcatgtg

SEQ ID NO: 4259791 - DNA, 25 bp, Homo sapien
ttctcttgggtctcattgaccacac

SEQ ID NO: 4259792 - DNA, 25 bp, Homo sapien
tcaggatgctttctaatagctcagc

SEQ ID NO: 4259793 - DNA, 25 bp, Homo sapien
gtgtactccatcgaagtctctcagg

SEQ ID NO: 4259794 - DNA, 25 bp, Homo sapien
gggtgatcaagtctcggtgtactcc

SEQ ID NO: 4259795 - DNA, 25 bp, Homo sapien
cgaagtctctcaggatgctttctaa

SEQ ID NO: 4259796 - DNA, 25 bp, Homo sapien
ttcactggctttaacttcatcctcc

SEQ ID NO: 4259797 - DNA, 25 bp, Homo sapien
tttcactggctttaacttcatcctc

SEQ ID NO: 4259798 - DNA, 25 bp, Homo sapien
ttttcactggctttaacttcatcct

SEQ ID NO: 4259799 - DNA, 25 bp, Homo sapien
aaatgatgaacttttctgcattgtt

SEQ ID NO: 4259800 - DNA, 25 bp, Homo sapien
tctgcattgttctgggcaaagaaat

SEQ ID NO: 4259801 - DNA, 25 bp, Homo sapien
ctgcattgttctgggcaaagaaatg

SEQ ID NO: 4259802 - DNA, 25 bp, Homo sapien
ctctgaccaagagcgtgcagcacct

SEQ ID NO: 4259803 - DNA, 25 bp, Homo sapien
gccgtgggtgtcttttcagtgatga

SEQ ID NO: 4259804 - DNA, 25 bp, Homo sapien
gcagcacctggatctggtgattcag

SEQ ID NO: 4259805 - DNA, 25 bp, Homo sapien
ctttctatttggactgagggccgtg

SEQ ID NO: 4259806 - DNA, 25 bp, Homo sapien
gctcttggtgttcctctggttgcat

SEQ ID NO: 4259807 - DNA, 25 bp, Homo sapien
tgccaggaagtgtggacagacagct

SEQ ID NO: 4259808 - DNA, 25 bp, Homo sapien
gctctatgtgtctgaagccagggat

SEQ ID NO: 4259809 - DNA, 25 bp, Homo sapien
caggaagtgtggacagacagctcta

SEQ ID NO: 4259810 - DNA, 25 bp, Homo sapien
gacagacagctctatgtgtctgaag

SEQ ID NO: 4259811 - DNA, 25 bp, Homo sapien
ctgcggcatcggaacgagaatcctt

SEQ ID NO: 4259812 - DNA, 25 bp, Homo sapien
tccactccctcaggcgaattatggc

SEQ ID NO: 4259813 - DNA, 25 bp, Homo sapien
attatggcaattccctgctgtgtgg

SEQ ID NO: 4259814 - DNA, 25 bp, Homo sapien
ggaacgagaatccttcctccaagtc

SEQ ID NO: 4259815 - DNA, 25 bp, Homo sapien
ttgcctcctcaggaacttcaatacc

SEQ ID NO: 4259816 - DNA, 25 bp, Homo sapien
tgttctggctgctttgcctcctcag

SEQ ID NO: 4259817 - DNA, 25 bp, Homo sapien
tggctgctttgcctcctcaggaact

SEQ ID NO: 4259818 - DNA, 25 bp, Homo sapien
gaacttcaataccaggaatgatgtg

SEQ ID NO: 4259819 - DNA, 25 bp, Homo sapien
ggagcctactaacctgcccctctgt

SEQ ID NO: 4259820 - DNA, 25 bp, Homo sapien
gtagtgagatgaggagaacatcctc

SEQ ID NO: 4259821 - DNA, 25 bp, Homo sapien
atcccccaaacccagtagtgagatg

SEQ ID NO: 4259822 - DNA, 25 bp, Homo sapien
ccaggagcctactaacctgcccctc

SEQ ID NO: 4259823 - DNA, 25 bp, Homo sapien
agttgactctgcgggaaaagctgac

SEQ ID NO: 4259824 - DNA, 25 bp, Homo sapien
tcagttgactctgcgggaaaagctg

SEQ ID NO: 4259825 - DNA, 25 bp, Homo sapien
cagttgactctgcgggaaaagctga

SEQ ID NO: 4259826 - DNA, 25 bp, Homo sapien
ctctctcgtcaagggctctaacagc

SEQ ID NO: 4259827 - DNA, 25 bp, Homo sapien
gcttcttgctgtgaatccctctctc

SEQ ID NO: 4259828 - DNA, 25 bp, Homo sapien
gcattctgaagagccagcttcttgc

SEQ ID NO: 4259829 - DNA, 25 bp, Homo sapien
cggttctgttccctcctgtaggagc

SEQ ID NO: 4259830 - DNA, 25 bp, Homo sapien
ttggccgtgcacctggcaatttgtg

SEQ ID NO: 4259831 - DNA, 25 bp, Homo sapien
agccactagattgcaccgaagattg

SEQ ID NO: 4259832 - DNA, 25 bp, Homo sapien
tagattgcaccgaagattggccgtg

SEQ ID NO: 4259833 - DNA, 25 bp, Homo sapien
gcaccgaagattggccgtgcacctg

SEQ ID NO: 4259834 - DNA, 25 bp, Homo sapien
cactggcatcctagcatctttagaa

SEQ ID NO: 4259835 - DNA, 25 bp, Homo sapien
cagccttcctgttactcctgtgtag

SEQ ID NO: 4259836 - DNA, 25 bp, Homo sapien
gcatcctagcatctttagaagtggg

SEQ ID NO: 4259837 - DNA, 25 bp, Homo sapien
tggcatcctagcatctttagaagtg

SEQ ID NO: 4259838 - DNA, 25 bp, Homo sapien
taggcacagtggcatagagcctctt

SEQ ID NO: 4259839 - DNA, 25 bp, Homo sapien
aacagctgctgaggatttgtgtcat

SEQ ID NO: 4259840 - DNA, 25 bp, Homo sapien
ggtgacaacagctgctgaggatttg

SEQ ID NO: 4259841 - DNA, 25 bp, Homo sapien
tagagcctcttgatggtgacaacag

SEQ ID NO: 4259842 - DNA, 25 bp, Homo sapien
aaacttagcttgtcggaactctgag

SEQ ID NO: 4259843 - DNA, 25 bp, Homo sapien
ggttgcatcccaagctgaatacgca

SEQ ID NO: 4259844 - DNA, 25 bp, Homo sapien
gaatacgcacaagtgtctggagacc

SEQ ID NO: 4259845 - DNA, 25 bp, Homo sapien
ttttggaggctgacactgctgcaca

SEQ ID NO: 4259846 - DNA, 25 bp, Homo sapien
ctgtagacacggaaagaactgacaa

SEQ ID NO: 4259847 - DNA, 25 bp, Homo sapien
tgtagacacggaaagaactgacaag

SEQ ID NO: 4259848 - DNA, 25 bp, Homo sapien
gttcttagtcgcttccagagcccag

SEQ ID NO: 4259849 - DNA, 25 bp, Homo sapien
ctcttgacaaacagttcttagtcgc

SEQ ID NO: 4259850 - DNA, 25 bp, Homo sapien
tgacaaacagttcttagtcgcttcc

SEQ ID NO: 4259851 - DNA, 25 bp, Homo sapien
aacagttcttagtcgcttccagagc

SEQ ID NO: 4259852 - DNA, 25 bp, Homo sapien
ctgcagcactaagggcatacagaag

SEQ ID NO: 4259853 - DNA, 25 bp, Homo sapien
cactaagggcatacagaagttctgg

SEQ ID NO: 4259854 - DNA, 25 bp, Homo sapien
atgcactgcagcactaagggcatac

SEQ ID NO: 4259855 - DNA, 25 bp, Homo sapien
aacactgtttggctacacaaccaac

SEQ ID NO: 4259856 - DNA, 25 bp, Homo sapien
tcaaaaaatggagtgtctgtggcca

SEQ ID NO: 4259857 - DNA, 25 bp, Homo sapien
cttcaaaaaatggagtgtctgtggc

SEQ ID NO: 4259858 - DNA, 25 bp, Homo sapien
ttcaaaaaatggagtgtctgtggcc

SEQ ID NO: 4259859 - DNA, 25 bp, Homo sapien
caaaaaatggagtgtctgtggccat

SEQ ID NO: 4259860 - DNA, 25 bp, Homo sapien
ccggcctgattgctatgcttttaaa

SEQ ID NO: 4259861 - DNA, 25 bp, Homo sapien
atgcccggcctgattgctatgcttt

SEQ ID NO: 4259862 - DNA, 25 bp, Homo sapien
gcctatcttgcatgttccatgtaag

SEQ ID NO: 4259863 - DNA, 25 bp, Homo sapien
tatagctcagaatatggcctatctt

SEQ ID NO: 4259864 - DNA, 25 bp, Homo sapien
agaggttacagggagccgagatggc

SEQ ID NO: 4259865 - DNA, 25 bp, Homo sapien
tactcgggaggctgaggcaggagaa

SEQ ID NO: 4259866 - DNA, 25 bp, Homo sapien
tcacttgaacctgggaggcagaggt

SEQ ID NO: 4259867 - DNA, 25 bp, Homo sapien
actaaaaatacaaatcccagctact

SEQ ID NO: 4259868 - DNA, 25 bp, Homo sapien
ggcatcccgtgtatggaatggcata

SEQ ID NO: 4259869 - DNA, 25 bp, Homo sapien
tgtatggaatggcatacacgcccat

SEQ ID NO: 4259870 - DNA, 25 bp, Homo sapien
gactaaaggtctttgtccattggaa

SEQ ID NO: 4259871 - DNA, 25 bp, Homo sapien
ccattggaatggcatcccgtgtatg

SEQ ID NO: 4259872 - DNA, 25 bp, Homo sapien
tctctgattgatttgatccttggat

SEQ ID NO: 4259873 - DNA, 25 bp, Homo sapien
tgtcttcttccacggcaggcaatgc

SEQ ID NO: 4259874 - DNA, 25 bp, Homo sapien
ggagccgtgtcctctggttaagaca

SEQ ID NO: 4259875 - DNA, 25 bp, Homo sapien
caggcaatgcgtggagggtaaccct

SEQ ID NO: 4259876 - DNA, 25 bp, Homo sapien
gagacctttcctcgggagagctcgt

SEQ ID NO: 4259877 - DNA, 25 bp, Homo sapien
actgaaatttcctatcctcggtgta

SEQ ID NO: 4259878 - DNA, 25 bp, Homo sapien
ttttcagtggacaactgtgagacct

SEQ ID NO: 4259879 - DNA, 25 bp, Homo sapien
tatcctcggtgtaataaacctgtca

SEQ ID NO: 4259880 - DNA, 25 bp, Homo sapien
gcaggctccggtggaaatacctttc

SEQ ID NO: 4259881 - DNA, 25 bp, Homo sapien
gccgcctccacatgtcgctgtctgc

SEQ ID NO: 4259882 - DNA, 25 bp, Homo sapien
cctttgaagagtggcggttgggctg

SEQ ID NO: 4259883 - DNA, 25 bp, Homo sapien
gggctggcagttccccagagctaag

SEQ ID NO: 4259884 - DNA, 25 bp, Homo sapien
gggcagagcagaaactaaggcatct

SEQ ID NO: 4259885 - DNA, 25 bp, Homo sapien
cctctggagctgacaaaatgtttgc

SEQ ID NO: 4259886 - DNA, 25 bp, Homo sapien
tccaatgcaggcttgttaggctgct

SEQ ID NO: 4259887 - DNA, 25 bp, Homo sapien
catcttcgaagctgaaacctctgga

SEQ ID NO: 4259888 - DNA, 25 bp, Homo sapien
accatttccatggtcatatttgtgg

SEQ ID NO: 4259889 - DNA, 25 bp, Homo sapien
caatacagcggagataagaaagtcc

SEQ ID NO: 4259890 - DNA, 25 bp, Homo sapien
tcaggtttccttactcctagagcca

SEQ ID NO: 4259891 - DNA, 25 bp, Homo sapien
gtccaatacgacagtcctggaagaa

SEQ ID NO: 4259892 - DNA, 25 bp, Homo sapien
cagtctccctgaccctcatctgcct

SEQ ID NO: 4259893 - DNA, 25 bp, Homo sapien
ctcacaccactccttggcacggcct

SEQ ID NO: 4259894 - DNA, 25 bp, Homo sapien
acagatcagctcacaccactccttg

SEQ ID NO: 4259895 - DNA, 25 bp, Homo sapien
gatcagctcacaccactccttggca

SEQ ID NO: 4259896 - DNA, 25 bp, Homo sapien
atgcggtaaaaccgactaaatgcgg

SEQ ID NO: 4259897 - DNA, 25 bp, Homo sapien
aatgcggtaaaaccgactaaatgcg

SEQ ID NO: 4259898 - DNA, 25 bp, Homo sapien
tcctccaagggcctgtgcaagagag

SEQ ID NO: 4259899 - DNA, 25 bp, Homo sapien
caggctcgggtacaatgtgaaaccc

SEQ ID NO: 4259900 - DNA, 25 bp, Homo sapien
tgctcaaatatgctccttctaaggg

SEQ ID NO: 4259901 - DNA, 25 bp, Homo sapien
ggagtttggcactttgataaatgga

SEQ ID NO: 4259902 - DNA, 25 bp, Homo sapien
catgaagttgggagtaaagagaaat

SEQ ID NO: 4259903 - DNA, 25 bp, Homo sapien
gaattgtgaaacctggaaagacgtc

SEQ ID NO: 4259904 - DNA, 25 bp, Homo sapien
ggcaggccagcaacctttgaatact

SEQ ID NO: 4259905 - DNA, 25 bp, Homo sapien
tgaatacttgggaatttgaattgtg

SEQ ID NO: 4259906 - DNA, 25 bp, Homo sapien
tgtctttgttcctgagcagcgttcc

SEQ ID NO: 4259907 - DNA, 25 bp, Homo sapien
tttgttcctgagcagcgttcctatt

SEQ ID NO: 4259908 - DNA, 25 bp, Homo sapien
tctttgttcctgagcagcgttccta

SEQ ID NO: 4259909 - DNA, 25 bp, Homo sapien
gtctttgttcctgagcagcgttcct

SEQ ID NO: 4259910 - DNA, 25 bp, Homo sapien
ctcaggaaggtcacgcctcaaggat

SEQ ID NO: 4259911 - DNA, 25 bp, Homo sapien
acagacttgagaacccatggtgagg

SEQ ID NO: 4259912 - DNA, 25 bp, Homo sapien
aggtagcatcagtgactatacttcc

SEQ ID NO: 4259913 - DNA, 25 bp, Homo sapien
tacttccacagacttgagaacccat

SEQ ID NO: 4259914 - DNA, 25 bp, Homo sapien
ggtattgggtgtactactccttgga

SEQ ID NO: 4259915 - DNA, 25 bp, Homo sapien
ccttaggtaacctttgctgccagca

SEQ ID NO: 4259916 - DNA, 25 bp, Homo sapien
tccttggatagtgccttaggtaacc

SEQ ID NO: 4259917 - DNA, 25 bp, Homo sapien
cagcaggacctggtagctccatatc

SEQ ID NO: 4259918 - DNA, 25 bp, Homo sapien
tagacaccagggcggctgtgagcat

SEQ ID NO: 4259919 - DNA, 25 bp, Homo sapien
gtagacaccagggcggctgtgagca

SEQ ID NO: 4259920 - DNA, 25 bp, Homo sapien
taaagtcagcatgagcaaaaactcc

SEQ ID NO: 4259921 - DNA, 25 bp, Homo sapien
gggttcgctatgtcggatgacgatt

SEQ ID NO: 4259922 - DNA, 25 bp, Homo sapien
cgtcttccaaccagcaaaccgagaa

SEQ ID NO: 4259923 - DNA, 25 bp, Homo sapien
caagaagaaggagagtaaagtcagc

SEQ ID NO: 4259924 - DNA, 25 bp, Homo sapien
ggaggtgggccgagagtcccggcca

SEQ ID NO: 4259925 - DNA, 25 bp, Homo sapien
agggtccggtgcacctgtgcggccg

SEQ ID NO: 4259926 - DNA, 25 bp, Homo sapien
tccggtgcacctgtgcggccgcggg

SEQ ID NO: 4259927 - DNA, 25 bp, Homo sapien
tgggccgagagtcccggccagcgtg

SEQ ID NO: 4259928 - DNA, 25 bp, Homo sapien
ggtgttcgcgccctgctttcgcgcg

SEQ ID NO: 4259929 - DNA, 25 bp, Homo sapien
tgctttcgcgcgcggtctcgggcca

SEQ ID NO: 4259930 - DNA, 25 bp, Homo sapien
gcgggggtgttcgcgccctgctttc

SEQ ID NO: 4259931 - DNA, 25 bp, Homo sapien
ctttcgcgcgcggtctcgggccaag

SEQ ID NO: 4259932 - DNA, 25 bp, Homo sapien
cgccacggctggcaggtcactcggg

SEQ ID NO: 4259933 - DNA, 25 bp, Homo sapien
gctggcaggtcactcgggcccgagg

SEQ ID NO: 4259934 - DNA, 25 bp, Homo sapien
cgaggggcctcgtggggagcggcca

SEQ ID NO: 4259935 - DNA, 25 bp, Homo sapien
accccgccacggctggcaggtcact

SEQ ID NO: 4259936 - DNA, 25 bp, Homo sapien
cctgagtctggcagtagggaagcat

SEQ ID NO: 4259937 - DNA, 25 bp, Homo sapien
gcatcaagagtttggcttcctcctc

SEQ ID NO: 4259938 - DNA, 25 bp, Homo sapien
ttcacctgaagtgaagacagcctga

SEQ ID NO: 4259939 - DNA, 25 bp, Homo sapien
tggctgttcacctgaagtgaagaca

SEQ ID NO: 4259940 - DNA, 25 bp, Homo sapien
gtgttttcctcagatttgtctcaca

SEQ ID NO: 4259941 - DNA, 25 bp, Homo sapien
gtgtgaatcaccacacccagaccca

SEQ ID NO: 4259942 - DNA, 25 bp, Homo sapien
acacccagacccagctgttttctaa

SEQ ID NO: 4259943 - DNA, 25 bp, Homo sapien
accacacccagacccagctgttttc

SEQ ID NO: 4259944 - DNA, 25 bp, Homo sapien
gtgaatcaccacacccagacccagc

SEQ ID NO: 4259945 - DNA, 25 bp, Homo sapien
tgtccctgtttaagagtggccttgt

SEQ ID NO: 4259946 - DNA, 25 bp, Homo sapien
tccctgtttaagagtggccttgtca

SEQ ID NO: 4259947 - DNA, 25 bp, Homo sapien
actgtccctgtttaagagtggcctt

SEQ ID NO: 4259948 - DNA, 25 bp, Homo sapien
cttattactcttcttgattcacctg

SEQ ID NO: 4259949 - DNA, 25 bp, Homo sapien
cataccttttggtcaatttttcaat

SEQ ID NO: 4259950 - DNA, 25 bp, Homo sapien
tgtgttgcttgttcctaaccttaaa

SEQ ID NO: 4259951 - DNA, 25 bp, Homo sapien
ttattttccataacgtacctctcag

SEQ ID NO: 4259952 - DNA, 25 bp, Homo sapien
cttgacagtgaactatttgatagtc

SEQ ID NO: 4259953 - DNA, 25 bp, Homo sapien
aatcttaactctgcctcttgatggc

SEQ ID NO: 4259954 - DNA, 25 bp, Homo sapien
ttttccctgaacagcactgctagct

SEQ ID NO: 4259955 - DNA, 25 bp, Homo sapien
tgtagcatgtcccattactctgtag

SEQ ID NO: 4259956 - DNA, 25 bp, Homo sapien
tcttgatggcactataatcttgggc

SEQ ID NO: 4259957 - DNA, 25 bp, Homo sapien
tttgttttgaaccagcacccttcca

SEQ ID NO: 4259958 - DNA, 25 bp, Homo sapien
tttgaaccagcacccttccaactcc

SEQ ID NO: 4259959 - DNA, 25 bp, Homo sapien
tgttttgaaccagcacccttccaac

SEQ ID NO: 4259960 - DNA, 25 bp, Homo sapien
ccctgcttcctattggttgttttgt

SEQ ID NO: 4259961 - DNA, 25 bp, Homo sapien
aatacagatcgtgttacttcttttc

SEQ ID NO: 4259962 - DNA, 25 bp, Homo sapien
tattggtcctaagagctttttagtg

SEQ ID NO: 4259963 - DNA, 25 bp, Homo sapien
caaatacagatcgtgttacttcttt

SEQ ID NO: 4259964 - DNA, 25 bp, Homo sapien
tggtcctaagagctttttagtggat

SEQ ID NO: 4259965 - DNA, 25 bp, Homo sapien
tctcaactcagtgcagccatgacct

SEQ ID NO: 4259966 - DNA, 25 bp, Homo sapien
gcaatctcaactcagtgcagccatg

SEQ ID NO: 4259967 - DNA, 25 bp, Homo sapien
aatctcaactcagtgcagccatgac

SEQ ID NO: 4259968 - DNA, 25 bp, Homo sapien
caactcagtgcagccatgaccttct

SEQ ID NO: 4259969 - DNA, 25 bp, Homo sapien
ggtttctgtagggttgagactctgc

SEQ ID NO: 4259970 - DNA, 25 bp, Homo sapien
aagatgaacgttctgacccgctcag

SEQ ID NO: 4259971 - DNA, 25 bp, Homo sapien
tctgtagggttgagactctgctgcc

SEQ ID NO: 4259972 - DNA, 25 bp, Homo sapien
tcaccttggctagatgaagatgaac

SEQ ID NO: 4259973 - DNA, 25 bp, Homo sapien
tctaggcttgttacgtttaggtagc

SEQ ID NO: 4259974 - DNA, 25 bp, Homo sapien
agtcattctaggcttgttacgttta

SEQ ID NO: 4259975 - DNA, 25 bp, Homo sapien
taggtagctgtgaaatgtcccacat

SEQ ID NO: 4259976 - DNA, 25 bp, Homo sapien
catctgtgggcctctttagctgctg

SEQ ID NO: 4259977 - DNA, 25 bp, Homo sapien
tatactgtcatatggttgtactcca

SEQ ID NO: 4259978 - DNA, 25 bp, Homo sapien
tgtactccaatgaacctatctcctg

SEQ ID NO: 4259979 - DNA, 25 bp, Homo sapien
tatagtcacatgcacgtgtccagtt

SEQ ID NO: 4259980 - DNA, 25 bp, Homo sapien
tcctgtcagtaagttagctcattcc

SEQ ID NO: 4259981 - DNA, 25 bp, Homo sapien
gcagtccgcaagtctgtttctagca

SEQ ID NO: 4259982 - DNA, 25 bp, Homo sapien
cactcagcgtctgtcctaacatctg

SEQ ID NO: 4259983 - DNA, 25 bp, Homo sapien
tgcctggctgctctaacagtgctcg

SEQ ID NO: 4259984 - DNA, 25 bp, Homo sapien
tgctctgatacctgtccgtgggcac

SEQ ID NO: 4259985 - DNA, 25 bp, Homo sapien
tgcggtggcactctagaagccaaca

SEQ ID NO: 4259986 - DNA, 25 bp, Homo sapien
gatgtagctgtgagcaaaaactgct

SEQ ID NO: 4259987 - DNA, 25 bp, Homo sapien
tattgtggccaaattatggtgtacc

SEQ ID NO: 4259988 - DNA, 25 bp, Homo sapien
tgataacagctaacagggttggagg

SEQ ID NO: 4259989 - DNA, 25 bp, Homo sapien
tggtcactgagatggcactcaattt

SEQ ID NO: 4259990 - DNA, 25 bp, Homo sapien
gactgacgtaagtttgccttgggct

SEQ ID NO: 4259991 - DNA, 25 bp, Homo sapien
taaatgtcgagtcatctgcctggca

SEQ ID NO: 4259992 - DNA, 25 bp, Homo sapien
tcagtctactagttgagacacacaa

SEQ ID NO: 4259993 - DNA, 25 bp, Homo sapien
tgtcgtacgtatctacccaagctgt

SEQ ID NO: 4259994 - DNA, 25 bp, Homo sapien
ggcttcaaagacgaaccctactgca

SEQ ID NO: 4259995 - DNA, 25 bp, Homo sapien
tgaccaacagagcagaacatgacag

SEQ ID NO: 4259996 - DNA, 25 bp, Homo sapien
caagtacatgagaaatgggttccgt

SEQ ID NO: 4259997 - DNA, 25 bp, Homo sapien
gactaagttgcattagtaggaaaca

SEQ ID NO: 4259998 - DNA, 25 bp, Homo sapien
caatagctgatttgtaagtatcgtc

SEQ ID NO: 4259999 - DNA, 25 bp, Homo sapien
tgaagaattatactgtagcagcaat

SEQ ID NO: 4260000 - DNA, 25 bp, Homo sapien
taacatgcatgggtgggaagctaga

SEQ ID NO: 4260001 - DNA, 25 bp, Homo sapien
acagtcagccacattgcttgagtct

SEQ ID NO: 4260002 - DNA, 25 bp, Homo sapien
aactcagacatctaagtcagatcaa

SEQ ID NO: 4260003 - DNA, 25 bp, Homo sapien
tgcttgagtcttgccaaaatcttta

SEQ ID NO: 4260004 - DNA, 25 bp, Homo sapien
tcacaggtgaaaccactaagtagct

SEQ ID NO: 4260005 - DNA, 25 bp, Homo sapien
atgatatcttccgaaacagcttggg

SEQ ID NO: 4260006 - DNA, 25 bp, Homo sapien
catgggtcttagtctgtttagcaaa

SEQ ID NO: 4260007 - DNA, 25 bp, Homo sapien
tgatgaacctacttaacactacctg

SEQ ID NO: 4260008 - DNA, 25 bp, Homo sapien
aaacggccttagagcgtgatgaacc

SEQ ID NO: 4260009 - DNA, 25 bp, Homo sapien
caatcagagttttccgatctgtaac

SEQ ID NO: 4260010 - DNA, 25 bp, Homo sapien
tgtgccacttcagcgtccacttgtc

SEQ ID NO: 4260011 - DNA, 25 bp, Homo sapien
ttagttctcagaattagagttccct

SEQ ID NO: 4260012 - DNA, 25 bp, Homo sapien
tctgctcagaaaggtcgattttgtt

SEQ ID NO: 4260013 - DNA, 25 bp, Homo sapien
cacatttggcatttttaacatatcc

SEQ ID NO: 4260014 - DNA, 25 bp, Homo sapien
acatttggcatttttaacatatcca

SEQ ID NO: 4260015 - DNA, 25 bp, Homo sapien
catttggcatttttaacatatccac

SEQ ID NO: 4260016 - DNA, 25 bp, Homo sapien
gtctttgaacttatcgatttctttc

SEQ ID NO: 4260017 - DNA, 25 bp, Homo sapien
tcagaagctccactctttgaaagga

SEQ ID NO: 4260018 - DNA, 25 bp, Homo sapien
gaagctccactctttgaaaggattc

SEQ ID NO: 4260019 - DNA, 25 bp, Homo sapien
ccactctttgaaaggattcaaggtt

SEQ ID NO: 4260020 - DNA, 25 bp, Homo sapien
aaaaataatgctttggcagctccac

SEQ ID NO: 4260021 - DNA, 25 bp, Homo sapien
acgccttcctgtagacctctggtgt

SEQ ID NO: 4260022 - DNA, 25 bp, Homo sapien
tttactcctcggtctgtttctactg

SEQ ID NO: 4260023 - DNA, 25 bp, Homo sapien
tgtacacaagaacgaagccatcagc

SEQ ID NO: 4260024 - DNA, 25 bp, Homo sapien
atgatttccataaaggagctgctcc

SEQ ID NO: 4260025 - DNA, 25 bp, Homo sapien
tccaaaattgcagttttccccacag

SEQ ID NO: 4260026 - DNA, 25 bp, Homo sapien
gctccaaaattgcagttttccccac

SEQ ID NO: 4260027 - DNA, 25 bp, Homo sapien
tccataaaggagctgctccaaaatt

SEQ ID NO: 4260028 - DNA, 25 bp, Homo sapien
ggccaccggctttggagcctggacc

SEQ ID NO: 4260029 - DNA, 25 bp, Homo sapien
tctcctcagacctcaaagacagcgg

SEQ ID NO: 4260030 - DNA, 25 bp, Homo sapien
gcggtacgcggccaccggctttgga

SEQ ID NO: 4260031 - DNA, 25 bp, Homo sapien
tcagacctcaaagacagcggctcca

SEQ ID NO: 4260032 - DNA, 25 bp, Homo sapien
gctcaggctcgaatcttgcggagca

SEQ ID NO: 4260033 - DNA, 25 bp, Homo sapien
tcctctcgcggagagacagtcgccg

SEQ ID NO: 4260034 - DNA, 25 bp, Homo sapien
gggcgggacaatagcggccgcggcg

SEQ ID NO: 4260035 - DNA, 25 bp, Homo sapien
tctctcacctctcgagacgcccagg

SEQ ID NO: 4260036 - DNA, 25 bp, Homo sapien
tctgggaggccgcagctttccaccg

SEQ ID NO: 4260037 - DNA, 25 bp, Homo sapien
tgggaggccgcagctttccaccgga

SEQ ID NO: 4260038 - DNA, 25 bp, Homo sapien
gaggccgcagctttccaccggaaag

SEQ ID NO: 4260039 - DNA, 25 bp, Homo sapien
ggccgcagctttccaccggaaagag

SEQ ID NO: 4260040 - DNA, 25 bp, Homo sapien
ggagataggtctccctcctgtgcgg

SEQ ID NO: 4260041 - DNA, 25 bp, Homo sapien
tttggtcaggatgcgggacagcaaa

SEQ ID NO: 4260042 - DNA, 25 bp, Homo sapien
ggaccctgcgtcctcggagataggt

SEQ ID NO: 4260043 - DNA, 25 bp, Homo sapien
taggctgcgttgaggatctttgctc

SEQ ID NO: 4260044 - DNA, 25 bp, Homo sapien
ttctggttctgttaattcgccccac

SEQ ID NO: 4260045 - DNA, 25 bp, Homo sapien
tcagttctggttctgttaattcgcc

SEQ ID NO: 4260046 - DNA, 25 bp, Homo sapien
tgctcagttctggttctgttaattc

SEQ ID NO: 4260047 - DNA, 25 bp, Homo sapien
gttctggttctgttaattcgcccca

SEQ ID NO: 4260048 - DNA, 25 bp, Homo sapien
ttgcggaagtgactgaacgcggctc

SEQ ID NO: 4260049 - DNA, 25 bp, Homo sapien
cggaagtgactgaacgcggctccgt

SEQ ID NO: 4260050 - DNA, 25 bp, Homo sapien
ctgtccccggcagttggtgcagagc

SEQ ID NO: 4260051 - DNA, 25 bp, Homo sapien
aacgtgccgagcaccgctctgtgct

SEQ ID NO: 4260052 - DNA, 25 bp, Homo sapien
cgtcttattgtacttaaagcggatg

SEQ ID NO: 4260053 - DNA, 25 bp, Homo sapien
gacggatacagtcgtcttattgtac

SEQ ID NO: 4260054 - DNA, 25 bp, Homo sapien
ttaaagcggatgatatttaatacac

SEQ ID NO: 4260055 - DNA, 25 bp, Homo sapien
ggaactaagatggacggatacagtc

SEQ ID NO: 4260056 - DNA, 25 bp, Homo sapien
cctaagggtgcaacttacggcaagc

SEQ ID NO: 4260057 - DNA, 25 bp, Homo sapien
tgttcgccgtggtggccgaaaacgc

SEQ ID NO: 4260058 - DNA, 25 bp, Homo sapien
cagttcctaagggtgcaacttacgg

SEQ ID NO: 4260059 - DNA, 25 bp, Homo sapien
tatataggattcgtgttcgccgtgg

SEQ ID NO: 4260060 - DNA, 25 bp, Homo sapien
aagtcacaagcgcatggtttccaac

SEQ ID NO: 4260061 - DNA, 25 bp, Homo sapien
tcttccaggagactagactactgtt

SEQ ID NO: 4260062 - DNA, 25 bp, Homo sapien
aacctgcagctttatcggagtgatg

SEQ ID NO: 4260063 - DNA, 25 bp, Homo sapien
tcccataggctacagaaaaagtcac

SEQ ID NO: 4260064 - DNA, 25 bp, Homo sapien
aaccgtttgctctaggacgcgacct

SEQ ID NO: 4260065 - DNA, 25 bp, Homo sapien
ttcccgaagggatacgctcgaagga

SEQ ID NO: 4260066 - DNA, 25 bp, Homo sapien
gtagcaccgcccctgttaggatgcc

SEQ ID NO: 4260067 - DNA, 25 bp, Homo sapien
tctgaggtgcttcgatcccgagcga

SEQ ID NO: 4260068 - DNA, 25 bp, Homo sapien
tgtatttactctaccactgctaaag

SEQ ID NO: 4260069 - DNA, 25 bp, Homo sapien
cgcacaatcacaagtgtatgaggac

SEQ ID NO: 4260070 - DNA, 25 bp, Homo sapien
gacttcgggatttaggagatctcca

SEQ ID NO: 4260071 - DNA, 25 bp, Homo sapien
aaatgagaattgatggtgtccccaa

SEQ ID NO: 4260072 - DNA, 25 bp, Homo sapien
aaatgtgggcattatgtcagcaaac

SEQ ID NO: 4260073 - DNA, 25 bp, Homo sapien
taagggcattatgtcagcaagctaa

SEQ ID NO: 4260074 - DNA, 25 bp, Homo sapien
tttgcaaagcaaggtgtagcagctc

SEQ ID NO: 4260075 - DNA, 25 bp, Homo sapien
gctagatttattactgtgcacgaaa

SEQ ID NO: 4260076 - DNA, 25 bp, Homo sapien
aagctattctggaactaacatggaa

SEQ ID NO: 4260077 - DNA, 25 bp, Homo sapien
tgttgatgggatatgagttaagttt

SEQ ID NO: 4260078 - DNA, 25 bp, Homo sapien
gatgaggacatggataatatcttca

SEQ ID NO: 4260079 - DNA, 25 bp, Homo sapien
tctggaactaacatggaaaaatgaa

SEQ ID NO: 4260080 - DNA, 25 bp, Homo sapien
tctacatcgaatagtaaggaacaaa

SEQ ID NO: 4260081 - DNA, 25 bp, Homo sapien
catcgaatagtaaggaacaaagggt

SEQ ID NO: 4260082 - DNA, 25 bp, Homo sapien
tcttctacatcgaatagtaaggaac

SEQ ID NO: 4260083 - DNA, 25 bp, Homo sapien
tacatcgaatagtaaggaacaaagg

SEQ ID NO: 4260084 - DNA, 25 bp, Homo sapien
agatttctgaattgcttaatcctcc

SEQ ID NO: 4260085 - DNA, 25 bp, Homo sapien
tgtagatttctgaattgcttaatcc

SEQ ID NO: 4260086 - DNA, 25 bp, Homo sapien
tttctgaattgcttaatcctccttt

SEQ ID NO: 4260087 - DNA, 25 bp, Homo sapien
gatttctgaattgcttaatcctcct

SEQ ID NO: 4260088 - DNA, 25 bp, Homo sapien
agaagtcccgtgatatgctgcctga

SEQ ID NO: 4260089 - DNA, 25 bp, Homo sapien
aaacacttgaggagaaccttgcgca

SEQ ID NO: 4260090 - DNA, 25 bp, Homo sapien
ctgtgttagtcagggctcaccagag

SEQ ID NO: 4260091 - DNA, 25 bp, Homo sapien
ggagctttgccctaactgtgtatgg

SEQ ID NO: 4260092 - DNA, 25 bp, Homo sapien
tgagttctcatagcagcaaggggca

SEQ ID NO: 4260093 - DNA, 25 bp, Homo sapien
gctgcctcaggtactatgtggtcca

SEQ ID NO: 4260094 - DNA, 25 bp, Homo sapien
acctgtttgcccttacttgctatcc

SEQ ID NO: 4260095 - DNA, 25 bp, Homo sapien
tatgtggtccatttcacccaagcgt

SEQ ID NO: 4260096 - DNA, 25 bp, Homo sapien
gcatccctctgtttggctcaggtgg

SEQ ID NO: 4260097 - DNA, 25 bp, Homo sapien
ccccaccccatttcgctctgctcat

SEQ ID NO: 4260098 - DNA, 25 bp, Homo sapien
cagccccaccccatttcgctctgct

SEQ ID NO: 4260099 - DNA, 25 bp, Homo sapien
agccccaccccatttcgctctgctc

SEQ ID NO: 4260100 - DNA, 25 bp, Homo sapien
gccccaccccatttcgctctgctca

SEQ ID NO: 4260101 - DNA, 25 bp, Homo sapien
ttttttgccacctctaagctttgac

SEQ ID NO: 4260102 - DNA, 25 bp, Homo sapien
ttttgccacctctaagctttgacat

SEQ ID NO: 4260103 - DNA, 25 bp, Homo sapien
tttttttgccacctctaagctttga

SEQ ID NO: 4260104 - DNA, 25 bp, Homo sapien
tttttgccacctctaagctttgaca

SEQ ID NO: 4260105 - DNA, 25 bp, Homo sapien
taccctagacgaatacgacagtatc

SEQ ID NO: 4260106 - DNA, 25 bp, Homo sapien
ttaccctagacgaatacgacagtat

SEQ ID NO: 4260107 - DNA, 25 bp, Homo sapien
accctagacgaatacgacagtatcc

SEQ ID NO: 4260108 - DNA, 25 bp, Homo sapien
ggtgattttgatgttcctcctggtg

SEQ ID NO: 4260109 - DNA, 25 bp, Homo sapien
tctccttgcctaatctcctgccata

SEQ ID NO: 4260110 - DNA, 25 bp, Homo sapien
ctttctccttgcctaatctcctgcc

SEQ ID NO: 4260111 - DNA, 25 bp, Homo sapien
gattttgatgttcctcctggtggct

SEQ ID NO: 4260112 - DNA, 25 bp, Homo sapien
cccagctctatgtctcctgtcccta

SEQ ID NO: 4260113 - DNA, 25 bp, Homo sapien
gaattgtcctcttaaccatggccta

SEQ ID NO: 4260114 - DNA, 25 bp, Homo sapien
accactcccaggatctaaaacttgg

SEQ ID NO: 4260115 - DNA, 25 bp, Homo sapien
tatgccctccatggcatcaatctca

SEQ ID NO: 4260116 - DNA, 25 bp, Homo sapien
gagaagatacaaatagtacagaaac

SEQ ID NO: 4260117 - DNA, 25 bp, Homo sapien
gaaatggtcagtgacagcaagggag

SEQ ID NO: 4260118 - DNA, 25 bp, Homo sapien
aggtacaaatcccaaaggcataaca

SEQ ID NO: 4260119 - DNA, 25 bp, Homo sapien
gaagtctgacatcccaagttgagaa

SEQ ID NO: 4260120 - DNA, 25 bp, Homo sapien
ggtgatcctggcactcctttgcaaa

SEQ ID NO: 4260121 - DNA, 25 bp, Homo sapien
tggcattatgctctctggatctggg

SEQ ID NO: 4260122 - DNA, 25 bp, Homo sapien
cctctcctcgtagtagaaggtgctg

SEQ ID NO: 4260123 - DNA, 25 bp, Homo sapien
gatgtgagcacagcttcccacaagg

SEQ ID NO: 4260124 - DNA, 25 bp, Homo sapien
gtgagttcgtttccagcctggaagg

SEQ ID NO: 4260125 - DNA, 25 bp, Homo sapien
tactcagcatggactatatttctct

SEQ ID NO: 4260126 - DNA, 25 bp, Homo sapien
tatttattgagcagccaaggagacc

SEQ ID NO: 4260127 - DNA, 25 bp, Homo sapien
taattttgcagtattgcccaggact

SEQ ID NO: 4260128 - DNA, 25 bp, Homo sapien
gctgcccactaatatgcattggcct

SEQ ID NO: 4260129 - DNA, 25 bp, Homo sapien
ttggccttgatccacacttcaactg

SEQ ID NO: 4260130 - DNA, 25 bp, Homo sapien
tcaactgtaatcccacggctgatgt

SEQ ID NO: 4260131 - DNA, 25 bp, Homo sapien
cccacggctgatgttatttcaaagc

SEQ ID NO: 4260132 - DNA, 25 bp, Homo sapien
taaagataactggtgctcattttca

SEQ ID NO: 4260133 - DNA, 25 bp, Homo sapien
agataactggtgctcattttcatca

SEQ ID NO: 4260134 - DNA, 25 bp, Homo sapien
cttaaagataactggtgctcatttt

SEQ ID NO: 4260135 - DNA, 25 bp, Homo sapien
aagataactggtgctcattttcatc

SEQ ID NO: 4260136 - DNA, 25 bp, Homo sapien
aaccgatcatcttcatcggccttta

SEQ ID NO: 4260137 - DNA, 25 bp, Homo sapien
gaaaccgatcatcttcatcggcctt

SEQ ID NO: 4260138 - DNA, 25 bp, Homo sapien
ccgaaaccgatcatcttcatcggcc

SEQ ID NO: 4260139 - DNA, 25 bp, Homo sapien
accgatcatcttcatcggcctttag

SEQ ID NO: 4260140 - DNA, 25 bp, Homo sapien
gagataaacaactaccgctccagag

SEQ ID NO: 4260141 - DNA, 25 bp, Homo sapien
aaacaactaccgctccagagaacag

SEQ ID NO: 4260142 - DNA, 25 bp, Homo sapien
gacggagataaacaactaccgctcc

SEQ ID NO: 4260143 - DNA, 25 bp, Homo sapien
gcagacggagataaacaactaccgc

SEQ ID NO: 4260144 - DNA, 25 bp, Homo sapien
tccgcctccatggacatgctgagaa

SEQ ID NO: 4260145 - DNA, 25 bp, Homo sapien
ctgatccatgtaatccgcctccatg

SEQ ID NO: 4260146 - DNA, 25 bp, Homo sapien
catggacatgctgagaaccttagtt

SEQ ID NO: 4260147 - DNA, 25 bp, Homo sapien
tgatccatgtaatccgcctccatgg

SEQ ID NO: 4260148 - DNA, 25 bp, Homo sapien
tgaatatatgccctcaacatttgca

SEQ ID NO: 4260149 - DNA, 25 bp, Homo sapien
taatacagcaggaaccaaacactct

SEQ ID NO: 4260150 - DNA, 25 bp, Homo sapien
catttgcataaatacatggagctcc

SEQ ID NO: 4260151 - DNA, 25 bp, Homo sapien
gctggcagttcattctatatagact

SEQ ID NO: 4260152 - DNA, 25 bp, Homo sapien
cagatgatatgacaacctgggtggc

SEQ ID NO: 4260153 - DNA, 25 bp, Homo sapien
gactggatccagttgcttatcggga

SEQ ID NO: 4260154 - DNA, 25 bp, Homo sapien
tactcaagatggaatggaagacctc

SEQ ID NO: 4260155 - DNA, 25 bp, Homo sapien
catgtcccatgaagctgactggcca

SEQ ID NO: 4260156 - DNA, 25 bp, Homo sapien
ttattaatataaagcttccctgtgt

SEQ ID NO: 4260157 - DNA, 25 bp, Homo sapien
ttcaacgcaagacctttattaatat

SEQ ID NO: 4260158 - DNA, 25 bp, Homo sapien
tttgacagttgcttaggaatattca

SEQ ID NO: 4260159 - DNA, 25 bp, Homo sapien
gatgatgcaatgacaggacgccgac

SEQ ID NO: 4260160 - DNA, 25 bp, Homo sapien
tattaactctgggcggatgcgtgct

SEQ ID NO: 4260161 - DNA, 25 bp, Homo sapien
cttattaactctgggcggatgcgtg

SEQ ID NO: 4260162 - DNA, 25 bp, Homo sapien
ttattaactctgggcggatgcgtgc

SEQ ID NO: 4260163 - DNA, 25 bp, Homo sapien
tagaatgagagacagagttagtatg

SEQ ID NO: 4260164 - DNA, 25 bp, Homo sapien
ctagaatgagagacagagttagtat

SEQ ID NO: 4260165 - DNA, 25 bp, Homo sapien
ccaaggccgatggtaatgagtcagg

SEQ ID NO: 4260166 - DNA, 25 bp, Homo sapien
tatctctgtgctgatagtagacctg

SEQ ID NO: 4260167 - DNA, 25 bp, Homo sapien
tagacctggtctactccccattttg

SEQ ID NO: 4260168 - DNA, 25 bp, Homo sapien
gaaagggctgccaatggaacagcaa

SEQ ID NO: 4260169 - DNA, 25 bp, Homo sapien
tggtcccttcctcatgggaatgagt

SEQ ID NO: 4260170 - DNA, 25 bp, Homo sapien
cacctcctggtagactttgaatgtt

SEQ ID NO: 4260171 - DNA, 25 bp, Homo sapien
tcagaattggaggtagggcctagtc

SEQ ID NO: 4260172 - DNA, 25 bp, Homo sapien
cctgaagcctcactagaagccaact

SEQ ID NO: 4260173 - DNA, 25 bp, Homo sapien
tctagaactcgttgctacccaaagg

SEQ ID NO: 4260174 - DNA, 25 bp, Homo sapien
tacccaaaggtttgctgtgtgggcc

SEQ ID NO: 4260175 - DNA, 25 bp, Homo sapien
aaacaatctggactccttaggctcc

SEQ ID NO: 4260176 - DNA, 25 bp, Homo sapien
gtgtgggcccaaggctttggtttca

SEQ ID NO: 4260177 - DNA, 25 bp, Homo sapien
ttcttctcagaatttccatcaccat

SEQ ID NO: 4260178 - DNA, 25 bp, Homo sapien
atggaagttaacattcttctcagaa

SEQ ID NO: 4260179 - DNA, 25 bp, Homo sapien
ataatggaagttaacattcttctca

SEQ ID NO: 4260180 - DNA, 25 bp, Homo sapien
attcttctcagaatttccatcacca

SEQ ID NO: 4260181 - DNA, 25 bp, Homo sapien
ctgaactggtgttttcacgaaccag

SEQ ID NO: 4260182 - DNA, 25 bp, Homo sapien
ggaagaatgcgatcaaacactttct

SEQ ID NO: 4260183 - DNA, 25 bp, Homo sapien
ctggtgttttcacgaaccaggaaga

SEQ ID NO: 4260184 - DNA, 25 bp, Homo sapien
cgaaccaggaagaatgcgatcaaac

SEQ ID NO: 4260185 - DNA, 25 bp, Homo sapien
gaaccgcttgctgtactgaaatggg

SEQ ID NO: 4260186 - DNA, 25 bp, Homo sapien
tcctctgtgtgaaggagaaccgctt

SEQ ID NO: 4260187 - DNA, 25 bp, Homo sapien
ccaccgtaaggtgaaaggccatgtg

SEQ ID NO: 4260188 - DNA, 25 bp, Homo sapien
gagctgtaaagctcatcctggagct

SEQ ID NO: 4260189 - DNA, 25 bp, Homo sapien
taagcttatgagtttatctacgccc

SEQ ID NO: 4260190 - DNA, 25 bp, Homo sapien
cacaatattgctcttgaaggcggca

SEQ ID NO: 4260191 - DNA, 25 bp, Homo sapien
gcaacagaaagccacaaacagcgtt

SEQ ID NO: 4260192 - DNA, 25 bp, Homo sapien
cttgtgcatagggtgggtcagcttt

SEQ ID NO: 4260193 - DNA, 25 bp, Homo sapien
tgaggcatcaacaggtcaagcgcgt

SEQ ID NO: 4260194 - DNA, 25 bp, Homo sapien
taaggcttgtcctactccgcatgaa

SEQ ID NO: 4260195 - DNA, 25 bp, Homo sapien
tagaaaaagctctgaggcggcacgt

SEQ ID NO: 4260196 - DNA, 25 bp, Homo sapien
tagtttcaagtacccgcattcaagg

SEQ ID NO: 4260197 - DNA, 25 bp, Homo sapien
taatcctcgaacacttccaagaaca

SEQ ID NO: 4260198 - DNA, 25 bp, Homo sapien
aatcctcgaacacttccaagaacaa

SEQ ID NO: 4260199 - DNA, 25 bp, Homo sapien
ctaatcctcgaacacttccaagaac

SEQ ID NO: 4260200 - DNA, 25 bp, Homo sapien
cgcagatctgtcaccttcatcagga

SEQ ID NO: 4260201 - DNA, 25 bp, Homo sapien
tggcaggctcctatcatccgcagat

SEQ ID NO: 4260202 - DNA, 25 bp, Homo sapien
gatatagtgttcaaaggccagcagg

SEQ ID NO: 4260203 - DNA, 25 bp, Homo sapien
tggccaaaagtgtgtcacgtggtgt

SEQ ID NO: 4260204 - DNA, 25 bp, Homo sapien
cttgagtgtgaaaggtgatgcctcc

SEQ ID NO: 4260205 - DNA, 25 bp, Homo sapien
catttatatgaagagaggcagtact

SEQ ID NO: 4260206 - DNA, 25 bp, Homo sapien
cctagggtacagaaggagaagcctg

SEQ ID NO: 4260207 - DNA, 25 bp, Homo sapien
tgagcatggatgcagcgtgaactct

SEQ ID NO: 4260208 - DNA, 25 bp, Homo sapien
gaacgcggaatagtaagacatttcc

SEQ ID NO: 4260209 - DNA, 25 bp, Homo sapien
gccaaaggaggaacgcggaatagta

SEQ ID NO: 4260210 - DNA, 25 bp, Homo sapien
agaggagaggatgagcgtggacatg

SEQ ID NO: 4260211 - DNA, 25 bp, Homo sapien
tttgaattttcactggctgcctggc

SEQ ID NO: 4260212 - DNA, 25 bp, Homo sapien
ttctgggtcatagcgcacagcagcg

SEQ ID NO: 4260213 - DNA, 25 bp, Homo sapien
caaggttaaagtctcactttctggg

SEQ ID NO: 4260214 - DNA, 25 bp, Homo sapien
atttttcagctggccccgtgtcact

SEQ ID NO: 4260215 - DNA, 25 bp, Homo sapien
gacagagacatgcccaggtcaaaga

SEQ ID NO: 4260216 - DNA, 25 bp, Homo sapien
agcctcttggcacaaagctagaggg

SEQ ID NO: 4260217 - DNA, 25 bp, Homo sapien
cctactgtttagctggcaactgggc

SEQ ID NO: 4260218 - DNA, 25 bp, Homo sapien
ctagagggttgttggcagagataca

SEQ ID NO: 4260219 - DNA, 25 bp, Homo sapien
gaagcacgtttgctcttgtagcctc

SEQ ID NO: 4260220 - DNA, 25 bp, Homo sapien
tgtgagttacacctaatatctgtct

SEQ ID NO: 4260221 - DNA, 25 bp, Homo sapien
caaccagtccaatttaggttattat

SEQ ID NO: 4260222 - DNA, 25 bp, Homo sapien
tcttggcaatactcaaccagtccaa

SEQ ID NO: 4260223 - DNA, 25 bp, Homo sapien
agagcagttacaaattccttttggg

SEQ ID NO: 4260224 - DNA, 25 bp, Homo sapien
tctgccggcgatgattttagatctt

SEQ ID NO: 4260225 - DNA, 25 bp, Homo sapien
tgcttccttaggagagcatcactca

SEQ ID NO: 4260226 - DNA, 25 bp, Homo sapien
gagatgcagggatactcccacaggt

SEQ ID NO: 4260227 - DNA, 25 bp, Homo sapien
ttgactggcaaagacgacagggccc

SEQ ID NO: 4260228 - DNA, 25 bp, Homo sapien
ggcattgactattggtgcttgtcca

SEQ ID NO: 4260229 - DNA, 25 bp, Homo sapien
actttttggcaaaatccaccactct

SEQ ID NO: 4260230 - DNA, 25 bp, Homo sapien
gctggtgtgatgatttttgtaaaat

SEQ ID NO: 4260231 - DNA, 25 bp, Homo sapien
tccaccactctggtaattgctggtg

SEQ ID NO: 4260232 - DNA, 25 bp, Homo sapien
ggttctgacagaagcctaatggcaa

SEQ ID NO: 4260233 - DNA, 25 bp, Homo sapien
catttcatgtcagccctacaaggag

SEQ ID NO: 4260234 - DNA, 25 bp, Homo sapien
tgaccacacagcacgaagatatttg

SEQ ID NO: 4260235 - DNA, 25 bp, Homo sapien
gcctttaagtgaacagtgcagacct

SEQ ID NO: 4260236 - DNA, 25 bp, Homo sapien
gatgagctcccattcctcgtctgtg

SEQ ID NO: 4260237 - DNA, 25 bp, Homo sapien
ttcggtgacagttttgatgagctcc

SEQ ID NO: 4260238 - DNA, 25 bp, Homo sapien
gcttgtgcccgatggacttctgcag

SEQ ID NO: 4260239 - DNA, 25 bp, Homo sapien
gctgccttgggcgttggtcgccaca

SEQ ID NO: 4260240 - DNA, 25 bp, Homo sapien
agcaaactgccattgactagtcttg

SEQ ID NO: 4260241 - DNA, 25 bp, Homo sapien
tctagagccaaactccccatgaccg

SEQ ID NO: 4260242 - DNA, 25 bp, Homo sapien
ttgtccaacatggtctctagagcca

SEQ ID NO: 4260243 - DNA, 25 bp, Homo sapien
gtccccagagaacctagacactgcg

SEQ ID NO: 4260244 - DNA, 25 bp, Homo sapien
gccagtcatccgaattcactctctg

SEQ ID NO: 4260245 - DNA, 25 bp, Homo sapien
ccatactacccacaagatcacagag

SEQ ID NO: 4260246 - DNA, 25 bp, Homo sapien
tgtccagccagtcatccgaattcac

SEQ ID NO: 4260247 - DNA, 25 bp, Homo sapien
gaggtaaaatccatactacccacaa

SEQ ID NO: 4260248 - DNA, 25 bp, Homo sapien
ggtgtaaatccctcgcacagtgtgg

SEQ ID NO: 4260249 - DNA, 25 bp, Homo sapien
gaggctctaccccatgtgaacactg

SEQ ID NO: 4260250 - DNA, 25 bp, Homo sapien
taatctcgccaccatatgctgtagc

SEQ ID NO: 4260251 - DNA, 25 bp, Homo sapien
gaaaactgggtaggacgacttcagc

SEQ ID NO: 4260252 - DNA, 25 bp, Homo sapien
tcctggcactgatttcgcgtgactt

SEQ ID NO: 4260253 - DNA, 25 bp, Homo sapien
gatgcatttcttaaagcgacattcc

SEQ ID NO: 4260254 - DNA, 25 bp, Homo sapien
cgcgtgactttgtctatgacacatt

SEQ ID NO: 4260255 - DNA, 25 bp, Homo sapien
tgttgccatgccaacatagatgcat

SEQ ID NO: 4260256 - DNA, 25 bp, Homo sapien
tggagctgggctaagctctgtgctt

SEQ ID NO: 4260257 - DNA, 25 bp, Homo sapien
ggagctgggctaagctctgtgcttg

SEQ ID NO: 4260258 - DNA, 25 bp, Homo sapien
gagctgggctaagctctgtgcttgt

SEQ ID NO: 4260259 - DNA, 25 bp, Homo sapien
taaacttaacattgcattctggaag

SEQ ID NO: 4260260 - DNA, 25 bp, Homo sapien
gccttcacacgtgatacagcggtag

SEQ ID NO: 4260261 - DNA, 25 bp, Homo sapien
cttcacacgtgatacagcggtagtg

SEQ ID NO: 4260262 - DNA, 25 bp, Homo sapien
acacgtgatacagcggtagtgatac

SEQ ID NO: 4260263 - DNA, 25 bp, Homo sapien
tgcagccttcacacgtgatacagcg

SEQ ID NO: 4260264 - DNA, 25 bp, Homo sapien
gagctcgtccttgtctaagtaactg

SEQ ID NO: 4260265 - DNA, 25 bp, Homo sapien
ttgtcaccacacactacacagagct

SEQ ID NO: 4260266 - DNA, 25 bp, Homo sapien
cacagagctcgtccttgtctaagta

SEQ ID NO: 4260267 - DNA, 25 bp, Homo sapien
tggctttgtcaccacacactacaca

SEQ ID NO: 4260268 - DNA, 25 bp, Homo sapien
tacaggcaggactaaaaccccagtc

SEQ ID NO: 4260269 - DNA, 25 bp, Homo sapien
tgatatgcaatccaacaacactgga

SEQ ID NO: 4260270 - DNA, 25 bp, Homo sapien
aggtcccgggagatgacgaagtcct

SEQ ID NO: 4260271 - DNA, 25 bp, Homo sapien
tctagccctccagtgtaatatgctg

SEQ ID NO: 4260272 - DNA, 25 bp, Homo sapien
acaatggctcgccaggctttgaaca

SEQ ID NO: 4260273 - DNA, 25 bp, Homo sapien
aatggctcgccaggctttgaacact

SEQ ID NO: 4260274 - DNA, 25 bp, Homo sapien
agcagacaatggctcgccaggcttt

SEQ ID NO: 4260275 - DNA, 25 bp, Homo sapien
cagacaatggctcgccaggctttga

SEQ ID NO: 4260276 - DNA, 25 bp, Homo sapien
ctcccggcctgagaacatatttctt

SEQ ID NO: 4260277 - DNA, 25 bp, Homo sapien
agtgagaagtattcttatcatatat

SEQ ID NO: 4260278 - DNA, 25 bp, Homo sapien
aattaagcagccattgtaagacagc

SEQ ID NO: 4260279 - DNA, 25 bp, Homo sapien
tatgtaagcattatgtgtctttgtt

SEQ ID NO: 4260280 - DNA, 25 bp, Homo sapien
gagattgatgctttcgtagtgctta

SEQ ID NO: 4260281 - DNA, 25 bp, Homo sapien
gagctatactgctctccctgcaggt

SEQ ID NO: 4260282 - DNA, 25 bp, Homo sapien
tcacatggatgtgcgctttagggag

SEQ ID NO: 4260283 - DNA, 25 bp, Homo sapien
tgtcatcagaacaccgtcactgtcg

SEQ ID NO: 4260284 - DNA, 25 bp, Homo sapien
gttatgtaggttcaggtgtactcca

SEQ ID NO: 4260285 - DNA, 25 bp, Homo sapien
aaatgagctatgacacatatgtatg

SEQ ID NO: 4260286 - DNA, 25 bp, Homo sapien
ccattttgacagacgtcaatatatg

SEQ ID NO: 4260287 - DNA, 25 bp, Homo sapien
ccaaatcccaacaatggaaatgagc

SEQ ID NO: 4260288 - DNA, 25 bp, Homo sapien
aatgctttggactcctactgttagc

SEQ ID NO: 4260289 - DNA, 25 bp, Homo sapien
cattcctctgtaagcctgccaggcg

SEQ ID NO: 4260290 - DNA, 25 bp, Homo sapien
gccaggcgtctgaatccatttgctc

SEQ ID NO: 4260291 - DNA, 25 bp, Homo sapien
cattgtgagtaagggcaatgcatgc

SEQ ID NO: 4260292 - DNA, 25 bp, Homo sapien
tcttctgagtgaatgatagggttct

SEQ ID NO: 4260293 - DNA, 25 bp, Homo sapien
tgattcaatgaactgacatctgact

SEQ ID NO: 4260294 - DNA, 25 bp, Homo sapien
cactggccccgtgaggacttagcat

SEQ ID NO: 4260295 - DNA, 25 bp, Homo sapien
gcacaacaaataacctgtctgccaa

SEQ ID NO: 4260296 - DNA, 25 bp, Homo sapien
ttactgggatttactcgaagacttg

SEQ ID NO: 4260297 - DNA, 25 bp, Homo sapien
ttgccttaacgagacactactgatg

SEQ ID NO: 4260298 - DNA, 25 bp, Homo sapien
tggataaacatgttgggtacaacct

SEQ ID NO: 4260299 - DNA, 25 bp, Homo sapien
tccaattggaaaatgaggcctaccc

SEQ ID NO: 4260300 - DNA, 25 bp, Homo sapien
cagatcctagcaaatcaacattagt

SEQ ID NO: 4260301 - DNA, 25 bp, Homo sapien
ttttacatcttacagtttgacatgg

SEQ ID NO: 4260302 - DNA, 25 bp, Homo sapien
caaatgagtttttaatctgaacctg

SEQ ID NO: 4260303 - DNA, 25 bp, Homo sapien
tgaacctgaactagagagaattatc

SEQ ID NO: 4260304 - DNA, 25 bp, Homo sapien
tacgcgtaataatcagtggactgca

SEQ ID NO: 4260305 - DNA, 25 bp, Homo sapien
ccggcagctgggtgcacttcatata

SEQ ID NO: 4260306 - DNA, 25 bp, Homo sapien
gaatacgatggcgactgcacttgag

SEQ ID NO: 4260307 - DNA, 25 bp, Homo sapien
gactgcatgtagcaattgctgccgg

SEQ ID NO: 4260308 - DNA, 25 bp, Homo sapien
cacagtctacgcatgcattctccag

SEQ ID NO: 4260309 - DNA, 25 bp, Homo sapien
tgagagctgggcatatacgcagaga

SEQ ID NO: 4260310 - DNA, 25 bp, Homo sapien
tactttgtaatagcacctgatgtgc

SEQ ID NO: 4260311 - DNA, 25 bp, Homo sapien
tacatacacatgaaacgcgaaggga

SEQ ID NO: 4260312 - DNA, 25 bp, Homo sapien
catgagcatgtgaccttgttggtat

SEQ ID NO: 4260313 - DNA, 25 bp, Homo sapien
tttacatttggcttcctgctggtcc

SEQ ID NO: 4260314 - DNA, 25 bp, Homo sapien
gctcggcctcaggtggttacgttta

SEQ ID NO: 4260315 - DNA, 25 bp, Homo sapien
ggattccttccgtttcttaggcagc

SEQ ID NO: 4260316 - DNA, 25 bp, Homo sapien
ttttggcggaaaccaaagaggtgca

SEQ ID NO: 4260317 - DNA, 25 bp, Homo sapien
agcacatctaatacattttggcgga

SEQ ID NO: 4260318 - DNA, 25 bp, Homo sapien
ctttcttggattgttgaggtctgga

SEQ ID NO: 4260319 - DNA, 25 bp, Homo sapien
ggtgcacaaaaactttttgaccatg

SEQ ID NO: 4260320 - DNA, 25 bp, Homo sapien
taagtggtcccataatacagtccca

SEQ ID NO: 4260321 - DNA, 25 bp, Homo sapien
gtcccataatacagtcccaagagat

SEQ ID NO: 4260322 - DNA, 25 bp, Homo sapien
ctaagtggtcccataatacagtccc

SEQ ID NO: 4260323 - DNA, 25 bp, Homo sapien
ccataatacagtcccaagagatgat

SEQ ID NO: 4260324 - DNA, 25 bp, Homo sapien
gatgaacccattgcagatacctgtt

SEQ ID NO: 4260325 - DNA, 25 bp, Homo sapien
gagcatgtcgtgtgtaagataacaa

SEQ ID NO: 4260326 - DNA, 25 bp, Homo sapien
agggcagtagcttcttttacttaca

SEQ ID NO: 4260327 - DNA, 25 bp, Homo sapien
agcatagaatgatcgcttcaaagga

SEQ ID NO: 4260328 - DNA, 25 bp, Homo sapien
cactatcagaggctacctttggcat

SEQ ID NO: 4260329 - DNA, 25 bp, Homo sapien
ggcatgaggtcgctgcatctccagg

SEQ ID NO: 4260330 - DNA, 25 bp, Homo sapien
gtactcaaaactcaaagcctccctg

SEQ ID NO: 4260331 - DNA, 25 bp, Homo sapien
ctagactgcaatgccactatcagag

SEQ ID NO: 4260332 - DNA, 25 bp, Homo sapien
tctgtgtgcatctcaacgaaaactg

SEQ ID NO: 4260333 - DNA, 25 bp, Homo sapien
catcctttggcgtgacagacactgt

SEQ ID NO: 4260334 - DNA, 25 bp, Homo sapien
tgtgccctgtgtaagtatttccctg

SEQ ID NO: 4260335 - DNA, 25 bp, Homo sapien
gaagttagatgaaccagggccttga

SEQ ID NO: 4260336 - DNA, 25 bp, Homo sapien
aattcacttaggatgcttacagcag

SEQ ID NO: 4260337 - DNA, 25 bp, Homo sapien
tgctcctggttaaaatagcctctga

SEQ ID NO: 4260338 - DNA, 25 bp, Homo sapien
caacagaatgtaagggctcttccat

SEQ ID NO: 4260339 - DNA, 25 bp, Homo sapien
tgatactccagcagattcaacagag

SEQ ID NO: 4260340 - DNA, 25 bp, Homo sapien
gaagagaaatgtagatgaagtacac

SEQ ID NO: 4260341 - DNA, 25 bp, Homo sapien
catgggacaccatacattggaagag

SEQ ID NO: 4260342 - DNA, 25 bp, Homo sapien
tatttgaagaaaaggacgcctagta

SEQ ID NO: 4260343 - DNA, 25 bp, Homo sapien
gataatgggctaataaaaatctggt

SEQ ID NO: 4260344 - DNA, 25 bp, Homo sapien
tcatttttcaacgtgctgcgcctct

SEQ ID NO: 4260345 - DNA, 25 bp, Homo sapien
tattgagctagtccaagtggtctgg

SEQ ID NO: 4260346 - DNA, 25 bp, Homo sapien
tctgggcacttgagacactctggtc

SEQ ID NO: 4260347 - DNA, 25 bp, Homo sapien
tactagcttccagtcgtgttctcgg

SEQ ID NO: 4260348 - DNA, 25 bp, Homo sapien
acacgagatgacgagctgttggcat

SEQ ID NO: 4260349 - DNA, 25 bp, Homo sapien
tgaaaaacacgagatgacgagctgt

SEQ ID NO: 4260350 - DNA, 25 bp, Homo sapien
ggttgaaaaacacgagatgacgagc

SEQ ID NO: 4260351 - DNA, 25 bp, Homo sapien
aagggttgaaaaacacgagatgacg

SEQ ID NO: 4260352 - DNA, 25 bp, Homo sapien
gaaggcaagttgtttctcaattctt

SEQ ID NO: 4260353 - DNA, 25 bp, Homo sapien
tggaaggcaagttgtttctcaattc

SEQ ID NO: 4260354 - DNA, 25 bp, Homo sapien
ggcaagttgtttctcaattcttttg

SEQ ID NO: 4260355 - DNA, 25 bp, Homo sapien
ttttggaaggcaagttgtttctcaa

SEQ ID NO: 4260356 - DNA, 25 bp, Homo sapien
gagagtggcaactctgtttttacca

SEQ ID NO: 4260357 - DNA, 25 bp, Homo sapien
gcaactctgtttttaccaccttcta

SEQ ID NO: 4260358 - DNA, 25 bp, Homo sapien
tggccacaccgagagtggcaactct

SEQ ID NO: 4260359 - DNA, 25 bp, Homo sapien
tttaccaccttctacctctgatggc

SEQ ID NO: 4260360 - DNA, 25 bp, Homo sapien
gtggttggcaataatggtcttcagt

SEQ ID NO: 4260361 - DNA, 25 bp, Homo sapien
gtaatttcctatgtctaatgcccat

SEQ ID NO: 4260362 - DNA, 25 bp, Homo sapien
ggttggcaataatggtcttcagtaa

SEQ ID NO: 4260363 - DNA, 25 bp, Homo sapien
aatggtcttcagtaatttcctatgt

SEQ ID NO: 4260364 - DNA, 25 bp, Homo sapien
ttatgtaggtctctgcaggaactct

SEQ ID NO: 4260365 - DNA, 25 bp, Homo sapien
tgcctgctcgcttccatttatgtag

SEQ ID NO: 4260366 - DNA, 25 bp, Homo sapien
gcttccatttatgtaggtctctgca

SEQ ID NO: 4260367 - DNA, 25 bp, Homo sapien
gctgcagtgcctgctcgcttccatt

SEQ ID NO: 4260368 - DNA, 25 bp, Homo sapien
cgtggacctatatttggatggcaca

SEQ ID NO: 4260369 - DNA, 25 bp, Homo sapien
tatttggatggcacactgtgtaggc

SEQ ID NO: 4260370 - DNA, 25 bp, Homo sapien
tctctctggactgccgtggacctat

SEQ ID NO: 4260371 - DNA, 25 bp, Homo sapien
ggatggcacactgtgtaggctttta

SEQ ID NO: 4260372 - DNA, 25 bp, Homo sapien
tgtttttccgaccctcatctaggga

SEQ ID NO: 4260373 - DNA, 25 bp, Homo sapien
tctttgtttttccgaccctcatcta

SEQ ID NO: 4260374 - DNA, 25 bp, Homo sapien
ttttccgaccctcatctagggacat

SEQ ID NO: 4260375 - DNA, 25 bp, Homo sapien
cactggagtgacttcatgaagtctt

SEQ ID NO: 4260376 - DNA, 25 bp, Homo sapien
cccaaagaccaaggctgcatcagtg

SEQ ID NO: 4260377 - DNA, 25 bp, Homo sapien
caaagaccaaggctgcatcagtggc

SEQ ID NO: 4260378 - DNA, 25 bp, Homo sapien
ctgcatcagtggctgagatgccgac

SEQ ID NO: 4260379 - DNA, 25 bp, Homo sapien
gcatcagtggctgagatgccgacat

SEQ ID NO: 4260380 - DNA, 25 bp, Homo sapien
ggagcgaagggtccagattcctgac

SEQ ID NO: 4260381 - DNA, 25 bp, Homo sapien
gagcgaagggtccagattcctgact

SEQ ID NO: 4260382 - DNA, 25 bp, Homo sapien
gtgtgtacagccgactcatcagggt

SEQ ID NO: 4260383 - DNA, 25 bp, Homo sapien
cagccgactcatcagggttttagcc

SEQ ID NO: 4260384 - DNA, 25 bp, Homo sapien
gattgactgtcctgagtttgggaga

SEQ ID NO: 4260385 - DNA, 25 bp, Homo sapien
gcctcccagctctatggcactgtgg

SEQ ID NO: 4260386 - DNA, 25 bp, Homo sapien
tacacctgtaatcagtcctaaggcc

SEQ ID NO: 4260387 - DNA, 25 bp, Homo sapien
tgcctcagaggctcaccactttgtg

SEQ ID NO: 4260388 - DNA, 25 bp, Homo sapien
aggttagtaatcattctggatccct

SEQ ID NO: 4260389 - DNA, 25 bp, Homo sapien
tagtaatcattctggatcccttttt

SEQ ID NO: 4260390 - DNA, 25 bp, Homo sapien
gttagtaatcattctggatcccttt

SEQ ID NO: 4260391 - DNA, 25 bp, Homo sapien
ggatcccttttttcactgacatctc

SEQ ID NO: 4260392 - DNA, 25 bp, Homo sapien
tcgtcaagggtctctaccacaagcc

SEQ ID NO: 4260393 - DNA, 25 bp, Homo sapien
attcttgcctctgattagctcgtca

SEQ ID NO: 4260394 - DNA, 25 bp, Homo sapien
gggtctctaccacaagccctttgtc

SEQ ID NO: 4260395 - DNA, 25 bp, Homo sapien
gattagctcgtcaagggtctctacc

SEQ ID NO: 4260396 - DNA, 25 bp, Homo sapien
tgtaggtgagagcacaggtcgtacc

SEQ ID NO: 4260397 - DNA, 25 bp, Homo sapien
cagtattgcgggtcctgactctgtt

SEQ ID NO: 4260398 - DNA, 25 bp, Homo sapien
acaggtcgtacctacagtattgcgg

SEQ ID NO: 4260399 - DNA, 25 bp, Homo sapien
actctgttgctcctcttagaaactg

SEQ ID NO: 4260400 - DNA, 25 bp, Homo sapien
gttttcacatgctaccactcctgaa

SEQ ID NO: 4260401 - DNA, 25 bp, Homo sapien
ttttcacatgctaccactcctgaat

SEQ ID NO: 4260402 - DNA, 25 bp, Homo sapien
tcacatgctaccactcctgaatatt

SEQ ID NO: 4260403 - DNA, 25 bp, Homo sapien
ttcacatgctaccactcctgaatat

SEQ ID NO: 4260404 - DNA, 25 bp, Homo sapien
gggccatgagagaaggaaaggtcat

SEQ ID NO: 4260405 - DNA, 25 bp, Homo sapien
tagactggggccatgagagaaggaa

SEQ ID NO: 4260406 - DNA, 25 bp, Homo sapien
tctcttcagagtagactggggccat

SEQ ID NO: 4260407 - DNA, 25 bp, Homo sapien
ctgtctcttcagagtagactggggc

SEQ ID NO: 4260408 - DNA, 25 bp, Homo sapien
cactgctgcctactgagaacttgat

SEQ ID NO: 4260409 - DNA, 25 bp, Homo sapien
catgcactggttgtacggttgcagt

SEQ ID NO: 4260410 - DNA, 25 bp, Homo sapien
cggttgcagtttttgaaaagggcat

SEQ ID NO: 4260411 - DNA, 25 bp, Homo sapien
gatttacttcatgcactggttgtac

SEQ ID NO: 4260412 - DNA, 25 bp, Homo sapien
tggtaacaatcgtagctgtcaacgt

SEQ ID NO: 4260413 - DNA, 25 bp, Homo sapien
tatcttacactggtaacaatcgtag

SEQ ID NO: 4260414 - DNA, 25 bp, Homo sapien
ttccagtaatgatttaggaggaggg

SEQ ID NO: 4260415 - DNA, 25 bp, Homo sapien
cgtagctgtcaacgttgccatagaa

SEQ ID NO: 4260416 - DNA, 25 bp, Homo sapien
aaaactctgtatttcatcctcacat

SEQ ID NO: 4260417 - DNA, 25 bp, Homo sapien
tatctcctggtaggcttcaagtacg

SEQ ID NO: 4260418 - DNA, 25 bp, Homo sapien
gcaatgagttcttgttctactttta

SEQ ID NO: 4260419 - DNA, 25 bp, Homo sapien
ccttgtaagacagtaattataacac

SEQ ID NO: 4260420 - DNA, 25 bp, Homo sapien
aataacaggctttcagtcttcaaga

SEQ ID NO: 4260421 - DNA, 25 bp, Homo sapien
tacttccaacagtctactgctaacc

SEQ ID NO: 4260422 - DNA, 25 bp, Homo sapien
tgctaacctctttgaataacaggct

SEQ ID NO: 4260423 - DNA, 25 bp, Homo sapien
ggctttcagtcttcaagacgtttgt

SEQ ID NO: 4260424 - DNA, 25 bp, Homo sapien
gaaatataaaatgctggagtttgcc

SEQ ID NO: 4260425 - DNA, 25 bp, Homo sapien
tataaaatgctggagtttgcctctc

SEQ ID NO: 4260426 - DNA, 25 bp, Homo sapien
ctgggggcagatgaaatataaaatg

SEQ ID NO: 4260427 - DNA, 25 bp, Homo sapien
taaaatgctggagtttgcctctctg

SEQ ID NO: 4260428 - DNA, 25 bp, Homo sapien
tccaaagttatgaaacacagctaaa

SEQ ID NO: 4260429 - DNA, 25 bp, Homo sapien
aaagagaatatgttccatccaaagt

SEQ ID NO: 4260430 - DNA, 25 bp, Homo sapien
tcattactgaagaactaagacgtta

SEQ ID NO: 4260431 - DNA, 25 bp, Homo sapien
tataatagctgtaagattcatgaga

SEQ ID NO: 4260432 - DNA, 25 bp, Homo sapien
cacacagcctagacacttactcacc

SEQ ID NO: 4260433 - DNA, 25 bp, Homo sapien
ttactcacccaaaatgtaaatgagg

SEQ ID NO: 4260434 - DNA, 25 bp, Homo sapien
ttaattgggtggtgtctcaagcaga

SEQ ID NO: 4260435 - DNA, 25 bp, Homo sapien
caagcagatatctatggtcatcttt

SEQ ID NO: 4260436 - DNA, 25 bp, Homo sapien
tacgtatacgcccacatttgtgtgg

SEQ ID NO: 4260437 - DNA, 25 bp, Homo sapien
tcccagaggtccttgaaatcaaacc

SEQ ID NO: 4260438 - DNA, 25 bp, Homo sapien
cattacataaaaccgagctctcctg

SEQ ID NO: 4260439 - DNA, 25 bp, Homo sapien
tgagatacaaaaggttccttcccag

SEQ ID NO: 4260440 - DNA, 25 bp, Homo sapien
tatgtgctgaactcctcaacctggc

SEQ ID NO: 4260441 - DNA, 25 bp, Homo sapien
cactcgggaaatcattgtctgcacc

SEQ ID NO: 4260442 - DNA, 25 bp, Homo sapien
aaatacctgggtgaatggtgccgcc

SEQ ID NO: 4260443 - DNA, 25 bp, Homo sapien
cattccttgaaggtgagggacccct

SEQ ID NO: 4260444 - DNA, 25 bp, Homo sapien
ctgggcttttaggacctgccgacat

SEQ ID NO: 4260445 - DNA, 25 bp, Homo sapien
tctgggcttttaggacctgccgaca

SEQ ID NO: 4260446 - DNA, 25 bp, Homo sapien
gaaaataactgctggtcaaccacca

SEQ ID NO: 4260447 - DNA, 25 bp, Homo sapien
caatgggctactacagagtcatgaa

SEQ ID NO: 4260448 - DNA, 25 bp, Homo sapien
ttttgaaagtgctccatgtgacagc

SEQ ID NO: 4260449 - DNA, 25 bp, Homo sapien
gaagctgtctgcatgccaaggcaat

SEQ ID NO: 4260450 - DNA, 25 bp, Homo sapien
gttgtaacactcactcaggtgtcca

SEQ ID NO: 4260451 - DNA, 25 bp, Homo sapien
gatgccccccttctcgttgtaacac

SEQ ID NO: 4260452 - DNA, 25 bp, Homo sapien
ccttctcgttgtaacactcactcag

SEQ ID NO: 4260453 - DNA, 25 bp, Homo sapien
tctcttcaaggacctttgctatgag

SEQ ID NO: 4260454 - DNA, 25 bp, Homo sapien
tgcatttgcaatcttggacttgagg

SEQ ID NO: 4260455 - DNA, 25 bp, Homo sapien
gcatttgcaatcttggacttgaggc

SEQ ID NO: 4260456 - DNA, 25 bp, Homo sapien
catcttggggcatcacaatctctct

SEQ ID NO: 4260457 - DNA, 25 bp, Homo sapien
tggcccctcactaggataattaaaa

SEQ ID NO: 4260458 - DNA, 25 bp, Homo sapien
ctaagtcttttagaggaactcctga

SEQ ID NO: 4260459 - DNA, 25 bp, Homo sapien
gtctgcacatcttggggcatcacaa

SEQ ID NO: 4260460 - DNA, 25 bp, Homo sapien
tctccgtacttgaagggcctccagt

SEQ ID NO: 4260461 - DNA, 25 bp, Homo sapien
tgctaggtgtctccgcaatgttccc

SEQ ID NO: 4260462 - DNA, 25 bp, Homo sapien
cctccagtagctgcctaattgtgac

SEQ ID NO: 4260463 - DNA, 25 bp, Homo sapien
taattgtgaccaagtctgctaggtg

SEQ ID NO: 4260464 - DNA, 25 bp, Homo sapien
ttcttgccgtttcctaacgccgtca

SEQ ID NO: 4260465 - DNA, 25 bp, Homo sapien
cctaacgccgtcatcatttcctttt

SEQ ID NO: 4260466 - DNA, 25 bp, Homo sapien
ctaaaacgcagaattggcccctggg

SEQ ID NO: 4260467 - DNA, 25 bp, Homo sapien
agtcccatttcgctcatcaggctct

SEQ ID NO: 4260468 - DNA, 25 bp, Homo sapien
gaacttggcacccacgcaggacagc

SEQ ID NO: 4260469 - DNA, 25 bp, Homo sapien
catgtgtggaacttggcacccacgc

SEQ ID NO: 4260470 - DNA, 25 bp, Homo sapien
tgtggaacttggcacccacgcagga

SEQ ID NO: 4260471 - DNA, 25 bp, Homo sapien
tgtgtggaacttggcacccacgcag

SEQ ID NO: 4260472 - DNA, 25 bp, Homo sapien
tataagacagcccaaggaagatgag

SEQ ID NO: 4260473 - DNA, 25 bp, Homo sapien
ggaaacccctaagctatcgagatga

SEQ ID NO: 4260474 - DNA, 25 bp, Homo sapien
gaagatgagcagagtcacctagctg

SEQ ID NO: 4260475 - DNA, 25 bp, Homo sapien
gaatgaggcatccagcaggaaaccc

SEQ ID NO: 4260476 - DNA, 25 bp, Homo sapien
tgacatcttggaggccagccatgac

SEQ ID NO: 4260477 - DNA, 25 bp, Homo sapien
tgaagcggctgggaataacaataag

SEQ ID NO: 4260478 - DNA, 25 bp, Homo sapien
cagacctcgatgagccctctatgaa

SEQ ID NO: 4260479 - DNA, 25 bp, Homo sapien
tgctggcatgacactatcataggcc

SEQ ID NO: 4260480 - DNA, 25 bp, Homo sapien
tcaacatttacaagggcatccaggg

SEQ ID NO: 4260481 - DNA, 25 bp, Homo sapien
tttgccataaaggagaaagtactcc

SEQ ID NO: 4260482 - DNA, 25 bp, Homo sapien
ccttgagcactcaaagaaatttgcc

SEQ ID NO: 4260483 - DNA, 25 bp, Homo sapien
ctttaagaagtgtgccccttgagca

SEQ ID NO: 4260484 - DNA, 25 bp, Homo sapien
tcctgctcatctttaaacccagcaa

SEQ ID NO: 4260485 - DNA, 25 bp, Homo sapien
tcaaactccttaatgtggtctctaa

SEQ ID NO: 4260486 - DNA, 25 bp, Homo sapien
agacagcttcatcaaatcctcaatg

SEQ ID NO: 4260487 - DNA, 25 bp, Homo sapien
agtgttctcctagccctcaagacag

SEQ ID NO: 4260488 - DNA, 25 bp, Homo sapien
aagtagattagttgttgcccagagc

SEQ ID NO: 4260489 - DNA, 25 bp, Homo sapien
catggtatgacatggataacctttg

SEQ ID NO: 4260490 - DNA, 25 bp, Homo sapien
caggcaaaggatctggaatattatt

SEQ ID NO: 4260491 - DNA, 25 bp, Homo sapien
gcattccaggaggaaatataaaacg

SEQ ID NO: 4260492 - DNA, 25 bp, Homo sapien
gagatcctgagaggtcttacttagt

SEQ ID NO: 4260493 - DNA, 25 bp, Homo sapien
gatggaagcctcctaggtggaatgt

SEQ ID NO: 4260494 - DNA, 25 bp, Homo sapien
cagctcctaagcagagatggaagcc

SEQ ID NO: 4260495 - DNA, 25 bp, Homo sapien
tggagtctctccctcaagagttagg

SEQ ID NO: 4260496 - DNA, 25 bp, Homo sapien
ttgtcagcatcagtgggaaataaga

SEQ ID NO: 4260497 - DNA, 25 bp, Homo sapien
cagactagacaatctgttcagataa

SEQ ID NO: 4260498 - DNA, 25 bp, Homo sapien
tcagataagcatttgacctcaaaaa

SEQ ID NO: 4260499 - DNA, 25 bp, Homo sapien
gcacaactttggttaaatcattact

SEQ ID NO: 4260500 - DNA, 25 bp, Homo sapien
tagagttaggcgcatttgaaggcta

SEQ ID NO: 4260501 - DNA, 25 bp, Homo sapien
gatttcccagtgaggacatttgcct

SEQ ID NO: 4260502 - DNA, 25 bp, Homo sapien
catttaagcagcagattaccaggca

SEQ ID NO: 4260503 - DNA, 25 bp, Homo sapien
aaggctataggagctcttcagagtc

SEQ ID NO: 4260504 - DNA, 25 bp, Homo sapien
gaagaaccgaactgcaaaccaatag

SEQ ID NO: 4260505 - DNA, 25 bp, Homo sapien
tgaagcacaaaagaccacggaagag

SEQ ID NO: 4260506 - DNA, 25 bp, Homo sapien
gattctttcagtccactcagtaggg

SEQ ID NO: 4260507 - DNA, 25 bp, Homo sapien
tccacactcggaataggaaggttct

SEQ ID NO: 4260508 - DNA, 25 bp, Homo sapien
tattaatgaacacccatgagtgcag

SEQ ID NO: 4260509 - DNA, 25 bp, Homo sapien
gcaagcattgccaactattctgtaa

SEQ ID NO: 4260510 - DNA, 25 bp, Homo sapien
ttgagagcagtctgtcagcaagcat

SEQ ID NO: 4260511 - DNA, 25 bp, Homo sapien
taatttacatcacagtgccaccact

SEQ ID NO: 4260512 - DNA, 25 bp, Homo sapien
ttgggcagaattgagggtaccctca

SEQ ID NO: 4260513 - DNA, 25 bp, Homo sapien
gctggctccgtgttcagtatgcaca

SEQ ID NO: 4260514 - DNA, 25 bp, Homo sapien
tattttcaaactaccacctggagag

SEQ ID NO: 4260515 - DNA, 25 bp, Homo sapien
tcaactacaggcacactttggagat

SEQ ID NO: 4260516 - DNA, 25 bp, Homo sapien
gttaatgaatgtcctttgggcagcc

SEQ ID NO: 4260517 - DNA, 25 bp, Homo sapien
gcttgcatttgaacactggccaata

SEQ ID NO: 4260518 - DNA, 25 bp, Homo sapien
gctatttggacatctcattcaggaa

SEQ ID NO: 4260519 - DNA, 25 bp, Homo sapien
agtttgtatcatttacggaaccgca

SEQ ID NO: 4260520 - DNA, 25 bp, Homo sapien
caacatcgggtcagtagatctctca

SEQ ID NO: 4260521 - DNA, 25 bp, Homo sapien
gcaagggtcctaacgcaggatacgt

SEQ ID NO: 4260522 - DNA, 25 bp, Homo sapien
cagtgacaccggcaccatcataatc

SEQ ID NO: 4260523 - DNA, 25 bp, Homo sapien
caggatacgtacagcacacacaagg

SEQ ID NO: 4260524 - DNA, 25 bp, Homo sapien
gagcaggaggtgtgtcagaatcaac

SEQ ID NO: 4260525 - DNA, 25 bp, Homo sapien
cctaccccatgagggcgaagatcat

SEQ ID NO: 4260526 - DNA, 25 bp, Homo sapien
cagaatcaaccggagaaaatgttcc

SEQ ID NO: 4260527 - DNA, 25 bp, Homo sapien
gagtagaatattggcccacggagca

SEQ ID NO: 4260528 - DNA, 25 bp, Homo sapien
tggttggtcaaaacatcaggaaagt

SEQ ID NO: 4260529 - DNA, 25 bp, Homo sapien
tattactcagcacgtacctgctggg

SEQ ID NO: 4260530 - DNA, 25 bp, Homo sapien
ttctggttcatctgaggacacgcgg

SEQ ID NO: 4260531 - DNA, 25 bp, Homo sapien
ggacacgcggttgctcattttaaaa

SEQ ID NO: 4260532 - DNA, 25 bp, Homo sapien
ggatcattaacttggacaactgacc

SEQ ID NO: 4260533 - DNA, 25 bp, Homo sapien
cttttgcaaaccctgagggatcatt

SEQ ID NO: 4260534 - DNA, 25 bp, Homo sapien
tgagggatcattaacttggacaact

SEQ ID NO: 4260535 - DNA, 25 bp, Homo sapien
ttttgcaaaccctgagggatcatta

SEQ ID NO: 4260536 - DNA, 25 bp, Homo sapien
tcactacacagaatggaagaccagc

SEQ ID NO: 4260537 - DNA, 25 bp, Homo sapien
taagcatggaatgtgtgcaacacac

SEQ ID NO: 4260538 - DNA, 25 bp, Homo sapien
caactggcacccacttaggatgtgt

SEQ ID NO: 4260539 - DNA, 25 bp, Homo sapien
ggatacaggcgatcaacaagcatca

SEQ ID NO: 4260540 - DNA, 25 bp, Homo sapien
cctccgcgcggtcctctagccaaat

SEQ ID NO: 4260541 - DNA, 25 bp, Homo sapien
tccgcgcggtcctctagccaaatta

SEQ ID NO: 4260542 - DNA, 25 bp, Homo sapien
tgcctccgcgcggtcctctagccaa

SEQ ID NO: 4260543 - DNA, 25 bp, Homo sapien
ccgcgcggtcctctagccaaattac

SEQ ID NO: 4260544 - DNA, 25 bp, Homo sapien
cctgcccggggaaggtagcctgcgg

SEQ ID NO: 4260545 - DNA, 25 bp, Homo sapien
ccctggagccggttgggttgagcgc

SEQ ID NO: 4260546 - DNA, 25 bp, Homo sapien
agtgccctggagccggttgggttga

SEQ ID NO: 4260547 - DNA, 25 bp, Homo sapien
ggaaggtagcctgcgggctcttgcc

SEQ ID NO: 4260548 - DNA, 25 bp, Homo sapien
gtcgcgcgagtcctgcaaaatgtca

SEQ ID NO: 4260549 - DNA, 25 bp, Homo sapien
ttattcatgcaaagttaatccccgc

SEQ ID NO: 4260550 - DNA, 25 bp, Homo sapien
tgcaaagttaatccccgccgcgtca

SEQ ID NO: 4260551 - DNA, 25 bp, Homo sapien
cgcccgcccgaggatgtgcgccttc

SEQ ID NO: 4260552 - DNA, 25 bp, Homo sapien
ggtttggtggccgcgcgtccaccca

SEQ ID NO: 4260553 - DNA, 25 bp, Homo sapien
ttgcctgcgcgcataggtgcgggtt

SEQ ID NO: 4260554 - DNA, 25 bp, Homo sapien
ctgtgggtttggtggccgcgcgtcc

SEQ ID NO: 4260555 - DNA, 25 bp, Homo sapien
gtccacccacccgattgcctgcgcg

SEQ ID NO: 4260556 - DNA, 25 bp, Homo sapien
gaaggttctctagatttccagccag

SEQ ID NO: 4260557 - DNA, 25 bp, Homo sapien
gacgatatggatcctcagctgcctg

SEQ ID NO: 4260558 - DNA, 25 bp, Homo sapien
tggtcctcggtgagaagtccgtgct

SEQ ID NO: 4260559 - DNA, 25 bp, Homo sapien
gagaaaagctgtggcgtctacacca

SEQ ID NO: 4260560 - DNA, 25 bp, Homo sapien
tcttgtaccctaggtggagttcctc

SEQ ID NO: 4260561 - DNA, 25 bp, Homo sapien
tgtaatgtaatagtccacccatgtg

SEQ ID NO: 4260562 - DNA, 25 bp, Homo sapien
agtgtgtaaagttcagactgcctcc

SEQ ID NO: 4260563 - DNA, 25 bp, Homo sapien
tattgaaaacagttgtaggcccagg

SEQ ID NO: 4260564 - DNA, 25 bp, Homo sapien
tcgcgcgggagttcaaagcccggca

SEQ ID NO: 4260565 - DNA, 25 bp, Homo sapien
ggatgggtcccagtgtcgcgcggga

SEQ ID NO: 4260566 - DNA, 25 bp, Homo sapien
tcccagtgtcgcgcgggagttcaaa

SEQ ID NO: 4260567 - DNA, 25 bp, Homo sapien
cgggagttcaaagcccggcactggc

SEQ ID NO: 4260568 - DNA, 25 bp, Homo sapien
gaagaaggtgcttgcttctccttca

SEQ ID NO: 4260569 - DNA, 25 bp, Homo sapien
ccttcaccttccaccacaattgtaa

SEQ ID NO: 4260570 - DNA, 25 bp, Homo sapien
ctccttcaccttccaccacaattgt

SEQ ID NO: 4260571 - DNA, 25 bp, Homo sapien
agaaggtgcttgcttctccttcacc

SEQ ID NO: 4260572 - DNA, 25 bp, Homo sapien
tttagtaggtcatgtgcctctcccc

SEQ ID NO: 4260573 - DNA, 25 bp, Homo sapien
gagcgctgccctcagctgaaatgag

SEQ ID NO: 4260574 - DNA, 25 bp, Homo sapien
catagtctcaggaggttctttacag

SEQ ID NO: 4260575 - DNA, 25 bp, Homo sapien
tgttggctgctaataagatcacagc

SEQ ID NO: 4260576 - DNA, 25 bp, Homo sapien
cctggtcctgtagaagaaggcgaac

SEQ ID NO: 4260577 - DNA, 25 bp, Homo sapien
gtagaagaaggcgaacatttgttct

SEQ ID NO: 4260578 - DNA, 25 bp, Homo sapien
ttagtgtgcatcaacaactgaggcc

SEQ ID NO: 4260579 - DNA, 25 bp, Homo sapien
gcatcaacaactgaggcctggtcct

SEQ ID NO: 4260580 - DNA, 25 bp, Homo sapien
aagttgcagagaggcacagtgatga

SEQ ID NO: 4260581 - DNA, 25 bp, Homo sapien
gacaagttaaagttgcagagaggca

SEQ ID NO: 4260582 - DNA, 25 bp, Homo sapien
ctactatgagcaaggacaagttaaa

SEQ ID NO: 4260583 - DNA, 25 bp, Homo sapien
gagcaaggacaagttaaagttgcag

SEQ ID NO: 4260584 - DNA, 25 bp, Homo sapien
taattcttgaacaatagttatgttc

SEQ ID NO: 4260585 - DNA, 25 bp, Homo sapien
caatagttatgttcgtatttttggc

SEQ ID NO: 4260586 - DNA, 25 bp, Homo sapien
agttatgttcgtatttttggctggc

SEQ ID NO: 4260587 - DNA, 25 bp, Homo sapien
tcttgaacaatagttatgttcgtat

SEQ ID NO: 4260588 - DNA, 25 bp, Homo sapien
catagtgatgttttagtagttgaga

SEQ ID NO: 4260589 - DNA, 25 bp, Homo sapien
gggcaagttgctcaacaatatccac

SEQ ID NO: 4260590 - DNA, 25 bp, Homo sapien
cctggtaagtgaagacgtctgggtt

SEQ ID NO: 4260591 - DNA, 25 bp, Homo sapien
gtataattctgagaacctggcctcc

SEQ ID NO: 4260592 - DNA, 25 bp, Homo sapien
tagaagccagcttgactgtcctgaa

SEQ ID NO: 4260593 - DNA, 25 bp, Homo sapien
tgtactagttcaacccagccttctt

SEQ ID NO: 4260594 - DNA, 25 bp, Homo sapien
cctgaagctgtactagttcaaccca

SEQ ID NO: 4260595 - DNA, 25 bp, Homo sapien
cagccttctttcagaccacggtcac

SEQ ID NO: 4260596 - DNA, 25 bp, Homo sapien
acccagatcccgctgaaggccttta

SEQ ID NO: 4260597 - DNA, 25 bp, Homo sapien
tgaaggcctttaccaacccatgcca

SEQ ID NO: 4260598 - DNA, 25 bp, Homo sapien
gatcccgctgaaggcctttaccaac

SEQ ID NO: 4260599 - DNA, 25 bp, Homo sapien
cgctgaaggcctttaccaacccatg

SEQ ID NO: 4260600 - DNA, 25 bp, Homo sapien
gcacatggtcatccaagcgcatcaa

SEQ ID NO: 4260601 - DNA, 25 bp, Homo sapien
caagcgcatcaagaaaagcagctga

SEQ ID NO: 4260602 - DNA, 25 bp, Homo sapien
caacagattttgtacctgggagatc

SEQ ID NO: 4260603 - DNA, 25 bp, Homo sapien
atgacccttttggaaagtataactg

SEQ ID NO: 4260604 - DNA, 25 bp, Homo sapien
tgttagaaaatttgtctcccatgtc

SEQ ID NO: 4260605 - DNA, 25 bp, Homo sapien
ggctgagatgctcggggatttgaca

SEQ ID NO: 4260606 - DNA, 25 bp, Homo sapien
ctgagatgctcggggatttgacagc

SEQ ID NO: 4260607 - DNA, 25 bp, Homo sapien
ctggctgagatgctcggggatttga

SEQ ID NO: 4260608 - DNA, 25 bp, Homo sapien
agatgctcggggatttgacagccag

SEQ ID NO: 4260609 - DNA, 25 bp, Homo sapien
agaaagcatgaagcccaagaacatt

SEQ ID NO: 4260610 - DNA, 25 bp, Homo sapien
gcatgaagcccaagaacattgtgga

SEQ ID NO: 4260611 - DNA, 25 bp, Homo sapien
cagatcttcatctgtagccaagaag

SEQ ID NO: 4260612 - DNA, 25 bp, Homo sapien
gaaaatatggctgaagcaccgatga

SEQ ID NO: 4260613 - DNA, 25 bp, Homo sapien
gctgattcccaacttttggtgaaca

SEQ ID NO: 4260614 - DNA, 25 bp, Homo sapien
tttctagcttgtgggctttgctgat

SEQ ID NO: 4260615 - DNA, 25 bp, Homo sapien
tttgctgattcccaacttttggtga

SEQ ID NO: 4260616 - DNA, 25 bp, Homo sapien
ctagcttgtgggctttgctgattcc

SEQ ID NO: 4260617 - DNA, 25 bp, Homo sapien
tcccatctacttttttgcaatcctg

SEQ ID NO: 4260618 - DNA, 25 bp, Homo sapien
tctacttttttgcaatcctgcccca

SEQ ID NO: 4260619 - DNA, 25 bp, Homo sapien
catctacttttttgcaatcctgccc

SEQ ID NO: 4260620 - DNA, 25 bp, Homo sapien
ctacttttttgcaatcctgccccat

SEQ ID NO: 4260621 - DNA, 25 bp, Homo sapien
cccgcattatagtaatgggagattt

SEQ ID NO: 4260622 - DNA, 25 bp, Homo sapien
aaaggagacttagacacccgcatta

SEQ ID NO: 4260623 - DNA, 25 bp, Homo sapien
ggagacttagacacccgcattatag

SEQ ID NO: 4260624 - DNA, 25 bp, Homo sapien
cttagacacccgcattatagtaatg

SEQ ID NO: 4260625 - DNA, 25 bp, Homo sapien
ccgctgcttggcaaaccttgtattc

SEQ ID NO: 4260626 - DNA, 25 bp, Homo sapien
tgtattcatctcttgttgactccct

SEQ ID NO: 4260627 - DNA, 25 bp, Homo sapien
caaaccttgtattcatctcttgttg

SEQ ID NO: 4260628 - DNA, 25 bp, Homo sapien
cttctccgctgcttggcaaaccttg

SEQ ID NO: 4260629 - DNA, 25 bp, Homo sapien
cttttgcctgtctcctgaatcatca

SEQ ID NO: 4260630 - DNA, 25 bp, Homo sapien
gtctcctgaatcatcattaaactcc

SEQ ID NO: 4260631 - DNA, 25 bp, Homo sapien
ctaagatgagcccttttgggtccct

SEQ ID NO: 4260632 - DNA, 25 bp, Homo sapien
taaactccagagctccaaggtcgct

SEQ ID NO: 4260633 - DNA, 25 bp, Homo sapien
tgtggtataattgggctgctgcctg

SEQ ID NO: 4260634 - DNA, 25 bp, Homo sapien
cagttgcgcaagctctcctgcaaga

SEQ ID NO: 4260635 - DNA, 25 bp, Homo sapien
gctgcctgcagttgcgcaagctctc

SEQ ID NO: 4260636 - DNA, 25 bp, Homo sapien
caagattggcttcaggtctccatga

SEQ ID NO: 4260637 - DNA, 25 bp, Homo sapien
ggagcttccaaaaatcctctgagaa

SEQ ID NO: 4260638 - DNA, 25 bp, Homo sapien
aacaataggcgctaactgttggatc

SEQ ID NO: 4260639 - DNA, 25 bp, Homo sapien
aatgctgataaagcagctctaggag

SEQ ID NO: 4260640 - DNA, 25 bp, Homo sapien
tgagagcacaccaaatggtttgggg

SEQ ID NO: 4260641 - DNA, 25 bp, Homo sapien
ttctttacactttgagctgcttctg

SEQ ID NO: 4260642 - DNA, 25 bp, Homo sapien
ccattttcagaagagtgtatacttg

SEQ ID NO: 4260643 - DNA, 25 bp, Homo sapien
tcagaagagtgtatacttgttcccc

SEQ ID NO: 4260644 - DNA, 25 bp, Homo sapien
agtgtatacttgttcccccagttgg

SEQ ID NO: 4260645 - DNA, 25 bp, Homo sapien
tcttcataagaacagctgaacagag

SEQ ID NO: 4260646 - DNA, 25 bp, Homo sapien
gaacagagataagcactagctggtt

SEQ ID NO: 4260647 - DNA, 25 bp, Homo sapien
ttgtgacagggcgaaaagttgaagc

SEQ ID NO: 4260648 - DNA, 25 bp, Homo sapien
tgacagggcgaaaagttgaagcttc

SEQ ID NO: 4260649 - DNA, 25 bp, Homo sapien
atactctatttggaagagccagaag

SEQ ID NO: 4260650 - DNA, 25 bp, Homo sapien
tgggagaagatgacatatcatcttg

SEQ ID NO: 4260651 - DNA, 25 bp, Homo sapien
tttagggatggtgaatctactaact

SEQ ID NO: 4260652 - DNA, 25 bp, Homo sapien
aaaatgtagctacagctgggtgcag

SEQ ID NO: 4260653 - DNA, 25 bp, Homo sapien
cctgggtatttagcaagagcctgtt

SEQ ID NO: 4260654 - DNA, 25 bp, Homo sapien
ggatggtgaatctactaactatgga

SEQ ID NO: 4260655 - DNA, 25 bp, Homo sapien
cacagaacagtgtaatcatcttttc

SEQ ID NO: 4260656 - DNA, 25 bp, Homo sapien
tctaatgttgttagacaaccttgac

SEQ ID NO: 4260657 - DNA, 25 bp, Homo sapien
cactgcattaagaagcgttcaacac

SEQ ID NO: 4260658 - DNA, 25 bp, Homo sapien
gcactaagacagtcaacagtatttg

SEQ ID NO: 4260659 - DNA, 25 bp, Homo sapien
aatacactagcagaattcactgccg

SEQ ID NO: 4260660 - DNA, 25 bp, Homo sapien
caatgaagtaattaccgggtggtga

SEQ ID NO: 4260661 - DNA, 25 bp, Homo sapien
gtcagtgtttggatgctcattacgt

SEQ ID NO: 4260662 - DNA, 25 bp, Homo sapien
tcactgccgggttattgttggaaaa

SEQ ID NO: 4260663 - DNA, 25 bp, Homo sapien
tggtagccaaaaggtgcggatgtga

SEQ ID NO: 4260664 - DNA, 25 bp, Homo sapien
gcggatgtgagagctctttcttagg

SEQ ID NO: 4260665 - DNA, 25 bp, Homo sapien
gcagaattctcagtaacctctgaga

SEQ ID NO: 4260666 - DNA, 25 bp, Homo sapien
ctgttggcagtatgactgatctgca

SEQ ID NO: 4260667 - DNA, 25 bp, Homo sapien
taaatgccgggcaaacagtccagtg

SEQ ID NO: 4260668 - DNA, 25 bp, Homo sapien
gagggcataaatgccgggcaaacag

SEQ ID NO: 4260669 - DNA, 25 bp, Homo sapien
gccgggcaaacagtccagtgcactg

SEQ ID NO: 4260670 - DNA, 25 bp, Homo sapien
agagggcataaatgccgggcaaaca

SEQ ID NO: 4260671 - DNA, 25 bp, Homo sapien
gtttctgatgatagcacttcccttg

SEQ ID NO: 4260672 - DNA, 25 bp, Homo sapien
ggataatacatttggctggcaagag

SEQ ID NO: 4260673 - DNA, 25 bp, Homo sapien
tgagttctacaacctgcgtctgtcc

SEQ ID NO: 4260674 - DNA, 25 bp, Homo sapien
agcctttatttactatgagttctac

SEQ ID NO: 4260675 - DNA, 25 bp, Homo sapien
tgaaagtgtttggtgcaatatgaac

SEQ ID NO: 4260676 - DNA, 25 bp, Homo sapien
tgtttggtgcaatatgaactccatg

SEQ ID NO: 4260677 - DNA, 25 bp, Homo sapien
caatatgaactccatgttgagtcga

SEQ ID NO: 4260678 - DNA, 25 bp, Homo sapien
gaactccatgttgagtcgatcactc

SEQ ID NO: 4260679 - DNA, 25 bp, Homo sapien
gaagccttttgcacaaggacctaaa

SEQ ID NO: 4260680 - DNA, 25 bp, Homo sapien
ctcttaaggctataacgttggcaac

SEQ ID NO: 4260681 - DNA, 25 bp, Homo sapien
gaacgaagtgtcttcacatggaagc

SEQ ID NO: 4260682 - DNA, 25 bp, Homo sapien
ggtgccagcaggtttactgaaggct

SEQ ID NO: 4260683 - DNA, 25 bp, Homo sapien
ttctggagcccatagttacttgttt

SEQ ID NO: 4260684 - DNA, 25 bp, Homo sapien
ctggagcccatagttacttgtttct

SEQ ID NO: 4260685 - DNA, 25 bp, Homo sapien
gttgctgatgccacggagacttctg

SEQ ID NO: 4260686 - DNA, 25 bp, Homo sapien
ctgatgccacggagacttctggagc

SEQ ID NO: 4260687 - DNA, 25 bp, Homo sapien
tcttagatcagtccgctctgccaga

SEQ ID NO: 4260688 - DNA, 25 bp, Homo sapien
ctcttagatcagtccgctctgccag

SEQ ID NO: 4260689 - DNA, 25 bp, Homo sapien
atcagtccgctctgccagatttgtt

SEQ ID NO: 4260690 - DNA, 25 bp, Homo sapien
tagatcagtccgctctgccagattt

SEQ ID NO: 4260691 - DNA, 25 bp, Homo sapien
tgttgtcagtctggcatgtttaagg

SEQ ID NO: 4260692 - DNA, 25 bp, Homo sapien
cagtctggcatgtttaaggaatccc

SEQ ID NO: 4260693 - DNA, 25 bp, Homo sapien
tacctctgttgtcagtctggcatgt

SEQ ID NO: 4260694 - DNA, 25 bp, Homo sapien
gtctggcatgtttaaggaatcccat

SEQ ID NO: 4260695 - DNA, 25 bp, Homo sapien
ttcctactctaattgcattatttat

SEQ ID NO: 4260696 - DNA, 25 bp, Homo sapien
aattcctactctaattgcattattt

SEQ ID NO: 4260697 - DNA, 25 bp, Homo sapien
tgaattcctactctaattgcattat

SEQ ID NO: 4260698 - DNA, 25 bp, Homo sapien
ctgaattcctactctaattgcatta

SEQ ID NO: 4260699 - DNA, 25 bp, Homo sapien
gatttgctactaaacatcatggaca

SEQ ID NO: 4260700 - DNA, 25 bp, Homo sapien
tgttctagcttgcagacatctacaa

SEQ ID NO: 4260701 - DNA, 25 bp, Homo sapien
cattaactcagcagtattaagccag

SEQ ID NO: 4260702 - DNA, 25 bp, Homo sapien
caagattagattgcatattgggcca

SEQ ID NO: 4260703 - DNA, 25 bp, Homo sapien
gctcatctgctgaatgggttatgtt

SEQ ID NO: 4260704 - DNA, 25 bp, Homo sapien
cagctcatctgctgaatgggttatg

SEQ ID NO: 4260705 - DNA, 25 bp, Homo sapien
gcagctcatctgctgaatgggttat

SEQ ID NO: 4260706 - DNA, 25 bp, Homo sapien
catctgctgaatgggttatgtttgt

SEQ ID NO: 4260707 - DNA, 25 bp, Homo sapien
ctaaggacatctctggttgaacaaa

SEQ ID NO: 4260708 - DNA, 25 bp, Homo sapien
gaacaaactaatagtctgtgtttct

SEQ ID NO: 4260709 - DNA, 25 bp, Homo sapien
tctggttgaacaaactaatagtctg

SEQ ID NO: 4260710 - DNA, 25 bp, Homo sapien
gaagcatcttgtaatagtaacaggt

SEQ ID NO: 4260711 - DNA, 25 bp, Homo sapien
gtatctgtcactcttccgtttggct

SEQ ID NO: 4260712 - DNA, 25 bp, Homo sapien
tatctgtcactcttccgtttggctc

SEQ ID NO: 4260713 - DNA, 25 bp, Homo sapien
ccctgctaccaggacttttgggagc

SEQ ID NO: 4260714 - DNA, 25 bp, Homo sapien
caggacttttgggagcttcttggtt

SEQ ID NO: 4260715 - DNA, 25 bp, Homo sapien
tctgccaaagtcagtttcaagtgct

SEQ ID NO: 4260716 - DNA, 25 bp, Homo sapien
ctgccaaagtcagtttcaagtgctt

SEQ ID NO: 4260717 - DNA, 25 bp, Homo sapien
tgccaaagtcagtttcaagtgcttg

SEQ ID NO: 4260718 - DNA, 25 bp, Homo sapien
agtcttgagcttaaggagcctttgc

SEQ ID NO: 4260719 - DNA, 25 bp, Homo sapien
caaggcataactcccctttcctctg

SEQ ID NO: 4260720 - DNA, 25 bp, Homo sapien
ttccttccactttcaaggcataact

SEQ ID NO: 4260721 - DNA, 25 bp, Homo sapien
ttcaaatcagcacaaaggattccag

SEQ ID NO: 4260722 - DNA, 25 bp, Homo sapien
ggaacccaggcttggtttggagata

SEQ ID NO: 4260723 - DNA, 25 bp, Homo sapien
tactggggtaatgattttccgtctg

SEQ ID NO: 4260724 - DNA, 25 bp, Homo sapien
ttgaactggctcatccattactggg

SEQ ID NO: 4260725 - DNA, 25 bp, Homo sapien
agtgctcagcgtcccagtggttctc

SEQ ID NO: 4260726 - DNA, 25 bp, Homo sapien
gcgtcccagtggttctccttttgaa

SEQ ID NO: 4260727 - DNA, 25 bp, Homo sapien
gctgagggcacagccagcgggcggc

SEQ ID NO: 4260728 - DNA, 25 bp, Homo sapien
caggggctgagggcacagccagcgg

SEQ ID NO: 4260729 - DNA, 25 bp, Homo sapien
gggctgagggcacagccagcgggcg

SEQ ID NO: 4260730 - DNA, 25 bp, Homo sapien
aggggctgagggcacagccagcggg

SEQ ID NO: 4260731 - DNA, 25 bp, Homo sapien
ggcagcccgccaaaaggtaaagcca

SEQ ID NO: 4260732 - DNA, 25 bp, Homo sapien
ggctgctgtccaagcccctagcgtc

SEQ ID NO: 4260733 - DNA, 25 bp, Homo sapien
tagcgtccccggagccccaagctgg

SEQ ID NO: 4260734 - DNA, 25 bp, Homo sapien
cgctggcgggtcttcctgttgggtg

SEQ ID NO: 4260735 - DNA, 25 bp, Homo sapien
gacatctggactcgcggacaacttt

SEQ ID NO: 4260736 - DNA, 25 bp, Homo sapien
cccaggagtcgctggcaagttgcac

SEQ ID NO: 4260737 - DNA, 25 bp, Homo sapien
cagggcatttgcatggcatccaggg

SEQ ID NO: 4260738 - DNA, 25 bp, Homo sapien
tagcagggattttgcgtgtaccgcg

SEQ ID NO: 4260739 - DNA, 25 bp, Homo sapien
ctgtggggatctaagctccaggccg

SEQ ID NO: 4260740 - DNA, 25 bp, Homo sapien
acctctgggttgcagcatgctttgg

SEQ ID NO: 4260741 - DNA, 25 bp, Homo sapien
gcgaaacctggcgcccttgggagca

SEQ ID NO: 4260742 - DNA, 25 bp, Homo sapien
gtgtcggacctctgggttgcagcat

SEQ ID NO: 4260743 - DNA, 25 bp, Homo sapien
gtcaggtgacttacttttggagcca

SEQ ID NO: 4260744 - DNA, 25 bp, Homo sapien
ctttggtcttggaaatatggtgaaa

SEQ ID NO: 4260745 - DNA, 25 bp, Homo sapien
tggcaaaattgtcaagtcaggtgac

SEQ ID NO: 4260746 - DNA, 25 bp, Homo sapien
ggtgaaatcacaatgaccaacgtct

SEQ ID NO: 4260747 - DNA, 25 bp, Homo sapien
agcatgatgggcctttggagtgtaa

SEQ ID NO: 4260748 - DNA, 25 bp, Homo sapien
cctttggagtgtaatatcatttgcc

SEQ ID NO: 4260749 - DNA, 25 bp, Homo sapien
ggtcatttagcatgatgggcctttg

SEQ ID NO: 4260750 - DNA, 25 bp, Homo sapien
gatgggcctttggagtgtaatatca

SEQ ID NO: 4260751 - DNA, 25 bp, Homo sapien
aactgttggtatccaggttctgtcc

SEQ ID NO: 4260752 - DNA, 25 bp, Homo sapien
tgtttcacccataacactgaactgt

SEQ ID NO: 4260753 - DNA, 25 bp, Homo sapien
cagtcactgatgttctgattgcagg

SEQ ID NO: 4260754 - DNA, 25 bp, Homo sapien
aggcatgatggcattcaagttgtat

SEQ ID NO: 4260755 - DNA, 25 bp, Homo sapien
aactggaaaacagtaactgtcagac

SEQ ID NO: 4260756 - DNA, 25 bp, Homo sapien
tttgcaaatagaagatgggacgttc

SEQ ID NO: 4260757 - DNA, 25 bp, Homo sapien
gaatgattgggaattttgcaaatag

SEQ ID NO: 4260758 - DNA, 25 bp, Homo sapien
aacagtaactgtcagactaatttcc

SEQ ID NO: 4260759 - DNA, 25 bp, Homo sapien
ttccagggaatcaccgtcagagtga

SEQ ID NO: 4260760 - DNA, 25 bp, Homo sapien
catcctcagttgacaccaggttttt

SEQ ID NO: 4260761 - DNA, 25 bp, Homo sapien
gtgatttcacatccatcctcagttg

SEQ ID NO: 4260762 - DNA, 25 bp, Homo sapien
gaatcaccgtcagagtgatttcaca

SEQ ID NO: 4260763 - DNA, 25 bp, Homo sapien
ctgcttaaagaagcctggaggtgca

SEQ ID NO: 4260764 - DNA, 25 bp, Homo sapien
cttaaagaagcctggaggtgcagta

SEQ ID NO: 4260765 - DNA, 25 bp, Homo sapien
aaagaagcctggaggtgcagtagtc

SEQ ID NO: 4260766 - DNA, 25 bp, Homo sapien
agaagcctggaggtgcagtagtcat

SEQ ID NO: 4260767 - DNA, 25 bp, Homo sapien
aagcattgctgagactttaagatac

SEQ ID NO: 4260768 - DNA, 25 bp, Homo sapien
taatgcggtataattagtgatgtac

SEQ ID NO: 4260769 - DNA, 25 bp, Homo sapien
gaattcatttgacagtaatgcggta

SEQ ID NO: 4260770 - DNA, 25 bp, Homo sapien
tagtgatgtactaaatccattgaga

SEQ ID NO: 4260771 - DNA, 25 bp, Homo sapien
tctccttccacaaaacttgatttga

SEQ ID NO: 4260772 - DNA, 25 bp, Homo sapien
ccttccacaaaacttgatttgatag

SEQ ID NO: 4260773 - DNA, 25 bp, Homo sapien
ttgatagaaaaatagaggtgattcc

SEQ ID NO: 4260774 - DNA, 25 bp, Homo sapien
tagaggtgattccaactgaatgcca

SEQ ID NO: 4260775 - DNA, 25 bp, Homo sapien
tgtgctatagctaaaacattagggc

SEQ ID NO: 4260776 - DNA, 25 bp, Homo sapien
ttgttgtcacgctcatggcctcttg

SEQ ID NO: 4260777 - DNA, 25 bp, Homo sapien
acattagggcctaatggcttcccat

SEQ ID NO: 4260778 - DNA, 25 bp, Homo sapien
gatctagtttgccttctcatgcttg

SEQ ID NO: 4260779 - DNA, 25 bp, Homo sapien
aatttcagagacaagtccaactgca

SEQ ID NO: 4260780 - DNA, 25 bp, Homo sapien
gaatttcagagacaagtccaactgc

SEQ ID NO: 4260781 - DNA, 25 bp, Homo sapien
aaggaatttcagagacaagtccaac

SEQ ID NO: 4260782 - DNA, 25 bp, Homo sapien
ggaatttcagagacaagtccaactg

SEQ ID NO: 4260783 - DNA, 25 bp, Homo sapien
tgctgccgcgttggcagccatgagc

SEQ ID NO: 4260784 - DNA, 25 bp, Homo sapien
ctccacgcatgtcagtatcctgctg

SEQ ID NO: 4260785 - DNA, 25 bp, Homo sapien
gcatgtcagtatcctgctgcagtcc

SEQ ID NO: 4260786 - DNA, 25 bp, Homo sapien
cagtcccagacgaacagaaaggaca

SEQ ID NO: 4260787 - DNA, 25 bp, Homo sapien
actgcttaagtcttggctgccttgg

SEQ ID NO: 4260788 - DNA, 25 bp, Homo sapien
gactgcttaagtcttggctgccttg

SEQ ID NO: 4260789 - DNA, 25 bp, Homo sapien
ttgactgcttaagtcttggctgcct

SEQ ID NO: 4260790 - DNA, 25 bp, Homo sapien
tgcttaagtcttggctgccttggta

SEQ ID NO: 4260791 - DNA, 25 bp, Homo sapien
cttccagaagacttagagggggatg

SEQ ID NO: 4260792 - DNA, 25 bp, Homo sapien
aatatgctcatttgccttattctgt

SEQ ID NO: 4260793 - DNA, 25 bp, Homo sapien
ttccagaagacttagagggggatgg

SEQ ID NO: 4260794 - DNA, 25 bp, Homo sapien
ggaaatatgctcatttgccttattc

SEQ ID NO: 4260795 - DNA, 25 bp, Homo sapien
gagaggtgggttctcaccaggttgc

SEQ ID NO: 4260796 - DNA, 25 bp, Homo sapien
cacatgagttttgacaggctctgtt

SEQ ID NO: 4260797 - DNA, 25 bp, Homo sapien
acatgagttttgacaggctctgttt

SEQ ID NO: 4260798 - DNA, 25 bp, Homo sapien
tgaacactctcaatctcatctgatc

SEQ ID NO: 4260799 - DNA, 25 bp, Homo sapien
tcagaagttaagcaggattgggcct

SEQ ID NO: 4260800 - DNA, 25 bp, Homo sapien
ggttagagaaatccatgtctgccaa

SEQ ID NO: 4260801 - DNA, 25 bp, Homo sapien
ggttagcaaatatggccataccacc

SEQ ID NO: 4260802 - DNA, 25 bp, Homo sapien
acgctttctgttctcataccataaa

SEQ ID NO: 4260803 - DNA, 25 bp, Homo sapien
ccacgctttctgttctcataccata

SEQ ID NO: 4260804 - DNA, 25 bp, Homo sapien
agccacgctttctgttctcatacca

SEQ ID NO: 4260805 - DNA, 25 bp, Homo sapien
ctagccacgctttctgttctcatac

SEQ ID NO: 4260806 - DNA, 25 bp, Homo sapien
agtgactgccacaactgaggtggtt

SEQ ID NO: 4260807 - DNA, 25 bp, Homo sapien
ctcggtaactaaatggtgaactgcc

SEQ ID NO: 4260808 - DNA, 25 bp, Homo sapien
gggccacagatgttgtgacatggtc

SEQ ID NO: 4260809 - DNA, 25 bp, Homo sapien
tgaggtggttatacactcggtaact

SEQ ID NO: 4260810 - DNA, 25 bp, Homo sapien
tatctttgtttgtagggctgcttcg

SEQ ID NO: 4260811 - DNA, 25 bp, Homo sapien
ctgcttcggagagcaatggtctggt

SEQ ID NO: 4260812 - DNA, 25 bp, Homo sapien
tctttgtttgtagggctgcttcgga

SEQ ID NO: 4260813 - DNA, 25 bp, Homo sapien
tctggttaggatgtcgaaaaggcat

SEQ ID NO: 4260814 - DNA, 25 bp, Homo sapien
tcctacagatatggcttgtgctcct

SEQ ID NO: 4260815 - DNA, 25 bp, Homo sapien
gagtccatgtggacacagttccagt

SEQ ID NO: 4260816 - DNA, 25 bp, Homo sapien
ttgctcttgaggagttcttggtttc

SEQ ID NO: 4260817 - DNA, 25 bp, Homo sapien
cctggcgcaggtcattgtccttgct

SEQ ID NO: 4260818 - DNA, 25 bp, Homo sapien
gatgtcaaggagttcgtgcatagga

SEQ ID NO: 4260819 - DNA, 25 bp, Homo sapien
gaatgatgtcaaggagttcgtgcat

SEQ ID NO: 4260820 - DNA, 25 bp, Homo sapien
taaggcaatggtggccattggctct

SEQ ID NO: 4260821 - DNA, 25 bp, Homo sapien
tcgtgcataggagtaaggcaatggt

SEQ ID NO: 4260822 - DNA, 25 bp, Homo sapien
tacactgtcacagcgttttatctgg

SEQ ID NO: 4260823 - DNA, 25 bp, Homo sapien
aaggcaagaacactgtaaatctcag

SEQ ID NO: 4260824 - DNA, 25 bp, Homo sapien
tgcaccgtagctccttgtgtataca

SEQ ID NO: 4260825 - DNA, 25 bp, Homo sapien
aatctcagagggaactgcaccgtag

SEQ ID NO: 4260826 - DNA, 25 bp, Homo sapien
tgtccatccttgtttcagaggagac

SEQ ID NO: 4260827 - DNA, 25 bp, Homo sapien
gtccgatgttaactgtccatccttg

SEQ ID NO: 4260828 - DNA, 25 bp, Homo sapien
gaggagacacagacttattgaggac

SEQ ID NO: 4260829 - DNA, 25 bp, Homo sapien
tgccttcctgaccaaagtccgatgt

SEQ ID NO: 4260830 - DNA, 25 bp, Homo sapien
tgacaacagtggaaagacagcaagg

SEQ ID NO: 4260831 - DNA, 25 bp, Homo sapien
tgtcatctgagtttgcgacagaact

SEQ ID NO: 4260832 - DNA, 25 bp, Homo sapien
taggcaacaacttgtgagaatgggc

SEQ ID NO: 4260833 - DNA, 25 bp, Homo sapien
acagcaaggactgtgagcctaggca

SEQ ID NO: 4260834 - DNA, 25 bp, Homo sapien
aagggtggtttctcggagaaatgca

SEQ ID NO: 4260835 - DNA, 25 bp, Homo sapien
agggtggtttctcggagaaatgcat

SEQ ID NO: 4260836 - DNA, 25 bp, Homo sapien
caaagggtggtttctcggagaaatg

SEQ ID NO: 4260837 - DNA, 25 bp, Homo sapien
gcagccttgacccctcagattcagg

SEQ ID NO: 4260838 - DNA, 25 bp, Homo sapien
agccttgacccctcagattcaggtg

SEQ ID NO: 4260839 - DNA, 25 bp, Homo sapien
cttgacccctcagattcaggtgatc

SEQ ID NO: 4260840 - DNA, 25 bp, Homo sapien
gccttgacccctcagattcaggtga

SEQ ID NO: 4260841 - DNA, 25 bp, Homo sapien
tacccagacacatactgttgccaag

SEQ ID NO: 4260842 - DNA, 25 bp, Homo sapien
agattcagagaaagacgaagtttaa

SEQ ID NO: 4260843 - DNA, 25 bp, Homo sapien
tactgttgccaagtgaatgaacaaa

SEQ ID NO: 4260844 - DNA, 25 bp, Homo sapien
gaacaaatgaataagagattcagag

SEQ ID NO: 4260845 - DNA, 25 bp, Homo sapien
ctcatcagcaccctggaggatagta

SEQ ID NO: 4260846 - DNA, 25 bp, Homo sapien
ttaggcagtgacaatctcatcagca

SEQ ID NO: 4260847 - DNA, 25 bp, Homo sapien
gtgacaatctcatcagcaccctgga

SEQ ID NO: 4260848 - DNA, 25 bp, Homo sapien
tcatcagcaccctggaggatagtaa

SEQ ID NO: 4260849 - DNA, 25 bp, Homo sapien
ccatgactgagaggcgaaactactt

SEQ ID NO: 4260850 - DNA, 25 bp, Homo sapien
ggtcccattggcattctataaggaa

SEQ ID NO: 4260851 - DNA, 25 bp, Homo sapien
ttcccaatcaccctgtcctttcggc

SEQ ID NO: 4260852 - DNA, 25 bp, Homo sapien
gaatgttagccagagtccacccttc

SEQ ID NO: 4260853 - DNA, 25 bp, Homo sapien
ggggaagagaggctcacactccttt

SEQ ID NO: 4260854 - DNA, 25 bp, Homo sapien
gggaagagaggctcacactcctttg

SEQ ID NO: 4260855 - DNA, 25 bp, Homo sapien
aagagaggctcacactcctttgcta

SEQ ID NO: 4260856 - DNA, 25 bp, Homo sapien
ctcatggggaagagaggctcacact

SEQ ID NO: 4260857 - DNA, 25 bp, Homo sapien
gcccttctgtagactgagttgtctc

SEQ ID NO: 4260858 - DNA, 25 bp, Homo sapien
cccttctgtagactgagttgtctca

SEQ ID NO: 4260859 - DNA, 25 bp, Homo sapien
ttctgtagactgagttgtctcagca

SEQ ID NO: 4260860 - DNA, 25 bp, Homo sapien
ccttctgtagactgagttgtctcag

SEQ ID NO: 4260861 - DNA, 25 bp, Homo sapien
caatggtggttccagaataatgtct

SEQ ID NO: 4260862 - DNA, 25 bp, Homo sapien
tgttcccttgacagaaagccacggc

SEQ ID NO: 4260863 - DNA, 25 bp, Homo sapien
tgtaatctttaccagcaaactgtct

SEQ ID NO: 4260864 - DNA, 25 bp, Homo sapien
tcctctgtctttaatggttgcatgc

SEQ ID NO: 4260865 - DNA, 25 bp, Homo sapien
tttgatgcataagggtacactaagt

SEQ ID NO: 4260866 - DNA, 25 bp, Homo sapien
gctgccttcgtctctttgatgcata

SEQ ID NO: 4260867 - DNA, 25 bp, Homo sapien
ctttaagagcgtcatttctttctcc

SEQ ID NO: 4260868 - DNA, 25 bp, Homo sapien
cattaagtttcactgtaccaggaag

SEQ ID NO: 4260869 - DNA, 25 bp, Homo sapien
tcctgtaactgtttaactgtctcca

SEQ ID NO: 4260870 - DNA, 25 bp, Homo sapien
tgcaagaaccctgtcattctttcct

SEQ ID NO: 4260871 - DNA, 25 bp, Homo sapien
ctggtgcaagaaccctgtcattctt

SEQ ID NO: 4260872 - DNA, 25 bp, Homo sapien
acactggtgcaagaaccctgtcatt

SEQ ID NO: 4260873 - DNA, 25 bp, Homo sapien
ctggtcttaaactgcgaagctgaac

SEQ ID NO: 4260874 - DNA, 25 bp, Homo sapien
taaactgcgaagctgaacgacgaaa

SEQ ID NO: 4260875 - DNA, 25 bp, Homo sapien
ctgaacgacgaaagcatccttcctg

SEQ ID NO: 4260876 - DNA, 25 bp, Homo sapien
gcagagaaaccatgctgggaagaag

SEQ ID NO: 4260877 - DNA, 25 bp, Homo sapien
gtgaggcccgaaacatgaccaccag

SEQ ID NO: 4260878 - DNA, 25 bp, Homo sapien
agagcacctttctttctgtgaggcc

SEQ ID NO: 4260879 - DNA, 25 bp, Homo sapien
ctgtgaggcccgaaacatgaccacc

SEQ ID NO: 4260880 - DNA, 25 bp, Homo sapien
cacctttctttctgtgaggcccgaa

SEQ ID NO: 4260881 - DNA, 25 bp, Homo sapien
ctaaatatcagtgccattctgtgtt

SEQ ID NO: 4260882 - DNA, 25 bp, Homo sapien
aatatcagtgccattctgtgttgaa

SEQ ID NO: 4260883 - DNA, 25 bp, Homo sapien
atactgttcccttccgctctctttg

SEQ ID NO: 4260884 - DNA, 25 bp, Homo sapien
tactgttcccttccgctctctttgt

SEQ ID NO: 4260885 - DNA, 25 bp, Homo sapien
gctgctgagcttgtaccttttgtaa

SEQ ID NO: 4260886 - DNA, 25 bp, Homo sapien
aaggtgacctggactcagggcccat

SEQ ID NO: 4260887 - DNA, 25 bp, Homo sapien
gggaaggtgacctggactcagggcc

SEQ ID NO: 4260888 - DNA, 25 bp, Homo sapien
taactcaccaggggaaggtgacctg

SEQ ID NO: 4260889 - DNA, 25 bp, Homo sapien
gcttaaaacgataacttgtgagaac

SEQ ID NO: 4260890 - DNA, 25 bp, Homo sapien
tagtggtccctcaaattgcttgtat

SEQ ID NO: 4260891 - DNA, 25 bp, Homo sapien
cttttccatcgagccctagtggtcc

SEQ ID NO: 4260892 - DNA, 25 bp, Homo sapien
tctggaaccgcacctttagcttaaa

SEQ ID NO: 4260893 - DNA, 25 bp, Homo sapien
ggagatcagatcctggatatttaat

SEQ ID NO: 4260894 - DNA, 25 bp, Homo sapien
attttttctggagatcagatcctgg

SEQ ID NO: 4260895 - DNA, 25 bp, Homo sapien
tagtagatcaacacaaatatgaatt

SEQ ID NO: 4260896 - DNA, 25 bp, Homo sapien
cttcacagacacagtagtagatcaa

SEQ ID NO: 4260897 - DNA, 25 bp, Homo sapien
aggctctgttattatctgctttgtg

SEQ ID NO: 4260898 - DNA, 25 bp, Homo sapien
tgttattatctgctttgtgtcactt

SEQ ID NO: 4260899 - DNA, 25 bp, Homo sapien
tctgttattatctgctttgtgtcac

SEQ ID NO: 4260900 - DNA, 25 bp, Homo sapien
ctctgttattatctgctttgtgtca

SEQ ID NO: 4260901 - DNA, 25 bp, Homo sapien
gctccctcaatctagaaaatctatt

SEQ ID NO: 4260902 - DNA, 25 bp, Homo sapien
tattgctccctcaatctagaaaatc

SEQ ID NO: 4260903 - DNA, 25 bp, Homo sapien
tctcatattgctccctcaatctaga

SEQ ID NO: 4260904 - DNA, 25 bp, Homo sapien
cctttttctcatattgctccctcaa

SEQ ID NO: 4260905 - DNA, 25 bp, Homo sapien
gttgtaatgatccatttgtgtacat

SEQ ID NO: 4260906 - DNA, 25 bp, Homo sapien
tggagggacgaagcacattaaatct

SEQ ID NO: 4260907 - DNA, 25 bp, Homo sapien
tgacaagcgtatttctcttagagct

SEQ ID NO: 4260908 - DNA, 25 bp, Homo sapien
cattaaatctgcagttgcttacagc

SEQ ID NO: 4260909 - DNA, 25 bp, Homo sapien
tcagtttgatgagagtcagtgctag

SEQ ID NO: 4260910 - DNA, 25 bp, Homo sapien
gcgatatcatttggtttgcatgttt

SEQ ID NO: 4260911 - DNA, 25 bp, Homo sapien
ttcatcaccaaaactgcttatggtt

SEQ ID NO: 4260912 - DNA, 25 bp, Homo sapien
aactgcttatggtttcatattgccc

SEQ ID NO: 4260913 - DNA, 25 bp, Homo sapien
tggcaaagataaggaatgcgatatc

SEQ ID NO: 4260914 - DNA, 25 bp, Homo sapien
acttgtttactcttaaacacatact

SEQ ID NO: 4260915 - DNA, 25 bp, Homo sapien
cttgtttactcttaaacacatactt

SEQ ID NO: 4260916 - DNA, 25 bp, Homo sapien
caggaaggtctttatcccccgacat

SEQ ID NO: 4260917 - DNA, 25 bp, Homo sapien
gaaggtctttatcccccgacatatc

SEQ ID NO: 4260918 - DNA, 25 bp, Homo sapien
ccgacatatccagccattttggaag

SEQ ID NO: 4260919 - DNA, 25 bp, Homo sapien
ttggaagctgcatcctcctacaggg

SEQ ID NO: 4260920 - DNA, 25 bp, Homo sapien
ctgagctggattattccatcatcag

SEQ ID NO: 4260921 - DNA, 25 bp, Homo sapien
actgagctggattattccatcatca

SEQ ID NO: 4260922 - DNA, 25 bp, Homo sapien
gcagagtactatcactctcaactgt

SEQ ID NO: 4260923 - DNA, 25 bp, Homo sapien
gagaaaaagtccacagcagagtact

SEQ ID NO: 4260924 - DNA, 25 bp, Homo sapien
tttgagagttgacaaagtcatgtgt

SEQ ID NO: 4260925 - DNA, 25 bp, Homo sapien
acttcaagatatctattttacaaga

SEQ ID NO: 4260926 - DNA, 25 bp, Homo sapien
ctttcaccactggagatgcttccat

SEQ ID NO: 4260927 - DNA, 25 bp, Homo sapien
gctttcaccactggagatgcttcca

SEQ ID NO: 4260928 - DNA, 25 bp, Homo sapien
tagactttgattgaaagtcagcctt

SEQ ID NO: 4260929 - DNA, 25 bp, Homo sapien
aatccaaccattctttcaatagact

SEQ ID NO: 4260930 - DNA, 25 bp, Homo sapien
ttcacattcacatctagtagcagct

SEQ ID NO: 4260931 - DNA, 25 bp, Homo sapien
tatggctgtccacgggctaatttat

SEQ ID NO: 4260932 - DNA, 25 bp, Homo sapien
gtacaaacagttctgcagggacctt

SEQ ID NO: 4260933 - DNA, 25 bp, Homo sapien
agtacaaacagttctgcagggacct

SEQ ID NO: 4260934 - DNA, 25 bp, Homo sapien
gcagggacctttgcaggcagagggc

SEQ ID NO: 4260935 - DNA, 25 bp, Homo sapien
cagggacctttgcaggcagagggca

SEQ ID NO: 4260936 - DNA, 25 bp, Homo sapien
tgtgctggtgatataaccatggcta

SEQ ID NO: 4260937 - DNA, 25 bp, Homo sapien
ataaccataaggtcctgtatgttcc

SEQ ID NO: 4260938 - DNA, 25 bp, Homo sapien
tctcgttataaccataaggtcctgt

SEQ ID NO: 4260939 - DNA, 25 bp, Homo sapien
taaccatggctaccttctcgttata

SEQ ID NO: 4260940 - DNA, 25 bp, Homo sapien
tctcttttttcctgtcccctgtcat

SEQ ID NO: 4260941 - DNA, 25 bp, Homo sapien
cttgctgatttccctttctcttttt

SEQ ID NO: 4260942 - DNA, 25 bp, Homo sapien
ttctcttttttcctgtcccctgtca

SEQ ID NO: 4260943 - DNA, 25 bp, Homo sapien
tgctgatttccctttctcttttttc

SEQ ID NO: 4260944 - DNA, 25 bp, Homo sapien
ggagctgctgttttcgatcgtaagt

SEQ ID NO: 4260945 - DNA, 25 bp, Homo sapien
gctgttttcgatcgtaagtcttgtc

SEQ ID NO: 4260946 - DNA, 25 bp, Homo sapien
tcgtaagtcttgtcatgaggaaaat

SEQ ID NO: 4260947 - DNA, 25 bp, Homo sapien
ggtgtggcaaagtttgggagctgct

SEQ ID NO: 4260948 - DNA, 25 bp, Homo sapien
tctaagatcagatgagatggggcac

SEQ ID NO: 4260949 - DNA, 25 bp, Homo sapien
acattcatggtggtatggccataca

SEQ ID NO: 4260950 - DNA, 25 bp, Homo sapien
tgagatggggcacattcatggtggt

SEQ ID NO: 4260951 - DNA, 25 bp, Homo sapien
caatctcagattctctcctgtccaa

SEQ ID NO: 4260952 - DNA, 25 bp, Homo sapien
caggcaattaagttttcggtgctcc

SEQ ID NO: 4260953 - DNA, 25 bp, Homo sapien
gaaagatgattccacaatactgttt

SEQ ID NO: 4260954 - DNA, 25 bp, Homo sapien
gagtatcgaagtagacaggctggaa

SEQ ID NO: 4260955 - DNA, 25 bp, Homo sapien
tgcactggggcggacaggcaattaa

SEQ ID NO: 4260956 - DNA, 25 bp, Homo sapien
cttcctttgcaaggaaatgagaact

SEQ ID NO: 4260957 - DNA, 25 bp, Homo sapien
ttcatcgtggaaagagcatggctcc

SEQ ID NO: 4260958 - DNA, 25 bp, Homo sapien
agcccactgcacaagacggtctcta

SEQ ID NO: 4260959 - DNA, 25 bp, Homo sapien
gagccaaggtgagaacccatgtcct

SEQ ID NO: 4260960 - DNA, 25 bp, Homo sapien
gcaatttacacttcactgtgtggct

SEQ ID NO: 4260961 - DNA, 25 bp, Homo sapien
aagagtattttcagacagtccaacc

SEQ ID NO: 4260962 - DNA, 25 bp, Homo sapien
agttgtctacgaacatactcccaga

SEQ ID NO: 4260963 - DNA, 25 bp, Homo sapien
tctctgctacaagctcaccgtggca

SEQ ID NO: 4260964 - DNA, 25 bp, Homo sapien
caccagtgagttgcagtttatttca

SEQ ID NO: 4260965 - DNA, 25 bp, Homo sapien
tctgttaagagattccatttctttc

SEQ ID NO: 4260966 - DNA, 25 bp, Homo sapien
tattgttctgttaagagattccatt

SEQ ID NO: 4260967 - DNA, 25 bp, Homo sapien
tgttctgttaagagattccatttct

SEQ ID NO: 4260968 - DNA, 25 bp, Homo sapien
gttattgttctgttaagagattcca

SEQ ID NO: 4260969 - DNA, 25 bp, Homo sapien
ggtatacattgtaatagcttctgtt

SEQ ID NO: 4260970 - DNA, 25 bp, Homo sapien
agtttgtgcacgtgaaggtgttcat

SEQ ID NO: 4260971 - DNA, 25 bp, Homo sapien
ttctgtggtatacattgtaatagct

SEQ ID NO: 4260972 - DNA, 25 bp, Homo sapien
aaggtgttctagtttgtgcacgtga

SEQ ID NO: 4260973 - DNA, 25 bp, Homo sapien
tttgctccatgagatgcgatccctg

SEQ ID NO: 4260974 - DNA, 25 bp, Homo sapien
ccatgagatgcgatccctgagaggc

SEQ ID NO: 4260975 - DNA, 25 bp, Homo sapien
ctgagaggccaaagctattttttaa

SEQ ID NO: 4260976 - DNA, 25 bp, Homo sapien
ctgtttgctccatgagatgcgatcc

SEQ ID NO: 4260977 - DNA, 25 bp, Homo sapien
gcatctgttagcaaaggctctgcaa

SEQ ID NO: 4260978 - DNA, 25 bp, Homo sapien
atctgttagcaaaggctctgcaaac

SEQ ID NO: 4260979 - DNA, 25 bp, Homo sapien
gagcatctgttagcaaaggctctgc

SEQ ID NO: 4260980 - DNA, 25 bp, Homo sapien
ttgagcatctgttagcaaaggctct

SEQ ID NO: 4260981 - DNA, 25 bp, Homo sapien
catcagctcgcacaccatatgccat

SEQ ID NO: 4260982 - DNA, 25 bp, Homo sapien
acattttcctggttgatagtcattg

SEQ ID NO: 4260983 - DNA, 25 bp, Homo sapien
gctcgcacaccatatgccatcatct

SEQ ID NO: 4260984 - DNA, 25 bp, Homo sapien
cctggttgatagtcattgcaaactt

SEQ ID NO: 4260985 - DNA, 25 bp, Homo sapien
gcattcggaaggctttttgcaagca

SEQ ID NO: 4260986 - DNA, 25 bp, Homo sapien
cgccccggctggattggccgagcaa

SEQ ID NO: 4260987 - DNA, 25 bp, Homo sapien
cgagcgatccgagcagggtttgtct

SEQ ID NO: 4260988 - DNA, 25 bp, Homo sapien
ggtaggatccggaacgcattcggaa

SEQ ID NO: 4260989 - DNA, 25 bp, Homo sapien
gcagacattcagtgcaagggagatc

SEQ ID NO: 4260990 - DNA, 25 bp, Homo sapien
cagacattcagtgcaagggagatca

SEQ ID NO: 4260991 - DNA, 25 bp, Homo sapien
aggataagcacttttgcagacattc

SEQ ID NO: 4260992 - DNA, 25 bp, Homo sapien
ctagaggataagcacttttgcagac

SEQ ID NO: 4260993 - DNA, 25 bp, Homo sapien
ctacgtatgcagtgtgctgatgtct

SEQ ID NO: 4260994 - DNA, 25 bp, Homo sapien
cgtatgcagtgtgctgatgtcttct

SEQ ID NO: 4260995 - DNA, 25 bp, Homo sapien
tatgcagtgtgctgatgtcttctgg

SEQ ID NO: 4260996 - DNA, 25 bp, Homo sapien
atgcagtgtgctgatgtcttctggc

SEQ ID NO: 4260997 - DNA, 25 bp, Homo sapien
gcgaatcagttcactggacttcgta

SEQ ID NO: 4260998 - DNA, 25 bp, Homo sapien
atttcacggagtaccccagtcccag

SEQ ID NO: 4260999 - DNA, 25 bp, Homo sapien
ttcgtataaagcctaatttcacgga

SEQ ID NO: 4261000 - DNA, 25 bp, Homo sapien
tcactggacttcgtataaagcctaa

SEQ ID NO: 4261001 - DNA, 25 bp, Homo sapien
taggaaccgtggtatggacacctcc

SEQ ID NO: 4261002 - DNA, 25 bp, Homo sapien
tcgagtagtgtgctttgtaggaacc

SEQ ID NO: 4261003 - DNA, 25 bp, Homo sapien
tgtggccagtttcttcccggatgct

SEQ ID NO: 4261004 - DNA, 25 bp, Homo sapien
tagagggcgcactctcgtgaatggc

SEQ ID NO: 4261005 - DNA, 25 bp, Homo sapien
tacgggcaggaagattcaatgtatc

SEQ ID NO: 4261006 - DNA, 25 bp, Homo sapien
tgaactgcagtgtccagtacgggca

SEQ ID NO: 4261007 - DNA, 25 bp, Homo sapien
tccagtacgggcaggaagattcaat

SEQ ID NO: 4261008 - DNA, 25 bp, Homo sapien
attattttgaactgcagtgtccagt

SEQ ID NO: 4261009 - DNA, 25 bp, Homo sapien
gcatatatgaccatgagagtgcatt

SEQ ID NO: 4261010 - DNA, 25 bp, Homo sapien
tatatgaccatgagagtgcatttca

SEQ ID NO: 4261011 - DNA, 25 bp, Homo sapien
tattgcatatatgaccatgagagtg

SEQ ID NO: 4261012 - DNA, 25 bp, Homo sapien
caggtttattgcatatatgaccatg

SEQ ID NO: 4261013 - DNA, 25 bp, Homo sapien
cagtgttcagccacacgccgttgga

SEQ ID NO: 4261014 - DNA, 25 bp, Homo sapien
agtgactgctcctgacagtgttcag

SEQ ID NO: 4261015 - DNA, 25 bp, Homo sapien
gagctggtggttgtgcagactccat

SEQ ID NO: 4261016 - DNA, 25 bp, Homo sapien
ttggactgccgccagaggcctttgg

SEQ ID NO: 4261017 - DNA, 25 bp, Homo sapien
actctaaaacttcctgccagggaca

SEQ ID NO: 4261018 - DNA, 25 bp, Homo sapien
acaggagttctgcacagtcctaaga

SEQ ID NO: 4261019 - DNA, 25 bp, Homo sapien
aggagttctgcacagtcctaagagg

SEQ ID NO: 4261020 - DNA, 25 bp, Homo sapien
ctaaaacttcctgccagggacagct

SEQ ID NO: 4261021 - DNA, 25 bp, Homo sapien
aacccacacagtgaggattaaatcg

SEQ ID NO: 4261022 - DNA, 25 bp, Homo sapien
ttatgcaggctcatggcattttctt

SEQ ID NO: 4261023 - DNA, 25 bp, Homo sapien
ttgaggctgttcatatggtgcatac

SEQ ID NO: 4261024 - DNA, 25 bp, Homo sapien
cacaattttatgcaggctcatggca

SEQ ID NO: 4261025 - DNA, 25 bp, Homo sapien
aagtacagccagttcttgctttgat

SEQ ID NO: 4261026 - DNA, 25 bp, Homo sapien
attatccaacgtgtctctgtggcac

SEQ ID NO: 4261027 - DNA, 25 bp, Homo sapien
aacgtgtctctgtggcacatactag

SEQ ID NO: 4261028 - DNA, 25 bp, Homo sapien
acatactaggagctgcatatgaagc

SEQ ID NO: 4261029 - DNA, 25 bp, Homo sapien
ctaggagctgcatatgaagctgttt

SEQ ID NO: 4261030 - DNA, 25 bp, Homo sapien
ccatgacagcgttcggctgctgggc

SEQ ID NO: 4261031 - DNA, 25 bp, Homo sapien
catgacagcgttcggctgctgggct

SEQ ID NO: 4261032 - DNA, 25 bp, Homo sapien
tccatgacagcgttcggctgctggg

SEQ ID NO: 4261033 - DNA, 25 bp, Homo sapien
atggaagtcctctgccatatccacg

SEQ ID NO: 4261034 - DNA, 25 bp, Homo sapien
aaatgtttgtttctgaatccttgct

SEQ ID NO: 4261035 - DNA, 25 bp, Homo sapien
acctctcctctcatggaagtcctct

SEQ ID NO: 4261036 - DNA, 25 bp, Homo sapien
catatccacgctgaccaataacatt

SEQ ID NO: 4261037 - DNA, 25 bp, Homo sapien
tgctatccttgtctttatgtgagag

SEQ ID NO: 4261038 - DNA, 25 bp, Homo sapien
gagacccagtcgtgggcctacaact

SEQ ID NO: 4261039 - DNA, 25 bp, Homo sapien
gtcttccctggagtagaagtgctgg

SEQ ID NO: 4261040 - DNA, 25 bp, Homo sapien
ttgagtcttccctggagtagaagtg

SEQ ID NO: 4261041 - DNA, 25 bp, Homo sapien
taagctgctgtgagtgcgttctggc

SEQ ID NO: 4261042 - DNA, 25 bp, Homo sapien
ctttaagctgctgtgagtgcgttct

SEQ ID NO: 4261043 - DNA, 25 bp, Homo sapien
tgagaaaaatgcagtacccttagta

SEQ ID NO: 4261044 - DNA, 25 bp, Homo sapien
cagtacccttagtatcgacatgacg

SEQ ID NO: 4261045 - DNA, 25 bp, Homo sapien
ggtattatgcagtccatgcctgtct

SEQ ID NO: 4261046 - DNA, 25 bp, Homo sapien
catttggaagtcgtctatgggcctt

SEQ ID NO: 4261047 - DNA, 25 bp, Homo sapien
gggtggtgaactcctgttgactctg

SEQ ID NO: 4261048 - DNA, 25 bp, Homo sapien
gagagctattcctgtgcatggtcag

SEQ ID NO: 4261049 - DNA, 25 bp, Homo sapien
tcagatagatgcatgacgaagtcaa

SEQ ID NO: 4261050 - DNA, 25 bp, Homo sapien
acattcctgcctagacccaagggca

SEQ ID NO: 4261051 - DNA, 25 bp, Homo sapien
tactgcacagaagagtacagtgtct

SEQ ID NO: 4261052 - DNA, 25 bp, Homo sapien
aaatatgagtcagcagattgcactg

SEQ ID NO: 4261053 - DNA, 25 bp, Homo sapien
atggttcatttcctacagggcaata

SEQ ID NO: 4261054 - DNA, 25 bp, Homo sapien
gcaaagctagatacaaaatggttca

SEQ ID NO: 4261055 - DNA, 25 bp, Homo sapien
tcaggtagatagaaaacgagagaga

SEQ ID NO: 4261056 - DNA, 25 bp, Homo sapien
gaataccggaataagattgcaaagc

SEQ ID NO: 4261057 - DNA, 25 bp, Homo sapien
tcaagggtgaatcaacatgtgaact

SEQ ID NO: 4261058 - DNA, 25 bp, Homo sapien
agttattcctggtgcctctgacagc

SEQ ID NO: 4261059 - DNA, 25 bp, Homo sapien
tggtgcctctgacagcttctaggat

SEQ ID NO: 4261060 - DNA, 25 bp, Homo sapien
tgcctctgacagcttctaggatatt

SEQ ID NO: 4261061 - DNA, 25 bp, Homo sapien
tgtctctggcttttcaccctcaaca

SEQ ID NO: 4261062 - DNA, 25 bp, Homo sapien
tctctggcttttcaccctcaacatt

SEQ ID NO: 4261063 - DNA, 25 bp, Homo sapien
gtctctggcttttcaccctcaacat

SEQ ID NO: 4261064 - DNA, 25 bp, Homo sapien
ctttctccaacagacattagggtta

SEQ ID NO: 4261065 - DNA, 25 bp, Homo sapien
tctccaacagacattagggttagat

SEQ ID NO: 4261066 - DNA, 25 bp, Homo sapien
gacattagggttagatttgcaaagt

SEQ ID NO: 4261067 - DNA, 25 bp, Homo sapien
caacagacattagggttagatttgc

SEQ ID NO: 4261068 - DNA, 25 bp, Homo sapien
ccactggaaccaccatcttctccat

SEQ ID NO: 4261069 - DNA, 25 bp, Homo sapien
agcagccccactggaaccaccatct

SEQ ID NO: 4261070 - DNA, 25 bp, Homo sapien
cagcagccccactggaaccaccatc

SEQ ID NO: 4261071 - DNA, 25 bp, Homo sapien
gccccactggaaccaccatcttctc

SEQ ID NO: 4261072 - DNA, 25 bp, Homo sapien
ccaatcaggtgggatctcaaagcag

SEQ ID NO: 4261073 - DNA, 25 bp, Homo sapien
ccctctttcaggcttagtgtcctct

SEQ ID NO: 4261074 - DNA, 25 bp, Homo sapien
agcactggccagtccagtggatagg

SEQ ID NO: 4261075 - DNA, 25 bp, Homo sapien
tggataggatccaatcaggtgggat

SEQ ID NO: 4261076 - DNA, 25 bp, Homo sapien
tggaagggcccattcctctcaaggg

SEQ ID NO: 4261077 - DNA, 25 bp, Homo sapien
ttccccatggtagggagggtagaga

SEQ ID NO: 4261078 - DNA, 25 bp, Homo sapien
cccattcctctcaaggggcttccat

SEQ ID NO: 4261079 - DNA, 25 bp, Homo sapien
agggcccattcctctcaaggggctt

SEQ ID NO: 4261080 - DNA, 25 bp, Homo sapien
gggcccaactctgaatcatgatgcc

SEQ ID NO: 4261081 - DNA, 25 bp, Homo sapien
taaccccacattgccgtatcatgaa

SEQ ID NO: 4261082 - DNA, 25 bp, Homo sapien
gatttacgactctcttcttgaatgc

SEQ ID NO: 4261083 - DNA, 25 bp, Homo sapien
attgccgtatcatgaaaatgcctgt

SEQ ID NO: 4261084 - DNA, 25 bp, Homo sapien
tggagcagaatccctcagttcataa

SEQ ID NO: 4261085 - DNA, 25 bp, Homo sapien
gagcagaatccctcagttcataaag

SEQ ID NO: 4261086 - DNA, 25 bp, Homo sapien
ctggagcagaatccctcagttcata

SEQ ID NO: 4261087 - DNA, 25 bp, Homo sapien
ggagcagaatccctcagttcataaa

SEQ ID NO: 4261088 - DNA, 25 bp, Homo sapien
taatatctgcttcgtgattttaatc

SEQ ID NO: 4261089 - DNA, 25 bp, Homo sapien
ccagtgaagcatccagccagcgaga

SEQ ID NO: 4261090 - DNA, 25 bp, Homo sapien
gaagcatccagccagcgagaccatg

SEQ ID NO: 4261091 - DNA, 25 bp, Homo sapien
catccagccagcgagaccatggaat

SEQ ID NO: 4261092 - DNA, 25 bp, Homo sapien
caccatggtactagctgagaactct

SEQ ID NO: 4261093 - DNA, 25 bp, Homo sapien
gaactctgctattcgtttcgtggga

SEQ ID NO: 4261094 - DNA, 25 bp, Homo sapien
tcgtttcgtgggaggtagctgtatt

SEQ ID NO: 4261095 - DNA, 25 bp, Homo sapien
actgctttacagaacaaccctccgg

SEQ ID NO: 4261096 - DNA, 25 bp, Homo sapien
gacccagctggccatccaacgttca

SEQ ID NO: 4261097 - DNA, 25 bp, Homo sapien
ctgtgtgtgcggttggcattgctct

SEQ ID NO: 4261098 - DNA, 25 bp, Homo sapien
cattgctctgagtagcgggtaaagc

SEQ ID NO: 4261099 - DNA, 25 bp, Homo sapien
agtgaacagttctcctcagacccag

SEQ ID NO: 4261100 - DNA, 25 bp, Homo sapien
acattcaggcccagttgcaaggtag

SEQ ID NO: 4261101 - DNA, 25 bp, Homo sapien
ggtaacagcagagttgatacccgaa

SEQ ID NO: 4261102 - DNA, 25 bp, Homo sapien
cttccgtgtcatggagaacaggccc

SEQ ID NO: 4261103 - DNA, 25 bp, Homo sapien
ttgatacccgaaggcctcctccaag

SEQ ID NO: 4261104 - DNA, 25 bp, Homo sapien
tgctcctgggagcttccgtgtcatg

SEQ ID NO: 4261105 - DNA, 25 bp, Homo sapien
tcactgggtcttcgctgcaacctgg

SEQ ID NO: 4261106 - DNA, 25 bp, Homo sapien
gtatggattgtcactgggtcttcgc

SEQ ID NO: 4261107 - DNA, 25 bp, Homo sapien
ggcgtgcatctgttgaacacatttg

SEQ ID NO: 4261108 - DNA, 25 bp, Homo sapien
gaacacatttgtatggattgtcact

SEQ ID NO: 4261109 - DNA, 25 bp, Homo sapien
gattgttcatcctcgcttacgactt

SEQ ID NO: 4261110 - DNA, 25 bp, Homo sapien
tcatcctcgcttacgacttcaacag

SEQ ID NO: 4261111 - DNA, 25 bp, Homo sapien
ttagattgttcatcctcgcttacga

SEQ ID NO: 4261112 - DNA, 25 bp, Homo sapien
cctcgcttacgacttcaacagtcat

SEQ ID NO: 4261113 - DNA, 25 bp, Homo sapien
gtgctgaccatcgagtccgactgga

SEQ ID NO: 4261114 - DNA, 25 bp, Homo sapien
ggtttcactggcttgaccatcgcag

SEQ ID NO: 4261115 - DNA, 25 bp, Homo sapien
gagcttcccggaaactgtatctgat

SEQ ID NO: 4261116 - DNA, 25 bp, Homo sapien
tctcctagaattccagtgctgacca

SEQ ID NO: 4261117 - DNA, 25 bp, Homo sapien
tctgtgaaatgggctgaattcccat

SEQ ID NO: 4261118 - DNA, 25 bp, Homo sapien
tatctgtgaaatgggctgaattccc

SEQ ID NO: 4261119 - DNA, 25 bp, Homo sapien
ctagcctctggctccttatctgtga

SEQ ID NO: 4261120 - DNA, 25 bp, Homo sapien
cttatctgtgaaatgggctgaattc

SEQ ID NO: 4261121 - DNA, 25 bp, Homo sapien
agcaagcaatgctgtgtcattctga

SEQ ID NO: 4261122 - DNA, 25 bp, Homo sapien
tccacagcaagcaatgctgtgtcat

SEQ ID NO: 4261123 - DNA, 25 bp, Homo sapien
gtccacagcaagcaatgctgtgtca

SEQ ID NO: 4261124 - DNA, 25 bp, Homo sapien
cagcaagcaatgctgtgtcattctg

SEQ ID NO: 4261125 - DNA, 25 bp, Homo sapien
cttggtatcctatagagtcactggg

SEQ ID NO: 4261126 - DNA, 25 bp, Homo sapien
tagacagcgtcttacatgcaacaga

SEQ ID NO: 4261127 - DNA, 25 bp, Homo sapien
tttgagcagaggtgtaccacggtct

SEQ ID NO: 4261128 - DNA, 25 bp, Homo sapien
tgtcttgtcatgtagcactgcgtca

SEQ ID NO: 4261129 - DNA, 25 bp, Homo sapien
catctggcccaactcacaagggcgc

SEQ ID NO: 4261130 - DNA, 25 bp, Homo sapien
tcacaagggcgcctctctctgctat

SEQ ID NO: 4261131 - DNA, 25 bp, Homo sapien
tctctctgctatatcacctcgtggc

SEQ ID NO: 4261132 - DNA, 25 bp, Homo sapien
tgctatatcacctcgtggcactgcc

SEQ ID NO: 4261133 - DNA, 25 bp, Homo sapien
gacatcatatttaaacgtcaccata

SEQ ID NO: 4261134 - DNA, 25 bp, Homo sapien
ttaaacgtcaccatatctcagctgc

SEQ ID NO: 4261135 - DNA, 25 bp, Homo sapien
atttaaacgtcaccatatctcagct

SEQ ID NO: 4261136 - DNA, 25 bp, Homo sapien
tcatatttaaacgtcaccatatctc

SEQ ID NO: 4261137 - DNA, 25 bp, Homo sapien
taaaataaggatagcctctgggagg

SEQ ID NO: 4261138 - DNA, 25 bp, Homo sapien
tacagtaatgatagcctccaaggca

SEQ ID NO: 4261139 - DNA, 25 bp, Homo sapien
gagaattctgaaggacatgaaccct

SEQ ID NO: 4261140 - DNA, 25 bp, Homo sapien
tgagtctgagctggttgagaaccca

SEQ ID NO: 4261141 - DNA, 25 bp, Homo sapien
agaatctgcctcctttgaccttgtt

SEQ ID NO: 4261142 - DNA, 25 bp, Homo sapien
tgaccttgttcaatcactatgaagc

SEQ ID NO: 4261143 - DNA, 25 bp, Homo sapien
ctcatttaagcactagtggaatttt

SEQ ID NO: 4261144 - DNA, 25 bp, Homo sapien
cagtttcttagttctcatttaagca

SEQ ID NO: 4261145 - DNA, 25 bp, Homo sapien
gtctgtgatgtactttcactggctc

SEQ ID NO: 4261146 - DNA, 25 bp, Homo sapien
tgtgatgtactttcactggctctgt

SEQ ID NO: 4261147 - DNA, 25 bp, Homo sapien
gagattgtttgtttaacaatgcttt

SEQ ID NO: 4261148 - DNA, 25 bp, Homo sapien
tgatatattagcaagtctgtgatgt

SEQ ID NO: 4261149 - DNA, 25 bp, Homo sapien
tactacacctttatcttcagtaaag

SEQ ID NO: 4261150 - DNA, 25 bp, Homo sapien
gtgtgtgggagcttttactacacct

SEQ ID NO: 4261151 - DNA, 25 bp, Homo sapien
ctacacctttatcttcagtaaagag

SEQ ID NO: 4261152 - DNA, 25 bp, Homo sapien
tgggagcttttactacacctttatc

SEQ ID NO: 4261153 - DNA, 25 bp, Homo sapien
taaaatctgtgctaatgcacggcag

SEQ ID NO: 4261154 - DNA, 25 bp, Homo sapien
gccagatgtacaaaagtctgagaca

SEQ ID NO: 4261155 - DNA, 25 bp, Homo sapien
tgcacggcagtctataacaattcta

SEQ ID NO: 4261156 - DNA, 25 bp, Homo sapien
caagccaatcagacagtacgtgaca

SEQ ID NO: 4261157 - DNA, 25 bp, Homo sapien
agcccgaccggttcgtggcagagaa

SEQ ID NO: 4261158 - DNA, 25 bp, Homo sapien
ctagcccgaccggttcgtggcagag

SEQ ID NO: 4261159 - DNA, 25 bp, Homo sapien
tcctagcccgaccggttcgtggcag

SEQ ID NO: 4261160 - DNA, 25 bp, Homo sapien
ttcctagcccgaccggttcgtggca

SEQ ID NO: 4261161 - DNA, 25 bp, Homo sapien
tctgaatcctgatcaaaagatgtct

SEQ ID NO: 4261162 - DNA, 25 bp, Homo sapien
tgtccacatctgaatcctgatcaaa

SEQ ID NO: 4261163 - DNA, 25 bp, Homo sapien
ccacatctgaatcctgatcaaaaga

SEQ ID NO: 4261164 - DNA, 25 bp, Homo sapien
gggaagatgtccacatctgaatcct

SEQ ID NO: 4261165 - DNA, 25 bp, Homo sapien
aagaactatcactccttaaacttcg

SEQ ID NO: 4261166 - DNA, 25 bp, Homo sapien
tcgcttatgtttaggaagtattaca

SEQ ID NO: 4261167 - DNA, 25 bp, Homo sapien
gtaaagactagtattaagaactatc

SEQ ID NO: 4261168 - DNA, 25 bp, Homo sapien
tatcactccttaaacttcgcttatg

SEQ ID NO: 4261169 - DNA, 25 bp, Homo sapien
tagtgtacttctggaaaagggtcag

SEQ ID NO: 4261170 - DNA, 25 bp, Homo sapien
tgcaaagcatcaccgaggtggacct

SEQ ID NO: 4261171 - DNA, 25 bp, Homo sapien
tacccaaaaagtatgcacaatgccc

SEQ ID NO: 4261172 - DNA, 25 bp, Homo sapien
taaaaattcaagctgtcctactggt

SEQ ID NO: 4261173 - DNA, 25 bp, Homo sapien
gcactaatatgcaatgatgttcccg

SEQ ID NO: 4261174 - DNA, 25 bp, Homo sapien
taatatgcaatgatgttcccggtta

SEQ ID NO: 4261175 - DNA, 25 bp, Homo sapien
aatatgcaatgatgttcccggttac

SEQ ID NO: 4261176 - DNA, 25 bp, Homo sapien
actaatatgcaatgatgttcccggt

SEQ ID NO: 4261177 - DNA, 25 bp, Homo sapien
gttttcctgccagggttataatcgc

SEQ ID NO: 4261178 - DNA, 25 bp, Homo sapien
tgttttcctgccagggttataatcg

SEQ ID NO: 4261179 - DNA, 25 bp, Homo sapien
tttcctgccagggttataatcgcct

SEQ ID NO: 4261180 - DNA, 25 bp, Homo sapien
tcctgccagggttataatcgccttc

SEQ ID NO: 4261181 - DNA, 25 bp, Homo sapien
gcagtcctgatctcttactatgagt

SEQ ID NO: 4261182 - DNA, 25 bp, Homo sapien
cattaagtggcaccatatgagaacc

SEQ ID NO: 4261183 - DNA, 25 bp, Homo sapien
ggttgacatgaccaaagactttttg

SEQ ID NO: 4261184 - DNA, 25 bp, Homo sapien
caatcagtggagcattgcagtcctg

SEQ ID NO: 4261185 - DNA, 25 bp, Homo sapien
tggaatgccaaattctgaatccgag

SEQ ID NO: 4261186 - DNA, 25 bp, Homo sapien
gggactgtatctgaagacggttttc

SEQ ID NO: 4261187 - DNA, 25 bp, Homo sapien
tgggcttagggactgtatctgaaga

SEQ ID NO: 4261188 - DNA, 25 bp, Homo sapien
gagtcagagtttacagcctctacta

SEQ ID NO: 4261189 - DNA, 25 bp, Homo sapien
aagcaaatttccatttcacaggtca

SEQ ID NO: 4261190 - DNA, 25 bp, Homo sapien
gcaaatttccatttcacaggtcaat

SEQ ID NO: 4261191 - DNA, 25 bp, Homo sapien
ctagtaagcaaatttccatttcaca

SEQ ID NO: 4261192 - DNA, 25 bp, Homo sapien
aatttccatttcacaggtcaatata

SEQ ID NO: 4261193 - DNA, 25 bp, Homo sapien
cacccagattgtgtggcttttccca

SEQ ID NO: 4261194 - DNA, 25 bp, Homo sapien
acagggcagctcctagcagggagta

SEQ ID NO: 4261195 - DNA, 25 bp, Homo sapien
aataaggcccctcgttagccaagag

SEQ ID NO: 4261196 - DNA, 25 bp, Homo sapien
taccaggcaaacaggtcagatatct

SEQ ID NO: 4261197 - DNA, 25 bp, Homo sapien
ctcaggcaacgaaaggcagatattg

SEQ ID NO: 4261198 - DNA, 25 bp, Homo sapien
gtgttaatattccagcacagtggca

SEQ ID NO: 4261199 - DNA, 25 bp, Homo sapien
tggctcacatgagaggcaaggacac

SEQ ID NO: 4261200 - DNA, 25 bp, Homo sapien
cactaagtggtaagggacatgggta

SEQ ID NO: 4261201 - DNA, 25 bp, Homo sapien
cattacaacctaaccacaagggagc

SEQ ID NO: 4261202 - DNA, 25 bp, Homo sapien
aagaggacctcaactgagctgacca

SEQ ID NO: 4261203 - DNA, 25 bp, Homo sapien
aaattttattaacgccctcagatgg

SEQ ID NO: 4261204 - DNA, 25 bp, Homo sapien
gatggctagaaaacgagaggttctc

SEQ ID NO: 4261205 - DNA, 25 bp, Homo sapien
ttcattactgtcaaatttagctgaa

SEQ ID NO: 4261206 - DNA, 25 bp, Homo sapien
agcagctaccgttttacttggaact

SEQ ID NO: 4261207 - DNA, 25 bp, Homo sapien
tttagcagctaccgttttacttgga

SEQ ID NO: 4261208 - DNA, 25 bp, Homo sapien
tcattactgtcaaatttagctgaat

SEQ ID NO: 4261209 - DNA, 25 bp, Homo sapien
tgaccaattagttaggaatcacctc

SEQ ID NO: 4261210 - DNA, 25 bp, Homo sapien
tgacggttttaatctctcaggtaac

SEQ ID NO: 4261211 - DNA, 25 bp, Homo sapien
cactggtgcccttacagatttagaa

SEQ ID NO: 4261212 - DNA, 25 bp, Homo sapien
gcctgtccacctaaatgcttccata

SEQ ID NO: 4261213 - DNA, 25 bp, Homo sapien
cttctgacttctgagaatatgaagg

SEQ ID NO: 4261214 - DNA, 25 bp, Homo sapien
aaataaacaccacagaggatacaat

SEQ ID NO: 4261215 - DNA, 25 bp, Homo sapien
aaaataaacaccacagaggatacaa

SEQ ID NO: 4261216 - DNA, 25 bp, Homo sapien
gaaaataaacaccacagaggataca

SEQ ID NO: 4261217 - DNA, 25 bp, Homo sapien
tgtgcacacatacccatgatccatg

SEQ ID NO: 4261218 - DNA, 25 bp, Homo sapien
cacagacaccatacaaatcaattat

SEQ ID NO: 4261219 - DNA, 25 bp, Homo sapien
gaatggaaactaagcaatggtttaa

SEQ ID NO: 4261220 - DNA, 25 bp, Homo sapien
tctctgttaaagacagggtaataaa

SEQ ID NO: 4261221 - DNA, 25 bp, Homo sapien
cccagatgtattcacgctcaccaaa

SEQ ID NO: 4261222 - DNA, 25 bp, Homo sapien
aaaagacagaattcccatcacacca

SEQ ID NO: 4261223 - DNA, 25 bp, Homo sapien
tctaattcaagactacaggtgggca

SEQ ID NO: 4261224 - DNA, 25 bp, Homo sapien
gaaggccaattgtaataggtgagaa

SEQ ID NO: 4261225 - DNA, 25 bp, Homo sapien
atctttatctaacccatctgaagga

SEQ ID NO: 4261226 - DNA, 25 bp, Homo sapien
ttcatctttatctaacccatctgaa

SEQ ID NO: 4261227 - DNA, 25 bp, Homo sapien
ttccccatcatttgttatgggagat

SEQ ID NO: 4261228 - DNA, 25 bp, Homo sapien
ccccatcatttgttatgggagatgc

SEQ ID NO: 4261229 - DNA, 25 bp, Homo sapien
tcaaatgtgtatttaggtctttcgg

SEQ ID NO: 4261230 - DNA, 25 bp, Homo sapien
aaatcaaatgtgtatttaggtcttt

SEQ ID NO: 4261231 - DNA, 25 bp, Homo sapien
gagaaatcaaatgtgtatttaggtc

SEQ ID NO: 4261232 - DNA, 25 bp, Homo sapien
cttcttctgagaaatcaaatgtgta

SEQ ID NO: 4261233 - DNA, 25 bp, Homo sapien
tctcttggaataaccacaggttctg

SEQ ID NO: 4261234 - DNA, 25 bp, Homo sapien
tgctgctctcctaagcaaagaatct

SEQ ID NO: 4261235 - DNA, 25 bp, Homo sapien
tctgaccaaggattccgtttcttca

SEQ ID NO: 4261236 - DNA, 25 bp, Homo sapien
cactaggtttaccagatgatgtagg

SEQ ID NO: 4261237 - DNA, 25 bp, Homo sapien
ttactgctgcagtatcaagatcacc

SEQ ID NO: 4261238 - DNA, 25 bp, Homo sapien
ggtgctccactgaattcttcatcaa

SEQ ID NO: 4261239 - DNA, 25 bp, Homo sapien
tttatttataggaactgatggagtc

SEQ ID NO: 4261240 - DNA, 25 bp, Homo sapien
tgatggagtcaatgcctcttctcct

SEQ ID NO: 4261241 - DNA, 25 bp, Homo sapien
tccagccagaacatcttctcgttct

SEQ ID NO: 4261242 - DNA, 25 bp, Homo sapien
acatcttctcgttcttgagattcca

SEQ ID NO: 4261243 - DNA, 25 bp, Homo sapien
ctggcatctgccttcatagctgtaa

SEQ ID NO: 4261244 - DNA, 25 bp, Homo sapien
tcttctgccataaggtgagggcatt

SEQ ID NO: 4261245 - DNA, 25 bp, Homo sapien
tccagttcttcaacaaatgccgcta

SEQ ID NO: 4261246 - DNA, 25 bp, Homo sapien
caaatgccgctaaatcctctttcca

SEQ ID NO: 4261247 - DNA, 25 bp, Homo sapien
gccgctaaatcctctttccaaagat

SEQ ID NO: 4261248 - DNA, 25 bp, Homo sapien
tcttcaacaaatgccgctaaatcct

SEQ ID NO: 4261249 - DNA, 25 bp, Homo sapien
atataattaaaatctgggcctgaag

SEQ ID NO: 4261250 - DNA, 25 bp, Homo sapien
tgaaggagttcctgaatcggaggaa

SEQ ID NO: 4261251 - DNA, 25 bp, Homo sapien
tcctgaatcggaggaactatcatca

SEQ ID NO: 4261252 - DNA, 25 bp, Homo sapien
aactatcatcatgctggttttgtgt

SEQ ID NO: 4261253 - DNA, 25 bp, Homo sapien
tcataacctctctggactaacattt

SEQ ID NO: 4261254 - DNA, 25 bp, Homo sapien
taacctctctggactaacatttgaa

SEQ ID NO: 4261255 - DNA, 25 bp, Homo sapien
cataacctctctggactaacatttg

SEQ ID NO: 4261256 - DNA, 25 bp, Homo sapien
cctctctggactaacatttgaatca

SEQ ID NO: 4261257 - DNA, 25 bp, Homo sapien
cttcagacatcccatatgatcaaaa

SEQ ID NO: 4261258 - DNA, 25 bp, Homo sapien
aatgaaacgggcttgattgttaagc

SEQ ID NO: 4261259 - DNA, 25 bp, Homo sapien
ctttcagaatgtcttgcacagtttc

SEQ ID NO: 4261260 - DNA, 25 bp, Homo sapien
gtagattctgctcccaacattccca

SEQ ID NO: 4261261 - DNA, 25 bp, Homo sapien
catggaattacaagtaagagtagtt

SEQ ID NO: 4261262 - DNA, 25 bp, Homo sapien
gaattacaagtaagagtagtttgaa

SEQ ID NO: 4261263 - DNA, 25 bp, Homo sapien
tggaattacaagtaagagtagtttg

SEQ ID NO: 4261264 - DNA, 25 bp, Homo sapien
attacaagtaagagtagtttgaagt

SEQ ID NO: 4261265 - DNA, 25 bp, Homo sapien
cacagttgtgtcagtatgatattct

SEQ ID NO: 4261266 - DNA, 25 bp, Homo sapien
tagcataggttctaaaacctgttct

SEQ ID NO: 4261267 - DNA, 25 bp, Homo sapien
tatctgttccatttagcataggttc

SEQ ID NO: 4261268 - DNA, 25 bp, Homo sapien
tgcttgtgctagtttctcttcagtc

SEQ ID NO: 4261269 - DNA, 25 bp, Homo sapien
ttttgaccaagttcttgaatcgtgc

SEQ ID NO: 4261270 - DNA, 25 bp, Homo sapien
actggaagctctgtaatttctactg

SEQ ID NO: 4261271 - DNA, 25 bp, Homo sapien
gtgtttctgtccactacaaatattt

SEQ ID NO: 4261272 - DNA, 25 bp, Homo sapien
ctggttttgaccaagttcttgaatc

SEQ ID NO: 4261273 - DNA, 25 bp, Homo sapien
aaacctggaatatgaggtgtttcta

SEQ ID NO: 4261274 - DNA, 25 bp, Homo sapien
ctgtaggcacatatcaaattatacc

SEQ ID NO: 4261275 - DNA, 25 bp, Homo sapien
ggtctttacggtctacaatatgttc

SEQ ID NO: 4261276 - DNA, 25 bp, Homo sapien
ccatgaaacttacctccaaaactca

SEQ ID NO: 4261277 - DNA, 25 bp, Homo sapien
tcatagttgggtagtttacaagccc

SEQ ID NO: 4261278 - DNA, 25 bp, Homo sapien
catgggatgaggatccaggccatct

SEQ ID NO: 4261279 - DNA, 25 bp, Homo sapien
gaacttaaggaggttgtcatccaca

SEQ ID NO: 4261280 - DNA, 25 bp, Homo sapien
tccacagcaggaaaaagtagccttg

SEQ ID NO: 4261281 - DNA, 25 bp, Homo sapien
caccatgaagccgagttccaaactg

SEQ ID NO: 4261282 - DNA, 25 bp, Homo sapien
ttgtgaaaatataacgagggcttgc

SEQ ID NO: 4261283 - DNA, 25 bp, Homo sapien
ccaataggctgaagcaagttaatgt

SEQ ID NO: 4261284 - DNA, 25 bp, Homo sapien
gaaaatataacgagggcttgcagca

SEQ ID NO: 4261285 - DNA, 25 bp, Homo sapien
tgatgataagccgacatctcagcaa

SEQ ID NO: 4261286 - DNA, 25 bp, Homo sapien
ccatgatgataagccgacatctcag

SEQ ID NO: 4261287 - DNA, 25 bp, Homo sapien
atgataagccgacatctcagcaaca

SEQ ID NO: 4261288 - DNA, 25 bp, Homo sapien
ctccatgatgataagccgacatctc

SEQ ID NO: 4261289 - DNA, 25 bp, Homo sapien
cttttacttcacgtttatcattcct

SEQ ID NO: 4261290 - DNA, 25 bp, Homo sapien
ggcaacttttacttcacgtttatca

SEQ ID NO: 4261291 - DNA, 25 bp, Homo sapien
gcaacttttacttcacgtttatcat

SEQ ID NO: 4261292 - DNA, 25 bp, Homo sapien
caacttttacttcacgtttatcatt

SEQ ID NO: 4261293 - DNA, 25 bp, Homo sapien
gtgagtacatactaacacgtttgtt

SEQ ID NO: 4261294 - DNA, 25 bp, Homo sapien
ttgcttttcaagaacaccagtaaaa

SEQ ID NO: 4261295 - DNA, 25 bp, Homo sapien
ttttcctagaaagccatctgcaggt

SEQ ID NO: 4261296 - DNA, 25 bp, Homo sapien
tgagattctgtaacaaagtgagtac

SEQ ID NO: 4261297 - DNA, 25 bp, Homo sapien
taaaataagaggtacataataattg

SEQ ID NO: 4261298 - DNA, 25 bp, Homo sapien
aaaataagaggtacataataattgg

SEQ ID NO: 4261299 - DNA, 25 bp, Homo sapien
tgagggataggtagaaacatctgct

SEQ ID NO: 4261300 - DNA, 25 bp, Homo sapien
tcatagaagaaaggcgatttgtggc

SEQ ID NO: 4261301 - DNA, 25 bp, Homo sapien
tcaaaaaggccttaaattcctctga

SEQ ID NO: 4261302 - DNA, 25 bp, Homo sapien
gatcaaaatctgcttcaactaacga

SEQ ID NO: 4261303 - DNA, 25 bp, Homo sapien
catcaacaagagatggtatagatct

SEQ ID NO: 4261304 - DNA, 25 bp, Homo sapien
caagagatggtatagatctttcatt

SEQ ID NO: 4261305 - DNA, 25 bp, Homo sapien
gatgaaatcattataagtcaaatgc

SEQ ID NO: 4261306 - DNA, 25 bp, Homo sapien
tgatgaaatcattataagtcaaatg

SEQ ID NO: 4261307 - DNA, 25 bp, Homo sapien
ctctggtaagccatgtagcctacgc

SEQ ID NO: 4261308 - DNA, 25 bp, Homo sapien
tgtagcctacgctgtctccggtctt

SEQ ID NO: 4261309 - DNA, 25 bp, Homo sapien
gccatgtagcctacgctgtctccgg

SEQ ID NO: 4261310 - DNA, 25 bp, Homo sapien
gctgtctccggtcttccataaaatt

SEQ ID NO: 4261311 - DNA, 25 bp, Homo sapien
ctgggaggaaaggaatagaaggtag

SEQ ID NO: 4261312 - DNA, 25 bp, Homo sapien
agagacttatcatagggaaccagga

SEQ ID NO: 4261313 - DNA, 25 bp, Homo sapien
agacttatcatagggaaccaggact

SEQ ID NO: 4261314 - DNA, 25 bp, Homo sapien
acttatcatagggaaccaggactgg

SEQ ID NO: 4261315 - DNA, 25 bp, Homo sapien
tctttagctgtactagtacccaatc

SEQ ID NO: 4261316 - DNA, 25 bp, Homo sapien
gcgatgcctttccatatcagcaaaa

SEQ ID NO: 4261317 - DNA, 25 bp, Homo sapien
catcttcaggaccagcatatctaaa

SEQ ID NO: 4261318 - DNA, 25 bp, Homo sapien
taaacaagatgcgatgcctttccat

SEQ ID NO: 4261319 - DNA, 25 bp, Homo sapien
cagtgatagctattttcgaagtcta

SEQ ID NO: 4261320 - DNA, 25 bp, Homo sapien
tggagtggcaataaaggaggtttac

SEQ ID NO: 4261321 - DNA, 25 bp, Homo sapien
ggaaacaagactagccattgaaatg

SEQ ID NO: 4261322 - DNA, 25 bp, Homo sapien
gttttttcaaactaatggagtggca

SEQ ID NO: 4261323 - DNA, 25 bp, Homo sapien
ttttccattcgtcaaattcaggaat

SEQ ID NO: 4261324 - DNA, 25 bp, Homo sapien
tcaaattcaggaatactgtagaagg

SEQ ID NO: 4261325 - DNA, 25 bp, Homo sapien
tttttccattcgtcaaattcaggaa

SEQ ID NO: 4261326 - DNA, 25 bp, Homo sapien
gccttttatgtgagaaccatcttga

SEQ ID NO: 4261327 - DNA, 25 bp, Homo sapien
aaagtgatggccaattgtgatggat

SEQ ID NO: 4261328 - DNA, 25 bp, Homo sapien
tcttcaagaaaaccatgcttcaaaa

SEQ ID NO: 4261329 - DNA, 25 bp, Homo sapien
taagcaggccttttatgtgagaacc

SEQ ID NO: 4261330 - DNA, 25 bp, Homo sapien
cttgtaggtaggctgctatagtacc

SEQ ID NO: 4261331 - DNA, 25 bp, Homo sapien
taagtcctggtatttgtgcattcca

SEQ ID NO: 4261332 - DNA, 25 bp, Homo sapien
caaatactttagagtgcataagaga

SEQ ID NO: 4261333 - DNA, 25 bp, Homo sapien
ttctagttctttctcgattaccatc

SEQ ID NO: 4261334 - DNA, 25 bp, Homo sapien
tcataatctttccatagcgtaaggt

SEQ ID NO: 4261335 - DNA, 25 bp, Homo sapien
gagattctgcatcatcgtaactttt

SEQ ID NO: 4261336 - DNA, 25 bp, Homo sapien
tctttccatagcgtaaggttttcag

SEQ ID NO: 4261337 - DNA, 25 bp, Homo sapien
gcgtaaggttttcagagattctgca

SEQ ID NO: 4261338 - DNA, 25 bp, Homo sapien
cttatattgtagaccaactatttta

SEQ ID NO: 4261339 - DNA, 25 bp, Homo sapien
tatattgtagaccaactattttaat

SEQ ID NO: 4261340 - DNA, 25 bp, Homo sapien
atattgtagaccaactattttaata

SEQ ID NO: 4261341 - DNA, 25 bp, Homo sapien
ttatattgtagaccaactattttaa

SEQ ID NO: 4261342 - DNA, 25 bp, Homo sapien
gttaatatcagtgtacactccaggg

SEQ ID NO: 4261343 - DNA, 25 bp, Homo sapien
cagccagtgatttggcagagtctcc

SEQ ID NO: 4261344 - DNA, 25 bp, Homo sapien
actccgtatctgtctcgtccaatca

SEQ ID NO: 4261345 - DNA, 25 bp, Homo sapien
cacctaatccagacacagccagtga

SEQ ID NO: 4261346 - DNA, 25 bp, Homo sapien
catccagtttgggaatacctttgat

SEQ ID NO: 4261347 - DNA, 25 bp, Homo sapien
gttcaggatactttctacaatgcca

SEQ ID NO: 4261348 - DNA, 25 bp, Homo sapien
gagtctgagccttaaatttcaccca

SEQ ID NO: 4261349 - DNA, 25 bp, Homo sapien
ttcttattcagctgagtctgagcct

SEQ ID NO: 4261350 - DNA, 25 bp, Homo sapien
tcaaaagttggattttcaataaggc

SEQ ID NO: 4261351 - DNA, 25 bp, Homo sapien
agttggattttcaataaggcaatta

SEQ ID NO: 4261352 - DNA, 25 bp, Homo sapien
gtctgagaatcaaaagttggatttt

SEQ ID NO: 4261353 - DNA, 25 bp, Homo sapien
caaaacttttgggctgcagagtcat

SEQ ID NO: 4261354 - DNA, 25 bp, Homo sapien
tcagtttaccaacaacttgatctac

SEQ ID NO: 4261355 - DNA, 25 bp, Homo sapien
tcttaactacttcaatcagtttacc

SEQ ID NO: 4261356 - DNA, 25 bp, Homo sapien
gatctaccacataatccacgtgccg

SEQ ID NO: 4261357 - DNA, 25 bp, Homo sapien
ggtttcactgatacaccagctttgt

SEQ ID NO: 4261358 - DNA, 25 bp, Homo sapien
tgtgagacaaacatcccatctttca

SEQ ID NO: 4261359 - DNA, 25 bp, Homo sapien
tgcaagctcatgaataactttcagg

SEQ ID NO: 4261360 - DNA, 25 bp, Homo sapien
tctttcatttgcaagctcatgaata

SEQ ID NO: 4261361 - DNA, 25 bp, Homo sapien
cctttttcactcaatgtgagacaaa

SEQ ID NO: 4261362 - DNA, 25 bp, Homo sapien
taaatttggacagatctggttggaa

SEQ ID NO: 4261363 - DNA, 25 bp, Homo sapien
tcatatgcccttctagtcatgaggg

SEQ ID NO: 4261364 - DNA, 25 bp, Homo sapien
ttaaacatgaccttgacccctctac

SEQ ID NO: 4261365 - DNA, 25 bp, Homo sapien
acccctctacacgaaccagccaaat

SEQ ID NO: 4261366 - DNA, 25 bp, Homo sapien
ttttgcaccataaccattacgacca

SEQ ID NO: 4261367 - DNA, 25 bp, Homo sapien
gcaagctgtttctactgtaaacttt

SEQ ID NO: 4261368 - DNA, 25 bp, Homo sapien
taaaactgtgtttgtattctttgca

SEQ ID NO: 4261369 - DNA, 25 bp, Homo sapien
atattacaaagttttgcaccataac

SEQ ID NO: 4261370 - DNA, 25 bp, Homo sapien
atcatcatagttactggatgttaaa

SEQ ID NO: 4261371 - DNA, 25 bp, Homo sapien
tcatcatagttactggatgttaaaa

SEQ ID NO: 4261372 - DNA, 25 bp, Homo sapien
catcatagttactggatgttaaaag

SEQ ID NO: 4261373 - DNA, 25 bp, Homo sapien
gcaggaacataaactttctctacct

SEQ ID NO: 4261374 - DNA, 25 bp, Homo sapien
ttctctaccttgtgttctactactg

SEQ ID NO: 4261375 - DNA, 25 bp, Homo sapien
tctctaccttgtgttctactactgg

SEQ ID NO: 4261376 - DNA, 25 bp, Homo sapien
aggaacataaactttctctaccttg

SEQ ID NO: 4261377 - DNA, 25 bp, Homo sapien
cattaatgtggctaaaatctttgga

SEQ ID NO: 4261378 - DNA, 25 bp, Homo sapien
caaacattcagtgtctattactcct

SEQ ID NO: 4261379 - DNA, 25 bp, Homo sapien
gatggcatgctatacactatttctt

SEQ ID NO: 4261380 - DNA, 25 bp, Homo sapien
tctttggactaatatggccagaacc

SEQ ID NO: 4261381 - DNA, 25 bp, Homo sapien
aaaaatggtctccaagagccccgat

SEQ ID NO: 4261382 - DNA, 25 bp, Homo sapien
tggtctccaagagccccgataggga

SEQ ID NO: 4261383 - DNA, 25 bp, Homo sapien
gaaatagcatacacagcatcaaaga

SEQ ID NO: 4261384 - DNA, 25 bp, Homo sapien
aatggtctccaagagccccgatagg

SEQ ID NO: 4261385 - DNA, 25 bp, Homo sapien
tacaagtcatgttcttatccctctg

SEQ ID NO: 4261386 - DNA, 25 bp, Homo sapien
agtcatgttcttatccctctgttta

SEQ ID NO: 4261387 - DNA, 25 bp, Homo sapien
ctttaatacaagtcatgttcttatc

SEQ ID NO: 4261388 - DNA, 25 bp, Homo sapien
aatacaagtcatgttcttatccctc

SEQ ID NO: 4261389 - DNA, 25 bp, Homo sapien
acctggcacaaaggtaacctccctg

SEQ ID NO: 4261390 - DNA, 25 bp, Homo sapien
atcaaagatcttgtataaacctggc

SEQ ID NO: 4261391 - DNA, 25 bp, Homo sapien
tcatcaaagatcttgtataaacctg

SEQ ID NO: 4261392 - DNA, 25 bp, Homo sapien
ggtaacctccctgcaattcattcct

SEQ ID NO: 4261393 - DNA, 25 bp, Homo sapien
atttccaaagcaagtaattacaata

SEQ ID NO: 4261394 - DNA, 25 bp, Homo sapien
aaagtaaatatagatgcacatctcc

SEQ ID NO: 4261395 - DNA, 25 bp, Homo sapien
cagatgaaattacaaatttccaaag

SEQ ID NO: 4261396 - DNA, 25 bp, Homo sapien
tgcgctcagcctcttctgacggttt

SEQ ID NO: 4261397 - DNA, 25 bp, Homo sapien
tatcaggacgaagaagaatgtgttc

SEQ ID NO: 4261398 - DNA, 25 bp, Homo sapien
atatatgtatcaggacgaagaagaa

SEQ ID NO: 4261399 - DNA, 25 bp, Homo sapien
aagaagaatgtgttcaagttgtgtc

SEQ ID NO: 4261400 - DNA, 25 bp, Homo sapien
caggacgaagaagaatgtgttcaag

SEQ ID NO: 4261401 - DNA, 25 bp, Homo sapien
ctgatacactctctcaacagacaac

SEQ ID NO: 4261402 - DNA, 25 bp, Homo sapien
catttttgttggcagtttctgactc

SEQ ID NO: 4261403 - DNA, 25 bp, Homo sapien
gatacactctctcaacagacaactt

SEQ ID NO: 4261404 - DNA, 25 bp, Homo sapien
cagacaacttctttgaagaatcatt

SEQ ID NO: 4261405 - DNA, 25 bp, Homo sapien
taaacactgatatgactgaaatggc

SEQ ID NO: 4261406 - DNA, 25 bp, Homo sapien
tgaacctggctaggtgcaggagccc

SEQ ID NO: 4261407 - DNA, 25 bp, Homo sapien
ggagccccaaaagcttccagatgta

SEQ ID NO: 4261408 - DNA, 25 bp, Homo sapien
taattcctcacatatcagctctggg

SEQ ID NO: 4261409 - DNA, 25 bp, Homo sapien
taaactgaactaaagggcacacagg

SEQ ID NO: 4261410 - DNA, 25 bp, Homo sapien
gccaggcgcagtgacgttaatttat

SEQ ID NO: 4261411 - DNA, 25 bp, Homo sapien
gattagactcaaccagaggctcatg

SEQ ID NO: 4261412 - DNA, 25 bp, Homo sapien
gttagacgatgaactagccggccag

SEQ ID NO: 4261413 - DNA, 25 bp, Homo sapien
tcagatccaaagatgcacaaaggct

SEQ ID NO: 4261414 - DNA, 25 bp, Homo sapien
aactggaatctgaagagagtggccg

SEQ ID NO: 4261415 - DNA, 25 bp, Homo sapien
gagtggccgtacttacatcagacaa

SEQ ID NO: 4261416 - DNA, 25 bp, Homo sapien
ccaactacaggttgtttacaagaca

SEQ ID NO: 4261417 - DNA, 25 bp, Homo sapien
acctgcgatgctgacgtagacaagc

SEQ ID NO: 4261418 - DNA, 25 bp, Homo sapien
gacaagcacttcttttaataatctc

SEQ ID NO: 4261419 - DNA, 25 bp, Homo sapien
tcaccccgttacacctgcgatgctg

SEQ ID NO: 4261420 - DNA, 25 bp, Homo sapien
gctgacgtagacaagcacttctttt

SEQ ID NO: 4261421 - DNA, 25 bp, Homo sapien
cagagggacgacctacagtattaac

SEQ ID NO: 4261422 - DNA, 25 bp, Homo sapien
tattaactgctgtgaaagtcatccc

SEQ ID NO: 4261423 - DNA, 25 bp, Homo sapien
tgagcgcattgaatgaggctttcca

SEQ ID NO: 4261424 - DNA, 25 bp, Homo sapien
tttgagattaaagccccagaaagag

SEQ ID NO: 4261425 - DNA, 25 bp, Homo sapien
acacagacacacttgcattatcgcc

SEQ ID NO: 4261426 - DNA, 25 bp, Homo sapien
cccaccatttcaggttcggctgccc

SEQ ID NO: 4261427 - DNA, 25 bp, Homo sapien
tgcattatcgccatccccaccattt

SEQ ID NO: 4261428 - DNA, 25 bp, Homo sapien
agacacacttgcattatcgccatcc

SEQ ID NO: 4261429 - DNA, 25 bp, Homo sapien
gcgccgcagccacccgacttggcca

SEQ ID NO: 4261430 - DNA, 25 bp, Homo sapien
cacccaggtcagtgccccgttgccg

SEQ ID NO: 4261431 - DNA, 25 bp, Homo sapien
aggtcagtgccccgttgccgccgcc

SEQ ID NO: 4261432 - DNA, 25 bp, Homo sapien
gtcagtgccccgttgccgccgccca

SEQ ID NO: 4261433 - DNA, 25 bp, Homo sapien
cagccactcgagtcgccagagtagt

SEQ ID NO: 4261434 - DNA, 25 bp, Homo sapien
tgccctcaaactcgaggcgcggcgt

SEQ ID NO: 4261435 - DNA, 25 bp, Homo sapien
caaaggcagccttagcctcgctgca

SEQ ID NO: 4261436 - DNA, 25 bp, Homo sapien
catcgcgaagatccggagcggacgt

SEQ ID NO: 4261437 - DNA, 25 bp, Homo sapien
cacctccctcttgtccggcataaca

SEQ ID NO: 4261438 - DNA, 25 bp, Homo sapien
acggtcacctccctcttgtccggca

SEQ ID NO: 4261439 - DNA, 25 bp, Homo sapien
gccacggtcacctccctcttgtccg

SEQ ID NO: 4261440 - DNA, 25 bp, Homo sapien
gccgccacggtcacctccctcttgt

SEQ ID NO: 4261441 - DNA, 25 bp, Homo sapien
tgcgggtagcaaccgaaaggaagac

SEQ ID NO: 4261442 - DNA, 25 bp, Homo sapien
cttcaagggtcaattgagggcggca

SEQ ID NO: 4261443 - DNA, 25 bp, Homo sapien
tactctgagacctaaccgggaatcc

SEQ ID NO: 4261444 - DNA, 25 bp, Homo sapien
tcgattgtaatcctccaagcgtgct

SEQ ID NO: 4261445 - DNA, 25 bp, Homo sapien
tcccaacaaaagtaatatctgagag

SEQ ID NO: 4261446 - DNA, 25 bp, Homo sapien
tctgagagttgggactgtgcagact

SEQ ID NO: 4261447 - DNA, 25 bp, Homo sapien
gagctgactgttcatttcagtcctc

SEQ ID NO: 4261448 - DNA, 25 bp, Homo sapien
gagagctgagccttcggtcccaaca

SEQ ID NO: 4261449 - DNA, 25 bp, Homo sapien
tgccccaagtgcgacaaggaagttt

SEQ ID NO: 4261450 - DNA, 25 bp, Homo sapien
aatgtgggaagacgctgacctccga

SEQ ID NO: 4261451 - DNA, 25 bp, Homo sapien
tgagcacgaaagcaagccctactgc

SEQ ID NO: 4261452 - DNA, 25 bp, Homo sapien
tttacttcgccgagagggtgacctc

SEQ ID NO: 4261453 - DNA, 25 bp, Homo sapien
ttgggacaaacagtttatgcatgcg

SEQ ID NO: 4261454 - DNA, 25 bp, Homo sapien
cattgggacaaacagtttatgcatg

SEQ ID NO: 4261455 - DNA, 25 bp, Homo sapien
gggacaaacagtttatgcatgcggg

SEQ ID NO: 4261456 - DNA, 25 bp, Homo sapien
caaacagtttatgcatgcggggctt

SEQ ID NO: 4261457 - DNA, 25 bp, Homo sapien
atcaaaatactcactgtgccaatag

SEQ ID NO: 4261458 - DNA, 25 bp, Homo sapien
tcttaagtacttggccactataggt

SEQ ID NO: 4261459 - DNA, 25 bp, Homo sapien
caatagcagacaccacaagacaggt

SEQ ID NO: 4261460 - DNA, 25 bp, Homo sapien
tacatgtcacgttctattgagtggc

SEQ ID NO: 4261461 - DNA, 25 bp, Homo sapien
aatgtccacgtattatggaatttaa

SEQ ID NO: 4261462 - DNA, 25 bp, Homo sapien
aaatgtatcctagtttatgttgtca

SEQ ID NO: 4261463 - DNA, 25 bp, Homo sapien
tataactcaaaggtaaggcattttc

SEQ ID NO: 4261464 - DNA, 25 bp, Homo sapien
tcaaaatgtccacgtattatggaat

SEQ ID NO: 4261465 - DNA, 25 bp, Homo sapien
taggagactctaatttaaccacttc

SEQ ID NO: 4261466 - DNA, 25 bp, Homo sapien
tcaaattactatcataagcccaaga

SEQ ID NO: 4261467 - DNA, 25 bp, Homo sapien
aatgaatggctgatcagaaaatgtc

SEQ ID NO: 4261468 - DNA, 25 bp, Homo sapien
tattgagtcaacaagactttactcc

SEQ ID NO: 4261469 - DNA, 25 bp, Homo sapien
gaaccaacagactacttcagtaagt

SEQ ID NO: 4261470 - DNA, 25 bp, Homo sapien
aaatatgctagcacagggtggtaac

SEQ ID NO: 4261471 - DNA, 25 bp, Homo sapien
cgtataaagataattttcatgaggg

SEQ ID NO: 4261472 - DNA, 25 bp, Homo sapien
ggtaactgccaactaagcatgcact

SEQ ID NO: 4261473 - DNA, 25 bp, Homo sapien
gtgtgttgccaagcgacatcaccat

SEQ ID NO: 4261474 - DNA, 25 bp, Homo sapien
tgggtgtgttgccaagcgacatcac

SEQ ID NO: 4261475 - DNA, 25 bp, Homo sapien
ctaaacagctgggtgtgttgccaag

SEQ ID NO: 4261476 - DNA, 25 bp, Homo sapien
cagctgggtgtgttgccaagcgaca

SEQ ID NO: 4261477 - DNA, 25 bp, Homo sapien
cttccaaaataacttcagtggcacc

SEQ ID NO: 4261478 - DNA, 25 bp, Homo sapien
tccaaaataacttcagtggcaccag

SEQ ID NO: 4261479 - DNA, 25 bp, Homo sapien
ccaaaataacttcagtggcaccaga

SEQ ID NO: 4261480 - DNA, 25 bp, Homo sapien
ttccaaaataacttcagtggcacca

SEQ ID NO: 4261481 - DNA, 25 bp, Homo sapien
ttggtaatttaaagagcacagatca

SEQ ID NO: 4261482 - DNA, 25 bp, Homo sapien
tttgcttttggtaatttaaagagca

SEQ ID NO: 4261483 - DNA, 25 bp, Homo sapien
tttggtaatttaaagagcacagatc

SEQ ID NO: 4261484 - DNA, 25 bp, Homo sapien
gcttttggtaatttaaagagcacag

SEQ ID NO: 4261485 - DNA, 25 bp, Homo sapien
tagtcttcagagtggtaaatatata

SEQ ID NO: 4261486 - DNA, 25 bp, Homo sapien
aaagagctacatctcaaataagtac

SEQ ID NO: 4261487 - DNA, 25 bp, Homo sapien
tagtattaataactcttaggtacga

SEQ ID NO: 4261488 - DNA, 25 bp, Homo sapien
tatttcgtgattaattctccaggca

SEQ ID NO: 4261489 - DNA, 25 bp, Homo sapien
gctatctacttttaggccaactgac

SEQ ID NO: 4261490 - DNA, 25 bp, Homo sapien
gcctgtcagttctacttgtgctgta

SEQ ID NO: 4261491 - DNA, 25 bp, Homo sapien
ctacttgtgctgtatcagatcgcaa

SEQ ID NO: 4261492 - DNA, 25 bp, Homo sapien
actgttccagtctgaaaagtttgac

SEQ ID NO: 4261493 - DNA, 25 bp, Homo sapien
aaagatgatccttcctttcgggcca

SEQ ID NO: 4261494 - DNA, 25 bp, Homo sapien
taagcaaaagatgatccttcctttc

SEQ ID NO: 4261495 - DNA, 25 bp, Homo sapien
gatccttcctttcgggccaaatata

SEQ ID NO: 4261496 - DNA, 25 bp, Homo sapien
gatgatccttcctttcgggccaaat

SEQ ID NO: 4261497 - DNA, 25 bp, Homo sapien
cacagggtagtatgtacaagtggtt

SEQ ID NO: 4261498 - DNA, 25 bp, Homo sapien
cttagtgaagaatattactgtcaca

SEQ ID NO: 4261499 - DNA, 25 bp, Homo sapien
attactgtcacagggtagtatgtac

SEQ ID NO: 4261500 - DNA, 25 bp, Homo sapien
gaagaatattactgtcacagggtag

SEQ ID NO: 4261501 - DNA, 25 bp, Homo sapien
aaactgacatccacagccttggtct

SEQ ID NO: 4261502 - DNA, 25 bp, Homo sapien
ggtctttcacaggtcactctattca

SEQ ID NO: 4261503 - DNA, 25 bp, Homo sapien
tctgcctggtctgaaatgtacagca

SEQ ID NO: 4261504 - DNA, 25 bp, Homo sapien
aaaatcctccacaattaggctgggc

SEQ ID NO: 4261505 - DNA, 25 bp, Homo sapien
taggtctctaaaaggtgagtgttgc

SEQ ID NO: 4261506 - DNA, 25 bp, Homo sapien
caaagactcatttttagaggtggta

SEQ ID NO: 4261507 - DNA, 25 bp, Homo sapien
gagtgttgctatcctactttagcag

SEQ ID NO: 4261508 - DNA, 25 bp, Homo sapien
attgtgtgcattctgtaagctcggt

SEQ ID NO: 4261509 - DNA, 25 bp, Homo sapien
tatttgaaactcgaacataacgatc

SEQ ID NO: 4261510 - DNA, 25 bp, Homo sapien
tcttctcattttcacagggaataaa

SEQ ID NO: 4261511 - DNA, 25 bp, Homo sapien
caaaggtggagctgtttagaaatct

SEQ ID NO: 4261512 - DNA, 25 bp, Homo sapien
cattctcccatccagaaatggtttg

SEQ ID NO: 4261513 - DNA, 25 bp, Homo sapien
tgccatgcaagagatagcacaccca

SEQ ID NO: 4261514 - DNA, 25 bp, Homo sapien
tagttccctaagctaggagagcagc

SEQ ID NO: 4261515 - DNA, 25 bp, Homo sapien
aagctctttaccacggctaccaggg

SEQ ID NO: 4261516 - DNA, 25 bp, Homo sapien
gaaaacaatgtggtatgcaacccaa

SEQ ID NO: 4261517 - DNA, 25 bp, Homo sapien
tactatacgccaccagaactgctaa

SEQ ID NO: 4261518 - DNA, 25 bp, Homo sapien
tgttacaaagcctagcacactgatt

SEQ ID NO: 4261519 - DNA, 25 bp, Homo sapien
tcaactttagctccctaagggcaaa

SEQ ID NO: 4261520 - DNA, 25 bp, Homo sapien
tactgccctaatgcctgttacaaag

SEQ ID NO: 4261521 - DNA, 25 bp, Homo sapien
gcaggaaagtaaaaggatcatcatg

SEQ ID NO: 4261522 - DNA, 25 bp, Homo sapien
gaagagcatagtatatgaagcagga

SEQ ID NO: 4261523 - DNA, 25 bp, Homo sapien
ggtcatagtcaatgcagttggagga

SEQ ID NO: 4261524 - DNA, 25 bp, Homo sapien
gaggatagtataggaagagcatagt

SEQ ID NO: 4261525 - DNA, 25 bp, Homo sapien
aattcaacaagctccacaattatcc

SEQ ID NO: 4261526 - DNA, 25 bp, Homo sapien
ggagatataaattcaacaagctcca

SEQ ID NO: 4261527 - DNA, 25 bp, Homo sapien
agatataaattcaacaagctccaca

SEQ ID NO: 4261528 - DNA, 25 bp, Homo sapien
aagctccacaattatcctctggaga

SEQ ID NO: 4261529 - DNA, 25 bp, Homo sapien
taagcccattaatagtgtctcgaag

SEQ ID NO: 4261530 - DNA, 25 bp, Homo sapien
ttaaccttagttcttctggcaatca

SEQ ID NO: 4261531 - DNA, 25 bp, Homo sapien
caatcacctcttcatgtttgcagga

SEQ ID NO: 4261532 - DNA, 25 bp, Homo sapien
tttgcaggaatatcgccaagtgaca

SEQ ID NO: 4261533 - DNA, 25 bp, Homo sapien
acttactaaatacctagaatgtatg

SEQ ID NO: 4261534 - DNA, 25 bp, Homo sapien
ctaaatacctagaatgtatgtaatt

SEQ ID NO: 4261535 - DNA, 25 bp, Homo sapien
tactaaatacctagaatgtatgtaa

SEQ ID NO: 4261536 - DNA, 25 bp, Homo sapien
tacaaatacttaacaagattacaac

SEQ ID NO: 4261537 - DNA, 25 bp, Homo sapien
tattcattcctaaacagttgatagt

SEQ ID NO: 4261538 - DNA, 25 bp, Homo sapien
cggaagagaatacgtcacttattca

SEQ ID NO: 4261539 - DNA, 25 bp, Homo sapien
aataaacggaagagaatacgtcact

SEQ ID NO: 4261540 - DNA, 25 bp, Homo sapien
ccagaaacgctatgataaaaaagtg

SEQ ID NO: 4261541 - DNA, 25 bp, Homo sapien
aaaaaacttcatacaccttggatca

SEQ ID NO: 4261542 - DNA, 25 bp, Homo sapien
caaaatggattgcagacataagcat

SEQ ID NO: 4261543 - DNA, 25 bp, Homo sapien
gaactgatttttgatacaagtggaa

SEQ ID NO: 4261544 - DNA, 25 bp, Homo sapien
tgaccaagggctaggcaaaatttct

SEQ ID NO: 4261545 - DNA, 25 bp, Homo sapien
gtacaatttaaatatatgcaggtta

SEQ ID NO: 4261546 - DNA, 25 bp, Homo sapien
gtggcttgtcacagacatcttcaca

SEQ ID NO: 4261547 - DNA, 25 bp, Homo sapien
cttcttgccccatcctatttcataa

SEQ ID NO: 4261548 - DNA, 25 bp, Homo sapien
ggagtggcttgtcacagacatcttc

SEQ ID NO: 4261549 - DNA, 25 bp, Homo sapien
gcttcttgccccatcctatttcata

SEQ ID NO: 4261550 - DNA, 25 bp, Homo sapien
aggagaatagacttctgtccagaca

SEQ ID NO: 4261551 - DNA, 25 bp, Homo sapien
aaggagaatagacttctgtccagac

SEQ ID NO: 4261552 - DNA, 25 bp, Homo sapien
tactcaagtaagagaaaagagagca

SEQ ID NO: 4261553 - DNA, 25 bp, Homo sapien
tgactttcaataactatacacaaac

SEQ ID NO: 4261554 - DNA, 25 bp, Homo sapien
tcataaagtaatgcataatattctg

SEQ ID NO: 4261555 - DNA, 25 bp, Homo sapien
cacaaactcctaagaatcataaagt

SEQ ID NO: 4261556 - DNA, 25 bp, Homo sapien
tccaatctcctttaacgtggtcagt

SEQ ID NO: 4261557 - DNA, 25 bp, Homo sapien
tttaggcttaatgtgcgctgtaact

SEQ ID NO: 4261558 - DNA, 25 bp, Homo sapien
cgtggtcagttttaggcttaatgtg

SEQ ID NO: 4261559 - DNA, 25 bp, Homo sapien
tttccaatctcctttaacgtggtca

SEQ ID NO: 4261560 - DNA, 25 bp, Homo sapien
actatcatgaaggagttaatgccac

SEQ ID NO: 4261561 - DNA, 25 bp, Homo sapien
tagaatctctggtcaatacatgctt

SEQ ID NO: 4261562 - DNA, 25 bp, Homo sapien
taagaaggtagacatattaaagagc

SEQ ID NO: 4261563 - DNA, 25 bp, Homo sapien
cagaaccagcaggaagtctaataga

SEQ ID NO: 4261564 - DNA, 25 bp, Homo sapien
taatcccaaacatagcgagcttcaa

SEQ ID NO: 4261565 - DNA, 25 bp, Homo sapien
aaacatagcgagcttcaaaccctac

SEQ ID NO: 4261566 - DNA, 25 bp, Homo sapien
ccaaacatagcgagcttcaaaccct

SEQ ID NO: 4261567 - DNA, 25 bp, Homo sapien
ctgtgtaatcccaaacatagcgagc

SEQ ID NO: 4261568 - DNA, 25 bp, Homo sapien
cacaccgtccacatcttgtttccaa

SEQ ID NO: 4261569 - DNA, 25 bp, Homo sapien
agctcggcagcacagtgtaaaacaa

SEQ ID NO: 4261570 - DNA, 25 bp, Homo sapien
gctcggcagcacagtgtaaaacaat

SEQ ID NO: 4261571 - DNA, 25 bp, Homo sapien
acaattggcccactcgccacaccgt

SEQ ID NO: 4261572 - DNA, 25 bp, Homo sapien
gagctagaggttaaaacaagcacat

SEQ ID NO: 4261573 - DNA, 25 bp, Homo sapien
aaacgtggtatctttccttgactga

SEQ ID NO: 4261574 - DNA, 25 bp, Homo sapien
cagactttgtgggtcatatcatttc

SEQ ID NO: 4261575 - DNA, 25 bp, Homo sapien
gcctccccatatagagaagagctag

SEQ ID NO: 4261576 - DNA, 25 bp, Homo sapien
tcttccttaaaccagtgcaaaagct

SEQ ID NO: 4261577 - DNA, 25 bp, Homo sapien
gggcagtaatgatctatctctagac

SEQ ID NO: 4261578 - DNA, 25 bp, Homo sapien
tgcacaaaacgttattcacccagtg

SEQ ID NO: 4261579 - DNA, 25 bp, Homo sapien
gaatcgattgctgaactggcaggca

SEQ ID NO: 4261580 - DNA, 25 bp, Homo sapien
gaattgatcctgaagtacaagggag

SEQ ID NO: 4261581 - DNA, 25 bp, Homo sapien
gaacacaatgacctcttagggaact

SEQ ID NO: 4261582 - DNA, 25 bp, Homo sapien
taagggaggaccaagtaagagctaa

SEQ ID NO: 4261583 - DNA, 25 bp, Homo sapien
cattatgcattaacaagtgagctga

SEQ ID NO: 4261584 - DNA, 25 bp, Homo sapien
ttttagcaatctcatttacctgcat

SEQ ID NO: 4261585 - DNA, 25 bp, Homo sapien
ccctgtcctctcaattttagcaatc

SEQ ID NO: 4261586 - DNA, 25 bp, Homo sapien
cctgtcctctcaattttagcaatct

SEQ ID NO: 4261587 - DNA, 25 bp, Homo sapien
ctgcaactgcaaattagcccggcta

SEQ ID NO: 4261588 - DNA, 25 bp, Homo sapien
tgcaactgcaaattagcccggctaa

SEQ ID NO: 4261589 - DNA, 25 bp, Homo sapien
atctgcaactgcaaattagcccggc

SEQ ID NO: 4261590 - DNA, 25 bp, Homo sapien
tctgcaactgcaaattagcccggct

SEQ ID NO: 4261591 - DNA, 25 bp, Homo sapien
ttatccaattttctagctctcgata

SEQ ID NO: 4261592 - DNA, 25 bp, Homo sapien
ttagttcttggaccggaatacaagc

SEQ ID NO: 4261593 - DNA, 25 bp, Homo sapien
tagctctcgataacttttcttgtga

SEQ ID NO: 4261594 - DNA, 25 bp, Homo sapien
tcttggaccggaatacaagccaacg

SEQ ID NO: 4261595 - DNA, 25 bp, Homo sapien
tcaacaaagaggtctgcctctgagc

SEQ ID NO: 4261596 - DNA, 25 bp, Homo sapien
agaggtctgcctctgagcagtaagt

SEQ ID NO: 4261597 - DNA, 25 bp, Homo sapien
aacaaagaggtctgcctctgagcag

SEQ ID NO: 4261598 - DNA, 25 bp, Homo sapien
ctcatcaacaaagaggtctgcctct

SEQ ID NO: 4261599 - DNA, 25 bp, Homo sapien
cccagttaaactaatcatgtacagg

SEQ ID NO: 4261600 - DNA, 25 bp, Homo sapien
taaaagcaccagtacaagtttcgat

SEQ ID NO: 4261601 - DNA, 25 bp, Homo sapien
tgggagtaggatctaaataaaagca

SEQ ID NO: 4261602 - DNA, 25 bp, Homo sapien
ggaacacagaattcattcccagtta

SEQ ID NO: 4261603 - DNA, 25 bp, Homo sapien
tctctccggataacgagtggctgga

SEQ ID NO: 4261604 - DNA, 25 bp, Homo sapien
gatggcacagatctcgaaggatatg

SEQ ID NO: 4261605 - DNA, 25 bp, Homo sapien
aacgctcctagggatgccttggtga

SEQ ID NO: 4261606 - DNA, 25 bp, Homo sapien
caagatggcacttcccaagaacgct

SEQ ID NO: 4261607 - DNA, 25 bp, Homo sapien
tcacgaattttttgcagctgctcca

SEQ ID NO: 4261608 - DNA, 25 bp, Homo sapien
gatgactgcccttgacggttccttg

SEQ ID NO: 4261609 - DNA, 25 bp, Homo sapien
tctctatggcaatcaggtcacgaat

SEQ ID NO: 4261610 - DNA, 25 bp, Homo sapien
tgtgtgctggtttaacccactggga

SEQ ID NO: 4261611 - DNA, 25 bp, Homo sapien
ttccctaggtgtgttcttcacttcc

SEQ ID NO: 4261612 - DNA, 25 bp, Homo sapien
cattgctactatgctagtgtgatct

SEQ ID NO: 4261613 - DNA, 25 bp, Homo sapien
tctccttaagtaacctaataattga

SEQ ID NO: 4261614 - DNA, 25 bp, Homo sapien
tgttcaattccattgttgaaacttt

SEQ ID NO: 4261615 - DNA, 25 bp, Homo sapien
tatttgggtttctcaggcagtgggc

SEQ ID NO: 4261616 - DNA, 25 bp, Homo sapien
aagaagatgtaagcttgccctaggg

SEQ ID NO: 4261617 - DNA, 25 bp, Homo sapien
cttttctctcagaaagaccatcagg

SEQ ID NO: 4261618 - DNA, 25 bp, Homo sapien
cagctgcagtagtatcaagaagatg

SEQ ID NO: 4261619 - DNA, 25 bp, Homo sapien
tccaatccggatggatctatatttt

SEQ ID NO: 4261620 - DNA, 25 bp, Homo sapien
aggctgtgtttccaatccggatgga

SEQ ID NO: 4261621 - DNA, 25 bp, Homo sapien
tgtgtttccaatccggatggatcta

SEQ ID NO: 4261622 - DNA, 25 bp, Homo sapien
ccggatggatctatatttttcatca

SEQ ID NO: 4261623 - DNA, 25 bp, Homo sapien
ttgggacaagtaaccagcacatgaa

SEQ ID NO: 4261624 - DNA, 25 bp, Homo sapien
ttctgaggcagtatctgggatccat

SEQ ID NO: 4261625 - DNA, 25 bp, Homo sapien
ctatgttaaggaggattctgaggca

SEQ ID NO: 4261626 - DNA, 25 bp, Homo sapien
caccagtcaattgcctattggccaa

SEQ ID NO: 4261627 - DNA, 25 bp, Homo sapien
tactcggatagtctcaacatgggaa

SEQ ID NO: 4261628 - DNA, 25 bp, Homo sapien
caaagacttagagggctgtagggac

SEQ ID NO: 4261629 - DNA, 25 bp, Homo sapien
tactgtgaagagctgtaaggcctca

SEQ ID NO: 4261630 - DNA, 25 bp, Homo sapien
ggaaatgtaagccactccgctcgaa

SEQ ID NO: 4261631 - DNA, 25 bp, Homo sapien
taaacgacgagaagagcggcagtgt

SEQ ID NO: 4261632 - DNA, 25 bp, Homo sapien
gtcacaactgcaaagaaacttcctt

SEQ ID NO: 4261633 - DNA, 25 bp, Homo sapien
ccgttgtgtcccgatatctgaggcc

SEQ ID NO: 4261634 - DNA, 25 bp, Homo sapien
gcagtgtctgaagcacgccttccta

SEQ ID NO: 4261635 - DNA, 25 bp, Homo sapien
cgccgtccgaccccgttgccctgca

SEQ ID NO: 4261636 - DNA, 25 bp, Homo sapien
gccgtccgaccccgttgccctgcac

SEQ ID NO: 4261637 - DNA, 25 bp, Homo sapien
cagcttggaggcctccaaaaaggtc

SEQ ID NO: 4261638 - DNA, 25 bp, Homo sapien
gcagcttggaggcctccaaaaaggt

SEQ ID NO: 4261639 - DNA, 25 bp, Homo sapien
agcttggaggcctccaaaaaggtct

SEQ ID NO: 4261640 - DNA, 25 bp, Homo sapien
gcttggaggcctccaaaaaggtctc

SEQ ID NO: 4261641 - DNA, 25 bp, Homo sapien
cggggacgccgagcctgaggagctg

SEQ ID NO: 4261642 - DNA, 25 bp, Homo sapien
gccggggacgccgagcctgaggagc

SEQ ID NO: 4261643 - DNA, 25 bp, Homo sapien
gcctgaggagctgcccaatgccgcc

SEQ ID NO: 4261644 - DNA, 25 bp, Homo sapien
gaggagctgcccaatgccgccgccg

SEQ ID NO: 4261645 - DNA, 25 bp, Homo sapien
ccacactgagcaggcgcctcagcgc

SEQ ID NO: 4261646 - DNA, 25 bp, Homo sapien
gccgcccctcgctctccgcgtccca

SEQ ID NO: 4261647 - DNA, 25 bp, Homo sapien
cgctctccgcgtcccacactgagca

SEQ ID NO: 4261648 - DNA, 25 bp, Homo sapien
tgagcaggcgcctcagcgcgcagca

SEQ ID NO: 4261649 - DNA, 25 bp, Homo sapien
cagtatacatcttgcagacctttaa

SEQ ID NO: 4261650 - DNA, 25 bp, Homo sapien
tcctaacaaatagtcgcaacatctc

SEQ ID NO: 4261651 - DNA, 25 bp, Homo sapien
ggctgcatggcatttggatgtacca

SEQ ID NO: 4261652 - DNA, 25 bp, Homo sapien
tactaataacgttgcgagctatagc

SEQ ID NO: 4261653 - DNA, 25 bp, Homo sapien
caagtcggggttgaatttcgagagg

SEQ ID NO: 4261654 - DNA, 25 bp, Homo sapien
tcaagtcggggttgaatttcgagag

SEQ ID NO: 4261655 - DNA, 25 bp, Homo sapien
aactatgttccactaaaggcacagg

SEQ ID NO: 4261656 - DNA, 25 bp, Homo sapien
ggcagtcgaggcagcttttaccaca

SEQ ID NO: 4261657 - DNA, 25 bp, Homo sapien
catgctacttccacaccattgggag

SEQ ID NO: 4261658 - DNA, 25 bp, Homo sapien
tcaactaagggagcaacaggacatc

SEQ ID NO: 4261659 - DNA, 25 bp, Homo sapien
attgttgttcattttcatgtggtaa

SEQ ID NO: 4261660 - DNA, 25 bp, Homo sapien
ttattgttgttcattttcatgtggt

SEQ ID NO: 4261661 - DNA, 25 bp, Homo sapien
ttgttcattttcatgtggtaatgcc

SEQ ID NO: 4261662 - DNA, 25 bp, Homo sapien
gttgttcattttcatgtggtaatgc

SEQ ID NO: 4261663 - DNA, 25 bp, Homo sapien
actgctgggcgggaagtcctttctt

SEQ ID NO: 4261664 - DNA, 25 bp, Homo sapien
gtagacagtagaccctcagatgtag

SEQ ID NO: 4261665 - DNA, 25 bp, Homo sapien
cattgggttgaaatgaccgagtttc

SEQ ID NO: 4261666 - DNA, 25 bp, Homo sapien
gctaacatgcagtgcaagcccaatg

SEQ ID NO: 4261667 - DNA, 25 bp, Homo sapien
agacgataattcctccatttggtag

SEQ ID NO: 4261668 - DNA, 25 bp, Homo sapien
tccttaagtgattgatacgttcccc

SEQ ID NO: 4261669 - DNA, 25 bp, Homo sapien
taagagtgactctaggacaccttct

SEQ ID NO: 4261670 - DNA, 25 bp, Homo sapien
catatgtttggtccttgtgctctta

SEQ ID NO: 4261671 - DNA, 25 bp, Homo sapien
ttatgagttgatttggccctattcg

SEQ ID NO: 4261672 - DNA, 25 bp, Homo sapien
tgttgccctgaaatcaatgacccag

SEQ ID NO: 4261673 - DNA, 25 bp, Homo sapien
tggcatttcactggctctttaaaag

SEQ ID NO: 4261674 - DNA, 25 bp, Homo sapien
ccctattcgttaatggatgttgccc

SEQ ID NO: 4261675 - DNA, 25 bp, Homo sapien
gcagaaggcaaggaggagcaagtca

SEQ ID NO: 4261676 - DNA, 25 bp, Homo sapien
tggcagaaggcaaggaggagcaagt

SEQ ID NO: 4261677 - DNA, 25 bp, Homo sapien
aattccatgtggctggagaggcctc

SEQ ID NO: 4261678 - DNA, 25 bp, Homo sapien
agaaggcaaggaggagcaagtcatg

SEQ ID NO: 4261679 - DNA, 25 bp, Homo sapien
ttggctttgagatcccatctgcaat

SEQ ID NO: 4261680 - DNA, 25 bp, Homo sapien
ctgtatcatatgtagagacttggct

SEQ ID NO: 4261681 - DNA, 25 bp, Homo sapien
gctttgagatcccatctgcaatgcc

SEQ ID NO: 4261682 - DNA, 25 bp, Homo sapien
aaacatctgtttgcctgtatcatat

SEQ ID NO: 4261683 - DNA, 25 bp, Homo sapien
ttcagagggcgtgtagacaggaata

SEQ ID NO: 4261684 - DNA, 25 bp, Homo sapien
tttgagatggttattcagagggcgt

SEQ ID NO: 4261685 - DNA, 25 bp, Homo sapien
tattcagagggcgtgtagacaggaa

SEQ ID NO: 4261686 - DNA, 25 bp, Homo sapien
atggttattcagagggcgtgtagac

SEQ ID NO: 4261687 - DNA, 25 bp, Homo sapien
attccgggcccgagccagtaaatag

SEQ ID NO: 4261688 - DNA, 25 bp, Homo sapien
tctcttggaaattccgggcccgagc

SEQ ID NO: 4261689 - DNA, 25 bp, Homo sapien
cgggcccgagccagtaaatagggca

SEQ ID NO: 4261690 - DNA, 25 bp, Homo sapien
cccgagccagtaaatagggcagcat

SEQ ID NO: 4261691 - DNA, 25 bp, Homo sapien
tttctgtgagtcaaaatatctattt

SEQ ID NO: 4261692 - DNA, 25 bp, Homo sapien
ttgggtccaatatcactctgcactg

SEQ ID NO: 4261693 - DNA, 25 bp, Homo sapien
cactgtcagagcatcagataaagct

SEQ ID NO: 4261694 - DNA, 25 bp, Homo sapien
tcatgaattggctgcttggacctag

SEQ ID NO: 4261695 - DNA, 25 bp, Homo sapien
catccacatgtagggcaaacatggg

SEQ ID NO: 4261696 - DNA, 25 bp, Homo sapien
ctctagtgttcccataagatggtca

SEQ ID NO: 4261697 - DNA, 25 bp, Homo sapien
cactgtagaacggaattcacttttt

SEQ ID NO: 4261698 - DNA, 25 bp, Homo sapien
tggtcacactgtagaacggaattca

SEQ ID NO: 4261699 - DNA, 25 bp, Homo sapien
cccataagatggtcacactgtagaa

SEQ ID NO: 4261700 - DNA, 25 bp, Homo sapien
tggttgctggtttcacttcagatgg

SEQ ID NO: 4261701 - DNA, 25 bp, Homo sapien
gtgcaggtttgagttaacgaaggta

SEQ ID NO: 4261702 - DNA, 25 bp, Homo sapien
tgcaggtttgagttaacgaaggtaa

SEQ ID NO: 4261703 - DNA, 25 bp, Homo sapien
gctaggtcatttgagaacaatatga

SEQ ID NO: 4261704 - DNA, 25 bp, Homo sapien
tgtggcttaactggtctcagcttgg

SEQ ID NO: 4261705 - DNA, 25 bp, Homo sapien
agttctgtggcttaactggtctcag

SEQ ID NO: 4261706 - DNA, 25 bp, Homo sapien
ttaactggtctcagcttggcatctc

SEQ ID NO: 4261707 - DNA, 25 bp, Homo sapien
ctggtctcagcttggcatctctctt

SEQ ID NO: 4261708 - DNA, 25 bp, Homo sapien
gatccctggtacccaagactttcat

SEQ ID NO: 4261709 - DNA, 25 bp, Homo sapien
gtttcagatgcttgacttgctcttg

SEQ ID NO: 4261710 - DNA, 25 bp, Homo sapien
tgatccctggtacccaagactttca

SEQ ID NO: 4261711 - DNA, 25 bp, Homo sapien
tgacttgctcttgatccctggtacc

SEQ ID NO: 4261712 - DNA, 25 bp, Homo sapien
tctctttgttttcacgggtatcctg

SEQ ID NO: 4261713 - DNA, 25 bp, Homo sapien
tctgttcttgcaccgaccttttctg

SEQ ID NO: 4261714 - DNA, 25 bp, Homo sapien
gagtcttgctgcgagttggtagtac

SEQ ID NO: 4261715 - DNA, 25 bp, Homo sapien
gggtatcctgcttccttctgtcagg

SEQ ID NO: 4261716 - DNA, 25 bp, Homo sapien
ccttcctgggtgtgaacttaaagat

SEQ ID NO: 4261717 - DNA, 25 bp, Homo sapien
tcatttgttcactgagcattttatt

SEQ ID NO: 4261718 - DNA, 25 bp, Homo sapien
gaacttaaagattgttggatgggaa

SEQ ID NO: 4261719 - DNA, 25 bp, Homo sapien
ttgtagcaacttactgaatcttcca

SEQ ID NO: 4261720 - DNA, 25 bp, Homo sapien
taatccgttttcattgagttgcaac

SEQ ID NO: 4261721 - DNA, 25 bp, Homo sapien
actttatacagccttgtagagaaca

SEQ ID NO: 4261722 - DNA, 25 bp, Homo sapien
gatgatatgctcatcaaggacaagg

SEQ ID NO: 4261723 - DNA, 25 bp, Homo sapien
gagaacattattgctgtatggatag

SEQ ID NO: 4261724 - DNA, 25 bp, Homo sapien
aaaggattgttatctaagtcatcat

SEQ ID NO: 4261725 - DNA, 25 bp, Homo sapien
aaaaggattgttatctaagtcatca

SEQ ID NO: 4261726 - DNA, 25 bp, Homo sapien
tgttttatagcttgactttgtggca

SEQ ID NO: 4261727 - DNA, 25 bp, Homo sapien
ctgttttatagcttgactttgtggc

SEQ ID NO: 4261728 - DNA, 25 bp, Homo sapien
taatcagatctacgtacgatgagat

SEQ ID NO: 4261729 - DNA, 25 bp, Homo sapien
ctgtctgcttctttatgaaccaaga

SEQ ID NO: 4261730 - DNA, 25 bp, Homo sapien
ctttatgaaccaagagctgtttgtt

SEQ ID NO: 4261731 - DNA, 25 bp, Homo sapien
cagtttaatcagatctacgtacgat

SEQ ID NO: 4261732 - DNA, 25 bp, Homo sapien
caattcccaccaactttattcccat

SEQ ID NO: 4261733 - DNA, 25 bp, Homo sapien
ggaccatcagttcaattcccaccaa

SEQ ID NO: 4261734 - DNA, 25 bp, Homo sapien
tcaattcccaccaactttattccca

SEQ ID NO: 4261735 - DNA, 25 bp, Homo sapien
atcagttcaattcccaccaacttta

SEQ ID NO: 4261736 - DNA, 25 bp, Homo sapien
ctgctgagcactcagcattgttgac

SEQ ID NO: 4261737 - DNA, 25 bp, Homo sapien
agcactcagcattgttgactgctga

SEQ ID NO: 4261738 - DNA, 25 bp, Homo sapien
cagcattgttgactgctgatcccat

SEQ ID NO: 4261739 - DNA, 25 bp, Homo sapien
ctcagcattgttgactgctgatccc

SEQ ID NO: 4261740 - DNA, 25 bp, Homo sapien
gatttggcctttgcctgtagctcca

SEQ ID NO: 4261741 - DNA, 25 bp, Homo sapien
aaaagctgctgaaccgttggtggaa

SEQ ID NO: 4261742 - DNA, 25 bp, Homo sapien
caggcttgactcttgtataaggtat

SEQ ID NO: 4261743 - DNA, 25 bp, Homo sapien
taacctgacttatagagtccttaat

SEQ ID NO: 4261744 - DNA, 25 bp, Homo sapien
ttgccatggacatcacccccagcca

SEQ ID NO: 4261745 - DNA, 25 bp, Homo sapien
cttgccatggacatcacccccagcc

SEQ ID NO: 4261746 - DNA, 25 bp, Homo sapien
tgccatggacatcacccccagccat

SEQ ID NO: 4261747 - DNA, 25 bp, Homo sapien
gccacactatggtagaaagccttca

SEQ ID NO: 4261748 - DNA, 25 bp, Homo sapien
tgttcccagcgtcacatttggccac

SEQ ID NO: 4261749 - DNA, 25 bp, Homo sapien
tgacatgcacatgagagggtttagg

SEQ ID NO: 4261750 - DNA, 25 bp, Homo sapien
ctggatgtaacgaacacggaccctg

SEQ ID NO: 4261751 - DNA, 25 bp, Homo sapien
tttacttcaatagctgcattttcac

SEQ ID NO: 4261752 - DNA, 25 bp, Homo sapien
aacaaatggcaatctgggtgattca

SEQ ID NO: 4261753 - DNA, 25 bp, Homo sapien
catatgattgctttcgctgtctcct

SEQ ID NO: 4261754 - DNA, 25 bp, Homo sapien
tctgggtgattcagataactctgaa

SEQ ID NO: 4261755 - DNA, 25 bp, Homo sapien
acaatgtggctgacatgggcatggc

SEQ ID NO: 4261756 - DNA, 25 bp, Homo sapien
cctctaagggggttacaatgtggct

SEQ ID NO: 4261757 - DNA, 25 bp, Homo sapien
tgtgagtctggtgtttgaacctcta

SEQ ID NO: 4261758 - DNA, 25 bp, Homo sapien
agtctggtgtttgaacctctaaggg

SEQ ID NO: 4261759 - DNA, 25 bp, Homo sapien
aaagaatccgaaggctgtaactgca

SEQ ID NO: 4261760 - DNA, 25 bp, Homo sapien
gttatttgagcaaagctgataggaa

SEQ ID NO: 4261761 - DNA, 25 bp, Homo sapien
ggggcacactgtatggctggatcca

SEQ ID NO: 4261762 - DNA, 25 bp, Homo sapien
gctgtcctctgttatttgagcaaag

SEQ ID NO: 4261763 - DNA, 25 bp, Homo sapien
gacttgaagtgctcatatgaaattc

SEQ ID NO: 4261764 - DNA, 25 bp, Homo sapien
tatacttgaagcttacctgagcata

SEQ ID NO: 4261765 - DNA, 25 bp, Homo sapien
tggagaaagagatgacttgatagac

SEQ ID NO: 4261766 - DNA, 25 bp, Homo sapien
tgaaattcattcctaaccgaacctc

SEQ ID NO: 4261767 - DNA, 25 bp, Homo sapien
tgacagattgggactataacttact

SEQ ID NO: 4261768 - DNA, 25 bp, Homo sapien
gaaacgtattccctccactaccaga

SEQ ID NO: 4261769 - DNA, 25 bp, Homo sapien
caattttccttaacatgccatgctg

SEQ ID NO: 4261770 - DNA, 25 bp, Homo sapien
catccgtattgttgtaacctgtacc

SEQ ID NO: 4261771 - DNA, 25 bp, Homo sapien
tgctcagggttaatgctgcagatct

SEQ ID NO: 4261772 - DNA, 25 bp, Homo sapien
gaaaactctgtttgtgcctcatggt

SEQ ID NO: 4261773 - DNA, 25 bp, Homo sapien
gtggtggctacctcagtgctgttca

SEQ ID NO: 4261774 - DNA, 25 bp, Homo sapien
cagtgaggtgaagcatcatcagtgg

SEQ ID NO: 4261775 - DNA, 25 bp, Homo sapien
aatttttgctggtttaagcctgagt

SEQ ID NO: 4261776 - DNA, 25 bp, Homo sapien
tccaagcttcagtataacgtaatgg

SEQ ID NO: 4261777 - DNA, 25 bp, Homo sapien
gttccaagcttcagtataacgtaat

SEQ ID NO: 4261778 - DNA, 25 bp, Homo sapien
ttgctggtttaagcctgagtcatct

SEQ ID NO: 4261779 - DNA, 25 bp, Homo sapien
tatgcaaatgtctctcatatttgga

SEQ ID NO: 4261780 - DNA, 25 bp, Homo sapien
ttgtctcttagatctatgcaaatgt

SEQ ID NO: 4261781 - DNA, 25 bp, Homo sapien
tacgaaggccagtgccatttttctc

SEQ ID NO: 4261782 - DNA, 25 bp, Homo sapien
tttggaattgagcttctacgaaggc

SEQ ID NO: 4261783 - DNA, 25 bp, Homo sapien
cacatctctgcaggctgatgtcctg

SEQ ID NO: 4261784 - DNA, 25 bp, Homo sapien
ggctgatgtcctgtccttctggtac

SEQ ID NO: 4261785 - DNA, 25 bp, Homo sapien
tgtccttctggtactccttattcat

SEQ ID NO: 4261786 - DNA, 25 bp, Homo sapien
tatgaaccttccacatctctgcagg

SEQ ID NO: 4261787 - DNA, 25 bp, Homo sapien
gatgcaatgatcctaaaccaattta

SEQ ID NO: 4261788 - DNA, 25 bp, Homo sapien
ctttgatcaaatgacggctttccaa

SEQ ID NO: 4261789 - DNA, 25 bp, Homo sapien
gggattagagcagatataagatgca

SEQ ID NO: 4261790 - DNA, 25 bp, Homo sapien
tgacggctttccaattgcattaaaa

SEQ ID NO: 4261791 - DNA, 25 bp, Homo sapien
aataactgccgtatcactctgtccc

SEQ ID NO: 4261792 - DNA, 25 bp, Homo sapien
ctaccattttcttgtcccaacccat

SEQ ID NO: 4261793 - DNA, 25 bp, Homo sapien
ccttttctatacttgaggtaatgac

SEQ ID NO: 4261794 - DNA, 25 bp, Homo sapien
atgacttctaaataactgccgtatc

SEQ ID NO: 4261795 - DNA, 25 bp, Homo sapien
cgaaactgtgttcatgaatctctga

SEQ ID NO: 4261796 - DNA, 25 bp, Homo sapien
gctcctccgtggcatgagatgccta

SEQ ID NO: 4261797 - DNA, 25 bp, Homo sapien
gaggctctccggttcaaaactgtcc

SEQ ID NO: 4261798 - DNA, 25 bp, Homo sapien
taattgttcttcgaaactgtgttca

SEQ ID NO: 4261799 - DNA, 25 bp, Homo sapien
acattctgagtgttttctgggtgtg

SEQ ID NO: 4261800 - DNA, 25 bp, Homo sapien
tacattctgagtgttttctgggtgt

SEQ ID NO: 4261801 - DNA, 25 bp, Homo sapien
cattctgagtgttttctgggtgtga

SEQ ID NO: 4261802 - DNA, 25 bp, Homo sapien
cacaaattggagtacagcccagtct

SEQ ID NO: 4261803 - DNA, 25 bp, Homo sapien
tctgcatggaattgacacaaattgg

SEQ ID NO: 4261804 - DNA, 25 bp, Homo sapien
taatgaattttgtttccgcttccca

SEQ ID NO: 4261805 - DNA, 25 bp, Homo sapien
gactttcttagggaccacgtcaatg

SEQ ID NO: 4261806 - DNA, 25 bp, Homo sapien
tccatgggaagaacttcatctgatg

SEQ ID NO: 4261807 - DNA, 25 bp, Homo sapien
gaagaacttcatctgatgagcccat

SEQ ID NO: 4261808 - DNA, 25 bp, Homo sapien
tgggaagaacttcatctgatgagcc

SEQ ID NO: 4261809 - DNA, 25 bp, Homo sapien
atctccatgggaagaacttcatctg

SEQ ID NO: 4261810 - DNA, 25 bp, Homo sapien
cactggggaggtaatgacagtgtcc

SEQ ID NO: 4261811 - DNA, 25 bp, Homo sapien
tgctgctgtacaatgcggaaagtgt

SEQ ID NO: 4261812 - DNA, 25 bp, Homo sapien
atcacattgctgctgtacaatgcgg

SEQ ID NO: 4261813 - DNA, 25 bp, Homo sapien
caatgcggaaagtgtgggatgaaca

SEQ ID NO: 4261814 - DNA, 25 bp, Homo sapien
agactgtcttgggatgctagcctgg

SEQ ID NO: 4261815 - DNA, 25 bp, Homo sapien
tttataacaacaatcagcatcgcca

SEQ ID NO: 4261816 - DNA, 25 bp, Homo sapien
cctggccaggttttataacaacaat

SEQ ID NO: 4261817 - DNA, 25 bp, Homo sapien
tgtcttgggatgctagcctggccag

SEQ ID NO: 4261818 - DNA, 25 bp, Homo sapien
tggatatatctactgccagatcagc

SEQ ID NO: 4261819 - DNA, 25 bp, Homo sapien
gatcagctttgattttgacatcgca

SEQ ID NO: 4261820 - DNA, 25 bp, Homo sapien
tcaagagttcgttttaatttggata

SEQ ID NO: 4261821 - DNA, 25 bp, Homo sapien
ttgacatcgcagtttggtgaatttg

SEQ ID NO: 4261822 - DNA, 25 bp, Homo sapien
cctttgcaccaaactaagtatgtgt

SEQ ID NO: 4261823 - DNA, 25 bp, Homo sapien
ccccaagttgatcagccctcttgca

SEQ ID NO: 4261824 - DNA, 25 bp, Homo sapien
gtgatcatcagtcctaaggctctca

SEQ ID NO: 4261825 - DNA, 25 bp, Homo sapien
aagtatgtgtttatggttgaagctg

SEQ ID NO: 4261826 - DNA, 25 bp, Homo sapien
ctccatggagagacaagaaactttc

SEQ ID NO: 4261827 - DNA, 25 bp, Homo sapien
gaattatcaggatgtagctcagtga

SEQ ID NO: 4261828 - DNA, 25 bp, Homo sapien
ggttgccaggctcatttccccagta

SEQ ID NO: 4261829 - DNA, 25 bp, Homo sapien
cagtactgcctgatcgtgtgccttt

SEQ ID NO: 4261830 - DNA, 25 bp, Homo sapien
tatcattgagtatgaagtacacctc

SEQ ID NO: 4261831 - DNA, 25 bp, Homo sapien
agtacacctcaaatacaggattggc

SEQ ID NO: 4261832 - DNA, 25 bp, Homo sapien
tggagatgagctcagcaagtgtagc

SEQ ID NO: 4261833 - DNA, 25 bp, Homo sapien
aattcatcccaatagccttgctgga

SEQ ID NO: 4261834 - DNA, 25 bp, Homo sapien
ggtgaatttccccttgatgtgcatt

SEQ ID NO: 4261835 - DNA, 25 bp, Homo sapien
tgttgagtttattgccactgtcccc

SEQ ID NO: 4261836 - DNA, 25 bp, Homo sapien
tatccttgttgcaggttctctccac

SEQ ID NO: 4261837 - DNA, 25 bp, Homo sapien
gaaattgatctctgctttccctagt

SEQ ID NO: 4261838 - DNA, 25 bp, Homo sapien
ccgcccggatgtgaacaggagaaga

SEQ ID NO: 4261839 - DNA, 25 bp, Homo sapien
ttggtagacggcaccatgccagtca

SEQ ID NO: 4261840 - DNA, 25 bp, Homo sapien
gataggcaccagtgcgatccagaca

SEQ ID NO: 4261841 - DNA, 25 bp, Homo sapien
tccagaatcttcaggtgggtcaagg

SEQ ID NO: 4261842 - DNA, 25 bp, Homo sapien
gccagcttctttcgctccaggtggc

SEQ ID NO: 4261843 - DNA, 25 bp, Homo sapien
ttggccagcttctttcgctccaggt

SEQ ID NO: 4261844 - DNA, 25 bp, Homo sapien
cagcttctttcgctccaggtggccc

SEQ ID NO: 4261845 - DNA, 25 bp, Homo sapien
tggccagcttctttcgctccaggtg

SEQ ID NO: 4261846 - DNA, 25 bp, Homo sapien
catagggcatagactgaaggactgt

SEQ ID NO: 4261847 - DNA, 25 bp, Homo sapien
catagactgaaggactgtattcttt

SEQ ID NO: 4261848 - DNA, 25 bp, Homo sapien
atttccatagggcatagactgaagg

SEQ ID NO: 4261849 - DNA, 25 bp, Homo sapien
gcatagactgaaggactgtattctt

SEQ ID NO: 4261850 - DNA, 25 bp, Homo sapien
attgccttttcacttaacttataat

SEQ ID NO: 4261851 - DNA, 25 bp, Homo sapien
ctgggcatgtaattgccttttcact

SEQ ID NO: 4261852 - DNA, 25 bp, Homo sapien
catgtaattgccttttcacttaact

SEQ ID NO: 4261853 - DNA, 25 bp, Homo sapien
tgtaattgccttttcacttaactta

SEQ ID NO: 4261854 - DNA, 25 bp, Homo sapien
cagacagcaggcctctcagtcctgt

SEQ ID NO: 4261855 - DNA, 25 bp, Homo sapien
catttattccagacagcaggcctct

SEQ ID NO: 4261856 - DNA, 25 bp, Homo sapien
attccagacagcaggcctctcagtc

SEQ ID NO: 4261857 - DNA, 25 bp, Homo sapien
gacagcaggcctctcagtcctgtga

SEQ ID NO: 4261858 - DNA, 25 bp, Homo sapien
agtaagacacgcccttttcctctgg

SEQ ID NO: 4261859 - DNA, 25 bp, Homo sapien
gaccacagtaagacacgcccttttc

SEQ ID NO: 4261860 - DNA, 25 bp, Homo sapien
tatgtcaggtccatgttgatcacct

SEQ ID NO: 4261861 - DNA, 25 bp, Homo sapien
agtatgtcaggtccatgttgatcac

SEQ ID NO: 4261862 - DNA, 25 bp, Homo sapien
gctgtgcaaggtgagtcatccagta

SEQ ID NO: 4261863 - DNA, 25 bp, Homo sapien
cagtattggactgtagttgctgcca

SEQ ID NO: 4261864 - DNA, 25 bp, Homo sapien
ggtatactttcctggcgtgcgctgc

SEQ ID NO: 4261865 - DNA, 25 bp, Homo sapien
gaggagaatcccttctgttgttcgt

SEQ ID NO: 4261866 - DNA, 25 bp, Homo sapien
gccattttcgacatcttttaatatg

SEQ ID NO: 4261867 - DNA, 25 bp, Homo sapien
tttcgacatcttttaatatgtacct

SEQ ID NO: 4261868 - DNA, 25 bp, Homo sapien
tatatgtggccattttcgacatctt

SEQ ID NO: 4261869 - DNA, 25 bp, Homo sapien
gtggccattttcgacatcttttaat

SEQ ID NO: 4261870 - DNA, 25 bp, Homo sapien
tcaggtctgtgccttgactggcttt

SEQ ID NO: 4261871 - DNA, 25 bp, Homo sapien
tctgaactgcagtacatgatggagt

SEQ ID NO: 4261872 - DNA, 25 bp, Homo sapien
atacatgacgcagtgtaaattctga

SEQ ID NO: 4261873 - DNA, 25 bp, Homo sapien
tgtgttaatacatgacgcagtgtaa

SEQ ID NO: 4261874 - DNA, 25 bp, Homo sapien
ttctcatcatcttgccaacttgctt

SEQ ID NO: 4261875 - DNA, 25 bp, Homo sapien
aagatttttgtactgccagttacag

SEQ ID NO: 4261876 - DNA, 25 bp, Homo sapien
tcatcttgccaacttgctttgtctc

SEQ ID NO: 4261877 - DNA, 25 bp, Homo sapien
agcagaaagatttttgtactgccag

SEQ ID NO: 4261878 - DNA, 25 bp, Homo sapien
gacctgtggtatagtccagaacttc

SEQ ID NO: 4261879 - DNA, 25 bp, Homo sapien
gggttcacaggatcagcaactatat

SEQ ID NO: 4261880 - DNA, 25 bp, Homo sapien
aagagagatattccttgctccgtcc

SEQ ID NO: 4261881 - DNA, 25 bp, Homo sapien
ccagcatagcatagggaaagagaga

SEQ ID NO: 4261882 - DNA, 25 bp, Homo sapien
gatcagtgtccggttatctacacac

SEQ ID NO: 4261883 - DNA, 25 bp, Homo sapien
tgttgagtggtgtcaaaacaggata

SEQ ID NO: 4261884 - DNA, 25 bp, Homo sapien
gtttgggcaaacacagaagccagtt

SEQ ID NO: 4261885 - DNA, 25 bp, Homo sapien
gctctctctgcttgtggagatcagt

SEQ ID NO: 4261886 - DNA, 25 bp, Homo sapien
gactaaatcgtgaacatgaggctaa

SEQ ID NO: 4261887 - DNA, 25 bp, Homo sapien
tagagaaaacgttccagaaatctga

SEQ ID NO: 4261888 - DNA, 25 bp, Homo sapien
gatggaatttgcctgaccagagagt

SEQ ID NO: 4261889 - DNA, 25 bp, Homo sapien
gaacaactttccaagaacagtcaga

SEQ ID NO: 4261890 - DNA, 25 bp, Homo sapien
caaagtacctagattagccaaaaag

SEQ ID NO: 4261891 - DNA, 25 bp, Homo sapien
taaaatagcccttacaatagcatca

SEQ ID NO: 4261892 - DNA, 25 bp, Homo sapien
ggacaggttcttcaataaacgatgc

SEQ ID NO: 4261893 - DNA, 25 bp, Homo sapien
gcactatgtgatcttaaggcatact

SEQ ID NO: 4261894 - DNA, 25 bp, Homo sapien
gatctgactgcgctcttgaattttc

SEQ ID NO: 4261895 - DNA, 25 bp, Homo sapien
ggtcggctgactatgatcatcatcc

SEQ ID NO: 4261896 - DNA, 25 bp, Homo sapien
gaattttcagaatattgcgcttggg

SEQ ID NO: 4261897 - DNA, 25 bp, Homo sapien
ccaactaaaaggcataagtgcttca

SEQ ID NO: 4261898 - DNA, 25 bp, Homo sapien
tagagatttgataaaattgtgtgat

SEQ ID NO: 4261899 - DNA, 25 bp, Homo sapien
agagatttgataaaattgtgtgatt

SEQ ID NO: 4261900 - DNA, 25 bp, Homo sapien
gtagagatttgataaaattgtgtga

SEQ ID NO: 4261901 - DNA, 25 bp, Homo sapien
ctctttgatttccttacaatgaaat

SEQ ID NO: 4261902 - DNA, 25 bp, Homo sapien
tttgatttccttacaatgaaattca

SEQ ID NO: 4261903 - DNA, 25 bp, Homo sapien
tctctttgatttccttacaatgaaa

SEQ ID NO: 4261904 - DNA, 25 bp, Homo sapien
atgatgatttccagagcttttctct

SEQ ID NO: 4261905 - DNA, 25 bp, Homo sapien
tctgacttccaccacgcaatgtgat

SEQ ID NO: 4261906 - DNA, 25 bp, Homo sapien
caaggggctactctttgacatttca

SEQ ID NO: 4261907 - DNA, 25 bp, Homo sapien
tgaaagcttcctaagtccatctgac

SEQ ID NO: 4261908 - DNA, 25 bp, Homo sapien
gatcacagactgaagtgaccaaggg

SEQ ID NO: 4261909 - DNA, 25 bp, Homo sapien
agttctatctcaacagctagggcac

SEQ ID NO: 4261910 - DNA, 25 bp, Homo sapien
ttcgtctcccgctaacaagttctat

SEQ ID NO: 4261911 - DNA, 25 bp, Homo sapien
caacagctagggcactagcaatctc

SEQ ID NO: 4261912 - DNA, 25 bp, Homo sapien
tagcaatctctagagtctcagcagc

SEQ ID NO: 4261913 - DNA, 25 bp, Homo sapien
tcatctagaacgacctgacttatcc

SEQ ID NO: 4261914 - DNA, 25 bp, Homo sapien
gaacgacctgacttatccgttccat

SEQ ID NO: 4261915 - DNA, 25 bp, Homo sapien
ttcttcatctagaacgacctgactt

SEQ ID NO: 4261916 - DNA, 25 bp, Homo sapien
tctagaacgacctgacttatccgtt

SEQ ID NO: 4261917 - DNA, 25 bp, Homo sapien
agttctgtgacgctgaggatgctgc

SEQ ID NO: 4261918 - DNA, 25 bp, Homo sapien
caaggtttggttctacagtgccagg

SEQ ID NO: 4261919 - DNA, 25 bp, Homo sapien
gattttctcatggtcagaagaagct

SEQ ID NO: 4261920 - DNA, 25 bp, Homo sapien
tgctgctgaacttgtcaaggtttgg

SEQ ID NO: 4261921 - DNA, 25 bp, Homo sapien
actcatgtttcattccagctccttt

SEQ ID NO: 4261922 - DNA, 25 bp, Homo sapien
agccacaatagacatagttgtcatt

SEQ ID NO: 4261923 - DNA, 25 bp, Homo sapien
gccacaatagacatagttgtcattt

SEQ ID NO: 4261924 - DNA, 25 bp, Homo sapien
cagccacaatagacatagttgtcat

SEQ ID NO: 4261925 - DNA, 25 bp, Homo sapien
ccagccacaatagacatagttgtca

SEQ ID NO: 4261926 - DNA, 25 bp, Homo sapien
ttagttcttgagctttgatcaccat

SEQ ID NO: 4261927 - DNA, 25 bp, Homo sapien
atactgaggctgatataggtccacc

SEQ ID NO: 4261928 - DNA, 25 bp, Homo sapien
tcagtacagagctggaaccgtagct

SEQ ID NO: 4261929 - DNA, 25 bp, Homo sapien
tggaagggtgttcatcatctaaaga

SEQ ID NO: 4261930 - DNA, 25 bp, Homo sapien
caatgtctatttctttgccagatgt

SEQ ID NO: 4261931 - DNA, 25 bp, Homo sapien
aactacaatgtctatttctttgcca

SEQ ID NO: 4261932 - DNA, 25 bp, Homo sapien
atgttgaggaagcaggcaagcacac

SEQ ID NO: 4261933 - DNA, 25 bp, Homo sapien
gtctatttctttgccagatgttgag

SEQ ID NO: 4261934 - DNA, 25 bp, Homo sapien
gacaatgctagtttgattattgcca

SEQ ID NO: 4261935 - DNA, 25 bp, Homo sapien
acaatgctagtttgattattgccat

SEQ ID NO: 4261936 - DNA, 25 bp, Homo sapien
caggacaatgctagtttgattattg

SEQ ID NO: 4261937 - DNA, 25 bp, Homo sapien
ggacaatgctagtttgattattgcc

SEQ ID NO: 4261938 - DNA, 25 bp, Homo sapien
aaatacaactcaactttgattcttg

SEQ ID NO: 4261939 - DNA, 25 bp, Homo sapien
cctgtaaatacaactcaactttgat

SEQ ID NO: 4261940 - DNA, 25 bp, Homo sapien
caactcaactttgattcttgttaaa

SEQ ID NO: 4261941 - DNA, 25 bp, Homo sapien
caacaacctgtaaatacaactcaac

SEQ ID NO: 4261942 - DNA, 25 bp, Homo sapien
taactcttgaggaactgagtaccat

SEQ ID NO: 4261943 - DNA, 25 bp, Homo sapien
tttaactcttgaggaactgagtacc

SEQ ID NO: 4261944 - DNA, 25 bp, Homo sapien
ctccatttaactcttgaggaactga

SEQ ID NO: 4261945 - DNA, 25 bp, Homo sapien
catttaactcttgaggaactgagta

SEQ ID NO: 4261946 - DNA, 25 bp, Homo sapien
actgagttgtaaattgaccaggaag

SEQ ID NO: 4261947 - DNA, 25 bp, Homo sapien
tgagttgtaaattgaccaggaagtc

SEQ ID NO: 4261948 - DNA, 25 bp, Homo sapien
caggaagtctggacacattgtgtcc

SEQ ID NO: 4261949 - DNA, 25 bp, Homo sapien
gaccaggaagtctggacacattgtg

SEQ ID NO: 4261950 - DNA, 25 bp, Homo sapien
tgcttcatagacagaaggttcaggg

SEQ ID NO: 4261951 - DNA, 25 bp, Homo sapien
gttaatgtctctacaccaaatcagg

SEQ ID NO: 4261952 - DNA, 25 bp, Homo sapien
cccaaaggcctttccttatgagtat

SEQ ID NO: 4261953 - DNA, 25 bp, Homo sapien
tatttatatccagagacaccacatg

SEQ ID NO: 4261954 - DNA, 25 bp, Homo sapien
agtgctttgaatttaccccagagtg

SEQ ID NO: 4261955 - DNA, 25 bp, Homo sapien
tctgcagtgctttgaatttacccca

SEQ ID NO: 4261956 - DNA, 25 bp, Homo sapien
agtttcctctgataattatattcta

SEQ ID NO: 4261957 - DNA, 25 bp, Homo sapien
gcagtgctttgaatttaccccagag

SEQ ID NO: 4261958 - DNA, 25 bp, Homo sapien
gaacactgtatatatgtggaataac

SEQ ID NO: 4261959 - DNA, 25 bp, Homo sapien
acactgtatatatgtggaataacac

SEQ ID NO: 4261960 - DNA, 25 bp, Homo sapien
tacagaacactgtatatatgtggaa

SEQ ID NO: 4261961 - DNA, 25 bp, Homo sapien
cagaacactgtatatatgtggaata

SEQ ID NO: 4261962 - DNA, 25 bp, Homo sapien
tttatgggatcctctcccgttctca

SEQ ID NO: 4261963 - DNA, 25 bp, Homo sapien
ttctcacagtctctgctgacttggc

SEQ ID NO: 4261964 - DNA, 25 bp, Homo sapien
gaagcagagcccaaccctttatggg

SEQ ID NO: 4261965 - DNA, 25 bp, Homo sapien
ctctgtccctgagactgggagggaa

SEQ ID NO: 4261966 - DNA, 25 bp, Homo sapien
ctgccgggaagtgttagatgtcact

SEQ ID NO: 4261967 - DNA, 25 bp, Homo sapien
ccgggaagtgttagatgtcactgca

SEQ ID NO: 4261968 - DNA, 25 bp, Homo sapien
gccgggaagtgttagatgtcactgc

SEQ ID NO: 4261969 - DNA, 25 bp, Homo sapien
tgccgggaagtgttagatgtcactg

SEQ ID NO: 4261970 - DNA, 25 bp, Homo sapien
gaatctcatagaagagctgggtaac

SEQ ID NO: 4261971 - DNA, 25 bp, Homo sapien
gccaaaggaatctcatagaagagct

SEQ ID NO: 4261972 - DNA, 25 bp, Homo sapien
tagaagagctgggtaactaaatgca

SEQ ID NO: 4261973 - DNA, 25 bp, Homo sapien
ggtaactaaatgcaagtctgcagag

SEQ ID NO: 4261974 - DNA, 25 bp, Homo sapien
ccaagaaatctagaatttctgtcat

SEQ ID NO: 4261975 - DNA, 25 bp, Homo sapien
gagagcagactgtacccatatgtgt

SEQ ID NO: 4261976 - DNA, 25 bp, Homo sapien
gaaccgtttgtttctgagagcagac

SEQ ID NO: 4261977 - DNA, 25 bp, Homo sapien
ttgtttctgagagcagactgtaccc

SEQ ID NO: 4261978 - DNA, 25 bp, Homo sapien
ccatatgtgtgtcctgaagtagtta

SEQ ID NO: 4261979 - DNA, 25 bp, Homo sapien
cttcagctgcaattctaactgtgtc

SEQ ID NO: 4261980 - DNA, 25 bp, Homo sapien
ttcagctgcaattctaactgtgtca

SEQ ID NO: 4261981 - DNA, 25 bp, Homo sapien
tcagctgcaattctaactgtgtcat

SEQ ID NO: 4261982 - DNA, 25 bp, Homo sapien
aactgattgcattgttggatgggcc

SEQ ID NO: 4261983 - DNA, 25 bp, Homo sapien
tgaaagcaaaaattcgatgggaaga

SEQ ID NO: 4261984 - DNA, 25 bp, Homo sapien
aattcgatgggaagatgagtgtcgt

SEQ ID NO: 4261985 - DNA, 25 bp, Homo sapien
cattacgatggagtgaactgattgc

SEQ ID NO: 4261986 - DNA, 25 bp, Homo sapien
gacactcaccctgtccactcttttg

SEQ ID NO: 4261987 - DNA, 25 bp, Homo sapien
caaaatcagtcagctctaggagagt

SEQ ID NO: 4261988 - DNA, 25 bp, Homo sapien
tgcaggaggcccaatttcatctcct

SEQ ID NO: 4261989 - DNA, 25 bp, Homo sapien
cctccactgaaacaggaagtctgca

SEQ ID NO: 4261990 - DNA, 25 bp, Homo sapien
tacacgatggcatttcagtaccaca

SEQ ID NO: 4261991 - DNA, 25 bp, Homo sapien
gtttaggccaaacataagctctagc

SEQ ID NO: 4261992 - DNA, 25 bp, Homo sapien
gatctgttgggtaaattgtagcagc

SEQ ID NO: 4261993 - DNA, 25 bp, Homo sapien
tataggaccactttactacacgatg

SEQ ID NO: 4261994 - DNA, 25 bp, Homo sapien
gggatgttgaactcaaatgaggaat

SEQ ID NO: 4261995 - DNA, 25 bp, Homo sapien
aataaaagcacagccgtattcaaag

SEQ ID NO: 4261996 - DNA, 25 bp, Homo sapien
gcacagccgtattcaaagtccttgt

SEQ ID NO: 4261997 - DNA, 25 bp, Homo sapien
gttgaactcaaatgaggaataaaag

SEQ ID NO: 4261998 - DNA, 25 bp, Homo sapien
ccataaagaggtggcaaaatctgca

SEQ ID NO: 4261999 - DNA, 25 bp, Homo sapien
ccatttccatatggacttccataaa

SEQ ID NO: 4262000 - DNA, 25 bp, Homo sapien
ttccataaagaggtggcaaaatctg

SEQ ID NO: 4262001 - DNA, 25 bp, Homo sapien
tatggacttccataaagaggtggca

SEQ ID NO: 4262002 - DNA, 25 bp, Homo sapien
gccaacagtatatgctgccaatgag

SEQ ID NO: 4262003 - DNA, 25 bp, Homo sapien
gaatcatgtataagccattggagga

SEQ ID NO: 4262004 - DNA, 25 bp, Homo sapien
taattttccaaacccttgcagatgg

SEQ ID NO: 4262005 - DNA, 25 bp, Homo sapien
aataccaggctatggcacccgtttg

SEQ ID NO: 4262006 - DNA, 25 bp, Homo sapien
gatatggatggtcccaaatgtgcca

SEQ ID NO: 4262007 - DNA, 25 bp, Homo sapien
tgccaaatgacttagtgggctacat

SEQ ID NO: 4262008 - DNA, 25 bp, Homo sapien
gtgggctacataccctcagccaggg

SEQ ID NO: 4262009 - DNA, 25 bp, Homo sapien
ggcactcctcaaggtccaagacttt

SEQ ID NO: 4262010 - DNA, 25 bp, Homo sapien
gctggtcttccctcaaagtctttca

SEQ ID NO: 4262011 - DNA, 25 bp, Homo sapien
aagccggcttccttgggattgtctg

SEQ ID NO: 4262012 - DNA, 25 bp, Homo sapien
ctaatgacatcgactgttgaataga

SEQ ID NO: 4262013 - DNA, 25 bp, Homo sapien
agtaggatgaggttaattcacagaa

SEQ ID NO: 4262014 - DNA, 25 bp, Homo sapien
gtgggtgaacacaactaaatattat

SEQ ID NO: 4262015 - DNA, 25 bp, Homo sapien
tattattttccaagccactcggata

SEQ ID NO: 4262016 - DNA, 25 bp, Homo sapien
gccactcggataccatcccatggag

SEQ ID NO: 4262017 - DNA, 25 bp, Homo sapien
aggtgggtgaacacaactaaatatt

SEQ ID NO: 4262018 - DNA, 25 bp, Homo sapien
caaaagtagcagtgtgtcctttcag

SEQ ID NO: 4262019 - DNA, 25 bp, Homo sapien
aatgtttccacataccctcctacac

SEQ ID NO: 4262020 - DNA, 25 bp, Homo sapien
agagccagggtgtcaaatgtttcca

SEQ ID NO: 4262021 - DNA, 25 bp, Homo sapien
cacataccctcctacacttctgcta

SEQ ID NO: 4262022 - DNA, 25 bp, Homo sapien
gggttgccagcttctgtactgtcca

SEQ ID NO: 4262023 - DNA, 25 bp, Homo sapien
gtactgtccagaagctgacatttgg

SEQ ID NO: 4262024 - DNA, 25 bp, Homo sapien
aatattgctttccagccgcccagaa

SEQ ID NO: 4262025 - DNA, 25 bp, Homo sapien
aaaccctaatattgctttccagccg

SEQ ID NO: 4262026 - DNA, 25 bp, Homo sapien
ttctcacaggaattcccctttgcta

SEQ ID NO: 4262027 - DNA, 25 bp, Homo sapien
gtagcttctcacaggaattcccctt

SEQ ID NO: 4262028 - DNA, 25 bp, Homo sapien
ctcacaggaattcccctttgctact

SEQ ID NO: 4262029 - DNA, 25 bp, Homo sapien
agcttctcacaggaattcccctttg

SEQ ID NO: 4262030 - DNA, 25 bp, Homo sapien
tcttctgagtgaagatacagccctg

SEQ ID NO: 4262031 - DNA, 25 bp, Homo sapien
gagacacaggtccttagtggagtag

SEQ ID NO: 4262032 - DNA, 25 bp, Homo sapien
agtagcatctccctcagatccttct

SEQ ID NO: 4262033 - DNA, 25 bp, Homo sapien
tgatgcttgatgcttgtatcagaca

SEQ ID NO: 4262034 - DNA, 25 bp, Homo sapien
taaaattggcagtcccaggatcact

SEQ ID NO: 4262035 - DNA, 25 bp, Homo sapien
attggcagtcccaggatcacttcca

SEQ ID NO: 4262036 - DNA, 25 bp, Homo sapien
acagttaaaattggcagtcccagga

SEQ ID NO: 4262037 - DNA, 25 bp, Homo sapien
tgtacagttaaaattggcagtccca

SEQ ID NO: 4262038 - DNA, 25 bp, Homo sapien
ggtcactgattatatttgcactcac

SEQ ID NO: 4262039 - DNA, 25 bp, Homo sapien
atcctggtcactgattatatttgca

SEQ ID NO: 4262040 - DNA, 25 bp, Homo sapien
tctgagtccaaaagatatcatctgg

SEQ ID NO: 4262041 - DNA, 25 bp, Homo sapien
gattatatttgcactcacagccaac

SEQ ID NO: 4262042 - DNA, 25 bp, Homo sapien
aagctacttccaccaaaatagattg

SEQ ID NO: 4262043 - DNA, 25 bp, Homo sapien
tcagagacgaagaattgcacaagcg

SEQ ID NO: 4262044 - DNA, 25 bp, Homo sapien
tgcacaagcgtttccaatcccagag

SEQ ID NO: 4262045 - DNA, 25 bp, Homo sapien
ctaaatcgtaggaggagagccaaca

SEQ ID NO: 4262046 - DNA, 25 bp, Homo sapien
cattgagaatgcttcactgattgag

SEQ ID NO: 4262047 - DNA, 25 bp, Homo sapien
gcatccccagggtcatggttagtgg

SEQ ID NO: 4262048 - DNA, 25 bp, Homo sapien
cccagggtcatggttagtggcattc

SEQ ID NO: 4262049 - DNA, 25 bp, Homo sapien
catccccagggtcatggttagtggc

SEQ ID NO: 4262050 - DNA, 25 bp, Homo sapien
tccccagggtcatggttagtggcat

SEQ ID NO: 4262051 - DNA, 25 bp, Homo sapien
ctttatagacaacaaggcactcctg

SEQ ID NO: 4262052 - DNA, 25 bp, Homo sapien
gaatggggtaactatctcctcaaac

SEQ ID NO: 4262053 - DNA, 25 bp, Homo sapien
gctaccaaatagtgcgtcttattca

SEQ ID NO: 4262054 - DNA, 25 bp, Homo sapien
ttgtgctaccaaatagtgcgtctta

SEQ ID NO: 4262055 - DNA, 25 bp, Homo sapien
gacactagtaagaaacggcatcaac

SEQ ID NO: 4262056 - DNA, 25 bp, Homo sapien
ccatcgacactagtaagaaacggca

SEQ ID NO: 4262057 - DNA, 25 bp, Homo sapien
agaccatcgacactagtaagaaacg

SEQ ID NO: 4262058 - DNA, 25 bp, Homo sapien
tcgacactagtaagaaacggcatca

SEQ ID NO: 4262059 - DNA, 25 bp, Homo sapien
caacctctccttattattgatcctg

SEQ ID NO: 4262060 - DNA, 25 bp, Homo sapien
gatcctgtatgctcttaggtttcag

SEQ ID NO: 4262061 - DNA, 25 bp, Homo sapien
ggccatgcttcacctactactgttt

SEQ ID NO: 4262062 - DNA, 25 bp, Homo sapien
cagcttcctctgctatgtcagtcat

SEQ ID NO: 4262063 - DNA, 25 bp, Homo sapien
tgtgctgtgagggttatgtggcttc

SEQ ID NO: 4262064 - DNA, 25 bp, Homo sapien
caatgtgaatgatctgagagtgtgc

SEQ ID NO: 4262065 - DNA, 25 bp, Homo sapien
tctgcaatgtgaatgatctgagagt

SEQ ID NO: 4262066 - DNA, 25 bp, Homo sapien
tgtgaatgatctgagagtgtgctgt

SEQ ID NO: 4262067 - DNA, 25 bp, Homo sapien
atttctgtattgactgactccttgt

SEQ ID NO: 4262068 - DNA, 25 bp, Homo sapien
gtatttctgtattgactgactcctt

SEQ ID NO: 4262069 - DNA, 25 bp, Homo sapien
tctgtattgactgactccttgttct

SEQ ID NO: 4262070 - DNA, 25 bp, Homo sapien
ttctgtattgactgactccttgttc

SEQ ID NO: 4262071 - DNA, 25 bp, Homo sapien
tggagacccttaatccaggaagcat

SEQ ID NO: 4262072 - DNA, 25 bp, Homo sapien
ttttagctatgaaccagtggtttcc

SEQ ID NO: 4262073 - DNA, 25 bp, Homo sapien
tacagagaggtaggagccagaaatg

SEQ ID NO: 4262074 - DNA, 25 bp, Homo sapien
tccctggagacccttaatccaggaa

SEQ ID NO: 4262075 - DNA, 25 bp, Homo sapien
cttcgaatacatgctgtcatcacac

SEQ ID NO: 4262076 - DNA, 25 bp, Homo sapien
ttcgaatacatgctgtcatcacaca

SEQ ID NO: 4262077 - DNA, 25 bp, Homo sapien
tcgaatacatgctgtcatcacacac

SEQ ID NO: 4262078 - DNA, 25 bp, Homo sapien
cactgattactcttgattctccttg

SEQ ID NO: 4262079 - DNA, 25 bp, Homo sapien
ttttgcgcacattatggcttttggg

SEQ ID NO: 4262080 - DNA, 25 bp, Homo sapien
tcatcttttgcgcacattatggctt

SEQ ID NO: 4262081 - DNA, 25 bp, Homo sapien
gcactgattactcttgattctcctt

SEQ ID NO: 4262082 - DNA, 25 bp, Homo sapien
tctgtggatttcttgtttctgtaac

SEQ ID NO: 4262083 - DNA, 25 bp, Homo sapien
cttcttccccagtcgttattagaga

SEQ ID NO: 4262084 - DNA, 25 bp, Homo sapien
aagcaccttaatggtgcattcttct

SEQ ID NO: 4262085 - DNA, 25 bp, Homo sapien
gagaatgagttcctgaccacgtcat

SEQ ID NO: 4262086 - DNA, 25 bp, Homo sapien
tcactcaacatagatgctgccactc

SEQ ID NO: 4262087 - DNA, 25 bp, Homo sapien
cactcaacatagatgctgccactca

SEQ ID NO: 4262088 - DNA, 25 bp, Homo sapien
actcaacatagatgctgccactcac

SEQ ID NO: 4262089 - DNA, 25 bp, Homo sapien
cactgattacatcaaatgcaaattt

SEQ ID NO: 4262090 - DNA, 25 bp, Homo sapien
agatggttttgcctcccatatcact

SEQ ID NO: 4262091 - DNA, 25 bp, Homo sapien
caaaagtaaccttcttgctacattt

SEQ ID NO: 4262092 - DNA, 25 bp, Homo sapien
ccatatcactgattacatcaaatgc

SEQ ID NO: 4262093 - DNA, 25 bp, Homo sapien
ggtcagagtcagtagccactgatac

SEQ ID NO: 4262094 - DNA, 25 bp, Homo sapien
agggtcagagtcagtagccactgat

SEQ ID NO: 4262095 - DNA, 25 bp, Homo sapien
gtcagagtcagtagccactgataca

SEQ ID NO: 4262096 - DNA, 25 bp, Homo sapien
gggtcagagtcagtagccactgata

SEQ ID NO: 4262097 - DNA, 25 bp, Homo sapien
aaaaggcacatatgctccacctccg

SEQ ID NO: 4262098 - DNA, 25 bp, Homo sapien
gaaaaggcacatatgctccacctcc

SEQ ID NO: 4262099 - DNA, 25 bp, Homo sapien
gagaaaaggcacatatgctccacct

SEQ ID NO: 4262100 - DNA, 25 bp, Homo sapien
aaagagaaaaggcacatatgctcca

SEQ ID NO: 4262101 - DNA, 25 bp, Homo sapien
tctcaaggcagttcaacaaggaccc

SEQ ID NO: 4262102 - DNA, 25 bp, Homo sapien
gcatctgattatccatctcaaggca

SEQ ID NO: 4262103 - DNA, 25 bp, Homo sapien
atggacatttctcggtagctagcat

SEQ ID NO: 4262104 - DNA, 25 bp, Homo sapien
ggtagctagcatctgattatccatc

SEQ ID NO: 4262105 - DNA, 25 bp, Homo sapien
tgctataaagaaacacatgcacatg

SEQ ID NO: 4262106 - DNA, 25 bp, Homo sapien
atagcaaagtcttggaaccaagcca

SEQ ID NO: 4262107 - DNA, 25 bp, Homo sapien
aatgtccaacaatgatagactggat

SEQ ID NO: 4262108 - DNA, 25 bp, Homo sapien
tatgtttattgtggcactattcaca

SEQ ID NO: 4262109 - DNA, 25 bp, Homo sapien
gagagaaaccatagaattcagatgc

SEQ ID NO: 4262110 - DNA, 25 bp, Homo sapien
gaaggattgtttagcaacatgagag

SEQ ID NO: 4262111 - DNA, 25 bp, Homo sapien
tttaactgctcttgactctaacttg

SEQ ID NO: 4262112 - DNA, 25 bp, Homo sapien
agagaattttaagaggagccttggg

SEQ ID NO: 4262113 - DNA, 25 bp, Homo sapien
tctcatacttaattgccagaacagc

SEQ ID NO: 4262114 - DNA, 25 bp, Homo sapien
gggtgtttcaccctaggcttattga

SEQ ID NO: 4262115 - DNA, 25 bp, Homo sapien
tctgggcttttagcgtggccatcac

SEQ ID NO: 4262116 - DNA, 25 bp, Homo sapien
tagaggagtgttggatagctgtatc

SEQ ID NO: 4262117 - DNA, 25 bp, Homo sapien
ccttagctccaagcaggttatacct

SEQ ID NO: 4262118 - DNA, 25 bp, Homo sapien
ccctatctcagtgagagctttcatt

SEQ ID NO: 4262119 - DNA, 25 bp, Homo sapien
ccacaacagtgtgggaactcaagat

SEQ ID NO: 4262120 - DNA, 25 bp, Homo sapien
cattttagtgtcatgattttcctta

SEQ ID NO: 4262121 - DNA, 25 bp, Homo sapien
tataggcagtgtgcccagtgtagta

SEQ ID NO: 4262122 - DNA, 25 bp, Homo sapien
aggcagtgtgcccagtgtagtagct

SEQ ID NO: 4262123 - DNA, 25 bp, Homo sapien
accctataggcagtgtgcccagtgt

SEQ ID NO: 4262124 - DNA, 25 bp, Homo sapien
ccctataggcagtgtgcccagtgta

SEQ ID NO: 4262125 - DNA, 25 bp, Homo sapien
taggccctgcctatcattgaaggag

SEQ ID NO: 4262126 - DNA, 25 bp, Homo sapien
tagaggcccaccgtctgtaattgct

SEQ ID NO: 4262127 - DNA, 25 bp, Homo sapien
ggtacttccgagtcattgccatgga

SEQ ID NO: 4262128 - DNA, 25 bp, Homo sapien
tatctggtccaaagttgagtccctg

SEQ ID NO: 4262129 - DNA, 25 bp, Homo sapien
ctctgtatgttctgatctgagaaaa

SEQ ID NO: 4262130 - DNA, 25 bp, Homo sapien
tccttgcttatgagtggaatcccat

SEQ ID NO: 4262131 - DNA, 25 bp, Homo sapien
cagccttgggaacctggcgactaga

SEQ ID NO: 4262132 - DNA, 25 bp, Homo sapien
tctgagaaaaggcatcatatatatc

SEQ ID NO: 4262133 - DNA, 25 bp, Homo sapien
ccatttctagagcaacaggtgcttg

SEQ ID NO: 4262134 - DNA, 25 bp, Homo sapien
ggtgagtgaagtattggcctcgggc

SEQ ID NO: 4262135 - DNA, 25 bp, Homo sapien
gtgcttggagttccccctctgtagg

SEQ ID NO: 4262136 - DNA, 25 bp, Homo sapien
tcaacgaatacatttttccaagtgg

SEQ ID NO: 4262137 - DNA, 25 bp, Homo sapien
aaactccacgaacagatccagcctg

SEQ ID NO: 4262138 - DNA, 25 bp, Homo sapien
ccagcagccagatttcttgggtctc

SEQ ID NO: 4262139 - DNA, 25 bp, Homo sapien
gcttctcctattatctccctgaggt

SEQ ID NO: 4262140 - DNA, 25 bp, Homo sapien
tggtctttagtcttaaactccacga

SEQ ID NO: 4262141 - DNA, 25 bp, Homo sapien
cagctgaaaacctgtccacagcctg

SEQ ID NO: 4262142 - DNA, 25 bp, Homo sapien
gcaggcactgaagggcttctcagca

SEQ ID NO: 4262143 - DNA, 25 bp, Homo sapien
cttgagaagggaaagcagcaggcac

SEQ ID NO: 4262144 - DNA, 25 bp, Homo sapien
aagcagcaggcactgaagggcttct

SEQ ID NO: 4262145 - DNA, 25 bp, Homo sapien
gcagcaggcactgaagggcttctca

SEQ ID NO: 4262146 - DNA, 25 bp, Homo sapien
aactcttcggaaatagttccctgct

SEQ ID NO: 4262147 - DNA, 25 bp, Homo sapien
caagaacatcaaaactcttcggaaa

SEQ ID NO: 4262148 - DNA, 25 bp, Homo sapien
catcaaaactcttcggaaatagttc

SEQ ID NO: 4262149 - DNA, 25 bp, Homo sapien
aatagttccctgcttcatacttcca

SEQ ID NO: 4262150 - DNA, 25 bp, Homo sapien
ccagggaaaagcttgtgacgtctct

SEQ ID NO: 4262151 - DNA, 25 bp, Homo sapien
taggccatctggttgtgtgactacc

SEQ ID NO: 4262152 - DNA, 25 bp, Homo sapien
tgacgtctctaggtgactccacaga

SEQ ID NO: 4262153 - DNA, 25 bp, Homo sapien
tccacagaatagcaacagtcttttg

SEQ ID NO: 4262154 - DNA, 25 bp, Homo sapien
aatttgacctctgatacacccaggg

SEQ ID NO: 4262155 - DNA, 25 bp, Homo sapien
taccaatttcctagctaagcccaag

SEQ ID NO: 4262156 - DNA, 25 bp, Homo sapien
tgtaactttttgaaccataggctcc

SEQ ID NO: 4262157 - DNA, 25 bp, Homo sapien
taggctccctatatgtggccataag

SEQ ID NO: 4262158 - DNA, 25 bp, Homo sapien
tatatcttaaactgcaggcaaccag

SEQ ID NO: 4262159 - DNA, 25 bp, Homo sapien
ttatatcttaaactgcaggcaacca

SEQ ID NO: 4262160 - DNA, 25 bp, Homo sapien
atcttaaactgcaggcaaccagagt

SEQ ID NO: 4262161 - DNA, 25 bp, Homo sapien
tatcttaaactgcaggcaaccagag

SEQ ID NO: 4262162 - DNA, 25 bp, Homo sapien
tctttgtccatgataatgctaactg

SEQ ID NO: 4262163 - DNA, 25 bp, Homo sapien
tgctcttgaccaccattcaacttca

SEQ ID NO: 4262164 - DNA, 25 bp, Homo sapien
tccatgataatgctaactggagatg

SEQ ID NO: 4262165 - DNA, 25 bp, Homo sapien
ctaactggagatgctcttgaccacc

SEQ ID NO: 4262166 - DNA, 25 bp, Homo sapien
tatcctttaattatgccgcagagct

SEQ ID NO: 4262167 - DNA, 25 bp, Homo sapien
atcctttaattatgccgcagagctc

SEQ ID NO: 4262168 - DNA, 25 bp, Homo sapien
ctatcctttaattatgccgcagagc

SEQ ID NO: 4262169 - DNA, 25 bp, Homo sapien
tctgtgcaggaaaccttgtttgttc

SEQ ID NO: 4262170 - DNA, 25 bp, Homo sapien
gatagaaatcacgtacagagaagta

SEQ ID NO: 4262171 - DNA, 25 bp, Homo sapien
tagagtaggtgtgctcatgaaggaa

SEQ ID NO: 4262172 - DNA, 25 bp, Homo sapien
gactttgaggtcattctagagtagg

SEQ ID NO: 4262173 - DNA, 25 bp, Homo sapien
caaaaagatactatgttagaggcta

SEQ ID NO: 4262174 - DNA, 25 bp, Homo sapien
aaaagcacattgcaggtatttttgc

SEQ ID NO: 4262175 - DNA, 25 bp, Homo sapien
cgatggaatacaggaagcactatag

SEQ ID NO: 4262176 - DNA, 25 bp, Homo sapien
ttatcctcacaaagtcaccagtgtg

SEQ ID NO: 4262177 - DNA, 25 bp, Homo sapien
gatcctgtcctacggattccaccag

SEQ ID NO: 4262178 - DNA, 25 bp, Homo sapien
tcaacttgttggtgacggtgcctgg

SEQ ID NO: 4262179 - DNA, 25 bp, Homo sapien
cagcaggttatgaagagactttggg

SEQ ID NO: 4262180 - DNA, 25 bp, Homo sapien
taccgctctgggtggtcaacttgtt

SEQ ID NO: 4262181 - DNA, 25 bp, Homo sapien
catttgaagactacatgcctggagg

SEQ ID NO: 4262182 - DNA, 25 bp, Homo sapien
ccttcagacaggagctaaagtcatt

SEQ ID NO: 4262183 - DNA, 25 bp, Homo sapien
taaaggaacccagcatattgactgt

SEQ ID NO: 4262184 - DNA, 25 bp, Homo sapien
tggacaaaatttcacccaaggagtc

SEQ ID NO: 4262185 - DNA, 25 bp, Homo sapien
gttaagcgagaaccaacccatccat

SEQ ID NO: 4262186 - DNA, 25 bp, Homo sapien
gaagagaaggagtttaagcccagtg

SEQ ID NO: 4262187 - DNA, 25 bp, Homo sapien
tctcccggcataaaggatgatacac

SEQ ID NO: 4262188 - DNA, 25 bp, Homo sapien
gttcaagaccactagcacccaagtg

SEQ ID NO: 4262189 - DNA, 25 bp, Homo sapien
tgttaaggaaaattctgtaagagag

SEQ ID NO: 4262190 - DNA, 25 bp, Homo sapien
taatgttaaggaaaattctgtaaga

SEQ ID NO: 4262191 - DNA, 25 bp, Homo sapien
attctgtaagagagtttttttgttg

SEQ ID NO: 4262192 - DNA, 25 bp, Homo sapien
ctgtaagagagtttttttgttgttg

SEQ ID NO: 4262193 - DNA, 25 bp, Homo sapien
tgtcatatactccagcacaggaccc

SEQ ID NO: 4262194 - DNA, 25 bp, Homo sapien
aatgtgttctggcaatgaagccctc

SEQ ID NO: 4262195 - DNA, 25 bp, Homo sapien
tgaagccctcaagtaccgcagctgt

SEQ ID NO: 4262196 - DNA, 25 bp, Homo sapien
gcacactggtagctctgacatcctg

SEQ ID NO: 4262197 - DNA, 25 bp, Homo sapien
caagtccactcaaaatgcagcattt

SEQ ID NO: 4262198 - DNA, 25 bp, Homo sapien
aatcaagtccactcaaaatgcagca

SEQ ID NO: 4262199 - DNA, 25 bp, Homo sapien
tgagaaaatcaagtccactcaaaat

SEQ ID NO: 4262200 - DNA, 25 bp, Homo sapien
gagaaaatcaagtccactcaaaatg

SEQ ID NO: 4262201 - DNA, 25 bp, Homo sapien
tcatcttttggttgggtgattcttg

SEQ ID NO: 4262202 - DNA, 25 bp, Homo sapien
tcttttggttgggtgattcttggtc

SEQ ID NO: 4262203 - DNA, 25 bp, Homo sapien
tggttgggtgattcttggtccccca

SEQ ID NO: 4262204 - DNA, 25 bp, Homo sapien
gttgggtgattcttggtcccccatg

SEQ ID NO: 4262205 - DNA, 25 bp, Homo sapien
aattgtaatagccactttcctcaag

SEQ ID NO: 4262206 - DNA, 25 bp, Homo sapien
tgttagatgtaaaattgtaatagcc

SEQ ID NO: 4262207 - DNA, 25 bp, Homo sapien
tgtaatagccactttcctcaaggac

SEQ ID NO: 4262208 - DNA, 25 bp, Homo sapien
tttcctcaaggacttcttcaatcac

SEQ ID NO: 4262209 - DNA, 25 bp, Homo sapien
ttcctccaattcaatgctggttggt

SEQ ID NO: 4262210 - DNA, 25 bp, Homo sapien
ctgcatctgttcatatgttattcct

SEQ ID NO: 4262211 - DNA, 25 bp, Homo sapien
tccaattcaatgctggttggtaaac

SEQ ID NO: 4262212 - DNA, 25 bp, Homo sapien
tattccttcctccaattcaatgctg

SEQ ID NO: 4262213 - DNA, 25 bp, Homo sapien
gtaatctgctgtgaaaaagttgggc

SEQ ID NO: 4262214 - DNA, 25 bp, Homo sapien
tgtaataaatggtaatctgctgtga

SEQ ID NO: 4262215 - DNA, 25 bp, Homo sapien
ggctcaatcggttctggagatccct

SEQ ID NO: 4262216 - DNA, 25 bp, Homo sapien
ccaccggatgaacgatgtaataaat

SEQ ID NO: 4262217 - DNA, 25 bp, Homo sapien
catttccctatgtctctgcacagaa

SEQ ID NO: 4262218 - DNA, 25 bp, Homo sapien
cagtgaaagcaagttggacaattct

SEQ ID NO: 4262219 - DNA, 25 bp, Homo sapien
ggacaattctctggtcatatgaaaa

SEQ ID NO: 4262220 - DNA, 25 bp, Homo sapien
catcttagtttacactcagaaggaa

SEQ ID NO: 4262221 - DNA, 25 bp, Homo sapien
tcatatggtttagcgtaggagtaac

SEQ ID NO: 4262222 - DNA, 25 bp, Homo sapien
tttagcgtaggagtaactggctgcc

SEQ ID NO: 4262223 - DNA, 25 bp, Homo sapien
gagtaactggctgcctgaaatctca

SEQ ID NO: 4262224 - DNA, 25 bp, Homo sapien
tttttcatatggtttagcgtaggag

SEQ ID NO: 4262225 - DNA, 25 bp, Homo sapien
gaattggaaagcaaatcctgtacaa

SEQ ID NO: 4262226 - DNA, 25 bp, Homo sapien
cacctaagaggttattgattcctga

SEQ ID NO: 4262227 - DNA, 25 bp, Homo sapien
tactatccgtaatatttcagcatgg

SEQ ID NO: 4262228 - DNA, 25 bp, Homo sapien
gattcctgaatactgtcatgcactg

SEQ ID NO: 4262229 - DNA, 25 bp, Homo sapien
tatatccccaaggagtcatgggtgg

SEQ ID NO: 4262230 - DNA, 25 bp, Homo sapien
tgctgaaaatcctagttcccaaggg

SEQ ID NO: 4262231 - DNA, 25 bp, Homo sapien
tatactctcagtagtccttgacacc

SEQ ID NO: 4262232 - DNA, 25 bp, Homo sapien
cagttcctgctctagaccaaaatca

SEQ ID NO: 4262233 - DNA, 25 bp, Homo sapien
tttcaaattacaagggttactctgc

SEQ ID NO: 4262234 - DNA, 25 bp, Homo sapien
tcaaattgtggtgcaaagctggagg

SEQ ID NO: 4262235 - DNA, 25 bp, Homo sapien
tcttgaatctctctataacccttct

SEQ ID NO: 4262236 - DNA, 25 bp, Homo sapien
ttactctgctggctgaagagggatt

SEQ ID NO: 4262237 - DNA, 25 bp, Homo sapien
taggatcactgatctgacgcacttt

SEQ ID NO: 4262238 - DNA, 25 bp, Homo sapien
atctgacgcactttcctctgggaca

SEQ ID NO: 4262239 - DNA, 25 bp, Homo sapien
gatatagattattttgtgcagctga

SEQ ID NO: 4262240 - DNA, 25 bp, Homo sapien
aatatctgctgaataggatcactga

SEQ ID NO: 4262241 - DNA, 25 bp, Homo sapien
ttgccacaagaatgtgcccatctgt

SEQ ID NO: 4262242 - DNA, 25 bp, Homo sapien
cacaagaatgtgcccatctgtggcc

SEQ ID NO: 4262243 - DNA, 25 bp, Homo sapien
cttgccacaagaatgtgcccatctg

SEQ ID NO: 4262244 - DNA, 25 bp, Homo sapien
gccacaagaatgtgcccatctgtgg

SEQ ID NO: 4262245 - DNA, 25 bp, Homo sapien
tgttggccgggacggaacctgcaat

SEQ ID NO: 4262246 - DNA, 25 bp, Homo sapien
caatgaaggtgcttacaatctggtt

SEQ ID NO: 4262247 - DNA, 25 bp, Homo sapien
gactagtatcatagaagttttgact

SEQ ID NO: 4262248 - DNA, 25 bp, Homo sapien
agttttgactaaaacctgtgagcaa

SEQ ID NO: 4262249 - DNA, 25 bp, Homo sapien
aacataattaaggacccagaaatca

SEQ ID NO: 4262250 - DNA, 25 bp, Homo sapien
cagtgcataagaacccatacatcgg

SEQ ID NO: 4262251 - DNA, 25 bp, Homo sapien
aatagattcatagtcatccaatagg

SEQ ID NO: 4262252 - DNA, 25 bp, Homo sapien
cataaagtgacaatttctattcaaa

SEQ ID NO: 4262253 - DNA, 25 bp, Homo sapien
catttgacccacactaatagaatcc

SEQ ID NO: 4262254 - DNA, 25 bp, Homo sapien
tgcacttgaaaatttaggtttgact

SEQ ID NO: 4262255 - DNA, 25 bp, Homo sapien
tgaaaagaacacgtttcctgtgtta

SEQ ID NO: 4262256 - DNA, 25 bp, Homo sapien
ccttgtcttgaaaggaaacgattat

SEQ ID NO: 4262257 - DNA, 25 bp, Homo sapien
aaattaccacccaagcatcgttcag

SEQ ID NO: 4262258 - DNA, 25 bp, Homo sapien
tcagacatctcaggcccaactataa

SEQ ID NO: 4262259 - DNA, 25 bp, Homo sapien
taataatggtgaacaaacaaggcag

SEQ ID NO: 4262260 - DNA, 25 bp, Homo sapien
aaggcagaattctccgctctttgta

SEQ ID NO: 4262261 - DNA, 25 bp, Homo sapien
atgtggggtggcactttcagaagca

SEQ ID NO: 4262262 - DNA, 25 bp, Homo sapien
gagatttcgaagaatcacagcagga

SEQ ID NO: 4262263 - DNA, 25 bp, Homo sapien
tatttccttaatgtgggccctgagc

SEQ ID NO: 4262264 - DNA, 25 bp, Homo sapien
gactgccaccctgtcactaactcag

SEQ ID NO: 4262265 - DNA, 25 bp, Homo sapien
cttggtcttgatcctgttcctccag

SEQ ID NO: 4262266 - DNA, 25 bp, Homo sapien
cttgatcctgttcctccagtgaagt

SEQ ID NO: 4262267 - DNA, 25 bp, Homo sapien
ctggtcttggtcttgatcctgttcc

SEQ ID NO: 4262268 - DNA, 25 bp, Homo sapien
tgatcctgttcctccagtgaagtcc

SEQ ID NO: 4262269 - DNA, 25 bp, Homo sapien
tctgatagatcatacaccctgttga

SEQ ID NO: 4262270 - DNA, 25 bp, Homo sapien
agggttttatcgaatatctttctga

SEQ ID NO: 4262271 - DNA, 25 bp, Homo sapien
tcatacaccctgttgataagttttc

SEQ ID NO: 4262272 - DNA, 25 bp, Homo sapien
tatcgaatatctttctgatagatca

SEQ ID NO: 4262273 - DNA, 25 bp, Homo sapien
cctgaagcactaaaacttctcttta

SEQ ID NO: 4262274 - DNA, 25 bp, Homo sapien
ctcctcctgaagcactaaaacttct

SEQ ID NO: 4262275 - DNA, 25 bp, Homo sapien
tttctcctcctgaagcactaaaact

SEQ ID NO: 4262276 - DNA, 25 bp, Homo sapien
cttgtttgggattgtctttctcctc

SEQ ID NO: 4262277 - DNA, 25 bp, Homo sapien
tgctggagttatccgaaatgtccaa

SEQ ID NO: 4262278 - DNA, 25 bp, Homo sapien
gctgctggagttatccgaaatgtcc

SEQ ID NO: 4262279 - DNA, 25 bp, Homo sapien
tggagctgctggagttatccgaaat

SEQ ID NO: 4262280 - DNA, 25 bp, Homo sapien
gagttatccgaaatgtccaattcat

SEQ ID NO: 4262281 - DNA, 25 bp, Homo sapien
gttgacacactgccactagcagtac

SEQ ID NO: 4262282 - DNA, 25 bp, Homo sapien
ggttgaagttatcatctgacaggat

SEQ ID NO: 4262283 - DNA, 25 bp, Homo sapien
caggatttcgtcacaggccctgtct

SEQ ID NO: 4262284 - DNA, 25 bp, Homo sapien
ttcgtctttaccataggaggcctgg

SEQ ID NO: 4262285 - DNA, 25 bp, Homo sapien
ggcaggtctgcgctttctgaaagtt

SEQ ID NO: 4262286 - DNA, 25 bp, Homo sapien
gagcttccgcatcaggagtgaggca

SEQ ID NO: 4262287 - DNA, 25 bp, Homo sapien
gacggtgttccggttggcttccata

SEQ ID NO: 4262288 - DNA, 25 bp, Homo sapien
taaaatacctttgtgtgcgtcttcg

SEQ ID NO: 4262289 - DNA, 25 bp, Homo sapien
tctacaatatctggacgagcttccg

SEQ ID NO: 4262290 - DNA, 25 bp, Homo sapien
gatggaaagaattagaaggatacct

SEQ ID NO: 4262291 - DNA, 25 bp, Homo sapien
aaggccagatggaaagaattagaag

SEQ ID NO: 4262292 - DNA, 25 bp, Homo sapien
tagaaggataccttattcaattaca

SEQ ID NO: 4262293 - DNA, 25 bp, Homo sapien
gatacaaagaattgaaaggggtgaa

SEQ ID NO: 4262294 - DNA, 25 bp, Homo sapien
ctgctgatggtgtctgttacttttt

SEQ ID NO: 4262295 - DNA, 25 bp, Homo sapien
tggtgtctgttactttttcagagta

SEQ ID NO: 4262296 - DNA, 25 bp, Homo sapien
ggtgtctgttactttttcagagtag

SEQ ID NO: 4262297 - DNA, 25 bp, Homo sapien
ctgatggtgtctgttactttttcag

SEQ ID NO: 4262298 - DNA, 25 bp, Homo sapien
tctgggactggttcatataccgcct

SEQ ID NO: 4262299 - DNA, 25 bp, Homo sapien
ggactggttcatataccgcctccac

SEQ ID NO: 4262300 - DNA, 25 bp, Homo sapien
tgggactggttcatataccgcctcc

SEQ ID NO: 4262301 - DNA, 25 bp, Homo sapien
gggactggttcatataccgcctcca

SEQ ID NO: 4262302 - DNA, 25 bp, Homo sapien
tcaaagtcgccatctgataaaggat

SEQ ID NO: 4262303 - DNA, 25 bp, Homo sapien
gacatcagccttctccccatacggc

SEQ ID NO: 4262304 - DNA, 25 bp, Homo sapien
cggctcactcttcagtacctcgggg

SEQ ID NO: 4262305 - DNA, 25 bp, Homo sapien
gccaaggacagcatgttagtgctgt

SEQ ID NO: 4262306 - DNA, 25 bp, Homo sapien
agtaaaataaggacattaatacatg

SEQ ID NO: 4262307 - DNA, 25 bp, Homo sapien
gaagtaaaataaggacattaataca

SEQ ID NO: 4262308 - DNA, 25 bp, Homo sapien
tgaagtaaaataaggacattaatac

SEQ ID NO: 4262309 - DNA, 25 bp, Homo sapien
ctgaagtaaaataaggacattaata

SEQ ID NO: 4262310 - DNA, 25 bp, Homo sapien
catatgctggtaactcgcagaccta

SEQ ID NO: 4262311 - DNA, 25 bp, Homo sapien
gctggtaactcgcagacctaatttc

SEQ ID NO: 4262312 - DNA, 25 bp, Homo sapien
aaccatatgctggtaactcgcagac

SEQ ID NO: 4262313 - DNA, 25 bp, Homo sapien
ggtaactcgcagacctaatttccat

SEQ ID NO: 4262314 - DNA, 25 bp, Homo sapien
tgcgaaaaccaatggccatggcctt

SEQ ID NO: 4262315 - DNA, 25 bp, Homo sapien
tcgacagcttcctcacaaccaattt

SEQ ID NO: 4262316 - DNA, 25 bp, Homo sapien
tgaatatgcgaaaaccaatggccat

SEQ ID NO: 4262317 - DNA, 25 bp, Homo sapien
atggccttcgacagcttcctcacaa

SEQ ID NO: 4262318 - DNA, 25 bp, Homo sapien
tgacaacaagccgttttccttggta

SEQ ID NO: 4262319 - DNA, 25 bp, Homo sapien
ttgctttgttgacattctggtttgc

SEQ ID NO: 4262320 - DNA, 25 bp, Homo sapien
ctgacatgacaacaagccgttttcc

SEQ ID NO: 4262321 - DNA, 25 bp, Homo sapien
gctttgttgacattctggtttgcca

SEQ ID NO: 4262322 - DNA, 25 bp, Homo sapien
ggaccaaatcaatgtataccttacg

SEQ ID NO: 4262323 - DNA, 25 bp, Homo sapien
cacccctaggcatatgttatcagga

SEQ ID NO: 4262324 - DNA, 25 bp, Homo sapien
taagcaagaagctgaatggcctacc

SEQ ID NO: 4262325 - DNA, 25 bp, Homo sapien
gtcacggtcctcacatgtggctcag

SEQ ID NO: 4262326 - DNA, 25 bp, Homo sapien
ggcagcttacttcacggcacttcag

SEQ ID NO: 4262327 - DNA, 25 bp, Homo sapien
ttaagaccacctcctcaccatttcc

SEQ ID NO: 4262328 - DNA, 25 bp, Homo sapien
caaaaccagtgcctatcttcacgac

SEQ ID NO: 4262329 - DNA, 25 bp, Homo sapien
aatcatgtgacagttggagtaagcc

SEQ ID NO: 4262330 - DNA, 25 bp, Homo sapien
taaagagtgtatgaatccgttcttg

SEQ ID NO: 4262331 - DNA, 25 bp, Homo sapien
agagtgtatgaatccgttcttgcac

SEQ ID NO: 4262332 - DNA, 25 bp, Homo sapien
gtgtatgaatccgttcttgcactac

SEQ ID NO: 4262333 - DNA, 25 bp, Homo sapien
acatttaaagagtgtatgaatccgt

SEQ ID NO: 4262334 - DNA, 25 bp, Homo sapien
aggaggagccagcacgttttatgtg

SEQ ID NO: 4262335 - DNA, 25 bp, Homo sapien
agccagcacgttttatgtggccaga

SEQ ID NO: 4262336 - DNA, 25 bp, Homo sapien
gcaggagagcgaaggtagaggtgct

SEQ ID NO: 4262337 - DNA, 25 bp, Homo sapien
catttgcttcttgggaggcatcagg

SEQ ID NO: 4262338 - DNA, 25 bp, Homo sapien
tctttggtgatctattgagaaaaca

SEQ ID NO: 4262339 - DNA, 25 bp, Homo sapien
gagaaaacacttttactagtatata

SEQ ID NO: 4262340 - DNA, 25 bp, Homo sapien
tatatcaggtgtggcaaattctttg

SEQ ID NO: 4262341 - DNA, 25 bp, Homo sapien
tatatgcccttgtatagtccctcca

SEQ ID NO: 4262342 - DNA, 25 bp, Homo sapien
aattgtaagagctagtcaggaactg

SEQ ID NO: 4262343 - DNA, 25 bp, Homo sapien
gcaacatgaccttaaatagcccagg

SEQ ID NO: 4262344 - DNA, 25 bp, Homo sapien
gaactttttagagctaggacatcta

SEQ ID NO: 4262345 - DNA, 25 bp, Homo sapien
atagcccaggattatctgaatgtgg

SEQ ID NO: 4262346 - DNA, 25 bp, Homo sapien
ctcttcctccatcaacggctctttc

SEQ ID NO: 4262347 - DNA, 25 bp, Homo sapien
ttatcctcttcctccatcaacggct

SEQ ID NO: 4262348 - DNA, 25 bp, Homo sapien
atcctcttcctccatcaacggctct

SEQ ID NO: 4262349 - DNA, 25 bp, Homo sapien
tttatcctcttcctccatcaacggc

SEQ ID NO: 4262350 - DNA, 25 bp, Homo sapien
cactcccctgaaacctctctggata

SEQ ID NO: 4262351 - DNA, 25 bp, Homo sapien
tctctggataaccattgtccatctg

SEQ ID NO: 4262352 - DNA, 25 bp, Homo sapien
cccctgaaacctctctggataacca

SEQ ID NO: 4262353 - DNA, 25 bp, Homo sapien
ctctggataaccattgtccatctgc

SEQ ID NO: 4262354 - DNA, 25 bp, Homo sapien
taatgatggctcttctcataggacc

SEQ ID NO: 4262355 - DNA, 25 bp, Homo sapien
ttataactacatgaagatccagagc

SEQ ID NO: 4262356 - DNA, 25 bp, Homo sapien
tggaacccgggctaagatagcaagt

SEQ ID NO: 4262357 - DNA, 25 bp, Homo sapien
cactgtgttagtccaggttctctag

SEQ ID NO: 4262358 - DNA, 25 bp, Homo sapien
cattactgtattaccagcttagtgt

SEQ ID NO: 4262359 - DNA, 25 bp, Homo sapien
tatttctatctgtgataggatcata

SEQ ID NO: 4262360 - DNA, 25 bp, Homo sapien
tagtgttatttatctaaccaacctc

SEQ ID NO: 4262361 - DNA, 25 bp, Homo sapien
tctgtgatgtctgcttgacttgaca

SEQ ID NO: 4262362 - DNA, 25 bp, Homo sapien
gatttggcccacaactagtctgatt

SEQ ID NO: 4262363 - DNA, 25 bp, Homo sapien
gttaacaaagttacacatgaagact

SEQ ID NO: 4262364 - DNA, 25 bp, Homo sapien
gaagacttggcccacaaccagtgat

SEQ ID NO: 4262365 - DNA, 25 bp, Homo sapien
tggttacttggttataccctctata

SEQ ID NO: 4262366 - DNA, 25 bp, Homo sapien
agcaatgtgcccacaaaccctttat

SEQ ID NO: 4262367 - DNA, 25 bp, Homo sapien
tctgaggcacttcctacaagagttg

SEQ ID NO: 4262368 - DNA, 25 bp, Homo sapien
ctagtacaatcggtccagcaatgtg

SEQ ID NO: 4262369 - DNA, 25 bp, Homo sapien
caagagttgacaaagagacctttct

SEQ ID NO: 4262370 - DNA, 25 bp, Homo sapien
tcttctctcagaaagtaacgagtag

SEQ ID NO: 4262371 - DNA, 25 bp, Homo sapien
gataagtagacatcatataagcttg

SEQ ID NO: 4262372 - DNA, 25 bp, Homo sapien
agtaacgagtaggtcagccttactg

SEQ ID NO: 4262373 - DNA, 25 bp, Homo sapien
tgcagcttacaaggtacatgttagc

SEQ ID NO: 4262374 - DNA, 25 bp, Homo sapien
aaccacagaggtgagtttactgttt

SEQ ID NO: 4262375 - DNA, 25 bp, Homo sapien
accacagaggtgagtttactgtttt

SEQ ID NO: 4262376 - DNA, 25 bp, Homo sapien
cacagaggtgagtttactgttttct

SEQ ID NO: 4262377 - DNA, 25 bp, Homo sapien
ccacagaggtgagtttactgttttc

SEQ ID NO: 4262378 - DNA, 25 bp, Homo sapien
aagaaatggaccacttcatgcattt

SEQ ID NO: 4262379 - DNA, 25 bp, Homo sapien
ttagtatacatgctggcacagtgag

SEQ ID NO: 4262380 - DNA, 25 bp, Homo sapien
taaagaaatggaccacttcatgcat

SEQ ID NO: 4262381 - DNA, 25 bp, Homo sapien
aaatggaccacttcatgcatttgca

SEQ ID NO: 4262382 - DNA, 25 bp, Homo sapien
gaaatatttgcctagcccaatactg

SEQ ID NO: 4262383 - DNA, 25 bp, Homo sapien
ttttctactagtctgcagcttatct

SEQ ID NO: 4262384 - DNA, 25 bp, Homo sapien
ggctttgatgctgtctaagaaatat

SEQ ID NO: 4262385 - DNA, 25 bp, Homo sapien
tcattctcttaacgtttttcaaaga

SEQ ID NO: 4262386 - DNA, 25 bp, Homo sapien
tactcatccttgtacagcacttgac

SEQ ID NO: 4262387 - DNA, 25 bp, Homo sapien
tgtacagcacttgaccataagcatc

SEQ ID NO: 4262388 - DNA, 25 bp, Homo sapien
cttgaccataagcatcttggtgcct

SEQ ID NO: 4262389 - DNA, 25 bp, Homo sapien
tgtctttttcgttacctgaaatggc

SEQ ID NO: 4262390 - DNA, 25 bp, Homo sapien
caaatgttgactgtgtctcacccca

SEQ ID NO: 4262391 - DNA, 25 bp, Homo sapien
ggcaagcggacatggaaggtttaca

SEQ ID NO: 4262392 - DNA, 25 bp, Homo sapien
tatggaccttatttggcaagtgaca

SEQ ID NO: 4262393 - DNA, 25 bp, Homo sapien
gagaacaagacctgaacatgtgtca

SEQ ID NO: 4262394 - DNA, 25 bp, Homo sapien
catttgtcactcataaggcacagac

SEQ ID NO: 4262395 - DNA, 25 bp, Homo sapien
caggcctacctgctacagatgaagt

SEQ ID NO: 4262396 - DNA, 25 bp, Homo sapien
gaaattttatccaacatcaggccta

SEQ ID NO: 4262397 - DNA, 25 bp, Homo sapien
gagtttctaaggcaacccaatggga

SEQ ID NO: 4262398 - DNA, 25 bp, Homo sapien
ccaacataatgttgtttggtgtcag

SEQ ID NO: 4262399 - DNA, 25 bp, Homo sapien
gtttggtgtcagatctctatggaca

SEQ ID NO: 4262400 - DNA, 25 bp, Homo sapien
cctcttctccttgtgtaagtatcga

SEQ ID NO: 4262401 - DNA, 25 bp, Homo sapien
gtaagtatcgaagagctaagcacag

SEQ ID NO: 4262402 - DNA, 25 bp, Homo sapien
aatgctctccaagcggggctccttc

SEQ ID NO: 4262403 - DNA, 25 bp, Homo sapien
ctgaaatgctctccaagcggggctc

SEQ ID NO: 4262404 - DNA, 25 bp, Homo sapien
tccaagcggggctccttctatcagc

SEQ ID NO: 4262405 - DNA, 25 bp, Homo sapien
caagcggggctccttctatcagctc

SEQ ID NO: 4262406 - DNA, 25 bp, Homo sapien
ctgcctccagggttcaagcaattct

SEQ ID NO: 4262407 - DNA, 25 bp, Homo sapien
gtcttgctctgtggcaaagctgaag

SEQ ID NO: 4262408 - DNA, 25 bp, Homo sapien
tgcctccagggttcaagcaattctc

SEQ ID NO: 4262409 - DNA, 25 bp, Homo sapien
cttgctctgtggcaaagctgaagtg

SEQ ID NO: 4262410 - DNA, 25 bp, Homo sapien
ggatttactgcatgagttttagcac

SEQ ID NO: 4262411 - DNA, 25 bp, Homo sapien
gacaggatttactgcatgagtttta

SEQ ID NO: 4262412 - DNA, 25 bp, Homo sapien
atttactgcatgagttttagcactg

SEQ ID NO: 4262413 - DNA, 25 bp, Homo sapien
caggatttactgcatgagttttagc

SEQ ID NO: 4262414 - DNA, 25 bp, Homo sapien
aaatgttttgtaataacgtacaatg

SEQ ID NO: 4262415 - DNA, 25 bp, Homo sapien
aataacgtacaatgttgggatgata

SEQ ID NO: 4262416 - DNA, 25 bp, Homo sapien
tgttttgtaataacgtacaatgttg

SEQ ID NO: 4262417 - DNA, 25 bp, Homo sapien
tgtaataacgtacaatgttgggatg

SEQ ID NO: 4262418 - DNA, 25 bp, Homo sapien
tacgctgctgtctcgatctttctta

SEQ ID NO: 4262419 - DNA, 25 bp, Homo sapien
gaaacaatattccttacgctgctgt

SEQ ID NO: 4262420 - DNA, 25 bp, Homo sapien
tgctaaaagattttgaccactatgc

SEQ ID NO: 4262421 - DNA, 25 bp, Homo sapien
gctgggttatgtaaattgacctctt

SEQ ID NO: 4262422 - DNA, 25 bp, Homo sapien
ccaaaattgcatagttgcctatata

SEQ ID NO: 4262423 - DNA, 25 bp, Homo sapien
cttccaagatgatccaaaattgcat

SEQ ID NO: 4262424 - DNA, 25 bp, Homo sapien
gatgatccaaaattgcatagttgcc

SEQ ID NO: 4262425 - DNA, 25 bp, Homo sapien
gcatagttgcctatatatttcaaag

SEQ ID NO: 4262426 - DNA, 25 bp, Homo sapien
gatatcacgtacataatgccctatg

SEQ ID NO: 4262427 - DNA, 25 bp, Homo sapien
cactaataaattcagcttggatacc

SEQ ID NO: 4262428 - DNA, 25 bp, Homo sapien
atgccctatgtcaatgaagatctca

SEQ ID NO: 4262429 - DNA, 25 bp, Homo sapien
tcttcataagcactgatatcacgta

SEQ ID NO: 4262430 - DNA, 25 bp, Homo sapien
atctcaaggctctgaaagcataaca

SEQ ID NO: 4262431 - DNA, 25 bp, Homo sapien
catactgaagagaaatctcaaggct

SEQ ID NO: 4262432 - DNA, 25 bp, Homo sapien
gagaaatctcaaggctctgaaagca

SEQ ID NO: 4262433 - DNA, 25 bp, Homo sapien
gaagagaaatctcaaggctctgaaa

SEQ ID NO: 4262434 - DNA, 25 bp, Homo sapien
gttacccaagatttcaataacttga

SEQ ID NO: 4262435 - DNA, 25 bp, Homo sapien
agttacccaagatttcaataacttg

SEQ ID NO: 4262436 - DNA, 25 bp, Homo sapien
tacccaagatttcaataacttgata

SEQ ID NO: 4262437 - DNA, 25 bp, Homo sapien
catagttacccaagatttcaataac

SEQ ID NO: 4262438 - DNA, 25 bp, Homo sapien
gaaggacaagagacatgtttattac

SEQ ID NO: 4262439 - DNA, 25 bp, Homo sapien
ctgaaggacaagagacatgtttatt

SEQ ID NO: 4262440 - DNA, 25 bp, Homo sapien
ttgctattgtatatacaccattttc

SEQ ID NO: 4262441 - DNA, 25 bp, Homo sapien
ctgtaatagattactttttgctgca

SEQ ID NO: 4262442 - DNA, 25 bp, Homo sapien
tgtaatagattactttttgctgcat

SEQ ID NO: 4262443 - DNA, 25 bp, Homo sapien
attttgctattgtatatacaccatt

SEQ ID NO: 4262444 - DNA, 25 bp, Homo sapien
cattgagcaccagctcagtgagggc

SEQ ID NO: 4262445 - DNA, 25 bp, Homo sapien
aatgaagctgctggattcggcctgc

SEQ ID NO: 4262446 - DNA, 25 bp, Homo sapien
atttccctagggctcaagtcttctg

SEQ ID NO: 4262447 - DNA, 25 bp, Homo sapien
cactggacaggcttccaatggagga

SEQ ID NO: 4262448 - DNA, 25 bp, Homo sapien
cggcctgcagcatttgcactggaca

SEQ ID NO: 4262449 - DNA, 25 bp, Homo sapien
gaagaagctgtttgatgcctcccca

SEQ ID NO: 4262450 - DNA, 25 bp, Homo sapien
aatgcgaatttccacgctggtctca

SEQ ID NO: 4262451 - DNA, 25 bp, Homo sapien
aaagtaggcgcagcaactccgctgt

SEQ ID NO: 4262452 - DNA, 25 bp, Homo sapien
ggaggaccggtatcccctcatagag

SEQ ID NO: 4262453 - DNA, 25 bp, Homo sapien
ttctacaatgttgagttcacttatc

SEQ ID NO: 4262454 - DNA, 25 bp, Homo sapien
tctacaatgttgagttcacttatct

SEQ ID NO: 4262455 - DNA, 25 bp, Homo sapien
ttttctacaatgttgagttcactta

SEQ ID NO: 4262456 - DNA, 25 bp, Homo sapien
tttctacaatgttgagttcacttat

SEQ ID NO: 4262457 - DNA, 25 bp, Homo sapien
agaagggaacccaatagaacattag

SEQ ID NO: 4262458 - DNA, 25 bp, Homo sapien
tatctcgggcaccaagtaaatttac

SEQ ID NO: 4262459 - DNA, 25 bp, Homo sapien
tctgctaaactagccagagccagaa

SEQ ID NO: 4262460 - DNA, 25 bp, Homo sapien
ctttctgctaaactagccagagcca

SEQ ID NO: 4262461 - DNA, 25 bp, Homo sapien
gaaacttggctccacatggctacag

SEQ ID NO: 4262462 - DNA, 25 bp, Homo sapien
ggcttcccgggatatgaaactcaac

SEQ ID NO: 4262463 - DNA, 25 bp, Homo sapien
tgcggagtgcccctgaaaagtgcct

SEQ ID NO: 4262464 - DNA, 25 bp, Homo sapien
tgacttaaccgcaaaggctctgaac

SEQ ID NO: 4262465 - DNA, 25 bp, Homo sapien
gggctccacttgtggtgacccattc

SEQ ID NO: 4262466 - DNA, 25 bp, Homo sapien
tctttgactgcagcaagtttttgaa

SEQ ID NO: 4262467 - DNA, 25 bp, Homo sapien
tccacttgtggtgacccattctctt

SEQ ID NO: 4262468 - DNA, 25 bp, Homo sapien
atctttgactgcagcaagtttttga

SEQ ID NO: 4262469 - DNA, 25 bp, Homo sapien
tatgaagagccagtccagtcacaca

SEQ ID NO: 4262470 - DNA, 25 bp, Homo sapien
aacacctgagctgtgtgtgcgaaca

SEQ ID NO: 4262471 - DNA, 25 bp, Homo sapien
ttggcctggatgctcaacacctgag

SEQ ID NO: 4262472 - DNA, 25 bp, Homo sapien
gaacctgcacgtttcctcagctgag

SEQ ID NO: 4262473 - DNA, 25 bp, Homo sapien
tcctgctgcaaacaccatactgctt

SEQ ID NO: 4262474 - DNA, 25 bp, Homo sapien
tgctttttctagcaagtccacaaaa

SEQ ID NO: 4262475 - DNA, 25 bp, Homo sapien
gctttttctagcaagtccacaaaaa

SEQ ID NO: 4262476 - DNA, 25 bp, Homo sapien
cctgctgcaaacaccatactgcttt

SEQ ID NO: 4262477 - DNA, 25 bp, Homo sapien
ctcttctccatagccgaggtactca

SEQ ID NO: 4262478 - DNA, 25 bp, Homo sapien
tgtcatgttgaccagcttgtccaca

SEQ ID NO: 4262479 - DNA, 25 bp, Homo sapien
ggtactcattggctacaatctccat

SEQ ID NO: 4262480 - DNA, 25 bp, Homo sapien
gccgaggtactcattggctacaatc

SEQ ID NO: 4262481 - DNA, 25 bp, Homo sapien
ggacaccaaaagcacccaaggaagc

SEQ ID NO: 4262482 - DNA, 25 bp, Homo sapien
aaataaactgtaggtggcaaaacag

SEQ ID NO: 4262483 - DNA, 25 bp, Homo sapien
ggcaaaacagattcatcaaataata

SEQ ID NO: 4262484 - DNA, 25 bp, Homo sapien
aaaccaacaagccagtcaggacacc

SEQ ID NO: 4262485 - DNA, 25 bp, Homo sapien
ttcaatcccacccaagctatggagt

SEQ ID NO: 4262486 - DNA, 25 bp, Homo sapien
tttcaatcccacccaagctatggag

SEQ ID NO: 4262487 - DNA, 25 bp, Homo sapien
tcaatcccacccaagctatggagta

SEQ ID NO: 4262488 - DNA, 25 bp, Homo sapien
ctgagctaggttttcaatcccaccc

SEQ ID NO: 4262489 - DNA, 25 bp, Homo sapien
cattagtagcctcagacagattaac

SEQ ID NO: 4262490 - DNA, 25 bp, Homo sapien
gaaaatgaatagatggggctcgatt

SEQ ID NO: 4262491 - DNA, 25 bp, Homo sapien
tagatggggctcgattaacccactc

SEQ ID NO: 4262492 - DNA, 25 bp, Homo sapien
gataacatggatccctcattagtag

SEQ ID NO: 4262493 - DNA, 25 bp, Homo sapien
cacatctatcaaatgaggcttaaga

SEQ ID NO: 4262494 - DNA, 25 bp, Homo sapien
cccacatctatcaaatgaggcttaa

SEQ ID NO: 4262495 - DNA, 25 bp, Homo sapien
ccacatctatcaaatgaggcttaag

SEQ ID NO: 4262496 - DNA, 25 bp, Homo sapien
ctcccacatctatcaaatgaggctt

SEQ ID NO: 4262497 - DNA, 25 bp, Homo sapien
tctcaaagaactatgtgaaccaact

SEQ ID NO: 4262498 - DNA, 25 bp, Homo sapien
caagaaggaacaagatctcaaagaa

SEQ ID NO: 4262499 - DNA, 25 bp, Homo sapien
cctaagacttttgaggccttaatga

SEQ ID NO: 4262500 - DNA, 25 bp, Homo sapien
tgacctcaatgagtccaggaaagac

SEQ ID NO: 4262501 - DNA, 25 bp, Homo sapien
cagaggacttgttaactaatccttc

SEQ ID NO: 4262502 - DNA, 25 bp, Homo sapien
tctggcagcagcatacccagctctt

SEQ ID NO: 4262503 - DNA, 25 bp, Homo sapien
tctatgaagcagctcagaacggaca

SEQ ID NO: 4262504 - DNA, 25 bp, Homo sapien
gaaaattcggacctgactgcaatcc

SEQ ID NO: 4262505 - DNA, 25 bp, Homo sapien
atgagtctatttttcaccaaggcgg

SEQ ID NO: 4262506 - DNA, 25 bp, Homo sapien
gcggtaaagatctcctgaaatagtt

SEQ ID NO: 4262507 - DNA, 25 bp, Homo sapien
agtttacgctgaggatgtttgctga

SEQ ID NO: 4262508 - DNA, 25 bp, Homo sapien
tcaccaaggcggtaaagatctcctg

SEQ ID NO: 4262509 - DNA, 25 bp, Homo sapien
caacagcttctgtggattcatgcca

SEQ ID NO: 4262510 - DNA, 25 bp, Homo sapien
cagacttcgtcatgctattttgggc

SEQ ID NO: 4262511 - DNA, 25 bp, Homo sapien
cactatcgaagttaatggctggaag

SEQ ID NO: 4262512 - DNA, 25 bp, Homo sapien
atgccactgaccccgagctctgtgt

SEQ ID NO: 4262513 - DNA, 25 bp, Homo sapien
tttgcttgattggacgttcaaaagg

SEQ ID NO: 4262514 - DNA, 25 bp, Homo sapien
tgcttgattggacgttcaaaaggca

SEQ ID NO: 4262515 - DNA, 25 bp, Homo sapien
attggacgttcaaaaggcaccgaag

SEQ ID NO: 4262516 - DNA, 25 bp, Homo sapien
ggcaccgaagtcttttaagatctga

SEQ ID NO: 4262517 - DNA, 25 bp, Homo sapien
ctgatggtgatttcttgctgtttat

SEQ ID NO: 4262518 - DNA, 25 bp, Homo sapien
cagttgatttttctgtggtcttcac

SEQ ID NO: 4262519 - DNA, 25 bp, Homo sapien
atttcttgctgtttatcagttgatt

SEQ ID NO: 4262520 - DNA, 25 bp, Homo sapien
cttcacctttttatcttgatcaggc

SEQ ID NO: 4262521 - DNA, 25 bp, Homo sapien
aaaacatcaatgccccagaattaac

SEQ ID NO: 4262522 - DNA, 25 bp, Homo sapien
aacatcaatgccccagaattaacat

SEQ ID NO: 4262523 - DNA, 25 bp, Homo sapien
gtaaaacatcaatgccccagaatta

SEQ ID NO: 4262524 - DNA, 25 bp, Homo sapien
tgtaaaacatcaatgccccagaatt

SEQ ID NO: 4262525 - DNA, 25 bp, Homo sapien
catgaacaggacaataaggtttcct

SEQ ID NO: 4262526 - DNA, 25 bp, Homo sapien
tattcacattgtgtcaagtgtagca

SEQ ID NO: 4262527 - DNA, 25 bp, Homo sapien
cactgtctccactgatgcaagttga

SEQ ID NO: 4262528 - DNA, 25 bp, Homo sapien
tcctaaaggaaagatgagtattcac

SEQ ID NO: 4262529 - DNA, 25 bp, Homo sapien
tataagcaaaagcttcattggccat

SEQ ID NO: 4262530 - DNA, 25 bp, Homo sapien
tttataagcaaaagcttcattggcc

SEQ ID NO: 4262531 - DNA, 25 bp, Homo sapien
cttttataagcaaaagcttcattgg

SEQ ID NO: 4262532 - DNA, 25 bp, Homo sapien
gcttcattggccatttctgactttt

SEQ ID NO: 4262533 - DNA, 25 bp, Homo sapien
accacagccgcattctctacctctg

SEQ ID NO: 4262534 - DNA, 25 bp, Homo sapien
gcagtgactcacttacccaccacag

SEQ ID NO: 4262535 - DNA, 25 bp, Homo sapien
tgaaaagactgcctcacgcagtgac

SEQ ID NO: 4262536 - DNA, 25 bp, Homo sapien
tccccggagaccctgactcaagctg

SEQ ID NO: 4262537 - DNA, 25 bp, Homo sapien
gtcccctcaacctcagggacaccgc

SEQ ID NO: 4262538 - DNA, 25 bp, Homo sapien
gagggacggtccctccttcaggcca

SEQ ID NO: 4262539 - DNA, 25 bp, Homo sapien
gcaccgttggttttccaatcaaatc

SEQ ID NO: 4262540 - DNA, 25 bp, Homo sapien
tgcagaccgggggtcccgtccagtc

SEQ ID NO: 4262541 - DNA, 25 bp, Homo sapien
tatgaacaatgggatgccacagctt

SEQ ID NO: 4262542 - DNA, 25 bp, Homo sapien
taggcagtaccaaatgatgacagct

SEQ ID NO: 4262543 - DNA, 25 bp, Homo sapien
aaagactgtgtgcttggcttcggca

SEQ ID NO: 4262544 - DNA, 25 bp, Homo sapien
tcacaatatagacccagtagaggct

SEQ ID NO: 4262545 - DNA, 25 bp, Homo sapien
cacagcactggtatagactccctat

SEQ ID NO: 4262546 - DNA, 25 bp, Homo sapien
tactgatcatagacccttctgagag

SEQ ID NO: 4262547 - DNA, 25 bp, Homo sapien
aatagagaagccctgaaatgttacc

SEQ ID NO: 4262548 - DNA, 25 bp, Homo sapien
gaaaacgccagttagtgaaacacga

SEQ ID NO: 4262549 - DNA, 25 bp, Homo sapien
tcagcatccacgtatttctttcttg

SEQ ID NO: 4262550 - DNA, 25 bp, Homo sapien
agcatccacgtatttctttcttggt

SEQ ID NO: 4262551 - DNA, 25 bp, Homo sapien
cagcatccacgtatttctttcttgg

SEQ ID NO: 4262552 - DNA, 25 bp, Homo sapien
ttattttcacactcacaggtttatc

SEQ ID NO: 4262553 - DNA, 25 bp, Homo sapien
ttttcacactcacaggtttatcagg

SEQ ID NO: 4262554 - DNA, 25 bp, Homo sapien
tttcacactcacaggtttatcagga

SEQ ID NO: 4262555 - DNA, 25 bp, Homo sapien
attttcacactcacaggtttatcag

SEQ ID NO: 4262556 - DNA, 25 bp, Homo sapien
ggtccttaaaatagggcagtatatg

SEQ ID NO: 4262557 - DNA, 25 bp, Homo sapien
catatgaacagttatagcatgagac

SEQ ID NO: 4262558 - DNA, 25 bp, Homo sapien
gcagtatatggtcagaatctgttgg

SEQ ID NO: 4262559 - DNA, 25 bp, Homo sapien
aatgagtatactaaaccttctgaga

SEQ ID NO: 4262560 - DNA, 25 bp, Homo sapien
tgaatgactgagcaccctagaagac

SEQ ID NO: 4262561 - DNA, 25 bp, Homo sapien
tccctgagggcttagttcttgaagt

SEQ ID NO: 4262562 - DNA, 25 bp, Homo sapien
tcagaagacagagctaagacagcaa

SEQ ID NO: 4262563 - DNA, 25 bp, Homo sapien
gattaccaaacagaatccctgaggg

SEQ ID NO: 4262564 - DNA, 25 bp, Homo sapien
tatgttaacaattgagggatcaaca

SEQ ID NO: 4262565 - DNA, 25 bp, Homo sapien
ggccatttcatctgatatgttaaca

SEQ ID NO: 4262566 - DNA, 25 bp, Homo sapien
gcattctcagtattcatggaaagtg

SEQ ID NO: 4262567 - DNA, 25 bp, Homo sapien
catgttagatctggttactttggca

SEQ ID NO: 4262568 - DNA, 25 bp, Homo sapien
tcaaatggaaggtgcacagtatcat

SEQ ID NO: 4262569 - DNA, 25 bp, Homo sapien
cttcaaatggaaggtgcacagtatc

SEQ ID NO: 4262570 - DNA, 25 bp, Homo sapien
ttttagggccttgactggaatttgc

SEQ ID NO: 4262571 - DNA, 25 bp, Homo sapien
actggaatttgcaagagacttcccc

SEQ ID NO: 4262572 - DNA, 25 bp, Homo sapien
ctttctggcataagatcatcaagcc

SEQ ID NO: 4262573 - DNA, 25 bp, Homo sapien
gccaactaagttctctcttcgtgaa

SEQ ID NO: 4262574 - DNA, 25 bp, Homo sapien
gagtttgcgcacaaacactaatgca

SEQ ID NO: 4262575 - DNA, 25 bp, Homo sapien
tctcttcgtgaaacacaggtccatg

SEQ ID NO: 4262576 - DNA, 25 bp, Homo sapien
gcagctgaaacttttatcacccata

SEQ ID NO: 4262577 - DNA, 25 bp, Homo sapien
atcacccataaaaggaccaaacaag

SEQ ID NO: 4262578 - DNA, 25 bp, Homo sapien
ggaccttccagagcggcacataacg

SEQ ID NO: 4262579 - DNA, 25 bp, Homo sapien
taacggaggtatatcaaatcaggct

SEQ ID NO: 4262580 - DNA, 25 bp, Homo sapien
catacagaacaggcattggaataaa

SEQ ID NO: 4262581 - DNA, 25 bp, Homo sapien
tcccatataaaggaaaacaccatac

SEQ ID NO: 4262582 - DNA, 25 bp, Homo sapien
catataaaggaaaacaccatacaga

SEQ ID NO: 4262583 - DNA, 25 bp, Homo sapien
aaggaaaacaccatacagaacaggc

SEQ ID NO: 4262584 - DNA, 25 bp, Homo sapien
aacgccaaccatgagcaaatcaagg

SEQ ID NO: 4262585 - DNA, 25 bp, Homo sapien
aacttgggttgttcccctggagcag

SEQ ID NO: 4262586 - DNA, 25 bp, Homo sapien
aaatcattagccctgtaacccgctg

SEQ ID NO: 4262587 - DNA, 25 bp, Homo sapien
caaaccatggaagtcccatgacaga

SEQ ID NO: 4262588 - DNA, 25 bp, Homo sapien
tctgtaagtctaaatggttccctca

SEQ ID NO: 4262589 - DNA, 25 bp, Homo sapien
ctgtaagtctaaatggttccctcaa

SEQ ID NO: 4262590 - DNA, 25 bp, Homo sapien
tgtaagtctaaatggttccctcaat

SEQ ID NO: 4262591 - DNA, 25 bp, Homo sapien
tatctgtaagtctaaatggttccct

SEQ ID NO: 4262592 - DNA, 25 bp, Homo sapien
taaagatgagaatggtacaaagcaa

SEQ ID NO: 4262593 - DNA, 25 bp, Homo sapien
tgatttgttgatccataaagatgag

SEQ ID NO: 4262594 - DNA, 25 bp, Homo sapien
taattacagctgtgatttgttgatc

SEQ ID NO: 4262595 - DNA, 25 bp, Homo sapien
ccataaagatgagaatggtacaaag

SEQ ID NO: 4262596 - DNA, 25 bp, Homo sapien
ctattaataaggtccaccaaggatt

SEQ ID NO: 4262597 - DNA, 25 bp, Homo sapien
ccaaggattatctcccagtgggctt

SEQ ID NO: 4262598 - DNA, 25 bp, Homo sapien
ttatctcccagtgggcttatgatcc

SEQ ID NO: 4262599 - DNA, 25 bp, Homo sapien
tccaccaaggattatctcccagtgg

SEQ ID NO: 4262600 - DNA, 25 bp, Homo sapien
catgaagtttaggagatggaactcc

SEQ ID NO: 4262601 - DNA, 25 bp, Homo sapien
caaggtagtcaattgtaaccattat

SEQ ID NO: 4262602 - DNA, 25 bp, Homo sapien
gaacatgaagtttaggagatggaac

SEQ ID NO: 4262603 - DNA, 25 bp, Homo sapien
gagatggaactcctacaaggtagtc

SEQ ID NO: 4262604 - DNA, 25 bp, Homo sapien
aatacagcaaaatcactgattgtcg

SEQ ID NO: 4262605 - DNA, 25 bp, Homo sapien
gaaatacagcaaaatcactgattgt

SEQ ID NO: 4262606 - DNA, 25 bp, Homo sapien
cagcaaaatcactgattgtcgatcg

SEQ ID NO: 4262607 - DNA, 25 bp, Homo sapien
caaaatcactgattgtcgatcgcac

SEQ ID NO: 4262608 - DNA, 25 bp, Homo sapien
gttggcatggagtattaacctcaaa

SEQ ID NO: 4262609 - DNA, 25 bp, Homo sapien
aacacatttcgcaactaacctagca

SEQ ID NO: 4262610 - DNA, 25 bp, Homo sapien
tgtgagctcaggcacgtaatataca

SEQ ID NO: 4262611 - DNA, 25 bp, Homo sapien
caaatggagcttttaactagtgaca

SEQ ID NO: 4262612 - DNA, 25 bp, Homo sapien
aacgcttggtcttaaattgcttgag

SEQ ID NO: 4262613 - DNA, 25 bp, Homo sapien
aagtaacgcttggtcttaaattgct

SEQ ID NO: 4262614 - DNA, 25 bp, Homo sapien
gcttggtcttaaattgcttgaggaa

SEQ ID NO: 4262615 - DNA, 25 bp, Homo sapien
ggtcttaaattgcttgaggaatgaa

SEQ ID NO: 4262616 - DNA, 25 bp, Homo sapien
ctggaatataaggtccatgatgacc

SEQ ID NO: 4262617 - DNA, 25 bp, Homo sapien
ggaatataaggtccatgatgaccac

SEQ ID NO: 4262618 - DNA, 25 bp, Homo sapien
gaatataaggtccatgatgaccaca

SEQ ID NO: 4262619 - DNA, 25 bp, Homo sapien
aatataaggtccatgatgaccacaa

SEQ ID NO: 4262620 - DNA, 25 bp, Homo sapien
tgtgtgctgttatattatctttctt

SEQ ID NO: 4262621 - DNA, 25 bp, Homo sapien
gggtttggaggttcagtacatacac

SEQ ID NO: 4262622 - DNA, 25 bp, Homo sapien
gaaacagtaagatttctccaggaaa

SEQ ID NO: 4262623 - DNA, 25 bp, Homo sapien
cattgtgctagagtttcattgctgg

SEQ ID NO: 4262624 - DNA, 25 bp, Homo sapien
ctgagaaattagagtaggatacatt

SEQ ID NO: 4262625 - DNA, 25 bp, Homo sapien
ggatcctgaatttcatgcttacatt

SEQ ID NO: 4262626 - DNA, 25 bp, Homo sapien
gcatggagactagaaagtggaaaat

SEQ ID NO: 4262627 - DNA, 25 bp, Homo sapien
tagagtaggatacatttttaaggat

SEQ ID NO: 4262628 - DNA, 25 bp, Homo sapien
gaggctctgacatctctgtaaaaac

SEQ ID NO: 4262629 - DNA, 25 bp, Homo sapien
ggctctgacatctctgtaaaaacac

SEQ ID NO: 4262630 - DNA, 25 bp, Homo sapien
tctgacatctctgtaaaaacacatt

SEQ ID NO: 4262631 - DNA, 25 bp, Homo sapien
tgaggctctgacatctctgtaaaaa

SEQ ID NO: 4262632 - DNA, 25 bp, Homo sapien
agcctcttctgtaaatcgagtaata

SEQ ID NO: 4262633 - DNA, 25 bp, Homo sapien
caaagcctcgtagatgaatatgatg

SEQ ID NO: 4262634 - DNA, 25 bp, Homo sapien
attaaatgcatatgtttctcctaaa

SEQ ID NO: 4262635 - DNA, 25 bp, Homo sapien
atatgtttctcctaaatcaaagagc

SEQ ID NO: 4262636 - DNA, 25 bp, Homo sapien
tgttgcaaccaaaacaatgcacaaa

SEQ ID NO: 4262637 - DNA, 25 bp, Homo sapien
ctgttgcaaccaaaacaatgcacaa

SEQ ID NO: 4262638 - DNA, 25 bp, Homo sapien
taaagacagataagaaagttgataa

SEQ ID NO: 4262639 - DNA, 25 bp, Homo sapien
aagacagataagaaagttgataatc

SEQ ID NO: 4262640 - DNA, 25 bp, Homo sapien
agacagataagaaagttgataatct

SEQ ID NO: 4262641 - DNA, 25 bp, Homo sapien
cttaaagacagataagaaagttgat

SEQ ID NO: 4262642 - DNA, 25 bp, Homo sapien
attgcaagcaatgggaacagcaaga

SEQ ID NO: 4262643 - DNA, 25 bp, Homo sapien
gaaataactctatatctttttctgc

SEQ ID NO: 4262644 - DNA, 25 bp, Homo sapien
catatgtggaatagtatttgtacct

SEQ ID NO: 4262645 - DNA, 25 bp, Homo sapien
tgcttcggctgaagactagcttatt

SEQ ID NO: 4262646 - DNA, 25 bp, Homo sapien
gaaaatctaccaggcgataaatatt

SEQ ID NO: 4262647 - DNA, 25 bp, Homo sapien
aaatctaccaggcgataaatatttc

SEQ ID NO: 4262648 - DNA, 25 bp, Homo sapien
aaaatctaccaggcgataaatattt

SEQ ID NO: 4262649 - DNA, 25 bp, Homo sapien
tgaaaatctaccaggcgataaatat

SEQ ID NO: 4262650 - DNA, 25 bp, Homo sapien
ctattagtctatgtggcatgccaga

SEQ ID NO: 4262651 - DNA, 25 bp, Homo sapien
cagaatctatacttcgggtcactgc

SEQ ID NO: 4262652 - DNA, 25 bp, Homo sapien
gggtcactgcattctctattagtct

SEQ ID NO: 4262653 - DNA, 25 bp, Homo sapien
gagagctggatccatcaaatatgta

SEQ ID NO: 4262654 - DNA, 25 bp, Homo sapien
cacatgtgataagtagagagggcta

SEQ ID NO: 4262655 - DNA, 25 bp, Homo sapien
tgaacaacctcaccgatggaaactg

SEQ ID NO: 4262656 - DNA, 25 bp, Homo sapien
tcaaagtctaacagctacagtaccc

SEQ ID NO: 4262657 - DNA, 25 bp, Homo sapien
gggccagaggatggtcaatcataca

SEQ ID NO: 4262658 - DNA, 25 bp, Homo sapien
gatgctccaaaaagagactctattg

SEQ ID NO: 4262659 - DNA, 25 bp, Homo sapien
caatattgttagaggttgcccagca

SEQ ID NO: 4262660 - DNA, 25 bp, Homo sapien
caaacactagaactggacctgtgct

SEQ ID NO: 4262661 - DNA, 25 bp, Homo sapien
ggcaatcccagttaatgatgctcca

SEQ ID NO: 4262662 - DNA, 25 bp, Homo sapien
aaaaatacccatcaagcagttataa

SEQ ID NO: 4262663 - DNA, 25 bp, Homo sapien
aagaaacttttgtgatcatccttaa

SEQ ID NO: 4262664 - DNA, 25 bp, Homo sapien
tcataaacatttctctaacgtacta

SEQ ID NO: 4262665 - DNA, 25 bp, Homo sapien
taacgtactataatacatgtaagac

SEQ ID NO: 4262666 - DNA, 25 bp, Homo sapien
tgggagagacacatactagggcttc

SEQ ID NO: 4262667 - DNA, 25 bp, Homo sapien
gagggcttccgaaactagatttcca

SEQ ID NO: 4262668 - DNA, 25 bp, Homo sapien
gaacgtactatccagaaaagccagc

SEQ ID NO: 4262669 - DNA, 25 bp, Homo sapien
gccagcccattaattggtaaaggga

SEQ ID NO: 4262670 - DNA, 25 bp, Homo sapien
tgtccgtgttaatgacacatttgtt

SEQ ID NO: 4262671 - DNA, 25 bp, Homo sapien
tttatgcagagcttaagtcaaagga

SEQ ID NO: 4262672 - DNA, 25 bp, Homo sapien
gccatcataaaatccttagttcaat

SEQ ID NO: 4262673 - DNA, 25 bp, Homo sapien
catttgttaattatatgggctaaat

SEQ ID NO: 4262674 - DNA, 25 bp, Homo sapien
attaacacaggcaaatcggtataaa

SEQ ID NO: 4262675 - DNA, 25 bp, Homo sapien
acaggcaaatcggtataaaattaag

SEQ ID NO: 4262676 - DNA, 25 bp, Homo sapien
gttcccctctcctaatcttgggctg

SEQ ID NO: 4262677 - DNA, 25 bp, Homo sapien
ccctctcctaatcttgggctgaaaa

SEQ ID NO: 4262678 - DNA, 25 bp, Homo sapien
aaaaaatcagcctattaccctgcct

SEQ ID NO: 4262679 - DNA, 25 bp, Homo sapien
atgagcccgccgtggtggtgggccc

SEQ ID NO: 4262680 - DNA, 25 bp, Homo sapien
aaaatcagcctattaccctgcctgc

SEQ ID NO: 4262681 - DNA, 25 bp, Homo sapien
cagcctattaccctgcctgcctacc

SEQ ID NO: 4262682 - DNA, 25 bp, Homo sapien
tcctcttctaggtctgtgtgtctaa

SEQ ID NO: 4262683 - DNA, 25 bp, Homo sapien
cattccataaatctgggtaatttca

SEQ ID NO: 4262684 - DNA, 25 bp, Homo sapien
tctaggtctgtgtgtctaatttgct

SEQ ID NO: 4262685 - DNA, 25 bp, Homo sapien
cataaatctgggtaatttcacactt

SEQ ID NO: 4262686 - DNA, 25 bp, Homo sapien
ctatttcaaccttcactcctatata

SEQ ID NO: 4262687 - DNA, 25 bp, Homo sapien
tcctatataaacgattcccaatctt

SEQ ID NO: 4262688 - DNA, 25 bp, Homo sapien
actctacacactctgggaccgtatc

SEQ ID NO: 4262689 - DNA, 25 bp, Homo sapien
tctgggaccgtatctcctaatatct

SEQ ID NO: 4262690 - DNA, 25 bp, Homo sapien
tgtgacagcacataaagcaacttac

SEQ ID NO: 4262691 - DNA, 25 bp, Homo sapien
cttgaggacaggagatactggctct

SEQ ID NO: 4262692 - DNA, 25 bp, Homo sapien
ttatctcactcacgtgtggcaaagc

SEQ ID NO: 4262693 - DNA, 25 bp, Homo sapien
gaatgacagtccacggacaaagagg

SEQ ID NO: 4262694 - DNA, 25 bp, Homo sapien
gcctggccactaccaatctttgtac

SEQ ID NO: 4262695 - DNA, 25 bp, Homo sapien
tgctttgggtcacgttaatcatgct

SEQ ID NO: 4262696 - DNA, 25 bp, Homo sapien
gctgtgggtagactcttcaaataaa

SEQ ID NO: 4262697 - DNA, 25 bp, Homo sapien
agctaaaagcctggccactaccaat

SEQ ID NO: 4262698 - DNA, 25 bp, Homo sapien
acaggcacagtataggaaaagaatc

SEQ ID NO: 4262699 - DNA, 25 bp, Homo sapien
taatgcatccttgaagtcactcaag

SEQ ID NO: 4262700 - DNA, 25 bp, Homo sapien
aggcttaatgcatccttgaagtcac

SEQ ID NO: 4262701 - DNA, 25 bp, Homo sapien
aaaagtgattacaggagacatacag

SEQ ID NO: 4262702 - DNA, 25 bp, Homo sapien
tgcttgtccatggaagattacctca

SEQ ID NO: 4262703 - DNA, 25 bp, Homo sapien
taattccatactgaccaccagtgga

SEQ ID NO: 4262704 - DNA, 25 bp, Homo sapien
caagaaccttctgtataagcaatgg

SEQ ID NO: 4262705 - DNA, 25 bp, Homo sapien
ggtttccagagagcaatacaatggt

SEQ ID NO: 4262706 - DNA, 25 bp, Homo sapien
ccagcatgatgagcggcctctttag

SEQ ID NO: 4262707 - DNA, 25 bp, Homo sapien
tgtgggggtagatccattgtgaaac

SEQ ID NO: 4262708 - DNA, 25 bp, Homo sapien
cggcctctttaggagtctcacccag

SEQ ID NO: 4262709 - DNA, 25 bp, Homo sapien
atgatgagcggcctctttaggagtc

SEQ ID NO: 4262710 - DNA, 25 bp, Homo sapien
atttcacaaaaaacattattttcag

SEQ ID NO: 4262711 - DNA, 25 bp, Homo sapien
ctgaatttcacaaaaaacattattt

SEQ ID NO: 4262712 - DNA, 25 bp, Homo sapien
tttcacaaaaaacattattttcaga

SEQ ID NO: 4262713 - DNA, 25 bp, Homo sapien
cacaaaaaacattattttcagaatt

SEQ ID NO: 4262714 - DNA, 25 bp, Homo sapien
tgcgtatagaaggatcccactctcc

SEQ ID NO: 4262715 - DNA, 25 bp, Homo sapien
catcaattccagataagaggtcatt

SEQ ID NO: 4262716 - DNA, 25 bp, Homo sapien
ctggaggtaggacagttacttgatc

SEQ ID NO: 4262717 - DNA, 25 bp, Homo sapien
tttgctttataagctacatcatgga

SEQ ID NO: 4262718 - DNA, 25 bp, Homo sapien
gtgccttgcccgctggacccaataa

SEQ ID NO: 4262719 - DNA, 25 bp, Homo sapien
ggctattgatcgtccaatttcatgg

SEQ ID NO: 4262720 - DNA, 25 bp, Homo sapien
catctgtcatgagagtggctattga

SEQ ID NO: 4262721 - DNA, 25 bp, Homo sapien
ttgcccgctggacccaataacaaaa

SEQ ID NO: 4262722 - DNA, 25 bp, Homo sapien
tcagcacccgtaggaatttttctca

SEQ ID NO: 4262723 - DNA, 25 bp, Homo sapien
acgttggatgcctcagcacccgtag

SEQ ID NO: 4262724 - DNA, 25 bp, Homo sapien
caaaaagtctacttcgcccaccagg

SEQ ID NO: 4262725 - DNA, 25 bp, Homo sapien
tcgcccaccaggacgttggatgcct

SEQ ID NO: 4262726 - DNA, 25 bp, Homo sapien
aactacagtgccaggaggcagactc

SEQ ID NO: 4262727 - DNA, 25 bp, Homo sapien
ccacaactacagtgccaggaggcag

SEQ ID NO: 4262728 - DNA, 25 bp, Homo sapien
ccagtgtgccacaactacagtgcca

SEQ ID NO: 4262729 - DNA, 25 bp, Homo sapien
tgtgccacaactacagtgccaggag

SEQ ID NO: 4262730 - DNA, 25 bp, Homo sapien
ctccacttttactattgtccaagtt

SEQ ID NO: 4262731 - DNA, 25 bp, Homo sapien
cttgctgaagtcaacagtactattt

SEQ ID NO: 4262732 - DNA, 25 bp, Homo sapien
catgaaacaatggacaactaaaatc

SEQ ID NO: 4262733 - DNA, 25 bp, Homo sapien
gagaacttcaatcttctcaaaggca

SEQ ID NO: 4262734 - DNA, 25 bp, Homo sapien
gattccaggcagtcagtcattagag

SEQ ID NO: 4262735 - DNA, 25 bp, Homo sapien
atccgagtctgtatatgattccagg

SEQ ID NO: 4262736 - DNA, 25 bp, Homo sapien
ggagttaagtcaacattttcctcat

SEQ ID NO: 4262737 - DNA, 25 bp, Homo sapien
agtcttcctcaggcggatgaattac

SEQ ID NO: 4262738 - DNA, 25 bp, Homo sapien
tctgctcctcgcctttcagcgctgc

SEQ ID NO: 4262739 - DNA, 25 bp, Homo sapien
tttcagcgctgcttctaagtcttcc

SEQ ID NO: 4262740 - DNA, 25 bp, Homo sapien
caggcggctgatgctagggctagaa

SEQ ID NO: 4262741 - DNA, 25 bp, Homo sapien
cggctgatgctagggctagaaggag

SEQ ID NO: 4262742 - DNA, 25 bp, Homo sapien
gctagaaggaggactgttttgaggg

SEQ ID NO: 4262743 - DNA, 25 bp, Homo sapien
caggtgaaaccagtagttctggggc

SEQ ID NO: 4262744 - DNA, 25 bp, Homo sapien
gattctcctctcaaggaaaggtttg

SEQ ID NO: 4262745 - DNA, 25 bp, Homo sapien
aagaagatgaccaagaagaagagat

SEQ ID NO: 4262746 - DNA, 25 bp, Homo sapien
tcaaggaaaggtttgaggcagacag

SEQ ID NO: 4262747 - DNA, 25 bp, Homo sapien
gaagaagagataaaggtgattctcc

SEQ ID NO: 4262748 - DNA, 25 bp, Homo sapien
ctgttcgcaaagagtggcgggaggc

SEQ ID NO: 4262749 - DNA, 25 bp, Homo sapien
aaagagtggcgggaggctgaaaggc

SEQ ID NO: 4262750 - DNA, 25 bp, Homo sapien
ttcgcaaagagtggcgggaggctga

SEQ ID NO: 4262751 - DNA, 25 bp, Homo sapien
caaagagtggcgggaggctgaaagg

SEQ ID NO: 4262752 - DNA, 25 bp, Homo sapien
tagaagtgttagcaaaaattggatg

SEQ ID NO: 4262753 - DNA, 25 bp, Homo sapien
gcaaaaattggatgccacaacttat

SEQ ID NO: 4262754 - DNA, 25 bp, Homo sapien
aattggatgccacaacttatctcac

SEQ ID NO: 4262755 - DNA, 25 bp, Homo sapien
ttacagtagaagtgttagcaaaaat

SEQ ID NO: 4262756 - DNA, 25 bp, Homo sapien
tatctgcaaaagatcgaacaagagg

SEQ ID NO: 4262757 - DNA, 25 bp, Homo sapien
caagaggaatccgactggtgaatct

SEQ ID NO: 4262758 - DNA, 25 bp, Homo sapien
tctgacattctctcgtatggactcg

SEQ ID NO: 4262759 - DNA, 25 bp, Homo sapien
cattcctttcaagcaagtgagggtc

SEQ ID NO: 4262760 - DNA, 25 bp, Homo sapien
tcttcgagaggtagagaaaccaaca

SEQ ID NO: 4262761 - DNA, 25 bp, Homo sapien
gccaagtttctgctctcttcgagag

SEQ ID NO: 4262762 - DNA, 25 bp, Homo sapien
ttaactattcactgagcgtccgctg

SEQ ID NO: 4262763 - DNA, 25 bp, Homo sapien
gcgtccgctgtgtgttgggaataca

SEQ ID NO: 4262764 - DNA, 25 bp, Homo sapien
tagagtgcttgctctcatatccagc

SEQ ID NO: 4262765 - DNA, 25 bp, Homo sapien
gactgttccattgaggatgcaactc

SEQ ID NO: 4262766 - DNA, 25 bp, Homo sapien
actgtgcaaagagagagttgccaca

SEQ ID NO: 4262767 - DNA, 25 bp, Homo sapien
ataaggtttactccatcggtcaccg

SEQ ID NO: 4262768 - DNA, 25 bp, Homo sapien
ttataagtaatgaagattccatttg

SEQ ID NO: 4262769 - DNA, 25 bp, Homo sapien
tatcttaatgtgataaagaaacatt

SEQ ID NO: 4262770 - DNA, 25 bp, Homo sapien
taagtaatgaagattccatttgttt

SEQ ID NO: 4262771 - DNA, 25 bp, Homo sapien
gtttatcttaatgtgataaagaaac

SEQ ID NO: 4262772 - DNA, 25 bp, Homo sapien
tcatcatcttcagtaccaaggataa

SEQ ID NO: 4262773 - DNA, 25 bp, Homo sapien
tcatcttcagtaccaaggataaact

SEQ ID NO: 4262774 - DNA, 25 bp, Homo sapien
catcatcttcagtaccaaggataaa

SEQ ID NO: 4262775 - DNA, 25 bp, Homo sapien
atcatcttcagtaccaaggataaac

SEQ ID NO: 4262776 - DNA, 25 bp, Homo sapien
caaaataagaatttacatatactca

SEQ ID NO: 4262777 - DNA, 25 bp, Homo sapien
agataaattcacagttttgaaaatg

SEQ ID NO: 4262778 - DNA, 25 bp, Homo sapien
tttcctcaagtcattcaaagataaa

SEQ ID NO: 4262779 - DNA, 25 bp, Homo sapien
ttacatatactcaaatttttcctca

SEQ ID NO: 4262780 - DNA, 25 bp, Homo sapien
ggcacgcggacactttgaaaggtga

SEQ ID NO: 4262781 - DNA, 25 bp, Homo sapien
caaaaccgggttctggtcacatggc

SEQ ID NO: 4262782 - DNA, 25 bp, Homo sapien
catggcagggaaagattaggcacgc

SEQ ID NO: 4262783 - DNA, 25 bp, Homo sapien
cagcgtctcactcccaggatggggt

SEQ ID NO: 4262784 - DNA, 25 bp, Homo sapien
gtgatgtttgtgtccgcgatgccta

SEQ ID NO: 4262785 - DNA, 25 bp, Homo sapien
ttttcttctccggtggtgatgtttg

SEQ ID NO: 4262786 - DNA, 25 bp, Homo sapien
cgcgatgcctatgacgccgacgact

SEQ ID NO: 4262787 - DNA, 25 bp, Homo sapien
cctatgacgccgacgactctcttta

SEQ ID NO: 4262788 - DNA, 25 bp, Homo sapien
aacgggacgtgaacaccaatatata

SEQ ID NO: 4262789 - DNA, 25 bp, Homo sapien
taaacgggacgtgaacaccaatata

SEQ ID NO: 4262790 - DNA, 25 bp, Homo sapien
ctaaacgggacgtgaacaccaatat

SEQ ID NO: 4262791 - DNA, 25 bp, Homo sapien
cgggacgtgaacaccaatatataca

SEQ ID NO: 4262792 - DNA, 25 bp, Homo sapien
taaaaggttcagaaacatattacta

SEQ ID NO: 4262793 - DNA, 25 bp, Homo sapien
aaaaggttcagaaacatattactag

SEQ ID NO: 4262794 - DNA, 25 bp, Homo sapien
tcacagttgagctagttttgccaag

SEQ ID NO: 4262795 - DNA, 25 bp, Homo sapien
tttgccaagatccacaacagcttct

SEQ ID NO: 4262796 - DNA, 25 bp, Homo sapien
tctttttcaaacttggtgttcacag

SEQ ID NO: 4262797 - DNA, 25 bp, Homo sapien
caaacttggtgttcacagttgagct

SEQ ID NO: 4262798 - DNA, 25 bp, Homo sapien
tagaaacagatttatgccttcataa

SEQ ID NO: 4262799 - DNA, 25 bp, Homo sapien
tgttagaaacagatttatgccttca

SEQ ID NO: 4262800 - DNA, 25 bp, Homo sapien
aggttgcagtgagcgcatagagcgc

SEQ ID NO: 4262801 - DNA, 25 bp, Homo sapien
tgagcgcatagagcgccaccgcact

SEQ ID NO: 4262802 - DNA, 25 bp, Homo sapien
acttcttctccagacgaaatctttc

SEQ ID NO: 4262803 - DNA, 25 bp, Homo sapien
taacttcttctccagacgaaatctt

SEQ ID NO: 4262804 - DNA, 25 bp, Homo sapien
tcttctccagacgaaatctttccat

SEQ ID NO: 4262805 - DNA, 25 bp, Homo sapien
aggtaacttcttctccagacgaaat

SEQ ID NO: 4262806 - DNA, 25 bp, Homo sapien
agaaatgccttgtttctgatgatgt

SEQ ID NO: 4262807 - DNA, 25 bp, Homo sapien
tctgatgatgtaatgcagtaactcc

SEQ ID NO: 4262808 - DNA, 25 bp, Homo sapien
atatagaaatgccttgtttctgatg

SEQ ID NO: 4262809 - DNA, 25 bp, Homo sapien
gtaatatagaaatgccttgtttctg

SEQ ID NO: 4262810 - DNA, 25 bp, Homo sapien
tggtacagccaatcactgtgttcta

SEQ ID NO: 4262811 - DNA, 25 bp, Homo sapien
tctaagttacttttatggtacagcc

SEQ ID NO: 4262812 - DNA, 25 bp, Homo sapien
gggacagtgagcacatatctgattt

SEQ ID NO: 4262813 - DNA, 25 bp, Homo sapien
ctgatttaggtcactgtgctttgca

SEQ ID NO: 4262814 - DNA, 25 bp, Homo sapien
gacaaaacttagaggaatacctctg

SEQ ID NO: 4262815 - DNA, 25 bp, Homo sapien
aatccatattcacacagatattctg

SEQ ID NO: 4262816 - DNA, 25 bp, Homo sapien
gtgatctgcccttggttaaagtata

SEQ ID NO: 4262817 - DNA, 25 bp, Homo sapien
caagacaaaacttagaggaatacct

SEQ ID NO: 4262818 - DNA, 25 bp, Homo sapien
tcaaaaatcattttactcgatacgt

SEQ ID NO: 4262819 - DNA, 25 bp, Homo sapien
tactcgatacgtattttggatagat

SEQ ID NO: 4262820 - DNA, 25 bp, Homo sapien
caaaaatcattttactcgatacgta

SEQ ID NO: 4262821 - DNA, 25 bp, Homo sapien
tcattttactcgatacgtattttgg

SEQ ID NO: 4262822 - DNA, 25 bp, Homo sapien
aaaacacgggatcgcttccagttga

SEQ ID NO: 4262823 - DNA, 25 bp, Homo sapien
gaatccttctaagattgttaaacag

SEQ ID NO: 4262824 - DNA, 25 bp, Homo sapien
gcaactcagacttggagaatccttc

SEQ ID NO: 4262825 - DNA, 25 bp, Homo sapien
ttccagttgagaatctaaaagcaac

SEQ ID NO: 4262826 - DNA, 25 bp, Homo sapien
taatctgtcggcagttctttcttct

SEQ ID NO: 4262827 - DNA, 25 bp, Homo sapien
gatttgagtttgaaattgaacagaa

SEQ ID NO: 4262828 - DNA, 25 bp, Homo sapien
caagtaagctactattaatgaaata

SEQ ID NO: 4262829 - DNA, 25 bp, Homo sapien
taatatacatggaacaagtaagcta

SEQ ID NO: 4262830 - DNA, 25 bp, Homo sapien
tggccgggaagcagaatatacctct

SEQ ID NO: 4262831 - DNA, 25 bp, Homo sapien
ggatttcagccccatagctattcag

SEQ ID NO: 4262832 - DNA, 25 bp, Homo sapien
ataactacgttaaagcaggcagagg

SEQ ID NO: 4262833 - DNA, 25 bp, Homo sapien
caggcagaggctagtcaggatttca

SEQ ID NO: 4262834 - DNA, 25 bp, Homo sapien
taaacaattttgtcaacacatcata

SEQ ID NO: 4262835 - DNA, 25 bp, Homo sapien
tgactccaggagacagtgcgagcct

SEQ ID NO: 4262836 - DNA, 25 bp, Homo sapien
tgtcaacacatcatatcctttaaaa

SEQ ID NO: 4262837 - DNA, 25 bp, Homo sapien
gcaacaaaccagtatcaggccaggc

SEQ ID NO: 4262838 - DNA, 25 bp, Homo sapien
ctagctgagttagagaaggagcacc

SEQ ID NO: 4262839 - DNA, 25 bp, Homo sapien
agccagtctcagtaggaaacgcgat

SEQ ID NO: 4262840 - DNA, 25 bp, Homo sapien
tgggaacaccggccttaagtccatc

SEQ ID NO: 4262841 - DNA, 25 bp, Homo sapien
ggaaacgcgatcttgctagctgagt

SEQ ID NO: 4262842 - DNA, 25 bp, Homo sapien
tgggtgcgtccgtgcgcgaggtgtg

SEQ ID NO: 4262843 - DNA, 25 bp, Homo sapien
agtagcggtctcatctgctcgccgg

SEQ ID NO: 4262844 - DNA, 25 bp, Homo sapien
gctttagtaggagagcgaggccgcg

SEQ ID NO: 4262845 - DNA, 25 bp, Homo sapien
cgcgcgaggacaaacgtgggtgcgt

SEQ ID NO: 4262846 - DNA, 25 bp, Homo sapien
ttttcttcggcaaggcaactgagct

SEQ ID NO: 4262847 - DNA, 25 bp, Homo sapien
tcaatactgcaaaatatctgccgtc

SEQ ID NO: 4262848 - DNA, 25 bp, Homo sapien
gaccatcactcttgacgtcaagcca

SEQ ID NO: 4262849 - DNA, 25 bp, Homo sapien
tcttgacgtcaagccaagtgacacc

SEQ ID NO: 4262850 - DNA, 25 bp, Homo sapien
gtgctgcgcctgtaaggtggcatta

SEQ ID NO: 4262851 - DNA, 25 bp, Homo sapien
tgccgcaagtgctatgcttgcctgc

SEQ ID NO: 4262852 - DNA, 25 bp, Homo sapien
gtggcattattgagccttccctctg

SEQ ID NO: 4262853 - DNA, 25 bp, Homo sapien
atacaactgtgacaagatgatctgc

SEQ ID NO: 4262854 - DNA, 25 bp, Homo sapien
gaataaagagggagccgtagggagc

SEQ ID NO: 4262855 - DNA, 25 bp, Homo sapien
agaataaagagggagccgtagggag

SEQ ID NO: 4262856 - DNA, 25 bp, Homo sapien
ggggatgccaactctgcccttactt

SEQ ID NO: 4262857 - DNA, 25 bp, Homo sapien
catggggatgccaactctgccctta

SEQ ID NO: 4262858 - DNA, 25 bp, Homo sapien
gggatgccaactctgcccttacttt

SEQ ID NO: 4262859 - DNA, 25 bp, Homo sapien
tggggatgccaactctgcccttact

SEQ ID NO: 4262860 - DNA, 25 bp, Homo sapien
gcctaaatggttgactcagacatgt

SEQ ID NO: 4262861 - DNA, 25 bp, Homo sapien
tcaatttgtagcctaaatggttgac

SEQ ID NO: 4262862 - DNA, 25 bp, Homo sapien
ctttggatcttccacaaaggggact

SEQ ID NO: 4262863 - DNA, 25 bp, Homo sapien
tttctgtgttgagctttggatcttc

SEQ ID NO: 4262864 - DNA, 25 bp, Homo sapien
tttggatcttccacaaaggggactg

SEQ ID NO: 4262865 - DNA, 25 bp, Homo sapien
tctgtgttgagctttggatcttcca

SEQ ID NO: 4262866 - DNA, 25 bp, Homo sapien
ctgcggaagtccagccagggagtag

SEQ ID NO: 4262867 - DNA, 25 bp, Homo sapien
tgcggaagtccagccagggagtagt

SEQ ID NO: 4262868 - DNA, 25 bp, Homo sapien
gaagtccagccagggagtagtcaga

SEQ ID NO: 4262869 - DNA, 25 bp, Homo sapien
cggaagtccagccagggagtagtca

SEQ ID NO: 4262870 - DNA, 25 bp, Homo sapien
cccatagatggtgtgtggcaaatct

SEQ ID NO: 4262871 - DNA, 25 bp, Homo sapien
aaacagataattgggtctgcagaca

SEQ ID NO: 4262872 - DNA, 25 bp, Homo sapien
gatggtggtctgtctttagaacaaa

SEQ ID NO: 4262873 - DNA, 25 bp, Homo sapien
gtggcaaatctctttgccgccatgt

SEQ ID NO: 4262874 - DNA, 25 bp, Homo sapien
aatggaaaaggaacaaagaaatctg

SEQ ID NO: 4262875 - DNA, 25 bp, Homo sapien
taactgattgtgatcaattagttgt

SEQ ID NO: 4262876 - DNA, 25 bp, Homo sapien
taggctcgtcaggtgaagcagtggg

SEQ ID NO: 4262877 - DNA, 25 bp, Homo sapien
gtaaacaccactgcccttggaccag

SEQ ID NO: 4262878 - DNA, 25 bp, Homo sapien
gccttaggtgccacagtaatgacaa

SEQ ID NO: 4262879 - DNA, 25 bp, Homo sapien
tagacctctattcctcttgaactct

SEQ ID NO: 4262880 - DNA, 25 bp, Homo sapien
aatgagagaaagtcatcctagacct

SEQ ID NO: 4262881 - DNA, 25 bp, Homo sapien
gcaaagccttaggtgccacagtaat

SEQ ID NO: 4262882 - DNA, 25 bp, Homo sapien
tcacccgagggagcatgtaaaggaa

SEQ ID NO: 4262883 - DNA, 25 bp, Homo sapien
gaaacatgcccacgctgtctgctaa

SEQ ID NO: 4262884 - DNA, 25 bp, Homo sapien
tgctggcatcggcattgttgctcag

SEQ ID NO: 4262885 - DNA, 25 bp, Homo sapien
agcctgagggcttggaaacatgccc

SEQ ID NO: 4262886 - DNA, 25 bp, Homo sapien
gaaaacatagatgggtatgcttgtg

SEQ ID NO: 4262887 - DNA, 25 bp, Homo sapien
gggtatgcttgtgcgactcccaggc

SEQ ID NO: 4262888 - DNA, 25 bp, Homo sapien
tagatgggtatgcttgtgcgactcc

SEQ ID NO: 4262889 - DNA, 25 bp, Homo sapien
atgcttgtgcgactcccaggcagac

SEQ ID NO: 4262890 - DNA, 25 bp, Homo sapien
cagaaaacatcacgatacatctcat

SEQ ID NO: 4262891 - DNA, 25 bp, Homo sapien
gaaaacatcacgatacatctcatct

SEQ ID NO: 4262892 - DNA, 25 bp, Homo sapien
tggtacagaaaacatcacgatacat

SEQ ID NO: 4262893 - DNA, 25 bp, Homo sapien
tacagaaaacatcacgatacatctc

SEQ ID NO: 4262894 - DNA, 25 bp, Homo sapien
cgagtgccatgtgctttaatcttct

SEQ ID NO: 4262895 - DNA, 25 bp, Homo sapien
aaacgagtgccatgtgctttaatct

SEQ ID NO: 4262896 - DNA, 25 bp, Homo sapien
gacaacgggctctgcaccagtcctg

SEQ ID NO: 4262897 - DNA, 25 bp, Homo sapien
tcctgtttttaaaacgagtgccatg

SEQ ID NO: 4262898 - DNA, 25 bp, Homo sapien
tggggctctggaccttgtgtctcat

SEQ ID NO: 4262899 - DNA, 25 bp, Homo sapien
tttctggggctctggaccttgtgtc

SEQ ID NO: 4262900 - DNA, 25 bp, Homo sapien
tctggggctctggaccttgtgtctc

SEQ ID NO: 4262901 - DNA, 25 bp, Homo sapien
atttctggggctctggaccttgtgt

SEQ ID NO: 4262902 - DNA, 25 bp, Homo sapien
tttgataatgaaaaatccagatccg

SEQ ID NO: 4262903 - DNA, 25 bp, Homo sapien
ggaaacgccatcacatgaccaaggt

SEQ ID NO: 4262904 - DNA, 25 bp, Homo sapien
tgttatatttggaggaaacgccatc

SEQ ID NO: 4262905 - DNA, 25 bp, Homo sapien
gaaaaatccagatccggacagatgg

SEQ ID NO: 4262906 - DNA, 25 bp, Homo sapien
taatcagtggcaacatccggagagc

SEQ ID NO: 4262907 - DNA, 25 bp, Homo sapien
gcaacatccggagagccattaaggg

SEQ ID NO: 4262908 - DNA, 25 bp, Homo sapien
ctgctgaagagccatgaacggcacc

SEQ ID NO: 4262909 - DNA, 25 bp, Homo sapien
catgaacggcaccataatcagtggc

SEQ ID NO: 4262910 - DNA, 25 bp, Homo sapien
gaacgtgtcacatgagccctgcatg

SEQ ID NO: 4262911 - DNA, 25 bp, Homo sapien
tctgctagatgatgatccaagctgg

SEQ ID NO: 4262912 - DNA, 25 bp, Homo sapien
gagcttgtgagtccaagtggaacgt

SEQ ID NO: 4262913 - DNA, 25 bp, Homo sapien
ctagatgatgatccaagctggatgc

SEQ ID NO: 4262914 - DNA, 25 bp, Homo sapien
gagagggcatcctgcacaatctgta

SEQ ID NO: 4262915 - DNA, 25 bp, Homo sapien
gaaacagcttcaccatagcacacag

SEQ ID NO: 4262916 - DNA, 25 bp, Homo sapien
cttgtgggtaggttgtcaccactgg

SEQ ID NO: 4262917 - DNA, 25 bp, Homo sapien
tattattgctgttctcacaaggaag

SEQ ID NO: 4262918 - DNA, 25 bp, Homo sapien
aatgatgagtacaacagcagcccac

SEQ ID NO: 4262919 - DNA, 25 bp, Homo sapien
tacttggaatgatgagtacaacagc

SEQ ID NO: 4262920 - DNA, 25 bp, Homo sapien
agcattttgcaaacagacagaagac

SEQ ID NO: 4262921 - DNA, 25 bp, Homo sapien
cagcattttgcaaacagacagaaga

SEQ ID NO: 4262922 - DNA, 25 bp, Homo sapien
tctccccttgctttgattaaggccc

SEQ ID NO: 4262923 - DNA, 25 bp, Homo sapien
caacagtgggattggcctgatgtgt

SEQ ID NO: 4262924 - DNA, 25 bp, Homo sapien
gattggcctgatgtgtgactttcag

SEQ ID NO: 4262925 - DNA, 25 bp, Homo sapien
cccttgctttgattaaggccctcat

SEQ ID NO: 4262926 - DNA, 25 bp, Homo sapien
agatttccttggttctaaaagatga

SEQ ID NO: 4262927 - DNA, 25 bp, Homo sapien
tcagatttccttggttctaaaagat

SEQ ID NO: 4262928 - DNA, 25 bp, Homo sapien
ttccttggttctaaaagatgatcat

SEQ ID NO: 4262929 - DNA, 25 bp, Homo sapien
ccttggttctaaaagatgatcatga

SEQ ID NO: 4262930 - DNA, 25 bp, Homo sapien
cacacgagaggggcctgaggagagg

SEQ ID NO: 4262931 - DNA, 25 bp, Homo sapien
cctagtccacacgagaggggcctga

SEQ ID NO: 4262932 - DNA, 25 bp, Homo sapien
acgagaggggcctgaggagaggcac

SEQ ID NO: 4262933 - DNA, 25 bp, Homo sapien
ctagtccacacgagaggggcctgag

SEQ ID NO: 4262934 - DNA, 25 bp, Homo sapien
acaaagtggctgaattttcaaaggg

SEQ ID NO: 4262935 - DNA, 25 bp, Homo sapien
gaccacaacggcatgggcagaggat

SEQ ID NO: 4262936 - DNA, 25 bp, Homo sapien
aaaggggtcactcatggagaactgc

SEQ ID NO: 4262937 - DNA, 25 bp, Homo sapien
ggccatgtctaagaccacaacggca

SEQ ID NO: 4262938 - DNA, 25 bp, Homo sapien
tctgagaaatagtagcacatgctgc

SEQ ID NO: 4262939 - DNA, 25 bp, Homo sapien
tttcagcagtctcatccttatgctc

SEQ ID NO: 4262940 - DNA, 25 bp, Homo sapien
gcctctgttcaaatgctgagcatct

SEQ ID NO: 4262941 - DNA, 25 bp, Homo sapien
ggcaacctgcctctgttcaaatgct

SEQ ID NO: 4262942 - DNA, 25 bp, Homo sapien
ctgaggggcacttgactggtgcttt

SEQ ID NO: 4262943 - DNA, 25 bp, Homo sapien
gaggggcacttgactggtgctttac

SEQ ID NO: 4262944 - DNA, 25 bp, Homo sapien
tgaggggcacttgactggtgcttta

SEQ ID NO: 4262945 - DNA, 25 bp, Homo sapien
tacatgattcttccctcagctggag

SEQ ID NO: 4262946 - DNA, 25 bp, Homo sapien
ctggagctggttctttatctgcttt

SEQ ID NO: 4262947 - DNA, 25 bp, Homo sapien
tggtttttgatacatgattcttccc

SEQ ID NO: 4262948 - DNA, 25 bp, Homo sapien
taaaaaacatcacttgaggctcttc

SEQ ID NO: 4262949 - DNA, 25 bp, Homo sapien
ctctacggtgggctcctccctatag

SEQ ID NO: 4262950 - DNA, 25 bp, Homo sapien
ggtctctacggtgggctcctcccta

SEQ ID NO: 4262951 - DNA, 25 bp, Homo sapien
tctcttggtctctacggtgggctcc

SEQ ID NO: 4262952 - DNA, 25 bp, Homo sapien
ctcttggtctctacggtgggctcct

SEQ ID NO: 4262953 - DNA, 25 bp, Homo sapien
cctaggtttctgtgtctcatgttcc

SEQ ID NO: 4262954 - DNA, 25 bp, Homo sapien
taggtttctgtgtctcatgttcccc

SEQ ID NO: 4262955 - DNA, 25 bp, Homo sapien
tacacctaggtttctgtgtctcatg

SEQ ID NO: 4262956 - DNA, 25 bp, Homo sapien
cattttacacctaggtttctgtgtc

SEQ ID NO: 4262957 - DNA, 25 bp, Homo sapien
ccgcggcccagaagagagaggagcc

SEQ ID NO: 4262958 - DNA, 25 bp, Homo sapien
aggagcctgcagacccgcgcggaaa

SEQ ID NO: 4262959 - DNA, 25 bp, Homo sapien
gcgcggaaactctgctgcgggacct

SEQ ID NO: 4262960 - DNA, 25 bp, Homo sapien
caccagatggcgaaggctgcccgcg

SEQ ID NO: 4262961 - DNA, 25 bp, Homo sapien
gaagaaaatccagcgcaggtcgggt

SEQ ID NO: 4262962 - DNA, 25 bp, Homo sapien
gagaaattcgatgaccagcaaggct

SEQ ID NO: 4262963 - DNA, 25 bp, Homo sapien
ggctggagtcccatcgtcttgttgg

SEQ ID NO: 4262964 - DNA, 25 bp, Homo sapien
tgtccaagatatcgcttagctcctg

SEQ ID NO: 4262965 - DNA, 25 bp, Homo sapien
aatagaggcttgtttatcggtgtca

SEQ ID NO: 4262966 - DNA, 25 bp, Homo sapien
ttcacaatttggtgtctgacactcc

SEQ ID NO: 4262967 - DNA, 25 bp, Homo sapien
ttagatacatctcttcacaatttgg

SEQ ID NO: 4262968 - DNA, 25 bp, Homo sapien
tgtcatcctaggaggattaattaga

SEQ ID NO: 4262969 - DNA, 25 bp, Homo sapien
tttactgtacgatgcaaaaacatac

SEQ ID NO: 4262970 - DNA, 25 bp, Homo sapien
taaacactgtgagggacttttcaca

SEQ ID NO: 4262971 - DNA, 25 bp, Homo sapien
tacaggacccgaaatagactagggc

SEQ ID NO: 4262972 - DNA, 25 bp, Homo sapien
tagggccagaatctgctatatcccg

SEQ ID NO: 4262973 - DNA, 25 bp, Homo sapien
gcactgttttcgaaattccatcgca

SEQ ID NO: 4262974 - DNA, 25 bp, Homo sapien
catcgcatctcccaatattcggtgg

SEQ ID NO: 4262975 - DNA, 25 bp, Homo sapien
tgagtctcccttccggaatctaaat

SEQ ID NO: 4262976 - DNA, 25 bp, Homo sapien
gggcagaaataggagagcactgttt

SEQ ID NO: 4262977 - DNA, 25 bp, Homo sapien
ccaaggtcacgggtggcgcgggaag

SEQ ID NO: 4262978 - DNA, 25 bp, Homo sapien
aggagttcgagcccccaaggtcacg

SEQ ID NO: 4262979 - DNA, 25 bp, Homo sapien
caaagtgttttgagtaggccgttcg

SEQ ID NO: 4262980 - DNA, 25 bp, Homo sapien
ttcggaaacgcggagcaggagttcg

SEQ ID NO: 4262981 - DNA, 25 bp, Homo sapien
acaggacagtcgaggtacaaggtcc

SEQ ID NO: 4262982 - DNA, 25 bp, Homo sapien
aggacagtcgaggtacaaggtcctg

SEQ ID NO: 4262983 - DNA, 25 bp, Homo sapien
ggagacaggacagtcgaggtacaag

SEQ ID NO: 4262984 - DNA, 25 bp, Homo sapien
agacaggacagtcgaggtacaaggt

SEQ ID NO: 4262985 - DNA, 25 bp, Homo sapien
tacacagttagcagaatgatcctcc

SEQ ID NO: 4262986 - DNA, 25 bp, Homo sapien
aggtctcggctgattgctcgcctcc

SEQ ID NO: 4262987 - DNA, 25 bp, Homo sapien
tgcatttccgcgctacacagttagc

SEQ ID NO: 4262988 - DNA, 25 bp, Homo sapien
aggaggtctcggctgattgctcgcc

SEQ ID NO: 4262989 - DNA, 25 bp, Homo sapien
caaggtcactgtttgcagagcggca

SEQ ID NO: 4262990 - DNA, 25 bp, Homo sapien
tcccgtggagcgtgggccaaataaa

SEQ ID NO: 4262991 - DNA, 25 bp, Homo sapien
gaaaggtttgcaatctgggcctgaa

SEQ ID NO: 4262992 - DNA, 25 bp, Homo sapien
tgaagccgtctgcagataagcctgg

SEQ ID NO: 4262993 - DNA, 25 bp, Homo sapien
ctgcgcctcagaccgagtccgggcg

SEQ ID NO: 4262994 - DNA, 25 bp, Homo sapien
cgagtccgggcggagtttgactgca

SEQ ID NO: 4262995 - DNA, 25 bp, Homo sapien
tccgggcggagtttgactgcagcta

SEQ ID NO: 4262996 - DNA, 25 bp, Homo sapien
ctcagaccgagtccgggcggagttt

SEQ ID NO: 4262997 - DNA, 25 bp, Homo sapien
gccggcggcggcgggtgcgcagcgt

SEQ ID NO: 4262998 - DNA, 25 bp, Homo sapien
gcagccggcggcggcgggtgcgcag

SEQ ID NO: 4262999 - DNA, 25 bp, Homo sapien
ggcagccggcggcggcgggtgcgca

SEQ ID NO: 4263000 - DNA, 25 bp, Homo sapien
ctgaggccggcagccggcggcggcg

SEQ ID NO: 4263001 - DNA, 25 bp, Homo sapien
ggaccctgaactggtgggcgctcaa

SEQ ID NO: 4263002 - DNA, 25 bp, Homo sapien
aaagccgcaggtgggcgcagaagct

SEQ ID NO: 4263003 - DNA, 25 bp, Homo sapien
ctgggttcagaagaaagccgcaggt

SEQ ID NO: 4263004 - DNA, 25 bp, Homo sapien
gatgggtggccccaagtaagcctag

SEQ ID NO: 4263005 - DNA, 25 bp, Homo sapien
tacaggaggaagcaaaatgagatct

SEQ ID NO: 4263006 - DNA, 25 bp, Homo sapien
tagagattctagagccttccgtgga

SEQ ID NO: 4263007 - DNA, 25 bp, Homo sapien
ccagaagcggaggttttcgaggctt

SEQ ID NO: 4263008 - DNA, 25 bp, Homo sapien
gaaatagccccattccacttcaagg

SEQ ID NO: 4263009 - DNA, 25 bp, Homo sapien
cctggactagggcaaacatggcttg

SEQ ID NO: 4263010 - DNA, 25 bp, Homo sapien
tttgcccctggcagaatgtaacagc

SEQ ID NO: 4263011 - DNA, 25 bp, Homo sapien
gcagaggcctagcaagtctcaagtg

SEQ ID NO: 4263012 - DNA, 25 bp, Homo sapien
aactcatctgatagcactgggcacc

SEQ ID NO: 4263013 - DNA, 25 bp, Homo sapien
ttagggagttgtgtaaaaagcataa

SEQ ID NO: 4263014 - DNA, 25 bp, Homo sapien
tagggagttgtgtaaaaagcataat

SEQ ID NO: 4263015 - DNA, 25 bp, Homo sapien
agggagttgtgtaaaaagcataata

SEQ ID NO: 4263016 - DNA, 25 bp, Homo sapien
gggagttgtgtaaaaagcataatac

SEQ ID NO: 4263017 - DNA, 25 bp, Homo sapien
cctcccatgccttttgaggtgtctt

SEQ ID NO: 4263018 - DNA, 25 bp, Homo sapien
tactcttcagcattaatgtcctcac

SEQ ID NO: 4263019 - DNA, 25 bp, Homo sapien
atactcttcagcattaatgtcctca

SEQ ID NO: 4263020 - DNA, 25 bp, Homo sapien
tatactcttcagcattaatgtcctc

SEQ ID NO: 4263021 - DNA, 25 bp, Homo sapien
tcattactggagttgctaggagaca

SEQ ID NO: 4263022 - DNA, 25 bp, Homo sapien
ccaggttgctggacaggcgtgacaa

SEQ ID NO: 4263023 - DNA, 25 bp, Homo sapien
gaagaaggattgaacgccgtaccga

SEQ ID NO: 4263024 - DNA, 25 bp, Homo sapien
taccgacctccagggacaatctgat

SEQ ID NO: 4263025 - DNA, 25 bp, Homo sapien
gtcattttctgaagcggtgtacatg

SEQ ID NO: 4263026 - DNA, 25 bp, Homo sapien
aggagaatccgtgggagatggagtt

SEQ ID NO: 4263027 - DNA, 25 bp, Homo sapien
ctaggagaatccgtgggagatggag

SEQ ID NO: 4263028 - DNA, 25 bp, Homo sapien
ctgtcattttctgaagcggtgtaca

SEQ ID NO: 4263029 - DNA, 25 bp, Homo sapien
gccttttgcaaaggggttatgatca

SEQ ID NO: 4263030 - DNA, 25 bp, Homo sapien
gcaaaggggttatgatcaatcttta

SEQ ID NO: 4263031 - DNA, 25 bp, Homo sapien
gggttatgatcaatctttagttgag

SEQ ID NO: 4263032 - DNA, 25 bp, Homo sapien
gtctctgaagccttttgcaaagggg

SEQ ID NO: 4263033 - DNA, 25 bp, Homo sapien
gctttagagattcttgagatgtctg

SEQ ID NO: 4263034 - DNA, 25 bp, Homo sapien
tgcgtttctgagaaggtaaaagtct

SEQ ID NO: 4263035 - DNA, 25 bp, Homo sapien
taaaagtctgggtctttgagggctc

SEQ ID NO: 4263036 - DNA, 25 bp, Homo sapien
taggcagtcactgcaatgaattgcg

SEQ ID NO: 4263037 - DNA, 25 bp, Homo sapien
tgtgtaaggattgtaagactatcat

SEQ ID NO: 4263038 - DNA, 25 bp, Homo sapien
gaaagagtacagaaaaaaattgcta

SEQ ID NO: 4263039 - DNA, 25 bp, Homo sapien
agagtacagaaaaaaattgctaaat

SEQ ID NO: 4263040 - DNA, 25 bp, Homo sapien
gtacagaaaaaaattgctaaatcta

SEQ ID NO: 4263041 - DNA, 25 bp, Homo sapien
gagtacagaaaaaaattgctaaatc

SEQ ID NO: 4263042 - DNA, 25 bp, Homo sapien
ttagaaataggcgagcaaacaggtc

SEQ ID NO: 4263043 - DNA, 25 bp, Homo sapien
tagtcaaagccagaagatatcccct

SEQ ID NO: 4263044 - DNA, 25 bp, Homo sapien
tcaactcactgttatcgaaatccaa

SEQ ID NO: 4263045 - DNA, 25 bp, Homo sapien
aatacagtgaaaagagtagggactc

SEQ ID NO: 4263046 - DNA, 25 bp, Homo sapien
tatttgcgcctttgttattggtgag

SEQ ID NO: 4263047 - DNA, 25 bp, Homo sapien
ggagactctgggtgaacatacattt

SEQ ID NO: 4263048 - DNA, 25 bp, Homo sapien
tcatccagtgggaaccagtattagg

SEQ ID NO: 4263049 - DNA, 25 bp, Homo sapien
taatttcccgaatgaaatctcctgt

SEQ ID NO: 4263050 - DNA, 25 bp, Homo sapien
gcagtgggattgagtccgtttatgt

SEQ ID NO: 4263051 - DNA, 25 bp, Homo sapien
cctgcatgttattgtcggctttgcc

SEQ ID NO: 4263052 - DNA, 25 bp, Homo sapien
tacgaacacattgtagtgggcagtg

SEQ ID NO: 4263053 - DNA, 25 bp, Homo sapien
tgcccccctggaagcgccagtggtt

SEQ ID NO: 4263054 - DNA, 25 bp, Homo sapien
agaaaaatcgattttaattgggatg

SEQ ID NO: 4263055 - DNA, 25 bp, Homo sapien
tcagaaaaatcgattttaattggga

SEQ ID NO: 4263056 - DNA, 25 bp, Homo sapien
aatcagaaaaatcgattttaattgg

SEQ ID NO: 4263057 - DNA, 25 bp, Homo sapien
gtgcaagggaatagaatcagaaaaa

SEQ ID NO: 4263058 - DNA, 25 bp, Homo sapien
cctatccgtggctccttgccggcat

SEQ ID NO: 4263059 - DNA, 25 bp, Homo sapien
gctccttgccggcatgcaggcatgc

SEQ ID NO: 4263060 - DNA, 25 bp, Homo sapien
cagctcttgagccttccctatccgt

SEQ ID NO: 4263061 - DNA, 25 bp, Homo sapien
gctcttgagccttccctatccgtgg

SEQ ID NO: 4263062 - DNA, 25 bp, Homo sapien
cagcttgtggacatgccctaatttc

SEQ ID NO: 4263063 - DNA, 25 bp, Homo sapien
cgccgagcaggaggatctaacgaat

SEQ ID NO: 4263064 - DNA, 25 bp, Homo sapien
cctcctccaggtctgttcaggtgag

SEQ ID NO: 4263065 - DNA, 25 bp, Homo sapien
ggaaaagcggtgtacagccgtaaca

SEQ ID NO: 4263066 - DNA, 25 bp, Homo sapien
ggacaccgcattggagatgcggtgt

SEQ ID NO: 4263067 - DNA, 25 bp, Homo sapien
ctgacacagagggacaccgcattgg

SEQ ID NO: 4263068 - DNA, 25 bp, Homo sapien
acacagagggacaccgcattggaga

SEQ ID NO: 4263069 - DNA, 25 bp, Homo sapien
cacagagggacaccgcattggagat

SEQ ID NO: 4263070 - DNA, 25 bp, Homo sapien
gaggccggttgcacaggtagacgtg

SEQ ID NO: 4263071 - DNA, 25 bp, Homo sapien
agtttggtggcggtggaatttgagc

SEQ ID NO: 4263072 - DNA, 25 bp, Homo sapien
tagacgtgggcacggaagccagaac

SEQ ID NO: 4263073 - DNA, 25 bp, Homo sapien
tggtggcggtggaatttgagccaca

SEQ ID NO: 4263074 - DNA, 25 bp, Homo sapien
cccagtcctccgcaagatcccgccg

SEQ ID NO: 4263075 - DNA, 25 bp, Homo sapien
ccccagtcctccgcaagatcccgcc

SEQ ID NO: 4263076 - DNA, 25 bp, Homo sapien
tgtactgataggtgcccgggccgcc

SEQ ID NO: 4263077 - DNA, 25 bp, Homo sapien
cggctccagggtacggcccgtagag

SEQ ID NO: 4263078 - DNA, 25 bp, Homo sapien
acggcccgtagagcggagccccctg

SEQ ID NO: 4263079 - DNA, 25 bp, Homo sapien
cccgtagagcggagccccctggctg

SEQ ID NO: 4263080 - DNA, 25 bp, Homo sapien
gcgccctcccgggtgggcacacagc

SEQ ID NO: 4263081 - DNA, 25 bp, Homo sapien
gccggggggcagcatggagccgtag

SEQ ID NO: 4263082 - DNA, 25 bp, Homo sapien
taggagccgggtacacaggtccgtg

SEQ ID NO: 4263083 - DNA, 25 bp, Homo sapien
catggagccgtaggggtagcgcgcc

SEQ ID NO: 4263084 - DNA, 25 bp, Homo sapien
ctggtacgggaagagtgagcagggc

SEQ ID NO: 4263085 - DNA, 25 bp, Homo sapien
tggtacgggaagagtgagcagggcg

SEQ ID NO: 4263086 - DNA, 25 bp, Homo sapien
gggaagagtgagcagggcgcagcca

SEQ ID NO: 4263087 - DNA, 25 bp, Homo sapien
aagagtgagcagggcgcagccagct

SEQ ID NO: 4263088 - DNA, 25 bp, Homo sapien
ctgaggaccgggggactggaggtag

SEQ ID NO: 4263089 - DNA, 25 bp, Homo sapien
catggagtagcgcgcagtggccgca

SEQ ID NO: 4263090 - DNA, 25 bp, Homo sapien
tggcaaatgcgtccccggcgtcggt

SEQ ID NO: 4263091 - DNA, 25 bp, Homo sapien
aatgcgtccccggcgtcggtgtcac

SEQ ID NO: 4263092 - DNA, 25 bp, Homo sapien
aaatgcgtccccggcgtcggtgtca

SEQ ID NO: 4263093 - DNA, 25 bp, Homo sapien
gcaaatgcgtccccggcgtcggtgt

SEQ ID NO: 4263094 - DNA, 25 bp, Homo sapien
taagcatggccgcgggggcccctgc

SEQ ID NO: 4263095 - DNA, 25 bp, Homo sapien
tggcggctgcgggctccccgctcac

SEQ ID NO: 4263096 - DNA, 25 bp, Homo sapien
gggcccctgcgctggcggctgcggg

SEQ ID NO: 4263097 - DNA, 25 bp, Homo sapien
atggccgcgggggcccctgcgctgg

SEQ ID NO: 4263098 - DNA, 25 bp, Homo sapien
tcttggacgctttgtctaagtccaa

SEQ ID NO: 4263099 - DNA, 25 bp, Homo sapien
acgctttgtctaagtccaacttctg

SEQ ID NO: 4263100 - DNA, 25 bp, Homo sapien
gaaaacttcttggacgctttgtcta

SEQ ID NO: 4263101 - DNA, 25 bp, Homo sapien
caggagagactgccggaaaacttct

SEQ ID NO: 4263102 - DNA, 25 bp, Homo sapien
ctccagcgggtagaagtgcgcgcca

SEQ ID NO: 4263103 - DNA, 25 bp, Homo sapien
tctccagcgggtagaagtgcgcgcc

SEQ ID NO: 4263104 - DNA, 25 bp, Homo sapien
gaagtgcgcgccaggcaggttcact

SEQ ID NO: 4263105 - DNA, 25 bp, Homo sapien
gtagaagtgcgcgccaggcaggttc

SEQ ID NO: 4263106 - DNA, 25 bp, Homo sapien
ggcagctggctgcttcctctcctcc

SEQ ID NO: 4263107 - DNA, 25 bp, Homo sapien
ctggctgcttcctctcctccggtgg

SEQ ID NO: 4263108 - DNA, 25 bp, Homo sapien
tggctgcttcctctcctccggtggc

SEQ ID NO: 4263109 - DNA, 25 bp, Homo sapien
agctggctgcttcctctcctccggt

SEQ ID NO: 4263110 - DNA, 25 bp, Homo sapien
gggagccagcgccctcttccgaggg

SEQ ID NO: 4263111 - DNA, 25 bp, Homo sapien
gatgggggagccagcgccctcttcc

SEQ ID NO: 4263112 - DNA, 25 bp, Homo sapien
cttattataaaggcaggatggggga

SEQ ID NO: 4263113 - DNA, 25 bp, Homo sapien
gccagcgccctcttccgaggggaag

SEQ ID NO: 4263114 - DNA, 25 bp, Homo sapien
tggaaactaacccagaagccctctc

SEQ ID NO: 4263115 - DNA, 25 bp, Homo sapien
gaatccagcgtcctttccggaagga

SEQ ID NO: 4263116 - DNA, 25 bp, Homo sapien
ggtgacttagatctttgtccccatc

SEQ ID NO: 4263117 - DNA, 25 bp, Homo sapien
caggctcacacgctggaagaaggtg

SEQ ID NO: 4263118 - DNA, 25 bp, Homo sapien
cgcgctaagcttttgggattccggg

SEQ ID NO: 4263119 - DNA, 25 bp, Homo sapien
ggggacggccagagcacattgccat

SEQ ID NO: 4263120 - DNA, 25 bp, Homo sapien
tagagaggaaactcgcgctaagctt

SEQ ID NO: 4263121 - DNA, 25 bp, Homo sapien
ccagtgggaaaggtttgtagagagg

SEQ ID NO: 4263122 - DNA, 25 bp, Homo sapien
aacacaactgctttcggggagacag

SEQ ID NO: 4263123 - DNA, 25 bp, Homo sapien
caacacaactgctttcggggagaca

SEQ ID NO: 4263124 - DNA, 25 bp, Homo sapien
gccaacacaactgctttcggggaga

SEQ ID NO: 4263125 - DNA, 25 bp, Homo sapien
cacaactgctttcggggagacagtc

SEQ ID NO: 4263126 - DNA, 25 bp, Homo sapien
taagcaattacagacgccgccagta

SEQ ID NO: 4263127 - DNA, 25 bp, Homo sapien
tgaaacccaggagtgcgcgaagatt

SEQ ID NO: 4263128 - DNA, 25 bp, Homo sapien
tcttcgcccacaacagatgagatgg

SEQ ID NO: 4263129 - DNA, 25 bp, Homo sapien
cattttccggctgagatgtcgggac

SEQ ID NO: 4263130 - DNA, 25 bp, Homo sapien
ttttgacgcagccagggaagcgctt

SEQ ID NO: 4263131 - DNA, 25 bp, Homo sapien
gaagcgcttcgcgtggcaaagtgcc

SEQ ID NO: 4263132 - DNA, 25 bp, Homo sapien
gctagggtggccaaaggtacatgac

SEQ ID NO: 4263133 - DNA, 25 bp, Homo sapien
gacagttttgcgctttaacaaagca

SEQ ID NO: 4263134 - DNA, 25 bp, Homo sapien
aggccatctggatccactcgctgtg

SEQ ID NO: 4263135 - DNA, 25 bp, Homo sapien
ttaactggatgtccagaaaaagagg

SEQ ID NO: 4263136 - DNA, 25 bp, Homo sapien
tctggatccactcgctgtgggtccc

SEQ ID NO: 4263137 - DNA, 25 bp, Homo sapien
aactggatgtccagaaaaagaggcc

SEQ ID NO: 4263138 - DNA, 25 bp, Homo sapien
tccagggcagaggttaatttagaca

SEQ ID NO: 4263139 - DNA, 25 bp, Homo sapien
ccttgacgccgagagtcttctctgt

SEQ ID NO: 4263140 - DNA, 25 bp, Homo sapien
tacccttaggtcatcgtccagggca

SEQ ID NO: 4263141 - DNA, 25 bp, Homo sapien
cttctctgtttctccgtacccttag

SEQ ID NO: 4263142 - DNA, 25 bp, Homo sapien
gagcatgaagcttccaaggtatcgt

SEQ ID NO: 4263143 - DNA, 25 bp, Homo sapien
gcttccaaggtatcgtggaagtcca

SEQ ID NO: 4263144 - DNA, 25 bp, Homo sapien
gctgatctgtatgggtagaggagaa

SEQ ID NO: 4263145 - DNA, 25 bp, Homo sapien
caaggtatcgtggaagtccacagga

SEQ ID NO: 4263146 - DNA, 25 bp, Homo sapien
cctgatacgtgcactgaaaggacac

SEQ ID NO: 4263147 - DNA, 25 bp, Homo sapien
ttttcctgatacgtgcactgaaagg

SEQ ID NO: 4263148 - DNA, 25 bp, Homo sapien
gaattttcctgatacgtgcactgaa

SEQ ID NO: 4263149 - DNA, 25 bp, Homo sapien
gaggtaagtaggtggccacagctgt

SEQ ID NO: 4263150 - DNA, 25 bp, Homo sapien
agtccaaacagatcagggtccaagg

SEQ ID NO: 4263151 - DNA, 25 bp, Homo sapien
tgcatctgacatcaacaagttcaga

SEQ ID NO: 4263152 - DNA, 25 bp, Homo sapien
ataattagaagtccaaacagatcag

SEQ ID NO: 4263153 - DNA, 25 bp, Homo sapien
ttttgcatctgacatcaacaagttc

SEQ ID NO: 4263154 - DNA, 25 bp, Homo sapien
taaaagcacggtttgatagacatcc

SEQ ID NO: 4263155 - DNA, 25 bp, Homo sapien
ccaacacacctggtctgagaagtga

SEQ ID NO: 4263156 - DNA, 25 bp, Homo sapien
cttgttcttgatggcagggctatga

SEQ ID NO: 4263157 - DNA, 25 bp, Homo sapien
ccatgggagaaacttatttgcctag

SEQ ID NO: 4263158 - DNA, 25 bp, Homo sapien
tctggaagatcaaagccttgggctt

SEQ ID NO: 4263159 - DNA, 25 bp, Homo sapien
agctcagtgctgtctctggaagatc

SEQ ID NO: 4263160 - DNA, 25 bp, Homo sapien
tcaatgggactttctgaatgggcag

SEQ ID NO: 4263161 - DNA, 25 bp, Homo sapien
agtagtagttaaagatcaatgggac

SEQ ID NO: 4263162 - DNA, 25 bp, Homo sapien
tcttctcttcttgcaccctggcaca

SEQ ID NO: 4263163 - DNA, 25 bp, Homo sapien
tctcttctcttcttgcaccctggca

SEQ ID NO: 4263164 - DNA, 25 bp, Homo sapien
ctctcttctcttcttgcaccctggc

SEQ ID NO: 4263165 - DNA, 25 bp, Homo sapien
cttctcttcttgcaccctggcacat

SEQ ID NO: 4263166 - DNA, 25 bp, Homo sapien
ggggtctcaattcatgtgacaatga

SEQ ID NO: 4263167 - DNA, 25 bp, Homo sapien
tgtgacaatgaactgggagctggtg

SEQ ID NO: 4263168 - DNA, 25 bp, Homo sapien
atgtgacaatgaactgggagctggt

SEQ ID NO: 4263169 - DNA, 25 bp, Homo sapien
tagggctgcattggactagatggct

SEQ ID NO: 4263170 - DNA, 25 bp, Homo sapien
attctctgccagtcaactctgtcac

SEQ ID NO: 4263171 - DNA, 25 bp, Homo sapien
cacacctgaggagatagggctgcat

SEQ ID NO: 4263172 - DNA, 25 bp, Homo sapien
gccagtcaactctgtcacacctgag

SEQ ID NO: 4263173 - DNA, 25 bp, Homo sapien
aaggagtgaatgcaaacactgcctg

SEQ ID NO: 4263174 - DNA, 25 bp, Homo sapien
ggagtgaatgcaaacactgcctgag

SEQ ID NO: 4263175 - DNA, 25 bp, Homo sapien
ataaaggagtgaatgcaaacactgc

SEQ ID NO: 4263176 - DNA, 25 bp, Homo sapien
acaataaaggagtgaatgcaaacac

SEQ ID NO: 4263177 - DNA, 25 bp, Homo sapien
tgcttgctgtctttagttctgagaa

SEQ ID NO: 4263178 - DNA, 25 bp, Homo sapien
tttgtgaagatctggtcaccccagt

SEQ ID NO: 4263179 - DNA, 25 bp, Homo sapien
ctcatggctgtgatgttatggggaa

SEQ ID NO: 4263180 - DNA, 25 bp, Homo sapien
cactcatggctgtgatgttatgggg

SEQ ID NO: 4263181 - DNA, 25 bp, Homo sapien
gctttgccatttgtgtggataccta

SEQ ID NO: 4263182 - DNA, 25 bp, Homo sapien
tacctagtagagcaatttgggtgcc

SEQ ID NO: 4263183 - DNA, 25 bp, Homo sapien
tccctttgctttagccacaggtctg

SEQ ID NO: 4263184 - DNA, 25 bp, Homo sapien
ttctttgaggaatccattggatctg

SEQ ID NO: 4263185 - DNA, 25 bp, Homo sapien
cttgtcggcccagatagatgttttc

SEQ ID NO: 4263186 - DNA, 25 bp, Homo sapien
acaggaatctctccacttgtcggcc

SEQ ID NO: 4263187 - DNA, 25 bp, Homo sapien
aaagttgcattctcgcacatgcaca

SEQ ID NO: 4263188 - DNA, 25 bp, Homo sapien
ctgtatttagccaaagttgcattct

SEQ ID NO: 4263189 - DNA, 25 bp, Homo sapien
ccttatatttttttgctgaagtcat

SEQ ID NO: 4263190 - DNA, 25 bp, Homo sapien
aactgtccttatatttttttgctga

SEQ ID NO: 4263191 - DNA, 25 bp, Homo sapien
tgtccttatatttttttgctgaagt

SEQ ID NO: 4263192 - DNA, 25 bp, Homo sapien
aaactgtccttatatttttttgctg

SEQ ID NO: 4263193 - DNA, 25 bp, Homo sapien
cacctgggtcgctacaaaatggata

SEQ ID NO: 4263194 - DNA, 25 bp, Homo sapien
taaatccttgcgatctgagaacctg

SEQ ID NO: 4263195 - DNA, 25 bp, Homo sapien
catattatgcttgagatgcccctga

SEQ ID NO: 4263196 - DNA, 25 bp, Homo sapien
catccaggtctgtgtagttcaaaac

SEQ ID NO: 4263197 - DNA, 25 bp, Homo sapien
tctccataggttgtctggacttcct

SEQ ID NO: 4263198 - DNA, 25 bp, Homo sapien
aagaacaaccatcccaagagaacca

SEQ ID NO: 4263199 - DNA, 25 bp, Homo sapien
gggcctctccataggttgtctggac

SEQ ID NO: 4263200 - DNA, 25 bp, Homo sapien
ccataggttgtctggacttcctcac

SEQ ID NO: 4263201 - DNA, 25 bp, Homo sapien
tgatggcagtggctttcagtatctt

SEQ ID NO: 4263202 - DNA, 25 bp, Homo sapien
aaagttctcattatgtacttcaaac

SEQ ID NO: 4263203 - DNA, 25 bp, Homo sapien
ggctgttaagactgccaccaaggaa

SEQ ID NO: 4263204 - DNA, 25 bp, Homo sapien
tcattatgtacttcaaactttccaa

SEQ ID NO: 4263205 - DNA, 25 bp, Homo sapien
ccatatgtttaagatacactttgtg

SEQ ID NO: 4263206 - DNA, 25 bp, Homo sapien
gactttccatatgtttaagatacac

SEQ ID NO: 4263207 - DNA, 25 bp, Homo sapien
tttcttgactttccatatgtttaag

SEQ ID NO: 4263208 - DNA, 25 bp, Homo sapien
tatgtttaagatacactttgtgtgt

SEQ ID NO: 4263209 - DNA, 25 bp, Homo sapien
tctcatggcaaggtttagtgtcagg

SEQ ID NO: 4263210 - DNA, 25 bp, Homo sapien
aaaaattctcatggcaaggtttagt

SEQ ID NO: 4263211 - DNA, 25 bp, Homo sapien
catggcaaggtttagtgtcaggcat

SEQ ID NO: 4263212 - DNA, 25 bp, Homo sapien
aattctcatggcaaggtttagtgtc

SEQ ID NO: 4263213 - DNA, 25 bp, Homo sapien
tcagaggacgtgatgagccctggtg

SEQ ID NO: 4263214 - DNA, 25 bp, Homo sapien
taggcaatcccaggagacctatgcc

SEQ ID NO: 4263215 - DNA, 25 bp, Homo sapien
aactggatccatttggagataggca

SEQ ID NO: 4263216 - DNA, 25 bp, Homo sapien
ctggtggctttctgaggttgtaggg

SEQ ID NO: 4263217 - DNA, 25 bp, Homo sapien
cattccaagataaatgtactacaca

SEQ ID NO: 4263218 - DNA, 25 bp, Homo sapien
aacaatatatcatgatcaggaaaac

SEQ ID NO: 4263219 - DNA, 25 bp, Homo sapien
taaaatgaaaagtcacgagtgagaa

SEQ ID NO: 4263220 - DNA, 25 bp, Homo sapien
tatgctataataagtaacgttcctt

SEQ ID NO: 4263221 - DNA, 25 bp, Homo sapien
caccaacatactcactcttctcatt

SEQ ID NO: 4263222 - DNA, 25 bp, Homo sapien
catactcactcttctcattgggaga

SEQ ID NO: 4263223 - DNA, 25 bp, Homo sapien
actcactcttctcattgggagaagg

SEQ ID NO: 4263224 - DNA, 25 bp, Homo sapien
caacatactcactcttctcattggg

SEQ ID NO: 4263225 - DNA, 25 bp, Homo sapien
gactgcatagagctgtgggaattat

SEQ ID NO: 4263226 - DNA, 25 bp, Homo sapien
gatcaagtgtcctgtgagttttagg

SEQ ID NO: 4263227 - DNA, 25 bp, Homo sapien
gaattattctggtggtttttggatc

SEQ ID NO: 4263228 - DNA, 25 bp, Homo sapien
cacaaccttaatggtggactgcata

SEQ ID NO: 4263229 - DNA, 25 bp, Homo sapien
taagcctgactgatatttatctctg

SEQ ID NO: 4263230 - DNA, 25 bp, Homo sapien
tatgaaaattcttaagcctgactga

SEQ ID NO: 4263231 - DNA, 25 bp, Homo sapien
cctaaagtgaatccctgtgctgtgg

SEQ ID NO: 4263232 - DNA, 25 bp, Homo sapien
taaggttgacgttctgttatgaaaa

SEQ ID NO: 4263233 - DNA, 25 bp, Homo sapien
catgtgccttccaatacatcagagg

SEQ ID NO: 4263234 - DNA, 25 bp, Homo sapien
agggtggtagattcaaaatagattc

SEQ ID NO: 4263235 - DNA, 25 bp, Homo sapien
tcatgtgccttccaatacatcagag

SEQ ID NO: 4263236 - DNA, 25 bp, Homo sapien
ttgcaggtagggtggtagattcaaa

SEQ ID NO: 4263237 - DNA, 25 bp, Homo sapien
tgtgaggatttagaggcagaagtgt

SEQ ID NO: 4263238 - DNA, 25 bp, Homo sapien
tttaggtacagctgtggagatgtga

SEQ ID NO: 4263239 - DNA, 25 bp, Homo sapien
tctaaagtaacattccagggtctca

SEQ ID NO: 4263240 - DNA, 25 bp, Homo sapien
ttttggttttaggtacagctgtgga

SEQ ID NO: 4263241 - DNA, 25 bp, Homo sapien
tcagatatttggaagaacctgggtg

SEQ ID NO: 4263242 - DNA, 25 bp, Homo sapien
tatcttgatgatcccttcagggcag

SEQ ID NO: 4263243 - DNA, 25 bp, Homo sapien
cacccctagtccagtgaggctgtgg

SEQ ID NO: 4263244 - DNA, 25 bp, Homo sapien
tgtctgggcttattggtagccatcc

SEQ ID NO: 4263245 - DNA, 25 bp, Homo sapien
cttaaagatccaggcttgatgtcta

SEQ ID NO: 4263246 - DNA, 25 bp, Homo sapien
gcttgatgtctagggacaaataaaa

SEQ ID NO: 4263247 - DNA, 25 bp, Homo sapien
aacttgattacttgcaattctccaa

SEQ ID NO: 4263248 - DNA, 25 bp, Homo sapien
tccaggcttgatgtctagggacaaa

SEQ ID NO: 4263249 - DNA, 25 bp, Homo sapien
tagcaaataggaagataggacgaga

SEQ ID NO: 4263250 - DNA, 25 bp, Homo sapien
caatgagaccctgtggagccttttc

SEQ ID NO: 4263251 - DNA, 25 bp, Homo sapien
taggacgagacaatgtggagtgcta

SEQ ID NO: 4263252 - DNA, 25 bp, Homo sapien
cagcaatttggagacttcacctgac

SEQ ID NO: 4263253 - DNA, 25 bp, Homo sapien
aacaccccactaagtactccattga

SEQ ID NO: 4263254 - DNA, 25 bp, Homo sapien
cagaccatgcctgtgtttggagagt

SEQ ID NO: 4263255 - DNA, 25 bp, Homo sapien
cattaagagttccaaagtgttccac

SEQ ID NO: 4263256 - DNA, 25 bp, Homo sapien
ccaaagctaagtatacattaagagt

SEQ ID NO: 4263257 - DNA, 25 bp, Homo sapien
ggatctttacccattatgctgagca

SEQ ID NO: 4263258 - DNA, 25 bp, Homo sapien
aaagccttaggtagatgaatcttac

SEQ ID NO: 4263259 - DNA, 25 bp, Homo sapien
tacaagagatgtttgggaggctcta

SEQ ID NO: 4263260 - DNA, 25 bp, Homo sapien
gaggctctagtaatgttcagtttca

SEQ ID NO: 4263261 - DNA, 25 bp, Homo sapien
gcagtgctcttgctaatcctctcat

SEQ ID NO: 4263262 - DNA, 25 bp, Homo sapien
caggttaaatacattgcagtgctct

SEQ ID NO: 4263263 - DNA, 25 bp, Homo sapien
ccctgccacgttgggtagagtggcc

SEQ ID NO: 4263264 - DNA, 25 bp, Homo sapien
aacagagctagtgccgcaggttaaa

SEQ ID NO: 4263265 - DNA, 25 bp, Homo sapien
tgctggctctggcagaaagaaaggg

SEQ ID NO: 4263266 - DNA, 25 bp, Homo sapien
ccctgctggctctggcagaaagaaa

SEQ ID NO: 4263267 - DNA, 25 bp, Homo sapien
tcagcactctccttccctgctggct

SEQ ID NO: 4263268 - DNA, 25 bp, Homo sapien
ttccctgctggctctggcagaaaga

SEQ ID NO: 4263269 - DNA, 25 bp, Homo sapien
tgcttgcccgcaggtatccttttga

SEQ ID NO: 4263270 - DNA, 25 bp, Homo sapien
gtccagcgtggccactgcagggctt

SEQ ID NO: 4263271 - DNA, 25 bp, Homo sapien
ggattccaggtgtcccttaatgcag

SEQ ID NO: 4263272 - DNA, 25 bp, Homo sapien
taaaagggacatttgctgacgtccg

SEQ ID NO: 4263273 - DNA, 25 bp, Homo sapien
ctgctagtttcactgactgcagctc

SEQ ID NO: 4263274 - DNA, 25 bp, Homo sapien
ctagtttcactgactgcagctctga

SEQ ID NO: 4263275 - DNA, 25 bp, Homo sapien
ttatcatgaggttctgtctgcaggc

SEQ ID NO: 4263276 - DNA, 25 bp, Homo sapien
aggccttggcttggacctgagcctc

SEQ ID NO: 4263277 - DNA, 25 bp, Homo sapien
gggctatgggagaaggtgccttgta

SEQ ID NO: 4263278 - DNA, 25 bp, Homo sapien
gtaagggatgtcttgaagtaagtcc

SEQ ID NO: 4263279 - DNA, 25 bp, Homo sapien
agaaggtgccttgtaagggatgtct

SEQ ID NO: 4263280 - DNA, 25 bp, Homo sapien
ctttcataatgcagggctatgggag

SEQ ID NO: 4263281 - DNA, 25 bp, Homo sapien
ggcaaccatgaatgaaggtgccatg

SEQ ID NO: 4263282 - DNA, 25 bp, Homo sapien
aaccatgaatgaaggtgccatgctc

SEQ ID NO: 4263283 - DNA, 25 bp, Homo sapien
agtttggcaaccatgaatgaaggtg

SEQ ID NO: 4263284 - DNA, 25 bp, Homo sapien
tttggcaaccatgaatgaaggtgcc

SEQ ID NO: 4263285 - DNA, 25 bp, Homo sapien
gcacatttgtgcaaaagctttgtaa

SEQ ID NO: 4263286 - DNA, 25 bp, Homo sapien
ggtcaaaaggagcaattagcacttt

SEQ ID NO: 4263287 - DNA, 25 bp, Homo sapien
caagctgtactgagaaataatgcag

SEQ ID NO: 4263288 - DNA, 25 bp, Homo sapien
gatgtactaatctgtgcagtcccca

SEQ ID NO: 4263289 - DNA, 25 bp, Homo sapien
taggaatacctgtatgcccttcatg

SEQ ID NO: 4263290 - DNA, 25 bp, Homo sapien
caggacatgtaggaatacctgtatg

SEQ ID NO: 4263291 - DNA, 25 bp, Homo sapien
tctgtcgttcagtggtgtacttttc

SEQ ID NO: 4263292 - DNA, 25 bp, Homo sapien
gttcagtggtgtacttttcttccca

SEQ ID NO: 4263293 - DNA, 25 bp, Homo sapien
tgcctgtttcctgcatgtgagagaa

SEQ ID NO: 4263294 - DNA, 25 bp, Homo sapien
gagaagtgctgcagcgaccctgttt

SEQ ID NO: 4263295 - DNA, 25 bp, Homo sapien
tctcgagtagctaaaccctttgaca

SEQ ID NO: 4263296 - DNA, 25 bp, Homo sapien
ttagaacccttgatgtacaagccgg

SEQ ID NO: 4263297 - DNA, 25 bp, Homo sapien
cctgcaaagggcacgaaggctgcca

SEQ ID NO: 4263298 - DNA, 25 bp, Homo sapien
gttaatcaaccagaaagaggctgct

SEQ ID NO: 4263299 - DNA, 25 bp, Homo sapien
agatgccaatctgcgcacatgagcc

SEQ ID NO: 4263300 - DNA, 25 bp, Homo sapien
cacggttacagagctgccgaggaga

SEQ ID NO: 4263301 - DNA, 25 bp, Homo sapien
caacaccagccctgcctgagagctc

SEQ ID NO: 4263302 - DNA, 25 bp, Homo sapien
ccatggaaaccataggcaaaagagc

SEQ ID NO: 4263303 - DNA, 25 bp, Homo sapien
agccacaagtctgaggccaccaaca

SEQ ID NO: 4263304 - DNA, 25 bp, Homo sapien
aagagcagccacaagtctgaggcca

SEQ ID NO: 4263305 - DNA, 25 bp, Homo sapien
ttctccgtgggcaataaagcagcag

SEQ ID NO: 4263306 - DNA, 25 bp, Homo sapien
tgttttcttcaggaccaagcctcag

SEQ ID NO: 4263307 - DNA, 25 bp, Homo sapien
gactcttcacttcgcttctccgtgg

SEQ ID NO: 4263308 - DNA, 25 bp, Homo sapien
tcaccattgtccaaacagcaaatga

SEQ ID NO: 4263309 - DNA, 25 bp, Homo sapien
cagaggagacacctcaccataaaat

SEQ ID NO: 4263310 - DNA, 25 bp, Homo sapien
agacacctcaccataaaatggtgtc

SEQ ID NO: 4263311 - DNA, 25 bp, Homo sapien
tctttctggccatagttgattatcc

SEQ ID NO: 4263312 - DNA, 25 bp, Homo sapien
ttctaccattcctagcatgtgcttc

SEQ ID NO: 4263313 - DNA, 25 bp, Homo sapien
ttcctagcatgtgcttctagcaggg

SEQ ID NO: 4263314 - DNA, 25 bp, Homo sapien
ctagcaggggttgtcgtgttttaca

SEQ ID NO: 4263315 - DNA, 25 bp, Homo sapien
gcatgcaacatagaacccttgtagg

SEQ ID NO: 4263316 - DNA, 25 bp, Homo sapien
catgcaacatagaacccttgtaggg

SEQ ID NO: 4263317 - DNA, 25 bp, Homo sapien
tgcaacatagaacccttgtagggtc

SEQ ID NO: 4263318 - DNA, 25 bp, Homo sapien
tgcatgcaacatagaacccttgtag

SEQ ID NO: 4263319 - DNA, 25 bp, Homo sapien
tttaggtggtactcattagctttta

SEQ ID NO: 4263320 - DNA, 25 bp, Homo sapien
aggtggtactcattagcttttaagg

SEQ ID NO: 4263321 - DNA, 25 bp, Homo sapien
ttaggtggtactcattagcttttaa

SEQ ID NO: 4263322 - DNA, 25 bp, Homo sapien
taggtggtactcattagcttttaag

SEQ ID NO: 4263323 - DNA, 25 bp, Homo sapien
gctcaaacaacagctgattgcacac

SEQ ID NO: 4263324 - DNA, 25 bp, Homo sapien
agctcaaacaacagctgattgcaca

SEQ ID NO: 4263325 - DNA, 25 bp, Homo sapien
aacactgaaattagagagctcaaac

SEQ ID NO: 4263326 - DNA, 25 bp, Homo sapien
gatccactaaaatctgacagcaggt

SEQ ID NO: 4263327 - DNA, 25 bp, Homo sapien
tgacagcaggtgcattcaccaactt

SEQ ID NO: 4263328 - DNA, 25 bp, Homo sapien
aaaatctgacagcaggtgcattcac

SEQ ID NO: 4263329 - DNA, 25 bp, Homo sapien
aatctgacagcaggtgcattcacca

SEQ ID NO: 4263330 - DNA, 25 bp, Homo sapien
tagttaccttaaatgtacatgggct

SEQ ID NO: 4263331 - DNA, 25 bp, Homo sapien
ggcaaaataaccagatagcaccatg

SEQ ID NO: 4263332 - DNA, 25 bp, Homo sapien
acataccagaagagattgggagcca

SEQ ID NO: 4263333 - DNA, 25 bp, Homo sapien
aaaatgaaaaaccagtagcagccac

SEQ ID NO: 4263334 - DNA, 25 bp, Homo sapien
caatgattcttttctaacggttagg

SEQ ID NO: 4263335 - DNA, 25 bp, Homo sapien
taaatttcacatctaaaccatggac

SEQ ID NO: 4263336 - DNA, 25 bp, Homo sapien
catgtgttcactgatcggcctcctc

SEQ ID NO: 4263337 - DNA, 25 bp, Homo sapien
agttaattcagggtagcctacatgg

SEQ ID NO: 4263338 - DNA, 25 bp, Homo sapien
attactttttattatgattgctttg

SEQ ID NO: 4263339 - DNA, 25 bp, Homo sapien
gggactcattactttttattatgat

SEQ ID NO: 4263340 - DNA, 25 bp, Homo sapien
ctttttattatgattgctttgtaaa

SEQ ID NO: 4263341 - DNA, 25 bp, Homo sapien
tactttttattatgattgctttgta

SEQ ID NO: 4263342 - DNA, 25 bp, Homo sapien
atgatagggcacactgctaaatctc

SEQ ID NO: 4263343 - DNA, 25 bp, Homo sapien
tgataaatgatagggcacactgcta

SEQ ID NO: 4263344 - DNA, 25 bp, Homo sapien
taaatgatagggcacactgctaaat

SEQ ID NO: 4263345 - DNA, 25 bp, Homo sapien
ctgataaatgatagggcacactgct

SEQ ID NO: 4263346 - DNA, 25 bp, Homo sapien
cgagccagttaaacgtgaatttgac

SEQ ID NO: 4263347 - DNA, 25 bp, Homo sapien
aaatgaacctaagtgccacctagaa

SEQ ID NO: 4263348 - DNA, 25 bp, Homo sapien
tgaaggctggtttgtgagtggaaat

SEQ ID NO: 4263349 - DNA, 25 bp, Homo sapien
ttgacaaggaagcacttctgaaggc

SEQ ID NO: 4263350 - DNA, 25 bp, Homo sapien
tttgtaacatcacccaaatcatact

SEQ ID NO: 4263351 - DNA, 25 bp, Homo sapien
acgtcctgaggatattatttcacaa

SEQ ID NO: 4263352 - DNA, 25 bp, Homo sapien
cacccaaatcatactgtacgtcctg

SEQ ID NO: 4263353 - DNA, 25 bp, Homo sapien
tcatactgtacgtcctgaggatatt

SEQ ID NO: 4263354 - DNA, 25 bp, Homo sapien
aacaactagtgcgtgtggcgtttat

SEQ ID NO: 4263355 - DNA, 25 bp, Homo sapien
caactagtgcgtgtggcgtttatca

SEQ ID NO: 4263356 - DNA, 25 bp, Homo sapien
gtgaacaactagtgcgtgtggcgtt

SEQ ID NO: 4263357 - DNA, 25 bp, Homo sapien
aactagtgcgtgtggcgtttatcac

SEQ ID NO: 4263358 - DNA, 25 bp, Homo sapien
cttggcaggcatgaaatagacattt

SEQ ID NO: 4263359 - DNA, 25 bp, Homo sapien
cccctcgtattcagaaccgtggctg

SEQ ID NO: 4263360 - DNA, 25 bp, Homo sapien
tgttattttcccctcgtattcagaa

SEQ ID NO: 4263361 - DNA, 25 bp, Homo sapien
cagaaccgtggctggaacttggcag

SEQ ID NO: 4263362 - DNA, 25 bp, Homo sapien
agtcacggccgacccgggtctgcaa

SEQ ID NO: 4263363 - DNA, 25 bp, Homo sapien
cggccgacccgggtctgcaactggt

SEQ ID NO: 4263364 - DNA, 25 bp, Homo sapien
tctgcaactggtgcacaagcctcct

SEQ ID NO: 4263365 - DNA, 25 bp, Homo sapien
aagcctcctgaagcgaggctgcgcg

SEQ ID NO: 4263366 - DNA, 25 bp, Homo sapien
cgccaagcggctacgttcttctcgg

SEQ ID NO: 4263367 - DNA, 25 bp, Homo sapien
gttccactctagttacaggattggg

SEQ ID NO: 4263368 - DNA, 25 bp, Homo sapien
agatggcgctcgaccccgcaggtac

SEQ ID NO: 4263369 - DNA, 25 bp, Homo sapien
caaagggcccgtgtttctgttgcgg

SEQ ID NO: 4263370 - DNA, 25 bp, Homo sapien
tgatggcccataggaacctgcacct

SEQ ID NO: 4263371 - DNA, 25 bp, Homo sapien
gattatattctcagatgatggccca

SEQ ID NO: 4263372 - DNA, 25 bp, Homo sapien
catggcagcctaagggaagtttcct

SEQ ID NO: 4263373 - DNA, 25 bp, Homo sapien
tgcttattgccatgttccggacaaa

SEQ ID NO: 4263374 - DNA, 25 bp, Homo sapien
ctgtgggaatgtaggtaaattacct

SEQ ID NO: 4263375 - DNA, 25 bp, Homo sapien
taaaaggttgtggagttgattagaa

SEQ ID NO: 4263376 - DNA, 25 bp, Homo sapien
tattattgccgccatatctctagag

SEQ ID NO: 4263377 - DNA, 25 bp, Homo sapien
ccttgctcaggagcacttgaactcc

SEQ ID NO: 4263378 - DNA, 25 bp, Homo sapien
taccctggccaatccatacaattag

SEQ ID NO: 4263379 - DNA, 25 bp, Homo sapien
tattccctcacacaaggtatcactg

SEQ ID NO: 4263380 - DNA, 25 bp, Homo sapien
ttttggtaaggactcatgaactgct

SEQ ID NO: 4263381 - DNA, 25 bp, Homo sapien
cagatttggccagagttccctttaa

SEQ ID NO: 4263382 - DNA, 25 bp, Homo sapien
tattcagatatgatgcgcctatatg

SEQ ID NO: 4263383 - DNA, 25 bp, Homo sapien
tatgatgcgcctatatgtaacaaat

SEQ ID NO: 4263384 - DNA, 25 bp, Homo sapien
aaccttttattcagatatgatgcgc

SEQ ID NO: 4263385 - DNA, 25 bp, Homo sapien
taacctatgtatagagttgttttcc

SEQ ID NO: 4263386 - DNA, 25 bp, Homo sapien
tctggctgctcgtaatatttttcct

SEQ ID NO: 4263387 - DNA, 25 bp, Homo sapien
gaatattgaatattagcacccagtc

SEQ ID NO: 4263388 - DNA, 25 bp, Homo sapien
tgtttctccttcacctaggaagctt

SEQ ID NO: 4263389 - DNA, 25 bp, Homo sapien
ttttaggtgatctggcctttctgtc

SEQ ID NO: 4263390 - DNA, 25 bp, Homo sapien
cagaaggagggaccagagtagttca

SEQ ID NO: 4263391 - DNA, 25 bp, Homo sapien
gcagagtctggaactagggcagcca

SEQ ID NO: 4263392 - DNA, 25 bp, Homo sapien
ggaaatagttgcttacttacagtag

SEQ ID NO: 4263393 - DNA, 25 bp, Homo sapien
gacgatgtttaagatctcacttgga

SEQ ID NO: 4263394 - DNA, 25 bp, Homo sapien
ggtgctctattaattgtgccccatt

SEQ ID NO: 4263395 - DNA, 25 bp, Homo sapien
tttctgagtatagcataaatggcac

SEQ ID NO: 4263396 - DNA, 25 bp, Homo sapien
tagtggtacctatctacttggcagg

SEQ ID NO: 4263397 - DNA, 25 bp, Homo sapien
tggtctttcaaaatacaacgcaagc

SEQ ID NO: 4263398 - DNA, 25 bp, Homo sapien
taatccagtctttacttgtccttta

SEQ ID NO: 4263399 - DNA, 25 bp, Homo sapien
tacaccgtgggttcccaggacagga

SEQ ID NO: 4263400 - DNA, 25 bp, Homo sapien
tctgtcacagtattttgtagattta

SEQ ID NO: 4263401 - DNA, 25 bp, Homo sapien
tctcattgctctattctgtgacagt

SEQ ID NO: 4263402 - DNA, 25 bp, Homo sapien
tacttctaaagattgagcctgatga

SEQ ID NO: 4263403 - DNA, 25 bp, Homo sapien
tccaacaagcatgtaggcagatact

SEQ ID NO: 4263404 - DNA, 25 bp, Homo sapien
ggcagatactcaaatgacattcagg

SEQ ID NO: 4263405 - DNA, 25 bp, Homo sapien
taagcttacatttaacacatgcagg

SEQ ID NO: 4263406 - DNA, 25 bp, Homo sapien
cctggtcattctggaccttttgaaa

SEQ ID NO: 4263407 - DNA, 25 bp, Homo sapien
ggctatgaaccagaatccttcctga

SEQ ID NO: 4263408 - DNA, 25 bp, Homo sapien
tatgctaatggctaatcatgggagc

SEQ ID NO: 4263409 - DNA, 25 bp, Homo sapien
gcaggaatggacaaccttcaaaggt

SEQ ID NO: 4263410 - DNA, 25 bp, Homo sapien
tggactcaggaagtagtataaaaaa

SEQ ID NO: 4263411 - DNA, 25 bp, Homo sapien
tcttaacctgataacttgttagtcc

SEQ ID NO: 4263412 - DNA, 25 bp, Homo sapien
tatttctaagtgaattaccattctg

SEQ ID NO: 4263413 - DNA, 25 bp, Homo sapien
ggagatacctacttatatgaattaa

SEQ ID NO: 4263414 - DNA, 25 bp, Homo sapien
tcccaggccacagatcaaaaggagg

SEQ ID NO: 4263415 - DNA, 25 bp, Homo sapien
tattggtgcatttcctagagcacag

SEQ ID NO: 4263416 - DNA, 25 bp, Homo sapien
aaggagggagattactagagcagac

SEQ ID NO: 4263417 - DNA, 25 bp, Homo sapien
tgtcttgcttgcttatgggtgcctc

SEQ ID NO: 4263418 - DNA, 25 bp, Homo sapien
tagattcataagctacagatgggcc

SEQ ID NO: 4263419 - DNA, 25 bp, Homo sapien
tctataggcaaggacaatatttcac

SEQ ID NO: 4263420 - DNA, 25 bp, Homo sapien
cacatgattcagctcttcaagtctg

SEQ ID NO: 4263421 - DNA, 25 bp, Homo sapien
tccaagtagcctttctgaattaaga

SEQ ID NO: 4263422 - DNA, 25 bp, Homo sapien
tagaagctgctctacacaatgtgca

SEQ ID NO: 4263423 - DNA, 25 bp, Homo sapien
gacttaaggaatgtgctgggacaaa

SEQ ID NO: 4263424 - DNA, 25 bp, Homo sapien
tacttggcaggagattgtactcccc

SEQ ID NO: 4263425 - DNA, 25 bp, Homo sapien
tatacagcctatgcagccacatgag

SEQ ID NO: 4263426 - DNA, 25 bp, Homo sapien
ttttcaatatctttacgcattataa

SEQ ID NO: 4263427 - DNA, 25 bp, Homo sapien
gaaatgtaacctactcacattgcca

SEQ ID NO: 4263428 - DNA, 25 bp, Homo sapien
atatctttacgcattataacaacag

SEQ ID NO: 4263429 - DNA, 25 bp, Homo sapien
tcaatatctttacgcattataacaa

SEQ ID NO: 4263430 - DNA, 25 bp, Homo sapien
aaataatttcttgggaggaccactg

SEQ ID NO: 4263431 - DNA, 25 bp, Homo sapien
tcctcatggtgaaatcgtgaatctc

SEQ ID NO: 4263432 - DNA, 25 bp, Homo sapien
gagggtgctctttcatactagaaaa

SEQ ID NO: 4263433 - DNA, 25 bp, Homo sapien
cttagaatatggagctagagggtgc

SEQ ID NO: 4263434 - DNA, 25 bp, Homo sapien
cattgtctgtccatgattggaggat

SEQ ID NO: 4263435 - DNA, 25 bp, Homo sapien
gaaagcatgtaccatcattaggaat

SEQ ID NO: 4263436 - DNA, 25 bp, Homo sapien
gctgtctcacttgatttaggaggac

SEQ ID NO: 4263437 - DNA, 25 bp, Homo sapien
aggacttggaaatacccaggaattg

SEQ ID NO: 4263438 - DNA, 25 bp, Homo sapien
tcatcaagtgcagttttgtgctgtc

SEQ ID NO: 4263439 - DNA, 25 bp, Homo sapien
catcaagtgcagttttgtgctgtct

SEQ ID NO: 4263440 - DNA, 25 bp, Homo sapien
ggaagatgtggtatgacaaagagct

SEQ ID NO: 4263441 - DNA, 25 bp, Homo sapien
aaagagctttgccatttggtaagag

SEQ ID NO: 4263442 - DNA, 25 bp, Homo sapien
cataaaattcgataacacttcacca

SEQ ID NO: 4263443 - DNA, 25 bp, Homo sapien
tttgaattctagaactggtgatgaa

SEQ ID NO: 4263444 - DNA, 25 bp, Homo sapien
taagatttccaagttagtgtgatca

SEQ ID NO: 4263445 - DNA, 25 bp, Homo sapien
tagtgtgatcattgaggcactgtga

SEQ ID NO: 4263446 - DNA, 25 bp, Homo sapien
tccacaggcagtccaaaagcaaatt

SEQ ID NO: 4263447 - DNA, 25 bp, Homo sapien
tccagctcagcctaccagtgtggaa

SEQ ID NO: 4263448 - DNA, 25 bp, Homo sapien
ccttgtctgcagaatggatatagaa

SEQ ID NO: 4263449 - DNA, 25 bp, Homo sapien
caaatgttaatgctactgtggtcac

SEQ ID NO: 4263450 - DNA, 25 bp, Homo sapien
tggtaaaaggtcaactagagcaaac

SEQ ID NO: 4263451 - DNA, 25 bp, Homo sapien
tgacagctagttgctcttcaggcag

SEQ ID NO: 4263452 - DNA, 25 bp, Homo sapien
gctttggcgaaagtagctactacta

SEQ ID NO: 4263453 - DNA, 25 bp, Homo sapien
cctgaggagaactatttatgacaca

SEQ ID NO: 4263454 - DNA, 25 bp, Homo sapien
tcagtggtttccggtaaacagtgac

SEQ ID NO: 4263455 - DNA, 25 bp, Homo sapien
cttcagttcccagtatgcatgctgc

SEQ ID NO: 4263456 - DNA, 25 bp, Homo sapien
cttgagtcaccagatgtaaattaga

SEQ ID NO: 4263457 - DNA, 25 bp, Homo sapien
tcttagtagttcagcttgtacttga

SEQ ID NO: 4263458 - DNA, 25 bp, Homo sapien
tcttgattgcagttgaggttttcag

SEQ ID NO: 4263459 - DNA, 25 bp, Homo sapien
tttacaaaaagttaatactcatcat

SEQ ID NO: 4263460 - DNA, 25 bp, Homo sapien
ttttacaaaaagttaatactcatca

SEQ ID NO: 4263461 - DNA, 25 bp, Homo sapien
ttgaattctgtaaggtgaaatacct

SEQ ID NO: 4263462 - DNA, 25 bp, Homo sapien
aattattaccccttagatactagtg

SEQ ID NO: 4263463 - DNA, 25 bp, Homo sapien
cagaaatcaaactagacaaacgtgt

SEQ ID NO: 4263464 - DNA, 25 bp, Homo sapien
caaacgtgtcaccttatgcttcaat

SEQ ID NO: 4263465 - DNA, 25 bp, Homo sapien
taatgactgatcactgcccttttgg

SEQ ID NO: 4263466 - DNA, 25 bp, Homo sapien
ggagggagtacatgtcctgcttaca

SEQ ID NO: 4263467 - DNA, 25 bp, Homo sapien
caaagtgtaacagctaaaagcccag

SEQ ID NO: 4263468 - DNA, 25 bp, Homo sapien
gtgaaacctgcatgtccacaactga

SEQ ID NO: 4263469 - DNA, 25 bp, Homo sapien
cactccaggctgtgctacagatact

SEQ ID NO: 4263470 - DNA, 25 bp, Homo sapien
tattcttatgcgaagagggaacagt

SEQ ID NO: 4263471 - DNA, 25 bp, Homo sapien
ggaacagtcctcaaaattcatgcta

SEQ ID NO: 4263472 - DNA, 25 bp, Homo sapien
gggtaacaatgtagagaggctatct

SEQ ID NO: 4263473 - DNA, 25 bp, Homo sapien
tgctatcccaaagactaacaatggc

SEQ ID NO: 4263474 - DNA, 25 bp, Homo sapien
caagtaggctcttaagacaaaggaa

SEQ ID NO: 4263475 - DNA, 25 bp, Homo sapien
aagactaacaatggccaagtaggct

SEQ ID NO: 4263476 - DNA, 25 bp, Homo sapien
taaatttcatgctatcccaaagact

SEQ ID NO: 4263477 - DNA, 25 bp, Homo sapien
tggaagaagacaacgtattgtctta

SEQ ID NO: 4263478 - DNA, 25 bp, Homo sapien
acaacgtattgtcttaatgctgaag

SEQ ID NO: 4263479 - DNA, 25 bp, Homo sapien
ggaagaagacaacgtattgtcttaa

SEQ ID NO: 4263480 - DNA, 25 bp, Homo sapien
gaagacaacgtattgtcttaatgct

SEQ ID NO: 4263481 - DNA, 25 bp, Homo sapien
aaatgcttagtttttggagatctct

SEQ ID NO: 4263482 - DNA, 25 bp, Homo sapien
gaaatgcttagtttttggagatctc

SEQ ID NO: 4263483 - DNA, 25 bp, Homo sapien
tcagattgtcttcctgatatggatc

SEQ ID NO: 4263484 - DNA, 25 bp, Homo sapien
gacatgttcaggttttacagaatat

SEQ ID NO: 4263485 - DNA, 25 bp, Homo sapien
cagagacatgttcaggttttacaga

SEQ ID NO: 4263486 - DNA, 25 bp, Homo sapien
catgttcaggttttacagaatatat

SEQ ID NO: 4263487 - DNA, 25 bp, Homo sapien
gagacatgttcaggttttacagaat

SEQ ID NO: 4263488 - DNA, 25 bp, Homo sapien
ttctattttgagatcgctacattct

SEQ ID NO: 4263489 - DNA, 25 bp, Homo sapien
attttgagatcgctacattctttcc

SEQ ID NO: 4263490 - DNA, 25 bp, Homo sapien
tttgagatcgctacattctttcctc

SEQ ID NO: 4263491 - DNA, 25 bp, Homo sapien
gagatcgctacattctttcctcatc

SEQ ID NO: 4263492 - DNA, 25 bp, Homo sapien
tacttctttagattgtagctgctca

SEQ ID NO: 4263493 - DNA, 25 bp, Homo sapien
cttctttagattgtagctgctcatt

SEQ ID NO: 4263494 - DNA, 25 bp, Homo sapien
acttctttagattgtagctgctcat

SEQ ID NO: 4263495 - DNA, 25 bp, Homo sapien
ttctttagattgtagctgctcattc

SEQ ID NO: 4263496 - DNA, 25 bp, Homo sapien
tctcgatatgcatgataggccttat

SEQ ID NO: 4263497 - DNA, 25 bp, Homo sapien
tatttacttgttctcgtcccacgga

SEQ ID NO: 4263498 - DNA, 25 bp, Homo sapien
caaattatctctatcaatgcaaacc

SEQ ID NO: 4263499 - DNA, 25 bp, Homo sapien
aatgcaaacctctcgatatgcatga

SEQ ID NO: 4263500 - DNA, 25 bp, Homo sapien
taaagcctggattcattaggtgagt

SEQ ID NO: 4263501 - DNA, 25 bp, Homo sapien
aaataagtcagtgttctgatggctc

SEQ ID NO: 4263502 - DNA, 25 bp, Homo sapien
agcagcaccttagggcatacttgac

SEQ ID NO: 4263503 - DNA, 25 bp, Homo sapien
gagtatagatgtgatacacactgct

SEQ ID NO: 4263504 - DNA, 25 bp, Homo sapien
ccaagtacatggtatgtgaaacaca

SEQ ID NO: 4263505 - DNA, 25 bp, Homo sapien
gaaacacaggataagtataatgccc

SEQ ID NO: 4263506 - DNA, 25 bp, Homo sapien
catacagctatggaggtaagtaaac

SEQ ID NO: 4263507 - DNA, 25 bp, Homo sapien
cacaaacgcaatgaaggtaaaagat

SEQ ID NO: 4263508 - DNA, 25 bp, Homo sapien
ctgtatctctcttatgggctttttc

SEQ ID NO: 4263509 - DNA, 25 bp, Homo sapien
tttcatgattcagaatacagatatc

SEQ ID NO: 4263510 - DNA, 25 bp, Homo sapien
tgaatatattgaaactggagtcact

SEQ ID NO: 4263511 - DNA, 25 bp, Homo sapien
tttgatgtcttcatatgcagtgaca

SEQ ID NO: 4263512 - DNA, 25 bp, Homo sapien
tgaacatctacttttgctgttaggt

SEQ ID NO: 4263513 - DNA, 25 bp, Homo sapien
cttttgctgttaggttcagcattac

SEQ ID NO: 4263514 - DNA, 25 bp, Homo sapien
tgtttaacgaaaaactgacttgctc

SEQ ID NO: 4263515 - DNA, 25 bp, Homo sapien
gaaaaactgacttgctctgaacatc

SEQ ID NO: 4263516 - DNA, 25 bp, Homo sapien
acatgatggaaggagaaactgtggc

SEQ ID NO: 4263517 - DNA, 25 bp, Homo sapien
tgatggaaggagaaactgtggctaa

SEQ ID NO: 4263518 - DNA, 25 bp, Homo sapien
tgaaaaacatgatggaaggagaaac

SEQ ID NO: 4263519 - DNA, 25 bp, Homo sapien
atggaaggagaaactgtggctaaaa

SEQ ID NO: 4263520 - DNA, 25 bp, Homo sapien
attgtcaactaaagcaacagctggg

SEQ ID NO: 4263521 - DNA, 25 bp, Homo sapien
tacaggacaactcccactcttaagg

SEQ ID NO: 4263522 - DNA, 25 bp, Homo sapien
taacattttctaaccatacaggaca

SEQ ID NO: 4263523 - DNA, 25 bp, Homo sapien
gtaggtaaaacctgccatccagtca

SEQ ID NO: 4263524 - DNA, 25 bp, Homo sapien
actgtgaaggcaaaagtttaataca

SEQ ID NO: 4263525 - DNA, 25 bp, Homo sapien
ctgtgaaggcaaaagtttaatacaa

SEQ ID NO: 4263526 - DNA, 25 bp, Homo sapien
ctcaacaaacagccgaaggctggaa

SEQ ID NO: 4263527 - DNA, 25 bp, Homo sapien
cgtagtagtagttactcaacaaaca

SEQ ID NO: 4263528 - DNA, 25 bp, Homo sapien
gaaggctggaatgaataccgtatac

SEQ ID NO: 4263529 - DNA, 25 bp, Homo sapien
tgaataccgtatacaggttagacat

SEQ ID NO: 4263530 - DNA, 25 bp, Homo sapien
cgagtttcgattccttagtgtttgg

SEQ ID NO: 4263531 - DNA, 25 bp, Homo sapien
ccaaggccgccgagtttcgattcct

SEQ ID NO: 4263532 - DNA, 25 bp, Homo sapien
ccagaagccaggctacgtagggccg

SEQ ID NO: 4263533 - DNA, 25 bp, Homo sapien
agaagccaggctacgtagggccgcc

SEQ ID NO: 4263534 - DNA, 25 bp, Homo sapien
cggtttcttcgaagacaccgccgct

SEQ ID NO: 4263535 - DNA, 25 bp, Homo sapien
gtttcttcgaagacaccgccgcttc

SEQ ID NO: 4263536 - DNA, 25 bp, Homo sapien
agggagtcccatttcttctgactcg

SEQ ID NO: 4263537 - DNA, 25 bp, Homo sapien
ttctgactcggcaggagcccgggac

SEQ ID NO: 4263538 - DNA, 25 bp, Homo sapien
gttacccagcaatacgcgcgcgaga

SEQ ID NO: 4263539 - DNA, 25 bp, Homo sapien
gccgacgcgagagaaggcccgttac

SEQ ID NO: 4263540 - DNA, 25 bp, Homo sapien
gaagcactccggaaagtgattggaa

SEQ ID NO: 4263541 - DNA, 25 bp, Homo sapien
tggatgagctctcagccggaaaagg

SEQ ID NO: 4263542 - DNA, 25 bp, Homo sapien
gttcatagcaaaccctcaagaaaaa

SEQ ID NO: 4263543 - DNA, 25 bp, Homo sapien
tggttcatagcaaaccctcaagaaa

SEQ ID NO: 4263544 - DNA, 25 bp, Homo sapien
ggttcatagcaaaccctcaagaaaa

SEQ ID NO: 4263545 - DNA, 25 bp, Homo sapien
ctggttcatagcaaaccctcaagaa

SEQ ID NO: 4263546 - DNA, 25 bp, Homo sapien
gcatccaggccttatggttacagct

SEQ ID NO: 4263547 - DNA, 25 bp, Homo sapien
cagctttaagatagtgcaagataag

SEQ ID NO: 4263548 - DNA, 25 bp, Homo sapien
tatggttacagctttaagatagtgc

SEQ ID NO: 4263549 - DNA, 25 bp, Homo sapien
agtgcaagataagagtaggattgac

SEQ ID NO: 4263550 - DNA, 25 bp, Homo sapien
atcagtacacatgattagactagca

SEQ ID NO: 4263551 - DNA, 25 bp, Homo sapien
catatcagtacacatgattagacta

SEQ ID NO: 4263552 - DNA, 25 bp, Homo sapien
tatcagtacacatgattagactagc

SEQ ID NO: 4263553 - DNA, 25 bp, Homo sapien
tcagtacacatgattagactagcac

SEQ ID NO: 4263554 - DNA, 25 bp, Homo sapien
ggctctgggccatagttagtttcta

SEQ ID NO: 4263555 - DNA, 25 bp, Homo sapien
caaaattgattgctgtaggctctgg

SEQ ID NO: 4263556 - DNA, 25 bp, Homo sapien
tcatatctttgggaggctagcctgc

SEQ ID NO: 4263557 - DNA, 25 bp, Homo sapien
tgacagtggcatccaaacattgtgg

SEQ ID NO: 4263558 - DNA, 25 bp, Homo sapien
tgtaggcttagcaaacccttggacc

SEQ ID NO: 4263559 - DNA, 25 bp, Homo sapien
gctgttacttcaatactcaaaccaa

SEQ ID NO: 4263560 - DNA, 25 bp, Homo sapien
caaagagagattaccctatatgctg

SEQ ID NO: 4263561 - DNA, 25 bp, Homo sapien
gatccctccaatattcactatctgt

SEQ ID NO: 4263562 - DNA, 25 bp, Homo sapien
gacttcgcagcaccaactaaattgt

SEQ ID NO: 4263563 - DNA, 25 bp, Homo sapien
tgaataagcccaatatcagcagtgt

SEQ ID NO: 4263564 - DNA, 25 bp, Homo sapien
taatctgactccttggtgaatgaat

SEQ ID NO: 4263565 - DNA, 25 bp, Homo sapien
tagtttagcgtaaacagaagtgtca

SEQ ID NO: 4263566 - DNA, 25 bp, Homo sapien
tggtcccaaatggagacggcagaca

SEQ ID NO: 4263567 - DNA, 25 bp, Homo sapien
tactagtagtttccattcttgctga

SEQ ID NO: 4263568 - DNA, 25 bp, Homo sapien
tactaaatttaggagtggcataatg

SEQ ID NO: 4263569 - DNA, 25 bp, Homo sapien
tctctgaggcactgttggcagctca

SEQ ID NO: 4263570 - DNA, 25 bp, Homo sapien
agattcctactgctgggttctagcc

SEQ ID NO: 4263571 - DNA, 25 bp, Homo sapien
gcagattcctactgctgggttctag

SEQ ID NO: 4263572 - DNA, 25 bp, Homo sapien
ttatagcagattcctactgctgggt

SEQ ID NO: 4263573 - DNA, 25 bp, Homo sapien
tagcagattcctactgctgggttct

SEQ ID NO: 4263574 - DNA, 25 bp, Homo sapien
tttccataggccagtgttccccaga

SEQ ID NO: 4263575 - DNA, 25 bp, Homo sapien
ctttccataggccagtgttccccag

SEQ ID NO: 4263576 - DNA, 25 bp, Homo sapien
ggaattagctcgacagtgtcctggt

SEQ ID NO: 4263577 - DNA, 25 bp, Homo sapien
gaaccaccttggacattgctgcatg

SEQ ID NO: 4263578 - DNA, 25 bp, Homo sapien
gctcataagtattgccaaaggaatt

SEQ ID NO: 4263579 - DNA, 25 bp, Homo sapien
tgcatgccaagtccagctcataagt

SEQ ID NO: 4263580 - DNA, 25 bp, Homo sapien
tccagcacctcaagactggctgagt

SEQ ID NO: 4263581 - DNA, 25 bp, Homo sapien
gctgagttccctcagtcttgtaggt

SEQ ID NO: 4263582 - DNA, 25 bp, Homo sapien
tgagttccctcagtcttgtaggtgt

SEQ ID NO: 4263583 - DNA, 25 bp, Homo sapien
ggctgagttccctcagtcttgtagg

SEQ ID NO: 4263584 - DNA, 25 bp, Homo sapien
caccaaggctgaccattctagctgg

SEQ ID NO: 4263585 - DNA, 25 bp, Homo sapien
tcagcaccaaggctgaccattctag

SEQ ID NO: 4263586 - DNA, 25 bp, Homo sapien
agcaccaaggctgaccattctagct

SEQ ID NO: 4263587 - DNA, 25 bp, Homo sapien
gcaccaaggctgaccattctagctg

SEQ ID NO: 4263588 - DNA, 25 bp, Homo sapien
ttccctccttatctgctttcctcat

SEQ ID NO: 4263589 - DNA, 25 bp, Homo sapien
gttccctccttatctgctttcctca

SEQ ID NO: 4263590 - DNA, 25 bp, Homo sapien
taagctactacccaggatcaagtgg

SEQ ID NO: 4263591 - DNA, 25 bp, Homo sapien
gctcgatatgcacaaagacactctg

SEQ ID NO: 4263592 - DNA, 25 bp, Homo sapien
taaatttatagacgcaacgcactgc

SEQ ID NO: 4263593 - DNA, 25 bp, Homo sapien
tgaaagtccctcctggacgtgcaga

SEQ ID NO: 4263594 - DNA, 25 bp, Homo sapien
ccgccccgggcacattgcagtaaat

SEQ ID NO: 4263595 - DNA, 25 bp, Homo sapien
accaccaaaaagagacggcgcccag

SEQ ID NO: 4263596 - DNA, 25 bp, Homo sapien
caccaaaaagagacggcgcccagct

SEQ ID NO: 4263597 - DNA, 25 bp, Homo sapien
cccgggcacattgcagtaaatgcct

SEQ ID NO: 4263598 - DNA, 25 bp, Homo sapien
tgcgctctgcttagcgggactgccg

SEQ ID NO: 4263599 - DNA, 25 bp, Homo sapien
caaggtaggtccacagtgttggcgc

SEQ ID NO: 4263600 - DNA, 25 bp, Homo sapien
agacccaacggcgagaaaggagaga

SEQ ID NO: 4263601 - DNA, 25 bp, Homo sapien
cgggctggagagcaagtacccaagc

SEQ ID NO: 4263602 - DNA, 25 bp, Homo sapien
atattctgatatcctcagctttcca

SEQ ID NO: 4263603 - DNA, 25 bp, Homo sapien
tccagtcgctcttgatttcatgaat

SEQ ID NO: 4263604 - DNA, 25 bp, Homo sapien
ctcagctttccagtcgctcttgatt

SEQ ID NO: 4263605 - DNA, 25 bp, Homo sapien
tgtgaaaactatgatgaattttaat

SEQ ID NO: 4263606 - DNA, 25 bp, Homo sapien
gccagatcagcttgtctcctaaatt

SEQ ID NO: 4263607 - DNA, 25 bp, Homo sapien
attgcaggttcatggtcatatgtcc

SEQ ID NO: 4263608 - DNA, 25 bp, Homo sapien
tcatggtcatatgtcctcggaaagt

SEQ ID NO: 4263609 - DNA, 25 bp, Homo sapien
aaatcagagcttagtgccagatcag

SEQ ID NO: 4263610 - DNA, 25 bp, Homo sapien
cgtttcaagcctgagattgggctga

SEQ ID NO: 4263611 - DNA, 25 bp, Homo sapien
tatgtacttccttatggataggggg

SEQ ID NO: 4263612 - DNA, 25 bp, Homo sapien
cacttctctgtagacttctatgtac

SEQ ID NO: 4263613 - DNA, 25 bp, Homo sapien
caagcctgagattgggctgaggcat

SEQ ID NO: 4263614 - DNA, 25 bp, Homo sapien
gatgtcaatagcttcaagcaacttg

SEQ ID NO: 4263615 - DNA, 25 bp, Homo sapien
tgtcaatagcttcaagcaacttgaa

SEQ ID NO: 4263616 - DNA, 25 bp, Homo sapien
atgtcaatagcttcaagcaacttga

SEQ ID NO: 4263617 - DNA, 25 bp, Homo sapien
tcaatagcttcaagcaacttgaaac

SEQ ID NO: 4263618 - DNA, 25 bp, Homo sapien
caatttaattgtggcctagagctga

SEQ ID NO: 4263619 - DNA, 25 bp, Homo sapien
gtgtatccttttaatgaaggaagaa

SEQ ID NO: 4263620 - DNA, 25 bp, Homo sapien
gaaaatccttgagggacaagcagta

SEQ ID NO: 4263621 - DNA, 25 bp, Homo sapien
ctgagatttgcatctctaaggctat

SEQ ID NO: 4263622 - DNA, 25 bp, Homo sapien
atccaatcttctgtgacagaatggc

SEQ ID NO: 4263623 - DNA, 25 bp, Homo sapien
gaatccaatcttctgtgacagaatg

SEQ ID NO: 4263624 - DNA, 25 bp, Homo sapien
aagaatccaatcttctgtgacagaa

SEQ ID NO: 4263625 - DNA, 25 bp, Homo sapien
gtgaaggcactttggaaagaattct

SEQ ID NO: 4263626 - DNA, 25 bp, Homo sapien
gattcagctgatacagattttccca

SEQ ID NO: 4263627 - DNA, 25 bp, Homo sapien
ccatttgctgggcttgcaaacccat

SEQ ID NO: 4263628 - DNA, 25 bp, Homo sapien
actcatcggtaaactggtaaatgga

SEQ ID NO: 4263629 - DNA, 25 bp, Homo sapien
cacactaccaactcatcggtaaact

SEQ ID NO: 4263630 - DNA, 25 bp, Homo sapien
tggagaaagtacaggcggacagccg

SEQ ID NO: 4263631 - DNA, 25 bp, Homo sapien
agtacaggcggacagccgaaaattt

SEQ ID NO: 4263632 - DNA, 25 bp, Homo sapien
ataaaagatcacagaaggtgcctga

SEQ ID NO: 4263633 - DNA, 25 bp, Homo sapien
aaggtgcctgaggagatttagacct

SEQ ID NO: 4263634 - DNA, 25 bp, Homo sapien
tcaatagagagctagaatgagccac

SEQ ID NO: 4263635 - DNA, 25 bp, Homo sapien
agaacattccttaaactatcaatgg

SEQ ID NO: 4263636 - DNA, 25 bp, Homo sapien
ggaaatcaaaattcagagcagcttc

SEQ ID NO: 4263637 - DNA, 25 bp, Homo sapien
gaaagcatcagttcaatcaatggac

SEQ ID NO: 4263638 - DNA, 25 bp, Homo sapien
tttgttcctctgagtggcggttcag

SEQ ID NO: 4263639 - DNA, 25 bp, Homo sapien
gtgctctgttgaaaatcagcctcca

SEQ ID NO: 4263640 - DNA, 25 bp, Homo sapien
tccatttccaagaggagactctcct

SEQ ID NO: 4263641 - DNA, 25 bp, Homo sapien
ttcagtgaaatcagagatggctctc

SEQ ID NO: 4263642 - DNA, 25 bp, Homo sapien
tcaagattcctaacgtcttgtttct

SEQ ID NO: 4263643 - DNA, 25 bp, Homo sapien
ctaacgtcttgtttcttgcccttgg

SEQ ID NO: 4263644 - DNA, 25 bp, Homo sapien
tacatcaagattcctaacgtcttgt

SEQ ID NO: 4263645 - DNA, 25 bp, Homo sapien
gattcctaacgtcttgtttcttgcc

SEQ ID NO: 4263646 - DNA, 25 bp, Homo sapien
gaattactcctctatttgactcttc

SEQ ID NO: 4263647 - DNA, 25 bp, Homo sapien
tctccctctgaattactcctctatt

SEQ ID NO: 4263648 - DNA, 25 bp, Homo sapien
cctctgaattactcctctatttgac

SEQ ID NO: 4263649 - DNA, 25 bp, Homo sapien
agctctccctctgaattactcctct

SEQ ID NO: 4263650 - DNA, 25 bp, Homo sapien
tgagagccagaaactttaggatcat

SEQ ID NO: 4263651 - DNA, 25 bp, Homo sapien
ctgagagccagaaactttaggatca

SEQ ID NO: 4263652 - DNA, 25 bp, Homo sapien
gtcttttctcgccaatcttctcttc

SEQ ID NO: 4263653 - DNA, 25 bp, Homo sapien
ctttggcatcgcctatttctctggg

SEQ ID NO: 4263654 - DNA, 25 bp, Homo sapien
ctttcctttggcatcgcctatttct

SEQ ID NO: 4263655 - DNA, 25 bp, Homo sapien
gactccacaccttgcttgtgtcttt

SEQ ID NO: 4263656 - DNA, 25 bp, Homo sapien
acaatcctgccgaagcgtgttcacc

SEQ ID NO: 4263657 - DNA, 25 bp, Homo sapien
tgccgaagcgtgttcaccctggaaa

SEQ ID NO: 4263658 - DNA, 25 bp, Homo sapien
ggcaagagataccctgaggaggacc

SEQ ID NO: 4263659 - DNA, 25 bp, Homo sapien
cctgaggaggaccacaatcctgccg

SEQ ID NO: 4263660 - DNA, 25 bp, Homo sapien
ttgagcaaagggagactgaagtctg

SEQ ID NO: 4263661 - DNA, 25 bp, Homo sapien
ctttgagcaaagggagactgaagtc

SEQ ID NO: 4263662 - DNA, 25 bp, Homo sapien
agactgaagtctgaagatacattca

SEQ ID NO: 4263663 - DNA, 25 bp, Homo sapien
ggagactgaagtctgaagatacatt

SEQ ID NO: 4263664 - DNA, 25 bp, Homo sapien
tggaatgccaaggtcatttggcccc

SEQ ID NO: 4263665 - DNA, 25 bp, Homo sapien
taaacgttggaatgccaaggtcatt

SEQ ID NO: 4263666 - DNA, 25 bp, Homo sapien
ggtaaacgttggaatgccaaggtca

SEQ ID NO: 4263667 - DNA, 25 bp, Homo sapien
gaatgccaaggtcatttggcccctg

SEQ ID NO: 4263668 - DNA, 25 bp, Homo sapien
caatgggccacaatatcttgtctgt

SEQ ID NO: 4263669 - DNA, 25 bp, Homo sapien
tatctagactcaaaagcaatgggcc

SEQ ID NO: 4263670 - DNA, 25 bp, Homo sapien
tcaaaaccgaacctgagaaactggc

SEQ ID NO: 4263671 - DNA, 25 bp, Homo sapien
gtctgtgtaaggcactcatgcttct

SEQ ID NO: 4263672 - DNA, 25 bp, Homo sapien
cccctaaggaacattctttctctgc

SEQ ID NO: 4263673 - DNA, 25 bp, Homo sapien
tggatttgtttagtgtatcccctaa

SEQ ID NO: 4263674 - DNA, 25 bp, Homo sapien
tttatggatttgtttagtgtatccc

SEQ ID NO: 4263675 - DNA, 25 bp, Homo sapien
cctaaggaacattctttctctgcca

SEQ ID NO: 4263676 - DNA, 25 bp, Homo sapien
ccgctggcagaggtcattaggcaaa

SEQ ID NO: 4263677 - DNA, 25 bp, Homo sapien
accgctggcagaggtcattaggcaa

SEQ ID NO: 4263678 - DNA, 25 bp, Homo sapien
aaccagtgtccgatttggtcacgtt

SEQ ID NO: 4263679 - DNA, 25 bp, Homo sapien
taaccagtgtccgatttggtcacgt

SEQ ID NO: 4263680 - DNA, 25 bp, Homo sapien
ctaaccagtgtccgatttggtcacg

SEQ ID NO: 4263681 - DNA, 25 bp, Homo sapien
cttgcttattacagcctgttaaatc

SEQ ID NO: 4263682 - DNA, 25 bp, Homo sapien
ttcccacattaagcctgcatgatga

SEQ ID NO: 4263683 - DNA, 25 bp, Homo sapien
gcttattacagcctgttaaatcata

SEQ ID NO: 4263684 - DNA, 25 bp, Homo sapien
tttcccacattaagcctgcatgatg

SEQ ID NO: 4263685 - DNA, 25 bp, Homo sapien
acttcactgtctctgccttcttcat

SEQ ID NO: 4263686 - DNA, 25 bp, Homo sapien
ccaaacttcactgtctctgccttct

SEQ ID NO: 4263687 - DNA, 25 bp, Homo sapien
aacttcactgtctctgccttcttca

SEQ ID NO: 4263688 - DNA, 25 bp, Homo sapien
ccctgccaaacttcactgtctctgc

SEQ ID NO: 4263689 - DNA, 25 bp, Homo sapien
cattttgtgacttatcttgataagt

SEQ ID NO: 4263690 - DNA, 25 bp, Homo sapien
ctgccacattttgtgacttatcttg

SEQ ID NO: 4263691 - DNA, 25 bp, Homo sapien
gccacattttgtgacttatcttgat

SEQ ID NO: 4263692 - DNA, 25 bp, Homo sapien
ccacattttgtgacttatcttgata

SEQ ID NO: 4263693 - DNA, 25 bp, Homo sapien
cagtgtagacctatcagtggtgacc

SEQ ID NO: 4263694 - DNA, 25 bp, Homo sapien
tcagttgactcagcaataaggtctc

SEQ ID NO: 4263695 - DNA, 25 bp, Homo sapien
tggagtaaaaaacaaggcatgcttc

SEQ ID NO: 4263696 - DNA, 25 bp, Homo sapien
tagtcaacagtaagtggatggttcc

SEQ ID NO: 4263697 - DNA, 25 bp, Homo sapien
tatgtcaatggctgttggaagctct

SEQ ID NO: 4263698 - DNA, 25 bp, Homo sapien
tgaatgaccataggagctgataact

SEQ ID NO: 4263699 - DNA, 25 bp, Homo sapien
ggaagctcttgtcttatactagaaa

SEQ ID NO: 4263700 - DNA, 25 bp, Homo sapien
ttagttccaggcagtaagcctttac

SEQ ID NO: 4263701 - DNA, 25 bp, Homo sapien
gtagcctaaggctgagatatcagga

SEQ ID NO: 4263702 - DNA, 25 bp, Homo sapien
tgttcgctttctgggtagggtagcc

SEQ ID NO: 4263703 - DNA, 25 bp, Homo sapien
tttgttcagtataacagagttgggt

SEQ ID NO: 4263704 - DNA, 25 bp, Homo sapien
tagggtagcctaaggctgagatatc

SEQ ID NO: 4263705 - DNA, 25 bp, Homo sapien
ttgttcttagaaggacagtagtctc

SEQ ID NO: 4263706 - DNA, 25 bp, Homo sapien
ggtaaaactctggttttgatagagc

SEQ ID NO: 4263707 - DNA, 25 bp, Homo sapien
acagtagtctctgggtaaaactctg

SEQ ID NO: 4263708 - DNA, 25 bp, Homo sapien
aggacagtagtctctgggtaaaact

SEQ ID NO: 4263709 - DNA, 25 bp, Homo sapien
tatggactgcgctactaggatttca

SEQ ID NO: 4263710 - DNA, 25 bp, Homo sapien
tctctcctgatcatgtggagccctt

SEQ ID NO: 4263711 - DNA, 25 bp, Homo sapien
gcttctctcctgatcatgtggagcc

SEQ ID NO: 4263712 - DNA, 25 bp, Homo sapien
gatgaacaatgctaatttccaagtc

SEQ ID NO: 4263713 - DNA, 25 bp, Homo sapien
tcagttggtggatattagagagtga

SEQ ID NO: 4263714 - DNA, 25 bp, Homo sapien
tgtaatcagttggtggatattagag

SEQ ID NO: 4263715 - DNA, 25 bp, Homo sapien
taatcagttggtggatattagagag

SEQ ID NO: 4263716 - DNA, 25 bp, Homo sapien
aatcagttggtggatattagagagt

SEQ ID NO: 4263717 - DNA, 25 bp, Homo sapien
tattaagggcacaaaccagaagctt

SEQ ID NO: 4263718 - DNA, 25 bp, Homo sapien
ggtcacaatgggcactctgggtgta

SEQ ID NO: 4263719 - DNA, 25 bp, Homo sapien
ttgaactattaagggcacaaaccag

SEQ ID NO: 4263720 - DNA, 25 bp, Homo sapien
tgcctggacaccaggtcacaatggg

SEQ ID NO: 4263721 - DNA, 25 bp, Homo sapien
ctttaggtgtctgttctttatcaga

SEQ ID NO: 4263722 - DNA, 25 bp, Homo sapien
tttaggtgtctgttctttatcagaa

SEQ ID NO: 4263723 - DNA, 25 bp, Homo sapien
tctttaggtgtctgttctttatcag

SEQ ID NO: 4263724 - DNA, 25 bp, Homo sapien
taggtgtctgttctttatcagaatt

SEQ ID NO: 4263725 - DNA, 25 bp, Homo sapien
aagaggtaggtggagatattttcct

SEQ ID NO: 4263726 - DNA, 25 bp, Homo sapien
gaaggacatcatgcaaggaaggagc

SEQ ID NO: 4263727 - DNA, 25 bp, Homo sapien
ccatagctttgaaaggttgctttat

SEQ ID NO: 4263728 - DNA, 25 bp, Homo sapien
cttggaaggacatcatgcaaggaag

SEQ ID NO: 4263729 - DNA, 25 bp, Homo sapien
tcctaactgcccgtttagaaggaga

SEQ ID NO: 4263730 - DNA, 25 bp, Homo sapien
agccgctcaccctccgtgatgatgt

SEQ ID NO: 4263731 - DNA, 25 bp, Homo sapien
cagggacctgatcctaactctttcc

SEQ ID NO: 4263732 - DNA, 25 bp, Homo sapien
gagagaaatccgacgtctcccaggc

SEQ ID NO: 4263733 - DNA, 25 bp, Homo sapien
aagaggcccgaggaatgagcacagt

SEQ ID NO: 4263734 - DNA, 25 bp, Homo sapien
gcccgaggaatgagcacagtcttga

SEQ ID NO: 4263735 - DNA, 25 bp, Homo sapien
caggtgaaccaaagacgcttttgtt

SEQ ID NO: 4263736 - DNA, 25 bp, Homo sapien
gcacagtcttgacaggtgaaccaaa

SEQ ID NO: 4263737 - DNA, 25 bp, Homo sapien
acttggcacgattgcacttttcagc

SEQ ID NO: 4263738 - DNA, 25 bp, Homo sapien
gccccttggtggcaaggttgagacc

SEQ ID NO: 4263739 - DNA, 25 bp, Homo sapien
aaggttgagaccctaggagcagttc

SEQ ID NO: 4263740 - DNA, 25 bp, Homo sapien
tcctctcttctaagaacttggcacg

SEQ ID NO: 4263741 - DNA, 25 bp, Homo sapien
ctgtggttggagaggtgcattaagc

SEQ ID NO: 4263742 - DNA, 25 bp, Homo sapien
gtggttggagaggtgcattaagccc

SEQ ID NO: 4263743 - DNA, 25 bp, Homo sapien
cactgtggttggagaggtgcattaa

SEQ ID NO: 4263744 - DNA, 25 bp, Homo sapien
tgtggttggagaggtgcattaagcc

SEQ ID NO: 4263745 - DNA, 25 bp, Homo sapien
caggtccactgagtaaggacagtcc

SEQ ID NO: 4263746 - DNA, 25 bp, Homo sapien
tccactgagtaaggacagtcctgaa

SEQ ID NO: 4263747 - DNA, 25 bp, Homo sapien
agtaaggacagtcctgaattgtgtc

SEQ ID NO: 4263748 - DNA, 25 bp, Homo sapien
aactcaggtccactgagtaaggaca

SEQ ID NO: 4263749 - DNA, 25 bp, Homo sapien
tcctccttcaacttcggaagccatt

SEQ ID NO: 4263750 - DNA, 25 bp, Homo sapien
gaagccattcattgaaagggaccct

SEQ ID NO: 4263751 - DNA, 25 bp, Homo sapien
cattgaaagggaccctttcattgta

SEQ ID NO: 4263752 - DNA, 25 bp, Homo sapien
tcaacttcggaagccattcattgaa

SEQ ID NO: 4263753 - DNA, 25 bp, Homo sapien
atccaccagactttaacacctcatg

SEQ ID NO: 4263754 - DNA, 25 bp, Homo sapien
taacacctcatgaggcactgaaatt

SEQ ID NO: 4263755 - DNA, 25 bp, Homo sapien
gactttaacacctcatgaggcactg

SEQ ID NO: 4263756 - DNA, 25 bp, Homo sapien
ttatccaccagactttaacacctca

SEQ ID NO: 4263757 - DNA, 25 bp, Homo sapien
catagttctccgggtctcacacatc

SEQ ID NO: 4263758 - DNA, 25 bp, Homo sapien
gttctccgggtctcacacatctctc

SEQ ID NO: 4263759 - DNA, 25 bp, Homo sapien
tagttctccgggtctcacacatctc

SEQ ID NO: 4263760 - DNA, 25 bp, Homo sapien
agttctccgggtctcacacatctct

SEQ ID NO: 4263761 - DNA, 25 bp, Homo sapien
catgcacagctggttgcatcacaca

SEQ ID NO: 4263762 - DNA, 25 bp, Homo sapien
gctccatgccctcctttggttctgg

SEQ ID NO: 4263763 - DNA, 25 bp, Homo sapien
tgccctcctttggttctggttccca

SEQ ID NO: 4263764 - DNA, 25 bp, Homo sapien
ccatgcacagctggttgcatcacac

SEQ ID NO: 4263765 - DNA, 25 bp, Homo sapien
caaaagcgtatggagggtgtttgtt

SEQ ID NO: 4263766 - DNA, 25 bp, Homo sapien
tatggagggtgtttgttggctataa

SEQ ID NO: 4263767 - DNA, 25 bp, Homo sapien
ttaatcaaaagcgtatggagggtgt

SEQ ID NO: 4263768 - DNA, 25 bp, Homo sapien
gtttgttggctataatagtgcctaa

SEQ ID NO: 4263769 - DNA, 25 bp, Homo sapien
tagacactcagaattgtaacaagca

SEQ ID NO: 4263770 - DNA, 25 bp, Homo sapien
catccttactatttgggatgccaca

SEQ ID NO: 4263771 - DNA, 25 bp, Homo sapien
gtgaatgtgttgtagacactcagaa

SEQ ID NO: 4263772 - DNA, 25 bp, Homo sapien
tatttcacatcaacatccttactat

SEQ ID NO: 4263773 - DNA, 25 bp, Homo sapien
cctatagctggtgagttgggcaata

SEQ ID NO: 4263774 - DNA, 25 bp, Homo sapien
cagtagtctttcatcaggtccatgc

SEQ ID NO: 4263775 - DNA, 25 bp, Homo sapien
gtcttcctggcactagagctattaa

SEQ ID NO: 4263776 - DNA, 25 bp, Homo sapien
tatttgaagtgtatgtgaccgaggc

SEQ ID NO: 4263777 - DNA, 25 bp, Homo sapien
aggcagaggatccaaggacaagcca

SEQ ID NO: 4263778 - DNA, 25 bp, Homo sapien
agcaggacaggagttggaatcaagg

SEQ ID NO: 4263779 - DNA, 25 bp, Homo sapien
agaggatccaaggacaagccaggca

SEQ ID NO: 4263780 - DNA, 25 bp, Homo sapien
agttggaatcaaggagagggattcc

SEQ ID NO: 4263781 - DNA, 25 bp, Homo sapien
tccaactgggtttcgaagccttgag

SEQ ID NO: 4263782 - DNA, 25 bp, Homo sapien
caactgggtttcgaagccttgaggt

SEQ ID NO: 4263783 - DNA, 25 bp, Homo sapien
ttccaactgggtttcgaagccttga

SEQ ID NO: 4263784 - DNA, 25 bp, Homo sapien
ccaactgggtttcgaagccttgagg

SEQ ID NO: 4263785 - DNA, 25 bp, Homo sapien
tccaacaacccaagagatgcctctc

SEQ ID NO: 4263786 - DNA, 25 bp, Homo sapien
tgctccaacaacccaagagatgcct

SEQ ID NO: 4263787 - DNA, 25 bp, Homo sapien
gctccaacaacccaagagatgcctc

SEQ ID NO: 4263788 - DNA, 25 bp, Homo sapien
ctccaacaacccaagagatgcctct

SEQ ID NO: 4263789 - DNA, 25 bp, Homo sapien
ttttccacagtctgcagctcacagt

SEQ ID NO: 4263790 - DNA, 25 bp, Homo sapien
ttgcagctcttatgacgatgatggg

SEQ ID NO: 4263791 - DNA, 25 bp, Homo sapien
ccttgctttgatttgcagctcttat

SEQ ID NO: 4263792 - DNA, 25 bp, Homo sapien
gctttgatttgcagctcttatgacg

SEQ ID NO: 4263793 - DNA, 25 bp, Homo sapien
gttctgcctttaggctgcctcttca

SEQ ID NO: 4263794 - DNA, 25 bp, Homo sapien
tctggcttgtggcacaattgacctc

SEQ ID NO: 4263795 - DNA, 25 bp, Homo sapien
tgagcgaccctagtgatctggcttg

SEQ ID NO: 4263796 - DNA, 25 bp, Homo sapien
tgacctcgggcaagcctcatcataa

SEQ ID NO: 4263797 - DNA, 25 bp, Homo sapien
tttccctgagcgaccctagtgatct

SEQ ID NO: 4263798 - DNA, 25 bp, Homo sapien
tcacacagaagcccactcaacaata

SEQ ID NO: 4263799 - DNA, 25 bp, Homo sapien
ctcaacaatacctccaaggcagttt

SEQ ID NO: 4263800 - DNA, 25 bp, Homo sapien
agcccactcaacaatacctccaagg

SEQ ID NO: 4263801 - DNA, 25 bp, Homo sapien
cacagaagcccactcaacaatacct

SEQ ID NO: 4263802 - DNA, 25 bp, Homo sapien
gtcagcttctttacaactccagcca

SEQ ID NO: 4263803 - DNA, 25 bp, Homo sapien
ggtattctattgtcattgttatcgt

SEQ ID NO: 4263804 - DNA, 25 bp, Homo sapien
attagtcagcttctttacaactcca

SEQ ID NO: 4263805 - DNA, 25 bp, Homo sapien
caactccagccacagtatttggcat

SEQ ID NO: 4263806 - DNA, 25 bp, Homo sapien
ttctgctaagcatcctgtttgcttt

SEQ ID NO: 4263807 - DNA, 25 bp, Homo sapien
ggtgttaagatctgtcctttttcgc

SEQ ID NO: 4263808 - DNA, 25 bp, Homo sapien
cctttttcgcattctgctaagcatc

SEQ ID NO: 4263809 - DNA, 25 bp, Homo sapien
catcatcaaagtaactccaaaataa

SEQ ID NO: 4263810 - DNA, 25 bp, Homo sapien
tggatcctaaagtacaagaagcaat

SEQ ID NO: 4263811 - DNA, 25 bp, Homo sapien
caagaagcaatagcaattcgtgcac

SEQ ID NO: 4263812 - DNA, 25 bp, Homo sapien
tacggttggatcctaaagtacaaga

SEQ ID NO: 4263813 - DNA, 25 bp, Homo sapien
ttatgtacggttggatcctaaagta

SEQ ID NO: 4263814 - DNA, 25 bp, Homo sapien
tgtgtcaaaacctgtttcccacttg

SEQ ID NO: 4263815 - DNA, 25 bp, Homo sapien
tgtttcccacttgcttgtaaccatc

SEQ ID NO: 4263816 - DNA, 25 bp, Homo sapien
gtggactggctgatgatactgggtt

SEQ ID NO: 4263817 - DNA, 25 bp, Homo sapien
caaaacctgtttcccacttgcttgt

SEQ ID NO: 4263818 - DNA, 25 bp, Homo sapien
ttttagagctattaagtagaactcg

SEQ ID NO: 4263819 - DNA, 25 bp, Homo sapien
gctattaagtagaactcgataaatt

SEQ ID NO: 4263820 - DNA, 25 bp, Homo sapien
ggctaacgcatatttaataagtttg

SEQ ID NO: 4263821 - DNA, 25 bp, Homo sapien
ttttcctgcttttagagctattaag

SEQ ID NO: 4263822 - DNA, 25 bp, Homo sapien
cacttcttgagtgactcccagctaa

SEQ ID NO: 4263823 - DNA, 25 bp, Homo sapien
tctgtcataactaggtcttggttcc

SEQ ID NO: 4263824 - DNA, 25 bp, Homo sapien
tcaatccagtcttgggttcaaactg

SEQ ID NO: 4263825 - DNA, 25 bp, Homo sapien
ccagtcttgggttcaaactgactct

SEQ ID NO: 4263826 - DNA, 25 bp, Homo sapien
cctgacttgggtccggtgcttatga

SEQ ID NO: 4263827 - DNA, 25 bp, Homo sapien
tgttccaggcttgccctacgtggca

SEQ ID NO: 4263828 - DNA, 25 bp, Homo sapien
tgcactctcaacacctaaggactgc

SEQ ID NO: 4263829 - DNA, 25 bp, Homo sapien
tgcttatgacattccgctgccttgt

SEQ ID NO: 4263830 - DNA, 25 bp, Homo sapien
gaaatttgattagtctcccaaacca

SEQ ID NO: 4263831 - DNA, 25 bp, Homo sapien
tttgcaggcttaggtaaccgcagcg

SEQ ID NO: 4263832 - DNA, 25 bp, Homo sapien
gctggcatgtggaaaccatcacttg

SEQ ID NO: 4263833 - DNA, 25 bp, Homo sapien
gctctatgagtatgagctgtcagaa

SEQ ID NO: 4263834 - DNA, 25 bp, Homo sapien
agaacggccagggatttgctgccag

SEQ ID NO: 4263835 - DNA, 25 bp, Homo sapien
tgagaacggccagggatttgctgcc

SEQ ID NO: 4263836 - DNA, 25 bp, Homo sapien
gaacggccagggatttgctgccaga

SEQ ID NO: 4263837 - DNA, 25 bp, Homo sapien
gtgagaacggccagggatttgctgc

SEQ ID NO: 4263838 - DNA, 25 bp, Homo sapien
aacaggacaacataagaccttctgt

SEQ ID NO: 4263839 - DNA, 25 bp, Homo sapien
caggacaacataagaccttctgtga

SEQ ID NO: 4263840 - DNA, 25 bp, Homo sapien
acaggacaacataagaccttctgtg

SEQ ID NO: 4263841 - DNA, 25 bp, Homo sapien
tctgcaccttcatctccaatttgtt

SEQ ID NO: 4263842 - DNA, 25 bp, Homo sapien
acattgaatatatccccatctgcac

SEQ ID NO: 4263843 - DNA, 25 bp, Homo sapien
taattacattgaatatatccccatc

SEQ ID NO: 4263844 - DNA, 25 bp, Homo sapien
gtcatacaagaaattataattacat

SEQ ID NO: 4263845 - DNA, 25 bp, Homo sapien
cacacactcacgcaggagcactagt

SEQ ID NO: 4263846 - DNA, 25 bp, Homo sapien
cactagtgtgcttgggttcattgaa

SEQ ID NO: 4263847 - DNA, 25 bp, Homo sapien
tgtgcttgggttcattgaatgtgca

SEQ ID NO: 4263848 - DNA, 25 bp, Homo sapien
ccatttcagtcgcagttactctggg

SEQ ID NO: 4263849 - DNA, 25 bp, Homo sapien
tgagccagaaatgagctgtagagta

SEQ ID NO: 4263850 - DNA, 25 bp, Homo sapien
ctgagccagaaatgagctgtagagt

SEQ ID NO: 4263851 - DNA, 25 bp, Homo sapien
gagccagaaatgagctgtagagtaa

SEQ ID NO: 4263852 - DNA, 25 bp, Homo sapien
caaagtaaccacttgtcccacacag

SEQ ID NO: 4263853 - DNA, 25 bp, Homo sapien
tgaaatctttagaaaccacatagtg

SEQ ID NO: 4263854 - DNA, 25 bp, Homo sapien
tagaaaccacatagtgggaatcctt

SEQ ID NO: 4263855 - DNA, 25 bp, Homo sapien
tgcaaagagaggtttggtatgggtt

SEQ ID NO: 4263856 - DNA, 25 bp, Homo sapien
tagcctctccgtgaactttatgttg

SEQ ID NO: 4263857 - DNA, 25 bp, Homo sapien
tcgtttagcctctccgtgaacttta

SEQ ID NO: 4263858 - DNA, 25 bp, Homo sapien
cctctccgtgaactttatgttgaca

SEQ ID NO: 4263859 - DNA, 25 bp, Homo sapien
ggaagtcgtttagcctctccgtgaa

SEQ ID NO: 4263860 - DNA, 25 bp, Homo sapien
gccacatggtccttcagctctgctt

SEQ ID NO: 4263861 - DNA, 25 bp, Homo sapien
ctctctgagccacatggtccttcag

SEQ ID NO: 4263862 - DNA, 25 bp, Homo sapien
gcttctttctgtgcatctgctcctt

SEQ ID NO: 4263863 - DNA, 25 bp, Homo sapien
tctgagccacatggtccttcagctc

SEQ ID NO: 4263864 - DNA, 25 bp, Homo sapien
ctcagactcaagttggggaagtcac

SEQ ID NO: 4263865 - DNA, 25 bp, Homo sapien
actcagactcaagttggggaagtca

SEQ ID NO: 4263866 - DNA, 25 bp, Homo sapien
tcagactcaagttggggaagtcacc

SEQ ID NO: 4263867 - DNA, 25 bp, Homo sapien
ttatatgccttatatgccatggcca

SEQ ID NO: 4263868 - DNA, 25 bp, Homo sapien
ggtatcagaatctaccccaatggga

SEQ ID NO: 4263869 - DNA, 25 bp, Homo sapien
caatgcgattagcacattttcccag

SEQ ID NO: 4263870 - DNA, 25 bp, Homo sapien
ttgtgaaagtcactgtgctactggg

SEQ ID NO: 4263871 - DNA, 25 bp, Homo sapien
tgttgagttcatatggccccacaag

SEQ ID NO: 4263872 - DNA, 25 bp, Homo sapien
gagtagcctcaatgcctcaacctaa

SEQ ID NO: 4263873 - DNA, 25 bp, Homo sapien
taatctggcagagggaacactccga

SEQ ID NO: 4263874 - DNA, 25 bp, Homo sapien
caattcagtgcagggtttgctgagc

SEQ ID NO: 4263875 - DNA, 25 bp, Homo sapien
aaggacttgatatacttcccaactc

SEQ ID NO: 4263876 - DNA, 25 bp, Homo sapien
cttcccaactctttgaatcaaatgg

SEQ ID NO: 4263877 - DNA, 25 bp, Homo sapien
ttccaaggacttgatatacttccca

SEQ ID NO: 4263878 - DNA, 25 bp, Homo sapien
ccaaggacttgatatacttcccaac

SEQ ID NO: 4263879 - DNA, 25 bp, Homo sapien
tgtccctgagagaccttgcaaatct

SEQ ID NO: 4263880 - DNA, 25 bp, Homo sapien
taagaattttagagccaactttaga

SEQ ID NO: 4263881 - DNA, 25 bp, Homo sapien
tgatatgtgattgaggcagggtcta

SEQ ID NO: 4263882 - DNA, 25 bp, Homo sapien
gggtctatggagtcaataagaattt

SEQ ID NO: 4263883 - DNA, 25 bp, Homo sapien
agaaacctgggcattatttgatata

SEQ ID NO: 4263884 - DNA, 25 bp, Homo sapien
aaagtagaaacctgggcattatttg

SEQ ID NO: 4263885 - DNA, 25 bp, Homo sapien
tcttctctttgtttgtgaatatgag

SEQ ID NO: 4263886 - DNA, 25 bp, Homo sapien
catcatagatggctgtgccaactac

SEQ ID NO: 4263887 - DNA, 25 bp, Homo sapien
ccttcccctggatgcagtgcgactt

SEQ ID NO: 4263888 - DNA, 25 bp, Homo sapien
ctcattctaccctttacttctattc

SEQ ID NO: 4263889 - DNA, 25 bp, Homo sapien
cctggacacagcctaggggctccat

SEQ ID NO: 4263890 - DNA, 25 bp, Homo sapien
gatgcagtgcgacttgcgccctgcc

SEQ ID NO: 4263891 - DNA, 25 bp, Homo sapien
caatcactgagttcccaatgtcaag

SEQ ID NO: 4263892 - DNA, 25 bp, Homo sapien
ggcttcaatcactgagttcccaatg

SEQ ID NO: 4263893 - DNA, 25 bp, Homo sapien
aaataaagacaatggcttcaatcac

SEQ ID NO: 4263894 - DNA, 25 bp, Homo sapien
aataaagacaatggcttcaatcact

SEQ ID NO: 4263895 - DNA, 25 bp, Homo sapien
tctgacttacgtctttgaaaggcca

SEQ ID NO: 4263896 - DNA, 25 bp, Homo sapien
gccagagtggcagcaattgtagata

SEQ ID NO: 4263897 - DNA, 25 bp, Homo sapien
gaactgtgcaacatgactctgggaa

SEQ ID NO: 4263898 - DNA, 25 bp, Homo sapien
caagaacagcccgtgcaaaggaaag

SEQ ID NO: 4263899 - DNA, 25 bp, Homo sapien
gctggcaattatgtctagtattcct

SEQ ID NO: 4263900 - DNA, 25 bp, Homo sapien
ggcaattatgtctagtattcctatt

SEQ ID NO: 4263901 - DNA, 25 bp, Homo sapien
tcctttcaatcttgtatatagacgt

SEQ ID NO: 4263902 - DNA, 25 bp, Homo sapien
cttgtatatagacgtttccatgttt

SEQ ID NO: 4263903 - DNA, 25 bp, Homo sapien
catcttgggaccatcagggtgggaa

SEQ ID NO: 4263904 - DNA, 25 bp, Homo sapien
ccaggctcaggagtggtgaatctta

SEQ ID NO: 4263905 - DNA, 25 bp, Homo sapien
cttcagaaaggagttccggaatcca

SEQ ID NO: 4263906 - DNA, 25 bp, Homo sapien
gatatttgcctcttgcttcagaaag

SEQ ID NO: 4263907 - DNA, 25 bp, Homo sapien
cagagaaggtgcaaaggactcccag

SEQ ID NO: 4263908 - DNA, 25 bp, Homo sapien
gtgcaaaggactcccagacttgtct

SEQ ID NO: 4263909 - DNA, 25 bp, Homo sapien
agaaggtgcaaaggactcccagact

SEQ ID NO: 4263910 - DNA, 25 bp, Homo sapien
caaaggactcccagacttgtctgcc

SEQ ID NO: 4263911 - DNA, 25 bp, Homo sapien
gcattggtgcaattgctctctagtt

SEQ ID NO: 4263912 - DNA, 25 bp, Homo sapien
ctgcattggtgcaattgctctctag

SEQ ID NO: 4263913 - DNA, 25 bp, Homo sapien
ttcaggctacactccacccaggtat

SEQ ID NO: 4263914 - DNA, 25 bp, Homo sapien
tgctctctagtttcaggctacactc

SEQ ID NO: 4263915 - DNA, 25 bp, Homo sapien
gtggttcactttgcactctctttac

SEQ ID NO: 4263916 - DNA, 25 bp, Homo sapien
gggtggttcactttgcactctcttt

SEQ ID NO: 4263917 - DNA, 25 bp, Homo sapien
ttagggtggttcactttgcactctc

SEQ ID NO: 4263918 - DNA, 25 bp, Homo sapien
tagggtggttcactttgcactctct

SEQ ID NO: 4263919 - DNA, 25 bp, Homo sapien
tcaggcaggctgtatggccacaatt

SEQ ID NO: 4263920 - DNA, 25 bp, Homo sapien
cgaataattatgtttcctgactgca

SEQ ID NO: 4263921 - DNA, 25 bp, Homo sapien
tggatggagcatctggactaccagg

SEQ ID NO: 4263922 - DNA, 25 bp, Homo sapien
tagtgctgttcatgcggatgtcatc

SEQ ID NO: 4263923 - DNA, 25 bp, Homo sapien
gggattgatattgccagggacagtc

SEQ ID NO: 4263924 - DNA, 25 bp, Homo sapien
ccagggacagtcaccgccaagaaac

SEQ ID NO: 4263925 - DNA, 25 bp, Homo sapien
cagggacagtcaccgccaagaaacc

SEQ ID NO: 4263926 - DNA, 25 bp, Homo sapien
ctccagctgggggattgatattgcc

SEQ ID NO: 4263927 - DNA, 25 bp, Homo sapien
gctgagcagtccaacatcatggtgg

SEQ ID NO: 4263928 - DNA, 25 bp, Homo sapien
gagcagtccaacatcatggtggcag

SEQ ID NO: 4263929 - DNA, 25 bp, Homo sapien
tcatggtggcagcagacctggtgtc

SEQ ID NO: 4263930 - DNA, 25 bp, Homo sapien
tctgatgagggcttgcctccgggtt

SEQ ID NO: 4263931 - DNA, 25 bp, Homo sapien
ttcccctcggtggaagccagttgct

SEQ ID NO: 4263932 - DNA, 25 bp, Homo sapien
ggtggtgcggcttgtatgtggatgg

SEQ ID NO: 4263933 - DNA, 25 bp, Homo sapien
cagttcccctcggtggaagccagtt

SEQ ID NO: 4263934 - DNA, 25 bp, Homo sapien
accagttcccctcggtggaagccag

SEQ ID NO: 4263935 - DNA, 25 bp, Homo sapien
gataagaaataatccaccgcccgca

SEQ ID NO: 4263936 - DNA, 25 bp, Homo sapien
gggaatcggaactttgcttgcagca

SEQ ID NO: 4263937 - DNA, 25 bp, Homo sapien
ctattcgagatagccagcagaggga

SEQ ID NO: 4263938 - DNA, 25 bp, Homo sapien
gcgttgctgcaaaaatcgcttgcta

SEQ ID NO: 4263939 - DNA, 25 bp, Homo sapien
aatgaaaggacaggacaagccccga

SEQ ID NO: 4263940 - DNA, 25 bp, Homo sapien
gaaaggacaggacaagccccgaaca

SEQ ID NO: 4263941 - DNA, 25 bp, Homo sapien
aggacaggacaagccccgaacacca

SEQ ID NO: 4263942 - DNA, 25 bp, Homo sapien
aggacaagccccgaacaccatgtca

SEQ ID NO: 4263943 - DNA, 25 bp, Homo sapien
tcaccgggactgtcaggaatagtgg

SEQ ID NO: 4263944 - DNA, 25 bp, Homo sapien
gaagctgatctgcaaggattcggag

SEQ ID NO: 4263945 - DNA, 25 bp, Homo sapien
ctggttagagaacaaactgcctcat

SEQ ID NO: 4263946 - DNA, 25 bp, Homo sapien
cctttacgaacgctggcaattgaca

SEQ ID NO: 4263947 - DNA, 25 bp, Homo sapien
gaaagcagcaaacccggaattgtag

SEQ ID NO: 4263948 - DNA, 25 bp, Homo sapien
caggaacgtcttttgcagatgggca

SEQ ID NO: 4263949 - DNA, 25 bp, Homo sapien
tcccactggataggacgtgcaacgg

SEQ ID NO: 4263950 - DNA, 25 bp, Homo sapien
cagatgggcacggtttttagaaagc

SEQ ID NO: 4263951 - DNA, 25 bp, Homo sapien
ctgtttaggacaatttggcttcatg

SEQ ID NO: 4263952 - DNA, 25 bp, Homo sapien
gactcgtgtttaactttgttgttga

SEQ ID NO: 4263953 - DNA, 25 bp, Homo sapien
ttctctttctgactcgtgtttaact

SEQ ID NO: 4263954 - DNA, 25 bp, Homo sapien
tcatgttagcaatggaagtttctct

SEQ ID NO: 4263955 - DNA, 25 bp, Homo sapien
tagtcgtttaaactgtgaagagtct

SEQ ID NO: 4263956 - DNA, 25 bp, Homo sapien
ttaattctaattcatcccaaataat

SEQ ID NO: 4263957 - DNA, 25 bp, Homo sapien
tagtgatgaggctgtcaatagcagc

SEQ ID NO: 4263958 - DNA, 25 bp, Homo sapien
tgaacctcaaagcttttagtgatga

SEQ ID NO: 4263959 - DNA, 25 bp, Homo sapien
agttgtctggttcttacattgctat

SEQ ID NO: 4263960 - DNA, 25 bp, Homo sapien
tctgagatgaatatattggaaagtt

SEQ ID NO: 4263961 - DNA, 25 bp, Homo sapien
tttcacaatacttgtactttcctca

SEQ ID NO: 4263962 - DNA, 25 bp, Homo sapien
catatagtctgagatgaatatattg

SEQ ID NO: 4263963 - DNA, 25 bp, Homo sapien
ctagagtaaataaattagaggggag

SEQ ID NO: 4263964 - DNA, 25 bp, Homo sapien
aattagaggggagaaaaggtgtcat

SEQ ID NO: 4263965 - DNA, 25 bp, Homo sapien
tagagtaaataaattagaggggaga

SEQ ID NO: 4263966 - DNA, 25 bp, Homo sapien
tctctttcaaaacacgtggcctccg

SEQ ID NO: 4263967 - DNA, 25 bp, Homo sapien
gtggcctccgcctggatgactggct

SEQ ID NO: 4263968 - DNA, 25 bp, Homo sapien
tacgtaacctggaacggccatgtcc

SEQ ID NO: 4263969 - DNA, 25 bp, Homo sapien
catgtaattggttctctttcaaaac

SEQ ID NO: 4263970 - DNA, 25 bp, Homo sapien
tgggcaccaaagacagcttgcctgg

SEQ ID NO: 4263971 - DNA, 25 bp, Homo sapien
gggcaccaaagacagcttgcctggg

SEQ ID NO: 4263972 - DNA, 25 bp, Homo sapien
cctgggcaccaaagacagcttgcct

SEQ ID NO: 4263973 - DNA, 25 bp, Homo sapien
gcaccaaagacagcttgcctgggca

SEQ ID NO: 4263974 - DNA, 25 bp, Homo sapien
taggccccaatcctgttttcaccga

SEQ ID NO: 4263975 - DNA, 25 bp, Homo sapien
aatcctgttttcaccgacactaaat

SEQ ID NO: 4263976 - DNA, 25 bp, Homo sapien
agctctaggccccaatcctgttttc

SEQ ID NO: 4263977 - DNA, 25 bp, Homo sapien
tcaagctctaggccccaatcctgtt

SEQ ID NO: 4263978 - DNA, 25 bp, Homo sapien
aagaaatcagttgttctctcagtgt

SEQ ID NO: 4263979 - DNA, 25 bp, Homo sapien
tgttgtccaaaaatagtcggacagt

SEQ ID NO: 4263980 - DNA, 25 bp, Homo sapien
gtttcgtgtgctggtctgagcacca

SEQ ID NO: 4263981 - DNA, 25 bp, Homo sapien
aaagtgtgcctaataagaaatcagt

SEQ ID NO: 4263982 - DNA, 25 bp, Homo sapien
ttactgtggatgtttgaaagcacat

SEQ ID NO: 4263983 - DNA, 25 bp, Homo sapien
ttcttgagatctttcttaggctcct

SEQ ID NO: 4263984 - DNA, 25 bp, Homo sapien
ctttactgtggatgtttgaaagcac

SEQ ID NO: 4263985 - DNA, 25 bp, Homo sapien
tttactgtggatgtttgaaagcaca

SEQ ID NO: 4263986 - DNA, 25 bp, Homo sapien
tttgcaccccgtggagatctactcc

SEQ ID NO: 4263987 - DNA, 25 bp, Homo sapien
ctctgctccctttgcaccccgtgga

SEQ ID NO: 4263988 - DNA, 25 bp, Homo sapien
tctgcaggaatctcattagcctcca

SEQ ID NO: 4263989 - DNA, 25 bp, Homo sapien
ctgcaggaatctcattagcctccag

SEQ ID NO: 4263990 - DNA, 25 bp, Homo sapien
tgcaggtcaatcccaatacagctgc

SEQ ID NO: 4263991 - DNA, 25 bp, Homo sapien
tacagctgcacctttctactttgtg

SEQ ID NO: 4263992 - DNA, 25 bp, Homo sapien
cttgtccagggacattgatccctgg

SEQ ID NO: 4263993 - DNA, 25 bp, Homo sapien
ctacagtcgtactctctctattcct

SEQ ID NO: 4263994 - DNA, 25 bp, Homo sapien
cagcataatgagttcgtggagtcac

SEQ ID NO: 4263995 - DNA, 25 bp, Homo sapien
ttgtcgaccaattgcttcctccaca

SEQ ID NO: 4263996 - DNA, 25 bp, Homo sapien
ttattgtcgaccaattgcttcctcc

SEQ ID NO: 4263997 - DNA, 25 bp, Homo sapien
taatgagttcgtggagtcactgatg

SEQ ID NO: 4263998 - DNA, 25 bp, Homo sapien
tctaccccgatttacagtgataagt

SEQ ID NO: 4263999 - DNA, 25 bp, Homo sapien
ttcttagtaaagaagcagctttgtc

SEQ ID NO: 4264000 - DNA, 25 bp, Homo sapien
acttcaattccaaacctccgagact

SEQ ID NO: 4264001 - DNA, 25 bp, Homo sapien
cctccgagactttggcttaattaat

SEQ ID NO: 4264002 - DNA, 25 bp, Homo sapien
ttcctttgaggtcaatctctggatc

SEQ ID NO: 4264003 - DNA, 25 bp, Homo sapien
tttcctttgaggtcaatctctggat

SEQ ID NO: 4264004 - DNA, 25 bp, Homo sapien
ttatctctgtcttgtctgcagagag

SEQ ID NO: 4264005 - DNA, 25 bp, Homo sapien
tatctctgtcttgtctgcagagaga

SEQ ID NO: 4264006 - DNA, 25 bp, Homo sapien
gcaatcattcttcaacacctctgga

SEQ ID NO: 4264007 - DNA, 25 bp, Homo sapien
ccactggcattgacaagtagtagat

SEQ ID NO: 4264008 - DNA, 25 bp, Homo sapien
tccatagtatgatagtcactttcct

SEQ ID NO: 4264009 - DNA, 25 bp, Homo sapien
gggagaggtcatatgaccccctgct

SEQ ID NO: 4264010 - DNA, 25 bp, Homo sapien
tttggatagatccctgtactgttat

SEQ ID NO: 4264011 - DNA, 25 bp, Homo sapien
tttgaggtttggatagatccctgta

SEQ ID NO: 4264012 - DNA, 25 bp, Homo sapien
gttttgaggtttggatagatccctg

SEQ ID NO: 4264013 - DNA, 25 bp, Homo sapien
ttgaggtttggatagatccctgtac

SEQ ID NO: 4264014 - DNA, 25 bp, Homo sapien
ttggctgtcgaaccagattcctctt

SEQ ID NO: 4264015 - DNA, 25 bp, Homo sapien
tctgtgttggctgtcgaaccagatt

SEQ ID NO: 4264016 - DNA, 25 bp, Homo sapien
tgttggctgtcgaaccagattcctc

SEQ ID NO: 4264017 - DNA, 25 bp, Homo sapien
tgtgttggctgtcgaaccagattcc

SEQ ID NO: 4264018 - DNA, 25 bp, Homo sapien
ccttaatgtgaggaggcattgaaaa

SEQ ID NO: 4264019 - DNA, 25 bp, Homo sapien
ttgagtttctatcacaccactctgt

SEQ ID NO: 4264020 - DNA, 25 bp, Homo sapien
ccatttgagtttctatcacaccact

SEQ ID NO: 4264021 - DNA, 25 bp, Homo sapien
tctttcactgccaagttgccttaat

SEQ ID NO: 4264022 - DNA, 25 bp, Homo sapien
gaggcgtagtggacattaacactgc

SEQ ID NO: 4264023 - DNA, 25 bp, Homo sapien
gtagtggacattaacactgctttgc

SEQ ID NO: 4264024 - DNA, 25 bp, Homo sapien
gctggaggcgtagtggacattaaca

SEQ ID NO: 4264025 - DNA, 25 bp, Homo sapien
attgctgctggaggcgtagtggaca

SEQ ID NO: 4264026 - DNA, 25 bp, Homo sapien
tatgactatgcttgaaatgggtggg

SEQ ID NO: 4264027 - DNA, 25 bp, Homo sapien
tttgggtagcccagatgctgtggtt

SEQ ID NO: 4264028 - DNA, 25 bp, Homo sapien
ccctggccagtgatgaacgaataca

SEQ ID NO: 4264029 - DNA, 25 bp, Homo sapien
tgtaagcagtatgcttgcaggtgtt

SEQ ID NO: 4264030 - DNA, 25 bp, Homo sapien
taggctgcttcactggtttgtaaac

SEQ ID NO: 4264031 - DNA, 25 bp, Homo sapien
tgctttggcgatggatgctgtctca

SEQ ID NO: 4264032 - DNA, 25 bp, Homo sapien
ctgagagcttacagtagaccctgag

SEQ ID NO: 4264033 - DNA, 25 bp, Homo sapien
tggctggtgaataaggacgttctct

SEQ ID NO: 4264034 - DNA, 25 bp, Homo sapien
tgcattccgcccacatattccctca

SEQ ID NO: 4264035 - DNA, 25 bp, Homo sapien
gcattccgcccacatattccctcat

SEQ ID NO: 4264036 - DNA, 25 bp, Homo sapien
agcctgtgcattccgcccacatatt

SEQ ID NO: 4264037 - DNA, 25 bp, Homo sapien
atcagcctgtgcattccgcccacat

SEQ ID NO: 4264038 - DNA, 25 bp, Homo sapien
gctcaataaactttagccattgcta

SEQ ID NO: 4264039 - DNA, 25 bp, Homo sapien
ctgagcagctgaacaaccttgaaaa

SEQ ID NO: 4264040 - DNA, 25 bp, Homo sapien
tgcctggaatataatgtatgctcaa

SEQ ID NO: 4264041 - DNA, 25 bp, Homo sapien
cctggagttaacggaggtgaagact

SEQ ID NO: 4264042 - DNA, 25 bp, Homo sapien
gaaaatgcctcattattatctgaag

SEQ ID NO: 4264043 - DNA, 25 bp, Homo sapien
gctctttaagctacatccattggtc

SEQ ID NO: 4264044 - DNA, 25 bp, Homo sapien
tggtcttcattctacttaggagggt

SEQ ID NO: 4264045 - DNA, 25 bp, Homo sapien
tgctctttaagctacatccattgta

SEQ ID NO: 4264046 - DNA, 25 bp, Homo sapien
cttggtaaatgtccgttcagccagg

SEQ ID NO: 4264047 - DNA, 25 bp, Homo sapien
agtgcttggtaaatgtccgttcagc

SEQ ID NO: 4264048 - DNA, 25 bp, Homo sapien
ggtaaatgtccgttcagccaggacc

SEQ ID NO: 4264049 - DNA, 25 bp, Homo sapien
taaatgtccgttcagccaggaccat

SEQ ID NO: 4264050 - DNA, 25 bp, Homo sapien
actgcccttaattcatctggcggac

SEQ ID NO: 4264051 - DNA, 25 bp, Homo sapien
ggcggacaatgtatactgaatggtt

SEQ ID NO: 4264052 - DNA, 25 bp, Homo sapien
actgctccagtccaaagttgatttt

SEQ ID NO: 4264053 - DNA, 25 bp, Homo sapien
gttttatgatctcaccattggtttc

SEQ ID NO: 4264054 - DNA, 25 bp, Homo sapien
tgttccctcgtgatgtcttatctca

SEQ ID NO: 4264055 - DNA, 25 bp, Homo sapien
gcctttgttccctcgtgatgtctta

SEQ ID NO: 4264056 - DNA, 25 bp, Homo sapien
tcctagcttccagcatagatgtatc

SEQ ID NO: 4264057 - DNA, 25 bp, Homo sapien
tagatgtatccatgactgcctttgt

SEQ ID NO: 4264058 - DNA, 25 bp, Homo sapien
tgaacaaagcgagtaacagctccag

SEQ ID NO: 4264059 - DNA, 25 bp, Homo sapien
cattaagagcatcaagactgtcgtc

SEQ ID NO: 4264060 - DNA, 25 bp, Homo sapien
taagttagggacagtagtcaggcct

SEQ ID NO: 4264061 - DNA, 25 bp, Homo sapien
tagagtgtgccaaacataccagctc

SEQ ID NO: 4264062 - DNA, 25 bp, Homo sapien
tcacagtctattgagcaagaagctc

SEQ ID NO: 4264063 - DNA, 25 bp, Homo sapien
gaagctcatgagaagcaaaatggct

SEQ ID NO: 4264064 - DNA, 25 bp, Homo sapien
ggaagaaaccaacaccatggaaagc

SEQ ID NO: 4264065 - DNA, 25 bp, Homo sapien
ggaactatttaactctggcggataa

SEQ ID NO: 4264066 - DNA, 25 bp, Homo sapien
ctcagacttccttagaggtagtcgc

SEQ ID NO: 4264067 - DNA, 25 bp, Homo sapien
cctctatctcaaaagctttcttgac

SEQ ID NO: 4264068 - DNA, 25 bp, Homo sapien
gatggggattggtagtagttttctc

SEQ ID NO: 4264069 - DNA, 25 bp, Homo sapien
ttcttgacaagaatgatttgggttg

SEQ ID NO: 4264070 - DNA, 25 bp, Homo sapien
tcaccttcatagctgaatgtttagt

SEQ ID NO: 4264071 - DNA, 25 bp, Homo sapien
cctagcagttttggactagccagga

SEQ ID NO: 4264072 - DNA, 25 bp, Homo sapien
tgagcctagcagttttggactagcc

SEQ ID NO: 4264073 - DNA, 25 bp, Homo sapien
gcctagcagttttggactagccagg

SEQ ID NO: 4264074 - DNA, 25 bp, Homo sapien
gagcctagcagttttggactagcca

SEQ ID NO: 4264075 - DNA, 25 bp, Homo sapien
ttcctgttgaccgagtgacatccct

SEQ ID NO: 4264076 - DNA, 25 bp, Homo sapien
cctgttgaccgagtgacatcccttc

SEQ ID NO: 4264077 - DNA, 25 bp, Homo sapien
tcctgttgaccgagtgacatccctt

SEQ ID NO: 4264078 - DNA, 25 bp, Homo sapien
ctgttgaccgagtgacatcccttca

SEQ ID NO: 4264079 - DNA, 25 bp, Homo sapien
gacaaaggtcacgttgcagcaacat

SEQ ID NO: 4264080 - DNA, 25 bp, Homo sapien
gggacaaaggtcacgttgcagcaac

SEQ ID NO: 4264081 - DNA, 25 bp, Homo sapien
gatgcagcaatgtttctgaaggata

SEQ ID NO: 4264082 - DNA, 25 bp, Homo sapien
gcaatgtttctgaaggatatagtct

SEQ ID NO: 4264083 - DNA, 25 bp, Homo sapien
tggtattctctggatttcagtgatc

SEQ ID NO: 4264084 - DNA, 25 bp, Homo sapien
ggtattctctggatttcagtgatct

SEQ ID NO: 4264085 - DNA, 25 bp, Homo sapien
tattctctggatttcagtgatctgc

SEQ ID NO: 4264086 - DNA, 25 bp, Homo sapien
agtggtattctctggatttcagtga

SEQ ID NO: 4264087 - DNA, 25 bp, Homo sapien
tattccgatggtttctcattgagct

SEQ ID NO: 4264088 - DNA, 25 bp, Homo sapien
attccgatggtttctcattgagctt

SEQ ID NO: 4264089 - DNA, 25 bp, Homo sapien
ttattccgatggtttctcattgagc

SEQ ID NO: 4264090 - DNA, 25 bp, Homo sapien
tttctccctcatgtctaaatgttgt

SEQ ID NO: 4264091 - DNA, 25 bp, Homo sapien
ctccctcatgtctaaatgttgtcat

SEQ ID NO: 4264092 - DNA, 25 bp, Homo sapien
atttgttcatacttgaatgctattt

SEQ ID NO: 4264093 - DNA, 25 bp, Homo sapien
tttgttcatacttgaatgctatttc

SEQ ID NO: 4264094 - DNA, 25 bp, Homo sapien
attgcatctggtgactcggttatct

SEQ ID NO: 4264095 - DNA, 25 bp, Homo sapien
ggtgactcggttatctccaacaggc

SEQ ID NO: 4264096 - DNA, 25 bp, Homo sapien
tctggtgactcggttatctccaaca

SEQ ID NO: 4264097 - DNA, 25 bp, Homo sapien
actcggttatctccaacaggcccat

SEQ ID NO: 4264098 - DNA, 25 bp, Homo sapien
ttttctctttgaattctgttgcttc

SEQ ID NO: 4264099 - DNA, 25 bp, Homo sapien
atttttctctttgaattctgttgct

SEQ ID NO: 4264100 - DNA, 25 bp, Homo sapien
tatttttctctttgaattctgttgc

SEQ ID NO: 4264101 - DNA, 25 bp, Homo sapien
ttctctttgaattctgttgcttctt

SEQ ID NO: 4264102 - DNA, 25 bp, Homo sapien
ttctacttaatttgctgatccaaag

SEQ ID NO: 4264103 - DNA, 25 bp, Homo sapien
gatccaaagcgatgccagattgaca

SEQ ID NO: 4264104 - DNA, 25 bp, Homo sapien
ggagcatcctgccttttatttacaa

SEQ ID NO: 4264105 - DNA, 25 bp, Homo sapien
tcacataggagcatcctgcctttta

SEQ ID NO: 4264106 - DNA, 25 bp, Homo sapien
ttattctcattctcttctggatggt

SEQ ID NO: 4264107 - DNA, 25 bp, Homo sapien
ctcattctcttctggatggtctcca

SEQ ID NO: 4264108 - DNA, 25 bp, Homo sapien
ttctcattctcttctggatggtctc

SEQ ID NO: 4264109 - DNA, 25 bp, Homo sapien
tcttctgttggtttctttattctca

SEQ ID NO: 4264110 - DNA, 25 bp, Homo sapien
cattgccgagggtgtcttagcttag

SEQ ID NO: 4264111 - DNA, 25 bp, Homo sapien
ggaagggtacattcacggatccata

SEQ ID NO: 4264112 - DNA, 25 bp, Homo sapien
aggtttttggcctgcacgggcttca

SEQ ID NO: 4264113 - DNA, 25 bp, Homo sapien
cagggaagagcgctaccaatctaat

SEQ ID NO: 4264114 - DNA, 25 bp, Homo sapien
acttatatttttcagcctttgcaga

SEQ ID NO: 4264115 - DNA, 25 bp, Homo sapien
atatttttcagcctttgcagaatac

SEQ ID NO: 4264116 - DNA, 25 bp, Homo sapien
tatttttcagcctttgcagaataca

SEQ ID NO: 4264117 - DNA, 25 bp, Homo sapien
ttatatttttcagcctttgcagaat

SEQ ID NO: 4264118 - DNA, 25 bp, Homo sapien
agttttaaatcatcttcatgaacat

SEQ ID NO: 4264119 - DNA, 25 bp, Homo sapien
aatggcttttagttttaaatcatct

SEQ ID NO: 4264120 - DNA, 25 bp, Homo sapien
ggcttttagttttaaatcatcttca

SEQ ID NO: 4264121 - DNA, 25 bp, Homo sapien
tagttttaaatcatcttcatgaaca

SEQ ID NO: 4264122 - DNA, 25 bp, Homo sapien
agccttcacatgagtgtacattctc

SEQ ID NO: 4264123 - DNA, 25 bp, Homo sapien
ttgttgttcatgttccttttcatgt

SEQ ID NO: 4264124 - DNA, 25 bp, Homo sapien
gttgttcatgttccttttcatgttc

SEQ ID NO: 4264125 - DNA, 25 bp, Homo sapien
tcagccttcacatgagtgtacattc

SEQ ID NO: 4264126 - DNA, 25 bp, Homo sapien
tttttccacaggcagtctaggacta

SEQ ID NO: 4264127 - DNA, 25 bp, Homo sapien
gctctctgaacttgtggcatttttc

SEQ ID NO: 4264128 - DNA, 25 bp, Homo sapien
gacatatatacttcaacatctgctc

SEQ ID NO: 4264129 - DNA, 25 bp, Homo sapien
tccagttttactgtagacagcctca

SEQ ID NO: 4264130 - DNA, 25 bp, Homo sapien
taggctaaatattctgatcttaatt

SEQ ID NO: 4264131 - DNA, 25 bp, Homo sapien
aataggctaaatattctgatcttaa

SEQ ID NO: 4264132 - DNA, 25 bp, Homo sapien
ataggctaaatattctgatcttaat

SEQ ID NO: 4264133 - DNA, 25 bp, Homo sapien
aggctaaatattctgatcttaattc

SEQ ID NO: 4264134 - DNA, 25 bp, Homo sapien
aagtcagcattaatgcctatgtggc

SEQ ID NO: 4264135 - DNA, 25 bp, Homo sapien
ctggcagctgggtgaatcaggaaga

SEQ ID NO: 4264136 - DNA, 25 bp, Homo sapien
tggcagctgggtgaatcaggaagac

SEQ ID NO: 4264137 - DNA, 25 bp, Homo sapien
atcaggaagacttctaacgttagtt

SEQ ID NO: 4264138 - DNA, 25 bp, Homo sapien
ttgcttcttgatccttggtatttga

SEQ ID NO: 4264139 - DNA, 25 bp, Homo sapien
taaagcaatagttgaatcaagttgc

SEQ ID NO: 4264140 - DNA, 25 bp, Homo sapien
tgacaggaacacttacgcagtgaac

SEQ ID NO: 4264141 - DNA, 25 bp, Homo sapien
tacgcagtgaacacttggatttgct

SEQ ID NO: 4264142 - DNA, 25 bp, Homo sapien
tgtcagaggtaaaagcatagagcct

SEQ ID NO: 4264143 - DNA, 25 bp, Homo sapien
gaaaaaccaatctcaatgtcagagg

SEQ ID NO: 4264144 - DNA, 25 bp, Homo sapien
caaatcgttttgttcagggtatact

SEQ ID NO: 4264145 - DNA, 25 bp, Homo sapien
gagcctattctctagtgacaaatcg

SEQ ID NO: 4264146 - DNA, 25 bp, Homo sapien
tatctggtgccaaagaggcctgctg

SEQ ID NO: 4264147 - DNA, 25 bp, Homo sapien
tcatctggaggatcggtcaacgaca

SEQ ID NO: 4264148 - DNA, 25 bp, Homo sapien
tctgtaattatctggtgccaaagag

SEQ ID NO: 4264149 - DNA, 25 bp, Homo sapien
ggatcggtcaacgacactgtctgtg

SEQ ID NO: 4264150 - DNA, 25 bp, Homo sapien
cttactttgcctagtcagaggcact

SEQ ID NO: 4264151 - DNA, 25 bp, Homo sapien
gaggtaaggcatcttactttgccta

SEQ ID NO: 4264152 - DNA, 25 bp, Homo sapien
cttggatgtttgcttctggagcgcc

SEQ ID NO: 4264153 - DNA, 25 bp, Homo sapien
gagcgcctgtcttgaggtaaggcat

SEQ ID NO: 4264154 - DNA, 25 bp, Homo sapien
gaaatttaggtatctgtatttcaga

SEQ ID NO: 4264155 - DNA, 25 bp, Homo sapien
aatatgaattagcagtcacattcca

SEQ ID NO: 4264156 - DNA, 25 bp, Homo sapien
tgtatttcagaaagtgccatgtgga

SEQ ID NO: 4264157 - DNA, 25 bp, Homo sapien
attagcagtcacattccaattctga

SEQ ID NO: 4264158 - DNA, 25 bp, Homo sapien
ggatcagagcgtaaatcatccagag

SEQ ID NO: 4264159 - DNA, 25 bp, Homo sapien
cttgcctgcgagggtaaggatcaga

SEQ ID NO: 4264160 - DNA, 25 bp, Homo sapien
cgagggtaaggatcagagcgtaaat

SEQ ID NO: 4264161 - DNA, 25 bp, Homo sapien
gagcgtaaatcatccagagtctgga

SEQ ID NO: 4264162 - DNA, 25 bp, Homo sapien
tttggtaaacaagcattcaggcgcc

SEQ ID NO: 4264163 - DNA, 25 bp, Homo sapien
tagcatgcgaatgagtctgcccaca

SEQ ID NO: 4264164 - DNA, 25 bp, Homo sapien
gaaagctaaccacagatgccacatg

SEQ ID NO: 4264165 - DNA, 25 bp, Homo sapien
gaccttccaggtttgctagttgtag

SEQ ID NO: 4264166 - DNA, 25 bp, Homo sapien
tccacctgtactggctcagctacca

SEQ ID NO: 4264167 - DNA, 25 bp, Homo sapien
acctgcaagagtcatctccagatcc

SEQ ID NO: 4264168 - DNA, 25 bp, Homo sapien
catcctggggcacgcctggaagccc

SEQ ID NO: 4264169 - DNA, 25 bp, Homo sapien
cttcacagttccatgacctgcaaga

SEQ ID NO: 4264170 - DNA, 25 bp, Homo sapien
ttctttctccctaacacactctgaa

SEQ ID NO: 4264171 - DNA, 25 bp, Homo sapien
tttctccctaacacactctgaaggg

SEQ ID NO: 4264172 - DNA, 25 bp, Homo sapien
ctttctccctaacacactctgaagg

SEQ ID NO: 4264173 - DNA, 25 bp, Homo sapien
tctccctaacacactctgaagggac

SEQ ID NO: 4264174 - DNA, 25 bp, Homo sapien
tgtccatgtcgtaatctccagaacg

SEQ ID NO: 4264175 - DNA, 25 bp, Homo sapien
ccagaaggaacagggccctactgat

SEQ ID NO: 4264176 - DNA, 25 bp, Homo sapien
tccagaacgtgtgaatatcttgcct

SEQ ID NO: 4264177 - DNA, 25 bp, Homo sapien
ggaagtatatgcttgcctaaagcct

SEQ ID NO: 4264178 - DNA, 25 bp, Homo sapien
tcgagccacggacgttgaccagggt

SEQ ID NO: 4264179 - DNA, 25 bp, Homo sapien
gttgaaaatgaactgtatctgctat

SEQ ID NO: 4264180 - DNA, 25 bp, Homo sapien
tacaaaaaatgtatcgagccacgga

SEQ ID NO: 4264181 - DNA, 25 bp, Homo sapien
cattagttgaaaatgaactgtatct

SEQ ID NO: 4264182 - DNA, 25 bp, Homo sapien
tcaaaggcagcctatgtgaggtttc

SEQ ID NO: 4264183 - DNA, 25 bp, Homo sapien
atgtgaggtttcacacagcagtcag

SEQ ID NO: 4264184 - DNA, 25 bp, Homo sapien
cctatgtgaggtttcacacagcagt

SEQ ID NO: 4264185 - DNA, 25 bp, Homo sapien
aaaggcagcctatgtgaggtttcac

SEQ ID NO: 4264186 - DNA, 25 bp, Homo sapien
ggacagtcaggcatagatgcattta

SEQ ID NO: 4264187 - DNA, 25 bp, Homo sapien
caatccagaggtctctattttgtct

SEQ ID NO: 4264188 - DNA, 25 bp, Homo sapien
aactatgccatttagcggccacgtg

SEQ ID NO: 4264189 - DNA, 25 bp, Homo sapien
tataattcacatttagcgtcaatcc

SEQ ID NO: 4264190 - DNA, 25 bp, Homo sapien
caaagaactgggacagactggcaac

SEQ ID NO: 4264191 - DNA, 25 bp, Homo sapien
gaaggcttctagcaagagattagac

SEQ ID NO: 4264192 - DNA, 25 bp, Homo sapien
taaagatacgaggtaggcagacgtg

SEQ ID NO: 4264193 - DNA, 25 bp, Homo sapien
ggcagacgtgaagatttgcaaagaa

SEQ ID NO: 4264194 - DNA, 25 bp, Homo sapien
gacaaagcatgggggtacaaagaca

SEQ ID NO: 4264195 - DNA, 25 bp, Homo sapien
aggacaaagcatgggggtacaaaga

SEQ ID NO: 4264196 - DNA, 25 bp, Homo sapien
acaaagcatgggggtacaaagacaa

SEQ ID NO: 4264197 - DNA, 25 bp, Homo sapien
agaggacaaagcatgggggtacaaa

SEQ ID NO: 4264198 - DNA, 25 bp, Homo sapien
ctctgtttgattaggaacagctaga

SEQ ID NO: 4264199 - DNA, 25 bp, Homo sapien
tctgtttgattaggaacagctagac

SEQ ID NO: 4264200 - DNA, 25 bp, Homo sapien
tcccttgagttgcacctttctcctc

SEQ ID NO: 4264201 - DNA, 25 bp, Homo sapien
catcccttgagttgcacctttctcc

SEQ ID NO: 4264202 - DNA, 25 bp, Homo sapien
atcccttgagttgcacctttctcct

SEQ ID NO: 4264203 - DNA, 25 bp, Homo sapien
tttgcctgagctggccttgacctct

SEQ ID NO: 4264204 - DNA, 25 bp, Homo sapien
tggaatgagagtggccacagttgac

SEQ ID NO: 4264205 - DNA, 25 bp, Homo sapien
ttgacaatggagctatttccacagc

SEQ ID NO: 4264206 - DNA, 25 bp, Homo sapien
ttcttgctgttggatgtggtcttca

SEQ ID NO: 4264207 - DNA, 25 bp, Homo sapien
gagtgggcagtccatcacagataaa

SEQ ID NO: 4264208 - DNA, 25 bp, Homo sapien
cctgttacatgaccaaagggtacca

SEQ ID NO: 4264209 - DNA, 25 bp, Homo sapien
gctctggtaaggaaatggttgccat

SEQ ID NO: 4264210 - DNA, 25 bp, Homo sapien
cactctgctctggtaaggaaatggt

SEQ ID NO: 4264211 - DNA, 25 bp, Homo sapien
gaccaaagggtaccactgtcactgc

SEQ ID NO: 4264212 - DNA, 25 bp, Homo sapien
ccctgagtactgtgtgctgctttgc

SEQ ID NO: 4264213 - DNA, 25 bp, Homo sapien
cctggtcttgtctaaaagccgaaca

SEQ ID NO: 4264214 - DNA, 25 bp, Homo sapien
gaacactacacagggtaagcctggg

SEQ ID NO: 4264215 - DNA, 25 bp, Homo sapien
ggatggctggagatatgactaccct

SEQ ID NO: 4264216 - DNA, 25 bp, Homo sapien
ttccaaacacgagtcttcccattta

SEQ ID NO: 4264217 - DNA, 25 bp, Homo sapien
taagttccaaacacgagtcttccca

SEQ ID NO: 4264218 - DNA, 25 bp, Homo sapien
ctttatgagaagatcagtaccacat

SEQ ID NO: 4264219 - DNA, 25 bp, Homo sapien
attttatccgatcttcaaatgtttg

SEQ ID NO: 4264220 - DNA, 25 bp, Homo sapien
tgcattccactggacccgtgaaaca

SEQ ID NO: 4264221 - DNA, 25 bp, Homo sapien
gcattccactggacccgtgaaacag

SEQ ID NO: 4264222 - DNA, 25 bp, Homo sapien
ttcaggcccataccactcatgggct

SEQ ID NO: 4264223 - DNA, 25 bp, Homo sapien
ggaatttcaggcccataccactcat

SEQ ID NO: 4264224 - DNA, 25 bp, Homo sapien
cataccactcatgggctcctctctc

SEQ ID NO: 4264225 - DNA, 25 bp, Homo sapien
tacatctctgtggtttaaatgcctt

SEQ ID NO: 4264226 - DNA, 25 bp, Homo sapien
tgcctcctctcttggactcacttct

SEQ ID NO: 4264227 - DNA, 25 bp, Homo sapien
tccccgctttataactgcctcctct

SEQ ID NO: 4264228 - DNA, 25 bp, Homo sapien
ccccgctttataactgcctcctctc

SEQ ID NO: 4264229 - DNA, 25 bp, Homo sapien
ctgcctcctctcttggactcacttc

SEQ ID NO: 4264230 - DNA, 25 bp, Homo sapien
gaaagaattgaaatactgtgccggc

SEQ ID NO: 4264231 - DNA, 25 bp, Homo sapien
tctcgaggcaagctgtcaacgtctt

SEQ ID NO: 4264232 - DNA, 25 bp, Homo sapien
tgttgataaaccatggcaactgcaa

SEQ ID NO: 4264233 - DNA, 25 bp, Homo sapien
ttaaggacgtcaaaggctctcgagg

SEQ ID NO: 4264234 - DNA, 25 bp, Homo sapien
tctgtgaaatggtgagtggtctcct

SEQ ID NO: 4264235 - DNA, 25 bp, Homo sapien
tgtatattggtgttgccgaaagaac

SEQ ID NO: 4264236 - DNA, 25 bp, Homo sapien
tgatggccactagtaaaccaagatg

SEQ ID NO: 4264237 - DNA, 25 bp, Homo sapien
gctaaagacactttctggacctggt

SEQ ID NO: 4264238 - DNA, 25 bp, Homo sapien
cagtggcctaaaacccctattaatg

SEQ ID NO: 4264239 - DNA, 25 bp, Homo sapien
aaaattttgagcttactgggactga

SEQ ID NO: 4264240 - DNA, 25 bp, Homo sapien
gaagtttcaataggctgtctagaca

SEQ ID NO: 4264241 - DNA, 25 bp, Homo sapien
taaagcttaaacctgtcatagaacc

SEQ ID NO: 4264242 - DNA, 25 bp, Homo sapien
gtgatgggtggatttgacagctgtt

SEQ ID NO: 4264243 - DNA, 25 bp, Homo sapien
tgtaactaaaataggcaagctttgg

SEQ ID NO: 4264244 - DNA, 25 bp, Homo sapien
tcacttaatatttgtgttgatcatc

SEQ ID NO: 4264245 - DNA, 25 bp, Homo sapien
caaaggcaacagaggcgaggatgtg

SEQ ID NO: 4264246 - DNA, 25 bp, Homo sapien
tgccctttagcacaatgggggacaa

SEQ ID NO: 4264247 - DNA, 25 bp, Homo sapien
atggcacccgaagctgagcacagcc

SEQ ID NO: 4264248 - DNA, 25 bp, Homo sapien
caatgggggacaaattgcctagaga

SEQ ID NO: 4264249 - DNA, 25 bp, Homo sapien
gcagtgagttgggtctgccaggtct

SEQ ID NO: 4264250 - DNA, 25 bp, Homo sapien
acccttggcagtttgattatttggt

SEQ ID NO: 4264251 - DNA, 25 bp, Homo sapien
tggcagtttgattatttggtgccct

SEQ ID NO: 4264252 - DNA, 25 bp, Homo sapien
catttatatataaaggccatgaggg

SEQ ID NO: 4264253 - DNA, 25 bp, Homo sapien
taagcatttatatataaaggccatg

SEQ ID NO: 4264254 - DNA, 25 bp, Homo sapien
ccacgagctgttgtggtgatcttgt

SEQ ID NO: 4264255 - DNA, 25 bp, Homo sapien
gttaataggagctcccgctatgcca

SEQ ID NO: 4264256 - DNA, 25 bp, Homo sapien
cagttaataggagctcccgctatgc

SEQ ID NO: 4264257 - DNA, 25 bp, Homo sapien
tcaacagttaataggagctcccgct

SEQ ID NO: 4264258 - DNA, 25 bp, Homo sapien
aggttccttgtgcactcaatcccca

SEQ ID NO: 4264259 - DNA, 25 bp, Homo sapien
ctgagtaggttccttgtgcactcaa

SEQ ID NO: 4264260 - DNA, 25 bp, Homo sapien
tcaatccccacttcaaccagatcat

SEQ ID NO: 4264261 - DNA, 25 bp, Homo sapien
tcaaccagatcatcaaagtattctt

SEQ ID NO: 4264262 - DNA, 25 bp, Homo sapien
gatttctgctgtcgccatttattca

SEQ ID NO: 4264263 - DNA, 25 bp, Homo sapien
taccttaacttgatagagggcatct

SEQ ID NO: 4264264 - DNA, 25 bp, Homo sapien
tctcagcaagttagggatagaagag

SEQ ID NO: 4264265 - DNA, 25 bp, Homo sapien
catatttagtagtgacagactggct

SEQ ID NO: 4264266 - DNA, 25 bp, Homo sapien
aatcaacccaactagtgcacaggcc

SEQ ID NO: 4264267 - DNA, 25 bp, Homo sapien
catctggagataattgtgtgatatc

SEQ ID NO: 4264268 - DNA, 25 bp, Homo sapien
catttctaatgttggttggcagctc

SEQ ID NO: 4264269 - DNA, 25 bp, Homo sapien
ggtgctggatgaacctgcttcattt

SEQ ID NO: 4264270 - DNA, 25 bp, Homo sapien
gctgctttgagttgtggatgtccaa

SEQ ID NO: 4264271 - DNA, 25 bp, Homo sapien
tgccccagtagcattaggacagcca

SEQ ID NO: 4264272 - DNA, 25 bp, Homo sapien
gatgtccaaaacgaaggcacctcat

SEQ ID NO: 4264273 - DNA, 25 bp, Homo sapien
cctgcctgcattaccaatttgttga

SEQ ID NO: 4264274 - DNA, 25 bp, Homo sapien
catgaagtagagaacctgtggaact

SEQ ID NO: 4264275 - DNA, 25 bp, Homo sapien
gcaagttctgccaatggaccgctca

SEQ ID NO: 4264276 - DNA, 25 bp, Homo sapien
gaggaccagtgacccaagtccctga

SEQ ID NO: 4264277 - DNA, 25 bp, Homo sapien
tcagcagtcctcgaggagctgagca

SEQ ID NO: 4264278 - DNA, 25 bp, Homo sapien
gggcagcctctatatggctgagatc

SEQ ID NO: 4264279 - DNA, 25 bp, Homo sapien
tatatggctgagatcaaattttcca

SEQ ID NO: 4264280 - DNA, 25 bp, Homo sapien
ggtgtctggtttatgctgctggtta

SEQ ID NO: 4264281 - DNA, 25 bp, Homo sapien
tctggtgtctggtttatgctgctgg

SEQ ID NO: 4264282 - DNA, 25 bp, Homo sapien
tcagaaattgatctctctccccttt

SEQ ID NO: 4264283 - DNA, 25 bp, Homo sapien
tgccacttggcggtgtttaagggaa

SEQ ID NO: 4264284 - DNA, 25 bp, Homo sapien
tgatttcagaaattgatctctctcc

SEQ ID NO: 4264285 - DNA, 25 bp, Homo sapien
ctgccacttggcggtgtttaaggga

SEQ ID NO: 4264286 - DNA, 25 bp, Homo sapien
gagtctgctgccagcggccttgttg

SEQ ID NO: 4264287 - DNA, 25 bp, Homo sapien
atttgagtctgctgccagcggcctt

SEQ ID NO: 4264288 - DNA, 25 bp, Homo sapien
gctgccagcggccttgttgtggcct

SEQ ID NO: 4264289 - DNA, 25 bp, Homo sapien
cggccttgttgtggcctgttatcac

SEQ ID NO: 4264290 - DNA, 25 bp, Homo sapien
tgcatgaggacagtctctcggggtt

SEQ ID NO: 4264291 - DNA, 25 bp, Homo sapien
ctgcatgaggacagtctctcggggt

SEQ ID NO: 4264292 - DNA, 25 bp, Homo sapien
gagagagagtctatacgaggacaaa

SEQ ID NO: 4264293 - DNA, 25 bp, Homo sapien
tctatacgaggacaaaatggactcc

SEQ ID NO: 4264294 - DNA, 25 bp, Homo sapien
agtcactactgggtgagaagcctct

SEQ ID NO: 4264295 - DNA, 25 bp, Homo sapien
ctctgagtcactactgggtgagaag

SEQ ID NO: 4264296 - DNA, 25 bp, Homo sapien
tggaccattgtgtcacctgccacca

SEQ ID NO: 4264297 - DNA, 25 bp, Homo sapien
cctccttcacatccactattttggg

SEQ ID NO: 4264298 - DNA, 25 bp, Homo sapien
taggaagttggaagtactgcaagat

SEQ ID NO: 4264299 - DNA, 25 bp, Homo sapien
catccactattttgggccacggcat

SEQ ID NO: 4264300 - DNA, 25 bp, Homo sapien
catctgagggtgttcacacttgcag

SEQ ID NO: 4264301 - DNA, 25 bp, Homo sapien
agggtgttcacacttgcagcagatt

SEQ ID NO: 4264302 - DNA, 25 bp, Homo sapien
ccagcagtttcaatgccatccttct

SEQ ID NO: 4264303 - DNA, 25 bp, Homo sapien
caaaaacatctgagggtgttcacac

SEQ ID NO: 4264304 - DNA, 25 bp, Homo sapien
aatttgtctaatatttgtgcagcca

SEQ ID NO: 4264305 - DNA, 25 bp, Homo sapien
atttgtgcagccatctaatgcccaa

SEQ ID NO: 4264306 - DNA, 25 bp, Homo sapien
ttgtgcagccatctaatgcccaaat

SEQ ID NO: 4264307 - DNA, 25 bp, Homo sapien
atggaaatttgtctaatatttgtgc

SEQ ID NO: 4264308 - DNA, 25 bp, Homo sapien
ataagatgctcctctagtggaggaa

SEQ ID NO: 4264309 - DNA, 25 bp, Homo sapien
ctcctctagtggaggaagacgttca

SEQ ID NO: 4264310 - DNA, 25 bp, Homo sapien
tctagtggaggaagacgttcaggct

SEQ ID NO: 4264311 - DNA, 25 bp, Homo sapien
gatgctcctctagtggaggaagacg

SEQ ID NO: 4264312 - DNA, 25 bp, Homo sapien
tgggtccataaggaatatagtacat

SEQ ID NO: 4264313 - DNA, 25 bp, Homo sapien
aatatagtacatttccttcttatca

SEQ ID NO: 4264314 - DNA, 25 bp, Homo sapien
ggtccataaggaatatagtacattt

SEQ ID NO: 4264315 - DNA, 25 bp, Homo sapien
atatagtacatttccttcttatcat

SEQ ID NO: 4264316 - DNA, 25 bp, Homo sapien
aagggcagaaggcagttacatcgaa

SEQ ID NO: 4264317 - DNA, 25 bp, Homo sapien
gcagttacatcgaagcaacactgaa

SEQ ID NO: 4264318 - DNA, 25 bp, Homo sapien
aatgctgcgctttttcctcgtgatt

SEQ ID NO: 4264319 - DNA, 25 bp, Homo sapien
tcctcgtgatttgtggtgctctaca

SEQ ID NO: 4264320 - DNA, 25 bp, Homo sapien
gactcctctggtgtattccctgctg

SEQ ID NO: 4264321 - DNA, 25 bp, Homo sapien
ccctgctgtggatattactgtctga

SEQ ID NO: 4264322 - DNA, 25 bp, Homo sapien
tgacttgaaatgcactctcagccat

SEQ ID NO: 4264323 - DNA, 25 bp, Homo sapien
tcttccctgccagtaaaggtgtgaa

SEQ ID NO: 4264324 - DNA, 25 bp, Homo sapien
taagaaacttaacaggcaggcatac

SEQ ID NO: 4264325 - DNA, 25 bp, Homo sapien
gcaggcatactacttaaaccagccc

SEQ ID NO: 4264326 - DNA, 25 bp, Homo sapien
taactaggatgctacagtgggagca

SEQ ID NO: 4264327 - DNA, 25 bp, Homo sapien
tttttaggcatacaactgggctcca

SEQ ID NO: 4264328 - DNA, 25 bp, Homo sapien
tcttatggcatagaaacaagctggg

SEQ ID NO: 4264329 - DNA, 25 bp, Homo sapien
gacaaatcttttgcaagtcacctga

SEQ ID NO: 4264330 - DNA, 25 bp, Homo sapien
gctctgttaaggcaccacagtgtaa

SEQ ID NO: 4264331 - DNA, 25 bp, Homo sapien
gggccccagtgataaagatcatgga

SEQ ID NO: 4264332 - DNA, 25 bp, Homo sapien
ttgataaacagtgacttactcctgc

SEQ ID NO: 4264333 - DNA, 25 bp, Homo sapien
gtctcatcttatagttttgtcttaa

SEQ ID NO: 4264334 - DNA, 25 bp, Homo sapien
tgtgtctctatagggtaagtgtgtt

SEQ ID NO: 4264335 - DNA, 25 bp, Homo sapien
cagtgacttactcctgccaattttt

SEQ ID NO: 4264336 - DNA, 25 bp, Homo sapien
gagaaggataagttcccttatattc

SEQ ID NO: 4264337 - DNA, 25 bp, Homo sapien
tgttacaggtaataatctgctcctc

SEQ ID NO: 4264338 - DNA, 25 bp, Homo sapien
ttttacccttatgcaaaaatggaga

SEQ ID NO: 4264339 - DNA, 25 bp, Homo sapien
tttacagtcttcatcccgttttgga

SEQ ID NO: 4264340 - DNA, 25 bp, Homo sapien
tctgttccgtttgtctactagtctc

SEQ ID NO: 4264341 - DNA, 25 bp, Homo sapien
caaagattaattgacctaacgtgca

SEQ ID NO: 4264342 - DNA, 25 bp, Homo sapien
tcatcagggtagtgcaaaagaaaca

SEQ ID NO: 4264343 - DNA, 25 bp, Homo sapien
ccaggtttatgaaaaggtgcttgcc

SEQ ID NO: 4264344 - DNA, 25 bp, Homo sapien
caggcttaggatcttcagtacttga

SEQ ID NO: 4264345 - DNA, 25 bp, Homo sapien
gatcttcagtacttgagcatcttca

SEQ ID NO: 4264346 - DNA, 25 bp, Homo sapien
catggctatgtcaagagagggcagc

SEQ ID NO: 4264347 - DNA, 25 bp, Homo sapien
atcttcacatggctatgtcaagaga

SEQ ID NO: 4264348 - DNA, 25 bp, Homo sapien
aacttgattggcctctgggaaacca

SEQ ID NO: 4264349 - DNA, 25 bp, Homo sapien
gagataaatctggtcaacaacttga

SEQ ID NO: 4264350 - DNA, 25 bp, Homo sapien
aagccattcaaaccgcagacattca

SEQ ID NO: 4264351 - DNA, 25 bp, Homo sapien
tcagcattaactgctacagagataa

SEQ ID NO: 4264352 - DNA, 25 bp, Homo sapien
tgctcttctactgccagtacctctc

SEQ ID NO: 4264353 - DNA, 25 bp, Homo sapien
ctccttcctctcagtccttgattcc

SEQ ID NO: 4264354 - DNA, 25 bp, Homo sapien
tagccactgttgaaacatagctcat

SEQ ID NO: 4264355 - DNA, 25 bp, Homo sapien
cctgattccattagccactgttgaa

SEQ ID NO: 4264356 - DNA, 25 bp, Homo sapien
gactgactcttgtgaaagtttttaa

SEQ ID NO: 4264357 - DNA, 25 bp, Homo sapien
gcggaaggtgttaatgactgactct

SEQ ID NO: 4264358 - DNA, 25 bp, Homo sapien
gagaggtgagcctaaggcctcttgc

SEQ ID NO: 4264359 - DNA, 25 bp, Homo sapien
ttaggacctttataattccactgga

SEQ ID NO: 4264360 - DNA, 25 bp, Homo sapien
tcagttcacttgaatgctggtgcct

SEQ ID NO: 4264361 - DNA, 25 bp, Homo sapien
taaaactgcaccctcagttcacttg

SEQ ID NO: 4264362 - DNA, 25 bp, Homo sapien
aagaaacacacgaagtgtatatggg

SEQ ID NO: 4264363 - DNA, 25 bp, Homo sapien
catccgaataaggaagccaagaaac

SEQ ID NO: 4264364 - DNA, 25 bp, Homo sapien
taaattcaggaagaacgggtgccca

SEQ ID NO: 4264365 - DNA, 25 bp, Homo sapien
attcaggaagaacgggtgcccaaag

SEQ ID NO: 4264366 - DNA, 25 bp, Homo sapien
tgggtccctgctctaagtctttgca

SEQ ID NO: 4264367 - DNA, 25 bp, Homo sapien
cttgggtccctgctctaagtctttg

SEQ ID NO: 4264368 - DNA, 25 bp, Homo sapien
ttgggtccctgctctaagtctttgc

SEQ ID NO: 4264369 - DNA, 25 bp, Homo sapien
cccttgggtccctgctctaagtctt

SEQ ID NO: 4264370 - DNA, 25 bp, Homo sapien
tggagcacaattctttggataggat

SEQ ID NO: 4264371 - DNA, 25 bp, Homo sapien
gagcacaattctttggataggatat

SEQ ID NO: 4264372 - DNA, 25 bp, Homo sapien
tcttggagcacaattctttggatag

SEQ ID NO: 4264373 - DNA, 25 bp, Homo sapien
ttctttggataggatatttgccaat

SEQ ID NO: 4264374 - DNA, 25 bp, Homo sapien
tcagtgagatccattccagaagaca

SEQ ID NO: 4264375 - DNA, 25 bp, Homo sapien
tattcaagtatggactgggaacagg

SEQ ID NO: 4264376 - DNA, 25 bp, Homo sapien
tgtggaggtaccagaacagaccttt

SEQ ID NO: 4264377 - DNA, 25 bp, Homo sapien
gcagagactggatttcaggtcccac

SEQ ID NO: 4264378 - DNA, 25 bp, Homo sapien
ttaaagggtgtgcaggcccttgtga

SEQ ID NO: 4264379 - DNA, 25 bp, Homo sapien
ctggattaaagggtgtgcaggccct

SEQ ID NO: 4264380 - DNA, 25 bp, Homo sapien
cccttgtgagttagggctggctagg

SEQ ID NO: 4264381 - DNA, 25 bp, Homo sapien
aattttgctggattaaagggtgtgc

SEQ ID NO: 4264382 - DNA, 25 bp, Homo sapien
ttgaagaatgtttcagaagctgaga

SEQ ID NO: 4264383 - DNA, 25 bp, Homo sapien
agaatgtttcagaagctgagataag

SEQ ID NO: 4264384 - DNA, 25 bp, Homo sapien
gaagaatgtttcagaagctgagata

SEQ ID NO: 4264385 - DNA, 25 bp, Homo sapien
gaatgtttcagaagctgagataaga

SEQ ID NO: 4264386 - DNA, 25 bp, Homo sapien
acaagtttttggcatacctctagaa

SEQ ID NO: 4264387 - DNA, 25 bp, Homo sapien
tagcagaaacttacaagtttttggc

SEQ ID NO: 4264388 - DNA, 25 bp, Homo sapien
tcttctcattggctagcagaaactt

SEQ ID NO: 4264389 - DNA, 25 bp, Homo sapien
ctctagaaaatatgcgtgacttcat

SEQ ID NO: 4264390 - DNA, 25 bp, Homo sapien
ctgcaccatggtagggtagaaaaca

SEQ ID NO: 4264391 - DNA, 25 bp, Homo sapien
cccttccttgggatgacgaggcagc

SEQ ID NO: 4264392 - DNA, 25 bp, Homo sapien
tcagctgcaccatggtagggtagaa

SEQ ID NO: 4264393 - DNA, 25 bp, Homo sapien
ctggcccttccttgggatgacgagg

SEQ ID NO: 4264394 - DNA, 25 bp, Homo sapien
gaaagcgctcttcaggtaccctgct

SEQ ID NO: 4264395 - DNA, 25 bp, Homo sapien
agaaagcgctcttcaggtaccctgc

SEQ ID NO: 4264396 - DNA, 25 bp, Homo sapien
ggaagccaagaaggtcagcattggc

SEQ ID NO: 4264397 - DNA, 25 bp, Homo sapien
gttcaaaattgggttgcatggctgc

SEQ ID NO: 4264398 - DNA, 25 bp, Homo sapien
tttgttcaaaattgggttgcatggc

SEQ ID NO: 4264399 - DNA, 25 bp, Homo sapien
ggctgctcttggctacaagggaagc

SEQ ID NO: 4264400 - DNA, 25 bp, Homo sapien
tgaaaccgagggctaacctgattag

SEQ ID NO: 4264401 - DNA, 25 bp, Homo sapien
ggctaacctgattaggcccgccaaa

SEQ ID NO: 4264402 - DNA, 25 bp, Homo sapien
tactgaaaccgagggctaacctgat

SEQ ID NO: 4264403 - DNA, 25 bp, Homo sapien
agtttcatactgaaaccgagggcta

SEQ ID NO: 4264404 - DNA, 25 bp, Homo sapien
ctgaaagtcggccaaagctctcgga

SEQ ID NO: 4264405 - DNA, 25 bp, Homo sapien
tgatctactagggaaaacgtggacg

SEQ ID NO: 4264406 - DNA, 25 bp, Homo sapien
tgtgctcgcgactcaatagattgga

SEQ ID NO: 4264407 - DNA, 25 bp, Homo sapien
gctggtctaggaaacatgattggca

SEQ ID NO: 4264408 - DNA, 25 bp, Homo sapien
tcgtcctgtggacgcgtatcgccag

SEQ ID NO: 4264409 - DNA, 25 bp, Homo sapien
ggctcggtctatgacgagcagcggg

SEQ ID NO: 4264410 - DNA, 25 bp, Homo sapien
tgtggccgctgcacatcgtcctgtg

SEQ ID NO: 4264411 - DNA, 25 bp, Homo sapien
acatctggcccgcacatctgcgctg

SEQ ID NO: 4264412 - DNA, 25 bp, Homo sapien
cctgggccttagatggtactctgct

SEQ ID NO: 4264413 - DNA, 25 bp, Homo sapien
cagtttgcatggatccttgaagcca

SEQ ID NO: 4264414 - DNA, 25 bp, Homo sapien
gcaaattgattaccagggctcagga

SEQ ID NO: 4264415 - DNA, 25 bp, Homo sapien
tcagtctaggtagaaggataacacc

SEQ ID NO: 4264416 - DNA, 25 bp, Homo sapien
gcagtcctctagagtagctcggact

SEQ ID NO: 4264417 - DNA, 25 bp, Homo sapien
tatgtaccaagtctggtcttgaaca

SEQ ID NO: 4264418 - DNA, 25 bp, Homo sapien
tgcaccaccaagaccggccagtttt

SEQ ID NO: 4264419 - DNA, 25 bp, Homo sapien
tatttcagaggtatggcaatcagtt

SEQ ID NO: 4264420 - DNA, 25 bp, Homo sapien
agtgaaggcactgaactccttccag

SEQ ID NO: 4264421 - DNA, 25 bp, Homo sapien
cagccaacagtgaaggcactgaact

SEQ ID NO: 4264422 - DNA, 25 bp, Homo sapien
caacagtgaaggcactgaactcctt

SEQ ID NO: 4264423 - DNA, 25 bp, Homo sapien
tcacagccaacagtgaaggcactga

SEQ ID NO: 4264424 - DNA, 25 bp, Homo sapien
tcttagcacctataatcacagtggg

SEQ ID NO: 4264425 - DNA, 25 bp, Homo sapien
cttagcacctataatcacagtggga

SEQ ID NO: 4264426 - DNA, 25 bp, Homo sapien
tgggacagattaaattacttgtact

SEQ ID NO: 4264427 - DNA, 25 bp, Homo sapien
cagtgggacagattaaattacttgt

SEQ ID NO: 4264428 - DNA, 25 bp, Homo sapien
tctgtgctgtattctcctagaaact

SEQ ID NO: 4264429 - DNA, 25 bp, Homo sapien
tattctcctagaaactcacctttat

SEQ ID NO: 4264430 - DNA, 25 bp, Homo sapien
tgctgtattctcctagaaactcacc

SEQ ID NO: 4264431 - DNA, 25 bp, Homo sapien
cctagaaactcacctttatttggca

SEQ ID NO: 4264432 - DNA, 25 bp, Homo sapien
gaaagggacctttaagttcatcatg

SEQ ID NO: 4264433 - DNA, 25 bp, Homo sapien
cacagagagtggttgggtaattgcc

SEQ ID NO: 4264434 - DNA, 25 bp, Homo sapien
tccatatatctggatggcccagaac

SEQ ID NO: 4264435 - DNA, 25 bp, Homo sapien
taacttttacgtgagcaaatgagct

SEQ ID NO: 4264436 - DNA, 25 bp, Homo sapien
cttctcttaagggtgtgggacctga

SEQ ID NO: 4264437 - DNA, 25 bp, Homo sapien
catcttctcagaaggtgagttttct

SEQ ID NO: 4264438 - DNA, 25 bp, Homo sapien
tgtgttcctgtagctctgatgagtg

SEQ ID NO: 4264439 - DNA, 25 bp, Homo sapien
aaagcctggtgagactttcttcatg

SEQ ID NO: 4264440 - DNA, 25 bp, Homo sapien
tacagtacaggaagcctttcacagc

SEQ ID NO: 4264441 - DNA, 25 bp, Homo sapien
tcacagctgacgactcaaatgtctg

SEQ ID NO: 4264442 - DNA, 25 bp, Homo sapien
taatctctgacagtagaatacccag

SEQ ID NO: 4264443 - DNA, 25 bp, Homo sapien
gaatacccaggcatgtttactagca

SEQ ID NO: 4264444 - DNA, 25 bp, Homo sapien
ctccaagcggaaaggacgggccagt

SEQ ID NO: 4264445 - DNA, 25 bp, Homo sapien
gctggattttatagtcccgtttgaa

SEQ ID NO: 4264446 - DNA, 25 bp, Homo sapien
ggtgaatgtgctggattttatagtc

SEQ ID NO: 4264447 - DNA, 25 bp, Homo sapien
agaaaggagtctccaagcggaaagg

SEQ ID NO: 4264448 - DNA, 25 bp, Homo sapien
ccacttctgtgacatgaaaggctta

SEQ ID NO: 4264449 - DNA, 25 bp, Homo sapien
ctgtgtgcttgtgggatcatggatc

SEQ ID NO: 4264450 - DNA, 25 bp, Homo sapien
cctgctcaagaggtatggtcctgcc

SEQ ID NO: 4264451 - DNA, 25 bp, Homo sapien
tatgatctgacccatcgagccagct

SEQ ID NO: 4264452 - DNA, 25 bp, Homo sapien
caagtatttaatgaggagcaacaca

SEQ ID NO: 4264453 - DNA, 25 bp, Homo sapien
tccacatccctagcatttaggcctt

SEQ ID NO: 4264454 - DNA, 25 bp, Homo sapien
gaatagaagctgacacgtagcagcc

SEQ ID NO: 4264455 - DNA, 25 bp, Homo sapien
tttaggcctttgaatagaagctgac

SEQ ID NO: 4264456 - DNA, 25 bp, Homo sapien
cattgtcaggactatgacctcaggc

SEQ ID NO: 4264457 - DNA, 25 bp, Homo sapien
gctgcagtagcatagaggcgcctag

SEQ ID NO: 4264458 - DNA, 25 bp, Homo sapien
gcaccgtagggcatgctgataccat

SEQ ID NO: 4264459 - DNA, 25 bp, Homo sapien
ggtcagcacagcgtttcaaaaagtg

SEQ ID NO: 4264460 - DNA, 25 bp, Homo sapien
cattctgtagttcctaaaaatactg

SEQ ID NO: 4264461 - DNA, 25 bp, Homo sapien
tatcaaaagtctcaagcacttattt

SEQ ID NO: 4264462 - DNA, 25 bp, Homo sapien
tcttttatggaacacttcagctgta

SEQ ID NO: 4264463 - DNA, 25 bp, Homo sapien
agctgtactcatgtattaaaatagg

SEQ ID NO: 4264464 - DNA, 25 bp, Homo sapien
ttgcagggattttcacagccagtgt

SEQ ID NO: 4264465 - DNA, 25 bp, Homo sapien
tcttcttgactcttgtcatattcca

SEQ ID NO: 4264466 - DNA, 25 bp, Homo sapien
cctcatactagcaagctgttggctc

SEQ ID NO: 4264467 - DNA, 25 bp, Homo sapien
ttctctattcctcatactagcaagc

SEQ ID NO: 4264468 - DNA, 25 bp, Homo sapien
taatgttaatcagtactggctccag

SEQ ID NO: 4264469 - DNA, 25 bp, Homo sapien
cactttatactgtcagcccatggga

SEQ ID NO: 4264470 - DNA, 25 bp, Homo sapien
tagcaactggtaagaagcgcccatc

SEQ ID NO: 4264471 - DNA, 25 bp, Homo sapien
ggaacaccacggatactaagtcaga

SEQ ID NO: 4264472 - DNA, 25 bp, Homo sapien
tacctatgacctagaggccctgctt

SEQ ID NO: 4264473 - DNA, 25 bp, Homo sapien
tctaaatttcttcccgagggaggca

SEQ ID NO: 4264474 - DNA, 25 bp, Homo sapien
tgaggactgaactccgatcaccatt

SEQ ID NO: 4264475 - DNA, 25 bp, Homo sapien
ggaggcagttaaacccatgagctaa

SEQ ID NO: 4264476 - DNA, 25 bp, Homo sapien
tgtatagcaaagcagatgcaatcca

SEQ ID NO: 4264477 - DNA, 25 bp, Homo sapien
caggaagttacactaggagtcaagc

SEQ ID NO: 4264478 - DNA, 25 bp, Homo sapien
taggctgaaactcccacaggaacag

SEQ ID NO: 4264479 - DNA, 25 bp, Homo sapien
taaggagcatcacatgcaactggct

SEQ ID NO: 4264480 - DNA, 25 bp, Homo sapien
tcttcactactagtggaactactta

SEQ ID NO: 4264481 - DNA, 25 bp, Homo sapien
tggttgtggtcatcaatgtgtctag

SEQ ID NO: 4264482 - DNA, 25 bp, Homo sapien
aaacgatgagttgcttgccagtgtc

SEQ ID NO: 4264483 - DNA, 25 bp, Homo sapien
actacttatgtggttgtggtcatca

SEQ ID NO: 4264484 - DNA, 25 bp, Homo sapien
tacagagagctttcaacctactttt

SEQ ID NO: 4264485 - DNA, 25 bp, Homo sapien
caacactaagtatagtaatgttcct

SEQ ID NO: 4264486 - DNA, 25 bp, Homo sapien
tacaatccagtaaagaggagatgac

SEQ ID NO: 4264487 - DNA, 25 bp, Homo sapien
attcaaggtgttaactaaaatacag

SEQ ID NO: 4264488 - DNA, 25 bp, Homo sapien
ccaatagagataccgagaaactgtg

SEQ ID NO: 4264489 - DNA, 25 bp, Homo sapien
ctgagaatttgaagtaattcagaga

SEQ ID NO: 4264490 - DNA, 25 bp, Homo sapien
tgaccaatagagataccgagaaact

SEQ ID NO: 4264491 - DNA, 25 bp, Homo sapien
tagagataccgagaaactgtgcaca

SEQ ID NO: 4264492 - DNA, 25 bp, Homo sapien
ctttgatgctgatagtccagggacc

SEQ ID NO: 4264493 - DNA, 25 bp, Homo sapien
tattccctatgaggcacagagcaag

SEQ ID NO: 4264494 - DNA, 25 bp, Homo sapien
ttagcaacagtaatgcccaggcagc

SEQ ID NO: 4264495 - DNA, 25 bp, Homo sapien
taaaaagcaccccagttcaggtatc

SEQ ID NO: 4264496 - DNA, 25 bp, Homo sapien
gtaagtctatctcatccaggaggaa

SEQ ID NO: 4264497 - DNA, 25 bp, Homo sapien
ccagtaagtctatctcatccaggag

SEQ ID NO: 4264498 - DNA, 25 bp, Homo sapien
cagtaagtctatctcatccaggagg

SEQ ID NO: 4264499 - DNA, 25 bp, Homo sapien
agtaagtctatctcatccaggagga

SEQ ID NO: 4264500 - DNA, 25 bp, Homo sapien
accacctggcggaagaagttgacct

SEQ ID NO: 4264501 - DNA, 25 bp, Homo sapien
atcctctccttaatggctggggcca

SEQ ID NO: 4264502 - DNA, 25 bp, Homo sapien
agttgacctttccccggtgcggctg

SEQ ID NO: 4264503 - DNA, 25 bp, Homo sapien
ttccccggtgcggctggtagcccag

SEQ ID NO: 4264504 - DNA, 25 bp, Homo sapien
cctccagaagggaggagtacatata

SEQ ID NO: 4264505 - DNA, 25 bp, Homo sapien
tgtgcttttaaactccttaggtgag

SEQ ID NO: 4264506 - DNA, 25 bp, Homo sapien
cacaccagcccagtttttgaacata

SEQ ID NO: 4264507 - DNA, 25 bp, Homo sapien
agtacatatagaaagaacaccaggc

SEQ ID NO: 4264508 - DNA, 25 bp, Homo sapien
agcttgcggttctgtggttcttgtt

SEQ ID NO: 4264509 - DNA, 25 bp, Homo sapien
ttctgtggttcttgtttttgaaatc

SEQ ID NO: 4264510 - DNA, 25 bp, Homo sapien
cttgcggttctgtggttcttgtttt

SEQ ID NO: 4264511 - DNA, 25 bp, Homo sapien
tgtggttcttgtttttgaaatcaaa

SEQ ID NO: 4264512 - DNA, 25 bp, Homo sapien
cagggtataactggctctggcttgt

SEQ ID NO: 4264513 - DNA, 25 bp, Homo sapien
caggtacccagggtataactggctc

SEQ ID NO: 4264514 - DNA, 25 bp, Homo sapien
gctctggcttgtagccaattttaaa

SEQ ID NO: 4264515 - DNA, 25 bp, Homo sapien
ggcttgtagccaattttaaatgtaa

SEQ ID NO: 4264516 - DNA, 25 bp, Homo sapien
gctagatcactagggccactaatga

SEQ ID NO: 4264517 - DNA, 25 bp, Homo sapien
gttcctgattcacagcaccagctag

SEQ ID NO: 4264518 - DNA, 25 bp, Homo sapien
cagagagttaaaacgagtctgttcc

SEQ ID NO: 4264519 - DNA, 25 bp, Homo sapien
tagggccactaatgatgagtttagc

SEQ ID NO: 4264520 - DNA, 25 bp, Homo sapien
ggcatagacactatggattgatttg

SEQ ID NO: 4264521 - DNA, 25 bp, Homo sapien
tagacactatggattgatttggaac

SEQ ID NO: 4264522 - DNA, 25 bp, Homo sapien
cactatggattgatttggaacacca

SEQ ID NO: 4264523 - DNA, 25 bp, Homo sapien
tcaatggcatagacactatggattg

SEQ ID NO: 4264524 - DNA, 25 bp, Homo sapien
tagtgaaggatatgaggaagcgcat

SEQ ID NO: 4264525 - DNA, 25 bp, Homo sapien
ctagtgaaggatatgaggaagcgca

SEQ ID NO: 4264526 - DNA, 25 bp, Homo sapien
gacagaggacattatctgaaacaca

SEQ ID NO: 4264527 - DNA, 25 bp, Homo sapien
taaaagaagcgtgctttgagagaaa

SEQ ID NO: 4264528 - DNA, 25 bp, Homo sapien
cattagtctctggtggatcctataa

SEQ ID NO: 4264529 - DNA, 25 bp, Homo sapien
gtaaagaactattgagacaggagaa

SEQ ID NO: 4264530 - DNA, 25 bp, Homo sapien
gcataaatgcttaggacaattcgca

SEQ ID NO: 4264531 - DNA, 25 bp, Homo sapien
gcaggtatatccttgctcacagaac

SEQ ID NO: 4264532 - DNA, 25 bp, Homo sapien
aaatattgaggatgattacaggccc

SEQ ID NO: 4264533 - DNA, 25 bp, Homo sapien
gaaatcaacctacccagcctgacat

SEQ ID NO: 4264534 - DNA, 25 bp, Homo sapien
cctaaaacagtgaggcactaccatt

SEQ ID NO: 4264535 - DNA, 25 bp, Homo sapien
ccctaaaacagtgaggcactaccat

SEQ ID NO: 4264536 - DNA, 25 bp, Homo sapien
ctctgaggctcggtggaatgtacca

SEQ ID NO: 4264537 - DNA, 25 bp, Homo sapien
aggctcggtggaatgtaccaaaagc

SEQ ID NO: 4264538 - DNA, 25 bp, Homo sapien
ccatctctctgaggctcggtggaat

SEQ ID NO: 4264539 - DNA, 25 bp, Homo sapien
ttgcccagaactcgggtccttcttc

SEQ ID NO: 4264540 - DNA, 25 bp, Homo sapien
atataaagttgttatcttaagattt

SEQ ID NO: 4264541 - DNA, 25 bp, Homo sapien
tcttaagatttatcttagaatgcaa

SEQ ID NO: 4264542 - DNA, 25 bp, Homo sapien
ttaagatttatcttagaatgcaatg

SEQ ID NO: 4264543 - DNA, 25 bp, Homo sapien
tataaagttgttatcttaagattta

SEQ ID NO: 4264544 - DNA, 25 bp, Homo sapien
gatgataacagcgtgacctgcttgg

SEQ ID NO: 4264545 - DNA, 25 bp, Homo sapien
caagtgattctgaagcgggcagttt

SEQ ID NO: 4264546 - DNA, 25 bp, Homo sapien
gactcccggctctcgaatatcagta

SEQ ID NO: 4264547 - DNA, 25 bp, Homo sapien
gcttgggcttcactaaccagcacta

SEQ ID NO: 4264548 - DNA, 25 bp, Homo sapien
taatttcttacacatagcaaacaat

SEQ ID NO: 4264549 - DNA, 25 bp, Homo sapien
ttacattaggttaaaaactgctata

SEQ ID NO: 4264550 - DNA, 25 bp, Homo sapien
tatgtatagcacaggttccaagact

SEQ ID NO: 4264551 - DNA, 25 bp, Homo sapien
actgctataatacatatactataac

SEQ ID NO: 4264552 - DNA, 25 bp, Homo sapien
cagtaacttgaatccttctcttttc

SEQ ID NO: 4264553 - DNA, 25 bp, Homo sapien
tcttttcttgatttcatctactagg

SEQ ID NO: 4264554 - DNA, 25 bp, Homo sapien
ctcttttcttgatttcatctactag

SEQ ID NO: 4264555 - DNA, 25 bp, Homo sapien
tttcttgatttcatctactaggtac

SEQ ID NO: 4264556 - DNA, 25 bp, Homo sapien
taccatgtgggattgagagcattct

SEQ ID NO: 4264557 - DNA, 25 bp, Homo sapien
gaacacactagagaagccctcctga

SEQ ID NO: 4264558 - DNA, 25 bp, Homo sapien
gcctcaattcatggcggaagccgaa

SEQ ID NO: 4264559 - DNA, 25 bp, Homo sapien
catttgtgcatctcagtaggctagg

SEQ ID NO: 4264560 - DNA, 25 bp, Homo sapien
tcaaggcctaatgtacccagggcct

SEQ ID NO: 4264561 - DNA, 25 bp, Homo sapien
gcaagagcacgattaactctttctt

SEQ ID NO: 4264562 - DNA, 25 bp, Homo sapien
ctagataaagcaagagcacgattaa

SEQ ID NO: 4264563 - DNA, 25 bp, Homo sapien
aactctttcttcaaggcctaatgta

SEQ ID NO: 4264564 - DNA, 25 bp, Homo sapien
tcctgtgtcatagctcacatcatag

SEQ ID NO: 4264565 - DNA, 25 bp, Homo sapien
tccagaacttgaatgcatctggtct

SEQ ID NO: 4264566 - DNA, 25 bp, Homo sapien
atctggtcttctgctacactggata

SEQ ID NO: 4264567 - DNA, 25 bp, Homo sapien
tcttctgctacactggatagacttg

SEQ ID NO: 4264568 - DNA, 25 bp, Homo sapien
ggaagaggtaagatgccttggcaga

SEQ ID NO: 4264569 - DNA, 25 bp, Homo sapien
aagatgccttggcagagtagcattt

SEQ ID NO: 4264570 - DNA, 25 bp, Homo sapien
gtaagatgccttggcagagtagcat

SEQ ID NO: 4264571 - DNA, 25 bp, Homo sapien
ggtaagatgccttggcagagtagca

SEQ ID NO: 4264572 - DNA, 25 bp, Homo sapien
cgaaaaagaaaagattacaagactg

SEQ ID NO: 4264573 - DNA, 25 bp, Homo sapien
tttagcaaatctgaagtcctctgtg

SEQ ID NO: 4264574 - DNA, 25 bp, Homo sapien
attttttagcaaatctgaagtcctc

SEQ ID NO: 4264575 - DNA, 25 bp, Homo sapien
ggcgttccatactgaaacaggctgg

SEQ ID NO: 4264576 - DNA, 25 bp, Homo sapien
gcagagaagcaaaggttggcgttcc

SEQ ID NO: 4264577 - DNA, 25 bp, Homo sapien
atttgtctttcacaaggagagcaca

SEQ ID NO: 4264578 - DNA, 25 bp, Homo sapien
gatttgtctttcacaaggagagcac

SEQ ID NO: 4264579 - DNA, 25 bp, Homo sapien
tttgtctttcacaaggagagcacag

SEQ ID NO: 4264580 - DNA, 25 bp, Homo sapien
cttcctcgacatcaaagctgagcca

SEQ ID NO: 4264581 - DNA, 25 bp, Homo sapien
gacatcaaagctgagccaccccaag

SEQ ID NO: 4264582 - DNA, 25 bp, Homo sapien
gcttgcggtgcttcctcgacatcaa

SEQ ID NO: 4264583 - DNA, 25 bp, Homo sapien
gccatgcagaagcttgcggtgcttc

SEQ ID NO: 4264584 - DNA, 25 bp, Homo sapien
aacacagttgtaccagaagtggcac

SEQ ID NO: 4264585 - DNA, 25 bp, Homo sapien
gatgtctgctatttcatccagaggg

SEQ ID NO: 4264586 - DNA, 25 bp, Homo sapien
tcatccagagggtcaaaagctccca

SEQ ID NO: 4264587 - DNA, 25 bp, Homo sapien
tggcacagacaagaaacggtgctgc

SEQ ID NO: 4264588 - DNA, 25 bp, Homo sapien
ctctccctctcgctttctcccctct

SEQ ID NO: 4264589 - DNA, 25 bp, Homo sapien
ctccctctcgctttctcccctctca

SEQ ID NO: 4264590 - DNA, 25 bp, Homo sapien
ttctctctccctctcgctttctccc

SEQ ID NO: 4264591 - DNA, 25 bp, Homo sapien
ctctctccctctcgctttctcccct

SEQ ID NO: 4264592 - DNA, 25 bp, Homo sapien
ctggcttgccagacttgcttctcca

SEQ ID NO: 4264593 - DNA, 25 bp, Homo sapien
ctcttttctggcttgccagacttgc

SEQ ID NO: 4264594 - DNA, 25 bp, Homo sapien
tttctggcttgccagacttgcttct

SEQ ID NO: 4264595 - DNA, 25 bp, Homo sapien
cttttctggcttgccagacttgctt

SEQ ID NO: 4264596 - DNA, 25 bp, Homo sapien
cattctcagtgccaatcccaagaaa

SEQ ID NO: 4264597 - DNA, 25 bp, Homo sapien
agtgccaatcccaagaaaagaggct

SEQ ID NO: 4264598 - DNA, 25 bp, Homo sapien
caaacattctcagtgccaatcccaa

SEQ ID NO: 4264599 - DNA, 25 bp, Homo sapien
tctcagtgccaatcccaagaaaaga

SEQ ID NO: 4264600 - DNA, 25 bp, Homo sapien
aagagagcattgagctggagtttta

SEQ ID NO: 4264601 - DNA, 25 bp, Homo sapien
gctcccacaaggatttttttctatg

SEQ ID NO: 4264602 - DNA, 25 bp, Homo sapien
tcccacaaggatttttttctatgac

SEQ ID NO: 4264603 - DNA, 25 bp, Homo sapien
tggctcccacaaggatttttttcta

SEQ ID NO: 4264604 - DNA, 25 bp, Homo sapien
tctggctcccacaaggatttttttc

SEQ ID NO: 4264605 - DNA, 25 bp, Homo sapien
gctgctttctcctcaatgtacactg

SEQ ID NO: 4264606 - DNA, 25 bp, Homo sapien
cctcaatgtacactgtgccctggac

SEQ ID NO: 4264607 - DNA, 25 bp, Homo sapien
ccagtgctgactaatttgattctca

SEQ ID NO: 4264608 - DNA, 25 bp, Homo sapien
cacctggactccagtgctgactaat

SEQ ID NO: 4264609 - DNA, 25 bp, Homo sapien
ctgcttgcccgtggagaagacctgc

SEQ ID NO: 4264610 - DNA, 25 bp, Homo sapien
agccctcacccagcaatcaggagga

SEQ ID NO: 4264611 - DNA, 25 bp, Homo sapien
gcaatcacatcccatcgcaactcaa

SEQ ID NO: 4264612 - DNA, 25 bp, Homo sapien
cccgtggagaagacctgcaatcaca

SEQ ID NO: 4264613 - DNA, 25 bp, Homo sapien
aatatgctttctcagaaaatctata

SEQ ID NO: 4264614 - DNA, 25 bp, Homo sapien
atatgctttctcagaaaatctatat

SEQ ID NO: 4264615 - DNA, 25 bp, Homo sapien
aaagccctcttaaatatgctttctc

SEQ ID NO: 4264616 - DNA, 25 bp, Homo sapien
ttaatcttggcgaaccagacagccc

SEQ ID NO: 4264617 - DNA, 25 bp, Homo sapien
tccttaatatcaggacaatatttgt

SEQ ID NO: 4264618 - DNA, 25 bp, Homo sapien
tatctagctaaattcattgcataca

SEQ ID NO: 4264619 - DNA, 25 bp, Homo sapien
gatgtgaaaaggattaatcttggcg

SEQ ID NO: 4264620 - DNA, 25 bp, Homo sapien
cactggggacacctcatacgtataa

SEQ ID NO: 4264621 - DNA, 25 bp, Homo sapien
tcagaaccgcttcttccactaacag

SEQ ID NO: 4264622 - DNA, 25 bp, Homo sapien
attttcttcagaaccgcttcttcca

SEQ ID NO: 4264623 - DNA, 25 bp, Homo sapien
gaaccgcttcttccactaacagaaa

SEQ ID NO: 4264624 - DNA, 25 bp, Homo sapien
gatataaaaaacacttcacttctat

SEQ ID NO: 4264625 - DNA, 25 bp, Homo sapien
tataaaaaacacttcacttctatga

SEQ ID NO: 4264626 - DNA, 25 bp, Homo sapien
ctagatagatataaaaaacacttca

SEQ ID NO: 4264627 - DNA, 25 bp, Homo sapien
tagatataaaaaacacttcacttct

SEQ ID NO: 4264628 - DNA, 25 bp, Homo sapien
ttcggtcataaatcgggccaccaag

SEQ ID NO: 4264629 - DNA, 25 bp, Homo sapien
cacttggattcaatgcttcggtcat

SEQ ID NO: 4264630 - DNA, 25 bp, Homo sapien
aaggagtaataatcaagtccagcat

SEQ ID NO: 4264631 - DNA, 25 bp, Homo sapien
catacaattggttgaaaaatcttgg

SEQ ID NO: 4264632 - DNA, 25 bp, Homo sapien
ccaatagtttatggggtggctcgcc

SEQ ID NO: 4264633 - DNA, 25 bp, Homo sapien
gacatcccgacagagttccaatagt

SEQ ID NO: 4264634 - DNA, 25 bp, Homo sapien
ttcagttgttcaggaggcctccatt

SEQ ID NO: 4264635 - DNA, 25 bp, Homo sapien
gttttgacactgtagtgtatgacat

SEQ ID NO: 4264636 - DNA, 25 bp, Homo sapien
ttgtaggaccattcagcacaacccc

SEQ ID NO: 4264637 - DNA, 25 bp, Homo sapien
gacatctgtagctttcaaaaccacc

SEQ ID NO: 4264638 - DNA, 25 bp, Homo sapien
cattattagcctacaggcctcttca

SEQ ID NO: 4264639 - DNA, 25 bp, Homo sapien
cattcttcttacttggaatcatctc

SEQ ID NO: 4264640 - DNA, 25 bp, Homo sapien
gtagctgagtagttcagcccacact

SEQ ID NO: 4264641 - DNA, 25 bp, Homo sapien
tccaccatgttcagaacgcaagatg

SEQ ID NO: 4264642 - DNA, 25 bp, Homo sapien
tgggtaggcagcttcctagaccttc

SEQ ID NO: 4264643 - DNA, 25 bp, Homo sapien
tagaccttctgccttgttgctttcc

SEQ ID NO: 4264644 - DNA, 25 bp, Homo sapien
ttaaggacaaaaaccgcagccgcgc

SEQ ID NO: 4264645 - DNA, 25 bp, Homo sapien
ggacaaaaaccgcagccgcgctgag

SEQ ID NO: 4264646 - DNA, 25 bp, Homo sapien
aaccgcagccgcgctgagtcgttac

SEQ ID NO: 4264647 - DNA, 25 bp, Homo sapien
acaaaaaccgcagccgcgctgagtc

SEQ ID NO: 4264648 - DNA, 25 bp, Homo sapien
ccagtgcaaacggagggacgaggac

SEQ ID NO: 4264649 - DNA, 25 bp, Homo sapien
ccgcggctctctgttaatatttgga

SEQ ID NO: 4264650 - DNA, 25 bp, Homo sapien
tccacaggacactggcggtccgagt

SEQ ID NO: 4264651 - DNA, 25 bp, Homo sapien
ctcctttcactttgctatccaaggc

SEQ ID NO: 4264652 - DNA, 25 bp, Homo sapien
agagcctcatccagccggaggagcc

SEQ ID NO: 4264653 - DNA, 25 bp, Homo sapien
ttggagtaaccacttcgcagagcct

SEQ ID NO: 4264654 - DNA, 25 bp, Homo sapien
tctttggagtaaccacttcgcagag

SEQ ID NO: 4264655 - DNA, 25 bp, Homo sapien
tccagttctttggagtaaccacttc

SEQ ID NO: 4264656 - DNA, 25 bp, Homo sapien
tttgcctacttgcaggaaggtcaag

SEQ ID NO: 4264657 - DNA, 25 bp, Homo sapien
ccattgggctagctgtgcccctgct

SEQ ID NO: 4264658 - DNA, 25 bp, Homo sapien
aagatagccctgacgtctctcaagg

SEQ ID NO: 4264659 - DNA, 25 bp, Homo sapien
tctgcaggattgtgcccattgggct

SEQ ID NO: 4264660 - DNA, 25 bp, Homo sapien
gccaccttctttgagccatacccca

SEQ ID NO: 4264661 - DNA, 25 bp, Homo sapien
cttgtagccaccttctttgagccat

SEQ ID NO: 4264662 - DNA, 25 bp, Homo sapien
gtagccaccttctttgagccatacc

SEQ ID NO: 4264663 - DNA, 25 bp, Homo sapien
ccaccttctttgagccataccccat

SEQ ID NO: 4264664 - DNA, 25 bp, Homo sapien
caggatcgtcagagcaatgactggc

SEQ ID NO: 4264665 - DNA, 25 bp, Homo sapien
catgtaatctaagaggcttccttcg

SEQ ID NO: 4264666 - DNA, 25 bp, Homo sapien
acaaatcagaaagttccatgtaatc

SEQ ID NO: 4264667 - DNA, 25 bp, Homo sapien
atgtcaaaggatctggtaacttcat

SEQ ID NO: 4264668 - DNA, 25 bp, Homo sapien
tctggaatgctagaccatatgattt

SEQ ID NO: 4264669 - DNA, 25 bp, Homo sapien
ctggaatgctagaccatatgatttt

SEQ ID NO: 4264670 - DNA, 25 bp, Homo sapien
tcagagcaccaactgtttcccattt

SEQ ID NO: 4264671 - DNA, 25 bp, Homo sapien
gtgtttgtgtccctctcgggcagag

SEQ ID NO: 4264672 - DNA, 25 bp, Homo sapien
tccctctcgggcagaggcttccagg

SEQ ID NO: 4264673 - DNA, 25 bp, Homo sapien
tttgtgtccctctcgggcagaggct

SEQ ID NO: 4264674 - DNA, 25 bp, Homo sapien
ttgtcagaaagctgaacgtgtcttt

SEQ ID NO: 4264675 - DNA, 25 bp, Homo sapien
gtcagaaagctgaacgtgtctttcc

SEQ ID NO: 4264676 - DNA, 25 bp, Homo sapien
tgtcagaaagctgaacgtgtctttc

SEQ ID NO: 4264677 - DNA, 25 bp, Homo sapien
ggtaaaaataggcaatgggtttgca

SEQ ID NO: 4264678 - DNA, 25 bp, Homo sapien
ctacttcagtgataggtggtaaaaa

SEQ ID NO: 4264679 - DNA, 25 bp, Homo sapien
cttgtacgtgagcacaaggaagtgg

SEQ ID NO: 4264680 - DNA, 25 bp, Homo sapien
cctggggaatccttgtacgtgagca

SEQ ID NO: 4264681 - DNA, 25 bp, Homo sapien
tttaaatacagcctctacattcttg

SEQ ID NO: 4264682 - DNA, 25 bp, Homo sapien
gtttaaatacagcctctacattctt

SEQ ID NO: 4264683 - DNA, 25 bp, Homo sapien
tcttgtactcagactccacatgcat

SEQ ID NO: 4264684 - DNA, 25 bp, Homo sapien
tgtttaaatacagcctctacattct

SEQ ID NO: 4264685 - DNA, 25 bp, Homo sapien
ggagagctgcacctttataaccctg

SEQ ID NO: 4264686 - DNA, 25 bp, Homo sapien
gggcatcagccattagcacttccag

SEQ ID NO: 4264687 - DNA, 25 bp, Homo sapien
tttgagataaccgtgacccagctga

SEQ ID NO: 4264688 - DNA, 25 bp, Homo sapien
tacatttttgcttgaggctggccct

SEQ ID NO: 4264689 - DNA, 25 bp, Homo sapien
ttatcctgagatgggccagatacag

SEQ ID NO: 4264690 - DNA, 25 bp, Homo sapien
acttgctttttatcctgagatgggc

SEQ ID NO: 4264691 - DNA, 25 bp, Homo sapien
ttttatcctgagatgggccagatac

SEQ ID NO: 4264692 - DNA, 25 bp, Homo sapien
gctttttatcctgagatgggccaga

SEQ ID NO: 4264693 - DNA, 25 bp, Homo sapien
atactctcctaggcaggagcccatg

SEQ ID NO: 4264694 - DNA, 25 bp, Homo sapien
catactctcctaggcaggagcccat

SEQ ID NO: 4264695 - DNA, 25 bp, Homo sapien
gaggtgcgggacattctgtgactgc

SEQ ID NO: 4264696 - DNA, 25 bp, Homo sapien
tgacgttctgtttggatgggttgta

SEQ ID NO: 4264697 - DNA, 25 bp, Homo sapien
tctccacactaaaatcgctctctag

SEQ ID NO: 4264698 - DNA, 25 bp, Homo sapien
caactcagttgtgcctatgggaaac

SEQ ID NO: 4264699 - DNA, 25 bp, Homo sapien
taaccctaaggagcatggcaccagg

SEQ ID NO: 4264700 - DNA, 25 bp, Homo sapien
gattgtcagtcagcagtttgattca

SEQ ID NO: 4264701 - DNA, 25 bp, Homo sapien
gcaagactgcattctgcgaataggc

SEQ ID NO: 4264702 - DNA, 25 bp, Homo sapien
tgatcatatagtctcagtggaatgc

SEQ ID NO: 4264703 - DNA, 25 bp, Homo sapien
tggttctgatgaaagatcaccttct

SEQ ID NO: 4264704 - DNA, 25 bp, Homo sapien
gctggttctgatgaaagatcacctt

SEQ ID NO: 4264705 - DNA, 25 bp, Homo sapien
ctggttctgatgaaagatcaccttc

SEQ ID NO: 4264706 - DNA, 25 bp, Homo sapien
ggttctgatgaaagatcaccttctc

SEQ ID NO: 4264707 - DNA, 25 bp, Homo sapien
gcatcagccgtcacatcatcaaggg

SEQ ID NO: 4264708 - DNA, 25 bp, Homo sapien
tggattccattttgctcgatagaca

SEQ ID NO: 4264709 - DNA, 25 bp, Homo sapien
catcaagggaattctgcccttcttg

SEQ ID NO: 4264710 - DNA, 25 bp, Homo sapien
ggcaacggcatgcacatcgcatctg

SEQ ID NO: 4264711 - DNA, 25 bp, Homo sapien
gaaggtcaaactgagaagttccagc

SEQ ID NO: 4264712 - DNA, 25 bp, Homo sapien
tgcctcccttgaagccctgcaatgg

SEQ ID NO: 4264713 - DNA, 25 bp, Homo sapien
aaatccacggatttgtccacacgca

SEQ ID NO: 4264714 - DNA, 25 bp, Homo sapien
gactttggtcacagaaggtcaaact

SEQ ID NO: 4264715 - DNA, 25 bp, Homo sapien
tctctgtgactgtagatgttttcac

SEQ ID NO: 4264716 - DNA, 25 bp, Homo sapien
tccatttgtggagacaaggaccctg

SEQ ID NO: 4264717 - DNA, 25 bp, Homo sapien
ggtactttgtctcatcccagcattt

SEQ ID NO: 4264718 - DNA, 25 bp, Homo sapien
gcagcaggattgagctttcataaat

SEQ ID NO: 4264719 - DNA, 25 bp, Homo sapien
tgtggcatttaggcagtaagagcac

SEQ ID NO: 4264720 - DNA, 25 bp, Homo sapien
cttgtggcatttaggcagtaagagc

SEQ ID NO: 4264721 - DNA, 25 bp, Homo sapien
tgtagttcattacatggtccatgga

SEQ ID NO: 4264722 - DNA, 25 bp, Homo sapien
ctttgtgtcaagtgcatagacctcc

SEQ ID NO: 4264723 - DNA, 25 bp, Homo sapien
gagaagttccatgcatagccagggc

SEQ ID NO: 4264724 - DNA, 25 bp, Homo sapien
gatagtactcgtagtttccacagag

SEQ ID NO: 4264725 - DNA, 25 bp, Homo sapien
catggatcattgctggcccagctgt

SEQ ID NO: 4264726 - DNA, 25 bp, Homo sapien
cccagctgtcaagttggcattccag

SEQ ID NO: 4264727 - DNA, 25 bp, Homo sapien
gtcaagttggcattccagtggaagt

SEQ ID NO: 4264728 - DNA, 25 bp, Homo sapien
cagtggaagtattggggcagagtct

SEQ ID NO: 4264729 - DNA, 25 bp, Homo sapien
tcaagggctagatcatcaaagggtc

SEQ ID NO: 4264730 - DNA, 25 bp, Homo sapien
tgagcagattccatacggttagacc

SEQ ID NO: 4264731 - DNA, 25 bp, Homo sapien
caaaaccagcaaggcttcaagggct

SEQ ID NO: 4264732 - DNA, 25 bp, Homo sapien
gatgggacagacaaggctctcttgg

SEQ ID NO: 4264733 - DNA, 25 bp, Homo sapien
catgcctggctcaaggagatagtgt

SEQ ID NO: 4264734 - DNA, 25 bp, Homo sapien
gcagccctcgcagactaatacatgt

SEQ ID NO: 4264735 - DNA, 25 bp, Homo sapien
ccttagaagaagatatcagccctgc

SEQ ID NO: 4264736 - DNA, 25 bp, Homo sapien
cagacacgcacagaaggagagatac

SEQ ID NO: 4264737 - DNA, 25 bp, Homo sapien
ccaataaacacatcagagtgaggtt

SEQ ID NO: 4264738 - DNA, 25 bp, Homo sapien
tcttctaaaatccacgccagcaaaa

SEQ ID NO: 4264739 - DNA, 25 bp, Homo sapien
tgttgtgcaacatgatactggaggt

SEQ ID NO: 4264740 - DNA, 25 bp, Homo sapien
gatgcttagcaaacgaatccaaagc

SEQ ID NO: 4264741 - DNA, 25 bp, Homo sapien
tgcattcagcggctttaagagtcat

SEQ ID NO: 4264742 - DNA, 25 bp, Homo sapien
tgggtttctgcattcagcggcttta

SEQ ID NO: 4264743 - DNA, 25 bp, Homo sapien
ggtttctgcattcagcggctttaag

SEQ ID NO: 4264744 - DNA, 25 bp, Homo sapien
tttctgcattcagcggctttaagag

SEQ ID NO: 4264745 - DNA, 25 bp, Homo sapien
tccctcaggtaacgaagtccttcag

SEQ ID NO: 4264746 - DNA, 25 bp, Homo sapien
gattcgccaggcctggatatttgca

SEQ ID NO: 4264747 - DNA, 25 bp, Homo sapien
ctcagttgaggtggttggattcgcc

SEQ ID NO: 4264748 - DNA, 25 bp, Homo sapien
ccagtcttggtgatgacatgacaaa

SEQ ID NO: 4264749 - DNA, 25 bp, Homo sapien
cagcttcactgaataatcaactaaa

SEQ ID NO: 4264750 - DNA, 25 bp, Homo sapien
agaaatcaacatcacgtgaagctat

SEQ ID NO: 4264751 - DNA, 25 bp, Homo sapien
tggccataaccaacaagatacagaa

SEQ ID NO: 4264752 - DNA, 25 bp, Homo sapien
tattgaggcccgtagagcagtcact

SEQ ID NO: 4264753 - DNA, 25 bp, Homo sapien
ttcttgaaaggaatacaggtctggg

SEQ ID NO: 4264754 - DNA, 25 bp, Homo sapien
caaccactgggatttagatattttt

SEQ ID NO: 4264755 - DNA, 25 bp, Homo sapien
gagttccagcaaccactgggattta

SEQ ID NO: 4264756 - DNA, 25 bp, Homo sapien
gtgtaattcatttaacctcatctcc

SEQ ID NO: 4264757 - DNA, 25 bp, Homo sapien
gagtgtgtgctttcgcttttcatgg

SEQ ID NO: 4264758 - DNA, 25 bp, Homo sapien
ttcgcttttcatgggtgacttgttt

SEQ ID NO: 4264759 - DNA, 25 bp, Homo sapien
ctgagtgtgtgctttcgcttttcat

SEQ ID NO: 4264760 - DNA, 25 bp, Homo sapien
tgtgctttcgcttttcatgggtgac

SEQ ID NO: 4264761 - DNA, 25 bp, Homo sapien
tctaagctctctggccatggtgttt

SEQ ID NO: 4264762 - DNA, 25 bp, Homo sapien
ctctaagctctctggccatggtgtt

SEQ ID NO: 4264763 - DNA, 25 bp, Homo sapien
taagctctctggccatggtgtttct

SEQ ID NO: 4264764 - DNA, 25 bp, Homo sapien
agctctctggccatggtgtttctct

SEQ ID NO: 4264765 - DNA, 25 bp, Homo sapien
gagccctccggagttggtccgcttg

SEQ ID NO: 4264766 - DNA, 25 bp, Homo sapien
gctctctgggccgaaaaccaggaag

SEQ ID NO: 4264767 - DNA, 25 bp, Homo sapien
tccgcttgttattctcggccttgct

SEQ ID NO: 4264768 - DNA, 25 bp, Homo sapien
agtgatgtcagggagttcagagccc

SEQ ID NO: 4264769 - DNA, 25 bp, Homo sapien
tcaagggtcaggcattatataagaa

SEQ ID NO: 4264770 - DNA, 25 bp, Homo sapien
aaaagacttgaaggacctggaagct

SEQ ID NO: 4264771 - DNA, 25 bp, Homo sapien
tggaagctttctctcagtgttgtat

SEQ ID NO: 4264772 - DNA, 25 bp, Homo sapien
tcagtgttgtattttccccacattt

SEQ ID NO: 4264773 - DNA, 25 bp, Homo sapien
tccatgttaagaacactatccatct

SEQ ID NO: 4264774 - DNA, 25 bp, Homo sapien
atcttgcagtagcacattgagacca

SEQ ID NO: 4264775 - DNA, 25 bp, Homo sapien
tatccatcttgcagtagcacattga

SEQ ID NO: 4264776 - DNA, 25 bp, Homo sapien
gaacactatccatcttgcagtagca

SEQ ID NO: 4264777 - DNA, 25 bp, Homo sapien
tcaacatctctagacaaagtgactg

SEQ ID NO: 4264778 - DNA, 25 bp, Homo sapien
gtgactgtgatggtgccaagcctaa

SEQ ID NO: 4264779 - DNA, 25 bp, Homo sapien
tgatatcaagtttgaatccgaaaca

SEQ ID NO: 4264780 - DNA, 25 bp, Homo sapien
aattttgtaagccatgccaaggcga

SEQ ID NO: 4264781 - DNA, 25 bp, Homo sapien
cacatatcggaatacagccttgacc

SEQ ID NO: 4264782 - DNA, 25 bp, Homo sapien
catatcggaatacagccttgaccct

SEQ ID NO: 4264783 - DNA, 25 bp, Homo sapien
ctgcacatatcggaatacagccttg

SEQ ID NO: 4264784 - DNA, 25 bp, Homo sapien
tgcacatatcggaatacagccttga

SEQ ID NO: 4264785 - DNA, 25 bp, Homo sapien
gccctgctgcctgatccgacgccgc

SEQ ID NO: 4264786 - DNA, 25 bp, Homo sapien
gccactcacagaccctcggttgatt

SEQ ID NO: 4264787 - DNA, 25 bp, Homo sapien
atccgacgccgccactcacagaccc

SEQ ID NO: 4264788 - DNA, 25 bp, Homo sapien
caagggggaaaaagccctgctgcct

SEQ ID NO: 4264789 - DNA, 25 bp, Homo sapien
tgatggttgagtggtccatagtggg

SEQ ID NO: 4264790 - DNA, 25 bp, Homo sapien
gatgcctcctcgtgcggacatggtc

SEQ ID NO: 4264791 - DNA, 25 bp, Homo sapien
tcctcgtgcggacatggtcatgccc

SEQ ID NO: 4264792 - DNA, 25 bp, Homo sapien
gtgcggacatggtcatgcccgactg

SEQ ID NO: 4264793 - DNA, 25 bp, Homo sapien
ttctcccagtacttgatgccgattt

SEQ ID NO: 4264794 - DNA, 25 bp, Homo sapien
gggcatcgtcaaagttccactcctg

SEQ ID NO: 4264795 - DNA, 25 bp, Homo sapien
gtacttgatgccgatttccacccca

SEQ ID NO: 4264796 - DNA, 25 bp, Homo sapien
tcatgggggcatcgtcaaagttcca

SEQ ID NO: 4264797 - DNA, 25 bp, Homo sapien
gggggtcatgtcgtagctgaccatg

SEQ ID NO: 4264798 - DNA, 25 bp, Homo sapien
tccacgggggtcatgtcgtagctga

SEQ ID NO: 4264799 - DNA, 25 bp, Homo sapien
ccacgggggtcatgtcgtagctgac

SEQ ID NO: 4264800 - DNA, 25 bp, Homo sapien
acgggggtcatgtcgtagctgacca

SEQ ID NO: 4264801 - DNA, 25 bp, Homo sapien
tggagaagctgatgagtccctcgat

SEQ ID NO: 4264802 - DNA, 25 bp, Homo sapien
aagttggggccgatggagaagctga

SEQ ID NO: 4264803 - DNA, 25 bp, Homo sapien
gagaagctgatgagtccctcgatcc

SEQ ID NO: 4264804 - DNA, 25 bp, Homo sapien
gttggggccgatggagaagctgatg

SEQ ID NO: 4264805 - DNA, 25 bp, Homo sapien
tgacctcggctgacagcccatagga

SEQ ID NO: 4264806 - DNA, 25 bp, Homo sapien
gacaggagcaggttcttgacctcgg

SEQ ID NO: 4264807 - DNA, 25 bp, Homo sapien
caggttcttgacctcggctgacagc

SEQ ID NO: 4264808 - DNA, 25 bp, Homo sapien
atttggacaggagcaggttcttgac

SEQ ID NO: 4264809 - DNA, 25 bp, Homo sapien
tttttattcactggcccactactgt

SEQ ID NO: 4264810 - DNA, 25 bp, Homo sapien
ttattcactggcccactactgttat

SEQ ID NO: 4264811 - DNA, 25 bp, Homo sapien
tcactggcccactactgttattatc

SEQ ID NO: 4264812 - DNA, 25 bp, Homo sapien
tattcactggcccactactgttatt

SEQ ID NO: 4264813 - DNA, 25 bp, Homo sapien
caggaacctggcatccttattttta

SEQ ID NO: 4264814 - DNA, 25 bp, Homo sapien
ccccaggaacctggcatccttattt

SEQ ID NO: 4264815 - DNA, 25 bp, Homo sapien
cttgaggtatcagagaaattctgtg

SEQ ID NO: 4264816 - DNA, 25 bp, Homo sapien
aaattctgtacactgcttgaggtat

SEQ ID NO: 4264817 - DNA, 25 bp, Homo sapien
ttatgtatgaaatctcccacagggc

SEQ ID NO: 4264818 - DNA, 25 bp, Homo sapien
tggctgctacaaatgccccaaggtg

SEQ ID NO: 4264819 - DNA, 25 bp, Homo sapien
tacatagtttcacagctcgctctgg

SEQ ID NO: 4264820 - DNA, 25 bp, Homo sapien
ctagtgggaaaagcccgcctgtcgt

SEQ ID NO: 4264821 - DNA, 25 bp, Homo sapien
gagggagtttccactagcacatgcc

SEQ ID NO: 4264822 - DNA, 25 bp, Homo sapien
gaatgtctaaccagataatatccca

SEQ ID NO: 4264823 - DNA, 25 bp, Homo sapien
caggcagatgagagcgtctaattca

SEQ ID NO: 4264824 - DNA, 25 bp, Homo sapien
gcatgacctggctagaataatgatg

SEQ ID NO: 4264825 - DNA, 25 bp, Homo sapien
ccctgaaaacagcaacaaagcaatt

SEQ ID NO: 4264826 - DNA, 25 bp, Homo sapien
cctgaaaacagcaacaaagcaattg

SEQ ID NO: 4264827 - DNA, 25 bp, Homo sapien
caacagctgcatccgccatcccgtt

SEQ ID NO: 4264828 - DNA, 25 bp, Homo sapien
gcacggaagaccctatcaatgtctt

SEQ ID NO: 4264829 - DNA, 25 bp, Homo sapien
cggaagaccctatcaatgtcttggc

SEQ ID NO: 4264830 - DNA, 25 bp, Homo sapien
gaccctatcaatgtcttggctactc

SEQ ID NO: 4264831 - DNA, 25 bp, Homo sapien
ttaactggaagcctattacaggccg

SEQ ID NO: 4264832 - DNA, 25 bp, Homo sapien
tctcacagataacgacgtgggagcg

SEQ ID NO: 4264833 - DNA, 25 bp, Homo sapien
ttggccgataaagacaaccagcgta

SEQ ID NO: 4264834 - DNA, 25 bp, Homo sapien
gcacagtacacaacacaacttgagg

SEQ ID NO: 4264835 - DNA, 25 bp, Homo sapien
gtttgccagactttggagatagaaa

SEQ ID NO: 4264836 - DNA, 25 bp, Homo sapien
gaaagggataatcaactggaatctt

SEQ ID NO: 4264837 - DNA, 25 bp, Homo sapien
tatgctttcgaaagcagttggggag

SEQ ID NO: 4264838 - DNA, 25 bp, Homo sapien
ctttggagatagaaagggataatca

SEQ ID NO: 4264839 - DNA, 25 bp, Homo sapien
caaacaggaattggatgttatttcc

SEQ ID NO: 4264840 - DNA, 25 bp, Homo sapien
aaaatagaggactatatcataaatc

SEQ ID NO: 4264841 - DNA, 25 bp, Homo sapien
ccctttagcacaatgcttttccagt

SEQ ID NO: 4264842 - DNA, 25 bp, Homo sapien
cctgctctaagatccttaaaataga

SEQ ID NO: 4264843 - DNA, 25 bp, Homo sapien
ggctactgggccaaagtcagcacaa

SEQ ID NO: 4264844 - DNA, 25 bp, Homo sapien
tctgtgtagaactgatagtggtcca

SEQ ID NO: 4264845 - DNA, 25 bp, Homo sapien
gatgaaatcatagcgtctgctctga

SEQ ID NO: 4264846 - DNA, 25 bp, Homo sapien
aataaagctgtgtctgccactccaa

SEQ ID NO: 4264847 - DNA, 25 bp, Homo sapien
ccaaagacggaaggcaatgcctcaa

SEQ ID NO: 4264848 - DNA, 25 bp, Homo sapien
gccccaaagacggaaggcaatgcct

SEQ ID NO: 4264849 - DNA, 25 bp, Homo sapien
gacggaaggcaatgcctcaaacacc

SEQ ID NO: 4264850 - DNA, 25 bp, Homo sapien
cagtctgccccaaagacggaaggca

SEQ ID NO: 4264851 - DNA, 25 bp, Homo sapien
cagccccgagcagatgccgaagttc

SEQ ID NO: 4264852 - DNA, 25 bp, Homo sapien
tcagccccgagcagatgccgaagtt

SEQ ID NO: 4264853 - DNA, 25 bp, Homo sapien
acccttgtactaccctcttcagcca

SEQ ID NO: 4264854 - DNA, 25 bp, Homo sapien
tccacccttgtactaccctcttcag

SEQ ID NO: 4264855 - DNA, 25 bp, Homo sapien
ccttgtactaccctcttcagccaca

SEQ ID NO: 4264856 - DNA, 25 bp, Homo sapien
cttgtactaccctcttcagccacac

SEQ ID NO: 4264857 - DNA, 25 bp, Homo sapien
gacttgatgttgagggtgtagtccc

SEQ ID NO: 4264858 - DNA, 25 bp, Homo sapien
gttgagggtgtagtcccatgagaaa

SEQ ID NO: 4264859 - DNA, 25 bp, Homo sapien
catctgacttgatgttgagggtgta

SEQ ID NO: 4264860 - DNA, 25 bp, Homo sapien
gtttgccctcatctgacttgatgtt

SEQ ID NO: 4264861 - DNA, 25 bp, Homo sapien
acacttcacacgcagcaggcggcag

SEQ ID NO: 4264862 - DNA, 25 bp, Homo sapien
gggcaggagcgtgagagccatgcat

SEQ ID NO: 4264863 - DNA, 25 bp, Homo sapien
caggactagggcaggagcgtgagag

SEQ ID NO: 4264864 - DNA, 25 bp, Homo sapien
tgcctcacaagggggcaatgcagtg

SEQ ID NO: 4264865 - DNA, 25 bp, Homo sapien
gatgctggctttccacaataccata

SEQ ID NO: 4264866 - DNA, 25 bp, Homo sapien
gtttgtgtcaatgccaacaccttgc

SEQ ID NO: 4264867 - DNA, 25 bp, Homo sapien
cataactgcctgacaggtttgtgtc

SEQ ID NO: 4264868 - DNA, 25 bp, Homo sapien
ccttgccaggactaaaggaatacct

SEQ ID NO: 4264869 - DNA, 25 bp, Homo sapien
caccagtgacctgaaagctcgagaa

SEQ ID NO: 4264870 - DNA, 25 bp, Homo sapien
gaatggtataggccagagaacatct

SEQ ID NO: 4264871 - DNA, 25 bp, Homo sapien
ttccctcggacaccagtcccagaag

SEQ ID NO: 4264872 - DNA, 25 bp, Homo sapien
ctgaaagctcgagaatggtataggc

SEQ ID NO: 4264873 - DNA, 25 bp, Homo sapien
cgtagacaccaacgtcttcagtaca

SEQ ID NO: 4264874 - DNA, 25 bp, Homo sapien
ttactccactttccgtagacaccaa

SEQ ID NO: 4264875 - DNA, 25 bp, Homo sapien
cactttccgtagacaccaacgtctt

SEQ ID NO: 4264876 - DNA, 25 bp, Homo sapien
caacgtcttcagtacaagcacccat

SEQ ID NO: 4264877 - DNA, 25 bp, Homo sapien
cttttgggtcccatccagtaacaca

SEQ ID NO: 4264878 - DNA, 25 bp, Homo sapien
tccttttgggtcccatccagtaaca

SEQ ID NO: 4264879 - DNA, 25 bp, Homo sapien
agaatggccatctgcccccgttctg

SEQ ID NO: 4264880 - DNA, 25 bp, Homo sapien
gctcctaaggccacattgcaataag

SEQ ID NO: 4264881 - DNA, 25 bp, Homo sapien
gccctgtccgcagaatggccatctg

SEQ ID NO: 4264882 - DNA, 25 bp, Homo sapien
aataagatgatccatcccacaggca

SEQ ID NO: 4264883 - DNA, 25 bp, Homo sapien
ttccagcaggccactccacgcagac

SEQ ID NO: 4264884 - DNA, 25 bp, Homo sapien
tccttaataaggacagtgtcacctc

SEQ ID NO: 4264885 - DNA, 25 bp, Homo sapien
agcaggccactccacgcagactctc

SEQ ID NO: 4264886 - DNA, 25 bp, Homo sapien
cagcctcctacggttcccctggctt

SEQ ID NO: 4264887 - DNA, 25 bp, Homo sapien
tcctgtgtggttgataggagctgat

SEQ ID NO: 4264888 - DNA, 25 bp, Homo sapien
ctttcctgtgtggttgataggagct

SEQ ID NO: 4264889 - DNA, 25 bp, Homo sapien
cctgtgtggttgataggagctgatg

SEQ ID NO: 4264890 - DNA, 25 bp, Homo sapien
ttcctgtgtggttgataggagctga

SEQ ID NO: 4264891 - DNA, 25 bp, Homo sapien
gaaagggccttactatcttctacca

SEQ ID NO: 4264892 - DNA, 25 bp, Homo sapien
tctacactcccattagatgaaaggg

SEQ ID NO: 4264893 - DNA, 25 bp, Homo sapien
tcccattagatgaaagggccttact

SEQ ID NO: 4264894 - DNA, 25 bp, Homo sapien
cctgacatctacactcccattagat

SEQ ID NO: 4264895 - DNA, 25 bp, Homo sapien
tcaataaggacacctggggagtaat

SEQ ID NO: 4264896 - DNA, 25 bp, Homo sapien
ataaggacacctggggagtaattga

SEQ ID NO: 4264897 - DNA, 25 bp, Homo sapien
tctgctcaataaggacacctgggga

SEQ ID NO: 4264898 - DNA, 25 bp, Homo sapien
gacacctggggagtaattgaaggat

SEQ ID NO: 4264899 - DNA, 25 bp, Homo sapien
tgctttctaaacaatcgagaatgct

SEQ ID NO: 4264900 - DNA, 25 bp, Homo sapien
tctaaacaatcgagaatgctgacac

SEQ ID NO: 4264901 - DNA, 25 bp, Homo sapien
cctgaaatatgaacagttactggct

SEQ ID NO: 4264902 - DNA, 25 bp, Homo sapien
tttgaccctgaaatatgaacagtta

SEQ ID NO: 4264903 - DNA, 25 bp, Homo sapien
tcctgcttaaccaggaggtggccag

SEQ ID NO: 4264904 - DNA, 25 bp, Homo sapien
tacacagcaggcacccttaattcct

SEQ ID NO: 4264905 - DNA, 25 bp, Homo sapien
gagctccaaagcctgtccagaaaag

SEQ ID NO: 4264906 - DNA, 25 bp, Homo sapien
gagtcctttgttggtaactctccta

SEQ ID NO: 4264907 - DNA, 25 bp, Homo sapien
tcttcctcaatgtccgtaattttaa

SEQ ID NO: 4264908 - DNA, 25 bp, Homo sapien
aaatctcacccaaggcactgtggct

SEQ ID NO: 4264909 - DNA, 25 bp, Homo sapien
gtggcttcttataaacatgactgaa

SEQ ID NO: 4264910 - DNA, 25 bp, Homo sapien
attttaaaatctcacccaaggcact

SEQ ID NO: 4264911 - DNA, 25 bp, Homo sapien
tcttgggtatcattcccaactggtc

SEQ ID NO: 4264912 - DNA, 25 bp, Homo sapien
tatcattcccaactggtcttcttaa

SEQ ID NO: 4264913 - DNA, 25 bp, Homo sapien
ttcttaagaagcgtttgtgaaccat

SEQ ID NO: 4264914 - DNA, 25 bp, Homo sapien
tggtcttcttaagaagcgtttgtga

SEQ ID NO: 4264915 - DNA, 25 bp, Homo sapien
ggatgaagtcttcatcaaaatggcc

SEQ ID NO: 4264916 - DNA, 25 bp, Homo sapien
cacaggatgaagtcttcatcaaaat

SEQ ID NO: 4264917 - DNA, 25 bp, Homo sapien
atgaagtcttcatcaaaatggccag

SEQ ID NO: 4264918 - DNA, 25 bp, Homo sapien
tcaaaatggccagctgctgtgcagc

SEQ ID NO: 4264919 - DNA, 25 bp, Homo sapien
tacttgctccatattggaaaccaaa

SEQ ID NO: 4264920 - DNA, 25 bp, Homo sapien
cttgtagctagatttgttacagcca

SEQ ID NO: 4264921 - DNA, 25 bp, Homo sapien
gaaaatccatcaaattgcccataaa

SEQ ID NO: 4264922 - DNA, 25 bp, Homo sapien
ttctctcttgaatcttgtagctaga

SEQ ID NO: 4264923 - DNA, 25 bp, Homo sapien
ttcactgagcccatcacaggcaggt

SEQ ID NO: 4264924 - DNA, 25 bp, Homo sapien
aagtagctggcttgtgttagaggcc

SEQ ID NO: 4264925 - DNA, 25 bp, Homo sapien
ttttttgaataagtaccacatgaag

SEQ ID NO: 4264926 - DNA, 25 bp, Homo sapien
tcctccagtgttggattccctattt

SEQ ID NO: 4264927 - DNA, 25 bp, Homo sapien
taaatcgcccaaatcttggtgtgaa

SEQ ID NO: 4264928 - DNA, 25 bp, Homo sapien
ggtgtgaagatccatccatcagtga

SEQ ID NO: 4264929 - DNA, 25 bp, Homo sapien
tcccatcacattgtataaatcgccc

SEQ ID NO: 4264930 - DNA, 25 bp, Homo sapien
gacaaccagaggagcattacagact

SEQ ID NO: 4264931 - DNA, 25 bp, Homo sapien
gagagatagaagaagacctgaatcc

SEQ ID NO: 4264932 - DNA, 25 bp, Homo sapien
atggagagatagaagaagacctgaa

SEQ ID NO: 4264933 - DNA, 25 bp, Homo sapien
agaagacctgaatccccggctacta

SEQ ID NO: 4264934 - DNA, 25 bp, Homo sapien
gatagaagaagacctgaatccccgg

SEQ ID NO: 4264935 - DNA, 25 bp, Homo sapien
catccttttctacttaagtaatttg

SEQ ID NO: 4264936 - DNA, 25 bp, Homo sapien
tctccttcccagtattctccctgaa

SEQ ID NO: 4264937 - DNA, 25 bp, Homo sapien
aagactctttcctccatagatggga

SEQ ID NO: 4264938 - DNA, 25 bp, Homo sapien
cacaacagaaggcacatagccatct

SEQ ID NO: 4264939 - DNA, 25 bp, Homo sapien
cacatagccatctaagcagcaaaga

SEQ ID NO: 4264940 - DNA, 25 bp, Homo sapien
tgatgtttggtaaaacccatgaccc

SEQ ID NO: 4264941 - DNA, 25 bp, Homo sapien
agcaccatataaattcctgtctctg

SEQ ID NO: 4264942 - DNA, 25 bp, Homo sapien
tctctgtgggactgtaaggcttagg

SEQ ID NO: 4264943 - DNA, 25 bp, Homo sapien
tctgtattgagatctaacctcatgt

SEQ ID NO: 4264944 - DNA, 25 bp, Homo sapien
agggaaactcccgtgatggacagat

SEQ ID NO: 4264945 - DNA, 25 bp, Homo sapien
cccgtgatggacagatgtccctcag

SEQ ID NO: 4264946 - DNA, 25 bp, Homo sapien
ggaaactcccgtgatggacagatgt

SEQ ID NO: 4264947 - DNA, 25 bp, Homo sapien
tcacagggaaactcccgtgatggac

SEQ ID NO: 4264948 - DNA, 25 bp, Homo sapien
gtgggcctccgccaaacactgcatg

SEQ ID NO: 4264949 - DNA, 25 bp, Homo sapien
cactgcatgtggatcagcaaggcct

SEQ ID NO: 4264950 - DNA, 25 bp, Homo sapien
aattgcgtggttcctgtgggcctcc

SEQ ID NO: 4264951 - DNA, 25 bp, Homo sapien
agctgcttttggtcttccgtgtgca

SEQ ID NO: 4264952 - DNA, 25 bp, Homo sapien
tcactggggaatatttctcagctgc

SEQ ID NO: 4264953 - DNA, 25 bp, Homo sapien
gaaagaattcacttagcaaggaagg

SEQ ID NO: 4264954 - DNA, 25 bp, Homo sapien
ctggggaatatttctcagctgcagt

SEQ ID NO: 4264955 - DNA, 25 bp, Homo sapien
cactggggaatatttctcagctgca

SEQ ID NO: 4264956 - DNA, 25 bp, Homo sapien
accccgcatctaatccatctccaaa

SEQ ID NO: 4264957 - DNA, 25 bp, Homo sapien
cctaaagtccaagctgccagcatct

SEQ ID NO: 4264958 - DNA, 25 bp, Homo sapien
ctccaaatcctaaatatctcctctt

SEQ ID NO: 4264959 - DNA, 25 bp, Homo sapien
ccaaaatggcaacagcttattaacc

SEQ ID NO: 4264960 - DNA, 25 bp, Homo sapien
attttttgaagtggatacgtactct

SEQ ID NO: 4264961 - DNA, 25 bp, Homo sapien
tcacagtctgggtgttttccctggg

SEQ ID NO: 4264962 - DNA, 25 bp, Homo sapien
ctttgctttcaggacaggacatctt

SEQ ID NO: 4264963 - DNA, 25 bp, Homo sapien
aggacatcttcacagtctgggtgtt

SEQ ID NO: 4264964 - DNA, 25 bp, Homo sapien
catcttcacagtctgggtgttttcc

SEQ ID NO: 4264965 - DNA, 25 bp, Homo sapien
tggttgatgacaggtattccctcat

SEQ ID NO: 4264966 - DNA, 25 bp, Homo sapien
tatggttgatgacaggtattccctc

SEQ ID NO: 4264967 - DNA, 25 bp, Homo sapien
atggttgatgacaggtattccctca

SEQ ID NO: 4264968 - DNA, 25 bp, Homo sapien
ccctggggtctgattgcctcgtatt

SEQ ID NO: 4264969 - DNA, 25 bp, Homo sapien
tccagataaggtatctgaatagagg

SEQ ID NO: 4264970 - DNA, 25 bp, Homo sapien
atttccagataaggtatctgaatag

SEQ ID NO: 4264971 - DNA, 25 bp, Homo sapien
attgcctcgtattaaactttcatta

SEQ ID NO: 4264972 - DNA, 25 bp, Homo sapien
ctgccaacaatttagcatcttccca

SEQ ID NO: 4264973 - DNA, 25 bp, Homo sapien
gtccccagcgagaaggtccccttca

SEQ ID NO: 4264974 - DNA, 25 bp, Homo sapien
tcaaattggcagaattgccggcaag

SEQ ID NO: 4264975 - DNA, 25 bp, Homo sapien
cacacgggccgttcaagatcccggt

SEQ ID NO: 4264976 - DNA, 25 bp, Homo sapien
attgccggcaagcacacgggccgtt

SEQ ID NO: 4264977 - DNA, 25 bp, Homo sapien
gaccagtcaaggcgctcctcatctt

SEQ ID NO: 4264978 - DNA, 25 bp, Homo sapien
ccgagttgaatcttctaagcgcaag

SEQ ID NO: 4264979 - DNA, 25 bp, Homo sapien
gataagtcgtcttctgaccagtcaa

SEQ ID NO: 4264980 - DNA, 25 bp, Homo sapien
caaggtccaggagccattctagaaa

SEQ ID NO: 4264981 - DNA, 25 bp, Homo sapien
aataaactttgaagtgttcacctca

SEQ ID NO: 4264982 - DNA, 25 bp, Homo sapien
cctcacgtgcccctgagccctattt

SEQ ID NO: 4264983 - DNA, 25 bp, Homo sapien
ttgtatgtcaaggaggagtttaagg

SEQ ID NO: 4264984 - DNA, 25 bp, Homo sapien
caaactttctagtcctgctgatcct

SEQ ID NO: 4264985 - DNA, 25 bp, Homo sapien
tcccacatatcaattctcgaaaaac

SEQ ID NO: 4264986 - DNA, 25 bp, Homo sapien
cattcccacatatcaattctcgaaa

SEQ ID NO: 4264987 - DNA, 25 bp, Homo sapien
ttcattcccacatatcaattctcga

SEQ ID NO: 4264988 - DNA, 25 bp, Homo sapien
ccacatatcaattctcgaaaaacct

SEQ ID NO: 4264989 - DNA, 25 bp, Homo sapien
gaacaggcagactattatggtcagt

SEQ ID NO: 4264990 - DNA, 25 bp, Homo sapien
gacactgttaccattgtcaaaagat

SEQ ID NO: 4264991 - DNA, 25 bp, Homo sapien
catgtgtccactctgacactgttac

SEQ ID NO: 4264992 - DNA, 25 bp, Homo sapien
tatggactggtcctcaaaaggccct

SEQ ID NO: 4264993 - DNA, 25 bp, Homo sapien
gccacagctgttctcctcccaccac

SEQ ID NO: 4264994 - DNA, 25 bp, Homo sapien
attatctactgttttctctctattc

SEQ ID NO: 4264995 - DNA, 25 bp, Homo sapien
tcttattatctactgttttctctct

SEQ ID NO: 4264996 - DNA, 25 bp, Homo sapien
accaccagtcagagcggctgcttcc

SEQ ID NO: 4264997 - DNA, 25 bp, Homo sapien
gatctaccacctggaacctcttctg

SEQ ID NO: 4264998 - DNA, 25 bp, Homo sapien
ctcagacacaggagatctaccacct

SEQ ID NO: 4264999 - DNA, 25 bp, Homo sapien
gacacaggagatctaccacctggaa

SEQ ID NO: 4265000 - DNA, 25 bp, Homo sapien
tgtccctcgggtcttttttagatga

SEQ ID NO: 4265001 - DNA, 25 bp, Homo sapien
taactgagggcataactgcttctga

SEQ ID NO: 4265002 - DNA, 25 bp, Homo sapien
gagctcagcacaaggaaaagtgtgt

SEQ ID NO: 4265003 - DNA, 25 bp, Homo sapien
gctgctccacgcaagctgtaaaagt

SEQ ID NO: 4265004 - DNA, 25 bp, Homo sapien
taagcactacaaaaacctcctgtgt

SEQ ID NO: 4265005 - DNA, 25 bp, Homo sapien
tccaagaagcatggcagttctaagc

SEQ ID NO: 4265006 - DNA, 25 bp, Homo sapien
aagaagcatggcagttctaagcttg

SEQ ID NO: 4265007 - DNA, 25 bp, Homo sapien
aaaagggacaagccttgatggaaat

SEQ ID NO: 4265008 - DNA, 25 bp, Homo sapien
gatggaaatctgaaacaacgttttc

SEQ ID NO: 4265009 - DNA, 25 bp, Homo sapien
gagagggcagtgtggtacaaatcac

SEQ ID NO: 4265010 - DNA, 25 bp, Homo sapien
gattatgggcttggcaggcactctg

SEQ ID NO: 4265011 - DNA, 25 bp, Homo sapien
cacagtgtctcatgactaaaggact

SEQ ID NO: 4265012 - DNA, 25 bp, Homo sapien
caatcagacatggtttgggtggaga

SEQ ID NO: 4265013 - DNA, 25 bp, Homo sapien
tgttttgcaagtatcgggacccttc

SEQ ID NO: 4265014 - DNA, 25 bp, Homo sapien
taaatcccaagcactgcgaacatct

SEQ ID NO: 4265015 - DNA, 25 bp, Homo sapien
cttcacataggcacggcacaattcc

SEQ ID NO: 4265016 - DNA, 25 bp, Homo sapien
acatcttcttcacataggcacggca

SEQ ID NO: 4265017 - DNA, 25 bp, Homo sapien
actgcttataatgttctcgggaatg

SEQ ID NO: 4265018 - DNA, 25 bp, Homo sapien
gttctcgggaatgtgaatgatgttc

SEQ ID NO: 4265019 - DNA, 25 bp, Homo sapien
taggctggtaacgactgcttataat

SEQ ID NO: 4265020 - DNA, 25 bp, Homo sapien
caagcataattacattaggctggta

SEQ ID NO: 4265021 - DNA, 25 bp, Homo sapien
tttaaatgttcaaatccaagaaggc

SEQ ID NO: 4265022 - DNA, 25 bp, Homo sapien
tgttcaaatccaagaaggcgagttc

SEQ ID NO: 4265023 - DNA, 25 bp, Homo sapien
taagaaatacaagcaactctttctc

SEQ ID NO: 4265024 - DNA, 25 bp, Homo sapien
caagaaggcgagttctaagaaatac

SEQ ID NO: 4265025 - DNA, 25 bp, Homo sapien
aagggtgccggcacaacacagactc

SEQ ID NO: 4265026 - DNA, 25 bp, Homo sapien
gagtctgtgttgtgccggcaccctt

SEQ ID NO: 4265027 - DNA, 25 bp, Homo sapien
tgtcggctattaaactgttggtgag

SEQ ID NO: 4265028 - DNA, 25 bp, Homo sapien
catttcagcatgtaccgtttgggct

SEQ ID NO: 4265029 - DNA, 25 bp, Homo sapien
gctatgaggaaaagcatgtcatctt

SEQ ID NO: 4265030 - DNA, 25 bp, Homo sapien
gtgtacgttcaataaatgtcggcta

SEQ ID NO: 4265031 - DNA, 25 bp, Homo sapien
gcacaagaaccttcgttctattatt

SEQ ID NO: 4265032 - DNA, 25 bp, Homo sapien
agaactggaaacagcttaacgtcca

SEQ ID NO: 4265033 - DNA, 25 bp, Homo sapien
cagcttaacgtccagggtaagttag

SEQ ID NO: 4265034 - DNA, 25 bp, Homo sapien
tattatttagtaaagtgagaactgg

SEQ ID NO: 4265035 - DNA, 25 bp, Homo sapien
tgctcacattctcggattcccgcgg

SEQ ID NO: 4265036 - DNA, 25 bp, Homo sapien
catacagtactttcgcaattcggag

SEQ ID NO: 4265037 - DNA, 25 bp, Homo sapien
gaaggtcgcattttgcctgccggag

SEQ ID NO: 4265038 - DNA, 25 bp, Homo sapien
caatgagcaaggtaggctgtgtcac

SEQ ID NO: 4265039 - DNA, 25 bp, Homo sapien
tccgcgcaaagcgggttaaaagtca

SEQ ID NO: 4265040 - DNA, 25 bp, Homo sapien
agctcagctccatgaacctagcgga

SEQ ID NO: 4265041 - DNA, 25 bp, Homo sapien
ttaagacgagtttgaccgaggccgc

SEQ ID NO: 4265042 - DNA, 25 bp, Homo sapien
cgctttccgcgtcctttaagacgag

SEQ ID NO: 4265043 - DNA, 25 bp, Homo sapien
gaaaccgcgtctttcaactgacaat

SEQ ID NO: 4265044 - DNA, 25 bp, Homo sapien
tcattgcttctcagagccgtggtgc

SEQ ID NO: 4265045 - DNA, 25 bp, Homo sapien
gggcggcgggctagagagggaatgt

SEQ ID NO: 4265046 - DNA, 25 bp, Homo sapien
agaggttgcttgagctccgcccgga

SEQ ID NO: 4265047 - DNA, 25 bp, Homo sapien
ctgtcgggccggaggcggagtcaga

SEQ ID NO: 4265048 - DNA, 25 bp, Homo sapien
ggatacggatggctagtggggcgcc

SEQ ID NO: 4265049 - DNA, 25 bp, Homo sapien
ctgaggcggagactccccgccgccg

SEQ ID NO: 4265050 - DNA, 25 bp, Homo sapien
gccatctgggttgagagagcggcga

SEQ ID NO: 4265051 - DNA, 25 bp, Homo sapien
cgattgcggccgctgctgaggcgga

SEQ ID NO: 4265052 - DNA, 25 bp, Homo sapien
gagcgcgcagagctcttccctcctc

SEQ ID NO: 4265053 - DNA, 25 bp, Homo sapien
aagcacaagtcgtccctcaactcgt

SEQ ID NO: 4265054 - DNA, 25 bp, Homo sapien
ccggggcacaacatggcggagccct

SEQ ID NO: 4265055 - DNA, 25 bp, Homo sapien
actcgtccccgtggagtggcctcat

SEQ ID NO: 4265056 - DNA, 25 bp, Homo sapien
gcggaggaggagagctagacccgcc

SEQ ID NO: 4265057 - DNA, 25 bp, Homo sapien
cagtgcgcgcacaaggcggcgggcg

SEQ ID NO: 4265058 - DNA, 25 bp, Homo sapien
ctgggtggcagtcgcttctctcctt

SEQ ID NO: 4265059 - DNA, 25 bp, Homo sapien
gggcccagtgcgcgcacaaggcggc

SEQ ID NO: 4265060 - DNA, 25 bp, Homo sapien
tgggaaacagccggcacggccacca

SEQ ID NO: 4265061 - DNA, 25 bp, Homo sapien
gctcgcgcctcttcgccgtcatccg

SEQ ID NO: 4265062 - DNA, 25 bp, Homo sapien
tcttcgccgtcatccgcttcgaaag

SEQ ID NO: 4265063 - DNA, 25 bp, Homo sapien
gcttgccggcttcagctcgcgcctc

SEQ ID NO: 4265064 - DNA, 25 bp, Homo sapien
ttcagctcgcgcctcttcgccgtca

SEQ ID NO: 4265065 - DNA, 25 bp, Homo sapien
gctccgtcattagtttgctgatatt

SEQ ID NO: 4265066 - DNA, 25 bp, Homo sapien
gctgatattttctgttcggaaaggg

SEQ ID NO: 4265067 - DNA, 25 bp, Homo sapien
tttctctgctccgtcattagtttgc

SEQ ID NO: 4265068 - DNA, 25 bp, Homo sapien
ttgctgatattttctgttcggaaag

SEQ ID NO: 4265069 - DNA, 25 bp, Homo sapien
ctgtaatatggaacaaacttcatac

SEQ ID NO: 4265070 - DNA, 25 bp, Homo sapien
ccgagactgtcctcagaaagttggt

SEQ ID NO: 4265071 - DNA, 25 bp, Homo sapien
caccgagactgtcctcagaaagttg

SEQ ID NO: 4265072 - DNA, 25 bp, Homo sapien
tgttgctttccaccgagactgtcct

SEQ ID NO: 4265073 - DNA, 25 bp, Homo sapien
cttgtgctgttgctttccaccgaga

SEQ ID NO: 4265074 - DNA, 25 bp, Homo sapien
aactatagatcaacacatcatcttg

SEQ ID NO: 4265075 - DNA, 25 bp, Homo sapien
ttaaattggtttgatgaaagagcat

SEQ ID NO: 4265076 - DNA, 25 bp, Homo sapien
catctcatgggttctatgaattttt

SEQ ID NO: 4265077 - DNA, 25 bp, Homo sapien
aaattggtttgatgaaagagcatgg

SEQ ID NO: 4265078 - DNA, 25 bp, Homo sapien
ccagtgctgctgtacttatcaaaaa

SEQ ID NO: 4265079 - DNA, 25 bp, Homo sapien
tgaagatgataccaagcagtaggat

SEQ ID NO: 4265080 - DNA, 25 bp, Homo sapien
cagtaggatgttgccagtgctgctg

SEQ ID NO: 4265081 - DNA, 25 bp, Homo sapien
gctgctgtacttatcaaaaagtgtt

SEQ ID NO: 4265082 - DNA, 25 bp, Homo sapien
gggtgtggttcagcccattgaactg

SEQ ID NO: 4265083 - DNA, 25 bp, Homo sapien
gaacaagcaaaagacctctctggag

SEQ ID NO: 4265084 - DNA, 25 bp, Homo sapien
cattgaactggtttggcactgctga

SEQ ID NO: 4265085 - DNA, 25 bp, Homo sapien
gacctctctggagtgtagacaccta

SEQ ID NO: 4265086 - DNA, 25 bp, Homo sapien
aatctacttttaagcgtccttctct

SEQ ID NO: 4265087 - DNA, 25 bp, Homo sapien
cagagcttctgttatttacctgtta

SEQ ID NO: 4265088 - DNA, 25 bp, Homo sapien
tcttgctggatgaatagtcccaaac

SEQ ID NO: 4265089 - DNA, 25 bp, Homo sapien
cctgttatatgctcaccttctcttg

SEQ ID NO: 4265090 - DNA, 25 bp, Homo sapien
ttcccaaaacagaagtatttgtcaa

SEQ ID NO: 4265091 - DNA, 25 bp, Homo sapien
ccaaaacagaagtatttgtcaaaga

SEQ ID NO: 4265092 - DNA, 25 bp, Homo sapien
aaaacagaagtatttgtcaaagaag

SEQ ID NO: 4265093 - DNA, 25 bp, Homo sapien
cccaaaacagaagtatttgtcaaag

SEQ ID NO: 4265094 - DNA, 25 bp, Homo sapien
tctgagaatttggactaactgcacc

SEQ ID NO: 4265095 - DNA, 25 bp, Homo sapien
tacacaggatgttgcttaccaggac

SEQ ID NO: 4265096 - DNA, 25 bp, Homo sapien
tgttagcagtcgttttcaccaggta

SEQ ID NO: 4265097 - DNA, 25 bp, Homo sapien
taccaaaaggaagcgtggctacatt

SEQ ID NO: 4265098 - DNA, 25 bp, Homo sapien
atgcagagaagttgttgactgtagg

SEQ ID NO: 4265099 - DNA, 25 bp, Homo sapien
gtaacgaagtctggatttctgatac

SEQ ID NO: 4265100 - DNA, 25 bp, Homo sapien
tgacccagatgatggttcctttaca

SEQ ID NO: 4265101 - DNA, 25 bp, Homo sapien
ttttcacaaatagagtgtaacgaag

SEQ ID NO: 4265102 - DNA, 25 bp, Homo sapien
ggtatgcataaatgagctcccatat

SEQ ID NO: 4265103 - DNA, 25 bp, Homo sapien
tattgctggtaaaaaccactatgga

SEQ ID NO: 4265104 - DNA, 25 bp, Homo sapien
actgtccaccagattggctaattgg

SEQ ID NO: 4265105 - DNA, 25 bp, Homo sapien
tggcattagttagtgcaactgacaa

SEQ ID NO: 4265106 - DNA, 25 bp, Homo sapien
gggagagccccttgatcgtcacagg

SEQ ID NO: 4265107 - DNA, 25 bp, Homo sapien
tgtctagcagtcaaaagggactccc

SEQ ID NO: 4265108 - DNA, 25 bp, Homo sapien
ggtatacttagagcgcagccttgga

SEQ ID NO: 4265109 - DNA, 25 bp, Homo sapien
gaaattaacatagggagctgccagg

SEQ ID NO: 4265110 - DNA, 25 bp, Homo sapien
caaatggacctaacgtacagatcac

SEQ ID NO: 4265111 - DNA, 25 bp, Homo sapien
taaaactaaacccaaggctagctga

SEQ ID NO: 4265112 - DNA, 25 bp, Homo sapien
tacagatcacccaacaaccagagaa

SEQ ID NO: 4265113 - DNA, 25 bp, Homo sapien
tgacaaaacttacaggatgccatga

SEQ ID NO: 4265114 - DNA, 25 bp, Homo sapien
taagacaatgctactcaaagggatc

SEQ ID NO: 4265115 - DNA, 25 bp, Homo sapien
tacaaggtctcagtgaatgccaaca

SEQ ID NO: 4265116 - DNA, 25 bp, Homo sapien
ttgggcgcggacagacaaaacactg

SEQ ID NO: 4265117 - DNA, 25 bp, Homo sapien
tatggacagtgatcgggccatgcca

SEQ ID NO: 4265118 - DNA, 25 bp, Homo sapien
tcctacaaaaacagggctatactgg

SEQ ID NO: 4265119 - DNA, 25 bp, Homo sapien
acagggctatactggaaagctctgc

SEQ ID NO: 4265120 - DNA, 25 bp, Homo sapien
caaaaacagggctatactggaaagc

SEQ ID NO: 4265121 - DNA, 25 bp, Homo sapien
taatattcctacaaaaacagggcta

SEQ ID NO: 4265122 - DNA, 25 bp, Homo sapien
ggattgaagtatacccagccatcgc

SEQ ID NO: 4265123 - DNA, 25 bp, Homo sapien
ggggattgaagtatacccagccatc

SEQ ID NO: 4265124 - DNA, 25 bp, Homo sapien
gattgaagtatacccagccatcgcc

SEQ ID NO: 4265125 - DNA, 25 bp, Homo sapien
agaggggattgaagtatacccagcc

SEQ ID NO: 4265126 - DNA, 25 bp, Homo sapien
caagggtgtgcataccagtgacttc

SEQ ID NO: 4265127 - DNA, 25 bp, Homo sapien
aggataaccgcagccactctgtgtg

SEQ ID NO: 4265128 - DNA, 25 bp, Homo sapien
tccagcaggcagtagtcacaaacaa

SEQ ID NO: 4265129 - DNA, 25 bp, Homo sapien
tggagacctctcaacagggaaaagg

SEQ ID NO: 4265130 - DNA, 25 bp, Homo sapien
cctgtctgaaccagaatccaacctt

SEQ ID NO: 4265131 - DNA, 25 bp, Homo sapien
ccacacagggtccccactcagtgac

SEQ ID NO: 4265132 - DNA, 25 bp, Homo sapien
tctcagcctcgtatatagacagaat

SEQ ID NO: 4265133 - DNA, 25 bp, Homo sapien
gaataatccctctttgtagcagaag

SEQ ID NO: 4265134 - DNA, 25 bp, Homo sapien
tttctggctcctcatgaacaactag

SEQ ID NO: 4265135 - DNA, 25 bp, Homo sapien
gaatccaccccagttacctactatg

SEQ ID NO: 4265136 - DNA, 25 bp, Homo sapien
gttcctgtgggcctgctttaagacg

SEQ ID NO: 4265137 - DNA, 25 bp, Homo sapien
gctttaagacgtgtggctcctacat

SEQ ID NO: 4265138 - DNA, 25 bp, Homo sapien
tgggcctgctttaagacgtgtggct

SEQ ID NO: 4265139 - DNA, 25 bp, Homo sapien
attctgttctcagagtgcttcccaa

SEQ ID NO: 4265140 - DNA, 25 bp, Homo sapien
caagggaccaatgacaggcggcaga

SEQ ID NO: 4265141 - DNA, 25 bp, Homo sapien
tctcctgggcaagggaccaatgaca

SEQ ID NO: 4265142 - DNA, 25 bp, Homo sapien
cctgggcaagggaccaatgacaggc

SEQ ID NO: 4265143 - DNA, 25 bp, Homo sapien
ggaccaatgacaggcggcagagtta

SEQ ID NO: 4265144 - DNA, 25 bp, Homo sapien
atttgggcttccatggtgtgcggag

SEQ ID NO: 4265145 - DNA, 25 bp, Homo sapien
tgtgcggaggttctcgcgcttccgt

SEQ ID NO: 4265146 - DNA, 25 bp, Homo sapien
atcgggtcacctcccgccagaggtt

SEQ ID NO: 4265147 - DNA, 25 bp, Homo sapien
tctgctcggtggctgcgtcaatgtc

SEQ ID NO: 4265148 - DNA, 25 bp, Homo sapien
ctggggatgcgtggaggagaggaaa

SEQ ID NO: 4265149 - DNA, 25 bp, Homo sapien
cagctggctgcaagctaacggaact

SEQ ID NO: 4265150 - DNA, 25 bp, Homo sapien
ggccagctggctgcaagctaacgga

SEQ ID NO: 4265151 - DNA, 25 bp, Homo sapien
gccagctggctgcaagctaacggaa

SEQ ID NO: 4265152 - DNA, 25 bp, Homo sapien
agcagccacggagactggaaccagc

SEQ ID NO: 4265153 - DNA, 25 bp, Homo sapien
cagccacggagactggaaccagcca

SEQ ID NO: 4265154 - DNA, 25 bp, Homo sapien
ctgagcagccacggagactggaacc

SEQ ID NO: 4265155 - DNA, 25 bp, Homo sapien
actccactcctcaaggccgtttcct

SEQ ID NO: 4265156 - DNA, 25 bp, Homo sapien
gatcttcttgggatacactggcagt

SEQ ID NO: 4265157 - DNA, 25 bp, Homo sapien
cactggcagtgtggttgtgtcgatg

SEQ ID NO: 4265158 - DNA, 25 bp, Homo sapien
tggttgtgtcgatgactttggtttc

SEQ ID NO: 4265159 - DNA, 25 bp, Homo sapien
tcgatgactttggtttctccattgt

SEQ ID NO: 4265160 - DNA, 25 bp, Homo sapien
ccatgggctttacaaacaatggtgt

SEQ ID NO: 4265161 - DNA, 25 bp, Homo sapien
catgggctttacaaacaatggtgtt

SEQ ID NO: 4265162 - DNA, 25 bp, Homo sapien
acccacgggatggtgagaatggacc

SEQ ID NO: 4265163 - DNA, 25 bp, Homo sapien
gaatatcactgtcgctgagtaccca

SEQ ID NO: 4265164 - DNA, 25 bp, Homo sapien
taggcactaggcagggtgaatacgt

SEQ ID NO: 4265165 - DNA, 25 bp, Homo sapien
gaaaggcttcgtgtggaatatcact

SEQ ID NO: 4265166 - DNA, 25 bp, Homo sapien
gagggagagttaggcatgcaaacat

SEQ ID NO: 4265167 - DNA, 25 bp, Homo sapien
taggcatgcaaacatgtgaagaggg

SEQ ID NO: 4265168 - DNA, 25 bp, Homo sapien
gagttaggcatgcaaacatgtgaag

SEQ ID NO: 4265169 - DNA, 25 bp, Homo sapien
ggcatgcaaacatgtgaagagggca

SEQ ID NO: 4265170 - DNA, 25 bp, Homo sapien
gtgaagagtggggtcaatggctccc

SEQ ID NO: 4265171 - DNA, 25 bp, Homo sapien
aagagtggggtcaatggctcccaca

SEQ ID NO: 4265172 - DNA, 25 bp, Homo sapien
tcctgggcttccagtcctccagtgg

SEQ ID NO: 4265173 - DNA, 25 bp, Homo sapien
agtcctccagtggaaagagtgaaga

SEQ ID NO: 4265174 - DNA, 25 bp, Homo sapien
gttacttcttcatttggcctaacag

SEQ ID NO: 4265175 - DNA, 25 bp, Homo sapien
agttacttcttcatttggcctaaca

SEQ ID NO: 4265176 - DNA, 25 bp, Homo sapien
gggatcacaaatataagttacttct

SEQ ID NO: 4265177 - DNA, 25 bp, Homo sapien
aatgggatcacaaatataagttact

SEQ ID NO: 4265178 - DNA, 25 bp, Homo sapien
gttgactgaacagtgtcggctctca

SEQ ID NO: 4265179 - DNA, 25 bp, Homo sapien
ttaggttgactgaacagtgtcggct

SEQ ID NO: 4265180 - DNA, 25 bp, Homo sapien
taggttgactgaacagtgtcggctc

SEQ ID NO: 4265181 - DNA, 25 bp, Homo sapien
ggttgactgaacagtgtcggctctc

SEQ ID NO: 4265182 - DNA, 25 bp, Homo sapien
cccacagcaggaaaacatcaggtga

SEQ ID NO: 4265183 - DNA, 25 bp, Homo sapien
aacgagccaagggtcccctggccat

SEQ ID NO: 4265184 - DNA, 25 bp, Homo sapien
catcaggtgagtggccaggaagggc

SEQ ID NO: 4265185 - DNA, 25 bp, Homo sapien
gcccacccacagcaggaaaacatca

SEQ ID NO: 4265186 - DNA, 25 bp, Homo sapien
tctgcctgctgcctatgagaaacag

SEQ ID NO: 4265187 - DNA, 25 bp, Homo sapien
gctgggtaaagtgaatcaagggctc

SEQ ID NO: 4265188 - DNA, 25 bp, Homo sapien
cctgctgcctatgagaaacagagga

SEQ ID NO: 4265189 - DNA, 25 bp, Homo sapien
ctgggtaaagtgaatcaagggctcc

SEQ ID NO: 4265190 - DNA, 25 bp, Homo sapien
aactccaacatacgacatggcttac

SEQ ID NO: 4265191 - DNA, 25 bp, Homo sapien
tgtaagagccaaactccaacatacg

SEQ ID NO: 4265192 - DNA, 25 bp, Homo sapien
atagaaacgtcactgtgtaagagcc

SEQ ID NO: 4265193 - DNA, 25 bp, Homo sapien
caatcatctaccaggtatagaaacg

SEQ ID NO: 4265194 - DNA, 25 bp, Homo sapien
gcttcttggctaaagcgcccttgcg

SEQ ID NO: 4265195 - DNA, 25 bp, Homo sapien
tctgggtgcgccatgaaatctgcat

SEQ ID NO: 4265196 - DNA, 25 bp, Homo sapien
gcaaagatcgcttctccaggataaa

SEQ ID NO: 4265197 - DNA, 25 bp, Homo sapien
tacatgagtgttgacgcacagtctc

SEQ ID NO: 4265198 - DNA, 25 bp, Homo sapien
ggaaggacacaaagtcagacaatcc

SEQ ID NO: 4265199 - DNA, 25 bp, Homo sapien
tgggctaacacaatagtctctgtct

SEQ ID NO: 4265200 - DNA, 25 bp, Homo sapien
ctgggctaacacaatagtctctgtc

SEQ ID NO: 4265201 - DNA, 25 bp, Homo sapien
gctaacacaatagtctctgtctcag

SEQ ID NO: 4265202 - DNA, 25 bp, Homo sapien
taacacaatagtctctgtctcagtc

SEQ ID NO: 4265203 - DNA, 25 bp, Homo sapien
tcggtagaagaatggtgtacaagcc

SEQ ID NO: 4265204 - DNA, 25 bp, Homo sapien
cactgggaggcctcggtagaagaat

SEQ ID NO: 4265205 - DNA, 25 bp, Homo sapien
ggtagaagaatggtgtacaagcccc

SEQ ID NO: 4265206 - DNA, 25 bp, Homo sapien
tagaagaatggtgtacaagccccac

SEQ ID NO: 4265207 - DNA, 25 bp, Homo sapien
agcaggcaaatatccacagagctgc

SEQ ID NO: 4265208 - DNA, 25 bp, Homo sapien
tccaggacggggcaggcccatcagc

SEQ ID NO: 4265209 - DNA, 25 bp, Homo sapien
actgaggaagggtaggactgtggaa

SEQ ID NO: 4265210 - DNA, 25 bp, Homo sapien
cccatcagcaggcaaatatccacag

SEQ ID NO: 4265211 - DNA, 25 bp, Homo sapien
tacacgttatcatccacacttcatc

SEQ ID NO: 4265212 - DNA, 25 bp, Homo sapien
tgtacacgttatcatccacacttca

SEQ ID NO: 4265213 - DNA, 25 bp, Homo sapien
cttgtacacgttatcatccacactt

SEQ ID NO: 4265214 - DNA, 25 bp, Homo sapien
gtacttgtacacgttatcatccaca

SEQ ID NO: 4265215 - DNA, 25 bp, Homo sapien
gcactcagcaccaagaagagttggt

SEQ ID NO: 4265216 - DNA, 25 bp, Homo sapien
caagaagagttggttccacttctac

SEQ ID NO: 4265217 - DNA, 25 bp, Homo sapien
caggaagcatcctgcctgcactcag

SEQ ID NO: 4265218 - DNA, 25 bp, Homo sapien
cagcaccaagaagagttggttccac

SEQ ID NO: 4265219 - DNA, 25 bp, Homo sapien
tatactacgctgatcctccatgacg

SEQ ID NO: 4265220 - DNA, 25 bp, Homo sapien
tccattccaagtttgagttgtgaaa

SEQ ID NO: 4265221 - DNA, 25 bp, Homo sapien
tccatgacgcccaattccgtctctt

SEQ ID NO: 4265222 - DNA, 25 bp, Homo sapien
gacaaaaccaattcagagcctgagt

SEQ ID NO: 4265223 - DNA, 25 bp, Homo sapien
tccacagacatactcctaaggtgtt

SEQ ID NO: 4265224 - DNA, 25 bp, Homo sapien
caacgtaaatagacgttttccacag

SEQ ID NO: 4265225 - DNA, 25 bp, Homo sapien
tcagctctaaataaccccaattcta

SEQ ID NO: 4265226 - DNA, 25 bp, Homo sapien
ccccaattctaaagagatggttggg

SEQ ID NO: 4265227 - DNA, 25 bp, Homo sapien
tactaaatcaattgctccactgagg

SEQ ID NO: 4265228 - DNA, 25 bp, Homo sapien
caagaatggactgcatactaaatca

SEQ ID NO: 4265229 - DNA, 25 bp, Homo sapien
aggctgccataagcttcatgaagca

SEQ ID NO: 4265230 - DNA, 25 bp, Homo sapien
tgatttcctatttgctcacaagcca

SEQ ID NO: 4265231 - DNA, 25 bp, Homo sapien
tgacttctagtagccagaaagtctt

SEQ ID NO: 4265232 - DNA, 25 bp, Homo sapien
tcgaaaattagacccagcttgtccc

SEQ ID NO: 4265233 - DNA, 25 bp, Homo sapien
aagtcttccacaagatccagccgca

SEQ ID NO: 4265234 - DNA, 25 bp, Homo sapien
agaaagtcttccacaagatccagcc

SEQ ID NO: 4265235 - DNA, 25 bp, Homo sapien
tgaagtcccgcccacagaaggacgg

SEQ ID NO: 4265236 - DNA, 25 bp, Homo sapien
tcatccgggatgactggtggccctg

SEQ ID NO: 4265237 - DNA, 25 bp, Homo sapien
ttggtggcacaaatcctgagcaagc

SEQ ID NO: 4265238 - DNA, 25 bp, Homo sapien
aatcaacagcacatgccctctgtgt

SEQ ID NO: 4265239 - DNA, 25 bp, Homo sapien
aaacactgcagtgctttaagccctt

SEQ ID NO: 4265240 - DNA, 25 bp, Homo sapien
aacactgcagtgctttaagcccttt

SEQ ID NO: 4265241 - DNA, 25 bp, Homo sapien
acactgcagtgctttaagccctttt

SEQ ID NO: 4265242 - DNA, 25 bp, Homo sapien
tatatggctccagctcacagttggc

SEQ ID NO: 4265243 - DNA, 25 bp, Homo sapien
ggtgggtgtttacatcacaaagcca

SEQ ID NO: 4265244 - DNA, 25 bp, Homo sapien
agagattataccactcggtgctgag

SEQ ID NO: 4265245 - DNA, 25 bp, Homo sapien
taattctttgagtactgctgcagga

SEQ ID NO: 4265246 - DNA, 25 bp, Homo sapien
tgatatgggaattaggtgcctgtag

SEQ ID NO: 4265247 - DNA, 25 bp, Homo sapien
ccaggtgttacagtcagaaaggaat

SEQ ID NO: 4265248 - DNA, 25 bp, Homo sapien
gcccagccggcaccttagactttta

SEQ ID NO: 4265249 - DNA, 25 bp, Homo sapien
catcaggggccccttagacttttct

SEQ ID NO: 4265250 - DNA, 25 bp, Homo sapien
cagattcccgcacccaggtaggtgg

SEQ ID NO: 4265251 - DNA, 25 bp, Homo sapien
taggtgggactaaggcctggaactc

SEQ ID NO: 4265252 - DNA, 25 bp, Homo sapien
caacattgtaggtggccgtgattca

SEQ ID NO: 4265253 - DNA, 25 bp, Homo sapien
cctggaactctaagtgtggccacca

SEQ ID NO: 4265254 - DNA, 25 bp, Homo sapien
ggcagtgcatatcctcggcagcctg

SEQ ID NO: 4265255 - DNA, 25 bp, Homo sapien
ctcctgacgaggcagtgcatatcct

SEQ ID NO: 4265256 - DNA, 25 bp, Homo sapien
gctctcctgacgaggcagtgcatat

SEQ ID NO: 4265257 - DNA, 25 bp, Homo sapien
tgacgaggcagtgcatatcctcggc

SEQ ID NO: 4265258 - DNA, 25 bp, Homo sapien
taggagattcctcattcgtaggatc

SEQ ID NO: 4265259 - DNA, 25 bp, Homo sapien
cagctcaatgcccaagaggagtgtt

SEQ ID NO: 4265260 - DNA, 25 bp, Homo sapien
gaagttaaagtgactcccatttcaa

SEQ ID NO: 4265261 - DNA, 25 bp, Homo sapien
gctcccatcatgtcaataggcacca

SEQ ID NO: 4265262 - DNA, 25 bp, Homo sapien
cacaagaacatgagaagtgccgggc

SEQ ID NO: 4265263 - DNA, 25 bp, Homo sapien
agaagtgccgggcatgcacatagct

SEQ ID NO: 4265264 - DNA, 25 bp, Homo sapien
gaacatgagaagtgccgggcatgca

SEQ ID NO: 4265265 - DNA, 25 bp, Homo sapien
gccgggcatgcacatagctgatttt

SEQ ID NO: 4265266 - DNA, 25 bp, Homo sapien
gttcgtcttcagcagagtttggtaa

SEQ ID NO: 4265267 - DNA, 25 bp, Homo sapien
tgaggtttgttcgtcttcagcagag

SEQ ID NO: 4265268 - DNA, 25 bp, Homo sapien
gctctggctgtgaggtttgttcgtc

SEQ ID NO: 4265269 - DNA, 25 bp, Homo sapien
ctgtgaggtttgttcgtcttcagca

SEQ ID NO: 4265270 - DNA, 25 bp, Homo sapien
tgacttggacccgtgccatcccagg

SEQ ID NO: 4265271 - DNA, 25 bp, Homo sapien
aatgtgacttggacccgtgccatcc

SEQ ID NO: 4265272 - DNA, 25 bp, Homo sapien
acttggacccgtgccatcccaggat

SEQ ID NO: 4265273 - DNA, 25 bp, Homo sapien
tggaatgtgacttggacccgtgcca

SEQ ID NO: 4265274 - DNA, 25 bp, Homo sapien
agtctcacttatttggcccttttgg

SEQ ID NO: 4265275 - DNA, 25 bp, Homo sapien
tggcttattaactgacactccccgc

SEQ ID NO: 4265276 - DNA, 25 bp, Homo sapien
gccaagggtccttacaatagtctca

SEQ ID NO: 4265277 - DNA, 25 bp, Homo sapien
aaatgggaagaccaatgcaactggc

SEQ ID NO: 4265278 - DNA, 25 bp, Homo sapien
agttttgagcgtggttctgcctgcc

SEQ ID NO: 4265279 - DNA, 25 bp, Homo sapien
tgtctagttacaggcatctgcccga

SEQ ID NO: 4265280 - DNA, 25 bp, Homo sapien
gaagtagatttaggagccaccagta

SEQ ID NO: 4265281 - DNA, 25 bp, Homo sapien
tacctggcactagaatgagcttgtc

SEQ ID NO: 4265282 - DNA, 25 bp, Homo sapien
aattacatacctctccataaatgga

SEQ ID NO: 4265283 - DNA, 25 bp, Homo sapien
ttacatacctctccataaatggaag

SEQ ID NO: 4265284 - DNA, 25 bp, Homo sapien
aattttaattacatacctctccata

SEQ ID NO: 4265285 - DNA, 25 bp, Homo sapien
ttaattacatacctctccataaatg

SEQ ID NO: 4265286 - DNA, 25 bp, Homo sapien
atttcaacccgtcaccacctctgaa

SEQ ID NO: 4265287 - DNA, 25 bp, Homo sapien
tgaaggaggtagcacctgatgtgac

SEQ ID NO: 4265288 - DNA, 25 bp, Homo sapien
ggcaagtgacagtcaaaggtgggag

SEQ ID NO: 4265289 - DNA, 25 bp, Homo sapien
ggtagcacctgatgtgacataattt

SEQ ID NO: 4265290 - DNA, 25 bp, Homo sapien
gtaacaagttgaggcactccccaag

SEQ ID NO: 4265291 - DNA, 25 bp, Homo sapien
tggcccgcctggtgcacactctgct

SEQ ID NO: 4265292 - DNA, 25 bp, Homo sapien
ggcagggactcaatggcgtgcacaa

SEQ ID NO: 4265293 - DNA, 25 bp, Homo sapien
aatggcgtgcacaaggttcttctgc

SEQ ID NO: 4265294 - DNA, 25 bp, Homo sapien
tccaaaccttaactctttgctagtc

SEQ ID NO: 4265295 - DNA, 25 bp, Homo sapien
gacagcaggcgcactgtgtggcttt

SEQ ID NO: 4265296 - DNA, 25 bp, Homo sapien
tcttctacggaaggttatctgagac

SEQ ID NO: 4265297 - DNA, 25 bp, Homo sapien
ctttagagtccttcttctacggaag

SEQ ID NO: 4265298 - DNA, 25 bp, Homo sapien
gggaggcactgatgaagactcttca

SEQ ID NO: 4265299 - DNA, 25 bp, Homo sapien
aacacttgctaagactgggaggcac

SEQ ID NO: 4265300 - DNA, 25 bp, Homo sapien
tcacagttattactgctccaacact

SEQ ID NO: 4265301 - DNA, 25 bp, Homo sapien
aatgtaggatttctagccttggagc

SEQ ID NO: 4265302 - DNA, 25 bp, Homo sapien
cttaagccatgatcccaggtttttc

SEQ ID NO: 4265303 - DNA, 25 bp, Homo sapien
tgaggctgaccgtcactaagtgact

SEQ ID NO: 4265304 - DNA, 25 bp, Homo sapien
ggtgtcattattgaggctgaccgtc

SEQ ID NO: 4265305 - DNA, 25 bp, Homo sapien
gtcactaagtgacttaagccatgat

SEQ ID NO: 4265306 - DNA, 25 bp, Homo sapien
acaaaaggctggctcattccatcaa

SEQ ID NO: 4265307 - DNA, 25 bp, Homo sapien
ggctggctcattccatcaacaacca

SEQ ID NO: 4265308 - DNA, 25 bp, Homo sapien
tttgctttccgattacaaaaggctg

SEQ ID NO: 4265309 - DNA, 25 bp, Homo sapien
tgctttccgattacaaaaggctggc

SEQ ID NO: 4265310 - DNA, 25 bp, Homo sapien
ggaagcatgcagaaccattctgttc

SEQ ID NO: 4265311 - DNA, 25 bp, Homo sapien
tctgttcctacagatcacagcacaa

SEQ ID NO: 4265312 - DNA, 25 bp, Homo sapien
tgcacccagctcctgattaccatta

SEQ ID NO: 4265313 - DNA, 25 bp, Homo sapien
cataatttgcggatgcgaggtgtca

SEQ ID NO: 4265314 - DNA, 25 bp, Homo sapien
ttagcctgggaccttgaagcttcag

SEQ ID NO: 4265315 - DNA, 25 bp, Homo sapien
gaatgagttccaggctcaacttcca

SEQ ID NO: 4265316 - DNA, 25 bp, Homo sapien
gcacattatatatctctggacacac

SEQ ID NO: 4265317 - DNA, 25 bp, Homo sapien
gagaactccttttcattgcccctag

SEQ ID NO: 4265318 - DNA, 25 bp, Homo sapien
ggttgttttcaccagatagccttcc

SEQ ID NO: 4265319 - DNA, 25 bp, Homo sapien
gttgttttcaccagatagccttcca

SEQ ID NO: 4265320 - DNA, 25 bp, Homo sapien
ccagtgtagaattctgacattcatg

SEQ ID NO: 4265321 - DNA, 25 bp, Homo sapien
caagatttgtaggtcaactggaaca

SEQ ID NO: 4265322 - DNA, 25 bp, Homo sapien
ctgggagtataggctcacaccatga

SEQ ID NO: 4265323 - DNA, 25 bp, Homo sapien
gacattcatgagctataaggataca

SEQ ID NO: 4265324 - DNA, 25 bp, Homo sapien
cctcttctgtaaatgtaacactttt

SEQ ID NO: 4265325 - DNA, 25 bp, Homo sapien
gcctttcaaaacgtgcaagccagca

SEQ ID NO: 4265326 - DNA, 25 bp, Homo sapien
gattcttgattctcggaaccttcct

SEQ ID NO: 4265327 - DNA, 25 bp, Homo sapien
ttttcatgtcatatcgcctttcaaa

SEQ ID NO: 4265328 - DNA, 25 bp, Homo sapien
tctgagggaacatgcaaaggactgc

SEQ ID NO: 4265329 - DNA, 25 bp, Homo sapien
gagtttgccccgtgagtacagccaa

SEQ ID NO: 4265330 - DNA, 25 bp, Homo sapien
catggaacccaagctgattcaggag

SEQ ID NO: 4265331 - DNA, 25 bp, Homo sapien
taaaaagctgttggagtccaggatc

SEQ ID NO: 4265332 - DNA, 25 bp, Homo sapien
aaaacctttcggcactactcactca

SEQ ID NO: 4265333 - DNA, 25 bp, Homo sapien
agaaggatgttacgtgtgcagtgaa

SEQ ID NO: 4265334 - DNA, 25 bp, Homo sapien
tgttccaccagaagcttttcactag

SEQ ID NO: 4265335 - DNA, 25 bp, Homo sapien
tcctttagcaaatgtaataccttca

SEQ ID NO: 4265336 - DNA, 25 bp, Homo sapien
cctggagatcagtgcaaggaatgtg

SEQ ID NO: 4265337 - DNA, 25 bp, Homo sapien
tccagtctcaagaaacacatgagtt

SEQ ID NO: 4265338 - DNA, 25 bp, Homo sapien
ctgggtaaaagccttatgagcgcac

SEQ ID NO: 4265339 - DNA, 25 bp, Homo sapien
taaaagccttatgagcgcactgaat

SEQ ID NO: 4265340 - DNA, 25 bp, Homo sapien
ttactctcctggtataggtacacac

SEQ ID NO: 4265341 - DNA, 25 bp, Homo sapien
tttcaagcagtaatagacacctttc

SEQ ID NO: 4265342 - DNA, 25 bp, Homo sapien
cacggcctctaccactagaagtcaa

SEQ ID NO: 4265343 - DNA, 25 bp, Homo sapien
ccaatgagggcttttaccttaggct

SEQ ID NO: 4265344 - DNA, 25 bp, Homo sapien
tccaacaagactaccgctactttct

SEQ ID NO: 4265345 - DNA, 25 bp, Homo sapien
acaagactaccgctactttcttcag

SEQ ID NO: 4265346 - DNA, 25 bp, Homo sapien
aagctccaacaagactaccgctact

SEQ ID NO: 4265347 - DNA, 25 bp, Homo sapien
agactaccgctactttcttcagcca

SEQ ID NO: 4265348 - DNA, 25 bp, Homo sapien
ccagagcgggtaggtctacgtggag

SEQ ID NO: 4265349 - DNA, 25 bp, Homo sapien
ccagtgacttgtggagcccagagcg

SEQ ID NO: 4265350 - DNA, 25 bp, Homo sapien
cgggtaggtctacgtggagggatga

SEQ ID NO: 4265351 - DNA, 25 bp, Homo sapien
aggtctacgtggagggatgatcagc

SEQ ID NO: 4265352 - DNA, 25 bp, Homo sapien
ccaagcctgcttgacaggtgatagt

SEQ ID NO: 4265353 - DNA, 25 bp, Homo sapien
actacgtcagagacaagctctggcc

SEQ ID NO: 4265354 - DNA, 25 bp, Homo sapien
atcactccatccactacgtcagaga

SEQ ID NO: 4265355 - DNA, 25 bp, Homo sapien
cccttcgctttccagaaacaagctc

SEQ ID NO: 4265356 - DNA, 25 bp, Homo sapien
tggacaggagaactttttcagaggc

SEQ ID NO: 4265357 - DNA, 25 bp, Homo sapien
ttagagctagggatgcagctcccac

SEQ ID NO: 4265358 - DNA, 25 bp, Homo sapien
cagctcccacattaaggggtaggat

SEQ ID NO: 4265359 - DNA, 25 bp, Homo sapien
ctttgttagagctagggatgcagct

SEQ ID NO: 4265360 - DNA, 25 bp, Homo sapien
tccagtaaaccagtgcagcaaacag

SEQ ID NO: 4265361 - DNA, 25 bp, Homo sapien
taatctatccagtaaaccagtgcag

SEQ ID NO: 4265362 - DNA, 25 bp, Homo sapien
gcctcaacccagttaatctatccag

SEQ ID NO: 4265363 - DNA, 25 bp, Homo sapien
taaaccagtgcagcaaacagctttc

SEQ ID NO: 4265364 - DNA, 25 bp, Homo sapien
tgaaggatcactttctgctgaccga

SEQ ID NO: 4265365 - DNA, 25 bp, Homo sapien
ggttctccatcgaaagacccgccat

SEQ ID NO: 4265366 - DNA, 25 bp, Homo sapien
aaatggtccaaatcgttcttcaacg

SEQ ID NO: 4265367 - DNA, 25 bp, Homo sapien
caagagcactggaaacgatcgcaag

SEQ ID NO: 4265368 - DNA, 25 bp, Homo sapien
tttgagagtctgttctctataacag

SEQ ID NO: 4265369 - DNA, 25 bp, Homo sapien
atttgagagtctgttctctataaca

SEQ ID NO: 4265370 - DNA, 25 bp, Homo sapien
caagacggcgcaaaggaagaggagt

SEQ ID NO: 4265371 - DNA, 25 bp, Homo sapien
gagtcggcagagcgactgtcacagc

SEQ ID NO: 4265372 - DNA, 25 bp, Homo sapien
aggagtcggcagagcgactgtcaca

SEQ ID NO: 4265373 - DNA, 25 bp, Homo sapien
tcaagacggcgcaaaggaagaggag

SEQ ID NO: 4265374 - DNA, 25 bp, Homo sapien
ctgcaggcgacttgtgatgcgtgat

SEQ ID NO: 4265375 - DNA, 25 bp, Homo sapien
cttcgtgaagctggccggaatactg

SEQ ID NO: 4265376 - DNA, 25 bp, Homo sapien
ggaatactgactcttggctcttcgg

SEQ ID NO: 4265377 - DNA, 25 bp, Homo sapien
ctcttggctcttcgggcggctgcag

SEQ ID NO: 4265378 - DNA, 25 bp, Homo sapien
gagacttcggcttcgggagcttgga

SEQ ID NO: 4265379 - DNA, 25 bp, Homo sapien
aagtgagacttcggcttcgggagct

SEQ ID NO: 4265380 - DNA, 25 bp, Homo sapien
acttcggcttcgggagcttggagca

SEQ ID NO: 4265381 - DNA, 25 bp, Homo sapien
cttcggcttcgggagcttggagcac

SEQ ID NO: 4265382 - DNA, 25 bp, Homo sapien
tggcttctattcattttggacctct

SEQ ID NO: 4265383 - DNA, 25 bp, Homo sapien
ttctattcattttggacctcttcat

SEQ ID NO: 4265384 - DNA, 25 bp, Homo sapien
ttgaaataccgcagattgtaaagat

SEQ ID NO: 4265385 - DNA, 25 bp, Homo sapien
cttgaaataccgcagattgtaaaga

SEQ ID NO: 4265386 - DNA, 25 bp, Homo sapien
gatgttaagactttcaagtgaagaa

SEQ ID NO: 4265387 - DNA, 25 bp, Homo sapien
atcagtgactgcctgatggagagca

SEQ ID NO: 4265388 - DNA, 25 bp, Homo sapien
tagatgttaagactttcaagtgaag

SEQ ID NO: 4265389 - DNA, 25 bp, Homo sapien
agatgttaagactttcaagtgaaga

SEQ ID NO: 4265390 - DNA, 25 bp, Homo sapien
accatgcctggctaatttttgtggg

SEQ ID NO: 4265391 - DNA, 25 bp, Homo sapien
cctcctgagtagctacaggtgccca

SEQ ID NO: 4265392 - DNA, 25 bp, Homo sapien
tcctgagtagctacaggtgcccacc

SEQ ID NO: 4265393 - DNA, 25 bp, Homo sapien
ctcctgagtagctacaggtgcccac

SEQ ID NO: 4265394 - DNA, 25 bp, Homo sapien
tgggaaaccaggtcattagtaagcg

SEQ ID NO: 4265395 - DNA, 25 bp, Homo sapien
ggtcattagtaagcgccaggagaga

SEQ ID NO: 4265396 - DNA, 25 bp, Homo sapien
ttagtaagcgccaggagagagtcag

SEQ ID NO: 4265397 - DNA, 25 bp, Homo sapien
cactgtttgctctcagtgagcacag

SEQ ID NO: 4265398 - DNA, 25 bp, Homo sapien
cagcgaggagattgatcataaaggg

SEQ ID NO: 4265399 - DNA, 25 bp, Homo sapien
ctcagtttgatgtaacctctgtctc

SEQ ID NO: 4265400 - DNA, 25 bp, Homo sapien
caatcagcagttgccagttgcagag

SEQ ID NO: 4265401 - DNA, 25 bp, Homo sapien
cagaagtctgttgtgaaaggccata

SEQ ID NO: 4265402 - DNA, 25 bp, Homo sapien
aagcaggcaggttttagcagatgga

SEQ ID NO: 4265403 - DNA, 25 bp, Homo sapien
agacatttcacatggccctgaccca

SEQ ID NO: 4265404 - DNA, 25 bp, Homo sapien
ttagcagatggaatcatcagaagtt

SEQ ID NO: 4265405 - DNA, 25 bp, Homo sapien
caggtgtatctaagtaagacatttc

SEQ ID NO: 4265406 - DNA, 25 bp, Homo sapien
cacaagctcgaagctgagtcaccca

SEQ ID NO: 4265407 - DNA, 25 bp, Homo sapien
tgtggtatttggcacaagctcgaag

SEQ ID NO: 4265408 - DNA, 25 bp, Homo sapien
tttggcacaagctcgaagctgagtc

SEQ ID NO: 4265409 - DNA, 25 bp, Homo sapien
gaagctgagtcacccagaattgttt

SEQ ID NO: 4265410 - DNA, 25 bp, Homo sapien
cgccttggtctaccaaagtgatggt

SEQ ID NO: 4265411 - DNA, 25 bp, Homo sapien
ctgatgtgcagtggcgccaactcag

SEQ ID NO: 4265412 - DNA, 25 bp, Homo sapien
gccttggtctaccaaagtgatggta

SEQ ID NO: 4265413 - DNA, 25 bp, Homo sapien
aggctgatgtgcagtggcgccaact

SEQ ID NO: 4265414 - DNA, 25 bp, Homo sapien
aaatgctgccttagagagcctcaaa

SEQ ID NO: 4265415 - DNA, 25 bp, Homo sapien
tatttaaggcatgaagatggcccct

SEQ ID NO: 4265416 - DNA, 25 bp, Homo sapien
tcaaaaggcctgttacacaagtctg

SEQ ID NO: 4265417 - DNA, 25 bp, Homo sapien
caaaggactttgcagaaattagggc

SEQ ID NO: 4265418 - DNA, 25 bp, Homo sapien
caggctctacgacagtggattgaac

SEQ ID NO: 4265419 - DNA, 25 bp, Homo sapien
taaggcgcgctgctttgggaatcac

SEQ ID NO: 4265420 - DNA, 25 bp, Homo sapien
agatcttcgaagtcctaaggcgcgc

SEQ ID NO: 4265421 - DNA, 25 bp, Homo sapien
gagagccatcaccatagcaactaga

SEQ ID NO: 4265422 - DNA, 25 bp, Homo sapien
gcttcatcgctcagggacactatgg

SEQ ID NO: 4265423 - DNA, 25 bp, Homo sapien
tctccattagcagagtacaccacca

SEQ ID NO: 4265424 - DNA, 25 bp, Homo sapien
gataaagacaggactcctcgaggct

SEQ ID NO: 4265425 - DNA, 25 bp, Homo sapien
gatgccagcctcgaaatccagtacg

SEQ ID NO: 4265426 - DNA, 25 bp, Homo sapien
cctgctctgggacgttgaaatgcca

SEQ ID NO: 4265427 - DNA, 25 bp, Homo sapien
ggaggtgcttctgcaaccatctgga

SEQ ID NO: 4265428 - DNA, 25 bp, Homo sapien
ttcacacgaaggcaaggaatccccc

SEQ ID NO: 4265429 - DNA, 25 bp, Homo sapien
ggacacgctctagcaggcccattca

SEQ ID NO: 4265430 - DNA, 25 bp, Homo sapien
ctctgttaggcaggactgcaatggt

SEQ ID NO: 4265431 - DNA, 25 bp, Homo sapien
tctgttaggcaggactgcaatggtg

SEQ ID NO: 4265432 - DNA, 25 bp, Homo sapien
ctgttaggcaggactgcaatggtgt

SEQ ID NO: 4265433 - DNA, 25 bp, Homo sapien
caggtactgctgttaggagcacgca

SEQ ID NO: 4265434 - DNA, 25 bp, Homo sapien
ctggatcgggcttcattaaaccaag

SEQ ID NO: 4265435 - DNA, 25 bp, Homo sapien
ggagcacgcagctatatctcaaagt

SEQ ID NO: 4265436 - DNA, 25 bp, Homo sapien
gggtcatggctttgtcaggtactgc

SEQ ID NO: 4265437 - DNA, 25 bp, Homo sapien
gacaatcggacattaagggccacag

SEQ ID NO: 4265438 - DNA, 25 bp, Homo sapien
cattgtcatgggcagataagcagaa

SEQ ID NO: 4265439 - DNA, 25 bp, Homo sapien
tggagacgccacacaaaataaaggg

SEQ ID NO: 4265440 - DNA, 25 bp, Homo sapien
cagaggcagattcaaggaggctcct

SEQ ID NO: 4265441 - DNA, 25 bp, Homo sapien
tctgtgggcagctaaaacctaggag

SEQ ID NO: 4265442 - DNA, 25 bp, Homo sapien
aaagttctcacaagggctgacaggt

SEQ ID NO: 4265443 - DNA, 25 bp, Homo sapien
tcccaaacagaggatagagcgggct

SEQ ID NO: 4265444 - DNA, 25 bp, Homo sapien
acttgtgggctagctctacctggca

SEQ ID NO: 4265445 - DNA, 25 bp, Homo sapien
cccagccagaacctagtgaattctc

SEQ ID NO: 4265446 - DNA, 25 bp, Homo sapien
tgtgcccagccagaacctagtgaat

SEQ ID NO: 4265447 - DNA, 25 bp, Homo sapien
ctgtgcccagccagaacctagtgaa

SEQ ID NO: 4265448 - DNA, 25 bp, Homo sapien
tgcccagccagaacctagtgaattc

SEQ ID NO: 4265449 - DNA, 25 bp, Homo sapien
tctcctgaaaatggttgcttatctc

SEQ ID NO: 4265450 - DNA, 25 bp, Homo sapien
ctgttaatctccctcgctgtttcca

SEQ ID NO: 4265451 - DNA, 25 bp, Homo sapien
ctctcctgaaaatggttgcttatct

SEQ ID NO: 4265452 - DNA, 25 bp, Homo sapien
aggcggtcatcactgggaccactgc

SEQ ID NO: 4265453 - DNA, 25 bp, Homo sapien
gaccaggtgagaccatggcaacagg

SEQ ID NO: 4265454 - DNA, 25 bp, Homo sapien
ggcccactactgctagaccatctat

SEQ ID NO: 4265455 - DNA, 25 bp, Homo sapien
ggaccactgctgaccaaacaggaaa

SEQ ID NO: 4265456 - DNA, 25 bp, Homo sapien
gactggaaatccaaccaacagagag

SEQ ID NO: 4265457 - DNA, 25 bp, Homo sapien
tcttatgtggctccgtcttgcaggg

SEQ ID NO: 4265458 - DNA, 25 bp, Homo sapien
ttctagagcacaaaacggaagctat

SEQ ID NO: 4265459 - DNA, 25 bp, Homo sapien
gaaggcaccagaggatcgtaacgag

SEQ ID NO: 4265460 - DNA, 25 bp, Homo sapien
tctaaaatgtagctgctggcactca

SEQ ID NO: 4265461 - DNA, 25 bp, Homo sapien
caaatgaccttagaatccaccaagc

SEQ ID NO: 4265462 - DNA, 25 bp, Homo sapien
gaatggctccaactctgacagtacc

SEQ ID NO: 4265463 - DNA, 25 bp, Homo sapien
tcttcctcccaaagacctagcgtgg

SEQ ID NO: 4265464 - DNA, 25 bp, Homo sapien
tgagtcaccaagtccagcagtcatt

SEQ ID NO: 4265465 - DNA, 25 bp, Homo sapien
acctctatggtaatgcagggccaaa

SEQ ID NO: 4265466 - DNA, 25 bp, Homo sapien
cagtgtgtacaatctggaccaagac

SEQ ID NO: 4265467 - DNA, 25 bp, Homo sapien
taattaccagccaagtccaaaggaa

SEQ ID NO: 4265468 - DNA, 25 bp, Homo sapien
gcattcaatgcaccccaggagtgtt

SEQ ID NO: 4265469 - DNA, 25 bp, Homo sapien
cgaaaaacttccctgatcttgaagc

SEQ ID NO: 4265470 - DNA, 25 bp, Homo sapien
ccctgggtgccaaaggaatccttca

SEQ ID NO: 4265471 - DNA, 25 bp, Homo sapien
tggcagatagggagtctcagagatc

SEQ ID NO: 4265472 - DNA, 25 bp, Homo sapien
cttcaaaataaggctggatccagcc

SEQ ID NO: 4265473 - DNA, 25 bp, Homo sapien
ggcttaagtcaactgggtcctcatg

SEQ ID NO: 4265474 - DNA, 25 bp, Homo sapien
taatgagaggcagggctaagacacc

SEQ ID NO: 4265475 - DNA, 25 bp, Homo sapien
cactgggcaaatcaaatggcttaag

SEQ ID NO: 4265476 - DNA, 25 bp, Homo sapien
ggctggccgtgcagataaatactta

SEQ ID NO: 4265477 - DNA, 25 bp, Homo sapien
tgtggtacacacagaactctctcta

SEQ ID NO: 4265478 - DNA, 25 bp, Homo sapien
gagcagcttgcaaaacatgacatcc

SEQ ID NO: 4265479 - DNA, 25 bp, Homo sapien
tgttcagcctcagtagtcatcaggg

SEQ ID NO: 4265480 - DNA, 25 bp, Homo sapien
tcccaatggccgattaatacgtgaa

SEQ ID NO: 4265481 - DNA, 25 bp, Homo sapien
tggatatttggtcactaatggcccc

SEQ ID NO: 4265482 - DNA, 25 bp, Homo sapien
ggcacgtcacaggaagagtcatact

SEQ ID NO: 4265483 - DNA, 25 bp, Homo sapien
tccagatagagtcaaaagcaagccc

SEQ ID NO: 4265484 - DNA, 25 bp, Homo sapien
cacaaggacaaggttacaagcaggt

SEQ ID NO: 4265485 - DNA, 25 bp, Homo sapien
caccgcgcccggcctctttctgttt

SEQ ID NO: 4265486 - DNA, 25 bp, Homo sapien
ctcgcactgtcgccccggctagatt

SEQ ID NO: 4265487 - DNA, 25 bp, Homo sapien
tggaattacaggcgcgccgccacgc

SEQ ID NO: 4265488 - DNA, 25 bp, Homo sapien
actgtcgccccggctagattgcaat

SEQ ID NO: 4265489 - DNA, 25 bp, Homo sapien
ggcgaggagcccgccgaggtagcac

SEQ ID NO: 4265490 - DNA, 25 bp, Homo sapien
tgagcacgccctcgagcgccggctc

SEQ ID NO: 4265491 - DNA, 25 bp, Homo sapien
gctgagcacgccctcgagcgccggc

SEQ ID NO: 4265492 - DNA, 25 bp, Homo sapien
agcccgccgaggtagcacggctgct

SEQ ID NO: 4265493 - DNA, 25 bp, Homo sapien
ccgggccgcgcgtgcctgctccaaa

SEQ ID NO: 4265494 - DNA, 25 bp, Homo sapien
cggacgcccgggccgcgcgtgcctg

SEQ ID NO: 4265495 - DNA, 25 bp, Homo sapien
cccgggccgcgcgtgcctgctccaa

SEQ ID NO: 4265496 - DNA, 25 bp, Homo sapien
acgcccgggccgcgcgtgcctgctc

SEQ ID NO: 4265497 - DNA, 25 bp, Homo sapien
gaggaggcgaaggagagctgggaag

SEQ ID NO: 4265498 - DNA, 25 bp, Homo sapien
aggaggaggcgaaggagagctggga

SEQ ID NO: 4265499 - DNA, 25 bp, Homo sapien
ggaggaggaggcgaaggagagctgg

SEQ ID NO: 4265500 - DNA, 25 bp, Homo sapien
ctgactcatacaggaggaagaggag

SEQ ID NO: 4265501 - DNA, 25 bp, Homo sapien
ctccgcactagtttcccgggcaagt

SEQ ID NO: 4265502 - DNA, 25 bp, Homo sapien
cgggcaagttcggagcgggtggccg

SEQ ID NO: 4265503 - DNA, 25 bp, Homo sapien
taggcgagccctcttcgggttcctc

SEQ ID NO: 4265504 - DNA, 25 bp, Homo sapien
ttcggagcgggtggccggctaggcg

SEQ ID NO: 4265505 - DNA, 25 bp, Homo sapien
tgcagggtgggcacgccctaaatcc

SEQ ID NO: 4265506 - DNA, 25 bp, Homo sapien
gccctcgggacactctaggaggccg

SEQ ID NO: 4265507 - DNA, 25 bp, Homo sapien
gccaccctctcttggatccgaaggg

SEQ ID NO: 4265508 - DNA, 25 bp, Homo sapien
gaaagggaatctctgcacgtcactc

SEQ ID NO: 4265509 - DNA, 25 bp, Homo sapien
cacccacccggtccacccggatatg

SEQ ID NO: 4265510 - DNA, 25 bp, Homo sapien
acccgcccggcctgacaggctcaca

SEQ ID NO: 4265511 - DNA, 25 bp, Homo sapien
ctctctcggtcttccgcacacgatg

SEQ ID NO: 4265512 - DNA, 25 bp, Homo sapien
cccggatatggacccgcccggcctg

SEQ ID NO: 4265513 - DNA, 25 bp, Homo sapien
gacgctcctacacagtaacctggaa

SEQ ID NO: 4265514 - DNA, 25 bp, Homo sapien
aaattatcaccggcggagcaaagtc

SEQ ID NO: 4265515 - DNA, 25 bp, Homo sapien
gaaattatcaccggcggagcaaagt

SEQ ID NO: 4265516 - DNA, 25 bp, Homo sapien
aattatcaccggcggagcaaagtca

SEQ ID NO: 4265517 - DNA, 25 bp, Homo sapien
aacaggataatcctctttctcgtct

SEQ ID NO: 4265518 - DNA, 25 bp, Homo sapien
tcttcactggccgaaaccaatcagg

SEQ ID NO: 4265519 - DNA, 25 bp, Homo sapien
cagactgcacagtgaaacaggataa

SEQ ID NO: 4265520 - DNA, 25 bp, Homo sapien
caaggatttaattggtccaggtgga

SEQ ID NO: 4265521 - DNA, 25 bp, Homo sapien
gcactggcatccatacagatttgca

SEQ ID NO: 4265522 - DNA, 25 bp, Homo sapien
atgaactgcagttccccatagagcc

SEQ ID NO: 4265523 - DNA, 25 bp, Homo sapien
tttgcaggtggtgaacagcttttac

SEQ ID NO: 4265524 - DNA, 25 bp, Homo sapien
gacagctctaagctgaggaaacggg

SEQ ID NO: 4265525 - DNA, 25 bp, Homo sapien
tttcttaagaaagcaagtgataaaa

SEQ ID NO: 4265526 - DNA, 25 bp, Homo sapien
ttagaggctaaatttatgatatcta

SEQ ID NO: 4265527 - DNA, 25 bp, Homo sapien
tagaggctaaatttatgatatctaa

SEQ ID NO: 4265528 - DNA, 25 bp, Homo sapien
gagagacacgtgatacatgttctcc

SEQ ID NO: 4265529 - DNA, 25 bp, Homo sapien
agacacgtgatacatgttctccagg

SEQ ID NO: 4265530 - DNA, 25 bp, Homo sapien
gaggagagacacgtgatacatgttc

SEQ ID NO: 4265531 - DNA, 25 bp, Homo sapien
gagacacgtgatacatgttctccag

SEQ ID NO: 4265532 - DNA, 25 bp, Homo sapien
ccacaagaggcaccatggctaaact

SEQ ID NO: 4265533 - DNA, 25 bp, Homo sapien
cgtattaagcactctaagggctgag

SEQ ID NO: 4265534 - DNA, 25 bp, Homo sapien
gaaatcaagggaatgggcgccgttc

SEQ ID NO: 4265535 - DNA, 25 bp, Homo sapien
aatgtgcgtattaagcgtattaagc

SEQ ID NO: 4265536 - DNA, 25 bp, Homo sapien
gaagaatgaaccacttcccatttaa

SEQ ID NO: 4265537 - DNA, 25 bp, Homo sapien
ggagagtggttgctgactattttca

SEQ ID NO: 4265538 - DNA, 25 bp, Homo sapien
cctggaggaggaataatacttatcc

SEQ ID NO: 4265539 - DNA, 25 bp, Homo sapien
gcctcaggaagaatgaaccacttcc

SEQ ID NO: 4265540 - DNA, 25 bp, Homo sapien
tccattagaaacttgccctcctcct

SEQ ID NO: 4265541 - DNA, 25 bp, Homo sapien
tcctgcaaactcagtgacaggagca

SEQ ID NO: 4265542 - DNA, 25 bp, Homo sapien
cacctccattagaaacttgccctcc

SEQ ID NO: 4265543 - DNA, 25 bp, Homo sapien
caggagcagcttggccatgccagaa

SEQ ID NO: 4265544 - DNA, 25 bp, Homo sapien
ccacagaaagactggcgtcttttgc

SEQ ID NO: 4265545 - DNA, 25 bp, Homo sapien
tccacagaaagactggcgtcttttg

SEQ ID NO: 4265546 - DNA, 25 bp, Homo sapien
acagaaagactggcgtcttttgcag

SEQ ID NO: 4265547 - DNA, 25 bp, Homo sapien
cacagaaagactggcgtcttttgca

SEQ ID NO: 4265548 - DNA, 25 bp, Homo sapien
acaggttcacatgtgcctaatcaca

SEQ ID NO: 4265549 - DNA, 25 bp, Homo sapien
gcttgactaatcacaggttcacatg

SEQ ID NO: 4265550 - DNA, 25 bp, Homo sapien
tgctccttgggcatgaccaccctca

SEQ ID NO: 4265551 - DNA, 25 bp, Homo sapien
taatcacaggttcacatgtgcctaa

SEQ ID NO: 4265552 - DNA, 25 bp, Homo sapien
gcaccacggcaagctggttgggtct

SEQ ID NO: 4265553 - DNA, 25 bp, Homo sapien
gtggcagcccttcccgagtagggaa

SEQ ID NO: 4265554 - DNA, 25 bp, Homo sapien
aaccaggggcgcgagtcgctgctca

SEQ ID NO: 4265555 - DNA, 25 bp, Homo sapien
gggtctgctccacccatgaggatgg

SEQ ID NO: 4265556 - DNA, 25 bp, Homo sapien
cctgaaagtgtgcatcgtgggctcg

SEQ ID NO: 4265557 - DNA, 25 bp, Homo sapien
agccggccagggaagcacggtccag

SEQ ID NO: 4265558 - DNA, 25 bp, Homo sapien
ggtccaggcggctacattcggcccg

SEQ ID NO: 4265559 - DNA, 25 bp, Homo sapien
caaggctgaacaggcggaggtgggc

SEQ ID NO: 4265560 - DNA, 25 bp, Homo sapien
tttttcacacctattatgcatgaat

SEQ ID NO: 4265561 - DNA, 25 bp, Homo sapien
ctatttttcacacctattatgcatg

SEQ ID NO: 4265562 - DNA, 25 bp, Homo sapien
tcatagagaataagtcccagcagct

SEQ ID NO: 4265563 - DNA, 25 bp, Homo sapien
gaattcatagagaataagtcccagc

SEQ ID NO: 4265564 - DNA, 25 bp, Homo sapien
ggtacttcagtctaatccaggtacc

SEQ ID NO: 4265565 - DNA, 25 bp, Homo sapien
gtacttcagtctaatccaggtacct

SEQ ID NO: 4265566 - DNA, 25 bp, Homo sapien
tggtacttcagtctaatccaggtac

SEQ ID NO: 4265567 - DNA, 25 bp, Homo sapien
caaagcggccgtcatccgcctggga

SEQ ID NO: 4265568 - DNA, 25 bp, Homo sapien
ccaggatcttctgcaaaggccaagt

SEQ ID NO: 4265569 - DNA, 25 bp, Homo sapien
gcctgggactcatggaaatgattgc

SEQ ID NO: 4265570 - DNA, 25 bp, Homo sapien
ctgggttctgcgacggcctccgctg

SEQ ID NO: 4265571 - DNA, 25 bp, Homo sapien
tcttttctcttcgttagttgtcaga

SEQ ID NO: 4265572 - DNA, 25 bp, Homo sapien
taattagataatccactcatgtatt

SEQ ID NO: 4265573 - DNA, 25 bp, Homo sapien
tgccttcgtcaaggctcagaggtaa

SEQ ID NO: 4265574 - DNA, 25 bp, Homo sapien
gtcagaatatgccttcgtcaaggct

SEQ ID NO: 4265575 - DNA, 25 bp, Homo sapien
ccaagagccagtgattattccaggt

SEQ ID NO: 4265576 - DNA, 25 bp, Homo sapien
tgttccctaggaaatgactgtccca

SEQ ID NO: 4265577 - DNA, 25 bp, Homo sapien
tactttgtgagatttgggcctgtcc

SEQ ID NO: 4265578 - DNA, 25 bp, Homo sapien
tgctgaaacgcacattacctggaat

SEQ ID NO: 4265579 - DNA, 25 bp, Homo sapien
taacttttgactacagcatggcccc

SEQ ID NO: 4265580 - DNA, 25 bp, Homo sapien
gaatgaaatccaccctaggagacgg

SEQ ID NO: 4265581 - DNA, 25 bp, Homo sapien
tacactgttgccttgctaggatcca

SEQ ID NO: 4265582 - DNA, 25 bp, Homo sapien
gggagacacctagattagcagctca

SEQ ID NO: 4265583 - DNA, 25 bp, Homo sapien
tcccgtgaacacccataggaggtca

SEQ ID NO: 4265584 - DNA, 25 bp, Homo sapien
cgtgaacacccataggaggtcatgc

SEQ ID NO: 4265585 - DNA, 25 bp, Homo sapien
cgcatgcgtggcaccatttcccgtg

SEQ ID NO: 4265586 - DNA, 25 bp, Homo sapien
catttcccgtgaacacccataggag

SEQ ID NO: 4265587 - DNA, 25 bp, Homo sapien
ccgatcttcggatgtttctttaaca

SEQ ID NO: 4265588 - DNA, 25 bp, Homo sapien
taaatctaacgtgcacacaaagcac

SEQ ID NO: 4265589 - DNA, 25 bp, Homo sapien
tgtggaccaccttcaattagccgat

SEQ ID NO: 4265590 - DNA, 25 bp, Homo sapien
taataggctcccgggtgatgatgat

SEQ ID NO: 4265591 - DNA, 25 bp, Homo sapien
gcaaggcatcaggactcaccactgt

SEQ ID NO: 4265592 - DNA, 25 bp, Homo sapien
gaaggttgtgaaggccctcacaggc

SEQ ID NO: 4265593 - DNA, 25 bp, Homo sapien
tggcaatgccatcatgctctgaagg

SEQ ID NO: 4265594 - DNA, 25 bp, Homo sapien
ggtgtccatggtgaattctcttctc

SEQ ID NO: 4265595 - DNA, 25 bp, Homo sapien
caggaaataacaccgggctctggcg

SEQ ID NO: 4265596 - DNA, 25 bp, Homo sapien
gttacgctgattcatcctggccagg

SEQ ID NO: 4265597 - DNA, 25 bp, Homo sapien
tcatacagccgataaacgcacgcag

SEQ ID NO: 4265598 - DNA, 25 bp, Homo sapien
catcgatctcgggtctaaggtccgg

SEQ ID NO: 4265599 - DNA, 25 bp, Homo sapien
aaagagcccgtattctcttgccctt

SEQ ID NO: 4265600 - DNA, 25 bp, Homo sapien
tatgtacttcagttaattcccaaag

SEQ ID NO: 4265601 - DNA, 25 bp, Homo sapien
ggtgtgagttaccactcgtatgtac

SEQ ID NO: 4265602 - DNA, 25 bp, Homo sapien
taattcccaaagagcccgtattctc

SEQ ID NO: 4265603 - DNA, 25 bp, Homo sapien
ccaatgacgggtacagaggctttta

SEQ ID NO: 4265604 - DNA, 25 bp, Homo sapien
gcttttagagaatgcagaccgacct

SEQ ID NO: 4265605 - DNA, 25 bp, Homo sapien
ccgtaagaagctcactggtcccagt

SEQ ID NO: 4265606 - DNA, 25 bp, Homo sapien
cctttgctgtcatccatctctggtg

SEQ ID NO: 4265607 - DNA, 25 bp, Homo sapien
caatggttcccacaaaatgagcttt

SEQ ID NO: 4265608 - DNA, 25 bp, Homo sapien
tcttgtaacccgtgtcgtcaatggt

SEQ ID NO: 4265609 - DNA, 25 bp, Homo sapien
gagctttggatgttgcaccttctgt

SEQ ID NO: 4265610 - DNA, 25 bp, Homo sapien
gaaattgcgccacacaagatctttg

SEQ ID NO: 4265611 - DNA, 25 bp, Homo sapien
tccttctcaggataacgcagcccca

SEQ ID NO: 4265612 - DNA, 25 bp, Homo sapien
ccttctcaggataacgcagccccat

SEQ ID NO: 4265613 - DNA, 25 bp, Homo sapien
ctccttctcaggataacgcagcccc

SEQ ID NO: 4265614 - DNA, 25 bp, Homo sapien
catcgcaggcgcatgtaatgtgacc

SEQ ID NO: 4265615 - DNA, 25 bp, Homo sapien
gctgcagtcggggagctcacatcgc

SEQ ID NO: 4265616 - DNA, 25 bp, Homo sapien
atgtaatgtgaccagcacgtccccc

SEQ ID NO: 4265617 - DNA, 25 bp, Homo sapien
tgaccagcacgtcccccgggagtta

SEQ ID NO: 4265618 - DNA, 25 bp, Homo sapien
aaagttagttttaagtctgagagca

SEQ ID NO: 4265619 - DNA, 25 bp, Homo sapien
ggttgttcccgacatcttaggtcac

SEQ ID NO: 4265620 - DNA, 25 bp, Homo sapien
ttatggttgttcccgacatcttagg

SEQ ID NO: 4265621 - DNA, 25 bp, Homo sapien
gttagttttaagtctgagagcaaag

SEQ ID NO: 4265622 - DNA, 25 bp, Homo sapien
caaaaggcgattggccccctgacaa

SEQ ID NO: 4265623 - DNA, 25 bp, Homo sapien
aacaaggctcccaaaaggcgattgg

SEQ ID NO: 4265624 - DNA, 25 bp, Homo sapien
tcccaaaaggcgattggccccctga

SEQ ID NO: 4265625 - DNA, 25 bp, Homo sapien
caaggctcccaaaaggcgattggcc

SEQ ID NO: 4265626 - DNA, 25 bp, Homo sapien
cactcttcagttcatacagcatcat

SEQ ID NO: 4265627 - DNA, 25 bp, Homo sapien
cattagtaagtgtggagggttgaga

SEQ ID NO: 4265628 - DNA, 25 bp, Homo sapien
agggttgagaaatcccactcttcag

SEQ ID NO: 4265629 - DNA, 25 bp, Homo sapien
agatgagtaggcattagtaagtgtg

SEQ ID NO: 4265630 - DNA, 25 bp, Homo sapien
gaagtccagaacagatgttcatacc

SEQ ID NO: 4265631 - DNA, 25 bp, Homo sapien
ctattctgattgagcctgtggttca

SEQ ID NO: 4265632 - DNA, 25 bp, Homo sapien
taccctgtgttagccctgtctgtgc

SEQ ID NO: 4265633 - DNA, 25 bp, Homo sapien
gagcctgtggttcatcagaagtcca

SEQ ID NO: 4265634 - DNA, 25 bp, Homo sapien
ccttcagacaccaggggtgtgaagg

SEQ ID NO: 4265635 - DNA, 25 bp, Homo sapien
tgcaagttcctagttcaagagcagc

SEQ ID NO: 4265636 - DNA, 25 bp, Homo sapien
cccttcagacaccaggggtgtgaag

SEQ ID NO: 4265637 - DNA, 25 bp, Homo sapien
ccaaggggagatgatattcagatgc

SEQ ID NO: 4265638 - DNA, 25 bp, Homo sapien
aattgcacatctggcagcttttgag

SEQ ID NO: 4265639 - DNA, 25 bp, Homo sapien
tcagatgctttggtggcaagactag

SEQ ID NO: 4265640 - DNA, 25 bp, Homo sapien
ggagtgagtccttccaattgcacat

SEQ ID NO: 4265641 - DNA, 25 bp, Homo sapien
cctgctcaggttcacacagaagatg

SEQ ID NO: 4265642 - DNA, 25 bp, Homo sapien
cagagaccgaatcatcacaagcttc

SEQ ID NO: 4265643 - DNA, 25 bp, Homo sapien
tcttggaccagagaccgaatcatca

SEQ ID NO: 4265644 - DNA, 25 bp, Homo sapien
ccttggagcttatgagattcccaga

SEQ ID NO: 4265645 - DNA, 25 bp, Homo sapien
ggtacagattctgcctctacttgcc

SEQ ID NO: 4265646 - DNA, 25 bp, Homo sapien
tgaaaacgtggataaaatcaacact

SEQ ID NO: 4265647 - DNA, 25 bp, Homo sapien
gcaagttgccaaagcgtttctccac

SEQ ID NO: 4265648 - DNA, 25 bp, Homo sapien
gattaatggtgatacttaggacgcc

SEQ ID NO: 4265649 - DNA, 25 bp, Homo sapien
ggttttttgtctacagtgcacaagc

SEQ ID NO: 4265650 - DNA, 25 bp, Homo sapien
tacagtgcacaagctgctgatttcg

SEQ ID NO: 4265651 - DNA, 25 bp, Homo sapien
gctgatttcgtgtaattatctcagg

SEQ ID NO: 4265652 - DNA, 25 bp, Homo sapien
cgtccttcccttacataaaactatg

SEQ ID NO: 4265653 - DNA, 25 bp, Homo sapien
taatctcacctatgaataaccactg

SEQ ID NO: 4265654 - DNA, 25 bp, Homo sapien
accccagagagccaaaacagtagta

SEQ ID NO: 4265655 - DNA, 25 bp, Homo sapien
gagcccagtaatatacgctcatata

SEQ ID NO: 4265656 - DNA, 25 bp, Homo sapien
gggctgtagtgaactataatctcac

SEQ ID NO: 4265657 - DNA, 25 bp, Homo sapien
taatgctgtccttagcacgctcagc

SEQ ID NO: 4265658 - DNA, 25 bp, Homo sapien
tctgtataaagcagccagtctctga

SEQ ID NO: 4265659 - DNA, 25 bp, Homo sapien
tagggaagtgccttctaatgctgtc

SEQ ID NO: 4265660 - DNA, 25 bp, Homo sapien
tctgaaaatagagaccactcgatgg

SEQ ID NO: 4265661 - DNA, 25 bp, Homo sapien
cctagccctgggccgtcttggtgag

SEQ ID NO: 4265662 - DNA, 25 bp, Homo sapien
cagtgtctacctgagtgcctcggtg

SEQ ID NO: 4265663 - DNA, 25 bp, Homo sapien
tgcctcggtgcctactgttgtttcc

SEQ ID NO: 4265664 - DNA, 25 bp, Homo sapien
gagtaatagcatacctttgacatac

SEQ ID NO: 4265665 - DNA, 25 bp, Homo sapien
agggcttgacattcctaaacttgtt

SEQ ID NO: 4265666 - DNA, 25 bp, Homo sapien
tagtgcctaaaggtagaaggacaga

SEQ ID NO: 4265667 - DNA, 25 bp, Homo sapien
gacagaggtggagctatcccaagta

SEQ ID NO: 4265668 - DNA, 25 bp, Homo sapien
ggctctgtgcagtcccttcagggga

SEQ ID NO: 4265669 - DNA, 25 bp, Homo sapien
tatcccaagtaaagccggttctcag

SEQ ID NO: 4265670 - DNA, 25 bp, Homo sapien
gagtcctgagaagatcttggattgg

SEQ ID NO: 4265671 - DNA, 25 bp, Homo sapien
tcttggattgggtcatcagcatcca

SEQ ID NO: 4265672 - DNA, 25 bp, Homo sapien
gaagatttgtgttctttgtgagtcc

SEQ ID NO: 4265673 - DNA, 25 bp, Homo sapien
gctgcagctttacttaatggtgacc

SEQ ID NO: 4265674 - DNA, 25 bp, Homo sapien
cagggtccggttgtatcaccttagt

SEQ ID NO: 4265675 - DNA, 25 bp, Homo sapien
gatggtcgccatgcttgctaaacag

SEQ ID NO: 4265676 - DNA, 25 bp, Homo sapien
gataccctctagtggataagtgaag

SEQ ID NO: 4265677 - DNA, 25 bp, Homo sapien
tgctaaacagaagggctccgaacct

SEQ ID NO: 4265678 - DNA, 25 bp, Homo sapien
aaagcaaatgtagggagaggtcagc

SEQ ID NO: 4265679 - DNA, 25 bp, Homo sapien
gaggtatactcttccgttgtataat

SEQ ID NO: 4265680 - DNA, 25 bp, Homo sapien
cttccgttgtataatcttctctggc

SEQ ID NO: 4265681 - DNA, 25 bp, Homo sapien
tactcttccgttgtataatcttctc

SEQ ID NO: 4265682 - DNA, 25 bp, Homo sapien
gttgtgtccttgtgctttgcattct

SEQ ID NO: 4265683 - DNA, 25 bp, Homo sapien
cttggttgtgtccttgtgctttgca

SEQ ID NO: 4265684 - DNA, 25 bp, Homo sapien
cagacttggttgtgtccttgtgctt

SEQ ID NO: 4265685 - DNA, 25 bp, Homo sapien
ttccagacttggttgtgtccttgtg

SEQ ID NO: 4265686 - DNA, 25 bp, Homo sapien
gccaaactggccttaacgcagacct

SEQ ID NO: 4265687 - DNA, 25 bp, Homo sapien
tccagaggtcgagaaaagccaaact

SEQ ID NO: 4265688 - DNA, 25 bp, Homo sapien
cactgaggtccggacaatgtcactt

SEQ ID NO: 4265689 - DNA, 25 bp, Homo sapien
gagtcccatttgcttattccagagg

SEQ ID NO: 4265690 - DNA, 25 bp, Homo sapien
gccacagtctgtctacctggggaga

SEQ ID NO: 4265691 - DNA, 25 bp, Homo sapien
ttataaccaatagagagcactcaca

SEQ ID NO: 4265692 - DNA, 25 bp, Homo sapien
tcacaaagcggaatgtccacaggga

SEQ ID NO: 4265693 - DNA, 25 bp, Homo sapien
caatagagagcactcacaaagcgga

SEQ ID NO: 4265694 - DNA, 25 bp, Homo sapien
tctgggcgacggttacacaggtgta

SEQ ID NO: 4265695 - DNA, 25 bp, Homo sapien
tagtggagctgaacacgtaaggtct

SEQ ID NO: 4265696 - DNA, 25 bp, Homo sapien
ggtgatgggcacgttctatttgttg

SEQ ID NO: 4265697 - DNA, 25 bp, Homo sapien
gaacacgtaaggtctgggcatcaca

SEQ ID NO: 4265698 - DNA, 25 bp, Homo sapien
cagcacacatccgcagccgcaccca

SEQ ID NO: 4265699 - DNA, 25 bp, Homo sapien
acacaaaatcccaggaggctcagta

SEQ ID NO: 4265700 - DNA, 25 bp, Homo sapien
cacaaaatcccaggaggctcagtac

SEQ ID NO: 4265701 - DNA, 25 bp, Homo sapien
ctcagcacacatccgcagccgcacc

SEQ ID NO: 4265702 - DNA, 25 bp, Homo sapien
ctaacttccgcgcatctacgagggc

SEQ ID NO: 4265703 - DNA, 25 bp, Homo sapien
tcctctcgctccagtctaacttccg

SEQ ID NO: 4265704 - DNA, 25 bp, Homo sapien
aggccacgacccaaggcatccggtt

SEQ ID NO: 4265705 - DNA, 25 bp, Homo sapien
cgagggccgggactgccgctacctt

SEQ ID NO: 4265706 - DNA, 25 bp, Homo sapien
tcgtccgcaccacgtgcagcagcgg

SEQ ID NO: 4265707 - DNA, 25 bp, Homo sapien
agcccagcgcgagccccttggaggg

SEQ ID NO: 4265708 - DNA, 25 bp, Homo sapien
aatgtcgcacggagccgggctcgtc

SEQ ID NO: 4265709 - DNA, 25 bp, Homo sapien
agaggcggctccgcgtctccagcag

SEQ ID NO: 4265710 - DNA, 25 bp, Homo sapien
cagtttcgctcgaaggaggaggtca

SEQ ID NO: 4265711 - DNA, 25 bp, Homo sapien
ctgggaccgttgagacggccgtcct

SEQ ID NO: 4265712 - DNA, 25 bp, Homo sapien
ctgagggagcgaaacccgacctctt

SEQ ID NO: 4265713 - DNA, 25 bp, Homo sapien
gaggtcagagggtcttgtgttccat

SEQ ID NO: 4265714 - DNA, 25 bp, Homo sapien
tctctatgtgctcctcttaaaacca

SEQ ID NO: 4265715 - DNA, 25 bp, Homo sapien
caagagtggggcctgttgttccaaa

SEQ ID NO: 4265716 - DNA, 25 bp, Homo sapien
gcttattctctatgtgctcctctta

SEQ ID NO: 4265717 - DNA, 25 bp, Homo sapien
ggttgcttattctctatgtgctcct

SEQ ID NO: 4265718 - DNA, 25 bp, Homo sapien
ctgggagcaaagttgcccttgcagg

SEQ ID NO: 4265719 - DNA, 25 bp, Homo sapien
tgggagcaaagttgcccttgcagga

SEQ ID NO: 4265720 - DNA, 25 bp, Homo sapien
ttgcccttgcaggatggctgtatta

SEQ ID NO: 4265721 - DNA, 25 bp, Homo sapien
ctctgcttgggcatttgaggttcat

SEQ ID NO: 4265722 - DNA, 25 bp, Homo sapien
acaaaagctgggctgaaaggcatcc

SEQ ID NO: 4265723 - DNA, 25 bp, Homo sapien
cctagaagaaggagtgtcccctgca

SEQ ID NO: 4265724 - DNA, 25 bp, Homo sapien
ccctgcaggagtcacaaaagctggg

SEQ ID NO: 4265725 - DNA, 25 bp, Homo sapien
tgaaaggcatcccctgagtgcctga

SEQ ID NO: 4265726 - DNA, 25 bp, Homo sapien
cccgagtgaggcgatagggatggaa

SEQ ID NO: 4265727 - DNA, 25 bp, Homo sapien
gcgatagggatggaaataccagccc

SEQ ID NO: 4265728 - DNA, 25 bp, Homo sapien
ggatggaaataccagcccaaagtcc

SEQ ID NO: 4265729 - DNA, 25 bp, Homo sapien
tgaggcgatagggatggaaatacca

SEQ ID NO: 4265730 - DNA, 25 bp, Homo sapien
catgtttatcactgggctgtggtca

SEQ ID NO: 4265731 - DNA, 25 bp, Homo sapien
ggaagatggagcaatagcagtgcag

SEQ ID NO: 4265732 - DNA, 25 bp, Homo sapien
ggatctctgatggctgctccttagc

SEQ ID NO: 4265733 - DNA, 25 bp, Homo sapien
cagtggccatgtttatcactgggct

SEQ ID NO: 4265734 - DNA, 25 bp, Homo sapien
ttgcccaggcatgcccctggatctg

SEQ ID NO: 4265735 - DNA, 25 bp, Homo sapien
tccttccgcttgcaaacctggctta

SEQ ID NO: 4265736 - DNA, 25 bp, Homo sapien
cttccgcttgcaaacctggcttatt

SEQ ID NO: 4265737 - DNA, 25 bp, Homo sapien
cttccttccgcttgcaaacctggct

SEQ ID NO: 4265738 - DNA, 25 bp, Homo sapien
caagcagtgcgtcttgttttctggc

SEQ ID NO: 4265739 - DNA, 25 bp, Homo sapien
cattggtttttcaagggttcctcag

SEQ ID NO: 4265740 - DNA, 25 bp, Homo sapien
ccccattatcaagcagtgcgtcttg

SEQ ID NO: 4265741 - DNA, 25 bp, Homo sapien
cagacccttgtgttgataatgtgac

SEQ ID NO: 4265742 - DNA, 25 bp, Homo sapien
tacagctgtgaatgaggcagagccg

SEQ ID NO: 4265743 - DNA, 25 bp, Homo sapien
tcgaaggcaccattgttttaggcac

SEQ ID NO: 4265744 - DNA, 25 bp, Homo sapien
cagaggcgctaccttaagtcacttc

SEQ ID NO: 4265745 - DNA, 25 bp, Homo sapien
gatggtatttcatcacctcgaaggc

SEQ ID NO: 4265746 - DNA, 25 bp, Homo sapien
tttcattctccacgttccactgacg

SEQ ID NO: 4265747 - DNA, 25 bp, Homo sapien
tccactgacgttgaaaatttgcacc

SEQ ID NO: 4265748 - DNA, 25 bp, Homo sapien
aatttgcaccttctttaccgctgta

SEQ ID NO: 4265749 - DNA, 25 bp, Homo sapien
ctttgacatttcttactaaggctcc

SEQ ID NO: 4265750 - DNA, 25 bp, Homo sapien
gggaagtgtggcttctcttgagttt

SEQ ID NO: 4265751 - DNA, 25 bp, Homo sapien
tggggaagtgtggcttctcttgagt

SEQ ID NO: 4265752 - DNA, 25 bp, Homo sapien
tgagtttctgattcatacacaggaa

SEQ ID NO: 4265753 - DNA, 25 bp, Homo sapien
ggaagtgtggcttctcttgagtttc

SEQ ID NO: 4265754 - DNA, 25 bp, Homo sapien
cctgcaggtcgtcttccactgtcat

SEQ ID NO: 4265755 - DNA, 25 bp, Homo sapien
acctgcaggtcgtcttccactgtca

SEQ ID NO: 4265756 - DNA, 25 bp, Homo sapien
cacctgcaggtcgtcttccactgtc

SEQ ID NO: 4265757 - DNA, 25 bp, Homo sapien
acacctgcaggtcgtcttccactgt

SEQ ID NO: 4265758 - DNA, 25 bp, Homo sapien
gaggcttttgcagtggcaaggaggc

SEQ ID NO: 4265759 - DNA, 25 bp, Homo sapien
ggaggcttttgcagtggcaaggagg

SEQ ID NO: 4265760 - DNA, 25 bp, Homo sapien
tctttgtctttccaccaggaggctt

SEQ ID NO: 4265761 - DNA, 25 bp, Homo sapien
tcatggggactgaaaggccttcttt

SEQ ID NO: 4265762 - DNA, 25 bp, Homo sapien
tacgccagccttctgaaatgacttc

SEQ ID NO: 4265763 - DNA, 25 bp, Homo sapien
acgccagccttctgaaatgacttca

SEQ ID NO: 4265764 - DNA, 25 bp, Homo sapien
cgccagccttctgaaatgacttcag

SEQ ID NO: 4265765 - DNA, 25 bp, Homo sapien
gggcaaggtgtccacgccatagtcc

SEQ ID NO: 4265766 - DNA, 25 bp, Homo sapien
cacaatgatcatgcctttgaactgg

SEQ ID NO: 4265767 - DNA, 25 bp, Homo sapien
catagtcccactgtctgcctgactg

SEQ ID NO: 4265768 - DNA, 25 bp, Homo sapien
gaagggcggtttaccacagctggct

SEQ ID NO: 4265769 - DNA, 25 bp, Homo sapien
ggctactgggaagccaaaaccaaga

SEQ ID NO: 4265770 - DNA, 25 bp, Homo sapien
agttagccccgtcagagcctctagc

SEQ ID NO: 4265771 - DNA, 25 bp, Homo sapien
aggcccagcagttagccccgtcaga

SEQ ID NO: 4265772 - DNA, 25 bp, Homo sapien
ctccttctcggtttctgtggctact

SEQ ID NO: 4265773 - DNA, 25 bp, Homo sapien
ctgtcctctggatagatttcagctt

SEQ ID NO: 4265774 - DNA, 25 bp, Homo sapien
accagccagggtttgcttgactgca

SEQ ID NO: 4265775 - DNA, 25 bp, Homo sapien
caaggctctgcgctggtatttgcac

SEQ ID NO: 4265776 - DNA, 25 bp, Homo sapien
tgagagtcgtggaaagccgcagata

SEQ ID NO: 4265777 - DNA, 25 bp, Homo sapien
ttgcttgactgcaccagacctgctc

SEQ ID NO: 4265778 - DNA, 25 bp, Homo sapien
tctttcctgaagtgaggcgtgcctg

SEQ ID NO: 4265779 - DNA, 25 bp, Homo sapien
taatttatctagcttgtcagtccgg

SEQ ID NO: 4265780 - DNA, 25 bp, Homo sapien
gaaacactatgtggtcagcctgtcc

SEQ ID NO: 4265781 - DNA, 25 bp, Homo sapien
tgatgaaccccacttagcacagctg

SEQ ID NO: 4265782 - DNA, 25 bp, Homo sapien
ggttagaattgcaggatcccagccc

SEQ ID NO: 4265783 - DNA, 25 bp, Homo sapien
caaagtggatatcacctggcagctg

SEQ ID NO: 4265784 - DNA, 25 bp, Homo sapien
aaagtgggtgcaactctgaggctga

SEQ ID NO: 4265785 - DNA, 25 bp, Homo sapien
tgcatcataaccgagtcccagtggt

SEQ ID NO: 4265786 - DNA, 25 bp, Homo sapien
ggagcccgcgcgcaacgcgcccgct

SEQ ID NO: 4265787 - DNA, 25 bp, Homo sapien
ccgcgcgcaacgcgcccgctcctgg

SEQ ID NO: 4265788 - DNA, 25 bp, Homo sapien
cgcgcaacgcgcccgctcctggccg

SEQ ID NO: 4265789 - DNA, 25 bp, Homo sapien
ctgcaggagcccgcgcgcaacgcgc

SEQ ID NO: 4265790 - DNA, 25 bp, Homo sapien
gatggtacatcccaaacctaagaat

SEQ ID NO: 4265791 - DNA, 25 bp, Homo sapien
aattggccgctggatggtacatccc

SEQ ID NO: 4265792 - DNA, 25 bp, Homo sapien
tacagcaaaattggccgctggatgg

SEQ ID NO: 4265793 - DNA, 25 bp, Homo sapien
taagaatattcctacagcttccatc

SEQ ID NO: 4265794 - DNA, 25 bp, Homo sapien
aacctgagatttaacttgacttaag

SEQ ID NO: 4265795 - DNA, 25 bp, Homo sapien
tgacatgggtttgtccagtgccaac

SEQ ID NO: 4265796 - DNA, 25 bp, Homo sapien
agtgccaacagcaggtcccattctg

SEQ ID NO: 4265797 - DNA, 25 bp, Homo sapien
gaaagcaatgggttgacatgggttt

SEQ ID NO: 4265798 - DNA, 25 bp, Homo sapien
gcaactgctaacaaagtaactgatt

SEQ ID NO: 4265799 - DNA, 25 bp, Homo sapien
tctgaggaattctagcaaagtggca

SEQ ID NO: 4265800 - DNA, 25 bp, Homo sapien
gatttaggcaaagatcaatggatga

SEQ ID NO: 4265801 - DNA, 25 bp, Homo sapien
catggtcagtgcctgaacccactaa

SEQ ID NO: 4265802 - DNA, 25 bp, Homo sapien
tatttaaaaagactataaaatctga

SEQ ID NO: 4265803 - DNA, 25 bp, Homo sapien
tttaaaaagactataaaatctgaca

SEQ ID NO: 4265804 - DNA, 25 bp, Homo sapien
aagacccataagatttaaattgaca

SEQ ID NO: 4265805 - DNA, 25 bp, Homo sapien
gaaaggtcatatcccaagtgccctg

SEQ ID NO: 4265806 - DNA, 25 bp, Homo sapien
cagtattagtctgggcagggttccc

SEQ ID NO: 4265807 - DNA, 25 bp, Homo sapien
tttgcaccaatgaaacacatggagg

SEQ ID NO: 4265808 - DNA, 25 bp, Homo sapien
tgttttatatgacaggccagctgag

SEQ ID NO: 4265809 - DNA, 25 bp, Homo sapien
gcttcagccctagtggtattttcag

SEQ ID NO: 4265810 - DNA, 25 bp, Homo sapien
agtcaagtaggaacataaaacttgc

SEQ ID NO: 4265811 - DNA, 25 bp, Homo sapien
cattaagtggctcagtgagggcttc

SEQ ID NO: 4265812 - DNA, 25 bp, Homo sapien
gctgggactcctgtcgtttttcata

SEQ ID NO: 4265813 - DNA, 25 bp, Homo sapien
tcgcaggccctcaagtggtgttgtg

SEQ ID NO: 4265814 - DNA, 25 bp, Homo sapien
atagagctgtcagaaccatgaggca

SEQ ID NO: 4265815 - DNA, 25 bp, Homo sapien
gattacagggtactgtcgcaggccc

SEQ ID NO: 4265816 - DNA, 25 bp, Homo sapien
gaggcctcccttgctatgcttccta

SEQ ID NO: 4265817 - DNA, 25 bp, Homo sapien
catgctgtataacttgtcaagtact

SEQ ID NO: 4265818 - DNA, 25 bp, Homo sapien
tataacttgtcaagtactctccaaa

SEQ ID NO: 4265819 - DNA, 25 bp, Homo sapien
aaaaacaactctaacatgctgtata

SEQ ID NO: 4265820 - DNA, 25 bp, Homo sapien
caactctaacatgctgtataacttg

SEQ ID NO: 4265821 - DNA, 25 bp, Homo sapien
aatgatggatgccaacaaaaacaca

SEQ ID NO: 4265822 - DNA, 25 bp, Homo sapien
tgaagtcctgtcatgtgtggaaaca

SEQ ID NO: 4265823 - DNA, 25 bp, Homo sapien
agtcctgtcatgtgtggaaacaaaa

SEQ ID NO: 4265824 - DNA, 25 bp, Homo sapien
atgatggatgccaacaaaaacacac

SEQ ID NO: 4265825 - DNA, 25 bp, Homo sapien
aacttttcaataagcctggcattca

SEQ ID NO: 4265826 - DNA, 25 bp, Homo sapien
aataacaacaatcccctatgccagg

SEQ ID NO: 4265827 - DNA, 25 bp, Homo sapien
gatacaacccaaacttacataccca

SEQ ID NO: 4265828 - DNA, 25 bp, Homo sapien
tttcttgatacaacccaaacttaca

SEQ ID NO: 4265829 - DNA, 25 bp, Homo sapien
tacttttgtggtatcaactctctca

SEQ ID NO: 4265830 - DNA, 25 bp, Homo sapien
cataaaatggagtgcaatacacaat

SEQ ID NO: 4265831 - DNA, 25 bp, Homo sapien
tgtggtatcaactctctcataaaat

SEQ ID NO: 4265832 - DNA, 25 bp, Homo sapien
cacaatcagtataaggagactcaga

SEQ ID NO: 4265833 - DNA, 25 bp, Homo sapien
ccatgaaaaagtaggcagcgaggcc

SEQ ID NO: 4265834 - DNA, 25 bp, Homo sapien
tgcaagcccttgagaacgcgccgga

SEQ ID NO: 4265835 - DNA, 25 bp, Homo sapien
tagtggggctgtacaccgctccgtt

SEQ ID NO: 4265836 - DNA, 25 bp, Homo sapien
aacgcgccggagcaatgggagccgg

SEQ ID NO: 4265837 - DNA, 25 bp, Homo sapien
cacaggatccctagtaacagagaca

SEQ ID NO: 4265838 - DNA, 25 bp, Homo sapien
aattgggtgctctacttaaatggcc

SEQ ID NO: 4265839 - DNA, 25 bp, Homo sapien
gccgttgacttctcggactccagaa

SEQ ID NO: 4265840 - DNA, 25 bp, Homo sapien
tactttcggtgtgcagtgaaccccg

SEQ ID NO: 4265841 - DNA, 25 bp, Homo sapien
acaaaaaggttcacttagagaaatg

SEQ ID NO: 4265842 - DNA, 25 bp, Homo sapien
caaggtagcagatatatccaagtac

SEQ ID NO: 4265843 - DNA, 25 bp, Homo sapien
gagagaatctacaccaccctttttg

SEQ ID NO: 4265844 - DNA, 25 bp, Homo sapien
catggattgaaccaatcacagaagg

SEQ ID NO: 4265845 - DNA, 25 bp, Homo sapien
cattagttccacttacttcatcgag

SEQ ID NO: 4265846 - DNA, 25 bp, Homo sapien
ctttattaactgattacagttgaaa

SEQ ID NO: 4265847 - DNA, 25 bp, Homo sapien
ttaactgattacagttgaaagtcac

SEQ ID NO: 4265848 - DNA, 25 bp, Homo sapien
tattaactgattacagttgaaagtc

SEQ ID NO: 4265849 - DNA, 25 bp, Homo sapien
aactgattacagttgaaagtcacaa

SEQ ID NO: 4265850 - DNA, 25 bp, Homo sapien
gacaatgactagtgtatcaaacgct

SEQ ID NO: 4265851 - DNA, 25 bp, Homo sapien
tagacttccaagtcagtcaaatgcc

SEQ ID NO: 4265852 - DNA, 25 bp, Homo sapien
tagcatattccgtgtgtggtggtac

SEQ ID NO: 4265853 - DNA, 25 bp, Homo sapien
ctgtacggctccttctaaaaaatgg

SEQ ID NO: 4265854 - DNA, 25 bp, Homo sapien
cccagaaaacagaataaatggcttt

SEQ ID NO: 4265855 - DNA, 25 bp, Homo sapien
tcccagaaaacagaataaatggctt

SEQ ID NO: 4265856 - DNA, 25 bp, Homo sapien
aacagaataaatggctttatttggt

SEQ ID NO: 4265857 - DNA, 25 bp, Homo sapien
gaataaatggctttatttggtatct

SEQ ID NO: 4265858 - DNA, 25 bp, Homo sapien
tgtaactggttttcgtgtaattctg

SEQ ID NO: 4265859 - DNA, 25 bp, Homo sapien
tgttgtgggagaaactgtaactggt

SEQ ID NO: 4265860 - DNA, 25 bp, Homo sapien
tctgtctagttctgcatgaacatct

SEQ ID NO: 4265861 - DNA, 25 bp, Homo sapien
tccttccgtaggagatgtaggtgtt

SEQ ID NO: 4265862 - DNA, 25 bp, Homo sapien
tggatggtggtaaaccactgcttcc

SEQ ID NO: 4265863 - DNA, 25 bp, Homo sapien
tggtggatggtggtaaaccactgct

SEQ ID NO: 4265864 - DNA, 25 bp, Homo sapien
tggtggtaaaccactgcttccacct

SEQ ID NO: 4265865 - DNA, 25 bp, Homo sapien
gatggtggtaaaccactgcttccac

SEQ ID NO: 4265866 - DNA, 25 bp, Homo sapien
gaagaaatttgccagaacgccttca

SEQ ID NO: 4265867 - DNA, 25 bp, Homo sapien
agaacgccttcacttgtagctccag

SEQ ID NO: 4265868 - DNA, 25 bp, Homo sapien
agggctaccaccactcacaccaggg

SEQ ID NO: 4265869 - DNA, 25 bp, Homo sapien
aatttgccagaacgccttcacttgt

SEQ ID NO: 4265870 - DNA, 25 bp, Homo sapien
tacagatctatttggtgttcgtggg

SEQ ID NO: 4265871 - DNA, 25 bp, Homo sapien
gacacgctggcaacattagatgata

SEQ ID NO: 4265872 - DNA, 25 bp, Homo sapien
acccagcaggaatgggtgacacgct

SEQ ID NO: 4265873 - DNA, 25 bp, Homo sapien
gatgatacagatctatttggtgttc

SEQ ID NO: 4265874 - DNA, 25 bp, Homo sapien
cagctgcagttggtggttgctttgc

SEQ ID NO: 4265875 - DNA, 25 bp, Homo sapien
cagttggtggttgctttgctaaaag

SEQ ID NO: 4265876 - DNA, 25 bp, Homo sapien
ttggtggttgctttgctaaaaggga

SEQ ID NO: 4265877 - DNA, 25 bp, Homo sapien
ctgcagttggtggttgctttgctaa

SEQ ID NO: 4265878 - DNA, 25 bp, Homo sapien
aatacacacaagaacagtttaccca

SEQ ID NO: 4265879 - DNA, 25 bp, Homo sapien
tacccattaaccatactaagtctgc

SEQ ID NO: 4265880 - DNA, 25 bp, Homo sapien
catactaagtctgcttctgatataa

SEQ ID NO: 4265881 - DNA, 25 bp, Homo sapien
gaatcctagtttagacattcatagc

SEQ ID NO: 4265882 - DNA, 25 bp, Homo sapien
agcttcataagaaacacctgatcat

SEQ ID NO: 4265883 - DNA, 25 bp, Homo sapien
cagaggtgtccagtaactagctaca

SEQ ID NO: 4265884 - DNA, 25 bp, Homo sapien
gcatatgaggcaagtggctaccgta

SEQ ID NO: 4265885 - DNA, 25 bp, Homo sapien
gaaatgcttgcgaccagaagtggaa

SEQ ID NO: 4265886 - DNA, 25 bp, Homo sapien
tagagtcgagactaaaactgggccg

SEQ ID NO: 4265887 - DNA, 25 bp, Homo sapien
ttcttatcattatcccaccctgctg

SEQ ID NO: 4265888 - DNA, 25 bp, Homo sapien
caggtggtttagttatgatgtcttc

SEQ ID NO: 4265889 - DNA, 25 bp, Homo sapien
tcctattttcttatcattatcccac

SEQ ID NO: 4265890 - DNA, 25 bp, Homo sapien
ctttcgaacaggtggtttagttatg

SEQ ID NO: 4265891 - DNA, 25 bp, Homo sapien
ctgcacctggactattcaggtaact

SEQ ID NO: 4265892 - DNA, 25 bp, Homo sapien
cacctggactattcaggtaactttc

SEQ ID NO: 4265893 - DNA, 25 bp, Homo sapien
tgcacctggactattcaggtaactt

SEQ ID NO: 4265894 - DNA, 25 bp, Homo sapien
ctggactattcaggtaactttcttt

SEQ ID NO: 4265895 - DNA, 25 bp, Homo sapien
aagcatgtctagatctcatatttgg

SEQ ID NO: 4265896 - DNA, 25 bp, Homo sapien
ctaatataggcacccagtagacagt

SEQ ID NO: 4265897 - DNA, 25 bp, Homo sapien
gattcaccatcaaatagtagcaata

SEQ ID NO: 4265898 - DNA, 25 bp, Homo sapien
tcatcatggaaggtctattggtccc

SEQ ID NO: 4265899 - DNA, 25 bp, Homo sapien
gaacgatgtatttatatactaagtc

SEQ ID NO: 4265900 - DNA, 25 bp, Homo sapien
tactgaagtgtaaataagtgctgca

SEQ ID NO: 4265901 - DNA, 25 bp, Homo sapien
aacagcaggaatcttatagggaaat

SEQ ID NO: 4265902 - DNA, 25 bp, Homo sapien
tatagggaaatccatatagtttctg

SEQ ID NO: 4265903 - DNA, 25 bp, Homo sapien
tatgaccatccacattctagcactg

SEQ ID NO: 4265904 - DNA, 25 bp, Homo sapien
gatggattcagagtggctatcagaa

SEQ ID NO: 4265905 - DNA, 25 bp, Homo sapien
tggacaatgtgaccactgacagatg

SEQ ID NO: 4265906 - DNA, 25 bp, Homo sapien
ggcccttgtttctccaagggagatg

SEQ ID NO: 4265907 - DNA, 25 bp, Homo sapien
acaaaacttccggatatgtgactga

SEQ ID NO: 4265908 - DNA, 25 bp, Homo sapien
caaaacttccggatatgtgactgaa

SEQ ID NO: 4265909 - DNA, 25 bp, Homo sapien
aaacttccggatatgtgactgaata

SEQ ID NO: 4265910 - DNA, 25 bp, Homo sapien
acttccggatatgtgactgaataaa

SEQ ID NO: 4265911 - DNA, 25 bp, Homo sapien
tctggataggggaacatcataaaag

SEQ ID NO: 4265912 - DNA, 25 bp, Homo sapien
cactctgatatggtgaatgaacagc

SEQ ID NO: 4265913 - DNA, 25 bp, Homo sapien
cataaaagtaccactctgatatggt

SEQ ID NO: 4265914 - DNA, 25 bp, Homo sapien
tatggtgaatgaacagcaggacaca

SEQ ID NO: 4265915 - DNA, 25 bp, Homo sapien
tttgtgcaaactactagtactggaa

SEQ ID NO: 4265916 - DNA, 25 bp, Homo sapien
ttgtgcaaactactagtactggaat

SEQ ID NO: 4265917 - DNA, 25 bp, Homo sapien
ctttgtgcaaactactagtactgga

SEQ ID NO: 4265918 - DNA, 25 bp, Homo sapien
tctcctggctctacatattcttgga

SEQ ID NO: 4265919 - DNA, 25 bp, Homo sapien
cttctcctggctctacatattcttg

SEQ ID NO: 4265920 - DNA, 25 bp, Homo sapien
ctcctggctctacatattcttggaa

SEQ ID NO: 4265921 - DNA, 25 bp, Homo sapien
ttctcctggctctacatattcttgg

SEQ ID NO: 4265922 - DNA, 25 bp, Homo sapien
ggtttcatcatatcggccaggctag

SEQ ID NO: 4265923 - DNA, 25 bp, Homo sapien
gggtttcatcatatcggccaggcta

SEQ ID NO: 4265924 - DNA, 25 bp, Homo sapien
tttcatcatatcggccaggctagtc

SEQ ID NO: 4265925 - DNA, 25 bp, Homo sapien
tcatcatatcggccaggctagtctt

SEQ ID NO: 4265926 - DNA, 25 bp, Homo sapien
ccttcagagatacggcatccagtga

SEQ ID NO: 4265927 - DNA, 25 bp, Homo sapien
caggagggattttcagtttgtcaac

SEQ ID NO: 4265928 - DNA, 25 bp, Homo sapien
tgtcaacaaccagcataactagagt

SEQ ID NO: 4265929 - DNA, 25 bp, Homo sapien
taaagaatccaaagcagtccaaggc

SEQ ID NO: 4265930 - DNA, 25 bp, Homo sapien
caaagactaatgtgaatggcagtgc

SEQ ID NO: 4265931 - DNA, 25 bp, Homo sapien
tggcagtgcacctcaaaatagactt

SEQ ID NO: 4265932 - DNA, 25 bp, Homo sapien
caaaacaatcactatctgagggaag

SEQ ID NO: 4265933 - DNA, 25 bp, Homo sapien
tcttgaccagcatgacatcacagaa

SEQ ID NO: 4265934 - DNA, 25 bp, Homo sapien
catcatgcacatttaagtacaaata

SEQ ID NO: 4265935 - DNA, 25 bp, Homo sapien
cctgtcttcatcatgcacatttaag

SEQ ID NO: 4265936 - DNA, 25 bp, Homo sapien
tcttcatcatgcacatttaagtaca

SEQ ID NO: 4265937 - DNA, 25 bp, Homo sapien
atccctgtcttcatcatgcacattt

SEQ ID NO: 4265938 - DNA, 25 bp, Homo sapien
caaatcaggaagtcagcccagaggg

SEQ ID NO: 4265939 - DNA, 25 bp, Homo sapien
tcagagaagactgcctggctataac

SEQ ID NO: 4265940 - DNA, 25 bp, Homo sapien
ctatatgtaattcccagagactgca

SEQ ID NO: 4265941 - DNA, 25 bp, Homo sapien
ggtgacccacagacttccttcaagg

SEQ ID NO: 4265942 - DNA, 25 bp, Homo sapien
cctgctgttcttacaggtaaagggc

SEQ ID NO: 4265943 - DNA, 25 bp, Homo sapien
cagggcattctagttaatgatacac

SEQ ID NO: 4265944 - DNA, 25 bp, Homo sapien
tcctgaaccgatctcattatgctac

SEQ ID NO: 4265945 - DNA, 25 bp, Homo sapien
tctctcttaagacccttcatcaggg

SEQ ID NO: 4265946 - DNA, 25 bp, Homo sapien
gatctctaactcaacaatagaatgt

SEQ ID NO: 4265947 - DNA, 25 bp, Homo sapien
aacttcataataacaattaacaggg

SEQ ID NO: 4265948 - DNA, 25 bp, Homo sapien
aaacagtacagggtgatactgcttt

SEQ ID NO: 4265949 - DNA, 25 bp, Homo sapien
gatactgctttatctccctgataga

SEQ ID NO: 4265950 - DNA, 25 bp, Homo sapien
tagataaaccccaggccacgagaat

SEQ ID NO: 4265951 - DNA, 25 bp, Homo sapien
caggccacgagaatccctcagatga

SEQ ID NO: 4265952 - DNA, 25 bp, Homo sapien
gaatccctcagatgagcgatcgaat

SEQ ID NO: 4265953 - DNA, 25 bp, Homo sapien
agcgatcgaattctgtccttcccag

SEQ ID NO: 4265954 - DNA, 25 bp, Homo sapien
tcaagggtctcgtgttccccttctc

SEQ ID NO: 4265955 - DNA, 25 bp, Homo sapien
ttctctcccagccatccgcgacagg

SEQ ID NO: 4265956 - DNA, 25 bp, Homo sapien
catccgcgacaggtcgggaggcgag

SEQ ID NO: 4265957 - DNA, 25 bp, Homo sapien
caagggtctcgtgttccccttctct

SEQ ID NO: 4265958 - DNA, 25 bp, Homo sapien
gcagggagcttggagcgcgagcggg

SEQ ID NO: 4265959 - DNA, 25 bp, Homo sapien
ggccgccagtgtaagtcgaggataa

SEQ ID NO: 4265960 - DNA, 25 bp, Homo sapien
gataatcccggcggagaagaaccga

SEQ ID NO: 4265961 - DNA, 25 bp, Homo sapien
accgttgcccgacgctatctcgttg

SEQ ID NO: 4265962 - DNA, 25 bp, Homo sapien
ccgacgctatctcgttgcccaaggg

SEQ ID NO: 4265963 - DNA, 25 bp, Homo sapien
gggaatcacaccactcccggcaaga

SEQ ID NO: 4265964 - DNA, 25 bp, Homo sapien
ttggtcgggaatcacaccactcccg

SEQ ID NO: 4265965 - DNA, 25 bp, Homo sapien
gcaagactaaatgtgcgaggcggct

SEQ ID NO: 4265966 - DNA, 25 bp, Homo sapien
cactcccggcaagactaaatgtgcg

SEQ ID NO: 4265967 - DNA, 25 bp, Homo sapien
cacacttactacgtcgagcacagtt

SEQ ID NO: 4265968 - DNA, 25 bp, Homo sapien
cttactacgtcgagcacagttgaca

SEQ ID NO: 4265969 - DNA, 25 bp, Homo sapien
cacttactacgtcgagcacagttga

SEQ ID NO: 4265970 - DNA, 25 bp, Homo sapien
ttccacacttactacgtcgagcaca

SEQ ID NO: 4265971 - DNA, 25 bp, Homo sapien
gctactctggaggacaattgcttga

SEQ ID NO: 4265972 - DNA, 25 bp, Homo sapien
cagatcaatatgagctcaggagttt

SEQ ID NO: 4265973 - DNA, 25 bp, Homo sapien
aaggtgggcagatcaatatgagctc

SEQ ID NO: 4265974 - DNA, 25 bp, Homo sapien
cagctactctggaggacaattgctt

SEQ ID NO: 4265975 - DNA, 25 bp, Homo sapien
gcagtaagccacttaagcagaacac

SEQ ID NO: 4265976 - DNA, 25 bp, Homo sapien
aggcctgactggaagacggacacac

SEQ ID NO: 4265977 - DNA, 25 bp, Homo sapien
aagacggacacacgttgtggaagat

SEQ ID NO: 4265978 - DNA, 25 bp, Homo sapien
tcatcgtgcagtaagccacttaagc

SEQ ID NO: 4265979 - DNA, 25 bp, Homo sapien
aagccaacggttgagatggaggctt

SEQ ID NO: 4265980 - DNA, 25 bp, Homo sapien
gaaaagccaacggttgagatggagg

SEQ ID NO: 4265981 - DNA, 25 bp, Homo sapien
tgtagggaaaagccaacggttgaga

SEQ ID NO: 4265982 - DNA, 25 bp, Homo sapien
tagggaaaagccaacggttgagatg

SEQ ID NO: 4265983 - DNA, 25 bp, Homo sapien
aacaggaagagtatgtatgcaagtg

SEQ ID NO: 4265984 - DNA, 25 bp, Homo sapien
gtatgtatgcaagtgccaagactgt

SEQ ID NO: 4265985 - DNA, 25 bp, Homo sapien
agtatgtatgcaagtgccaagactg

SEQ ID NO: 4265986 - DNA, 25 bp, Homo sapien
gagtatgtatgcaagtgccaagact

SEQ ID NO: 4265987 - DNA, 25 bp, Homo sapien
tgcactgctgagcaatcgacccgaa

SEQ ID NO: 4265988 - DNA, 25 bp, Homo sapien
ctgctgagcaatcgacccgaagtac

SEQ ID NO: 4265989 - DNA, 25 bp, Homo sapien
ggccgggaacctgcactgctgagca

SEQ ID NO: 4265990 - DNA, 25 bp, Homo sapien
gatgcagatgaaggccgggaacctg

SEQ ID NO: 4265991 - DNA, 25 bp, Homo sapien
cagcttctatcgcattatccaaatc

SEQ ID NO: 4265992 - DNA, 25 bp, Homo sapien
gcttctatcgcattatccaaatctc

SEQ ID NO: 4265993 - DNA, 25 bp, Homo sapien
agcttctatcgcattatccaaatct

SEQ ID NO: 4265994 - DNA, 25 bp, Homo sapien
acagcttctatcgcattatccaaat

SEQ ID NO: 4265995 - DNA, 25 bp, Homo sapien
atccttttgttcaggtctgcctctt

SEQ ID NO: 4265996 - DNA, 25 bp, Homo sapien
cttgggaaacccaactgaagacgat

SEQ ID NO: 4265997 - DNA, 25 bp, Homo sapien
tgaagacgatctagccctttgagag

SEQ ID NO: 4265998 - DNA, 25 bp, Homo sapien
cctttgagagtaattgcaggaaacc

SEQ ID NO: 4265999 - DNA, 25 bp, Homo sapien
ctgggcctgctgtactagggcaata

SEQ ID NO: 4266000 - DNA, 25 bp, Homo sapien
gaagggcgagtatctagatttacag

SEQ ID NO: 4266001 - DNA, 25 bp, Homo sapien
ggaacacgcagtaactccttcagct

SEQ ID NO: 4266002 - DNA, 25 bp, Homo sapien
tagggcaataagaggaagagtcctg

SEQ ID NO: 4266003 - DNA, 25 bp, Homo sapien
ccttcgttgtacacagctgaagcgg

SEQ ID NO: 4266004 - DNA, 25 bp, Homo sapien
gccttcgttgtacacagctgaagcg

SEQ ID NO: 4266005 - DNA, 25 bp, Homo sapien
cctgcagtcctgtcgtgttggggga

SEQ ID NO: 4266006 - DNA, 25 bp, Homo sapien
tgcagtcctgtcgtgttgggggaag

SEQ ID NO: 4266007 - DNA, 25 bp, Homo sapien
gcagtcctgtcgtgttgggggaaga

SEQ ID NO: 4266008 - DNA, 25 bp, Homo sapien
ctgcagtcctgtcgtgttgggggaa

SEQ ID NO: 4266009 - DNA, 25 bp, Homo sapien
gcccatgttctgtcggttgccatag

SEQ ID NO: 4266010 - DNA, 25 bp, Homo sapien
ccaggatgggtgtccttccagttat

SEQ ID NO: 4266011 - DNA, 25 bp, Homo sapien
tgccatagcccccaggatgggtgtc

SEQ ID NO: 4266012 - DNA, 25 bp, Homo sapien
ctgtcggttgccatagcccccagga

SEQ ID NO: 4266013 - DNA, 25 bp, Homo sapien
gaatttctctggtgttgcagtggct

SEQ ID NO: 4266014 - DNA, 25 bp, Homo sapien
atttctctggtgttgcagtggctat

SEQ ID NO: 4266015 - DNA, 25 bp, Homo sapien
aatttctctggtgttgcagtggcta

SEQ ID NO: 4266016 - DNA, 25 bp, Homo sapien
tgaatttctctggtgttgcagtggc

SEQ ID NO: 4266017 - DNA, 25 bp, Homo sapien
gtgttccgcgtgagaatgaaggatt

SEQ ID NO: 4266018 - DNA, 25 bp, Homo sapien
tgtgttccgcgtgagaatgaaggat

SEQ ID NO: 4266019 - DNA, 25 bp, Homo sapien
aataatttggcttgggctgtgttcc

SEQ ID NO: 4266020 - DNA, 25 bp, Homo sapien
ggataactagctccaaataatttgg

SEQ ID NO: 4266021 - DNA, 25 bp, Homo sapien
gtatcaatccccctttgaaggtgaa

SEQ ID NO: 4266022 - DNA, 25 bp, Homo sapien
taagctggtatcaatccccctttga

SEQ ID NO: 4266023 - DNA, 25 bp, Homo sapien
gctggtatcaatccccctttgaagg

SEQ ID NO: 4266024 - DNA, 25 bp, Homo sapien
ttctaagctggtatcaatccccctt

SEQ ID NO: 4266025 - DNA, 25 bp, Homo sapien
gcagacaacctatggtccaactcct

SEQ ID NO: 4266026 - DNA, 25 bp, Homo sapien
agatttcattgcagacaacctatgg

SEQ ID NO: 4266027 - DNA, 25 bp, Homo sapien
cttgtatctctctattttagcctgc

SEQ ID NO: 4266028 - DNA, 25 bp, Homo sapien
tatctctctattttagcctgccttt

SEQ ID NO: 4266029 - DNA, 25 bp, Homo sapien
caaactttgcaatgtgatagtaatg

SEQ ID NO: 4266030 - DNA, 25 bp, Homo sapien
actttgcaatgtgatagtaatggca

SEQ ID NO: 4266031 - DNA, 25 bp, Homo sapien
aactttgcaatgtgatagtaatggc

SEQ ID NO: 4266032 - DNA, 25 bp, Homo sapien
gctcaaactttgcaatgtgatagta

SEQ ID NO: 4266033 - DNA, 25 bp, Homo sapien
agtttataaaatgttctcgagcccg

SEQ ID NO: 4266034 - DNA, 25 bp, Homo sapien
ctgagttaagtagtttataaaatgt

SEQ ID NO: 4266035 - DNA, 25 bp, Homo sapien
gtagtttataaaatgttctcgagcc

SEQ ID NO: 4266036 - DNA, 25 bp, Homo sapien
aagtagtttataaaatgttctcgag

SEQ ID NO: 4266037 - DNA, 25 bp, Homo sapien
ctgcaagacgcttgctagggttgac

SEQ ID NO: 4266038 - DNA, 25 bp, Homo sapien
accaacaggtacttcagctcggtga

SEQ ID NO: 4266039 - DNA, 25 bp, Homo sapien
gctcggtgaaagcaatctcttccaa

SEQ ID NO: 4266040 - DNA, 25 bp, Homo sapien
tgagggctccttgaagtgctggcac

SEQ ID NO: 4266041 - DNA, 25 bp, Homo sapien
gaagtgctggcaccaacaggtactt

SEQ ID NO: 4266042 - DNA, 25 bp, Homo sapien
tcgagctgcgataacatttcgggaa

SEQ ID NO: 4266043 - DNA, 25 bp, Homo sapien
agtcgagctgcgataacatttcggg

SEQ ID NO: 4266044 - DNA, 25 bp, Homo sapien
cgagctgcgataacatttcgggaac

SEQ ID NO: 4266045 - DNA, 25 bp, Homo sapien
aagtcgagctgcgataacatttcgg

SEQ ID NO: 4266046 - DNA, 25 bp, Homo sapien
ttctcaaggaggcccaggcccttga

SEQ ID NO: 4266047 - DNA, 25 bp, Homo sapien
ctcaaggaggcccaggcccttgaac

SEQ ID NO: 4266048 - DNA, 25 bp, Homo sapien
caaggaggcccaggcccttgaacac

SEQ ID NO: 4266049 - DNA, 25 bp, Homo sapien
cttctcaaggaggcccaggcccttg

SEQ ID NO: 4266050 - DNA, 25 bp, Homo sapien
tcctggactatctggtaaccggtgg

SEQ ID NO: 4266051 - DNA, 25 bp, Homo sapien
gaagctgtttgcctgtttcgagcag

SEQ ID NO: 4266052 - DNA, 25 bp, Homo sapien
gggagccgcggcaacagtaactcat

SEQ ID NO: 4266053 - DNA, 25 bp, Homo sapien
taaccggtggtttcagctgctaatt

SEQ ID NO: 4266054 - DNA, 25 bp, Homo sapien
tttgttctggcgtgcttctaacgat

SEQ ID NO: 4266055 - DNA, 25 bp, Homo sapien
cagtttgttctggcgtgcttctaac

SEQ ID NO: 4266056 - DNA, 25 bp, Homo sapien
gtttgttctggcgtgcttctaacga

SEQ ID NO: 4266057 - DNA, 25 bp, Homo sapien
ttgttctggcgtgcttctaacgatg

SEQ ID NO: 4266058 - DNA, 25 bp, Homo sapien
cagttttggccaacattgcatagta

SEQ ID NO: 4266059 - DNA, 25 bp, Homo sapien
tttggccaacattgcatagtactct

SEQ ID NO: 4266060 - DNA, 25 bp, Homo sapien
tgcatagtactctatttcggatttc

SEQ ID NO: 4266061 - DNA, 25 bp, Homo sapien
tagtgatggacaccagttttggcca

SEQ ID NO: 4266062 - DNA, 25 bp, Homo sapien
ctgagcagttgttagcaagaatgac

SEQ ID NO: 4266063 - DNA, 25 bp, Homo sapien
agcagttgttagcaagaatgaccaa

SEQ ID NO: 4266064 - DNA, 25 bp, Homo sapien
gttgttagcaagaatgaccaattta

SEQ ID NO: 4266065 - DNA, 25 bp, Homo sapien
ttgttagcaagaatgaccaatttag

SEQ ID NO: 4266066 - DNA, 25 bp, Homo sapien
ttgccttggcttcagagtctgcttg

SEQ ID NO: 4266067 - DNA, 25 bp, Homo sapien
gccttggcttcagagtctgcttgta

SEQ ID NO: 4266068 - DNA, 25 bp, Homo sapien
ccttggcttcagagtctgcttgtac

SEQ ID NO: 4266069 - DNA, 25 bp, Homo sapien
ctttgccttggcttcagagtctgct

SEQ ID NO: 4266070 - DNA, 25 bp, Homo sapien
tgagttggagcctagagttgatcga

SEQ ID NO: 4266071 - DNA, 25 bp, Homo sapien
atcgactccagtgactttttcatct

SEQ ID NO: 4266072 - DNA, 25 bp, Homo sapien
ttcataatgagttggagcctagagt

SEQ ID NO: 4266073 - DNA, 25 bp, Homo sapien
agttgatcgactccagtgacttttt

SEQ ID NO: 4266074 - DNA, 25 bp, Homo sapien
cctgccttaggtgcgagatggccct

SEQ ID NO: 4266075 - DNA, 25 bp, Homo sapien
gccttaggtgcgagatggccctcca

SEQ ID NO: 4266076 - DNA, 25 bp, Homo sapien
tcctgccttaggtgcgagatggccc

SEQ ID NO: 4266077 - DNA, 25 bp, Homo sapien
ttaggtgcgagatggccctccacca

SEQ ID NO: 4266078 - DNA, 25 bp, Homo sapien
gcccggcggcgggagtcagggccac

SEQ ID NO: 4266079 - DNA, 25 bp, Homo sapien
acagagttgtcctcggaggtccagg

SEQ ID NO: 4266080 - DNA, 25 bp, Homo sapien
ccggggtaggcacagagttgtcctc

SEQ ID NO: 4266081 - DNA, 25 bp, Homo sapien
taggcacagagttgtcctcggaggt

SEQ ID NO: 4266082 - DNA, 25 bp, Homo sapien
caggtagggcgccaatgtcccgagc

SEQ ID NO: 4266083 - DNA, 25 bp, Homo sapien
tgcagggaagaacccgagtcgaagc

SEQ ID NO: 4266084 - DNA, 25 bp, Homo sapien
gccaatgtcccgagcgacgagacgg

SEQ ID NO: 4266085 - DNA, 25 bp, Homo sapien
cgggcggaccctgaactcggaggcg

SEQ ID NO: 4266086 - DNA, 25 bp, Homo sapien
agtgtttggtactctacactttcag

SEQ ID NO: 4266087 - DNA, 25 bp, Homo sapien
gtgtttggtactctacactttcaga

SEQ ID NO: 4266088 - DNA, 25 bp, Homo sapien
tatctggcacactttctggctatcg

SEQ ID NO: 4266089 - DNA, 25 bp, Homo sapien
tagttccattccatcgtgggccagt

SEQ ID NO: 4266090 - DNA, 25 bp, Homo sapien
tacctgggcagtgtataaatatggg

SEQ ID NO: 4266091 - DNA, 25 bp, Homo sapien
ttatttcagacttggcagaggcaag

SEQ ID NO: 4266092 - DNA, 25 bp, Homo sapien
ttttagcagtaaaagccatgatgga

SEQ ID NO: 4266093 - DNA, 25 bp, Homo sapien
tattttagcagtaaaagccatgatg

SEQ ID NO: 4266094 - DNA, 25 bp, Homo sapien
ctctattttagcagtaaaagccatg

SEQ ID NO: 4266095 - DNA, 25 bp, Homo sapien
tctattttagcagtaaaagccatga

SEQ ID NO: 4266096 - DNA, 25 bp, Homo sapien
aaacagtacaagatggaaggagcct

SEQ ID NO: 4266097 - DNA, 25 bp, Homo sapien
tgttaaagggcaattctgtggcagg

SEQ ID NO: 4266098 - DNA, 25 bp, Homo sapien
tgtcttctatctaaggagcctgagc

SEQ ID NO: 4266099 - DNA, 25 bp, Homo sapien
cagtagcaatggtaatgtggacaca

SEQ ID NO: 4266100 - DNA, 25 bp, Homo sapien
ttgagcagcccctctcaaagtgccc

SEQ ID NO: 4266101 - DNA, 25 bp, Homo sapien
agtgtgtacagtccagctgaggttc

SEQ ID NO: 4266102 - DNA, 25 bp, Homo sapien
gacctcagtcactgcagcaaacaga

SEQ ID NO: 4266103 - DNA, 25 bp, Homo sapien
agcttttgatctaaagttacagtgt

SEQ ID NO: 4266104 - DNA, 25 bp, Homo sapien
ctgttttgagcaaaggcggcttcaa

SEQ ID NO: 4266105 - DNA, 25 bp, Homo sapien
aatgatccatcctaaagaggtgccc

SEQ ID NO: 4266106 - DNA, 25 bp, Homo sapien
ttgttttttcacgggcatctttctg

SEQ ID NO: 4266107 - DNA, 25 bp, Homo sapien
ggcagatgtacttggagtgtgtatc

SEQ ID NO: 4266108 - DNA, 25 bp, Homo sapien
aaattcaggtcatgcctctagggca

SEQ ID NO: 4266109 - DNA, 25 bp, Homo sapien
gaagaaaggctgttggctctaaata

SEQ ID NO: 4266110 - DNA, 25 bp, Homo sapien
tagggcatatacgatctccaagatg

SEQ ID NO: 4266111 - DNA, 25 bp, Homo sapien
gcagttgctttgagttatacaccat

SEQ ID NO: 4266112 - DNA, 25 bp, Homo sapien
tttcttttatacagcccacctataa

SEQ ID NO: 4266113 - DNA, 25 bp, Homo sapien
aagttctctacctgggctatacctt

SEQ ID NO: 4266114 - DNA, 25 bp, Homo sapien
agttctctacctgggctatacctta

SEQ ID NO: 4266115 - DNA, 25 bp, Homo sapien
cttttatacagcccacctataacaa

SEQ ID NO: 4266116 - DNA, 25 bp, Homo sapien
aagaaggtgtatgtttgactggctc

SEQ ID NO: 4266117 - DNA, 25 bp, Homo sapien
agaaggtgtatgtttgactggctcc

SEQ ID NO: 4266118 - DNA, 25 bp, Homo sapien
gaagaaggtgtatgtttgactggct

SEQ ID NO: 4266119 - DNA, 25 bp, Homo sapien
gcaggcaatggccaaaacactggtt

SEQ ID NO: 4266120 - DNA, 25 bp, Homo sapien
catctggtgaaatgcagggtggaca

SEQ ID NO: 4266121 - DNA, 25 bp, Homo sapien
actggttagaggagccctgttagga

SEQ ID NO: 4266122 - DNA, 25 bp, Homo sapien
tgctcttgcttgactcacatctggt

SEQ ID NO: 4266123 - DNA, 25 bp, Homo sapien
tgatggctcagctgaagtaccacct

SEQ ID NO: 4266124 - DNA, 25 bp, Homo sapien
tcttaggaccaggaggacgattgag

SEQ ID NO: 4266125 - DNA, 25 bp, Homo sapien
gggccaaactaagagggagacagca

SEQ ID NO: 4266126 - DNA, 25 bp, Homo sapien
aaaatacatgttgagtcttaggacc

SEQ ID NO: 4266127 - DNA, 25 bp, Homo sapien
ttctgcagcttcctagggccatcag

SEQ ID NO: 4266128 - DNA, 25 bp, Homo sapien
caagacggcttcatccttttggaga

SEQ ID NO: 4266129 - DNA, 25 bp, Homo sapien
gggccatcagcacatgtgtccagct

SEQ ID NO: 4266130 - DNA, 25 bp, Homo sapien
gcagctgagggcttaggcattcccg

SEQ ID NO: 4266131 - DNA, 25 bp, Homo sapien
gaaggtttcaaaggtcgtcacactg

SEQ ID NO: 4266132 - DNA, 25 bp, Homo sapien
gagagggctaatgtttcctgtttgc

SEQ ID NO: 4266133 - DNA, 25 bp, Homo sapien
ggagcacacaaaagcgggccgtgct

SEQ ID NO: 4266134 - DNA, 25 bp, Homo sapien
gaagtgagtttgctcctttggagat

SEQ ID NO: 4266135 - DNA, 25 bp, Homo sapien
cggagctcggatagcattgcacgac

SEQ ID NO: 4266136 - DNA, 25 bp, Homo sapien
taaccggcgtactgaagagaagagg

SEQ ID NO: 4266137 - DNA, 25 bp, Homo sapien
gatcggcgactcctttcagaaagaa

SEQ ID NO: 4266138 - DNA, 25 bp, Homo sapien
cgaaatggcccgatgacaaaggaaa

SEQ ID NO: 4266139 - DNA, 25 bp, Homo sapien
gcgtgcgtgttaagcgcgggcagcc

SEQ ID NO: 4266140 - DNA, 25 bp, Homo sapien
gaaggagcgtgcgtgaggcgcccag

SEQ ID NO: 4266141 - DNA, 25 bp, Homo sapien
cgcggaagactcgaggcgcgtggga

SEQ ID NO: 4266142 - DNA, 25 bp, Homo sapien
tcttcctgccgatgaataattcagg

SEQ ID NO: 4266143 - DNA, 25 bp, Homo sapien
cgtctatcgcgaagggaagcctcag

SEQ ID NO: 4266144 - DNA, 25 bp, Homo sapien
tgcacagcgaactctccttttggga

SEQ ID NO: 4266145 - DNA, 25 bp, Homo sapien
tgctctcgccgggactgggactgca

SEQ ID NO: 4266146 - DNA, 25 bp, Homo sapien
aatactcgtggaaccaaattctgct

SEQ ID NO: 4266147 - DNA, 25 bp, Homo sapien
gaggaatctgtgtcgccgctggata

SEQ ID NO: 4266148 - DNA, 25 bp, Homo sapien
ccgctggatagtggcatttaatgcc

SEQ ID NO: 4266149 - DNA, 25 bp, Homo sapien
cggattgcaggcctaatcgatgcat

SEQ ID NO: 4266150 - DNA, 25 bp, Homo sapien
cccccaagttatccggaggaatctg

SEQ ID NO: 4266151 - DNA, 25 bp, Homo sapien
caccacgacgacgaggtgagtgcgt

SEQ ID NO: 4266152 - DNA, 25 bp, Homo sapien
catcggataactgcgtgtgtgctca

SEQ ID NO: 4266153 - DNA, 25 bp, Homo sapien
tgtgtgctcaacagcgtttcccggc

SEQ ID NO: 4266154 - DNA, 25 bp, Homo sapien
tgtttcccgagcgcctcggcttctg

SEQ ID NO: 4266155 - DNA, 25 bp, Homo sapien
tgggctgtcgagtaaacatttgctt

SEQ ID NO: 4266156 - DNA, 25 bp, Homo sapien
tgcaaaggcttttagggctacattg

SEQ ID NO: 4266157 - DNA, 25 bp, Homo sapien
gctacattgcaaccctcgggctcga

SEQ ID NO: 4266158 - DNA, 25 bp, Homo sapien
tcgggctcgatttcgccctttgggc

SEQ ID NO: 4266159 - DNA, 25 bp, Homo sapien
ccaatgaaggcaggccaaaagtctt

SEQ ID NO: 4266160 - DNA, 25 bp, Homo sapien
aagtcttgagaagcgggctcttgcc

SEQ ID NO: 4266161 - DNA, 25 bp, Homo sapien
cctttccactttggtattatgcgag

SEQ ID NO: 4266162 - DNA, 25 bp, Homo sapien
tattatgcgagtgtcgtcttctccc

SEQ ID NO: 4266163 - DNA, 25 bp, Homo sapien
tttccaacgaaataatgagacgtac

SEQ ID NO: 4266164 - DNA, 25 bp, Homo sapien
ttttccaacgaaataatgagacgta

SEQ ID NO: 4266165 - DNA, 25 bp, Homo sapien
tgggttttccaacgaaataatgaga

SEQ ID NO: 4266166 - DNA, 25 bp, Homo sapien
cagagtccgaaaggcctgcaggctc

SEQ ID NO: 4266167 - DNA, 25 bp, Homo sapien
ccaaggcgaggaatccgaggtcgcc

SEQ ID NO: 4266168 - DNA, 25 bp, Homo sapien
tctgtgcctccagagtccgaaaggc

SEQ ID NO: 4266169 - DNA, 25 bp, Homo sapien
tggggcttttcactagttctgtgcc

SEQ ID NO: 4266170 - DNA, 25 bp, Homo sapien
taagacatttgctgtttcagggcca

SEQ ID NO: 4266171 - DNA, 25 bp, Homo sapien
ctgtgtttaagacatttgctgtttc

SEQ ID NO: 4266172 - DNA, 25 bp, Homo sapien
tgtttaagacatttgctgtttcagg

SEQ ID NO: 4266173 - DNA, 25 bp, Homo sapien
agacatttgctgtttcagggccaca

SEQ ID NO: 4266174 - DNA, 25 bp, Homo sapien
aaaccatggtctcaatccaggaagt

SEQ ID NO: 4266175 - DNA, 25 bp, Homo sapien
tgtgtttgtcttctttgtaagctgc

SEQ ID NO: 4266176 - DNA, 25 bp, Homo sapien
tttcatgactcaagcttgcctgtgt

SEQ ID NO: 4266177 - DNA, 25 bp, Homo sapien
aggaagtcccatcccgcatgctgct

SEQ ID NO: 4266178 - DNA, 25 bp, Homo sapien
taatccccatgtatgctctgtccct

SEQ ID NO: 4266179 - DNA, 25 bp, Homo sapien
ggcagtgaggactacaaagctctcc

SEQ ID NO: 4266180 - DNA, 25 bp, Homo sapien
gagtcttgccagcatgtgcctcaca

SEQ ID NO: 4266181 - DNA, 25 bp, Homo sapien
atagagtccagacccgtgccaaggg

SEQ ID NO: 4266182 - DNA, 25 bp, Homo sapien
ctggccttaatggtcataaatgacc

SEQ ID NO: 4266183 - DNA, 25 bp, Homo sapien
tctggccttaatggtcataaatgac

SEQ ID NO: 4266184 - DNA, 25 bp, Homo sapien
tggccttaatggtcataaatgaccc

SEQ ID NO: 4266185 - DNA, 25 bp, Homo sapien
gcctcgaagtaagggatactgggat

SEQ ID NO: 4266186 - DNA, 25 bp, Homo sapien
cccagtaagcttatttcttggtttg

SEQ ID NO: 4266187 - DNA, 25 bp, Homo sapien
taaggcatagcagtaactccccagt

SEQ ID NO: 4266188 - DNA, 25 bp, Homo sapien
tctcatcaaccagagttctaaggca

SEQ ID NO: 4266189 - DNA, 25 bp, Homo sapien
aaataagcccctcagtttggatgga

SEQ ID NO: 4266190 - DNA, 25 bp, Homo sapien
ggtagagcgagttcatttacctgcc

SEQ ID NO: 4266191 - DNA, 25 bp, Homo sapien
tacctgccttagattagaaacgctg

SEQ ID NO: 4266192 - DNA, 25 bp, Homo sapien
taaggtcagaaggaacccagtcttg

SEQ ID NO: 4266193 - DNA, 25 bp, Homo sapien
tttatggtcggtcctcggccttgga

SEQ ID NO: 4266194 - DNA, 25 bp, Homo sapien
gaccaaactggtcacagattccctg

SEQ ID NO: 4266195 - DNA, 25 bp, Homo sapien
gccttttggattgtggggccatgaa

SEQ ID NO: 4266196 - DNA, 25 bp, Homo sapien
agtgtcacggcctaaactggagcgc

SEQ ID NO: 4266197 - DNA, 25 bp, Homo sapien
gaatgaaggttcatcttcagggatg

SEQ ID NO: 4266198 - DNA, 25 bp, Homo sapien
agaatgaaggttcatcttcagggat

SEQ ID NO: 4266199 - DNA, 25 bp, Homo sapien
aatgaaggttcatcttcagggatgg

SEQ ID NO: 4266200 - DNA, 25 bp, Homo sapien
cagaatgaaggttcatcttcaggga

SEQ ID NO: 4266201 - DNA, 25 bp, Homo sapien
tgaccacgccttttctttctggaac

SEQ ID NO: 4266202 - DNA, 25 bp, Homo sapien
gggctcatgaccacgccttttcttt

SEQ ID NO: 4266203 - DNA, 25 bp, Homo sapien
ttctttctggaactgccacggacat

SEQ ID NO: 4266204 - DNA, 25 bp, Homo sapien
catgaccacgccttttctttctgga

SEQ ID NO: 4266205 - DNA, 25 bp, Homo sapien
actgcttctttgtagtggactgtgc

SEQ ID NO: 4266206 - DNA, 25 bp, Homo sapien
gactgcttctttgtagtggactgtg

SEQ ID NO: 4266207 - DNA, 25 bp, Homo sapien
cctgcccggaatgccgctggcctgg

SEQ ID NO: 4266208 - DNA, 25 bp, Homo sapien
atttccctgcccggaatgccgctgg

SEQ ID NO: 4266209 - DNA, 25 bp, Homo sapien
gcttttgcactgaagatgtttgctc

SEQ ID NO: 4266210 - DNA, 25 bp, Homo sapien
tgaagatgtttgctctgctctcgct

SEQ ID NO: 4266211 - DNA, 25 bp, Homo sapien
ctgcttttgcactgaagatgtttgc

SEQ ID NO: 4266212 - DNA, 25 bp, Homo sapien
ttttgcactgaagatgtttgctctg

SEQ ID NO: 4266213 - DNA, 25 bp, Homo sapien
cccagtgcagcacgggtacttcttg

SEQ ID NO: 4266214 - DNA, 25 bp, Homo sapien
cagaggccacgtgtgtgctatccac

SEQ ID NO: 4266215 - DNA, 25 bp, Homo sapien
agaaaggctcttgtaattgctggaa

SEQ ID NO: 4266216 - DNA, 25 bp, Homo sapien
tgccatagaagagcccagacttggg

SEQ ID NO: 4266217 - DNA, 25 bp, Homo sapien
gagacatattcatgaaactactttg

SEQ ID NO: 4266218 - DNA, 25 bp, Homo sapien
tgactctgccaaaactggtcgaagg

SEQ ID NO: 4266219 - DNA, 25 bp, Homo sapien
acgagttacaccaccctttctcagg

SEQ ID NO: 4266220 - DNA, 25 bp, Homo sapien
tcgaaggcgtttgctgtgctgccca

SEQ ID NO: 4266221 - DNA, 25 bp, Homo sapien
tatctgggttttcatcttccttaag

SEQ ID NO: 4266222 - DNA, 25 bp, Homo sapien
tgggttttcatcttccttaagagag

SEQ ID NO: 4266223 - DNA, 25 bp, Homo sapien
ggttttcatcttccttaagagagtc

SEQ ID NO: 4266224 - DNA, 25 bp, Homo sapien
ttttcatcttccttaagagagtcat

SEQ ID NO: 4266225 - DNA, 25 bp, Homo sapien
caaggatgttaactgtggcactgct

SEQ ID NO: 4266226 - DNA, 25 bp, Homo sapien
ttcacatgggtgaaggtcgacctga

SEQ ID NO: 4266227 - DNA, 25 bp, Homo sapien
tccaagcttgcaagtaggtttcccc

SEQ ID NO: 4266228 - DNA, 25 bp, Homo sapien
tgcacggagtgacccagaacattct

SEQ ID NO: 4266229 - DNA, 25 bp, Homo sapien
agaggaaggcaatgggtgggacgtt

SEQ ID NO: 4266230 - DNA, 25 bp, Homo sapien
gaggaaggcaatgggtgggacgttc

SEQ ID NO: 4266231 - DNA, 25 bp, Homo sapien
gcagccggattgtcgccaggcccga

SEQ ID NO: 4266232 - DNA, 25 bp, Homo sapien
ctggaattcctgctgctagacgacc

SEQ ID NO: 4266233 - DNA, 25 bp, Homo sapien
tgctagacgacctgttcttcccagt

SEQ ID NO: 4266234 - DNA, 25 bp, Homo sapien
gtctgtgcatctgcccgggaagccc

SEQ ID NO: 4266235 - DNA, 25 bp, Homo sapien
tttaaaggaggcaagttgctgctac

SEQ ID NO: 4266236 - DNA, 25 bp, Homo sapien
gctgctacctggtttcagtctgcca

SEQ ID NO: 4266237 - DNA, 25 bp, Homo sapien
ctggtttcagtctgccaccattgct

SEQ ID NO: 4266238 - DNA, 25 bp, Homo sapien
ggaggcaagttgctgctacctggtt

SEQ ID NO: 4266239 - DNA, 25 bp, Homo sapien
ctgtgttggaaccagctctgtagaa

SEQ ID NO: 4266240 - DNA, 25 bp, Homo sapien
ctgtggccttgagcactccccaact

SEQ ID NO: 4266241 - DNA, 25 bp, Homo sapien
tgtgtctttgctaacactgtggcct

SEQ ID NO: 4266242 - DNA, 25 bp, Homo sapien
cagctctgtagaaggctcatgctgg

SEQ ID NO: 4266243 - DNA, 25 bp, Homo sapien
gacgacaggcaatccaggtgagcct

SEQ ID NO: 4266244 - DNA, 25 bp, Homo sapien
tgcagttcccacgtgaatcgagccc

SEQ ID NO: 4266245 - DNA, 25 bp, Homo sapien
atccctgcagcagcggtccctttag

SEQ ID NO: 4266246 - DNA, 25 bp, Homo sapien
gacaattgggcagattccagtgtgg

SEQ ID NO: 4266247 - DNA, 25 bp, Homo sapien
gctggtgtctcctcgacaccggtgc

SEQ ID NO: 4266248 - DNA, 25 bp, Homo sapien
ctcgacaccggtgccctcgacactg

SEQ ID NO: 4266249 - DNA, 25 bp, Homo sapien
tgctggtgtctcctcgacaccggtg

SEQ ID NO: 4266250 - DNA, 25 bp, Homo sapien
accggtgccctcgacactgtggcat

SEQ ID NO: 4266251 - DNA, 25 bp, Homo sapien
cacgtaagggatgttcctggcctgc

SEQ ID NO: 4266252 - DNA, 25 bp, Homo sapien
aaactggctgatttactacggctgg

SEQ ID NO: 4266253 - DNA, 25 bp, Homo sapien
tagttacatgtcaaacagatgccag

SEQ ID NO: 4266254 - DNA, 25 bp, Homo sapien
gatggattagccactaccctgtcgc

SEQ ID NO: 4266255 - DNA, 25 bp, Homo sapien
ttgtgcagtcggaggtcaaagccgt

SEQ ID NO: 4266256 - DNA, 25 bp, Homo sapien
tcaaagccgtgacggcgaggcataa

SEQ ID NO: 4266257 - DNA, 25 bp, Homo sapien
ccttctaatgcctcgaagttgtttc

SEQ ID NO: 4266258 - DNA, 25 bp, Homo sapien
ttttcaagtctgacagagcagattc

SEQ ID NO: 4266259 - DNA, 25 bp, Homo sapien
tacagatgaatgtacttatcttttc

SEQ ID NO: 4266260 - DNA, 25 bp, Homo sapien
tcttcccctgcgtggggcatgatat

SEQ ID NO: 4266261 - DNA, 25 bp, Homo sapien
gaagtgataatttctatctacctca

SEQ ID NO: 4266262 - DNA, 25 bp, Homo sapien
cagggattgagcctgtgaagtgata

SEQ ID NO: 4266263 - DNA, 25 bp, Homo sapien
gtttctagcagtctgtgtagttgtc

SEQ ID NO: 4266264 - DNA, 25 bp, Homo sapien
tttgtgtttctagcagtctgtgtag

SEQ ID NO: 4266265 - DNA, 25 bp, Homo sapien
tagcagtctgtgtagttgtctttct

SEQ ID NO: 4266266 - DNA, 25 bp, Homo sapien
cagtctgtgtagttgtctttcttca

SEQ ID NO: 4266267 - DNA, 25 bp, Homo sapien
atgttactattgcaggccgcaggca

SEQ ID NO: 4266268 - DNA, 25 bp, Homo sapien
gaatgtatcactgtggtccacagag

SEQ ID NO: 4266269 - DNA, 25 bp, Homo sapien
aagtgttcaaaaactcctgtgttag

SEQ ID NO: 4266270 - DNA, 25 bp, Homo sapien
ccgcaggcatgacaggcaatgagca

SEQ ID NO: 4266271 - DNA, 25 bp, Homo sapien
ccctgaagtgtaaatggactctgaa

SEQ ID NO: 4266272 - DNA, 25 bp, Homo sapien
ggtgttgataccttcagcttcaaaa

SEQ ID NO: 4266273 - DNA, 25 bp, Homo sapien
cctgattagcagtttcaaaaagacc

SEQ ID NO: 4266274 - DNA, 25 bp, Homo sapien
catgttggtgttgataccttcagct

SEQ ID NO: 4266275 - DNA, 25 bp, Homo sapien
cacggcctctaatctggactcagca

SEQ ID NO: 4266276 - DNA, 25 bp, Homo sapien
tttcaacagcagcatggaccacctt

SEQ ID NO: 4266277 - DNA, 25 bp, Homo sapien
caactcggtttaggaatgtgcccac

SEQ ID NO: 4266278 - DNA, 25 bp, Homo sapien
gaatacagtgttccacgtccctcat

SEQ ID NO: 4266279 - DNA, 25 bp, Homo sapien
tagtcgtatcaaccatataccgctt

SEQ ID NO: 4266280 - DNA, 25 bp, Homo sapien
cagtgggatgcggagctctcctgct

SEQ ID NO: 4266281 - DNA, 25 bp, Homo sapien
tactcttcttaacaatagcaagggc

SEQ ID NO: 4266282 - DNA, 25 bp, Homo sapien
atttgaggaagagatcagtgctctt

SEQ ID NO: 4266283 - DNA, 25 bp, Homo sapien
tatcctggtggatacaggatacacg

SEQ ID NO: 4266284 - DNA, 25 bp, Homo sapien
tacaggatacacgtggtggaggtgg

SEQ ID NO: 4266285 - DNA, 25 bp, Homo sapien
tggagaagccttccggccactaact

SEQ ID NO: 4266286 - DNA, 25 bp, Homo sapien
ccggccgccgtgttgtatcctggtg

SEQ ID NO: 4266287 - DNA, 25 bp, Homo sapien
ttctgagaaattgtgaaacagcagc

SEQ ID NO: 4266288 - DNA, 25 bp, Homo sapien
tattgaacataactgccaaagtctg

SEQ ID NO: 4266289 - DNA, 25 bp, Homo sapien
tccatttgcaccagacttagagaca

SEQ ID NO: 4266290 - DNA, 25 bp, Homo sapien
aatacctggatggtctgcccaaagc

SEQ ID NO: 4266291 - DNA, 25 bp, Homo sapien
acttgggtcagaagttctcctggcc

SEQ ID NO: 4266292 - DNA, 25 bp, Homo sapien
catcgggttgtgaagacagctagcc

SEQ ID NO: 4266293 - DNA, 25 bp, Homo sapien
catttcctgagcagagggtgcacag

SEQ ID NO: 4266294 - DNA, 25 bp, Homo sapien
aatttcaaatttgcaggaggcagac

SEQ ID NO: 4266295 - DNA, 25 bp, Homo sapien
ggagctcagatcctgtagggtaact

SEQ ID NO: 4266296 - DNA, 25 bp, Homo sapien
gcaaagtgttgagcaaagctgagat

SEQ ID NO: 4266297 - DNA, 25 bp, Homo sapien
cctctgggttttggcacttgaagca

SEQ ID NO: 4266298 - DNA, 25 bp, Homo sapien
ggacaagaattagggaatagaagca

SEQ ID NO: 4266299 - DNA, 25 bp, Homo sapien
tccaaaggcctaaggaccagtagag

SEQ ID NO: 4266300 - DNA, 25 bp, Homo sapien
tagagcctatggtgtaagtccaaaa

SEQ ID NO: 4266301 - DNA, 25 bp, Homo sapien
gagctgaggatgtggttccagcctc

SEQ ID NO: 4266302 - DNA, 25 bp, Homo sapien
tgattatggaatctgaaatgtccca

SEQ ID NO: 4266303 - DNA, 25 bp, Homo sapien
ggcactccttttcggacatgggaaa

SEQ ID NO: 4266304 - DNA, 25 bp, Homo sapien
ctccttttcggacatgggaaatgct

SEQ ID NO: 4266305 - DNA, 25 bp, Homo sapien
cagatcccttggcactccttttcgg

SEQ ID NO: 4266306 - DNA, 25 bp, Homo sapien
ccttggcactccttttcggacatgg

SEQ ID NO: 4266307 - DNA, 25 bp, Homo sapien
gcttgacattggaaacgtggccccg

SEQ ID NO: 4266308 - DNA, 25 bp, Homo sapien
cagtgccgggactcttctccgggaa

SEQ ID NO: 4266309 - DNA, 25 bp, Homo sapien
tggagctatcgagggccttttctgc

SEQ ID NO: 4266310 - DNA, 25 bp, Homo sapien
tccatggctggttcatgagaactct

SEQ ID NO: 4266311 - DNA, 25 bp, Homo sapien
gcttcttagggccccttcctcagaa

SEQ ID NO: 4266312 - DNA, 25 bp, Homo sapien
cttcttagggccccttcctcagaag

SEQ ID NO: 4266313 - DNA, 25 bp, Homo sapien
tgtcctttggactttgcaaatggct

SEQ ID NO: 4266314 - DNA, 25 bp, Homo sapien
caaatggcttcttgatatctgccga

SEQ ID NO: 4266315 - DNA, 25 bp, Homo sapien
gatatctgccgatcatggcagacag

SEQ ID NO: 4266316 - DNA, 25 bp, Homo sapien
agttgcccaccagggaagttgtgat

SEQ ID NO: 4266317 - DNA, 25 bp, Homo sapien
gaaactcttcagctaagttcctggg

SEQ ID NO: 4266318 - DNA, 25 bp, Homo sapien
tcagcccgtttcacctcaaggaaga

SEQ ID NO: 4266319 - DNA, 25 bp, Homo sapien
ggcacttccggctcacgaaactctt

SEQ ID NO: 4266320 - DNA, 25 bp, Homo sapien
tccagagaaaaaccgagagtcatca

SEQ ID NO: 4266321 - DNA, 25 bp, Homo sapien
cattgtagcaggcaaaatgtgtgcc

SEQ ID NO: 4266322 - DNA, 25 bp, Homo sapien
ccaaaggtagcatccatagagagag

SEQ ID NO: 4266323 - DNA, 25 bp, Homo sapien
caatcaattcgtggacagatctgaa

SEQ ID NO: 4266324 - DNA, 25 bp, Homo sapien
gagtccagagtccaggtggcactat

SEQ ID NO: 4266325 - DNA, 25 bp, Homo sapien
gcttctatatagatataccatacta

SEQ ID NO: 4266326 - DNA, 25 bp, Homo sapien
gctgtatttataggttatctagtcc

SEQ ID NO: 4266327 - DNA, 25 bp, Homo sapien
aaagcaagtcaaataacgatcagaa

SEQ ID NO: 4266328 - DNA, 25 bp, Homo sapien
tactatgtacactgtgcaactgtta

SEQ ID NO: 4266329 - DNA, 25 bp, Homo sapien
tgatttaagtcagaccatataattc

SEQ ID NO: 4266330 - DNA, 25 bp, Homo sapien
gttatgatttaagtcagaccatata

SEQ ID NO: 4266331 - DNA, 25 bp, Homo sapien
caagttagtgaagtggtttattcag

SEQ ID NO: 4266332 - DNA, 25 bp, Homo sapien
cagcccactcaagtctagttatgat

SEQ ID NO: 4266333 - DNA, 25 bp, Homo sapien
agggtagaatccctcaaagacacag

SEQ ID NO: 4266334 - DNA, 25 bp, Homo sapien
tcagtgaaatgtggcatgacaggga

SEQ ID NO: 4266335 - DNA, 25 bp, Homo sapien
tatgcacgttactgtgctgtcagcc

SEQ ID NO: 4266336 - DNA, 25 bp, Homo sapien
gccctgcagatatgtatgcacgtta

SEQ ID NO: 4266337 - DNA, 25 bp, Homo sapien
tttggagggatgatcgtaggtcaca

SEQ ID NO: 4266338 - DNA, 25 bp, Homo sapien
cgtaggtcacagatgagccaataac

SEQ ID NO: 4266339 - DNA, 25 bp, Homo sapien
agggatgatcgtaggtcacagatga

SEQ ID NO: 4266340 - DNA, 25 bp, Homo sapien
tgagtcttttttcaacaggtttgga

SEQ ID NO: 4266341 - DNA, 25 bp, Homo sapien
gatcatcactgctgcagggtgccca

SEQ ID NO: 4266342 - DNA, 25 bp, Homo sapien
gttaaagccattaatccagacctgg

SEQ ID NO: 4266343 - DNA, 25 bp, Homo sapien
ccaatagcggccaaggttaaagcca

SEQ ID NO: 4266344 - DNA, 25 bp, Homo sapien
cactccagttccagcacggtgatgg

SEQ ID NO: 4266345 - DNA, 25 bp, Homo sapien
cccagatgcaccgaaagccctgagg

SEQ ID NO: 4266346 - DNA, 25 bp, Homo sapien
ggccagcagcaatggaggaaagaaa

SEQ ID NO: 4266347 - DNA, 25 bp, Homo sapien
catcaaccccagatgcaccgaaagc

SEQ ID NO: 4266348 - DNA, 25 bp, Homo sapien
agggcaggccagcagcaatggagga

SEQ ID NO: 4266349 - DNA, 25 bp, Homo sapien
ggccacagatgttggtaccagagaa

SEQ ID NO: 4266350 - DNA, 25 bp, Homo sapien
tttagcttcttgctgggataactgg

SEQ ID NO: 4266351 - DNA, 25 bp, Homo sapien
ggttcccaggtgctgcctgtaccca

SEQ ID NO: 4266352 - DNA, 25 bp, Homo sapien
tacaggtttggtccctctgacgggc

SEQ ID NO: 4266353 - DNA, 25 bp, Homo sapien
ttaaagtgaaaagatgttggtgttc

SEQ ID NO: 4266354 - DNA, 25 bp, Homo sapien
aagtgaaaagatgttggtgttccaa

SEQ ID NO: 4266355 - DNA, 25 bp, Homo sapien
gtgaaaagatgttggtgttccaatg

SEQ ID NO: 4266356 - DNA, 25 bp, Homo sapien
atgattaaagtgaaaagatgttggt

SEQ ID NO: 4266357 - DNA, 25 bp, Homo sapien
tttcacatgggccttcaagacacgg

SEQ ID NO: 4266358 - DNA, 25 bp, Homo sapien
gccccagcctagataatgagtatga

SEQ ID NO: 4266359 - DNA, 25 bp, Homo sapien
ggagatgtactttcaagcctggaga

SEQ ID NO: 4266360 - DNA, 25 bp, Homo sapien
tcaggtagatgtgccactgagcact

SEQ ID NO: 4266361 - DNA, 25 bp, Homo sapien
aatgggactcggcagaaagatggag

SEQ ID NO: 4266362 - DNA, 25 bp, Homo sapien
tgaaaaatgggactcggcagaaaga

SEQ ID NO: 4266363 - DNA, 25 bp, Homo sapien
aaaaatgggactcggcagaaagatg

SEQ ID NO: 4266364 - DNA, 25 bp, Homo sapien
aaatgggactcggcagaaagatgga

SEQ ID NO: 4266365 - DNA, 25 bp, Homo sapien
tacacctgatagcagtcaaggagga

SEQ ID NO: 4266366 - DNA, 25 bp, Homo sapien
ctgagggaacaaaggagttacacct

SEQ ID NO: 4266367 - DNA, 25 bp, Homo sapien
gacttcctcctagataccactgggc

SEQ ID NO: 4266368 - DNA, 25 bp, Homo sapien
cagagagataagtctgacaggaagc

SEQ ID NO: 4266369 - DNA, 25 bp, Homo sapien
caacaatgaggggatggtagccacg

SEQ ID NO: 4266370 - DNA, 25 bp, Homo sapien
gccacgatgaatgcgctgagaagtc

SEQ ID NO: 4266371 - DNA, 25 bp, Homo sapien
caaggactgctgggcaaatctgagg

SEQ ID NO: 4266372 - DNA, 25 bp, Homo sapien
tgctgaaggttgaaaaggccagtgg

SEQ ID NO: 4266373 - DNA, 25 bp, Homo sapien
agcagagacaccagtagtggatcca

SEQ ID NO: 4266374 - DNA, 25 bp, Homo sapien
cagagacaccagtagtggatccatt

SEQ ID NO: 4266375 - DNA, 25 bp, Homo sapien
ttagctgtgctcagtgactggtgaa

SEQ ID NO: 4266376 - DNA, 25 bp, Homo sapien
tgctcagtgactggtgaaccagcag

SEQ ID NO: 4266377 - DNA, 25 bp, Homo sapien
gcatatccatcagctccaatagaaa

SEQ ID NO: 4266378 - DNA, 25 bp, Homo sapien
gcagccatcattcaagttagtttca

SEQ ID NO: 4266379 - DNA, 25 bp, Homo sapien
ccagagagaggatattaaagcctaa

SEQ ID NO: 4266380 - DNA, 25 bp, Homo sapien
taggcaaccagtaagctactatctc

SEQ ID NO: 4266381 - DNA, 25 bp, Homo sapien
gaattcccagcctatagatccaaca

SEQ ID NO: 4266382 - DNA, 25 bp, Homo sapien
tctaaaaccaccgaagtgcttctgt

SEQ ID NO: 4266383 - DNA, 25 bp, Homo sapien
tgtcctcttggcagcataaatgctg

SEQ ID NO: 4266384 - DNA, 25 bp, Homo sapien
aaggcttactgattcccaagggcct

SEQ ID NO: 4266385 - DNA, 25 bp, Homo sapien
aggaagccaatgacaagggggcaga

SEQ ID NO: 4266386 - DNA, 25 bp, Homo sapien
ggtgtcattcactacaggaagccaa

SEQ ID NO: 4266387 - DNA, 25 bp, Homo sapien
agccaatgacaagggggcagatggc

SEQ ID NO: 4266388 - DNA, 25 bp, Homo sapien
atggtgtcattcactacaggaagcc

SEQ ID NO: 4266389 - DNA, 25 bp, Homo sapien
gaatgtccgaaacgccacactcaaa

SEQ ID NO: 4266390 - DNA, 25 bp, Homo sapien
ccatcacacgatatctcactaacag

SEQ ID NO: 4266391 - DNA, 25 bp, Homo sapien
tccctgaagatctgccacaatccgc

SEQ ID NO: 4266392 - DNA, 25 bp, Homo sapien
gccacaatccgcctcctgaagaatg

SEQ ID NO: 4266393 - DNA, 25 bp, Homo sapien
cgtccagtccgtgaggatattggaa

SEQ ID NO: 4266394 - DNA, 25 bp, Homo sapien
tggagaagttccccatataaaaggc

SEQ ID NO: 4266395 - DNA, 25 bp, Homo sapien
tgagagtcaggttagaaaccaaacc

SEQ ID NO: 4266396 - DNA, 25 bp, Homo sapien
tccagtggaaagatcgtccagtccg

SEQ ID NO: 4266397 - DNA, 25 bp, Homo sapien
ccctgttatgttcagagtgatcaca

SEQ ID NO: 4266398 - DNA, 25 bp, Homo sapien
tcccatgttctctaccagaaggtcc

SEQ ID NO: 4266399 - DNA, 25 bp, Homo sapien
gatcacattgtttcgctcaaggact

SEQ ID NO: 4266400 - DNA, 25 bp, Homo sapien
tatatgcaccatagttcacacgtcc

SEQ ID NO: 4266401 - DNA, 25 bp, Homo sapien
gaaacagtcaccatcaatagagcag

SEQ ID NO: 4266402 - DNA, 25 bp, Homo sapien
taagacaacacccaagttagaagcg

SEQ ID NO: 4266403 - DNA, 25 bp, Homo sapien
catgtaggataaaggcacgaagttc

SEQ ID NO: 4266404 - DNA, 25 bp, Homo sapien
tagttgtcacgagcagtccttcaga

SEQ ID NO: 4266405 - DNA, 25 bp, Homo sapien
acagcaacatatgctcgatcgtgga

SEQ ID NO: 4266406 - DNA, 25 bp, Homo sapien
ctgcaatcttgaggaagtgttgtcc

SEQ ID NO: 4266407 - DNA, 25 bp, Homo sapien
tccggtacagcacaaacccataatg

SEQ ID NO: 4266408 - DNA, 25 bp, Homo sapien
tatgctcgatcgtggactccattga

SEQ ID NO: 4266409 - DNA, 25 bp, Homo sapien
ccaagagatgaagttctgctcagca

SEQ ID NO: 4266410 - DNA, 25 bp, Homo sapien
aaacaaacagcaaagccaagagatg

SEQ ID NO: 4266411 - DNA, 25 bp, Homo sapien
gaacagtgtcttatcaagcatccct

SEQ ID NO: 4266412 - DNA, 25 bp, Homo sapien
taatagtaaactgcaaggaaccatg

SEQ ID NO: 4266413 - DNA, 25 bp, Homo sapien
ctgtttcacctggataaatgtcaag

SEQ ID NO: 4266414 - DNA, 25 bp, Homo sapien
tggtaataagctagcttggttttag

SEQ ID NO: 4266415 - DNA, 25 bp, Homo sapien
gcttttggtaataagctagcttggt

SEQ ID NO: 4266416 - DNA, 25 bp, Homo sapien
tccttcacggtaaacagaatgtgct

SEQ ID NO: 4266417 - DNA, 25 bp, Homo sapien
tttccttcacggtaaacagaatgtg

SEQ ID NO: 4266418 - DNA, 25 bp, Homo sapien
ttgcataaaaatagatttgtcatgg

SEQ ID NO: 4266419 - DNA, 25 bp, Homo sapien
tgttgcataaaaatagatttgtcat

SEQ ID NO: 4266420 - DNA, 25 bp, Homo sapien
gcataaaaatagatttgtcatggct

SEQ ID NO: 4266421 - DNA, 25 bp, Homo sapien
ctgttgcataaaaatagatttgtca

SEQ ID NO: 4266422 - DNA, 25 bp, Homo sapien
tggagggataggaccttctggtact

SEQ ID NO: 4266423 - DNA, 25 bp, Homo sapien
ttccatatgcaaactttggtgtaga

SEQ ID NO: 4266424 - DNA, 25 bp, Homo sapien
tatgcaaactttggtgtagatggag

SEQ ID NO: 4266425 - DNA, 25 bp, Homo sapien
tgtagatggagggataggaccttct

SEQ ID NO: 4266426 - DNA, 25 bp, Homo sapien
catcgcctctttgtagcccggagca

SEQ ID NO: 4266427 - DNA, 25 bp, Homo sapien
cgcctctttgtagcccggagcagct

SEQ ID NO: 4266428 - DNA, 25 bp, Homo sapien
cagcatcgcctctttgtagcccgga

SEQ ID NO: 4266429 - DNA, 25 bp, Homo sapien
gcagggccagtagtggcggcggaga

SEQ ID NO: 4266430 - DNA, 25 bp, Homo sapien
atgtcgcctcttttttctcgttttg

SEQ ID NO: 4266431 - DNA, 25 bp, Homo sapien
tttttttgagatggagtctcaaact

SEQ ID NO: 4266432 - DNA, 25 bp, Homo sapien
cctatgtcgcctcttttttctcgtt

SEQ ID NO: 4266433 - DNA, 25 bp, Homo sapien
tttgagatggagtctcaaacttcat

SEQ ID NO: 4266434 - DNA, 25 bp, Homo sapien
tttccaaaacatcagcggaactctt

SEQ ID NO: 4266435 - DNA, 25 bp, Homo sapien
actccaattatcaaggtcctcacta

SEQ ID NO: 4266436 - DNA, 25 bp, Homo sapien
aaggtcctcactaccacttgattaa

SEQ ID NO: 4266437 - DNA, 25 bp, Homo sapien
tccaaaacatcagcggaactcttac

SEQ ID NO: 4266438 - DNA, 25 bp, Homo sapien
gcaatatcctggcattgtgctccta

SEQ ID NO: 4266439 - DNA, 25 bp, Homo sapien
ggcattgtgctcctatgattggaaa

SEQ ID NO: 4266440 - DNA, 25 bp, Homo sapien
cccacatatggcaatatcctggcat

SEQ ID NO: 4266441 - DNA, 25 bp, Homo sapien
tgctcctatgattggaaagtcatta

SEQ ID NO: 4266442 - DNA, 25 bp, Homo sapien
gcagaaacccaattacatcaagaag

SEQ ID NO: 4266443 - DNA, 25 bp, Homo sapien
ctggaagcctcatagaccagctgtt

SEQ ID NO: 4266444 - DNA, 25 bp, Homo sapien
tgttcaggcagaaacccaattacat

SEQ ID NO: 4266445 - DNA, 25 bp, Homo sapien
cctcatagaccagctgttcaggcag

SEQ ID NO: 4266446 - DNA, 25 bp, Homo sapien
aaggatggccagtggaaggagagca

SEQ ID NO: 4266447 - DNA, 25 bp, Homo sapien
tgggccccctccatcagcctgccca

SEQ ID NO: 4266448 - DNA, 25 bp, Homo sapien
ttcaaggatggccagtggaaggaga

SEQ ID NO: 4266449 - DNA, 25 bp, Homo sapien
ctcttcaaggatggccagtggaagg

SEQ ID NO: 4266450 - DNA, 25 bp, Homo sapien
tgctcctgggatggtcgtgtgttca

SEQ ID NO: 4266451 - DNA, 25 bp, Homo sapien
atgcgggcaggtccatcacagccaa

SEQ ID NO: 4266452 - DNA, 25 bp, Homo sapien
caatgatgtcatgtagcatgcgggc

SEQ ID NO: 4266453 - DNA, 25 bp, Homo sapien
gatgccttgggaaatatatggtctc

SEQ ID NO: 4266454 - DNA, 25 bp, Homo sapien
caaaagggtacaacgctagcaggac

SEQ ID NO: 4266455 - DNA, 25 bp, Homo sapien
taggtgcctcaaaagggtacaacgc

SEQ ID NO: 4266456 - DNA, 25 bp, Homo sapien
tacaacgctagcaggactaagcagt

SEQ ID NO: 4266457 - DNA, 25 bp, Homo sapien
gactaagcagttcagatgcagtcca

SEQ ID NO: 4266458 - DNA, 25 bp, Homo sapien
tcctatgtacatcagctatttaagt

SEQ ID NO: 4266459 - DNA, 25 bp, Homo sapien
ttttcctatgtacatcagctattta

SEQ ID NO: 4266460 - DNA, 25 bp, Homo sapien
tgtacatcagctatttaagtagaca

SEQ ID NO: 4266461 - DNA, 25 bp, Homo sapien
tcagctatttaagtagacacacatt

SEQ ID NO: 4266462 - DNA, 25 bp, Homo sapien
acttattagacatatatgtgtcagg

SEQ ID NO: 4266463 - DNA, 25 bp, Homo sapien
gtcctggatggcttacatacgttct

SEQ ID NO: 4266464 - DNA, 25 bp, Homo sapien
gacatatatgtgtcaggaactgtcc

SEQ ID NO: 4266465 - DNA, 25 bp, Homo sapien
caagctttacagcacaaccagatgc

SEQ ID NO: 4266466 - DNA, 25 bp, Homo sapien
tcacatagtctgtatattgggccac

SEQ ID NO: 4266467 - DNA, 25 bp, Homo sapien
atatatccatgctgccttaataggg

SEQ ID NO: 4266468 - DNA, 25 bp, Homo sapien
tctctcttgcaaataaggacggagt

SEQ ID NO: 4266469 - DNA, 25 bp, Homo sapien
caagtctgtgaggtaagtacggcta

SEQ ID NO: 4266470 - DNA, 25 bp, Homo sapien
ctgaacttttggaaagataatctgg

SEQ ID NO: 4266471 - DNA, 25 bp, Homo sapien
tgaacttttggaaagataatctggc

SEQ ID NO: 4266472 - DNA, 25 bp, Homo sapien
ggctccaggcaggaagttgtccaca

SEQ ID NO: 4266473 - DNA, 25 bp, Homo sapien
aaccacgtgggtacaagatgcaaac

SEQ ID NO: 4266474 - DNA, 25 bp, Homo sapien
catagactcactcttaaccacgtgg

SEQ ID NO: 4266475 - DNA, 25 bp, Homo sapien
aaaagaggctctgtccaagatcagc

SEQ ID NO: 4266476 - DNA, 25 bp, Homo sapien
gatgtttcgcagagcaaaatacttc

SEQ ID NO: 4266477 - DNA, 25 bp, Homo sapien
ctgtgctgcatagggtgagttggcc

SEQ ID NO: 4266478 - DNA, 25 bp, Homo sapien
ctcagtggggcatcatagtcgtagc

SEQ ID NO: 4266479 - DNA, 25 bp, Homo sapien
catcatagtcgtagctggtgggctg

SEQ ID NO: 4266480 - DNA, 25 bp, Homo sapien
gccctcgtctgcttctaatgtggta

SEQ ID NO: 4266481 - DNA, 25 bp, Homo sapien
ctaatgtggtagtcacccatgctgt

SEQ ID NO: 4266482 - DNA, 25 bp, Homo sapien
tctgcttctaatgtggtagtcaccc

SEQ ID NO: 4266483 - DNA, 25 bp, Homo sapien
tctttgtggccctcgtctgcttcta

SEQ ID NO: 4266484 - DNA, 25 bp, Homo sapien
ctgcttgcacctcaggggcagagac

SEQ ID NO: 4266485 - DNA, 25 bp, Homo sapien
gctacactgcttgcacctcaggggc

SEQ ID NO: 4266486 - DNA, 25 bp, Homo sapien
cagagactgtgcctcacttgccctt

SEQ ID NO: 4266487 - DNA, 25 bp, Homo sapien
ggcagagactgtgcctcacttgccc

SEQ ID NO: 4266488 - DNA, 25 bp, Homo sapien
gccaggttgagttgggaaagtgtga

SEQ ID NO: 4266489 - DNA, 25 bp, Homo sapien
ccaggttgagttgggaaagtgtgac

SEQ ID NO: 4266490 - DNA, 25 bp, Homo sapien
aacagctgctaagtacagactggcc

SEQ ID NO: 4266491 - DNA, 25 bp, Homo sapien
agctgctaagtacagactggccttc

SEQ ID NO: 4266492 - DNA, 25 bp, Homo sapien
caggcaggtgcatgttcctgtgggt

SEQ ID NO: 4266493 - DNA, 25 bp, Homo sapien
tgctctcctctaggaagctggcctg

SEQ ID NO: 4266494 - DNA, 25 bp, Homo sapien
attggtcccacctataaacatgtac

SEQ ID NO: 4266495 - DNA, 25 bp, Homo sapien
aaaattggtcccacctataaacatg

SEQ ID NO: 4266496 - DNA, 25 bp, Homo sapien
aattggtcccacctataaacatgta

SEQ ID NO: 4266497 - DNA, 25 bp, Homo sapien
gcaaaattggtcccacctataaaca

SEQ ID NO: 4266498 - DNA, 25 bp, Homo sapien
gccccacgggcaagtatatcataga

SEQ ID NO: 4266499 - DNA, 25 bp, Homo sapien
cactgcttcggtcttgattgtggag

SEQ ID NO: 4266500 - DNA, 25 bp, Homo sapien
tagccagccagtatagaattcagaa

SEQ ID NO: 4266501 - DNA, 25 bp, Homo sapien
cccagtgatctagccagccagtata

SEQ ID NO: 4266502 - DNA, 25 bp, Homo sapien
cttgtcccagtattctgcaaagcag

SEQ ID NO: 4266503 - DNA, 25 bp, Homo sapien
acgaggaaggcttgtcccagtattc

SEQ ID NO: 4266504 - DNA, 25 bp, Homo sapien
aaggcttgtcccagtattctgcaaa

SEQ ID NO: 4266505 - DNA, 25 bp, Homo sapien
ttataacgaggaaggcttgtcccag

SEQ ID NO: 4266506 - DNA, 25 bp, Homo sapien
cctctggcttaggaaagcatctgtg

SEQ ID NO: 4266507 - DNA, 25 bp, Homo sapien
gcttaggaaagcatctgtgatgttg

SEQ ID NO: 4266508 - DNA, 25 bp, Homo sapien
ttcctctggcttaggaaagcatctg

SEQ ID NO: 4266509 - DNA, 25 bp, Homo sapien
tctggcttaggaaagcatctgtgat

SEQ ID NO: 4266510 - DNA, 25 bp, Homo sapien
tctgtaaggccagctttcaggacag

SEQ ID NO: 4266511 - DNA, 25 bp, Homo sapien
agccaagaccctctgataaccactt

SEQ ID NO: 4266512 - DNA, 25 bp, Homo sapien
gataaccacttgctctgagatgggc

SEQ ID NO: 4266513 - DNA, 25 bp, Homo sapien
cacagcaggtatcccagggtggacg

SEQ ID NO: 4266514 - DNA, 25 bp, Homo sapien
caaagtccaccgtggtgtagaggcc

SEQ ID NO: 4266515 - DNA, 25 bp, Homo sapien
agatggtggcgaaagcgcttctgca

SEQ ID NO: 4266516 - DNA, 25 bp, Homo sapien
cgcaggtagtcaaaatcacaggcaa

SEQ ID NO: 4266517 - DNA, 25 bp, Homo sapien
cacaggcaaagtagctgccatattc

SEQ ID NO: 4266518 - DNA, 25 bp, Homo sapien
ctgcactgttataactggccctcca

SEQ ID NO: 4266519 - DNA, 25 bp, Homo sapien
gggcagaaggactcccaaccacttg

SEQ ID NO: 4266520 - DNA, 25 bp, Homo sapien
tgcactgttataactggccctccat

SEQ ID NO: 4266521 - DNA, 25 bp, Homo sapien
gcggagaagaatagactctttctct

SEQ ID NO: 4266522 - DNA, 25 bp, Homo sapien
ggagcggagaagaatagactctttc

SEQ ID NO: 4266523 - DNA, 25 bp, Homo sapien
ctgggtcggaggagcggagaagaat

SEQ ID NO: 4266524 - DNA, 25 bp, Homo sapien
tcggaggagcggagaagaatagact

SEQ ID NO: 4266525 - DNA, 25 bp, Homo sapien
accttgtcaaggtaaaagacacctg

SEQ ID NO: 4266526 - DNA, 25 bp, Homo sapien
gatagagaagacaccattaactgct

SEQ ID NO: 4266527 - DNA, 25 bp, Homo sapien
tgaggtatgtgagtgaccaccaaga

SEQ ID NO: 4266528 - DNA, 25 bp, Homo sapien
acctgtgctgggtacagtcccaggc

SEQ ID NO: 4266529 - DNA, 25 bp, Homo sapien
catgagccagccgaagaaaatattc

SEQ ID NO: 4266530 - DNA, 25 bp, Homo sapien
tcatggtcctcagaaaactggtact

SEQ ID NO: 4266531 - DNA, 25 bp, Homo sapien
ggccagggctcatgaaagttccagg

SEQ ID NO: 4266532 - DNA, 25 bp, Homo sapien
ccgggcctcaggataaccagcagtc

SEQ ID NO: 4266533 - DNA, 25 bp, Homo sapien
ggactattgctaacacatggataag

SEQ ID NO: 4266534 - DNA, 25 bp, Homo sapien
gaaagggcctcattaggactattgc

SEQ ID NO: 4266535 - DNA, 25 bp, Homo sapien
gatacttggcagagtcaagaagaaa

SEQ ID NO: 4266536 - DNA, 25 bp, Homo sapien
taagagggagaaggcgctttgaaag

SEQ ID NO: 4266537 - DNA, 25 bp, Homo sapien
tctttgaagaccctgggttgtgtca

SEQ ID NO: 4266538 - DNA, 25 bp, Homo sapien
acagcatgggatacaaagttaaata

SEQ ID NO: 4266539 - DNA, 25 bp, Homo sapien
gatcccatgatttcagggttccctg

SEQ ID NO: 4266540 - DNA, 25 bp, Homo sapien
ggagccatccattaccatcacaaag

SEQ ID NO: 4266541 - DNA, 25 bp, Homo sapien
ggagtcccggctatagtcaatttca

SEQ ID NO: 4266542 - DNA, 25 bp, Homo sapien
cacacgggagtagtgaatgcttcct

SEQ ID NO: 4266543 - DNA, 25 bp, Homo sapien
aatggctggccatccttgaggaagg

SEQ ID NO: 4266544 - DNA, 25 bp, Homo sapien
gtctggatggcgttcagcccagcca

SEQ ID NO: 4266545 - DNA, 25 bp, Homo sapien
cccatacatggtgggacactgtctc

SEQ ID NO: 4266546 - DNA, 25 bp, Homo sapien
cttacaccaggtgtctcaatggatg

SEQ ID NO: 4266547 - DNA, 25 bp, Homo sapien
tcctaagttcaaaggtggcccatga

SEQ ID NO: 4266548 - DNA, 25 bp, Homo sapien
actactggcagaattcggaaaaggg

SEQ ID NO: 4266549 - DNA, 25 bp, Homo sapien
gtgctgagtaatcacagacaagaac

SEQ ID NO: 4266550 - DNA, 25 bp, Homo sapien
tgagtaatcacagacaagaaccaca

SEQ ID NO: 4266551 - DNA, 25 bp, Homo sapien
acaacccatatggagcttccatcta

SEQ ID NO: 4266552 - DNA, 25 bp, Homo sapien
aacccatatggagcttccatctagc

SEQ ID NO: 4266553 - DNA, 25 bp, Homo sapien
tcccactcctgttgctgcttgcgtg

SEQ ID NO: 4266554 - DNA, 25 bp, Homo sapien
ttctcccactcctgttgctgcttgc

SEQ ID NO: 4266555 - DNA, 25 bp, Homo sapien
ccactcctgttgctgcttgcgtgct

SEQ ID NO: 4266556 - DNA, 25 bp, Homo sapien
ctcctgttgctgcttgcgtgctcat

SEQ ID NO: 4266557 - DNA, 25 bp, Homo sapien
gcagctgagacttaggcgcttgccg

SEQ ID NO: 4266558 - DNA, 25 bp, Homo sapien
cttgccgtggcagatgaaaagccca

SEQ ID NO: 4266559 - DNA, 25 bp, Homo sapien
agacttaggcgcttgccgtggcaga

SEQ ID NO: 4266560 - DNA, 25 bp, Homo sapien
tgccgtggcagatgaaaagcccaag

SEQ ID NO: 4266561 - DNA, 25 bp, Homo sapien
ctaatgaaagcctgttgtgaacgat

SEQ ID NO: 4266562 - DNA, 25 bp, Homo sapien
aatttgacaggcaaccaatcaatga

SEQ ID NO: 4266563 - DNA, 25 bp, Homo sapien
gatcagattccaatttgacaggcaa

SEQ ID NO: 4266564 - DNA, 25 bp, Homo sapien
aacgatagggatggtcaatgagaca

SEQ ID NO: 4266565 - DNA, 25 bp, Homo sapien
tttccccaacacttagtgaaatgga

SEQ ID NO: 4266566 - DNA, 25 bp, Homo sapien
ggatttaagctataatcatcaatag

SEQ ID NO: 4266567 - DNA, 25 bp, Homo sapien
gcatctgaaaacaccttttccccaa

SEQ ID NO: 4266568 - DNA, 25 bp, Homo sapien
gaaattgtgtgaaggattgggcata

SEQ ID NO: 4266569 - DNA, 25 bp, Homo sapien
ggtaacgcctcaaagacaaatacca

SEQ ID NO: 4266570 - DNA, 25 bp, Homo sapien
tgctaagtggggtggtaacgcctca

SEQ ID NO: 4266571 - DNA, 25 bp, Homo sapien
aagacaaataccaaggccctcaact

SEQ ID NO: 4266572 - DNA, 25 bp, Homo sapien
gtggggtggtaacgcctcaaagaca

SEQ ID NO: 4266573 - DNA, 25 bp, Homo sapien
ccccgttaacgcatccaatactgga

SEQ ID NO: 4266574 - DNA, 25 bp, Homo sapien
taactctggtaagcacctactcagc

SEQ ID NO: 4266575 - DNA, 25 bp, Homo sapien
cagtatttagtgcatgaggtcacag

SEQ ID NO: 4266576 - DNA, 25 bp, Homo sapien
tgtgcacattccttgactacagaaa

SEQ ID NO: 4266577 - DNA, 25 bp, Homo sapien
ccaggatgccagagacccaatcctc

SEQ ID NO: 4266578 - DNA, 25 bp, Homo sapien
agagacccaatcctcttagcctgca

SEQ ID NO: 4266579 - DNA, 25 bp, Homo sapien
ggatgccagagacccaatcctctta

SEQ ID NO: 4266580 - DNA, 25 bp, Homo sapien
atgccagagacccaatcctcttagc

SEQ ID NO: 4266581 - DNA, 25 bp, Homo sapien
ttcaggtgactatgggtcaaaccct

SEQ ID NO: 4266582 - DNA, 25 bp, Homo sapien
tgattacatcagagctaagagcctt

SEQ ID NO: 4266583 - DNA, 25 bp, Homo sapien
ggaagcaccattccatcagataggc

SEQ ID NO: 4266584 - DNA, 25 bp, Homo sapien
ggtatttgcataacacgggcttctg

SEQ ID NO: 4266585 - DNA, 25 bp, Homo sapien
cattgaccatatttggcctaaggat

SEQ ID NO: 4266586 - DNA, 25 bp, Homo sapien
aatacagcttaaactgcattcaggg

SEQ ID NO: 4266587 - DNA, 25 bp, Homo sapien
tagactgattcccaatcctcacgga

SEQ ID NO: 4266588 - DNA, 25 bp, Homo sapien
tcctcacggactctggacatacaca

SEQ ID NO: 4266589 - DNA, 25 bp, Homo sapien
ggtcaaaaatctggctactagcccc

SEQ ID NO: 4266590 - DNA, 25 bp, Homo sapien
ggtctcgtcatgcttgttaaagctg

SEQ ID NO: 4266591 - DNA, 25 bp, Homo sapien
tatgataatgacactatagctatgc

SEQ ID NO: 4266592 - DNA, 25 bp, Homo sapien
gacagatacagctacttaatactca

SEQ ID NO: 4266593 - DNA, 25 bp, Homo sapien
gattcacaaaatgcggtcgggacac

SEQ ID NO: 4266594 - DNA, 25 bp, Homo sapien
taatttcatcaagcccaggtcactg

SEQ ID NO: 4266595 - DNA, 25 bp, Homo sapien
ctgtcaataccgtggctgcctggga

SEQ ID NO: 4266596 - DNA, 25 bp, Homo sapien
gcaccgcttttactgggaggtacaa

SEQ ID NO: 4266597 - DNA, 25 bp, Homo sapien
gtatgcctttctagcaaccccgagg

SEQ ID NO: 4266598 - DNA, 25 bp, Homo sapien
taaatagcatccctcaaggcctgga

SEQ ID NO: 4266599 - DNA, 25 bp, Homo sapien
gcaggagaaggtccccattccacat

SEQ ID NO: 4266600 - DNA, 25 bp, Homo sapien
ggaaatagttaaaccagcctgaaca

SEQ ID NO: 4266601 - DNA, 25 bp, Homo sapien
tacccagcctcatgggtatcccgta

SEQ ID NO: 4266602 - DNA, 25 bp, Homo sapien
catacacgaatgtagcctgggccac

SEQ ID NO: 4266603 - DNA, 25 bp, Homo sapien
caggatgagctctgtgatctcggcc

SEQ ID NO: 4266604 - DNA, 25 bp, Homo sapien
ggtatcccgtagtaggctgtgcctg

SEQ ID NO: 4266605 - DNA, 25 bp, Homo sapien
gatctgcccagcatgtgtgtgccca

SEQ ID NO: 4266606 - DNA, 25 bp, Homo sapien
catggccagagtagtgcaggatgtc

SEQ ID NO: 4266607 - DNA, 25 bp, Homo sapien
caatcaccgtgatgtctggttccag

SEQ ID NO: 4266608 - DNA, 25 bp, Homo sapien
taatatctggccgagcctggagagc

SEQ ID NO: 4266609 - DNA, 25 bp, Homo sapien
catgatgatgtaagcacccaggcag

SEQ ID NO: 4266610 - DNA, 25 bp, Homo sapien
tgcgccaaatgtagagggagccaat

SEQ ID NO: 4266611 - DNA, 25 bp, Homo sapien
caagagcgagttgacaaacagggca

SEQ ID NO: 4266612 - DNA, 25 bp, Homo sapien
tctctgccagatacgagcgggaggc

SEQ ID NO: 4266613 - DNA, 25 bp, Homo sapien
ctcctagtaggctcccccaccagtt

SEQ ID NO: 4266614 - DNA, 25 bp, Homo sapien
ttagaaaggacagtggccaaggaga

SEQ ID NO: 4266615 - DNA, 25 bp, Homo sapien
tctgctcctagtaggctcccccacc

SEQ ID NO: 4266616 - DNA, 25 bp, Homo sapien
tctgtgctggtggactctggaaatg

SEQ ID NO: 4266617 - DNA, 25 bp, Homo sapien
ggaagtggatccaagcgcaaagggc

SEQ ID NO: 4266618 - DNA, 25 bp, Homo sapien
caagcgaccgagctgcctggaagga

SEQ ID NO: 4266619 - DNA, 25 bp, Homo sapien
gtctcaacacctcgttacagatggg

SEQ ID NO: 4266620 - DNA, 25 bp, Homo sapien
gccggagcggaacgcacaagcgacc

SEQ ID NO: 4266621 - DNA, 25 bp, Homo sapien
gaggatgcgaaccaggaaccccggc

SEQ ID NO: 4266622 - DNA, 25 bp, Homo sapien
gcaacagagggaggatgcgaaccag

SEQ ID NO: 4266623 - DNA, 25 bp, Homo sapien
cgcaagccgcgcgtagggcccagaa

SEQ ID NO: 4266624 - DNA, 25 bp, Homo sapien
aagccgcgcgtagggcccagaagca

SEQ ID NO: 4266625 - DNA, 25 bp, Homo sapien
gcttcgcgtcacttgactaaggacc

SEQ ID NO: 4266626 - DNA, 25 bp, Homo sapien
gcgtcacttgactaaggacccacgg

SEQ ID NO: 4266627 - DNA, 25 bp, Homo sapien
aggccggccgcttcgcgtcacttga

SEQ ID NO: 4266628 - DNA, 25 bp, Homo sapien
acttgactaaggacccacggcctgg

SEQ ID NO: 4266629 - DNA, 25 bp, Homo sapien
gaatgaaaatcctgctcacgcctgt

SEQ ID NO: 4266630 - DNA, 25 bp, Homo sapien
tggaacttgttagaatgaaaatcct

SEQ ID NO: 4266631 - DNA, 25 bp, Homo sapien
gaacttgttagaatgaaaatcctgc

SEQ ID NO: 4266632 - DNA, 25 bp, Homo sapien
cttgttagaatgaaaatcctgctca

SEQ ID NO: 4266633 - DNA, 25 bp, Homo sapien
taatgaggctaaccagccactcaag

SEQ ID NO: 4266634 - DNA, 25 bp, Homo sapien
ctacacagtcaaggaagtatgtctg

SEQ ID NO: 4266635 - DNA, 25 bp, Homo sapien
caaattctgttgaattggctaggca

SEQ ID NO: 4266636 - DNA, 25 bp, Homo sapien
ccttagacaaagctctaatgaggct

SEQ ID NO: 4266637 - DNA, 25 bp, Homo sapien
aggagttggtaaggcaagggcaaga

SEQ ID NO: 4266638 - DNA, 25 bp, Homo sapien
caaaggctctttggcaggagttggt

SEQ ID NO: 4266639 - DNA, 25 bp, Homo sapien
aataacagccctgggcaaaggctct

SEQ ID NO: 4266640 - DNA, 25 bp, Homo sapien
atctgaaataacagccctgggcaaa

SEQ ID NO: 4266641 - DNA, 25 bp, Homo sapien
gcttgctgcgcgacagcgaggcctt

SEQ ID NO: 4266642 - DNA, 25 bp, Homo sapien
cctggagatcagcctgcggctgcac

SEQ ID NO: 4266643 - DNA, 25 bp, Homo sapien
gaggtgctggcggacttccagcgcc

SEQ ID NO: 4266644 - DNA, 25 bp, Homo sapien
gcactgcctcaagcgctgcaagcag

SEQ ID NO: 4266645 - DNA, 25 bp, Homo sapien
cttagttataagtctccgagttgga

SEQ ID NO: 4266646 - DNA, 25 bp, Homo sapien
catctccaaaattacaacggttggc

SEQ ID NO: 4266647 - DNA, 25 bp, Homo sapien
gaagacataggctaaatttctccag

SEQ ID NO: 4266648 - DNA, 25 bp, Homo sapien
aacggttggccgatcccatttgagg

SEQ ID NO: 4266649 - DNA, 25 bp, Homo sapien
tgaaaagagccaataggatttgctg

SEQ ID NO: 4266650 - DNA, 25 bp, Homo sapien
taccagttactgaaatagggaagga

SEQ ID NO: 4266651 - DNA, 25 bp, Homo sapien
tatggaatttggtgcaaagcaggct

SEQ ID NO: 4266652 - DNA, 25 bp, Homo sapien
ggaagctactgcaaggttccaggct

SEQ ID NO: 4266653 - DNA, 25 bp, Homo sapien
aagggatctggcagggcaccacagc

SEQ ID NO: 4266654 - DNA, 25 bp, Homo sapien
tctgggaaatgggaaatcagccaaa

SEQ ID NO: 4266655 - DNA, 25 bp, Homo sapien
gacttcagttgagggcaagtctctg

SEQ ID NO: 4266656 - DNA, 25 bp, Homo sapien
ggccactgagattgtctctgagtat

SEQ ID NO: 4266657 - DNA, 25 bp, Homo sapien
tccaaataagccacttgtgtagttg

SEQ ID NO: 4266658 - DNA, 25 bp, Homo sapien
aggcacagcgtttgggaaacaagac

SEQ ID NO: 4266659 - DNA, 25 bp, Homo sapien
cacttgtgtagttgggcccctccag

SEQ ID NO: 4266660 - DNA, 25 bp, Homo sapien
aaaggcacagcgtttgggaaacaag

SEQ ID NO: 4266661 - DNA, 25 bp, Homo sapien
tgtttggcccgaggagtcagtgtta

SEQ ID NO: 4266662 - DNA, 25 bp, Homo sapien
tgaagttgcccacgtccacaaaatc

SEQ ID NO: 4266663 - DNA, 25 bp, Homo sapien
tattactggtggatgcaccgtgtcc

SEQ ID NO: 4266664 - DNA, 25 bp, Homo sapien
caatcccagcgatgcgtcagatctt

SEQ ID NO: 4266665 - DNA, 25 bp, Homo sapien
ttcacccacgggatgccgggttctc

SEQ ID NO: 4266666 - DNA, 25 bp, Homo sapien
cttcacccacgggatgccgggttct

SEQ ID NO: 4266667 - DNA, 25 bp, Homo sapien
gggagatggccttcacccacgggat

SEQ ID NO: 4266668 - DNA, 25 bp, Homo sapien
atggccttcacccacgggatgccgg

SEQ ID NO: 4266669 - DNA, 25 bp, Homo sapien
tagtgggggacccagcgagtggacg

SEQ ID NO: 4266670 - DNA, 25 bp, Homo sapien
cgagtggacgccctgctccgggatt

SEQ ID NO: 4266671 - DNA, 25 bp, Homo sapien
ggacgccctgctccgggattcctga

SEQ ID NO: 4266672 - DNA, 25 bp, Homo sapien
ggacccagcgagtggacgccctgct

SEQ ID NO: 4266673 - DNA, 25 bp, Homo sapien
gcaggctgcactcaatgacctcaac

SEQ ID NO: 4266674 - DNA, 25 bp, Homo sapien
tgaaaccctggtgtgcaggctgcac

SEQ ID NO: 4266675 - DNA, 25 bp, Homo sapien
gcactcaatgacctcaacccaacac

SEQ ID NO: 4266676 - DNA, 25 bp, Homo sapien
ggtgtgcaggctgcactcaatgacc

SEQ ID NO: 4266677 - DNA, 25 bp, Homo sapien
cccattggttcagcctcaagtctgg

SEQ ID NO: 4266678 - DNA, 25 bp, Homo sapien
gattcctggatggagaccccattgg

SEQ ID NO: 4266679 - DNA, 25 bp, Homo sapien
tgtaagctttgtgggagcttccagg

SEQ ID NO: 4266680 - DNA, 25 bp, Homo sapien
tccaggcctgctctaagatgccttg

SEQ ID NO: 4266681 - DNA, 25 bp, Homo sapien
taaatgtgagccgtaaactgaagct

SEQ ID NO: 4266682 - DNA, 25 bp, Homo sapien
caggcctgaatgacctagtgtggag

SEQ ID NO: 4266683 - DNA, 25 bp, Homo sapien
taatagtgtcagaacatggaactgc

SEQ ID NO: 4266684 - DNA, 25 bp, Homo sapien
tatgcattggacttcctgtgcctgc

SEQ ID NO: 4266685 - DNA, 25 bp, Homo sapien
ccagggtgggactagagaatttgca

SEQ ID NO: 4266686 - DNA, 25 bp, Homo sapien
tagatgctacgaaatgggttaccca

SEQ ID NO: 4266687 - DNA, 25 bp, Homo sapien
tgataacctggtgttcggccctctg

SEQ ID NO: 4266688 - DNA, 25 bp, Homo sapien
tacaggagactattgcaggtggcat

SEQ ID NO: 4266689 - DNA, 25 bp, Homo sapien
cacacacgactccaaggtgggatga

SEQ ID NO: 4266690 - DNA, 25 bp, Homo sapien
gacggtgacaatggtggcgatcaca

SEQ ID NO: 4266691 - DNA, 25 bp, Homo sapien
tccaaagaagtcttcagacagcagg

SEQ ID NO: 4266692 - DNA, 25 bp, Homo sapien
tatgggaagctatcctggatctcag

SEQ ID NO: 4266693 - DNA, 25 bp, Homo sapien
cactgttaatatctccagggtggag

SEQ ID NO: 4266694 - DNA, 25 bp, Homo sapien
tcagtctcggaagcattcacgggtc

SEQ ID NO: 4266695 - DNA, 25 bp, Homo sapien
gaactgaactatgggtcatgccctc

SEQ ID NO: 4266696 - DNA, 25 bp, Homo sapien
ttcacgggtctgagcgccaaagctt

SEQ ID NO: 4266697 - DNA, 25 bp, Homo sapien
cacagaaatggagaccagacggtcc

SEQ ID NO: 4266698 - DNA, 25 bp, Homo sapien
tgcttctggagcagccgtgatcctg

SEQ ID NO: 4266699 - DNA, 25 bp, Homo sapien
tgtcacagggtagccatctaaccag

SEQ ID NO: 4266700 - DNA, 25 bp, Homo sapien
ccgagggaccatcagtgttgccgta

SEQ ID NO: 4266701 - DNA, 25 bp, Homo sapien
ctctgcagataccaagactgatact

SEQ ID NO: 4266702 - DNA, 25 bp, Homo sapien
catttgcacagagctttgccaaagg

SEQ ID NO: 4266703 - DNA, 25 bp, Homo sapien
ttgccaaaggcagtcctaggtgatg

SEQ ID NO: 4266704 - DNA, 25 bp, Homo sapien
ggtggtgagtcgaagtgcttcctca

SEQ ID NO: 4266705 - DNA, 25 bp, Homo sapien
caattcagggtctagcatgaggtcc

SEQ ID NO: 4266706 - DNA, 25 bp, Homo sapien
tgtgagataagggaacaattcaggg

SEQ ID NO: 4266707 - DNA, 25 bp, Homo sapien
atggggctgccccaatcgcctgctg

SEQ ID NO: 4266708 - DNA, 25 bp, Homo sapien
tataggagtcacaagccaggtcagc

SEQ ID NO: 4266709 - DNA, 25 bp, Homo sapien
acatagcaaggtgaaggcggtctcc

SEQ ID NO: 4266710 - DNA, 25 bp, Homo sapien
gcggtctcccggtggcccatgatgt

SEQ ID NO: 4266711 - DNA, 25 bp, Homo sapien
tgttacatagcaaggtgaaggcggt

SEQ ID NO: 4266712 - DNA, 25 bp, Homo sapien
cccacagctgttacatagcaaggtg

SEQ ID NO: 4266713 - DNA, 25 bp, Homo sapien
gatggtgtgtgggaacgaaggcggg

SEQ ID NO: 4266714 - DNA, 25 bp, Homo sapien
gaacgaaggcgggtctccacacggc

SEQ ID NO: 4266715 - DNA, 25 bp, Homo sapien
tgcggccctgcaggatggtgtgtgg

SEQ ID NO: 4266716 - DNA, 25 bp, Homo sapien
gtgcggccctgcaggatggtgtgtg

SEQ ID NO: 4266717 - DNA, 25 bp, Homo sapien
gcccacagttagagctgcagcctca

SEQ ID NO: 4266718 - DNA, 25 bp, Homo sapien
agctattactattttccttctgagg

SEQ ID NO: 4266719 - DNA, 25 bp, Homo sapien
tgtttgcaccaggtttaactggatc

SEQ ID NO: 4266720 - DNA, 25 bp, Homo sapien
tggagatgtttgcaccaggtttaac

SEQ ID NO: 4266721 - DNA, 25 bp, Homo sapien
cagaggcttaagaataaagttgtcc

SEQ ID NO: 4266722 - DNA, 25 bp, Homo sapien
ttaagaataaagttgtccctgagtg

SEQ ID NO: 4266723 - DNA, 25 bp, Homo sapien
gtatatgtctgcaaggcagggcttt

SEQ ID NO: 4266724 - DNA, 25 bp, Homo sapien
acccagccctaggcacacatgtata

SEQ ID NO: 4266725 - DNA, 25 bp, Homo sapien
cacttggcattcgtggaagctggct

SEQ ID NO: 4266726 - DNA, 25 bp, Homo sapien
acacggacaggtccagagtgcagcc

SEQ ID NO: 4266727 - DNA, 25 bp, Homo sapien
ctgctggtgtatcaggactggtcta

SEQ ID NO: 4266728 - DNA, 25 bp, Homo sapien
gcagccgcagctcttctgagtagca

SEQ ID NO: 4266729 - DNA, 25 bp, Homo sapien
ctccagcacctttaagaagactctg

SEQ ID NO: 4266730 - DNA, 25 bp, Homo sapien
agcacctttaagaagactctggcac

SEQ ID NO: 4266731 - DNA, 25 bp, Homo sapien
acctttaagaagactctggcactga

SEQ ID NO: 4266732 - DNA, 25 bp, Homo sapien
cctccagcacctttaagaagactct

SEQ ID NO: 4266733 - DNA, 25 bp, Homo sapien
aattctcacatcgacagctctcatg

SEQ ID NO: 4266734 - DNA, 25 bp, Homo sapien
gttctccacttcctttgctacacac

SEQ ID NO: 4266735 - DNA, 25 bp, Homo sapien
ttcatccttaatacaaagggcactg

SEQ ID NO: 4266736 - DNA, 25 bp, Homo sapien
aagggcactgtatgtgccaccagga

SEQ ID NO: 4266737 - DNA, 25 bp, Homo sapien
tttctatggccactcgccagccaga

SEQ ID NO: 4266738 - DNA, 25 bp, Homo sapien
ccagacatcttaggatcatcatcta

SEQ ID NO: 4266739 - DNA, 25 bp, Homo sapien
cagcatggctatgttttctatggcc

SEQ ID NO: 4266740 - DNA, 25 bp, Homo sapien
tcatcatctaccaaagtagttcttg

SEQ ID NO: 4266741 - DNA, 25 bp, Homo sapien
ccaagagtaccatctgctagccagc

SEQ ID NO: 4266742 - DNA, 25 bp, Homo sapien
caagagtaccatctgctagccagcc

SEQ ID NO: 4266743 - DNA, 25 bp, Homo sapien
cccctgctcttgcaggaaagccgag

SEQ ID NO: 4266744 - DNA, 25 bp, Homo sapien
ctcttgcaggaaagccgagcagcct

SEQ ID NO: 4266745 - DNA, 25 bp, Homo sapien
agttgtaggccctgagagccattct

SEQ ID NO: 4266746 - DNA, 25 bp, Homo sapien
cagttgtaggccctgagagccattc

SEQ ID NO: 4266747 - DNA, 25 bp, Homo sapien
ggcgtctgtgccaacgggcaggcgg

SEQ ID NO: 4266748 - DNA, 25 bp, Homo sapien
gcgcggcagaccgagcaggagcagc

SEQ ID NO: 4266749 - DNA, 25 bp, Homo sapien
catccgcccgcaccgaaaggcgcgg

SEQ ID NO: 4266750 - DNA, 25 bp, Homo sapien
cgtctgtgccaacgggcaggcgggc

SEQ ID NO: 4266751 - DNA, 25 bp, Homo sapien
ggactcgggtgagggctctggctgc

SEQ ID NO: 4266752 - DNA, 25 bp, Homo sapien
acgaatcgcaggcttcgcgccgggc

SEQ ID NO: 4266753 - DNA, 25 bp, Homo sapien
agtgcgcgggccagcggactcgggt

SEQ ID NO: 4266754 - DNA, 25 bp, Homo sapien
tctgcgctcggctcacgaatcgcag

SEQ ID NO: 4266755 - DNA, 25 bp, Homo sapien
gcgctgggcacctggaaacctcggt

SEQ ID NO: 4266756 - DNA, 25 bp, Homo sapien
cttcgcgctgggcacctggaaacct

SEQ ID NO: 4266757 - DNA, 25 bp, Homo sapien
ggtcttctctgtggcgccgaggagg

SEQ ID NO: 4266758 - DNA, 25 bp, Homo sapien
ccgaggaggcggctgtaacccggct

SEQ ID NO: 4266759 - DNA, 25 bp, Homo sapien
gtagctagccggccgcaaggagccc

SEQ ID NO: 4266760 - DNA, 25 bp, Homo sapien
gggagagtagctagccggccgcaag

SEQ ID NO: 4266761 - DNA, 25 bp, Homo sapien
gaggcggggagagtagctagccggc

SEQ ID NO: 4266762 - DNA, 25 bp, Homo sapien
ctgcgggtacagcggggcggagggc

SEQ ID NO: 4266763 - DNA, 25 bp, Homo sapien
tattgagtgcccatacatgcctgtc

SEQ ID NO: 4266764 - DNA, 25 bp, Homo sapien
tataactgaggcatgcgcggtgctc

SEQ ID NO: 4266765 - DNA, 25 bp, Homo sapien
gaatgtggctgcaatcggtcctaaa

SEQ ID NO: 4266766 - DNA, 25 bp, Homo sapien
actctgtcggtctggtctgggaatc

SEQ ID NO: 4266767 - DNA, 25 bp, Homo sapien
agtgattggtgctaaaggggcagat

SEQ ID NO: 4266768 - DNA, 25 bp, Homo sapien
gattggtgctaaaggggcagatgat

SEQ ID NO: 4266769 - DNA, 25 bp, Homo sapien
aaagtgattggtgctaaaggggcag

SEQ ID NO: 4266770 - DNA, 25 bp, Homo sapien
tgattggtgctaaaggggcagatga

SEQ ID NO: 4266771 - DNA, 25 bp, Homo sapien
tgactttcaccttgtctgggttctc

SEQ ID NO: 4266772 - DNA, 25 bp, Homo sapien
tattgactttcaccttgtctgggtt

SEQ ID NO: 4266773 - DNA, 25 bp, Homo sapien
gatattgactttcaccttgtctggg

SEQ ID NO: 4266774 - DNA, 25 bp, Homo sapien
tgggatattgactttcaccttgtct

SEQ ID NO: 4266775 - DNA, 25 bp, Homo sapien
ttttgtttactcagagtgtttgcac

SEQ ID NO: 4266776 - DNA, 25 bp, Homo sapien
ggctgccaatagtagaaaattttct

SEQ ID NO: 4266777 - DNA, 25 bp, Homo sapien
gccattgtggccactagtagttctt

SEQ ID NO: 4266778 - DNA, 25 bp, Homo sapien
cccttggggtctgaagttgatttgc

SEQ ID NO: 4266779 - DNA, 25 bp, Homo sapien
ctttgaacttggcgggaaggcatcc

SEQ ID NO: 4266780 - DNA, 25 bp, Homo sapien
agaaagcaattcagacgccctggcc

SEQ ID NO: 4266781 - DNA, 25 bp, Homo sapien
agccctcagaaagcaattcagacgc

SEQ ID NO: 4266782 - DNA, 25 bp, Homo sapien
acgccctggccccaaaggaagacag

SEQ ID NO: 4266783 - DNA, 25 bp, Homo sapien
atatctcctgttggccctagttcga

SEQ ID NO: 4266784 - DNA, 25 bp, Homo sapien
tccagtgctccaatctcccaaatat

SEQ ID NO: 4266785 - DNA, 25 bp, Homo sapien
gcatgagtctcatttccaggtgagt

SEQ ID NO: 4266786 - DNA, 25 bp, Homo sapien
caggaccctgggaagtctccagtgc

SEQ ID NO: 4266787 - DNA, 25 bp, Homo sapien
gataatcactgaactatgtcttttc

SEQ ID NO: 4266788 - DNA, 25 bp, Homo sapien
tgtcttttcactctgggaaagcagg

SEQ ID NO: 4266789 - DNA, 25 bp, Homo sapien
ttctatcatgtctaacattaagatc

SEQ ID NO: 4266790 - DNA, 25 bp, Homo sapien
tgtctaacattaagatcttcacttc

SEQ ID NO: 4266791 - DNA, 25 bp, Homo sapien
agagggtacttgatatcatttcaac

SEQ ID NO: 4266792 - DNA, 25 bp, Homo sapien
tctatgaggattgtagatttccagg

SEQ ID NO: 4266793 - DNA, 25 bp, Homo sapien
gtgttcaaagtagcctttaatgatt

SEQ ID NO: 4266794 - DNA, 25 bp, Homo sapien
ggttaatttagctaatggcccatca

SEQ ID NO: 4266795 - DNA, 25 bp, Homo sapien
aggacagagctctcacggcctactc

SEQ ID NO: 4266796 - DNA, 25 bp, Homo sapien
atttgggtgagacaatagtggttgt

SEQ ID NO: 4266797 - DNA, 25 bp, Homo sapien
aagtctaagatcaatgggctggccg

SEQ ID NO: 4266798 - DNA, 25 bp, Homo sapien
gaattcactccctcaggctctctta

SEQ ID NO: 4266799 - DNA, 25 bp, Homo sapien
ctgtgggctcgctcgcggctcttcg

SEQ ID NO: 4266800 - DNA, 25 bp, Homo sapien
tcaggtgagggacatcaaggtgatc

SEQ ID NO: 4266801 - DNA, 25 bp, Homo sapien
tcttcggccatggtgagtctgggac

SEQ ID NO: 4266802 - DNA, 25 bp, Homo sapien
gactgagaggatggaccagatacga

SEQ ID NO: 4266803 - DNA, 25 bp, Homo sapien
gcggcgcaggggtcgtggagaggcc

SEQ ID NO: 4266804 - DNA, 25 bp, Homo sapien
aacgttgctcggtttcactcggcgg

SEQ ID NO: 4266805 - DNA, 25 bp, Homo sapien
caaccgaaggcataattctccagag

SEQ ID NO: 4266806 - DNA, 25 bp, Homo sapien
gggacacacccttggtatagaatac

SEQ ID NO: 4266807 - DNA, 25 bp, Homo sapien
tcagttaacttcagacggcgtgggc

SEQ ID NO: 4266808 - DNA, 25 bp, Homo sapien
cacagtaccatgtaatgcctttatt

SEQ ID NO: 4266809 - DNA, 25 bp, Homo sapien
aacatcacccataaatcacagtacc

SEQ ID NO: 4266810 - DNA, 25 bp, Homo sapien
caaatattgcagtaatttactgtaa

SEQ ID NO: 4266811 - DNA, 25 bp, Homo sapien
tgctggcaggagaaaaacatcaccc

SEQ ID NO: 4266812 - DNA, 25 bp, Homo sapien
cacttttattgctgttttctctacc

SEQ ID NO: 4266813 - DNA, 25 bp, Homo sapien
ctacacttttattgctgttttctct

SEQ ID NO: 4266814 - DNA, 25 bp, Homo sapien
tttattgctgttttctctacctcac

SEQ ID NO: 4266815 - DNA, 25 bp, Homo sapien
ttttattgctgttttctctacctca

SEQ ID NO: 4266816 - DNA, 25 bp, Homo sapien
cctgtgtagtgtctatatcagccac

SEQ ID NO: 4266817 - DNA, 25 bp, Homo sapien
tcactgctatcctgtgtagtgtcta

SEQ ID NO: 4266818 - DNA, 25 bp, Homo sapien
cactagggtggccatgagagagaca

SEQ ID NO: 4266819 - DNA, 25 bp, Homo sapien
ccagcactagggtggccatgagaga

SEQ ID NO: 4266820 - DNA, 25 bp, Homo sapien
cctggggaatcataagcagcttcag

SEQ ID NO: 4266821 - DNA, 25 bp, Homo sapien
tggggaatcataagcagcttcaggc

SEQ ID NO: 4266822 - DNA, 25 bp, Homo sapien
cataagcagcttcaggcaggcccat

SEQ ID NO: 4266823 - DNA, 25 bp, Homo sapien
gggaatcataagcagcttcaggcag

SEQ ID NO: 4266824 - DNA, 25 bp, Homo sapien
taagtagatgggaccacaggagcgt

SEQ ID NO: 4266825 - DNA, 25 bp, Homo sapien
cgacttcctgagctcaaaccatcca

SEQ ID NO: 4266826 - DNA, 25 bp, Homo sapien
cctcgacttcctgagctcaaaccat

SEQ ID NO: 4266827 - DNA, 25 bp, Homo sapien
agctcaaaccatccacctgccccag

SEQ ID NO: 4266828 - DNA, 25 bp, Homo sapien
gctagtggccctcacagagaaagga

SEQ ID NO: 4266829 - DNA, 25 bp, Homo sapien
taaatgaactagctaatgcacccgg

SEQ ID NO: 4266830 - DNA, 25 bp, Homo sapien
caggctgtctgtaatggctagtggc

SEQ ID NO: 4266831 - DNA, 25 bp, Homo sapien
tatgtgaccactacaccatgcaggg

SEQ ID NO: 4266832 - DNA, 25 bp, Homo sapien
aaaaacttatgtatccaggtggcgg

SEQ ID NO: 4266833 - DNA, 25 bp, Homo sapien
gatttccaaggtagagtattcacca

SEQ ID NO: 4266834 - DNA, 25 bp, Homo sapien
gtgcatctaccaccaaaagagggct

SEQ ID NO: 4266835 - DNA, 25 bp, Homo sapien
catctgagcctgttcagtgcatcta

SEQ ID NO: 4266836 - DNA, 25 bp, Homo sapien
cttcatagactgcagtagccattca

SEQ ID NO: 4266837 - DNA, 25 bp, Homo sapien
aacattatcatgaccccggaaaggc

SEQ ID NO: 4266838 - DNA, 25 bp, Homo sapien
tgaatacaccccgatcaaaggtcaa

SEQ ID NO: 4266839 - DNA, 25 bp, Homo sapien
ggctgttacaaccagtactgcaatg

SEQ ID NO: 4266840 - DNA, 25 bp, Homo sapien
tccttcaaatatcaactcagtggtc

SEQ ID NO: 4266841 - DNA, 25 bp, Homo sapien
tgggccttgcacacaacaaactctt

SEQ ID NO: 4266842 - DNA, 25 bp, Homo sapien
taaacagtacttgccgttctcctgc

SEQ ID NO: 4266843 - DNA, 25 bp, Homo sapien
ctgccagtgcagagaagtatacttt

SEQ ID NO: 4266844 - DNA, 25 bp, Homo sapien
atgtgtacatcctactattaaaaaa

SEQ ID NO: 4266845 - DNA, 25 bp, Homo sapien
tgtgtacatcctactattaaaaaaa

SEQ ID NO: 4266846 - DNA, 25 bp, Homo sapien
caatgccactcagtataatttcaag

SEQ ID NO: 4266847 - DNA, 25 bp, Homo sapien
tgtttcactgggacaaactcacgtt

SEQ ID NO: 4266848 - DNA, 25 bp, Homo sapien
aaaatttatttagcctgtttcactg

SEQ ID NO: 4266849 - DNA, 25 bp, Homo sapien
atttcaagtctgataagcatctaag

SEQ ID NO: 4266850 - DNA, 25 bp, Homo sapien
ctgatgaggaattcaaaataagcac

SEQ ID NO: 4266851 - DNA, 25 bp, Homo sapien
tgatgaggaattcaaaataagcaca

SEQ ID NO: 4266852 - DNA, 25 bp, Homo sapien
tgtggtcacacgaaagcaaagggaa

SEQ ID NO: 4266853 - DNA, 25 bp, Homo sapien
gtacattcaaatcaggacacctggg

SEQ ID NO: 4266854 - DNA, 25 bp, Homo sapien
gggtcacctatttccaatgtctggg

SEQ ID NO: 4266855 - DNA, 25 bp, Homo sapien
gaagatcccttaacacctagtcaga

SEQ ID NO: 4266856 - DNA, 25 bp, Homo sapien
atgatttcttccaagaaggtgccga

SEQ ID NO: 4266857 - DNA, 25 bp, Homo sapien
gacatgatttcttccaagaaggtgc

SEQ ID NO: 4266858 - DNA, 25 bp, Homo sapien
caaacgtacaccctcagacatgatt

SEQ ID NO: 4266859 - DNA, 25 bp, Homo sapien
aacgtacaccctcagacatgatttc

SEQ ID NO: 4266860 - DNA, 25 bp, Homo sapien
tctccgcatacagattcactgctgg

SEQ ID NO: 4266861 - DNA, 25 bp, Homo sapien
acaacacaactctccgcatacagat

SEQ ID NO: 4266862 - DNA, 25 bp, Homo sapien
accaccaacggccacatcagcacaa

SEQ ID NO: 4266863 - DNA, 25 bp, Homo sapien
agattcactgctggccccacaacag

SEQ ID NO: 4266864 - DNA, 25 bp, Homo sapien
tctaggaactgtatttactggcctc

SEQ ID NO: 4266865 - DNA, 25 bp, Homo sapien
ttcatttccaaaccgcatacagtgt

SEQ ID NO: 4266866 - DNA, 25 bp, Homo sapien
gatgcatgctgtgccgatgtgctca

SEQ ID NO: 4266867 - DNA, 25 bp, Homo sapien
ggtaaatgcccacagtaagtttcta

SEQ ID NO: 4266868 - DNA, 25 bp, Homo sapien
cttcaaaattatgtggatgccatca

SEQ ID NO: 4266869 - DNA, 25 bp, Homo sapien
taaatgattctagagaaacaagcag

SEQ ID NO: 4266870 - DNA, 25 bp, Homo sapien
cagtatttcttcagtcaggcttagg

SEQ ID NO: 4266871 - DNA, 25 bp, Homo sapien
ccaattcagaggttacctttaaatg

SEQ ID NO: 4266872 - DNA, 25 bp, Homo sapien
tggaaaactccctgccaactacaac

SEQ ID NO: 4266873 - DNA, 25 bp, Homo sapien
ggtagggggacatctatcaagacac

SEQ ID NO: 4266874 - DNA, 25 bp, Homo sapien
acaataatagtgctgtccataaggg

SEQ ID NO: 4266875 - DNA, 25 bp, Homo sapien
tatcaacgcccgcattccaacactg

SEQ ID NO: 4266876 - DNA, 25 bp, Homo sapien
tagacattctgcgaagcctggccca

SEQ ID NO: 4266877 - DNA, 25 bp, Homo sapien
tgtgtacatctaccttttccagaaa

SEQ ID NO: 4266878 - DNA, 25 bp, Homo sapien
gaaaaatttctgagctactcacaga

SEQ ID NO: 4266879 - DNA, 25 bp, Homo sapien
tagtgagaagcaatataggcattca

SEQ ID NO: 4266880 - DNA, 25 bp, Homo sapien
cagaggacctgagggagtaaatgca

SEQ ID NO: 4266881 - DNA, 25 bp, Homo sapien
gggacacctgacacacatgacatct

SEQ ID NO: 4266882 - DNA, 25 bp, Homo sapien
tgatggcatacgcaacatgtgaggc

SEQ ID NO: 4266883 - DNA, 25 bp, Homo sapien
gcagcttttgtgctaagaccggatt

SEQ ID NO: 4266884 - DNA, 25 bp, Homo sapien
taatgttggagccacctaagcctgg

SEQ ID NO: 4266885 - DNA, 25 bp, Homo sapien
tttaaagaataaacacgagaggcac

SEQ ID NO: 4266886 - DNA, 25 bp, Homo sapien
cctcttccttatatgctaatttctg

SEQ ID NO: 4266887 - DNA, 25 bp, Homo sapien
tgattccagcattttaagacacaca

SEQ ID NO: 4266888 - DNA, 25 bp, Homo sapien
gaggcactaattagaggcacacacc

SEQ ID NO: 4266889 - DNA, 25 bp, Homo sapien
tactgtggagaataaaaaacaactc

SEQ ID NO: 4266890 - DNA, 25 bp, Homo sapien
taaaaaacaactctcatcttgaaaa

SEQ ID NO: 4266891 - DNA, 25 bp, Homo sapien
ataaaaaacaactctcatcttgaaa

SEQ ID NO: 4266892 - DNA, 25 bp, Homo sapien
aaaacaactctcatcttgaaaattc

SEQ ID NO: 4266893 - DNA, 25 bp, Homo sapien
ttttctacagttctacaattacatg

SEQ ID NO: 4266894 - DNA, 25 bp, Homo sapien
gccccagtgattggctgcatcctaa

SEQ ID NO: 4266895 - DNA, 25 bp, Homo sapien
tattatcactaggatgcctgaaact

SEQ ID NO: 4266896 - DNA, 25 bp, Homo sapien
tccatattatcactaggatgcctga

SEQ ID NO: 4266897 - DNA, 25 bp, Homo sapien
tgaaaaggaaaaacaaatgatttga

SEQ ID NO: 4266898 - DNA, 25 bp, Homo sapien
ctgaaaaggaaaaacaaatgatttg

SEQ ID NO: 4266899 - DNA, 25 bp, Homo sapien
aacaccagcgcaagttttcgagcaa

SEQ ID NO: 4266900 - DNA, 25 bp, Homo sapien
gggaccctgtctgtaaacctgatta

SEQ ID NO: 4266901 - DNA, 25 bp, Homo sapien
tggagagggatattaaacaccagcg

SEQ ID NO: 4266902 - DNA, 25 bp, Homo sapien
caagaatgtgaataccggtgggacc

SEQ ID NO: 4266903 - DNA, 25 bp, Homo sapien
aagaaaagcattttaacagtaatct

SEQ ID NO: 4266904 - DNA, 25 bp, Homo sapien
agaaaagcattttaacagtaatctt

SEQ ID NO: 4266905 - DNA, 25 bp, Homo sapien
taatcttggccatatctaagtgatg

SEQ ID NO: 4266906 - DNA, 25 bp, Homo sapien
tgaatgtgagagaccctatgtatga

SEQ ID NO: 4266907 - DNA, 25 bp, Homo sapien
cagagctctacctattcttagggca

SEQ ID NO: 4266908 - DNA, 25 bp, Homo sapien
cacagtagtgatgctatccttccaa

SEQ ID NO: 4266909 - DNA, 25 bp, Homo sapien
cattctcgcttgcactgcttgcagc

SEQ ID NO: 4266910 - DNA, 25 bp, Homo sapien
tgcttggctgctcccggcagacata

SEQ ID NO: 4266911 - DNA, 25 bp, Homo sapien
ctgccattctcgcttgcactgcttg

SEQ ID NO: 4266912 - DNA, 25 bp, Homo sapien
cggcagacatagatggttaaacggg

SEQ ID NO: 4266913 - DNA, 25 bp, Homo sapien
tggcaacaaacccagtcgtcttcaa

SEQ ID NO: 4266914 - DNA, 25 bp, Homo sapien
gtactgcccatgtgcatttctacca

SEQ ID NO: 4266915 - DNA, 25 bp, Homo sapien
caaacccagtcgtcttcaagaaatc

SEQ ID NO: 4266916 - DNA, 25 bp, Homo sapien
taccagtcttacagtctacctctgc

SEQ ID NO: 4266917 - DNA, 25 bp, Homo sapien
gcaccacaaatttgaactaaatcct

SEQ ID NO: 4266918 - DNA, 25 bp, Homo sapien
tatagagccgaattccatcggctgc

SEQ ID NO: 4266919 - DNA, 25 bp, Homo sapien
gaattccatcggctgcaccacaaat

SEQ ID NO: 4266920 - DNA, 25 bp, Homo sapien
cttgacttcagtgaattatagagcc

SEQ ID NO: 4266921 - DNA, 25 bp, Homo sapien
ctgtgtttcctggatcgtagctgaa

SEQ ID NO: 4266922 - DNA, 25 bp, Homo sapien
agagaacagtcttgtgtaggaagag

SEQ ID NO: 4266923 - DNA, 25 bp, Homo sapien
gaaaaattagagaacagtcttgtgt

SEQ ID NO: 4266924 - DNA, 25 bp, Homo sapien
aaaattagagaacagtcttgtgtag

SEQ ID NO: 4266925 - DNA, 25 bp, Homo sapien
tgtagaaccctgaaagcatcagata

SEQ ID NO: 4266926 - DNA, 25 bp, Homo sapien
gtgatggacacccaaaatatcctga

SEQ ID NO: 4266927 - DNA, 25 bp, Homo sapien
cagtatttcgtagcagagtaggatg

SEQ ID NO: 4266928 - DNA, 25 bp, Homo sapien
aatatcctgactcgattaccacaca

SEQ ID NO: 4266929 - DNA, 25 bp, Homo sapien
gaggtctgtgaagctccatctccct

SEQ ID NO: 4266930 - DNA, 25 bp, Homo sapien
accagaggtctgtgaagctccatct

SEQ ID NO: 4266931 - DNA, 25 bp, Homo sapien
ttcaccagaggtctgtgaagctcca

SEQ ID NO: 4266932 - DNA, 25 bp, Homo sapien
ccctgatgatttggggaagaagaat

SEQ ID NO: 4266933 - DNA, 25 bp, Homo sapien
aaatttcaagtaaggcaacagtggg

SEQ ID NO: 4266934 - DNA, 25 bp, Homo sapien
caacagcttagggtgtggacatgat

SEQ ID NO: 4266935 - DNA, 25 bp, Homo sapien
cagtgggagacagctatgaaagtct

SEQ ID NO: 4266936 - DNA, 25 bp, Homo sapien
aaaatgcaagcgcaacagcttaggg

SEQ ID NO: 4266937 - DNA, 25 bp, Homo sapien
ggctgtgggggcatcgggccacgga

SEQ ID NO: 4266938 - DNA, 25 bp, Homo sapien
ggctgttattcacataggctgtggg

SEQ ID NO: 4266939 - DNA, 25 bp, Homo sapien
gggaagggctgttattcacataggc

SEQ ID NO: 4266940 - DNA, 25 bp, Homo sapien
gaagggctgttattcacataggctg

SEQ ID NO: 4266941 - DNA, 25 bp, Homo sapien
tgtgtgcgtctagacactgattaat

SEQ ID NO: 4266942 - DNA, 25 bp, Homo sapien
agacactgattaatcttagagaaga

SEQ ID NO: 4266943 - DNA, 25 bp, Homo sapien
gacactgattaatcttagagaagac

SEQ ID NO: 4266944 - DNA, 25 bp, Homo sapien
tgctgtgtgcgtctagacactgatt

SEQ ID NO: 4266945 - DNA, 25 bp, Homo sapien
atttataagcaacatctgacatcac

SEQ ID NO: 4266946 - DNA, 25 bp, Homo sapien
catcacatggtgacctgaaacatgg

SEQ ID NO: 4266947 - DNA, 25 bp, Homo sapien
taagaatggcgaagacaagaaagga

SEQ ID NO: 4266948 - DNA, 25 bp, Homo sapien
aacaggcacctatcaagatttaaga

SEQ ID NO: 4266949 - DNA, 25 bp, Homo sapien
cattttacacaacaatgcccattct

SEQ ID NO: 4266950 - DNA, 25 bp, Homo sapien
taaacttattgcatggcatagcaac

SEQ ID NO: 4266951 - DNA, 25 bp, Homo sapien
tagctggagagctttgaataaactt

SEQ ID NO: 4266952 - DNA, 25 bp, Homo sapien
cttgaggagattgaggtcagccttg

SEQ ID NO: 4266953 - DNA, 25 bp, Homo sapien
agcaggatcatcgtttgtggactaa

SEQ ID NO: 4266954 - DNA, 25 bp, Homo sapien
ggcactaggatgagtacaatttcag

SEQ ID NO: 4266955 - DNA, 25 bp, Homo sapien
aaatgtaacgtgtgcttccagtggc

SEQ ID NO: 4266956 - DNA, 25 bp, Homo sapien
tacagcagtcacgaatacatatgat

SEQ ID NO: 4266957 - DNA, 25 bp, Homo sapien
tactttgcggtggaagttggtccta

SEQ ID NO: 4266958 - DNA, 25 bp, Homo sapien
gaagcaggaagtctaaacaaaagca

SEQ ID NO: 4266959 - DNA, 25 bp, Homo sapien
aaaccacccaatatggtcaacattg

SEQ ID NO: 4266960 - DNA, 25 bp, Homo sapien
tcaagacatggacatcaaaaacaat

SEQ ID NO: 4266961 - DNA, 25 bp, Homo sapien
ctgcctcgctttgccagagaatcac

SEQ ID NO: 4266962 - DNA, 25 bp, Homo sapien
actgcctcgctttgccagagaatca

SEQ ID NO: 4266963 - DNA, 25 bp, Homo sapien
gcttgctggactttttctgctcatg

SEQ ID NO: 4266964 - DNA, 25 bp, Homo sapien
agtccgcttgctggactttttctgc

SEQ ID NO: 4266965 - DNA, 25 bp, Homo sapien
tctgctcatgttcaactgcatcttc

SEQ ID NO: 4266966 - DNA, 25 bp, Homo sapien
gtagtctgctggcaaagtccgcttg

SEQ ID NO: 4266967 - DNA, 25 bp, Homo sapien
gaaagatctaacaccctgtttcatg

SEQ ID NO: 4266968 - DNA, 25 bp, Homo sapien
gatcccacccaggaaacagtctatc

SEQ ID NO: 4266969 - DNA, 25 bp, Homo sapien
taagacctcattgggatttcagcat

SEQ ID NO: 4266970 - DNA, 25 bp, Homo sapien
ggctccaacttaagtctcttgccaa

SEQ ID NO: 4266971 - DNA, 25 bp, Homo sapien
tccatcttctctcggtcagtttttt

SEQ ID NO: 4266972 - DNA, 25 bp, Homo sapien
atcttctctcggtcagttttttgtt

SEQ ID NO: 4266973 - DNA, 25 bp, Homo sapien
gattgtggtatcataggacggctga

SEQ ID NO: 4266974 - DNA, 25 bp, Homo sapien
atcataggacggctgatacttttct

SEQ ID NO: 4266975 - DNA, 25 bp, Homo sapien
tgcttaaaggtgtcaacctggatcc

SEQ ID NO: 4266976 - DNA, 25 bp, Homo sapien
acctggatcctaaagggcactccct

SEQ ID NO: 4266977 - DNA, 25 bp, Homo sapien
aaaactttgatttggcagctagctg

SEQ ID NO: 4266978 - DNA, 25 bp, Homo sapien
tgcttccgtggagtaaattctgtgc

SEQ ID NO: 4266979 - DNA, 25 bp, Homo sapien
gtcaattattcccacagacattgga

SEQ ID NO: 4266980 - DNA, 25 bp, Homo sapien
tggcttggattcgtccttgtgtcaa

SEQ ID NO: 4266981 - DNA, 25 bp, Homo sapien
gaaattcaaccgcatttaactggct

SEQ ID NO: 4266982 - DNA, 25 bp, Homo sapien
gaggtgcgttttgctgggtcccaca

SEQ ID NO: 4266983 - DNA, 25 bp, Homo sapien
cgaatatcatcgtttcccctaccat

SEQ ID NO: 4266984 - DNA, 25 bp, Homo sapien
aatggtctccatgatcaacttcttc

SEQ ID NO: 4266985 - DNA, 25 bp, Homo sapien
tcttcaacatcgaaacccaccctaa

SEQ ID NO: 4266986 - DNA, 25 bp, Homo sapien
tctgtctttcaatggtctccatgat

SEQ ID NO: 4266987 - DNA, 25 bp, Homo sapien
tttagcaccaaaaagctacttgacg

SEQ ID NO: 4266988 - DNA, 25 bp, Homo sapien
cggttctttataatacgaggatggg

SEQ ID NO: 4266989 - DNA, 25 bp, Homo sapien
tagaaaacaactctcaagacacaag

SEQ ID NO: 4266990 - DNA, 25 bp, Homo sapien
actataaaacaactctctcggttct

SEQ ID NO: 4266991 - DNA, 25 bp, Homo sapien
gtaattcatgatgccaacacaacac

SEQ ID NO: 4266992 - DNA, 25 bp, Homo sapien
ctttccccacacaagtaattcatga

SEQ ID NO: 4266993 - DNA, 25 bp, Homo sapien
cattactggctatagctaaacaata

SEQ ID NO: 4266994 - DNA, 25 bp, Homo sapien
caacacaacacattactggctatag

SEQ ID NO: 4266995 - DNA, 25 bp, Homo sapien
tccatggtcttttgatcactgcctg

SEQ ID NO: 4266996 - DNA, 25 bp, Homo sapien
tctccatggtcttttgatcactgcc

SEQ ID NO: 4266997 - DNA, 25 bp, Homo sapien
ccatggtcttttgatcactgcctgt

SEQ ID NO: 4266998 - DNA, 25 bp, Homo sapien
ctccatggtcttttgatcactgcct

SEQ ID NO: 4266999 - DNA, 25 bp, Homo sapien
agtctgtctcctgggcgattccact

SEQ ID NO: 4267000 - DNA, 25 bp, Homo sapien
tgctctgtgtattgtagccgtctgt

SEQ ID NO: 4267001 - DNA, 25 bp, Homo sapien
gtctcctgggcgattccacttccat

SEQ ID NO: 4267002 - DNA, 25 bp, Homo sapien
cgtctgtcatggaatacaaccctta

SEQ ID NO: 4267003 - DNA, 25 bp, Homo sapien
tgcataggctagtggtggcccctaa

SEQ ID NO: 4267004 - DNA, 25 bp, Homo sapien
tggttcacatctgctagccagctcg

SEQ ID NO: 4267005 - DNA, 25 bp, Homo sapien
tagtatagtcaaagatcctagggcc

SEQ ID NO: 4267006 - DNA, 25 bp, Homo sapien
gagacatttatagggctcagtggct

SEQ ID NO: 4267007 - DNA, 25 bp, Homo sapien
taattttccattgatctcaggcata

SEQ ID NO: 4267008 - DNA, 25 bp, Homo sapien
actaattttccattgatctcaggca

SEQ ID NO: 4267009 - DNA, 25 bp, Homo sapien
tatccagcatccgaatttcatatga

SEQ ID NO: 4267010 - DNA, 25 bp, Homo sapien
tatcacccattttccgattatccag

SEQ ID NO: 4267011 - DNA, 25 bp, Homo sapien
cagttttactgctggtgacgttgca

SEQ ID NO: 4267012 - DNA, 25 bp, Homo sapien
tcacatactgaaagggtgggtgctc

SEQ ID NO: 4267013 - DNA, 25 bp, Homo sapien
gacgttgcagcacacatcacatact

SEQ ID NO: 4267014 - DNA, 25 bp, Homo sapien
aataagtaagcgtttcatcatgcag

SEQ ID NO: 4267015 - DNA, 25 bp, Homo sapien
gtttgaaatatttgtctacagccat

SEQ ID NO: 4267016 - DNA, 25 bp, Homo sapien
ggtttgaaatatttgtctacagcca

SEQ ID NO: 4267017 - DNA, 25 bp, Homo sapien
tgggtttgaaatatttgtctacagc

SEQ ID NO: 4267018 - DNA, 25 bp, Homo sapien
tttgggtttgaaatatttgtctaca

SEQ ID NO: 4267019 - DNA, 25 bp, Homo sapien
tcatcctgaatgcacccaatcttgt

SEQ ID NO: 4267020 - DNA, 25 bp, Homo sapien
atcatcctgaatgcacccaatcttg

SEQ ID NO: 4267021 - DNA, 25 bp, Homo sapien
gatcacacggttagcaatggtccca

SEQ ID NO: 4267022 - DNA, 25 bp, Homo sapien
gagagaacgttatcccaccagtagt

SEQ ID NO: 4267023 - DNA, 25 bp, Homo sapien
gttctctcaacaccttgacctaggg

SEQ ID NO: 4267024 - DNA, 25 bp, Homo sapien
tcactaagatacttgggtagccagg

SEQ ID NO: 4267025 - DNA, 25 bp, Homo sapien
gacttggaaatcacaacaagcttga

SEQ ID NO: 4267026 - DNA, 25 bp, Homo sapien
ctgcaccaggcccaaatgatgcatt

SEQ ID NO: 4267027 - DNA, 25 bp, Homo sapien
aattttaatgtagcttagcaccaaa

SEQ ID NO: 4267028 - DNA, 25 bp, Homo sapien
acaagcttgatcaaatgaagtataa

SEQ ID NO: 4267029 - DNA, 25 bp, Homo sapien
tagtggccttgtgggtgtaggatac

SEQ ID NO: 4267030 - DNA, 25 bp, Homo sapien
tagttttagtggccttgtgggtgta

SEQ ID NO: 4267031 - DNA, 25 bp, Homo sapien
cttgtgggtgtaggatacagccatc

SEQ ID NO: 4267032 - DNA, 25 bp, Homo sapien
tggccttgtgggtgtaggatacagc

SEQ ID NO: 4267033 - DNA, 25 bp, Homo sapien
caggtttaatagcagctcagacaga

SEQ ID NO: 4267034 - DNA, 25 bp, Homo sapien
cactggcggaaaattgaaagagcgg

SEQ ID NO: 4267035 - DNA, 25 bp, Homo sapien
gaacaggaaactttaaaggacagca

SEQ ID NO: 4267036 - DNA, 25 bp, Homo sapien
gaacaaccaggtaacatggcctcct

SEQ ID NO: 4267037 - DNA, 25 bp, Homo sapien
tcagttagattagcctacagtcggg

SEQ ID NO: 4267038 - DNA, 25 bp, Homo sapien
gaatgggaactatggctcactgcca

SEQ ID NO: 4267039 - DNA, 25 bp, Homo sapien
aattgttctacacagatgttccccg

SEQ ID NO: 4267040 - DNA, 25 bp, Homo sapien
tcaggtgagaagactgcataagccc

SEQ ID NO: 4267041 - DNA, 25 bp, Homo sapien
tatgaatgctactgggaaactgtag

SEQ ID NO: 4267042 - DNA, 25 bp, Homo sapien
ctgggaaactgtagagcacttccaa

SEQ ID NO: 4267043 - DNA, 25 bp, Homo sapien
agtcctcctctagagctgcagtaag

SEQ ID NO: 4267044 - DNA, 25 bp, Homo sapien
ctgcagtaagatgtatgaatgctac

SEQ ID NO: 4267045 - DNA, 25 bp, Homo sapien
cgatgcccgagaggctggcgtcgaa

SEQ ID NO: 4267046 - DNA, 25 bp, Homo sapien
atgctgtaagcgccggcgcccagtt

SEQ ID NO: 4267047 - DNA, 25 bp, Homo sapien
gcccggactcgatcacctcgtccat

SEQ ID NO: 4267048 - DNA, 25 bp, Homo sapien
agtcgtgcaccagcccggactcgat

SEQ ID NO: 4267049 - DNA, 25 bp, Homo sapien
tccggcctcgccgtcgccccgcaca

SEQ ID NO: 4267050 - DNA, 25 bp, Homo sapien
ttccggcctcgccgtcgccccgcac

SEQ ID NO: 4267051 - DNA, 25 bp, Homo sapien
ccggcctcgccgtcgccccgcacac

SEQ ID NO: 4267052 - DNA, 25 bp, Homo sapien
cttccggcctcgccgtcgccccgca

SEQ ID NO: 4267053 - DNA, 25 bp, Homo sapien
cggcctccgcgtccagggcgaagga

SEQ ID NO: 4267054 - DNA, 25 bp, Homo sapien
cctccgcgtccagggcgaaggagcc

SEQ ID NO: 4267055 - DNA, 25 bp, Homo sapien
gcctccgcgtccagggcgaaggagc

SEQ ID NO: 4267056 - DNA, 25 bp, Homo sapien
ggcctccgcgtccagggcgaaggag

SEQ ID NO: 4267057 - DNA, 25 bp, Homo sapien
cgagtggtcaccagcggcggccggg

SEQ ID NO: 4267058 - DNA, 25 bp, Homo sapien
ggcggcgagtggtcaccagcggcgg

SEQ ID NO: 4267059 - DNA, 25 bp, Homo sapien
ggcgagtggtcaccagcggcggccg

SEQ ID NO: 4267060 - DNA, 25 bp, Homo sapien
cggaggggcggcgagtggtcaccag

SEQ ID NO: 4267061 - DNA, 25 bp, Homo sapien
agggcacgacgagcccagcgagcaa

SEQ ID NO: 4267062 - DNA, 25 bp, Homo sapien
tctgccggccggacgctggcttcaa

SEQ ID NO: 4267063 - DNA, 25 bp, Homo sapien
cccagcgagcaattgcagcgggagc

SEQ ID NO: 4267064 - DNA, 25 bp, Homo sapien
atcctcctccgggaccgctgggagg

SEQ ID NO: 4267065 - DNA, 25 bp, Homo sapien
cccgactaaacaaccaatcaaaatg

SEQ ID NO: 4267066 - DNA, 25 bp, Homo sapien
gttcttcaccttgggcgggctcgaa

SEQ ID NO: 4267067 - DNA, 25 bp, Homo sapien
ttggacgaagctcccgtgagtctct

SEQ ID NO: 4267068 - DNA, 25 bp, Homo sapien
cgggctcgaagacggaatttgttgc

SEQ ID NO: 4267069 - DNA, 25 bp, Homo sapien
cctctgtggtatttcccggtcgtct

SEQ ID NO: 4267070 - DNA, 25 bp, Homo sapien
cacttccggaggtgatttgctcctc

SEQ ID NO: 4267071 - DNA, 25 bp, Homo sapien
ccaaaacgccacttccggaggtgat

SEQ ID NO: 4267072 - DNA, 25 bp, Homo sapien
tttcccggtcgtctctgctttatgc

SEQ ID NO: 4267073 - DNA, 25 bp, Homo sapien
ttgctgaagagaacgtcaaggcccg

SEQ ID NO: 4267074 - DNA, 25 bp, Homo sapien
agccagtgtgcggatcagagttcct

SEQ ID NO: 4267075 - DNA, 25 bp, Homo sapien
gcttgacgggcggaatccttgctga

SEQ ID NO: 4267076 - DNA, 25 bp, Homo sapien
tcagagttccttaggagcggctgct

SEQ ID NO: 4267077 - DNA, 25 bp, Homo sapien
ggaaaatgctgtccactggcaccta

SEQ ID NO: 4267078 - DNA, 25 bp, Homo sapien
cagatccccaccaaatggaaaatgc

SEQ ID NO: 4267079 - DNA, 25 bp, Homo sapien
ctggcacctagacctcagatatggg

SEQ ID NO: 4267080 - DNA, 25 bp, Homo sapien
aattgagaactgaatgatgaccact

SEQ ID NO: 4267081 - DNA, 25 bp, Homo sapien
tatgattggcagagaaatttggtta

SEQ ID NO: 4267082 - DNA, 25 bp, Homo sapien
atgattggcagagaaatttggttat

SEQ ID NO: 4267083 - DNA, 25 bp, Homo sapien
gattcttgtaccctagcctccagag

SEQ ID NO: 4267084 - DNA, 25 bp, Homo sapien
taagtgtttggctcagcggtactaa

SEQ ID NO: 4267085 - DNA, 25 bp, Homo sapien
gcggtactaagtgcatgcacaatgt

SEQ ID NO: 4267086 - DNA, 25 bp, Homo sapien
catcattgctatccgtctccagaac

SEQ ID NO: 4267087 - DNA, 25 bp, Homo sapien
cttctgagatctgacgggattgggc

SEQ ID NO: 4267088 - DNA, 25 bp, Homo sapien
gcaaccaccatcctattttctcaca

SEQ ID NO: 4267089 - DNA, 25 bp, Homo sapien
gatctgacgggattgggcgtgttca

SEQ ID NO: 4267090 - DNA, 25 bp, Homo sapien
catcctattttctcacatccaagta

SEQ ID NO: 4267091 - DNA, 25 bp, Homo sapien
taatgtttaatactgcccagccaac

SEQ ID NO: 4267092 - DNA, 25 bp, Homo sapien
tactctaggtacttcgtataagcat

SEQ ID NO: 4267093 - DNA, 25 bp, Homo sapien
cgtataagcataaacatacaatata

SEQ ID NO: 4267094 - DNA, 25 bp, Homo sapien
tatatgaatgactatctaatgttta

SEQ ID NO: 4267095 - DNA, 25 bp, Homo sapien
tacctttgattgtggtagctacacc

SEQ ID NO: 4267096 - DNA, 25 bp, Homo sapien
gagtgcctgcctgccattagatgcc

SEQ ID NO: 4267097 - DNA, 25 bp, Homo sapien
gccaggtgcttatctaattttccag

SEQ ID NO: 4267098 - DNA, 25 bp, Homo sapien
gagaccaccactgatacaagaccgt

SEQ ID NO: 4267099 - DNA, 25 bp, Homo sapien
caaaagacactataggcagcagctc

SEQ ID NO: 4267100 - DNA, 25 bp, Homo sapien
gaaaaggtgctggtcactcccatgt

SEQ ID NO: 4267101 - DNA, 25 bp, Homo sapien
tgagcccattatacaaagacagcct

SEQ ID NO: 4267102 - DNA, 25 bp, Homo sapien
tggtaatttttgagtcggctgcaca

SEQ ID NO: 4267103 - DNA, 25 bp, Homo sapien
tacatgcagactgaggatagtcctc

SEQ ID NO: 4267104 - DNA, 25 bp, Homo sapien
cggagtccagctgtagttcaaatta

SEQ ID NO: 4267105 - DNA, 25 bp, Homo sapien
cactggcaaaggttaatgggaagac

SEQ ID NO: 4267106 - DNA, 25 bp, Homo sapien
tatagatcaccccaaagaagttgca

SEQ ID NO: 4267107 - DNA, 25 bp, Homo sapien
tttcttttgagagacctggttcgct

SEQ ID NO: 4267108 - DNA, 25 bp, Homo sapien
cattgatgagggtggtctatctgtc

SEQ ID NO: 4267109 - DNA, 25 bp, Homo sapien
caatagtaagttccaaaggatgtgt

SEQ ID NO: 4267110 - DNA, 25 bp, Homo sapien
acctggttcgctgtgatgagcttca

SEQ ID NO: 4267111 - DNA, 25 bp, Homo sapien
tcagtagtgggatcagctcctccag

SEQ ID NO: 4267112 - DNA, 25 bp, Homo sapien
cagtagtgggatcagctcctccaga

SEQ ID NO: 4267113 - DNA, 25 bp, Homo sapien
gtccagaaacatcagtagtgggatc

SEQ ID NO: 4267114 - DNA, 25 bp, Homo sapien
tttgtccagaaacatcagtagtggg

SEQ ID NO: 4267115 - DNA, 25 bp, Homo sapien
ctgtttgtgcacgtttgatgtaaag

SEQ ID NO: 4267116 - DNA, 25 bp, Homo sapien
tttgtgcacgtttgatgtaaagatt

SEQ ID NO: 4267117 - DNA, 25 bp, Homo sapien
ttgatgtaaagattcagtagcttca

SEQ ID NO: 4267118 - DNA, 25 bp, Homo sapien
tgatgtaaagattcagtagcttcat

SEQ ID NO: 4267119 - DNA, 25 bp, Homo sapien
gagcaagctgctccaaattataaga

SEQ ID NO: 4267120 - DNA, 25 bp, Homo sapien
ggttattataatgcccaagttattg

SEQ ID NO: 4267121 - DNA, 25 bp, Homo sapien
caagccaaataaatgtcatttgagc

SEQ ID NO: 4267122 - DNA, 25 bp, Homo sapien
ctctgaaagatagattttaggctgg

SEQ ID NO: 4267123 - DNA, 25 bp, Homo sapien
tagccatgggattcacgggatcaca

SEQ ID NO: 4267124 - DNA, 25 bp, Homo sapien
tgcctggccaccttagcagaatgaa

SEQ ID NO: 4267125 - DNA, 25 bp, Homo sapien
agtgacggtgagtgctttctgctaa

SEQ ID NO: 4267126 - DNA, 25 bp, Homo sapien
gagtttttaacctgctagccatggg

SEQ ID NO: 4267127 - DNA, 25 bp, Homo sapien
ttagttcatcaccaattaccgcatg

SEQ ID NO: 4267128 - DNA, 25 bp, Homo sapien
aagctttccgaacactgctctctga

SEQ ID NO: 4267129 - DNA, 25 bp, Homo sapien
ccagtaagttgactgagatgtggtt

SEQ ID NO: 4267130 - DNA, 25 bp, Homo sapien
aagacacaagctttccgaacactgc

SEQ ID NO: 4267131 - DNA, 25 bp, Homo sapien
taggttttaaggcagtcagcactcc

SEQ ID NO: 4267132 - DNA, 25 bp, Homo sapien
cactgttagtactccagagaagtcc

SEQ ID NO: 4267133 - DNA, 25 bp, Homo sapien
tttaacagggtcagaagatgcagct

SEQ ID NO: 4267134 - DNA, 25 bp, Homo sapien
gatgaaatctcgagcatactaagga

SEQ ID NO: 4267135 - DNA, 25 bp, Homo sapien
tgtatttatgcaagcaatgtataag

SEQ ID NO: 4267136 - DNA, 25 bp, Homo sapien
caccaatttgtatttatgcaagcaa

SEQ ID NO: 4267137 - DNA, 25 bp, Homo sapien
gctgtaccaccaatttgtatttatg

SEQ ID NO: 4267138 - DNA, 25 bp, Homo sapien
tatttatgcaagcaatgtataaggg

SEQ ID NO: 4267139 - DNA, 25 bp, Homo sapien
ggatagtagaccattatcagatata

SEQ ID NO: 4267140 - DNA, 25 bp, Homo sapien
tatatatactctggatagtagacca

SEQ ID NO: 4267141 - DNA, 25 bp, Homo sapien
tccgtaattactaatgacaccaagc

SEQ ID NO: 4267142 - DNA, 25 bp, Homo sapien
tcttttcacgtacttgctggccatt

SEQ ID NO: 4267143 - DNA, 25 bp, Homo sapien
aagcctagggccctctaagacggtg

SEQ ID NO: 4267144 - DNA, 25 bp, Homo sapien
gctaggctgcctacaattctgtctt

SEQ ID NO: 4267145 - DNA, 25 bp, Homo sapien
tatgtgcaactcacaataggcttca

SEQ ID NO: 4267146 - DNA, 25 bp, Homo sapien
catggagcccaaagaacatccagag

SEQ ID NO: 4267147 - DNA, 25 bp, Homo sapien
gagaaacacattacatctatgacta

SEQ ID NO: 4267148 - DNA, 25 bp, Homo sapien
gaaagagttcacaatgtatggttaa

SEQ ID NO: 4267149 - DNA, 25 bp, Homo sapien
ccactttggagtgaaatctggcaac

SEQ ID NO: 4267150 - DNA, 25 bp, Homo sapien
ggtttatgtagctaaagagaaacac

SEQ ID NO: 4267151 - DNA, 25 bp, Homo sapien
ggactaattgaagtggccaacactg

SEQ ID NO: 4267152 - DNA, 25 bp, Homo sapien
aaagcactttgatgcactgctctgg

SEQ ID NO: 4267153 - DNA, 25 bp, Homo sapien
gatgccgcttcctcagcagatctca

SEQ ID NO: 4267154 - DNA, 25 bp, Homo sapien
ggcataatctctggcaaaagcaggt

SEQ ID NO: 4267155 - DNA, 25 bp, Homo sapien
tttctcttagaaatacagtccttac

SEQ ID NO: 4267156 - DNA, 25 bp, Homo sapien
ctttctcttagaaatacagtcctta

SEQ ID NO: 4267157 - DNA, 25 bp, Homo sapien
gctttctcttagaaatacagtcctt

SEQ ID NO: 4267158 - DNA, 25 bp, Homo sapien
ccttatgaggatctttatgtgcttc

SEQ ID NO: 4267159 - DNA, 25 bp, Homo sapien
atcttgctggttgatgccttaggat

SEQ ID NO: 4267160 - DNA, 25 bp, Homo sapien
ttgctggttgatgccttaggatttc

SEQ ID NO: 4267161 - DNA, 25 bp, Homo sapien
tgtgcttccaatgttttcatgacag

SEQ ID NO: 4267162 - DNA, 25 bp, Homo sapien
tccaagcgtttcaagcaataaaagc

SEQ ID NO: 4267163 - DNA, 25 bp, Homo sapien
tcattatggttagacagctccttca

SEQ ID NO: 4267164 - DNA, 25 bp, Homo sapien
caactctgcaactaggtcagaatga

SEQ ID NO: 4267165 - DNA, 25 bp, Homo sapien
tattgttttgaagtgttcatcccaa

SEQ ID NO: 4267166 - DNA, 25 bp, Homo sapien
tgggcttgggccatagactaatttc

SEQ ID NO: 4267167 - DNA, 25 bp, Homo sapien
tggaatgaaacaaccacagagcacg

SEQ ID NO: 4267168 - DNA, 25 bp, Homo sapien
ttgagggatttcagcaggtagtgcc

SEQ ID NO: 4267169 - DNA, 25 bp, Homo sapien
tagactaatttccttcccatctctc

SEQ ID NO: 4267170 - DNA, 25 bp, Homo sapien
gccaaggtgcagttttattatcagt

SEQ ID NO: 4267171 - DNA, 25 bp, Homo sapien
gaaaatagcatctgcctcctagggt

SEQ ID NO: 4267172 - DNA, 25 bp, Homo sapien
tcatggtgaggacttgggcctagaa

SEQ ID NO: 4267173 - DNA, 25 bp, Homo sapien
gagcagtttcctaattattgccaag

SEQ ID NO: 4267174 - DNA, 25 bp, Homo sapien
ttcaaaaacaactgcatacacatgg

SEQ ID NO: 4267175 - DNA, 25 bp, Homo sapien
caggctgaggctgatctttggcata

SEQ ID NO: 4267176 - DNA, 25 bp, Homo sapien
gaaaaaggtacaggctcagaaagga

SEQ ID NO: 4267177 - DNA, 25 bp, Homo sapien
gaagaaccaggataatacagcatac

SEQ ID NO: 4267178 - DNA, 25 bp, Homo sapien
tagatgcaacgctggctcaacattc

SEQ ID NO: 4267179 - DNA, 25 bp, Homo sapien
catccctagatgcaacgctggctca

SEQ ID NO: 4267180 - DNA, 25 bp, Homo sapien
tcatgtaggcctcatccctagatgc

SEQ ID NO: 4267181 - DNA, 25 bp, Homo sapien
taggcctcatccctagatgcaacgc

SEQ ID NO: 4267182 - DNA, 25 bp, Homo sapien
tatggattatagtctcgagagcgtg

SEQ ID NO: 4267183 - DNA, 25 bp, Homo sapien
tgacttgagtcagtagcatcacctc

SEQ ID NO: 4267184 - DNA, 25 bp, Homo sapien
tcttgggtcagacatcccaggacca

SEQ ID NO: 4267185 - DNA, 25 bp, Homo sapien
acttgttgaagggactgatgctatc

SEQ ID NO: 4267186 - DNA, 25 bp, Homo sapien
tcatcttttttagaatcccttttca

SEQ ID NO: 4267187 - DNA, 25 bp, Homo sapien
gctgaaattctggattgcttcagtg

SEQ ID NO: 4267188 - DNA, 25 bp, Homo sapien
ttcttggctacggaagctgaaattc

SEQ ID NO: 4267189 - DNA, 25 bp, Homo sapien
tgcttcagtgacacctctaagagag

SEQ ID NO: 4267190 - DNA, 25 bp, Homo sapien
aaacatagtcgtgcctatttattta

SEQ ID NO: 4267191 - DNA, 25 bp, Homo sapien
taaacatagtcgtgcctatttattt

SEQ ID NO: 4267192 - DNA, 25 bp, Homo sapien
tattaaacatagtcgtgcctattta

SEQ ID NO: 4267193 - DNA, 25 bp, Homo sapien
ttattaaacatagtcgtgcctattt

SEQ ID NO: 4267194 - DNA, 25 bp, Homo sapien
ttaaataatcatcctgcatcagcct

SEQ ID NO: 4267195 - DNA, 25 bp, Homo sapien
cctaggcttaaataatcatcctgca

SEQ ID NO: 4267196 - DNA, 25 bp, Homo sapien
catcctgcatcagcctatcaagttg

SEQ ID NO: 4267197 - DNA, 25 bp, Homo sapien
actcctaggcttaaataatcatcct

SEQ ID NO: 4267198 - DNA, 25 bp, Homo sapien
ccagttagctggtgatcgtggtgtt

SEQ ID NO: 4267199 - DNA, 25 bp, Homo sapien
agaagtaagaggactggaccagtta

SEQ ID NO: 4267200 - DNA, 25 bp, Homo sapien
cttggagataaagtattctgtgatg

SEQ ID NO: 4267201 - DNA, 25 bp, Homo sapien
tgtgatgtattggtaggagaagtaa

SEQ ID NO: 4267202 - DNA, 25 bp, Homo sapien
taaagggccatatttacaggtcaat

SEQ ID NO: 4267203 - DNA, 25 bp, Homo sapien
gactttaccttaagcctgccatcag

SEQ ID NO: 4267204 - DNA, 25 bp, Homo sapien
catgtacttacgtctggtttccagg

SEQ ID NO: 4267205 - DNA, 25 bp, Homo sapien
aaaaagatgactgactctggttcac

SEQ ID NO: 4267206 - DNA, 25 bp, Homo sapien
ctgggttccattgccagtgtttcga

SEQ ID NO: 4267207 - DNA, 25 bp, Homo sapien
tgaagaagcttggtagcaccatcct

SEQ ID NO: 4267208 - DNA, 25 bp, Homo sapien
taatgaaatcagcactgactgtgct

SEQ ID NO: 4267209 - DNA, 25 bp, Homo sapien
ccagtgtttcgaaggtgattatgaa

SEQ ID NO: 4267210 - DNA, 25 bp, Homo sapien
tataagactgctgtaacaggccaag

SEQ ID NO: 4267211 - DNA, 25 bp, Homo sapien
gaaaggtctattatacactgctgaa

SEQ ID NO: 4267212 - DNA, 25 bp, Homo sapien
gaagctaaagtaagtccgttctgtg

SEQ ID NO: 4267213 - DNA, 25 bp, Homo sapien
ccatgacggtttccagggttactct

SEQ ID NO: 4267214 - DNA, 25 bp, Homo sapien
aattccattgttcaggtctccagag

SEQ ID NO: 4267215 - DNA, 25 bp, Homo sapien
tagggacagacatcccaattgctcc

SEQ ID NO: 4267216 - DNA, 25 bp, Homo sapien
gctttatttcccctgtagggacaga

SEQ ID NO: 4267217 - DNA, 25 bp, Homo sapien
tacaatagatgaggacttaggttcc

SEQ ID NO: 4267218 - DNA, 25 bp, Homo sapien
tgttgcctaagcttctgataccata

SEQ ID NO: 4267219 - DNA, 25 bp, Homo sapien
gataccatatccaagaatccactgc

SEQ ID NO: 4267220 - DNA, 25 bp, Homo sapien
tcttgttcttggaatactgcaaaat

SEQ ID NO: 4267221 - DNA, 25 bp, Homo sapien
ccactgccaaatcggagttcatgaa

SEQ ID NO: 4267222 - DNA, 25 bp, Homo sapien
tgccacaataggtaacgactacggt

SEQ ID NO: 4267223 - DNA, 25 bp, Homo sapien
tgcgtccggcctatgtgtactcctt

SEQ ID NO: 4267224 - DNA, 25 bp, Homo sapien
ttcggcccactgactatttaagagt

SEQ ID NO: 4267225 - DNA, 25 bp, Homo sapien
ggtttcatggcctagcgtgcagaat

SEQ ID NO: 4267226 - DNA, 25 bp, Homo sapien
tgacccgagacactgctaggcgagt

SEQ ID NO: 4267227 - DNA, 25 bp, Homo sapien
tgtatttaaggatagcaaccttcac

SEQ ID NO: 4267228 - DNA, 25 bp, Homo sapien
tgggttctgttgtccaagtgatgac

SEQ ID NO: 4267229 - DNA, 25 bp, Homo sapien
cactgctaggcgagtttcactggaa

SEQ ID NO: 4267230 - DNA, 25 bp, Homo sapien
caatgaatccatcgtttcagtcacc

SEQ ID NO: 4267231 - DNA, 25 bp, Homo sapien
gaaacgtttctcatagtcaagcaaa

SEQ ID NO: 4267232 - DNA, 25 bp, Homo sapien
tgtggaatggttataattgagctaa

SEQ ID NO: 4267233 - DNA, 25 bp, Homo sapien
ccagtaattcttgatgtgtaggtgc

SEQ ID NO: 4267234 - DNA, 25 bp, Homo sapien
tggaagaatgatcaatatcagtatt

SEQ ID NO: 4267235 - DNA, 25 bp, Homo sapien
gaaactcacatgactcaatagcaag

SEQ ID NO: 4267236 - DNA, 25 bp, Homo sapien
aaacgaaactcttccacaatgctgg

SEQ ID NO: 4267237 - DNA, 25 bp, Homo sapien
atgtggagaaaacgaaactcttcca

SEQ ID NO: 4267238 - DNA, 25 bp, Homo sapien
cacgagatgaatgcctgactgttcc

SEQ ID NO: 4267239 - DNA, 25 bp, Homo sapien
gacagctgcaagatagaaggctaca

SEQ ID NO: 4267240 - DNA, 25 bp, Homo sapien
tagcacttgaacaccactacaggta

SEQ ID NO: 4267241 - DNA, 25 bp, Homo sapien
cacaggtagaggacaacgatgagac

SEQ ID NO: 4267242 - DNA, 25 bp, Homo sapien
caatcctgggcagtaacgcttgtag

SEQ ID NO: 4267243 - DNA, 25 bp, Homo sapien
caaatgtgtgcatgcgtaaaaggct

SEQ ID NO: 4267244 - DNA, 25 bp, Homo sapien
tatagagtgagtttgcattaccagc

SEQ ID NO: 4267245 - DNA, 25 bp, Homo sapien
aagagtgaagctggtcccgaagtgc

SEQ ID NO: 4267246 - DNA, 25 bp, Homo sapien
tattgaactgaagatcatttggaaa

SEQ ID NO: 4267247 - DNA, 25 bp, Homo sapien
cttggtgtctgggtctgatcaactg

SEQ ID NO: 4267248 - DNA, 25 bp, Homo sapien
aagcttggtgtctgggtctgatcaa

SEQ ID NO: 4267249 - DNA, 25 bp, Homo sapien
tagaatattgaactgaagatcattt

SEQ ID NO: 4267250 - DNA, 25 bp, Homo sapien
tgtatgaaatccactagagtctcca

SEQ ID NO: 4267251 - DNA, 25 bp, Homo sapien
ttgtaacatcaagggctttctgaac

SEQ ID NO: 4267252 - DNA, 25 bp, Homo sapien
tgtcagcagtacaaacaaccaatct

SEQ ID NO: 4267253 - DNA, 25 bp, Homo sapien
acttttgcctgaacagatccaagca

SEQ ID NO: 4267254 - DNA, 25 bp, Homo sapien
tggcagccaagcggaaaaacaatct

SEQ ID NO: 4267255 - DNA, 25 bp, Homo sapien
tatgttcaattcaaagcgaatacag

SEQ ID NO: 4267256 - DNA, 25 bp, Homo sapien
aatcagaggcacagcgattggcagc

SEQ ID NO: 4267257 - DNA, 25 bp, Homo sapien
tcaattcaaagcgaatacagaaagg

SEQ ID NO: 4267258 - DNA, 25 bp, Homo sapien
ctgtgatacaagagtacctttgaac

SEQ ID NO: 4267259 - DNA, 25 bp, Homo sapien
tacaagagtacctttgaactgttat

SEQ ID NO: 4267260 - DNA, 25 bp, Homo sapien
tgatacaagagtacctttgaactgt

SEQ ID NO: 4267261 - DNA, 25 bp, Homo sapien
caagagtacctttgaactgttatcc

SEQ ID NO: 4267262 - DNA, 25 bp, Homo sapien
aacactgcatgaactctttgggaga

SEQ ID NO: 4267263 - DNA, 25 bp, Homo sapien
cgagctattacaattgaggcagact

SEQ ID NO: 4267264 - DNA, 25 bp, Homo sapien
taggtgtgccagtcatcaaatagaa

SEQ ID NO: 4267265 - DNA, 25 bp, Homo sapien
catttcgtggattgcaaaggttcca

SEQ ID NO: 4267266 - DNA, 25 bp, Homo sapien
caccacagtgaaggcagttctttcc

SEQ ID NO: 4267267 - DNA, 25 bp, Homo sapien
caactgtgcctcattttagtagcca

SEQ ID NO: 4267268 - DNA, 25 bp, Homo sapien
taccgtagttgtccaagactcaaga

SEQ ID NO: 4267269 - DNA, 25 bp, Homo sapien
gctgcctagaatgctcgtcaggaga

SEQ ID NO: 4267270 - DNA, 25 bp, Homo sapien
atttcacataatcttttcagttcaa

SEQ ID NO: 4267271 - DNA, 25 bp, Homo sapien
cttgccatgagggtcagcaaacatt

SEQ ID NO: 4267272 - DNA, 25 bp, Homo sapien
gtgaaaatttcacataatcttttca

SEQ ID NO: 4267273 - DNA, 25 bp, Homo sapien
gaaaatttcacataatcttttcagt

SEQ ID NO: 4267274 - DNA, 25 bp, Homo sapien
gtaaaatcaaaaagcgctaacctga

SEQ ID NO: 4267275 - DNA, 25 bp, Homo sapien
caccagtatctctaaagtgttatag

SEQ ID NO: 4267276 - DNA, 25 bp, Homo sapien
gaagcaaccatatgaattcaggaca

SEQ ID NO: 4267277 - DNA, 25 bp, Homo sapien
gaaagtatagatggtcctaaaagac

SEQ ID NO: 4267278 - DNA, 25 bp, Homo sapien
taccatttcgagaactataggagcg

SEQ ID NO: 4267279 - DNA, 25 bp, Homo sapien
tgaacaagcactagatgcatcgctg

SEQ ID NO: 4267280 - DNA, 25 bp, Homo sapien
taagttctgcagacctaggaggcct

SEQ ID NO: 4267281 - DNA, 25 bp, Homo sapien
cacatctattgaggacttctgccac

SEQ ID NO: 4267282 - DNA, 25 bp, Homo sapien
gcgaactccttgagagccctctatg

SEQ ID NO: 4267283 - DNA, 25 bp, Homo sapien
taaaatcagtgcaaagcatgctcct

SEQ ID NO: 4267284 - DNA, 25 bp, Homo sapien
tcagatatgtaaagtgggaagcgct

SEQ ID NO: 4267285 - DNA, 25 bp, Homo sapien
acctccagaggacattattcaagca

SEQ ID NO: 4267286 - DNA, 25 bp, Homo sapien
tgattggctgatcccataacctgga

SEQ ID NO: 4267287 - DNA, 25 bp, Homo sapien
agacgacagtcgacttgattggctg

SEQ ID NO: 4267288 - DNA, 25 bp, Homo sapien
tcaggactcgcatggcactaacaga

SEQ ID NO: 4267289 - DNA, 25 bp, Homo sapien
tccacatcagaacctgtgttcagga

SEQ ID NO: 4267290 - DNA, 25 bp, Homo sapien
ccccatacacttcgggggcgtagag

SEQ ID NO: 4267291 - DNA, 25 bp, Homo sapien
tgaggccccatacacttcgggggcg

SEQ ID NO: 4267292 - DNA, 25 bp, Homo sapien
cgtagagggcaccagttgatctgga

SEQ ID NO: 4267293 - DNA, 25 bp, Homo sapien
cagttgatctggaatggtgtctgga

SEQ ID NO: 4267294 - DNA, 25 bp, Homo sapien
ctggaataacaggaccatacaaacc

SEQ ID NO: 4267295 - DNA, 25 bp, Homo sapien
aataacaggaccatacaaacctcat

SEQ ID NO: 4267296 - DNA, 25 bp, Homo sapien
tggaataacaggaccatacaaacct

SEQ ID NO: 4267297 - DNA, 25 bp, Homo sapien
ggaataacaggaccatacaaacctc

SEQ ID NO: 4267298 - DNA, 25 bp, Homo sapien
gaatagtggcagcactactgtcagg

SEQ ID NO: 4267299 - DNA, 25 bp, Homo sapien
ggaatagtggcagcactactgtcag

SEQ ID NO: 4267300 - DNA, 25 bp, Homo sapien
tcaggcaaggagagttagttaacac

SEQ ID NO: 4267301 - DNA, 25 bp, Homo sapien
ggagagttagttaacactggtgtta

SEQ ID NO: 4267302 - DNA, 25 bp, Homo sapien
aatatccagccataagcaacaaggg

SEQ ID NO: 4267303 - DNA, 25 bp, Homo sapien
aacaaacagggctaatctgctgcct

SEQ ID NO: 4267304 - DNA, 25 bp, Homo sapien
ttagggccctcaggctaaacttgtg

SEQ ID NO: 4267305 - DNA, 25 bp, Homo sapien
gaaactaaaggtgcaagttccagag

SEQ ID NO: 4267306 - DNA, 25 bp, Homo sapien
caccacgtatatgtgcatgcgcatg

SEQ ID NO: 4267307 - DNA, 25 bp, Homo sapien
cacaaacaagggttgggcatattcc

SEQ ID NO: 4267308 - DNA, 25 bp, Homo sapien
tagtatatttgagccaaatggccca

SEQ ID NO: 4267309 - DNA, 25 bp, Homo sapien
tatctctgacaaagtacctgccaca

SEQ ID NO: 4267310 - DNA, 25 bp, Homo sapien
taacatttccgctgaaaaagacaaa

SEQ ID NO: 4267311 - DNA, 25 bp, Homo sapien
tctgaagtttaaacctgtgtgacat

SEQ ID NO: 4267312 - DNA, 25 bp, Homo sapien
caaactagtccgcatttcacttgag

SEQ ID NO: 4267313 - DNA, 25 bp, Homo sapien
caagttttaccgcagtgacaagagc

SEQ ID NO: 4267314 - DNA, 25 bp, Homo sapien
ccttgactcacacttggtcgaggaa

SEQ ID NO: 4267315 - DNA, 25 bp, Homo sapien
tagcttcccggctgcatccttgact

SEQ ID NO: 4267316 - DNA, 25 bp, Homo sapien
tggtcgaggaatacgactgcttcgg

SEQ ID NO: 4267317 - DNA, 25 bp, Homo sapien
gctgaaaagagcgaacaggacttgt

SEQ ID NO: 4267318 - DNA, 25 bp, Homo sapien
cactgaaagcctagatggactagcc

SEQ ID NO: 4267319 - DNA, 25 bp, Homo sapien
tgctgaggctgaattgaccaggact

SEQ ID NO: 4267320 - DNA, 25 bp, Homo sapien
tggtcagaactcttcctggagaccc

SEQ ID NO: 4267321 - DNA, 25 bp, Homo sapien
gactctttgaacaccagagctcaca

SEQ ID NO: 4267322 - DNA, 25 bp, Homo sapien
ccaatggtattagcagattgtgatc

SEQ ID NO: 4267323 - DNA, 25 bp, Homo sapien
accaatggtattagcagattgtgat

SEQ ID NO: 4267324 - DNA, 25 bp, Homo sapien
caccaatggtattagcagattgtga

SEQ ID NO: 4267325 - DNA, 25 bp, Homo sapien
tattatcacactgctctattccagc

SEQ ID NO: 4267326 - DNA, 25 bp, Homo sapien
aacatgaatgaaacagaatcagtca

SEQ ID NO: 4267327 - DNA, 25 bp, Homo sapien
gcttccagtgaaagagcaaaaatgt

SEQ ID NO: 4267328 - DNA, 25 bp, Homo sapien
taattttagctagacctcaaaattg

SEQ ID NO: 4267329 - DNA, 25 bp, Homo sapien
tcatttttgtcaggtgatgatgaac

SEQ ID NO: 4267330 - DNA, 25 bp, Homo sapien
cttcatttttgtcaggtgatgatga

SEQ ID NO: 4267331 - DNA, 25 bp, Homo sapien
ttcatttttgtcaggtgatgatgaa

SEQ ID NO: 4267332 - DNA, 25 bp, Homo sapien
acaaatataggagggctgataagca

SEQ ID NO: 4267333 - DNA, 25 bp, Homo sapien
aatacaaaagcaacacacttatcct

SEQ ID NO: 4267334 - DNA, 25 bp, Homo sapien
gtgacaaatataggagggctgataa

SEQ ID NO: 4267335 - DNA, 25 bp, Homo sapien
tggtcaatcgtctaatacagtaata

SEQ ID NO: 4267336 - DNA, 25 bp, Homo sapien
cttggcatttcccatgccagcaagt

SEQ ID NO: 4267337 - DNA, 25 bp, Homo sapien
gattgagacaccatttttgttcgac

SEQ ID NO: 4267338 - DNA, 25 bp, Homo sapien
caccatttttgttcgacttcttcct

SEQ ID NO: 4267339 - DNA, 25 bp, Homo sapien
tgctgaaagttttgctctcacccgg

SEQ ID NO: 4267340 - DNA, 25 bp, Homo sapien
ccataagcatgtcacttgtttctca

SEQ ID NO: 4267341 - DNA, 25 bp, Homo sapien
tggtatatggacatgtttactgctc

SEQ ID NO: 4267342 - DNA, 25 bp, Homo sapien
aatgtacttctaaagggatctgaag

SEQ ID NO: 4267343 - DNA, 25 bp, Homo sapien
gtttatatattagtccagcagttac

SEQ ID NO: 4267344 - DNA, 25 bp, Homo sapien
tttatttatttcttgacacacaatc

SEQ ID NO: 4267345 - DNA, 25 bp, Homo sapien
cttgacacacaatcttgttctgttg

SEQ ID NO: 4267346 - DNA, 25 bp, Homo sapien
ggatttcaggtgtgaacccctatgc

SEQ ID NO: 4267347 - DNA, 25 bp, Homo sapien
tatttcttgacacacaatcttgttc

SEQ ID NO: 4267348 - DNA, 25 bp, Homo sapien
tctgggagacaaactttgaaagcct

SEQ ID NO: 4267349 - DNA, 25 bp, Homo sapien
tactgacttgccaccttaggataca

SEQ ID NO: 4267350 - DNA, 25 bp, Homo sapien
tgttagcacatgatcctgactctga

SEQ ID NO: 4267351 - DNA, 25 bp, Homo sapien
acaaatgtcagccatgagtgcccca

SEQ ID NO: 4267352 - DNA, 25 bp, Homo sapien
cagtgggcactacccttaacttttg

SEQ ID NO: 4267353 - DNA, 25 bp, Homo sapien
cttgaaaacagtgggcactaccctt

SEQ ID NO: 4267354 - DNA, 25 bp, Homo sapien
acattcttgaaaacagtgggcacta

SEQ ID NO: 4267355 - DNA, 25 bp, Homo sapien
ttcttgaaaacagtgggcactaccc

SEQ ID NO: 4267356 - DNA, 25 bp, Homo sapien
gtattgtgttctggcgatctgcctg

SEQ ID NO: 4267357 - DNA, 25 bp, Homo sapien
tgcttagtgttccagcagtactacc

SEQ ID NO: 4267358 - DNA, 25 bp, Homo sapien
tctgcctgcttagtgttccagcagt

SEQ ID NO: 4267359 - DNA, 25 bp, Homo sapien
cctgcttagtgttccagcagtacta

SEQ ID NO: 4267360 - DNA, 25 bp, Homo sapien
caaactgaatagagttttggaatat

SEQ ID NO: 4267361 - DNA, 25 bp, Homo sapien
atcaaactgaatagagttttggaat

SEQ ID NO: 4267362 - DNA, 25 bp, Homo sapien
tcaaactgaatagagttttggaata

SEQ ID NO: 4267363 - DNA, 25 bp, Homo sapien
ccagatctccaaaaggcttcacatt

SEQ ID NO: 4267364 - DNA, 25 bp, Homo sapien
ttagacagagtagagctttgcagtt

SEQ ID NO: 4267365 - DNA, 25 bp, Homo sapien
tcccagatctccaaaaggcttcaca

SEQ ID NO: 4267366 - DNA, 25 bp, Homo sapien
agacagagtagagctttgcagttct

SEQ ID NO: 4267367 - DNA, 25 bp, Homo sapien
gaaacaaggcagctcagattcctca

SEQ ID NO: 4267368 - DNA, 25 bp, Homo sapien
tcctcagaagtgtgtccgcaatata

SEQ ID NO: 4267369 - DNA, 25 bp, Homo sapien
tcttcacagagatcagggagagaac

SEQ ID NO: 4267370 - DNA, 25 bp, Homo sapien
ccccttagaaaccagtggctagatg

SEQ ID NO: 4267371 - DNA, 25 bp, Homo sapien
taagcgcccgcttcgcacagactgt

SEQ ID NO: 4267372 - DNA, 25 bp, Homo sapien
atgtcacttcgtgaacgctgcaggc

SEQ ID NO: 4267373 - DNA, 25 bp, Homo sapien
tgcagcagcattcacatcaatgtca

SEQ ID NO: 4267374 - DNA, 25 bp, Homo sapien
ttcgtgaacgctgcaggcttcctgg

SEQ ID NO: 4267375 - DNA, 25 bp, Homo sapien
taaaacgatcttttcactatggagc

SEQ ID NO: 4267376 - DNA, 25 bp, Homo sapien
tcaactgagtgcgtcatgagaagca

SEQ ID NO: 4267377 - DNA, 25 bp, Homo sapien
taagtatggcttcctggaacttcgg

SEQ ID NO: 4267378 - DNA, 25 bp, Homo sapien
tacaggtacagtgcatatgtgtggt

SEQ ID NO: 4267379 - DNA, 25 bp, Homo sapien
tcttccagccacagttgatggattt

SEQ ID NO: 4267380 - DNA, 25 bp, Homo sapien
tgatggatttgctgtagaccatttg

SEQ ID NO: 4267381 - DNA, 25 bp, Homo sapien
cagttgatggatttgctgtagacca

SEQ ID NO: 4267382 - DNA, 25 bp, Homo sapien
agttgatggatttgctgtagaccat

SEQ ID NO: 4267383 - DNA, 25 bp, Homo sapien
aagaagacaatttaacactcctctg

SEQ ID NO: 4267384 - DNA, 25 bp, Homo sapien
ttagtaagaagacaatttaacactc

SEQ ID NO: 4267385 - DNA, 25 bp, Homo sapien
aaaatgcttttagtaagaagacaat

SEQ ID NO: 4267386 - DNA, 25 bp, Homo sapien
cactcctctgataaaaaccaataaa

SEQ ID NO: 4267387 - DNA, 25 bp, Homo sapien
gcctagctggtacttccaatttgaa

SEQ ID NO: 4267388 - DNA, 25 bp, Homo sapien
tagaacagttcctcccaatcatcag

SEQ ID NO: 4267389 - DNA, 25 bp, Homo sapien
ctcaatctctcaagttacctgggac

SEQ ID NO: 4267390 - DNA, 25 bp, Homo sapien
gctacagtgtagtcccataatcatg

SEQ ID NO: 4267391 - DNA, 25 bp, Homo sapien
tgagctaccatgcctggcctaagct

SEQ ID NO: 4267392 - DNA, 25 bp, Homo sapien
ggtgatctgctcgccttagcctctc

SEQ ID NO: 4267393 - DNA, 25 bp, Homo sapien
aggtgatctgctcgccttagcctct

SEQ ID NO: 4267394 - DNA, 25 bp, Homo sapien
gctaccatgcctggcctaagctgac

SEQ ID NO: 4267395 - DNA, 25 bp, Homo sapien
gaagtggagaaggcatcagtaattt

SEQ ID NO: 4267396 - DNA, 25 bp, Homo sapien
cacagggcaagaggtcacgaagagg

SEQ ID NO: 4267397 - DNA, 25 bp, Homo sapien
aaatctgcagatacatggcacaggg

SEQ ID NO: 4267398 - DNA, 25 bp, Homo sapien
gggcaagaggtcacgaagagggaca

SEQ ID NO: 4267399 - DNA, 25 bp, Homo sapien
aaaacagggttatggctgctaagca

SEQ ID NO: 4267400 - DNA, 25 bp, Homo sapien
ggatttgaggtagccgtcatcaaga

SEQ ID NO: 4267401 - DNA, 25 bp, Homo sapien
tactagataatgttgtcccttgagg

SEQ ID NO: 4267402 - DNA, 25 bp, Homo sapien
aaaaatgtagtgcttcccaggcttc

SEQ ID NO: 4267403 - DNA, 25 bp, Homo sapien
gaagactcttctgataagatggctc

SEQ ID NO: 4267404 - DNA, 25 bp, Homo sapien
tgaggacctgtctgattgtggaaga

SEQ ID NO: 4267405 - DNA, 25 bp, Homo sapien
gagatgctacactgccagaactctt

SEQ ID NO: 4267406 - DNA, 25 bp, Homo sapien
gtggtttctaagacccatgtatgtc

SEQ ID NO: 4267407 - DNA, 25 bp, Homo sapien
ggcctcagcgtcagcatcatgaatt

SEQ ID NO: 4267408 - DNA, 25 bp, Homo sapien
ttaatagtttcaaccaagacggctg

SEQ ID NO: 4267409 - DNA, 25 bp, Homo sapien
actctggcctcagcgtcagcatcat

SEQ ID NO: 4267410 - DNA, 25 bp, Homo sapien
tagtttcaaccaagacggctgcatg

SEQ ID NO: 4267411 - DNA, 25 bp, Homo sapien
gagtctgccactcttgcaacaataa

SEQ ID NO: 4267412 - DNA, 25 bp, Homo sapien
aatgagtctgccactcttgcaacaa

SEQ ID NO: 4267413 - DNA, 25 bp, Homo sapien
tctgccactcttgcaacaataaatc

SEQ ID NO: 4267414 - DNA, 25 bp, Homo sapien
gccactcttgcaacaataaatctaa

SEQ ID NO: 4267415 - DNA, 25 bp, Homo sapien
ctcctcacgggaactgattttgatg

SEQ ID NO: 4267416 - DNA, 25 bp, Homo sapien
aaaggtataagtctgggtacatgag

SEQ ID NO: 4267417 - DNA, 25 bp, Homo sapien
gatgtgcaattgcttgttattaaag

SEQ ID NO: 4267418 - DNA, 25 bp, Homo sapien
tcctcacgggaactgattttgatgt

SEQ ID NO: 4267419 - DNA, 25 bp, Homo sapien
aaccattgctacatcatactcaggg

SEQ ID NO: 4267420 - DNA, 25 bp, Homo sapien
ctaaccattgctacatcatactcag

SEQ ID NO: 4267421 - DNA, 25 bp, Homo sapien
ccattgctacatcatactcaggggg

SEQ ID NO: 4267422 - DNA, 25 bp, Homo sapien
attgctacatcatactcagggggag

SEQ ID NO: 4267423 - DNA, 25 bp, Homo sapien
agtgacagtataccaataaatgggt

SEQ ID NO: 4267424 - DNA, 25 bp, Homo sapien
gtgacagtataccaataaatgggtc

SEQ ID NO: 4267425 - DNA, 25 bp, Homo sapien
cagtataccaataaatgggtcagaa

SEQ ID NO: 4267426 - DNA, 25 bp, Homo sapien
gacagtataccaataaatgggtcag

SEQ ID NO: 4267427 - DNA, 25 bp, Homo sapien
gcacaacgaacaggaaacaaaatat

SEQ ID NO: 4267428 - DNA, 25 bp, Homo sapien
tgaacaaagtactcaattctatgcc

SEQ ID NO: 4267429 - DNA, 25 bp, Homo sapien
cagagaggagcataacaaaggtttt

SEQ ID NO: 4267430 - DNA, 25 bp, Homo sapien
gataaccaactacctatataaagtg

SEQ ID NO: 4267431 - DNA, 25 bp, Homo sapien
ttaacaggaaaggacaaactgatca

SEQ ID NO: 4267432 - DNA, 25 bp, Homo sapien
aggaaaggacaaactgatcaaggaa

SEQ ID NO: 4267433 - DNA, 25 bp, Homo sapien
acaggaaaggacaaactgatcaagg

SEQ ID NO: 4267434 - DNA, 25 bp, Homo sapien
tcctgggaaagtaatattaggaata

SEQ ID NO: 4267435 - DNA, 25 bp, Homo sapien
cacatccagaagttgccatgacttt

SEQ ID NO: 4267436 - DNA, 25 bp, Homo sapien
taaaaagtgtaggtacaatggcttc

SEQ ID NO: 4267437 - DNA, 25 bp, Homo sapien
cttttgcactattggggacgagatt

SEQ ID NO: 4267438 - DNA, 25 bp, Homo sapien
ggtacaatggcttcagcgccatgat

SEQ ID NO: 4267439 - DNA, 25 bp, Homo sapien
taaccacctgggatctaagatcctt

SEQ ID NO: 4267440 - DNA, 25 bp, Homo sapien
taagtgctccatccaacaatcgtaa

SEQ ID NO: 4267441 - DNA, 25 bp, Homo sapien
ctccagcaacaagcagtgatcgaat

SEQ ID NO: 4267442 - DNA, 25 bp, Homo sapien
aaagcaatcatactgtgcagctcca

SEQ ID NO: 4267443 - DNA, 25 bp, Homo sapien
tcccaggtttgagtggttttcgtgc

SEQ ID NO: 4267444 - DNA, 25 bp, Homo sapien
ccaggtttgagtggttttcgtgcct

SEQ ID NO: 4267445 - DNA, 25 bp, Homo sapien
ccactgcagctccactgcaacttgc

SEQ ID NO: 4267446 - DNA, 25 bp, Homo sapien
actgcagctccactgcaacttgcac

SEQ ID NO: 4267447 - DNA, 25 bp, Homo sapien
agtagtttccccttacctgcaagag

SEQ ID NO: 4267448 - DNA, 25 bp, Homo sapien
tgcaagagatatgtaccaagacccc

SEQ ID NO: 4267449 - DNA, 25 bp, Homo sapien
tggtaggataaaattacctgcaacg

SEQ ID NO: 4267450 - DNA, 25 bp, Homo sapien
tataagatgatacacaaagaacgac

SEQ ID NO: 4267451 - DNA, 25 bp, Homo sapien
tctgagcaactatttattatgtgcc

SEQ ID NO: 4267452 - DNA, 25 bp, Homo sapien
tatgtgcctgacatctataccaggt

SEQ ID NO: 4267453 - DNA, 25 bp, Homo sapien
tgtacatattaacctgcactcaata

SEQ ID NO: 4267454 - DNA, 25 bp, Homo sapien
tattacactaaggaatatatgtaca

SEQ ID NO: 4267455 - DNA, 25 bp, Homo sapien
gatatgtagacttcctaacaaagac

SEQ ID NO: 4267456 - DNA, 25 bp, Homo sapien
gaggaatactctctgttaaaaacag

SEQ ID NO: 4267457 - DNA, 25 bp, Homo sapien
gtcatgtttctctacagatcacctg

SEQ ID NO: 4267458 - DNA, 25 bp, Homo sapien
ctcagaattgaagaataggagccat

SEQ ID NO: 4267459 - DNA, 25 bp, Homo sapien
aagtccacagaaaggctaaagccct

SEQ ID NO: 4267460 - DNA, 25 bp, Homo sapien
ttcttaactcaagggtatctgacct

SEQ ID NO: 4267461 - DNA, 25 bp, Homo sapien
ccttatatgacttgaggatagtgct

SEQ ID NO: 4267462 - DNA, 25 bp, Homo sapien
gccagattgggacctctcaaagcag

SEQ ID NO: 4267463 - DNA, 25 bp, Homo sapien
ggctaccaaatgtgtaggataggca

SEQ ID NO: 4267464 - DNA, 25 bp, Homo sapien
tatttaatgtttcttcgagttctcg

SEQ ID NO: 4267465 - DNA, 25 bp, Homo sapien
gctgatcccagtcatgtttatcatc

SEQ ID NO: 4267466 - DNA, 25 bp, Homo sapien
cttcgagttctcgactagaataaat

SEQ ID NO: 4267467 - DNA, 25 bp, Homo sapien
tgcattggcacgctgatcccagtca

SEQ ID NO: 4267468 - DNA, 25 bp, Homo sapien
gaatagaagggacatctgtaaaagc

SEQ ID NO: 4267469 - DNA, 25 bp, Homo sapien
atcatcttcatcaactgctccagca

SEQ ID NO: 4267470 - DNA, 25 bp, Homo sapien
aaatcatcttcatcaactgctccag

SEQ ID NO: 4267471 - DNA, 25 bp, Homo sapien
ctgaatagaagggacatctgtaaaa

SEQ ID NO: 4267472 - DNA, 25 bp, Homo sapien
tcttcttcagtaagggaagaagaga

SEQ ID NO: 4267473 - DNA, 25 bp, Homo sapien
gtatcttcttcagtaagggaagaag

SEQ ID NO: 4267474 - DNA, 25 bp, Homo sapien
accaaaacacagaagtgttacttgg

SEQ ID NO: 4267475 - DNA, 25 bp, Homo sapien
aaccaaaacacagaagtgttacttg

SEQ ID NO: 4267476 - DNA, 25 bp, Homo sapien
gctcatggcaacctaggcattattt

SEQ ID NO: 4267477 - DNA, 25 bp, Homo sapien
cgatccagcgaactttagaaattta

SEQ ID NO: 4267478 - DNA, 25 bp, Homo sapien
aatccctgaatctttcgatccagcg

SEQ ID NO: 4267479 - DNA, 25 bp, Homo sapien
gagactgaatcaccaccattcaatg

SEQ ID NO: 4267480 - DNA, 25 bp, Homo sapien
tccggatgttttaggtgcaggaacc

SEQ ID NO: 4267481 - DNA, 25 bp, Homo sapien
caggaaccttgaaggctgatgcagc

SEQ ID NO: 4267482 - DNA, 25 bp, Homo sapien
tgttggcaggatttccggatgtttt

SEQ ID NO: 4267483 - DNA, 25 bp, Homo sapien
tgattcttcatcatcgaagctttta

SEQ ID NO: 4267484 - DNA, 25 bp, Homo sapien
gaaataaaggtcctttgaataagca

SEQ ID NO: 4267485 - DNA, 25 bp, Homo sapien
tcccatagtgtatcttctagcacgc

SEQ ID NO: 4267486 - DNA, 25 bp, Homo sapien
tatattggctaacaccatataaaat

SEQ ID NO: 4267487 - DNA, 25 bp, Homo sapien
aataatcctctgtaattcaaaatca

SEQ ID NO: 4267488 - DNA, 25 bp, Homo sapien
cacagatccgtttgcaaatcagtcg

SEQ ID NO: 4267489 - DNA, 25 bp, Homo sapien
cagatccgtttgcaaatcagtcgcc

SEQ ID NO: 4267490 - DNA, 25 bp, Homo sapien
tccgtttgcaaatcagtcgcctcat

SEQ ID NO: 4267491 - DNA, 25 bp, Homo sapien
aatcacagatccgtttgcaaatcag

SEQ ID NO: 4267492 - DNA, 25 bp, Homo sapien
cagtaaattcgatactaatcaaaga

SEQ ID NO: 4267493 - DNA, 25 bp, Homo sapien
caatagttcacatggccaaatacag

SEQ ID NO: 4267494 - DNA, 25 bp, Homo sapien
aagctcttaatttccctcaccctag

SEQ ID NO: 4267495 - DNA, 25 bp, Homo sapien
ctcaccctaggaggctcccaatagt

SEQ ID NO: 4267496 - DNA, 25 bp, Homo sapien
aataacgtcaccatctactcagctg

SEQ ID NO: 4267497 - DNA, 25 bp, Homo sapien
taaacccactgctcaatattaggat

SEQ ID NO: 4267498 - DNA, 25 bp, Homo sapien
taaggccagaccagtattgtctctg

SEQ ID NO: 4267499 - DNA, 25 bp, Homo sapien
ccacagagatcgtctaccaacagtt

SEQ ID NO: 4267500 - DNA, 25 bp, Homo sapien
tatgtaaaggcacagtaacaggtag

SEQ ID NO: 4267501 - DNA, 25 bp, Homo sapien
tactgagtaaacacagcaaatggca

SEQ ID NO: 4267502 - DNA, 25 bp, Homo sapien
tcctctgtttacacctgggctcggg

SEQ ID NO: 4267503 - DNA, 25 bp, Homo sapien
cacatgtagtttgtacaaaggtgct

SEQ ID NO: 4267504 - DNA, 25 bp, Homo sapien
gaaaccaagaggtcaaatagcacag

SEQ ID NO: 4267505 - DNA, 25 bp, Homo sapien
tgaaaccaagaggtcaaatagcaca

SEQ ID NO: 4267506 - DNA, 25 bp, Homo sapien
aaaccaagaggtcaaatagcacagc

SEQ ID NO: 4267507 - DNA, 25 bp, Homo sapien
ctgaaaccaagaggtcaaatagcac

SEQ ID NO: 4267508 - DNA, 25 bp, Homo sapien
acacccggagcactgtgtgacccag

SEQ ID NO: 4267509 - DNA, 25 bp, Homo sapien
tgcagctctgcaccgcaatagccaa

SEQ ID NO: 4267510 - DNA, 25 bp, Homo sapien
gcagacacccggagcactgtgtgac

SEQ ID NO: 4267511 - DNA, 25 bp, Homo sapien
caacagctgctactccacttcaaaa

SEQ ID NO: 4267512 - DNA, 25 bp, Homo sapien
tggattaactgatttgcgccttttt

SEQ ID NO: 4267513 - DNA, 25 bp, Homo sapien
gattaactgatttgcgcctttttaa

SEQ ID NO: 4267514 - DNA, 25 bp, Homo sapien
ggattaactgatttgcgccttttta

SEQ ID NO: 4267515 - DNA, 25 bp, Homo sapien
gatataatagaacccatcaacccca

SEQ ID NO: 4267516 - DNA, 25 bp, Homo sapien
atcaaccccacaatttctattaaag

SEQ ID NO: 4267517 - DNA, 25 bp, Homo sapien
ctcttgatcagttatagtctcttga

SEQ ID NO: 4267518 - DNA, 25 bp, Homo sapien
ttcctgtgtatgagtctcttgatca

SEQ ID NO: 4267519 - DNA, 25 bp, Homo sapien
gacactcaaaatcataccgcctgaa

SEQ ID NO: 4267520 - DNA, 25 bp, Homo sapien
gcagacactcaaaatcataccgcct

SEQ ID NO: 4267521 - DNA, 25 bp, Homo sapien
ctcaaaatcataccgcctgaacttt

SEQ ID NO: 4267522 - DNA, 25 bp, Homo sapien
ttgcagacactcaaaatcataccgc

SEQ ID NO: 4267523 - DNA, 25 bp, Homo sapien
ggaatccaccttacaagggacgtga

SEQ ID NO: 4267524 - DNA, 25 bp, Homo sapien
actgctcaatgaaattaaagaggat

SEQ ID NO: 4267525 - DNA, 25 bp, Homo sapien
tccaccttacaagggacgtgaagga

SEQ ID NO: 4267526 - DNA, 25 bp, Homo sapien
caatgaaattaaagaggatacaaac

SEQ ID NO: 4267527 - DNA, 25 bp, Homo sapien
tacatatgttaacatcacttctttc

SEQ ID NO: 4267528 - DNA, 25 bp, Homo sapien
atccataaaatgatgtagaatttac

SEQ ID NO: 4267529 - DNA, 25 bp, Homo sapien
cacaaatacatatgttaacatcact

SEQ ID NO: 4267530 - DNA, 25 bp, Homo sapien
tcatccataaaatgatgtagaattt

SEQ ID NO: 4267531 - DNA, 25 bp, Homo sapien
tgtatagcccctgaatcatgagcca

SEQ ID NO: 4267532 - DNA, 25 bp, Homo sapien
gaaatctgatctctaacgttggagg

SEQ ID NO: 4267533 - DNA, 25 bp, Homo sapien
caaacaactgctgctaagagagaca

SEQ ID NO: 4267534 - DNA, 25 bp, Homo sapien
cctagcaaatgctggcacggtgctt

SEQ ID NO: 4267535 - DNA, 25 bp, Homo sapien
ccacctggtatcaaaggatgattac

SEQ ID NO: 4267536 - DNA, 25 bp, Homo sapien
aattgtatggtacctttcaacagta

SEQ ID NO: 4267537 - DNA, 25 bp, Homo sapien
ggatgattacttgataatggtacat

SEQ ID NO: 4267538 - DNA, 25 bp, Homo sapien
tttttagtaaatccttgctcaagca

SEQ ID NO: 4267539 - DNA, 25 bp, Homo sapien
gcagggggaattcctctcttataaa

SEQ ID NO: 4267540 - DNA, 25 bp, Homo sapien
ataaatctccactatagccaatatt

SEQ ID NO: 4267541 - DNA, 25 bp, Homo sapien
atctccactatagccaatattgcag

SEQ ID NO: 4267542 - DNA, 25 bp, Homo sapien
tagcagggggaattcctctcttata

SEQ ID NO: 4267543 - DNA, 25 bp, Homo sapien
ggtatcaatttgctgatgactagtg

SEQ ID NO: 4267544 - DNA, 25 bp, Homo sapien
tccaaacaggatacacaaatgtggt

SEQ ID NO: 4267545 - DNA, 25 bp, Homo sapien
tgttggagtctccaaacaggataca

SEQ ID NO: 4267546 - DNA, 25 bp, Homo sapien
gatgactagtggctgagccccaaaa

SEQ ID NO: 4267547 - DNA, 25 bp, Homo sapien
gccttctcgagatcgaaaattcttg

SEQ ID NO: 4267548 - DNA, 25 bp, Homo sapien
acagacacacgccttctcgagatcg

SEQ ID NO: 4267549 - DNA, 25 bp, Homo sapien
tctcgagatcgaaaattcttgtgtt

SEQ ID NO: 4267550 - DNA, 25 bp, Homo sapien
gacacacgccttctcgagatcgaaa

SEQ ID NO: 4267551 - DNA, 25 bp, Homo sapien
tttcctgtgattaccattagcaaaa

SEQ ID NO: 4267552 - DNA, 25 bp, Homo sapien
tgatttcctgtgattaccattagca

SEQ ID NO: 4267553 - DNA, 25 bp, Homo sapien
gatttcctgtgattaccattagcaa

SEQ ID NO: 4267554 - DNA, 25 bp, Homo sapien
atttcctgtgattaccattagcaaa

SEQ ID NO: 4267555 - DNA, 25 bp, Homo sapien
ggcatctcccattctgtctattaaa

SEQ ID NO: 4267556 - DNA, 25 bp, Homo sapien
cattaacttcaatatcagagtctga

SEQ ID NO: 4267557 - DNA, 25 bp, Homo sapien
tctcgaaccttgtctttggcatctc

SEQ ID NO: 4267558 - DNA, 25 bp, Homo sapien
cataggtggtgctacttgatccatt

SEQ ID NO: 4267559 - DNA, 25 bp, Homo sapien
ccattgctacataggatttaaagcg

SEQ ID NO: 4267560 - DNA, 25 bp, Homo sapien
cataggatttaaagcgtgttgataa

SEQ ID NO: 4267561 - DNA, 25 bp, Homo sapien
aagcgtgttgataatctgtccacaa

SEQ ID NO: 4267562 - DNA, 25 bp, Homo sapien
aaatttccaatcccattaatgatac

SEQ ID NO: 4267563 - DNA, 25 bp, Homo sapien
gcactccagctggcaacaaagcaag

SEQ ID NO: 4267564 - DNA, 25 bp, Homo sapien
tcactgcactccagctggcaacaaa

SEQ ID NO: 4267565 - DNA, 25 bp, Homo sapien
actgcactccagctggcaacaaagc

SEQ ID NO: 4267566 - DNA, 25 bp, Homo sapien
tgcactccagctggcaacaaagcaa

SEQ ID NO: 4267567 - DNA, 25 bp, Homo sapien
cagcgcagtatagcattttatcaaa

SEQ ID NO: 4267568 - DNA, 25 bp, Homo sapien
agaatgaatgtaaggactaatatcc

SEQ ID NO: 4267569 - DNA, 25 bp, Homo sapien
ccaccatgctcagcgcagtatagca

SEQ ID NO: 4267570 - DNA, 25 bp, Homo sapien
cattttatcaaataaggaccataaa

SEQ ID NO: 4267571 - DNA, 25 bp, Homo sapien
aaagggctgccgcggagggcgtgac

SEQ ID NO: 4267572 - DNA, 25 bp, Homo sapien
ttaaagggctgccgcggagggcgtg

SEQ ID NO: 4267573 - DNA, 25 bp, Homo sapien
taaagggctgccgcggagggcgtga

SEQ ID NO: 4267574 - DNA, 25 bp, Homo sapien
agcccagcctcgccgccgtcgctta

SEQ ID NO: 4267575 - DNA, 25 bp, Homo sapien
gcccagcctcgccgccgtcgcttac

SEQ ID NO: 4267576 - DNA, 25 bp, Homo sapien
cagcccagcctcgccgccgtcgctt

SEQ ID NO: 4267577 - DNA, 25 bp, Homo sapien
acccagccggtgagcgcgtcgactg

SEQ ID NO: 4267578 - DNA, 25 bp, Homo sapien
tcctccaggtccgagatggcgccgg

SEQ ID NO: 4267579 - DNA, 25 bp, Homo sapien
actgtcttgcctaggcggcccaggt

SEQ ID NO: 4267580 - DNA, 25 bp, Homo sapien
gcacctgggcgcagaagtactccat

SEQ ID NO: 4267581 - DNA, 25 bp, Homo sapien
gaaaccgctgggagcgataggacct

SEQ ID NO: 4267582 - DNA, 25 bp, Homo sapien
tgccctcgccctgtgaaatgtggaa

SEQ ID NO: 4267583 - DNA, 25 bp, Homo sapien
gccgttctttgctagccgctgtcag

SEQ ID NO: 4267584 - DNA, 25 bp, Homo sapien
caaatgtattcacccgtggaaccgc

SEQ ID NO: 4267585 - DNA, 25 bp, Homo sapien
ttgcataaatactgagtgactgagg

SEQ ID NO: 4267586 - DNA, 25 bp, Homo sapien
gctgacctgatgtagtgccctttgg

SEQ ID NO: 4267587 - DNA, 25 bp, Homo sapien
cagtatgtggattgacattcagtcc

SEQ ID NO: 4267588 - DNA, 25 bp, Homo sapien
cagtattaagtcaaggtcaattagc

SEQ ID NO: 4267589 - DNA, 25 bp, Homo sapien
gaagtgccagaaacacaaggggtca

SEQ ID NO: 4267590 - DNA, 25 bp, Homo sapien
gccaggtcgtggaatcctgttctca

SEQ ID NO: 4267591 - DNA, 25 bp, Homo sapien
gggtcattggcagaatttgagtcca

SEQ ID NO: 4267592 - DNA, 25 bp, Homo sapien
tgggcagtaacaaaggccaggtcgt

SEQ ID NO: 4267593 - DNA, 25 bp, Homo sapien
caacagaaaccacagtgtgcccagc

SEQ ID NO: 4267594 - DNA, 25 bp, Homo sapien
catccaacagaaaccacagtgtgcc

SEQ ID NO: 4267595 - DNA, 25 bp, Homo sapien
gtctgcagccaacacatccaacaga

SEQ ID NO: 4267596 - DNA, 25 bp, Homo sapien
tggagccagtctgcagccaacacat

SEQ ID NO: 4267597 - DNA, 25 bp, Homo sapien
aagtgtctatagtcaatcttcacat

SEQ ID NO: 4267598 - DNA, 25 bp, Homo sapien
tgccagtttggttggttataggatt

SEQ ID NO: 4267599 - DNA, 25 bp, Homo sapien
cacattgccagtttggttggttata

SEQ ID NO: 4267600 - DNA, 25 bp, Homo sapien
gtcaatcttcacattgccagtttgg

SEQ ID NO: 4267601 - DNA, 25 bp, Homo sapien
acatctggacagagtccccaggata

SEQ ID NO: 4267602 - DNA, 25 bp, Homo sapien
atctggacagagtccccaggatagg

SEQ ID NO: 4267603 - DNA, 25 bp, Homo sapien
catctggacagagtccccaggatag

SEQ ID NO: 4267604 - DNA, 25 bp, Homo sapien
cttgtgagtcatcaatgaacttctt

SEQ ID NO: 4267605 - DNA, 25 bp, Homo sapien
ctgcaggggactgctgaatcaccat

SEQ ID NO: 4267606 - DNA, 25 bp, Homo sapien
tcatcaatgaacttctttgctctcc

SEQ ID NO: 4267607 - DNA, 25 bp, Homo sapien
tcctgactgtgctgcaggggactgc

SEQ ID NO: 4267608 - DNA, 25 bp, Homo sapien
cagcaggcaagacggtacacatgga

SEQ ID NO: 4267609 - DNA, 25 bp, Homo sapien
gcaaaactctatgctgtggctgaaa

SEQ ID NO: 4267610 - DNA, 25 bp, Homo sapien
aagtgcagtaagagaggacaaaccc

SEQ ID NO: 4267611 - DNA, 25 bp, Homo sapien
ttagggctaggagagtgactcaacc

SEQ ID NO: 4267612 - DNA, 25 bp, Homo sapien
catttaatgtatggttataaatatt

SEQ ID NO: 4267613 - DNA, 25 bp, Homo sapien
taatgtatgcctaagggaaaaccga

SEQ ID NO: 4267614 - DNA, 25 bp, Homo sapien
tactactctctgctactaagtcttg

SEQ ID NO: 4267615 - DNA, 25 bp, Homo sapien
tattacagtgttccacacgttcaga

SEQ ID NO: 4267616 - DNA, 25 bp, Homo sapien
cgaattaacaacgatagtcagggtg

SEQ ID NO: 4267617 - DNA, 25 bp, Homo sapien
gaatgcctgctataccaagtgctag

SEQ ID NO: 4267618 - DNA, 25 bp, Homo sapien
taaaaagaccattgtgactcagtgg

SEQ ID NO: 4267619 - DNA, 25 bp, Homo sapien
gaaaacattctaggtcacatgaggc

SEQ ID NO: 4267620 - DNA, 25 bp, Homo sapien
taatggctgcgctagaggttaacaa

SEQ ID NO: 4267621 - DNA, 25 bp, Homo sapien
gatctgtctagttacttcctctggc

SEQ ID NO: 4267622 - DNA, 25 bp, Homo sapien
gacagtctgttcaaaccaggatcca

SEQ ID NO: 4267623 - DNA, 25 bp, Homo sapien
tgcctggaatataccatgatgatac

SEQ ID NO: 4267624 - DNA, 25 bp, Homo sapien
tatccgattgagctacaacgtggcc

SEQ ID NO: 4267625 - DNA, 25 bp, Homo sapien
ggtttggaggctctcctttgccact

SEQ ID NO: 4267626 - DNA, 25 bp, Homo sapien
tttggaggctctcctttgccactcc

SEQ ID NO: 4267627 - DNA, 25 bp, Homo sapien
ttggaggctctcctttgccactcca

SEQ ID NO: 4267628 - DNA, 25 bp, Homo sapien
ggaggctctcctttgccactccacc

SEQ ID NO: 4267629 - DNA, 25 bp, Homo sapien
gaaagtgctcagtacaccactgcgg

SEQ ID NO: 4267630 - DNA, 25 bp, Homo sapien
gcagtgacaccagtacttctccggg

SEQ ID NO: 4267631 - DNA, 25 bp, Homo sapien
gcaagtctgtcagccagtcagtccg

SEQ ID NO: 4267632 - DNA, 25 bp, Homo sapien
caaactctcgcaggtggcagtgaca

SEQ ID NO: 4267633 - DNA, 25 bp, Homo sapien
cagggataaaaaattgggctgctaa

SEQ ID NO: 4267634 - DNA, 25 bp, Homo sapien
caaatcaaggcattgtgtagttctg

SEQ ID NO: 4267635 - DNA, 25 bp, Homo sapien
gatgagccttaaagcgcaaaaacag

SEQ ID NO: 4267636 - DNA, 25 bp, Homo sapien
gaatcattggtgatttggtacaagc

SEQ ID NO: 4267637 - DNA, 25 bp, Homo sapien
agttttagataaagctgtgcaggca

SEQ ID NO: 4267638 - DNA, 25 bp, Homo sapien
taaaaacgagaacgcaaagactgtc

SEQ ID NO: 4267639 - DNA, 25 bp, Homo sapien
gaatgttaccagtctcatcgtgaca

SEQ ID NO: 4267640 - DNA, 25 bp, Homo sapien
gcttttgtgtaagccagagcctgag

SEQ ID NO: 4267641 - DNA, 25 bp, Homo sapien
taatttaatgacctatcacagggag

SEQ ID NO: 4267642 - DNA, 25 bp, Homo sapien
ttagtaggaaaagatagaggtccca

SEQ ID NO: 4267643 - DNA, 25 bp, Homo sapien
acaggaaaacaagcgaaagggcaag

SEQ ID NO: 4267644 - DNA, 25 bp, Homo sapien
gaggtcccaaatctctgcacaggaa

SEQ ID NO: 4267645 - DNA, 25 bp, Homo sapien
catggttgggacatcagatacttac

SEQ ID NO: 4267646 - DNA, 25 bp, Homo sapien
tataatccttatgcgtatggccagt

SEQ ID NO: 4267647 - DNA, 25 bp, Homo sapien
tctatcaggtattgccaaatgccca

SEQ ID NO: 4267648 - DNA, 25 bp, Homo sapien
taatgtactctcctggactgaatgc

SEQ ID NO: 4267649 - DNA, 25 bp, Homo sapien
gattcatcaaagtgtgacatgggct

SEQ ID NO: 4267650 - DNA, 25 bp, Homo sapien
cattaggcatatgagcagatttcca

SEQ ID NO: 4267651 - DNA, 25 bp, Homo sapien
cttttagcccattccccatgctggg

SEQ ID NO: 4267652 - DNA, 25 bp, Homo sapien
tattttctgagtttcaacgctgacc

SEQ ID NO: 4267653 - DNA, 25 bp, Homo sapien
cacaccagagattttagattctttt

SEQ ID NO: 4267654 - DNA, 25 bp, Homo sapien
tatattatcacaccagagattttag

SEQ ID NO: 4267655 - DNA, 25 bp, Homo sapien
cattgctggtagttggattatattt

SEQ ID NO: 4267656 - DNA, 25 bp, Homo sapien
attcttttctggttagaaacattgc

SEQ ID NO: 4267657 - DNA, 25 bp, Homo sapien
ttttccttagtgaaagcagctgcag

SEQ ID NO: 4267658 - DNA, 25 bp, Homo sapien
tttccttagtgaaagcagctgcagt

SEQ ID NO: 4267659 - DNA, 25 bp, Homo sapien
attttccttagtgaaagcagctgca

SEQ ID NO: 4267660 - DNA, 25 bp, Homo sapien
ggcaatgcagggtcactgacaggta

SEQ ID NO: 4267661 - DNA, 25 bp, Homo sapien
caatgcagggtcactgacaggtaca

SEQ ID NO: 4267662 - DNA, 25 bp, Homo sapien
gcagggtcactgacaggtacacatt

SEQ ID NO: 4267663 - DNA, 25 bp, Homo sapien
aatgcagggtcactgacaggtacac

SEQ ID NO: 4267664 - DNA, 25 bp, Homo sapien
caggctgtttgactccttgcagtaa

SEQ ID NO: 4267665 - DNA, 25 bp, Homo sapien
aatggtaaagtcatctggttccggg

SEQ ID NO: 4267666 - DNA, 25 bp, Homo sapien
cttgcagtaagtacttttctaatgc

SEQ ID NO: 4267667 - DNA, 25 bp, Homo sapien
ggtgctgaagacaggggccccatcc

SEQ ID NO: 4267668 - DNA, 25 bp, Homo sapien
ttcccctccgtctttgtcaggcatt

SEQ ID NO: 4267669 - DNA, 25 bp, Homo sapien
ttcccgtaaaatgctcctaattctg

SEQ ID NO: 4267670 - DNA, 25 bp, Homo sapien
gcattccatctgttgaatcttcaag

SEQ ID NO: 4267671 - DNA, 25 bp, Homo sapien
gttgaatcttcaaggagcaagccct

SEQ ID NO: 4267672 - DNA, 25 bp, Homo sapien
tcaggcctaccacccagagtctttt

SEQ ID NO: 4267673 - DNA, 25 bp, Homo sapien
cacttaggtggcttctggtgttcag

SEQ ID NO: 4267674 - DNA, 25 bp, Homo sapien
tttgaattaatgaccgaggagagcc

SEQ ID NO: 4267675 - DNA, 25 bp, Homo sapien
cacaacagtcctgatggagacagtt

SEQ ID NO: 4267676 - DNA, 25 bp, Homo sapien
tgcagagcctcttacttcttcaggg

SEQ ID NO: 4267677 - DNA, 25 bp, Homo sapien
gcagagcctcttacttcttcagggc

SEQ ID NO: 4267678 - DNA, 25 bp, Homo sapien
agagcctcttacttcttcagggctt

SEQ ID NO: 4267679 - DNA, 25 bp, Homo sapien
ctgcagagcctcttacttcttcagg

SEQ ID NO: 4267680 - DNA, 25 bp, Homo sapien
catggagtcgggaaaggctccaact

SEQ ID NO: 4267681 - DNA, 25 bp, Homo sapien
ccatggagtcgggaaaggctccaac

SEQ ID NO: 4267682 - DNA, 25 bp, Homo sapien
tggagtattaagcacggcagccatg

SEQ ID NO: 4267683 - DNA, 25 bp, Homo sapien
agaaccatggagtattaagcacggc

SEQ ID NO: 4267684 - DNA, 25 bp, Homo sapien
acttcagcagctttatgccgggcta

SEQ ID NO: 4267685 - DNA, 25 bp, Homo sapien
agaagacccttgcaatatttttcag

SEQ ID NO: 4267686 - DNA, 25 bp, Homo sapien
gctgcatccagaagacccttgcaat

SEQ ID NO: 4267687 - DNA, 25 bp, Homo sapien
taggctacaacctgaatttattcca

SEQ ID NO: 4267688 - DNA, 25 bp, Homo sapien
ctacaggtgggaaagagtataccac

SEQ ID NO: 4267689 - DNA, 25 bp, Homo sapien
ctgacctagcccttcgttgcatggg

SEQ ID NO: 4267690 - DNA, 25 bp, Homo sapien
caggtgggaaagagtataccacctg

SEQ ID NO: 4267691 - DNA, 25 bp, Homo sapien
ggtgggaaagagtataccacctgga

SEQ ID NO: 4267692 - DNA, 25 bp, Homo sapien
gttattacctcgtctgctcctcaca

SEQ ID NO: 4267693 - DNA, 25 bp, Homo sapien
gaacaatttacgactgaggaggcag

SEQ ID NO: 4267694 - DNA, 25 bp, Homo sapien
aaaggcagcagcagttattacctcg

SEQ ID NO: 4267695 - DNA, 25 bp, Homo sapien
ccccatgggttatcagttgttgcat

SEQ ID NO: 4267696 - DNA, 25 bp, Homo sapien
cggtcagttggtcattattgtcccc

SEQ ID NO: 4267697 - DNA, 25 bp, Homo sapien
caagctgtctgcaacagggttgtcc

SEQ ID NO: 4267698 - DNA, 25 bp, Homo sapien
ctacattgtaagtggtggagtcgga

SEQ ID NO: 4267699 - DNA, 25 bp, Homo sapien
gctccaggtgcaagtacttaaaaca

SEQ ID NO: 4267700 - DNA, 25 bp, Homo sapien
atcacagtcctcttgtgtccagctg

SEQ ID NO: 4267701 - DNA, 25 bp, Homo sapien
tggatcacagtcctcttgtgtccag

SEQ ID NO: 4267702 - DNA, 25 bp, Homo sapien
taaagacttggaggtgaagtgcttg

SEQ ID NO: 4267703 - DNA, 25 bp, Homo sapien
gtgcttggatcacagtcctcttgtg

SEQ ID NO: 4267704 - DNA, 25 bp, Homo sapien
tgatgaatgccctcaaggaacgcag

SEQ ID NO: 4267705 - DNA, 25 bp, Homo sapien
ctgatgaatgccctcaaggaacgca

SEQ ID NO: 4267706 - DNA, 25 bp, Homo sapien
attctgatgaatgccctcaaggaac

SEQ ID NO: 4267707 - DNA, 25 bp, Homo sapien
tctgatgaatgccctcaaggaacgc

SEQ ID NO: 4267708 - DNA, 25 bp, Homo sapien
tagagtggaatggtgagatcccggc

SEQ ID NO: 4267709 - DNA, 25 bp, Homo sapien
aaatagctggattgaactacattct

SEQ ID NO: 4267710 - DNA, 25 bp, Homo sapien
cccagaaattggctccttccacttg

SEQ ID NO: 4267711 - DNA, 25 bp, Homo sapien
aaaaatagctggattgaactacatt

SEQ ID NO: 4267712 - DNA, 25 bp, Homo sapien
ttttgacaccgaagctcattaagaa

SEQ ID NO: 4267713 - DNA, 25 bp, Homo sapien
ttgggccctgctcccatgacgcttg

SEQ ID NO: 4267714 - DNA, 25 bp, Homo sapien
tcccatgacgcttgctttttgacac

SEQ ID NO: 4267715 - DNA, 25 bp, Homo sapien
gcttgcattgatcaggaacttgggc

SEQ ID NO: 4267716 - DNA, 25 bp, Homo sapien
tggagatcggaggatctaactcccc

SEQ ID NO: 4267717 - DNA, 25 bp, Homo sapien
ggtctacattggagtatgtccccat

SEQ ID NO: 4267718 - DNA, 25 bp, Homo sapien
cggaggatctaactccccagagatg

SEQ ID NO: 4267719 - DNA, 25 bp, Homo sapien
cccagagatgggacgtagctggtct

SEQ ID NO: 4267720 - DNA, 25 bp, Homo sapien
tattgtcaagaagactggacagacc

SEQ ID NO: 4267721 - DNA, 25 bp, Homo sapien
gacctctgaagtgatattgtcaaga

SEQ ID NO: 4267722 - DNA, 25 bp, Homo sapien
gggtcttatttgtgccttcgatgac

SEQ ID NO: 4267723 - DNA, 25 bp, Homo sapien
ggacagacctgtcatttgaccagca

SEQ ID NO: 4267724 - DNA, 25 bp, Homo sapien
tagtaggtggttagtcacaacctcc

SEQ ID NO: 4267725 - DNA, 25 bp, Homo sapien
tgtctctaaggaaagccactttggg

SEQ ID NO: 4267726 - DNA, 25 bp, Homo sapien
gaatgagtagtaggtggttagtcac

SEQ ID NO: 4267727 - DNA, 25 bp, Homo sapien
aacctcctcaggtggacatctctct

SEQ ID NO: 4267728 - DNA, 25 bp, Homo sapien
aagaaggccttgtggagcttgatca

SEQ ID NO: 4267729 - DNA, 25 bp, Homo sapien
ggagcctcttcaactgtcaatgaag

SEQ ID NO: 4267730 - DNA, 25 bp, Homo sapien
tgtggagcttgatcagaaaccctgg

SEQ ID NO: 4267731 - DNA, 25 bp, Homo sapien
tgtgactcgatgctgaccaggacct

SEQ ID NO: 4267732 - DNA, 25 bp, Homo sapien
tatttcgtgtgaccttctgtaggaa

SEQ ID NO: 4267733 - DNA, 25 bp, Homo sapien
gaatccataaacacgcatggagctc

SEQ ID NO: 4267734 - DNA, 25 bp, Homo sapien
agctggtgcctctatagcttttggt

SEQ ID NO: 4267735 - DNA, 25 bp, Homo sapien
gaagtatcaaagctggtgcctctat

SEQ ID NO: 4267736 - DNA, 25 bp, Homo sapien
ctggtgaggctagttccctttggca

SEQ ID NO: 4267737 - DNA, 25 bp, Homo sapien
tgctggtcagttccacatccctggt

SEQ ID NO: 4267738 - DNA, 25 bp, Homo sapien
ctgctggtcagttccacatccctgg

SEQ ID NO: 4267739 - DNA, 25 bp, Homo sapien
acatccctggtgaggctagttccct

SEQ ID NO: 4267740 - DNA, 25 bp, Homo sapien
ttttcccactgtctaaaccctcatc

SEQ ID NO: 4267741 - DNA, 25 bp, Homo sapien
tcttttcccactgtctaaaccctca

SEQ ID NO: 4267742 - DNA, 25 bp, Homo sapien
tcccactgtctaaaccctcatccat

SEQ ID NO: 4267743 - DNA, 25 bp, Homo sapien
ttcccactgtctaaaccctcatcca

SEQ ID NO: 4267744 - DNA, 25 bp, Homo sapien
cgttgctcattctatactttatctc

SEQ ID NO: 4267745 - DNA, 25 bp, Homo sapien
agtagagaccatgggcctgtgccca

SEQ ID NO: 4267746 - DNA, 25 bp, Homo sapien
caccttttcttcgttgctcattcta

SEQ ID NO: 4267747 - DNA, 25 bp, Homo sapien
agcagtcctggggaatgatggtaaa

SEQ ID NO: 4267748 - DNA, 25 bp, Homo sapien
agcctgcctgaattgagccctgttt

SEQ ID NO: 4267749 - DNA, 25 bp, Homo sapien
tccatctatccagcttcaattccat

SEQ ID NO: 4267750 - DNA, 25 bp, Homo sapien
tgcctgaattgagccctgtttgcca

SEQ ID NO: 4267751 - DNA, 25 bp, Homo sapien
tgcgctccatctatccagcttcaat

SEQ ID NO: 4267752 - DNA, 25 bp, Homo sapien
aacacagcttactgaagttccctca

SEQ ID NO: 4267753 - DNA, 25 bp, Homo sapien
ctacaacacagcttactgaagttcc

SEQ ID NO: 4267754 - DNA, 25 bp, Homo sapien
gaagttccctcagttgctgttatct

SEQ ID NO: 4267755 - DNA, 25 bp, Homo sapien
gctgttatctgtgcctgctggtgca

SEQ ID NO: 4267756 - DNA, 25 bp, Homo sapien
ataagaaaggcacggaaaaagtcag

SEQ ID NO: 4267757 - DNA, 25 bp, Homo sapien
aaaaagagacctacaagtcaacaag

SEQ ID NO: 4267758 - DNA, 25 bp, Homo sapien
tatttaggctatcaaataggaaaaa

SEQ ID NO: 4267759 - DNA, 25 bp, Homo sapien
tctttgtggtaatcaaacaaacatc

SEQ ID NO: 4267760 - DNA, 25 bp, Homo sapien
taaaaaatctagagaggccaacatc

SEQ ID NO: 4267761 - DNA, 25 bp, Homo sapien
attctttaatactcacacttctagg

SEQ ID NO: 4267762 - DNA, 25 bp, Homo sapien
tcttaaacattgttgatggcgggtc

SEQ ID NO: 4267763 - DNA, 25 bp, Homo sapien
ctaattgggcaagtgtataaagatc

SEQ ID NO: 4267764 - DNA, 25 bp, Homo sapien
tggaagctgtgaaacgggtagtaac

SEQ ID NO: 4267765 - DNA, 25 bp, Homo sapien
ttcttgtccccaaaggcttgttgtg

SEQ ID NO: 4267766 - DNA, 25 bp, Homo sapien
tggctgcccatggatttgtttatat

SEQ ID NO: 4267767 - DNA, 25 bp, Homo sapien
tgaaatgagagttgcaatgacgtct

SEQ ID NO: 4267768 - DNA, 25 bp, Homo sapien
caacctgctttaatcaaggcggccc

SEQ ID NO: 4267769 - DNA, 25 bp, Homo sapien
ggcagaacaacctgctttaatcaag

SEQ ID NO: 4267770 - DNA, 25 bp, Homo sapien
ctcctgagcgccctcatctgcagga

SEQ ID NO: 4267771 - DNA, 25 bp, Homo sapien
ttcttggcagaacaacctgctttaa

SEQ ID NO: 4267772 - DNA, 25 bp, Homo sapien
tatggagatgtccaataaccactgt

SEQ ID NO: 4267773 - DNA, 25 bp, Homo sapien
actgggctgggtatggagatgtcca

SEQ ID NO: 4267774 - DNA, 25 bp, Homo sapien
tacctgattactgggcttgctgagc

SEQ ID NO: 4267775 - DNA, 25 bp, Homo sapien
ccactggtacctgattactgggctt

SEQ ID NO: 4267776 - DNA, 25 bp, Homo sapien
gagtaagagcatgacttggagtgtc

SEQ ID NO: 4267777 - DNA, 25 bp, Homo sapien
ccagtgagtggagtaagagcatgac

SEQ ID NO: 4267778 - DNA, 25 bp, Homo sapien
ctgccagtgagtggagtaagagcat

SEQ ID NO: 4267779 - DNA, 25 bp, Homo sapien
taagagcatgacttggagtgtcaga

SEQ ID NO: 4267780 - DNA, 25 bp, Homo sapien
tcttttctccagatacccaattgtc

SEQ ID NO: 4267781 - DNA, 25 bp, Homo sapien
tagggacaggaatatggtgataagc

SEQ ID NO: 4267782 - DNA, 25 bp, Homo sapien
tgataagctctgtactagagggact

SEQ ID NO: 4267783 - DNA, 25 bp, Homo sapien
caattgtctcctctgtaactggcac

SEQ ID NO: 4267784 - DNA, 25 bp, Homo sapien
atctattaccttgctggcagccagg

SEQ ID NO: 4267785 - DNA, 25 bp, Homo sapien
aacgacctgagaaggaacgggcagt

SEQ ID NO: 4267786 - DNA, 25 bp, Homo sapien
ttaactgtgactcagattcggaacg

SEQ ID NO: 4267787 - DNA, 25 bp, Homo sapien
gctgacagcgccatctattaccttg

SEQ ID NO: 4267788 - DNA, 25 bp, Homo sapien
gtgcccagcagggtcgttgtaaacc

SEQ ID NO: 4267789 - DNA, 25 bp, Homo sapien
gcccagcagggtcgttgtaaaccat

SEQ ID NO: 4267790 - DNA, 25 bp, Homo sapien
tgcccagcagggtcgttgtaaacca

SEQ ID NO: 4267791 - DNA, 25 bp, Homo sapien
agctttgtctgagatctgcacctgc

SEQ ID NO: 4267792 - DNA, 25 bp, Homo sapien
acagcttgccgagcccctaatgtag

SEQ ID NO: 4267793 - DNA, 25 bp, Homo sapien
tttggacaactgtgctctgacagct

SEQ ID NO: 4267794 - DNA, 25 bp, Homo sapien
cctaatgtagctccaaatgcgagag

SEQ ID NO: 4267795 - DNA, 25 bp, Homo sapien
aattccaaagtctgatgctatcttc

SEQ ID NO: 4267796 - DNA, 25 bp, Homo sapien
tcatcgtgtatgtcaactataggca

SEQ ID NO: 4267797 - DNA, 25 bp, Homo sapien
gctatcttctcgtagtcatcgtgta

SEQ ID NO: 4267798 - DNA, 25 bp, Homo sapien
tcctccattagtataaatctcgggt

SEQ ID NO: 4267799 - DNA, 25 bp, Homo sapien
caacaaatcgtgatgtagaatcagt

SEQ ID NO: 4267800 - DNA, 25 bp, Homo sapien
cataacaacaaatcgtgatgtagaa

SEQ ID NO: 4267801 - DNA, 25 bp, Homo sapien
taacaacaaatcgtgatgtagaatc

SEQ ID NO: 4267802 - DNA, 25 bp, Homo sapien
acaacaaatcgtgatgtagaatcag

SEQ ID NO: 4267803 - DNA, 25 bp, Homo sapien
gtgttacaacacagaaagcagtttt

SEQ ID NO: 4267804 - DNA, 25 bp, Homo sapien
tgttacaacacagaaagcagttttt

SEQ ID NO: 4267805 - DNA, 25 bp, Homo sapien
tgtgttacaacacagaaagcagttt

SEQ ID NO: 4267806 - DNA, 25 bp, Homo sapien
ctgtgttacaacacagaaagcagtt

SEQ ID NO: 4267807 - DNA, 25 bp, Homo sapien
ttttcaagacctgcagccgctgtgg

SEQ ID NO: 4267808 - DNA, 25 bp, Homo sapien
taggaagcatgccgcttcttctttt

SEQ ID NO: 4267809 - DNA, 25 bp, Homo sapien
ctaggaagcatgccgcttcttcttt

SEQ ID NO: 4267810 - DNA, 25 bp, Homo sapien
tctttttcaagacctgcagccgctg

SEQ ID NO: 4267811 - DNA, 25 bp, Homo sapien
ccgccaaagccaggtgccctcatca

SEQ ID NO: 4267812 - DNA, 25 bp, Homo sapien
ctagctttgaagagctgccgccaaa

SEQ ID NO: 4267813 - DNA, 25 bp, Homo sapien
tcgggctcaccctgcagtgattgtg

SEQ ID NO: 4267814 - DNA, 25 bp, Homo sapien
aagagctgccgccaaagccaggtgc

SEQ ID NO: 4267815 - DNA, 25 bp, Homo sapien
gcttcctaattgtccgtgatctttc

SEQ ID NO: 4267816 - DNA, 25 bp, Homo sapien
attgcttcctaattgtccgtgatct

SEQ ID NO: 4267817 - DNA, 25 bp, Homo sapien
ttcctaattgtccgtgatctttcat

SEQ ID NO: 4267818 - DNA, 25 bp, Homo sapien
tgcttcctaattgtccgtgatcttt

SEQ ID NO: 4267819 - DNA, 25 bp, Homo sapien
ttactgcttagcctggacaatgctc

SEQ ID NO: 4267820 - DNA, 25 bp, Homo sapien
gctgtttactgcttagcctggacaa

SEQ ID NO: 4267821 - DNA, 25 bp, Homo sapien
ctttgttgctgtttactgcttagcc

SEQ ID NO: 4267822 - DNA, 25 bp, Homo sapien
tgttgctgtttactgcttagcctgg

SEQ ID NO: 4267823 - DNA, 25 bp, Homo sapien
tctcaaattcagacccaaggaaagg

SEQ ID NO: 4267824 - DNA, 25 bp, Homo sapien
tgacatcaggcatttggcctgtggg

SEQ ID NO: 4267825 - DNA, 25 bp, Homo sapien
gataagtgtatttccttgctttcct

SEQ ID NO: 4267826 - DNA, 25 bp, Homo sapien
caaggaaagggtctgacatcaggca

SEQ ID NO: 4267827 - DNA, 25 bp, Homo sapien
agggcaagaactgtggcttgccctg

SEQ ID NO: 4267828 - DNA, 25 bp, Homo sapien
tgccctggaagcagcgtcacttgct

SEQ ID NO: 4267829 - DNA, 25 bp, Homo sapien
caagaactgtggcttgccctggaag

SEQ ID NO: 4267830 - DNA, 25 bp, Homo sapien
gaagcagcgtcacttgctgacagca

SEQ ID NO: 4267831 - DNA, 25 bp, Homo sapien
ctggccagatctgccacataaggaa

SEQ ID NO: 4267832 - DNA, 25 bp, Homo sapien
gccacataaggaacaaaatggtctg

SEQ ID NO: 4267833 - DNA, 25 bp, Homo sapien
tatcctccttgcacattggacgtgc

SEQ ID NO: 4267834 - DNA, 25 bp, Homo sapien
cattattctcaccagctctggccag

SEQ ID NO: 4267835 - DNA, 25 bp, Homo sapien
gtctgcaaaatgaattcgattagtc

SEQ ID NO: 4267836 - DNA, 25 bp, Homo sapien
tatgtctgatggcaaagtgaatgct

SEQ ID NO: 4267837 - DNA, 25 bp, Homo sapien
cattattgtctgcaaaatgaattcg

SEQ ID NO: 4267838 - DNA, 25 bp, Homo sapien
cagctgtatattccaggggctctct

SEQ ID NO: 4267839 - DNA, 25 bp, Homo sapien
caatctaggtccaagagaaaacggc

SEQ ID NO: 4267840 - DNA, 25 bp, Homo sapien
tccaagggatgtgaacatagggtgc

SEQ ID NO: 4267841 - DNA, 25 bp, Homo sapien
gatttctgtgatgcgtatagcccaa

SEQ ID NO: 4267842 - DNA, 25 bp, Homo sapien
ttaattcttactgggccaagggaga

SEQ ID NO: 4267843 - DNA, 25 bp, Homo sapien
ggacaacggcaaaggaatgtagaga

SEQ ID NO: 4267844 - DNA, 25 bp, Homo sapien
gatcaaagcctcacagttttctgta

SEQ ID NO: 4267845 - DNA, 25 bp, Homo sapien
gatagcggcacttagatctctcaga

SEQ ID NO: 4267846 - DNA, 25 bp, Homo sapien
gaagatggctttcttggacaacggc

SEQ ID NO: 4267847 - DNA, 25 bp, Homo sapien
tcagcagtaggtactggcagggaca

SEQ ID NO: 4267848 - DNA, 25 bp, Homo sapien
atgtttatcagcagtaggtactggc

SEQ ID NO: 4267849 - DNA, 25 bp, Homo sapien
ttatcagcagtaggtactggcaggg

SEQ ID NO: 4267850 - DNA, 25 bp, Homo sapien
cagcagtaggtactggcagggacat

SEQ ID NO: 4267851 - DNA, 25 bp, Homo sapien
gaaatatagcatctaaagcagtcat

SEQ ID NO: 4267852 - DNA, 25 bp, Homo sapien
atatagcatctaaagcagtcatgga

SEQ ID NO: 4267853 - DNA, 25 bp, Homo sapien
ctctgaaatatagcatctaaagcag

SEQ ID NO: 4267854 - DNA, 25 bp, Homo sapien
tgctctgaaatatagcatctaaagc

SEQ ID NO: 4267855 - DNA, 25 bp, Homo sapien
atttggagaggttgaatgtaactga

SEQ ID NO: 4267856 - DNA, 25 bp, Homo sapien
gaatatcagaggtcaatttggagag

SEQ ID NO: 4267857 - DNA, 25 bp, Homo sapien
ggttgaatgtaactgagctagatgt

SEQ ID NO: 4267858 - DNA, 25 bp, Homo sapien
tatcagaggtcaatttggagaggtt

SEQ ID NO: 4267859 - DNA, 25 bp, Homo sapien
ttaatgggcctgcatgagtatcatc

SEQ ID NO: 4267860 - DNA, 25 bp, Homo sapien
atgttaatgggcctgcatgagtatc

SEQ ID NO: 4267861 - DNA, 25 bp, Homo sapien
ctccctgtatgttaatgggcctgca

SEQ ID NO: 4267862 - DNA, 25 bp, Homo sapien
taatgggcctgcatgagtatcatct

SEQ ID NO: 4267863 - DNA, 25 bp, Homo sapien
cttcgaagtctgactcttgcttgtc

SEQ ID NO: 4267864 - DNA, 25 bp, Homo sapien
agccttcgaagtctgactcttgctt

SEQ ID NO: 4267865 - DNA, 25 bp, Homo sapien
tcgaagtctgactcttgcttgtctc

SEQ ID NO: 4267866 - DNA, 25 bp, Homo sapien
gccttcgaagtctgactcttgcttg

SEQ ID NO: 4267867 - DNA, 25 bp, Homo sapien
ctgcagggtgaagactctggtccct

SEQ ID NO: 4267868 - DNA, 25 bp, Homo sapien
tttttccctgtggtttcttcatcca

SEQ ID NO: 4267869 - DNA, 25 bp, Homo sapien
ttttccctgtggtttcttcatccat

SEQ ID NO: 4267870 - DNA, 25 bp, Homo sapien
atttgaatggagtcttttttccctg

SEQ ID NO: 4267871 - DNA, 25 bp, Homo sapien
tcttgtttggttagggctctcagaa

SEQ ID NO: 4267872 - DNA, 25 bp, Homo sapien
gggctctcagaaagcacattggcca

SEQ ID NO: 4267873 - DNA, 25 bp, Homo sapien
cagaaattccctttagttcactagt

SEQ ID NO: 4267874 - DNA, 25 bp, Homo sapien
tctttttgcttcacgtctggaagtc

SEQ ID NO: 4267875 - DNA, 25 bp, Homo sapien
cattaggcctcagtccttggccagg

SEQ ID NO: 4267876 - DNA, 25 bp, Homo sapien
ccaggcatggcctgtgttggcattg

SEQ ID NO: 4267877 - DNA, 25 bp, Homo sapien
gaactgccagccagatcattaggcc

SEQ ID NO: 4267878 - DNA, 25 bp, Homo sapien
gcacatttgaccaagagccttctcg

SEQ ID NO: 4267879 - DNA, 25 bp, Homo sapien
gtaactaactattcttctccgtgaa

SEQ ID NO: 4267880 - DNA, 25 bp, Homo sapien
acataagaagggcataacagggtaa

SEQ ID NO: 4267881 - DNA, 25 bp, Homo sapien
taactaactattcttctccgtgaag

SEQ ID NO: 4267882 - DNA, 25 bp, Homo sapien
gcagcaggaacacataagaagggca

SEQ ID NO: 4267883 - DNA, 25 bp, Homo sapien
ctggatctgaggcagtaatggtact

SEQ ID NO: 4267884 - DNA, 25 bp, Homo sapien
actactgtggtggtaacagtatgca

SEQ ID NO: 4267885 - DNA, 25 bp, Homo sapien
agcagtgatacttatgaagcatcca

SEQ ID NO: 4267886 - DNA, 25 bp, Homo sapien
ggtgtcggcacttccactactgtgg

SEQ ID NO: 4267887 - DNA, 25 bp, Homo sapien
gcttgttatgacaatggctccagtg

SEQ ID NO: 4267888 - DNA, 25 bp, Homo sapien
ccgggtctgtaggaggacgcattca

SEQ ID NO: 4267889 - DNA, 25 bp, Homo sapien
cctggagtgtgaagtagcttgttat

SEQ ID NO: 4267890 - DNA, 25 bp, Homo sapien
taagaacctggttgtgggccctgga

SEQ ID NO: 4267891 - DNA, 25 bp, Homo sapien
gttcactgaaaagcaggccactggg

SEQ ID NO: 4267892 - DNA, 25 bp, Homo sapien
cagtgttcactgaaaagcaggccac

SEQ ID NO: 4267893 - DNA, 25 bp, Homo sapien
tgccagtgttcactgaaaagcaggc

SEQ ID NO: 4267894 - DNA, 25 bp, Homo sapien
aaaagatgccagtgttcactgaaaa

SEQ ID NO: 4267895 - DNA, 25 bp, Homo sapien
ttcctgatttctttttcaagacaac

SEQ ID NO: 4267896 - DNA, 25 bp, Homo sapien
atttcctgatttctttttcaagaca

SEQ ID NO: 4267897 - DNA, 25 bp, Homo sapien
tttcctgatttctttttcaagacaa

SEQ ID NO: 4267898 - DNA, 25 bp, Homo sapien
ctgtagcttgacagagtgctggcat

SEQ ID NO: 4267899 - DNA, 25 bp, Homo sapien
gcagctgtagcttgacagagtgctg

SEQ ID NO: 4267900 - DNA, 25 bp, Homo sapien
gatggcaagcagctgtagcttgaca

SEQ ID NO: 4267901 - DNA, 25 bp, Homo sapien
ggcaagcagctgtagcttgacagag

SEQ ID NO: 4267902 - DNA, 25 bp, Homo sapien
gctatgtaggcagtataacagcttt

SEQ ID NO: 4267903 - DNA, 25 bp, Homo sapien
tctgatgctatgtaggcagtataac

SEQ ID NO: 4267904 - DNA, 25 bp, Homo sapien
tccttttctgatgctatgtaggcag

SEQ ID NO: 4267905 - DNA, 25 bp, Homo sapien
ccttttctgatgctatgtaggcagt

SEQ ID NO: 4267906 - DNA, 25 bp, Homo sapien
ggttgcaaagtcagccactgaagat

SEQ ID NO: 4267907 - DNA, 25 bp, Homo sapien
cctgtttgtaccttgtgttttctgc

SEQ ID NO: 4267908 - DNA, 25 bp, Homo sapien
ctcgggtgggttgcaaagtcagcca

SEQ ID NO: 4267909 - DNA, 25 bp, Homo sapien
gctttatcagctcgggtgggttgca

SEQ ID NO: 4267910 - DNA, 25 bp, Homo sapien
tgtacacctgttgcgtcttggtgcc

SEQ ID NO: 4267911 - DNA, 25 bp, Homo sapien
gatttgcctatagaagccaatccat

SEQ ID NO: 4267912 - DNA, 25 bp, Homo sapien
tatctgtgatttgcctatagaagcc

SEQ ID NO: 4267913 - DNA, 25 bp, Homo sapien
ttttgtctggcatctaacttcggca

SEQ ID NO: 4267914 - DNA, 25 bp, Homo sapien
gaatacactctagagcacagcctag

SEQ ID NO: 4267915 - DNA, 25 bp, Homo sapien
gccagggacatcatagcagcttctg

SEQ ID NO: 4267916 - DNA, 25 bp, Homo sapien
tgacctcccctgagggaatacactc

SEQ ID NO: 4267917 - DNA, 25 bp, Homo sapien
tcttgaagaaacagagaggctagtc

SEQ ID NO: 4267918 - DNA, 25 bp, Homo sapien
caaatggcggcaaattttcataact

SEQ ID NO: 4267919 - DNA, 25 bp, Homo sapien
gctccccttccgttgtagctagttc

SEQ ID NO: 4267920 - DNA, 25 bp, Homo sapien
tttgccctctggcagtcgccctgct

SEQ ID NO: 4267921 - DNA, 25 bp, Homo sapien
tggcagtcgccctgctgcgctgctc

SEQ ID NO: 4267922 - DNA, 25 bp, Homo sapien
gctgctccccttccgttgtagctag

SEQ ID NO: 4267923 - DNA, 25 bp, Homo sapien
gaggaagtaagggccacaatctgga

SEQ ID NO: 4267924 - DNA, 25 bp, Homo sapien
ctgccaatgaggaagtaagggccac

SEQ ID NO: 4267925 - DNA, 25 bp, Homo sapien
ggaagtaagggccacaatctggact

SEQ ID NO: 4267926 - DNA, 25 bp, Homo sapien
gccaatgaggaagtaagggccacaa

SEQ ID NO: 4267927 - DNA, 25 bp, Homo sapien
gaatcctggccaatgtttcacttga

SEQ ID NO: 4267928 - DNA, 25 bp, Homo sapien
cttgacacattgtgcgcattgaagc

SEQ ID NO: 4267929 - DNA, 25 bp, Homo sapien
gctgagtttgtcaggaatcctggcc

SEQ ID NO: 4267930 - DNA, 25 bp, Homo sapien
ctgagagcaaaaggctgagtttgtc

SEQ ID NO: 4267931 - DNA, 25 bp, Homo sapien
tcttcattcaaagcctgcacagcat

SEQ ID NO: 4267932 - DNA, 25 bp, Homo sapien
tcaaagcctgcacagcattgttcat

SEQ ID NO: 4267933 - DNA, 25 bp, Homo sapien
aggctctgtgattcttgcctcttca

SEQ ID NO: 4267934 - DNA, 25 bp, Homo sapien
gattcttgcctcttcattcaaagcc

SEQ ID NO: 4267935 - DNA, 25 bp, Homo sapien
cttttagttaccttcaatttctgat

SEQ ID NO: 4267936 - DNA, 25 bp, Homo sapien
tgcttttagttaccttcaatttctg

SEQ ID NO: 4267937 - DNA, 25 bp, Homo sapien
gcttttagttaccttcaatttctga

SEQ ID NO: 4267938 - DNA, 25 bp, Homo sapien
catttttgactaattttcttgccat

SEQ ID NO: 4267939 - DNA, 25 bp, Homo sapien
ggtcatttttgactaattttcttgc

SEQ ID NO: 4267940 - DNA, 25 bp, Homo sapien
tcatttttgactaattttcttgcca

SEQ ID NO: 4267941 - DNA, 25 bp, Homo sapien
gtcatttttgactaattttcttgcc

SEQ ID NO: 4267942 - DNA, 25 bp, Homo sapien
cctgattgaaacctaacactttgct

SEQ ID NO: 4267943 - DNA, 25 bp, Homo sapien
tccaataggagtttccaaggagaca

SEQ ID NO: 4267944 - DNA, 25 bp, Homo sapien
ccacctttggttactgcctgattga

SEQ ID NO: 4267945 - DNA, 25 bp, Homo sapien
ccaataggagtttccaaggagacag

SEQ ID NO: 4267946 - DNA, 25 bp, Homo sapien
ttccgtgacttgggcttaaaggcca

SEQ ID NO: 4267947 - DNA, 25 bp, Homo sapien
gatgtttatcactagttttccgtga

SEQ ID NO: 4267948 - DNA, 25 bp, Homo sapien
ctggccagccataggatgtttatca

SEQ ID NO: 4267949 - DNA, 25 bp, Homo sapien
cactagttttccgtgacttgggctt

SEQ ID NO: 4267950 - DNA, 25 bp, Homo sapien
tgctgctagagcagccaatgtggta

SEQ ID NO: 4267951 - DNA, 25 bp, Homo sapien
aagtgagcagcccttttattctgct

SEQ ID NO: 4267952 - DNA, 25 bp, Homo sapien
ccaatgtggtatcagaagtgagcag

SEQ ID NO: 4267953 - DNA, 25 bp, Homo sapien
cttatgaactgctgctagagcagcc

SEQ ID NO: 4267954 - DNA, 25 bp, Homo sapien
tctccagattcctagcaggccccat

SEQ ID NO: 4267955 - DNA, 25 bp, Homo sapien
ttctccagattcctagcaggcccca

SEQ ID NO: 4267956 - DNA, 25 bp, Homo sapien
tttctccagattcctagcaggcccc

SEQ ID NO: 4267957 - DNA, 25 bp, Homo sapien
gtccatggtgctgaatagatgtgat

SEQ ID NO: 4267958 - DNA, 25 bp, Homo sapien
gtgggctagaaccttgtccatggtg

SEQ ID NO: 4267959 - DNA, 25 bp, Homo sapien
ccttctaggaatactccacccagtt

SEQ ID NO: 4267960 - DNA, 25 bp, Homo sapien
cacccagttctagtgggctagaacc

SEQ ID NO: 4267961 - DNA, 25 bp, Homo sapien
agtggcttgtgtgtcccttggaaaa

SEQ ID NO: 4267962 - DNA, 25 bp, Homo sapien
tggtcaaaggcaagtttaccaacag

SEQ ID NO: 4267963 - DNA, 25 bp, Homo sapien
tctttcttgtaaatattgagtggct

SEQ ID NO: 4267964 - DNA, 25 bp, Homo sapien
ctcgccaggatctgtattggactat

SEQ ID NO: 4267965 - DNA, 25 bp, Homo sapien
gcatagaggacatttacaaagggag

SEQ ID NO: 4267966 - DNA, 25 bp, Homo sapien
aggcatagaggacatttacaaaggg

SEQ ID NO: 4267967 - DNA, 25 bp, Homo sapien
ggcatagaggacatttacaaaggga

SEQ ID NO: 4267968 - DNA, 25 bp, Homo sapien
tgtcctgcacgtactgtccgacact

SEQ ID NO: 4267969 - DNA, 25 bp, Homo sapien
tggctcctcccccaaggcattaatt

SEQ ID NO: 4267970 - DNA, 25 bp, Homo sapien
tcatccgtcttctgcgtcgttcatg

SEQ ID NO: 4267971 - DNA, 25 bp, Homo sapien
gcttctgctcatgcttggtgcactg

SEQ ID NO: 4267972 - DNA, 25 bp, Homo sapien
ttctctggtatggaagtggtgtacc

SEQ ID NO: 4267973 - DNA, 25 bp, Homo sapien
gaagtggtgtacctgaacatcgcta

SEQ ID NO: 4267974 - DNA, 25 bp, Homo sapien
ggtggccagtctggtataaacaggt

SEQ ID NO: 4267975 - DNA, 25 bp, Homo sapien
gaaaattccgtcgagggctgatttg

SEQ ID NO: 4267976 - DNA, 25 bp, Homo sapien
tgttgatatgtctctggaataccca

SEQ ID NO: 4267977 - DNA, 25 bp, Homo sapien
tttgggttggatctgaaaactgcta

SEQ ID NO: 4267978 - DNA, 25 bp, Homo sapien
gttggatctgaaaactgctatgcac

SEQ ID NO: 4267979 - DNA, 25 bp, Homo sapien
gataatgatgttgatatgtctctgg

SEQ ID NO: 4267980 - DNA, 25 bp, Homo sapien
caaaacttgtaactgctgattccca

SEQ ID NO: 4267981 - DNA, 25 bp, Homo sapien
gaaattatgtatgggccagaagcca

SEQ ID NO: 4267982 - DNA, 25 bp, Homo sapien
gatggaacgtgtgctttcttacgtg

SEQ ID NO: 4267983 - DNA, 25 bp, Homo sapien
ggtgaagtgagcttaccccattcca

SEQ ID NO: 4267984 - DNA, 25 bp, Homo sapien
acagggttcaccacgccatcttcat

SEQ ID NO: 4267985 - DNA, 25 bp, Homo sapien
ccaataccagtcttaagctcctgtg

SEQ ID NO: 4267986 - DNA, 25 bp, Homo sapien
ccatagctaatgttgacagggttca

SEQ ID NO: 4267987 - DNA, 25 bp, Homo sapien
tcaatcaaagatctgcctaatcctg

SEQ ID NO: 4267988 - DNA, 25 bp, Homo sapien
gacgcctaacaaccagagacaaatg

SEQ ID NO: 4267989 - DNA, 25 bp, Homo sapien
tcaaaactgccaggtcccatgaggt

SEQ ID NO: 4267990 - DNA, 25 bp, Homo sapien
tcaactcagaccctcgtagaatagg

SEQ ID NO: 4267991 - DNA, 25 bp, Homo sapien
gctgctactgattctagaaaggcct

SEQ ID NO: 4267992 - DNA, 25 bp, Homo sapien
tggtgagcagtcctaacagaagtga

SEQ ID NO: 4267993 - DNA, 25 bp, Homo sapien
tcaggcttgtgctgcaatagtgtct

SEQ ID NO: 4267994 - DNA, 25 bp, Homo sapien
aatagggtattcagtatggctgtcc

SEQ ID NO: 4267995 - DNA, 25 bp, Homo sapien
gccactaaaattgaccagaccggaa

SEQ ID NO: 4267996 - DNA, 25 bp, Homo sapien
attcccagcatacactacattgtcc

SEQ ID NO: 4267997 - DNA, 25 bp, Homo sapien
ccattggcaatatggataattattc

SEQ ID NO: 4267998 - DNA, 25 bp, Homo sapien
gcatacactacattgtcctttctga

SEQ ID NO: 4267999 - DNA, 25 bp, Homo sapien
cattattgtcgatgtctgaatcatc

SEQ ID NO: 4268000 - DNA, 25 bp, Homo sapien
tctcaccttcagcatacatttccct

SEQ ID NO: 4268001 - DNA, 25 bp, Homo sapien
tgccacagtgcatggattctcacct

SEQ ID NO: 4268002 - DNA, 25 bp, Homo sapien
cagtgcatggattctcaccttcagc

SEQ ID NO: 4268003 - DNA, 25 bp, Homo sapien
atcagaatgccacagtgcatggatt

SEQ ID NO: 4268004 - DNA, 25 bp, Homo sapien
tctttgctgagtatgcttcgtattg

SEQ ID NO: 4268005 - DNA, 25 bp, Homo sapien
tatgcttcgtattgctgcagtttct

SEQ ID NO: 4268006 - DNA, 25 bp, Homo sapien
tcctttaccatcctattctgtttac

SEQ ID NO: 4268007 - DNA, 25 bp, Homo sapien
cctattctgtttacctggactacct

SEQ ID NO: 4268008 - DNA, 25 bp, Homo sapien
taatggtaacagattggcaactggc

SEQ ID NO: 4268009 - DNA, 25 bp, Homo sapien
agaaggtggcccagatgaccagaca

SEQ ID NO: 4268010 - DNA, 25 bp, Homo sapien
aatgaggctccctctcagaaggtgg

SEQ ID NO: 4268011 - DNA, 25 bp, Homo sapien
caagtctccatccataacagctagg

SEQ ID NO: 4268012 - DNA, 25 bp, Homo sapien
ctggaatagggcacagtgcccattt

SEQ ID NO: 4268013 - DNA, 25 bp, Homo sapien
gtttctgggctagctcaatctgata

SEQ ID NO: 4268014 - DNA, 25 bp, Homo sapien
atagggcacagtgcccattttggca

SEQ ID NO: 4268015 - DNA, 25 bp, Homo sapien
acagaatggtgatgagttcaggcat

SEQ ID NO: 4268016 - DNA, 25 bp, Homo sapien
ccactagagttaatattcggcccaa

SEQ ID NO: 4268017 - DNA, 25 bp, Homo sapien
tgttgaagatctgttccactagagt

SEQ ID NO: 4268018 - DNA, 25 bp, Homo sapien
ttaatattcggcccaagagaagcca

SEQ ID NO: 4268019 - DNA, 25 bp, Homo sapien
tgttccactagagttaatattcggc

SEQ ID NO: 4268020 - DNA, 25 bp, Homo sapien
ttttgaccatcagatagcaggccca

SEQ ID NO: 4268021 - DNA, 25 bp, Homo sapien
cccgtggagcttgtactggagcctg

SEQ ID NO: 4268022 - DNA, 25 bp, Homo sapien
tgttgtgaggagagaaagcccgtgg

SEQ ID NO: 4268023 - DNA, 25 bp, Homo sapien
cagaagagataacttggtgttgtga

SEQ ID NO: 4268024 - DNA, 25 bp, Homo sapien
gtattgtcctcttttcagtttctca

SEQ ID NO: 4268025 - DNA, 25 bp, Homo sapien
ttgtattgtcctcttttcagtttct

SEQ ID NO: 4268026 - DNA, 25 bp, Homo sapien
tgtcctcttttcagtttctcattaa

SEQ ID NO: 4268027 - DNA, 25 bp, Homo sapien
tcctcttttcagtttctcattaaaa

SEQ ID NO: 4268028 - DNA, 25 bp, Homo sapien
ttgccagtctgatgtaggtggtgtt

SEQ ID NO: 4268029 - DNA, 25 bp, Homo sapien
tgtgccattgccagtctgatgtagg

SEQ ID NO: 4268030 - DNA, 25 bp, Homo sapien
tgccattgccagtctgatgtaggtg

SEQ ID NO: 4268031 - DNA, 25 bp, Homo sapien
ccattgccagtctgatgtaggtggt

SEQ ID NO: 4268032 - DNA, 25 bp, Homo sapien
aggtagcagctgccttgatgagcca

SEQ ID NO: 4268033 - DNA, 25 bp, Homo sapien
gtggtgtgatattgaaactggcagc

SEQ ID NO: 4268034 - DNA, 25 bp, Homo sapien
agagtctggagagctaatctgaagc

SEQ ID NO: 4268035 - DNA, 25 bp, Homo sapien
tcctgctatggctaaaggtagcagc

SEQ ID NO: 4268036 - DNA, 25 bp, Homo sapien
tgtcagtggtgtagtcgctgaaaat

SEQ ID NO: 4268037 - DNA, 25 bp, Homo sapien
tcagtggtgtagtcgctgaaaatgg

SEQ ID NO: 4268038 - DNA, 25 bp, Homo sapien
agtggtgtagtcgctgaaaatggct

SEQ ID NO: 4268039 - DNA, 25 bp, Homo sapien
atgtcagtggtgtagtcgctgaaaa

SEQ ID NO: 4268040 - DNA, 25 bp, Homo sapien
ctttgctgccattgcttcccatcac

SEQ ID NO: 4268041 - DNA, 25 bp, Homo sapien
tttgctgccattgcttcccatcacc

SEQ ID NO: 4268042 - DNA, 25 bp, Homo sapien
ttgctgccattgcttcccatcacca

SEQ ID NO: 4268043 - DNA, 25 bp, Homo sapien
tgctgccattgcttcccatcaccat

SEQ ID NO: 4268044 - DNA, 25 bp, Homo sapien
caaaagcatttgcaggcatatgtac

SEQ ID NO: 4268045 - DNA, 25 bp, Homo sapien
cttgagcatcactgtgccctgagga

SEQ ID NO: 4268046 - DNA, 25 bp, Homo sapien
tgagacctggacgtctaagtctgct

SEQ ID NO: 4268047 - DNA, 25 bp, Homo sapien
gggagacacctgtatacaaaagcat

SEQ ID NO: 4268048 - DNA, 25 bp, Homo sapien
gtgttgcaaacaactagggcactgg

SEQ ID NO: 4268049 - DNA, 25 bp, Homo sapien
tgtttggctgtgttgcaaacaacta

SEQ ID NO: 4268050 - DNA, 25 bp, Homo sapien
tggctgtgttgcaaacaactagggc

SEQ ID NO: 4268051 - DNA, 25 bp, Homo sapien
tttggctgtgttgcaaacaactagg

SEQ ID NO: 4268052 - DNA, 25 bp, Homo sapien
agcaaggactgtattgtcatagcca

SEQ ID NO: 4268053 - DNA, 25 bp, Homo sapien
gtggaatcttttcatatcgtctaat

SEQ ID NO: 4268054 - DNA, 25 bp, Homo sapien
tagccaaacattctaaagaggattt

SEQ ID NO: 4268055 - DNA, 25 bp, Homo sapien
tcgtctaatttgtaggactagagaa

SEQ ID NO: 4268056 - DNA, 25 bp, Homo sapien
caaatgatgtgttgtgcgagttgca

SEQ ID NO: 4268057 - DNA, 25 bp, Homo sapien
gacctttgtctcctataccagggaa

SEQ ID NO: 4268058 - DNA, 25 bp, Homo sapien
gaggtgatataaggctattaacttc

SEQ ID NO: 4268059 - DNA, 25 bp, Homo sapien
tagctctcccttgccaacgtttagg

SEQ ID NO: 4268060 - DNA, 25 bp, Homo sapien
ctgctgcagaagctttacttacagc

SEQ ID NO: 4268061 - DNA, 25 bp, Homo sapien
ttctccgttctaaaggtcaactgcc

SEQ ID NO: 4268062 - DNA, 25 bp, Homo sapien
ctttctccgttctaaaggtcaactg

SEQ ID NO: 4268063 - DNA, 25 bp, Homo sapien
tttctccgttctaaaggtcaactgc

SEQ ID NO: 4268064 - DNA, 25 bp, Homo sapien
gatatgagacattggtgaattggcc

SEQ ID NO: 4268065 - DNA, 25 bp, Homo sapien
aaagtaagttaggagatcaccccag

SEQ ID NO: 4268066 - DNA, 25 bp, Homo sapien
gaccagaagccagtcacagtttaca

SEQ ID NO: 4268067 - DNA, 25 bp, Homo sapien
ggactcctaatagccttgaccagaa

SEQ ID NO: 4268068 - DNA, 25 bp, Homo sapien
tcctatcattttcaatagaaccttg

SEQ ID NO: 4268069 - DNA, 25 bp, Homo sapien
tactgctccatttatgtgcatctga

SEQ ID NO: 4268070 - DNA, 25 bp, Homo sapien
aaagatacatctgtagccgagccct

SEQ ID NO: 4268071 - DNA, 25 bp, Homo sapien
gaattctggcaagcatatttgcagc

SEQ ID NO: 4268072 - DNA, 25 bp, Homo sapien
tggaccaagacctcatgacacttac

SEQ ID NO: 4268073 - DNA, 25 bp, Homo sapien
atgggaggacctgaaaccctctgac

SEQ ID NO: 4268074 - DNA, 25 bp, Homo sapien
ctgaggctctttttggaccaagacc

SEQ ID NO: 4268075 - DNA, 25 bp, Homo sapien
cctctgacacgttcatgacttcctt

SEQ ID NO: 4268076 - DNA, 25 bp, Homo sapien
ttgccaaatgcagaacctccaagat

SEQ ID NO: 4268077 - DNA, 25 bp, Homo sapien
tacacagcccctcacaaataatact

SEQ ID NO: 4268078 - DNA, 25 bp, Homo sapien
tccaagattcaagggcagtaccaca

SEQ ID NO: 4268079 - DNA, 25 bp, Homo sapien
gaggtgggtcctccatcaagatgtg

SEQ ID NO: 4268080 - DNA, 25 bp, Homo sapien
cagagagatcggattcttcaccaac

SEQ ID NO: 4268081 - DNA, 25 bp, Homo sapien
catgggattaggcacatgaccaacc

SEQ ID NO: 4268082 - DNA, 25 bp, Homo sapien
tgtctgctcagtgtaaatcctgtct

SEQ ID NO: 4268083 - DNA, 25 bp, Homo sapien
tatccagttaaacgagctgtgctcc

SEQ ID NO: 4268084 - DNA, 25 bp, Homo sapien
tcctgggctccgtgaaacagttctg

SEQ ID NO: 4268085 - DNA, 25 bp, Homo sapien
cattggtttagagctagcaggtcca

SEQ ID NO: 4268086 - DNA, 25 bp, Homo sapien
gaggcccagacttgaaacccaatag

SEQ ID NO: 4268087 - DNA, 25 bp, Homo sapien
taacacattaggacagaacacccag

SEQ ID NO: 4268088 - DNA, 25 bp, Homo sapien
atagtccttgatagtcctagaagaa

SEQ ID NO: 4268089 - DNA, 25 bp, Homo sapien
gtgcctgtcagatccacatagtcct

SEQ ID NO: 4268090 - DNA, 25 bp, Homo sapien
tagtccttgatagtcctagaagaaa

SEQ ID NO: 4268091 - DNA, 25 bp, Homo sapien
atccacatagtccttgatagtccta

SEQ ID NO: 4268092 - DNA, 25 bp, Homo sapien
catactccatacagttctgctttgc

SEQ ID NO: 4268093 - DNA, 25 bp, Homo sapien
cacgatgccaatccgtagatatgat

SEQ ID NO: 4268094 - DNA, 25 bp, Homo sapien
tccgtagatatgatgttggcccaca

SEQ ID NO: 4268095 - DNA, 25 bp, Homo sapien
tatgtttttgtccacgatgccaatc

SEQ ID NO: 4268096 - DNA, 25 bp, Homo sapien
caaatgtagatgtagcaatgctttc

SEQ ID NO: 4268097 - DNA, 25 bp, Homo sapien
tacttcaaatgtagatgtagcaatg

SEQ ID NO: 4268098 - DNA, 25 bp, Homo sapien
cattacttcaaatgtagatgtagca

SEQ ID NO: 4268099 - DNA, 25 bp, Homo sapien
cttcaaatgtagatgtagcaatgct

SEQ ID NO: 4268100 - DNA, 25 bp, Homo sapien
tacagcagtcacaatgatggagctt

SEQ ID NO: 4268101 - DNA, 25 bp, Homo sapien
agattcttgccagagatacttcttc

SEQ ID NO: 4268102 - DNA, 25 bp, Homo sapien
ctttctagattcttgccagagatac

SEQ ID NO: 4268103 - DNA, 25 bp, Homo sapien
cagcagtcacaatgatggagcttga

SEQ ID NO: 4268104 - DNA, 25 bp, Homo sapien
gcacaagaccatgtaggatgaccat

SEQ ID NO: 4268105 - DNA, 25 bp, Homo sapien
gaattcacacaagggtgcctcacaa

SEQ ID NO: 4268106 - DNA, 25 bp, Homo sapien
tattaggagtggaacctcacagtcc

SEQ ID NO: 4268107 - DNA, 25 bp, Homo sapien
gcctgaatgtggagtgtttcaccca

SEQ ID NO: 4268108 - DNA, 25 bp, Homo sapien
ctagttcacccccagcatttggtgg

SEQ ID NO: 4268109 - DNA, 25 bp, Homo sapien
cacccccagcatttggtggatggtg

SEQ ID NO: 4268110 - DNA, 25 bp, Homo sapien
gttcacccccagcatttggtggatg

SEQ ID NO: 4268111 - DNA, 25 bp, Homo sapien
tagttcacccccagcatttggtgga

SEQ ID NO: 4268112 - DNA, 25 bp, Homo sapien
tcacactactccaaaataggtctta

SEQ ID NO: 4268113 - DNA, 25 bp, Homo sapien
cacactactccaaaataggtcttac

SEQ ID NO: 4268114 - DNA, 25 bp, Homo sapien
ccagaacccagttttcaagggctgt

SEQ ID NO: 4268115 - DNA, 25 bp, Homo sapien
cacttcaatctggtaaggtgttact

SEQ ID NO: 4268116 - DNA, 25 bp, Homo sapien
ggtgttactaatgccagaacccagt

SEQ ID NO: 4268117 - DNA, 25 bp, Homo sapien
caagggctgtggcatttggaagcct

SEQ ID NO: 4268118 - DNA, 25 bp, Homo sapien
tcaatatatccagacccttttcttg

SEQ ID NO: 4268119 - DNA, 25 bp, Homo sapien
tgggcttgtgtatctttcgacttac

SEQ ID NO: 4268120 - DNA, 25 bp, Homo sapien
tctctgggcttgtgtatctttcgac

SEQ ID NO: 4268121 - DNA, 25 bp, Homo sapien
tgtgtatctttcgacttactagaag

SEQ ID NO: 4268122 - DNA, 25 bp, Homo sapien
acatggaatctttggattaaagcca

SEQ ID NO: 4268123 - DNA, 25 bp, Homo sapien
ttctccaagacctctgaagaaagaa

SEQ ID NO: 4268124 - DNA, 25 bp, Homo sapien
gccattgcacatttcccgtcaaaat

SEQ ID NO: 4268125 - DNA, 25 bp, Homo sapien
cattctccaagacctctgaagaaag

SEQ ID NO: 4268126 - DNA, 25 bp, Homo sapien
gaggaatgataaaagcatatgggta

SEQ ID NO: 4268127 - DNA, 25 bp, Homo sapien
ttctctaatgcagtttcagaggaat

SEQ ID NO: 4268128 - DNA, 25 bp, Homo sapien
aaaagcatatgggtattgcatctcc

SEQ ID NO: 4268129 - DNA, 25 bp, Homo sapien
tcttatcttgataataccctgtaat

SEQ ID NO: 4268130 - DNA, 25 bp, Homo sapien
ctgggctgacttgtttatatgctgt

SEQ ID NO: 4268131 - DNA, 25 bp, Homo sapien
tgggctgacttgtttatatgctgtt

SEQ ID NO: 4268132 - DNA, 25 bp, Homo sapien
atatgctgtttttgatatggtagcc

SEQ ID NO: 4268133 - DNA, 25 bp, Homo sapien
tttatatgctgtttttgatatggta

SEQ ID NO: 4268134 - DNA, 25 bp, Homo sapien
aaagaaagaagtcaatcagtgggtt

SEQ ID NO: 4268135 - DNA, 25 bp, Homo sapien
cttttaagttcaaagctgtttactg

SEQ ID NO: 4268136 - DNA, 25 bp, Homo sapien
taagttcaaagctgtttactgaagt

SEQ ID NO: 4268137 - DNA, 25 bp, Homo sapien
cagacaattttgcataatgatgatt

SEQ ID NO: 4268138 - DNA, 25 bp, Homo sapien
gaagtcagacaattttgcataatga

SEQ ID NO: 4268139 - DNA, 25 bp, Homo sapien
taggtgaattacactaacaccttcg

SEQ ID NO: 4268140 - DNA, 25 bp, Homo sapien
gctccatgagctgtttatcaacctt

SEQ ID NO: 4268141 - DNA, 25 bp, Homo sapien
ctgccctgacaagagttgtaggtga

SEQ ID NO: 4268142 - DNA, 25 bp, Homo sapien
cactaacaccttcgggctccatgag

SEQ ID NO: 4268143 - DNA, 25 bp, Homo sapien
ccttcccctattgtcccattctcca

SEQ ID NO: 4268144 - DNA, 25 bp, Homo sapien
tgtccttcccctattgtcccattct

SEQ ID NO: 4268145 - DNA, 25 bp, Homo sapien
tccttcccctattgtcccattctcc

SEQ ID NO: 4268146 - DNA, 25 bp, Homo sapien
gtccttcccctattgtcccattctc

SEQ ID NO: 4268147 - DNA, 25 bp, Homo sapien
tctctgagcgagtggctcatactct

SEQ ID NO: 4268148 - DNA, 25 bp, Homo sapien
aaacactctaaattttctactggtg

SEQ ID NO: 4268149 - DNA, 25 bp, Homo sapien
ctctgagcgagtggctcatactcta

SEQ ID NO: 4268150 - DNA, 25 bp, Homo sapien
actctaaattttctactggtgccat

SEQ ID NO: 4268151 - DNA, 25 bp, Homo sapien
gtgctatttctttgccaagcttggg

SEQ ID NO: 4268152 - DNA, 25 bp, Homo sapien
aagtcttcttgttgtgctatttctt

SEQ ID NO: 4268153 - DNA, 25 bp, Homo sapien
gccaagcttgggcacaagattactt

SEQ ID NO: 4268154 - DNA, 25 bp, Homo sapien
cttaagatgcctaaaaatctaagca

SEQ ID NO: 4268155 - DNA, 25 bp, Homo sapien
tcagcaaaaggcaagatatcagcag

SEQ ID NO: 4268156 - DNA, 25 bp, Homo sapien
caaaaggcaagatatcagcagatcc

SEQ ID NO: 4268157 - DNA, 25 bp, Homo sapien
ctcagcaaaaggcaagatatcagca

SEQ ID NO: 4268158 - DNA, 25 bp, Homo sapien
aaggcaagatatcagcagatcctga

SEQ ID NO: 4268159 - DNA, 25 bp, Homo sapien
cctgccacacaggagatggtaagat

SEQ ID NO: 4268160 - DNA, 25 bp, Homo sapien
cacacaggagatggtaagattaatg

SEQ ID NO: 4268161 - DNA, 25 bp, Homo sapien
tgtgacaattctttgccagacaaag

SEQ ID NO: 4268162 - DNA, 25 bp, Homo sapien
taagattaatgaactgctgtgacaa

SEQ ID NO: 4268163 - DNA, 25 bp, Homo sapien
tgagggagaaagcaccaacgagcac

SEQ ID NO: 4268164 - DNA, 25 bp, Homo sapien
tgtgaaagatgagggagaaagcacc

SEQ ID NO: 4268165 - DNA, 25 bp, Homo sapien
agatgagggagaaagcaccaacgag

SEQ ID NO: 4268166 - DNA, 25 bp, Homo sapien
aagatgagggagaaagcaccaacga

SEQ ID NO: 4268167 - DNA, 25 bp, Homo sapien
gtagcatcccttgcttccattcttt

SEQ ID NO: 4268168 - DNA, 25 bp, Homo sapien
tgtagcatcccttgcttccattctt

SEQ ID NO: 4268169 - DNA, 25 bp, Homo sapien
ctgtagcatcccttgcttccattct

SEQ ID NO: 4268170 - DNA, 25 bp, Homo sapien
cactcagttttgtgatctatatgaa

SEQ ID NO: 4268171 - DNA, 25 bp, Homo sapien
aatgtttaagaactcaactttgtca

SEQ ID NO: 4268172 - DNA, 25 bp, Homo sapien
cagaggttggtacacatgccattca

SEQ ID NO: 4268173 - DNA, 25 bp, Homo sapien
ccaagtgtctaaaagtgaagatagg

SEQ ID NO: 4268174 - DNA, 25 bp, Homo sapien
caggtggcctttaggaggcttccac

SEQ ID NO: 4268175 - DNA, 25 bp, Homo sapien
ggtggcctttaggaggcttccactc

SEQ ID NO: 4268176 - DNA, 25 bp, Homo sapien
tggcctttaggaggcttccactcac

SEQ ID NO: 4268177 - DNA, 25 bp, Homo sapien
tcaggtggcctttaggaggcttcca

SEQ ID NO: 4268178 - DNA, 25 bp, Homo sapien
tttgattgggtaccgagctcgtttg

SEQ ID NO: 4268179 - DNA, 25 bp, Homo sapien
ccgagctcgtttgtaattatgttca

SEQ ID NO: 4268180 - DNA, 25 bp, Homo sapien
gatcaaaccgctcctttttgattgg

SEQ ID NO: 4268181 - DNA, 25 bp, Homo sapien
gaaattagcttttatgtgatcaaac

SEQ ID NO: 4268182 - DNA, 25 bp, Homo sapien
tgtggtcacattattgtaagatagc

SEQ ID NO: 4268183 - DNA, 25 bp, Homo sapien
taaatagttcaatgtggtcacatta

SEQ ID NO: 4268184 - DNA, 25 bp, Homo sapien
cacattattgtaagatagcagcaac

SEQ ID NO: 4268185 - DNA, 25 bp, Homo sapien
gtaagatagcagcaacagtttcttc

SEQ ID NO: 4268186 - DNA, 25 bp, Homo sapien
tgaatttgtgtggcacctttgcaca

SEQ ID NO: 4268187 - DNA, 25 bp, Homo sapien
catgaatttgtgtggcacctttgca

SEQ ID NO: 4268188 - DNA, 25 bp, Homo sapien
aatttgtgtggcacctttgcacatg

SEQ ID NO: 4268189 - DNA, 25 bp, Homo sapien
gtacatgtgctatcaaagtaagccc

SEQ ID NO: 4268190 - DNA, 25 bp, Homo sapien
ttaattctggctcaatggcaaaaca

SEQ ID NO: 4268191 - DNA, 25 bp, Homo sapien
agaagtagctatttcttcaaaatcc

SEQ ID NO: 4268192 - DNA, 25 bp, Homo sapien
tcaaaatccacttttgtgtcattaa

SEQ ID NO: 4268193 - DNA, 25 bp, Homo sapien
acacagaagtagctatttcttcaaa

SEQ ID NO: 4268194 - DNA, 25 bp, Homo sapien
aaatccacttttgtgtcattaatca

SEQ ID NO: 4268195 - DNA, 25 bp, Homo sapien
gtaaaaaaacactattcatgagata

SEQ ID NO: 4268196 - DNA, 25 bp, Homo sapien
tctgtgctgcatctttgatctgata

SEQ ID NO: 4268197 - DNA, 25 bp, Homo sapien
tattttagtgaacccaatatattac

SEQ ID NO: 4268198 - DNA, 25 bp, Homo sapien
tattacttcaatatgtaatcagtaa

SEQ ID NO: 4268199 - DNA, 25 bp, Homo sapien
taaaataaagtcgctgccactgtgg

SEQ ID NO: 4268200 - DNA, 25 bp, Homo sapien
aataaagtcgctgccactgtggtcc

SEQ ID NO: 4268201 - DNA, 25 bp, Homo sapien
aaaataaagtcgctgccactgtggt

SEQ ID NO: 4268202 - DNA, 25 bp, Homo sapien
aaataaagtcgctgccactgtggtc

SEQ ID NO: 4268203 - DNA, 25 bp, Homo sapien
gcttagacctctatgtctatgcaaa

SEQ ID NO: 4268204 - DNA, 25 bp, Homo sapien
ccataaaactgagttaggatcccag

SEQ ID NO: 4268205 - DNA, 25 bp, Homo sapien
gcatttgactgcttaaaccataaaa

SEQ ID NO: 4268206 - DNA, 25 bp, Homo sapien
tccccttgaaaagcatgcttagacc

SEQ ID NO: 4268207 - DNA, 25 bp, Homo sapien
gaaaatcagtaggaacaacgccagt

SEQ ID NO: 4268208 - DNA, 25 bp, Homo sapien
acaacgccagtaggaacaaatcagt

SEQ ID NO: 4268209 - DNA, 25 bp, Homo sapien
gtaggaaaatcagtaggaacaacgc

SEQ ID NO: 4268210 - DNA, 25 bp, Homo sapien
gccaataggaacaaagtccctatct

SEQ ID NO: 4268211 - DNA, 25 bp, Homo sapien
tggagcgctaaggccagtggaagga

SEQ ID NO: 4268212 - DNA, 25 bp, Homo sapien
gggcagtgagttggagcgctaaggc

SEQ ID NO: 4268213 - DNA, 25 bp, Homo sapien
cagtgagttggagcgctaaggccag

SEQ ID NO: 4268214 - DNA, 25 bp, Homo sapien
ttggagcgctaaggccagtggaagg

SEQ ID NO: 4268215 - DNA, 25 bp, Homo sapien
catgaccctgagattgcccctctgg

SEQ ID NO: 4268216 - DNA, 25 bp, Homo sapien
tctggactgctttcacccacagccg

SEQ ID NO: 4268217 - DNA, 25 bp, Homo sapien
gaccctgagattgcccctctggact

SEQ ID NO: 4268218 - DNA, 25 bp, Homo sapien
ctctggactgctttcacccacagcc

SEQ ID NO: 4268219 - DNA, 25 bp, Homo sapien
catggcacaataatcatcggagacc

SEQ ID NO: 4268220 - DNA, 25 bp, Homo sapien
tcatagtccaaccatttgaacggta

SEQ ID NO: 4268221 - DNA, 25 bp, Homo sapien
caaatgcggaggtagttgggactaa

SEQ ID NO: 4268222 - DNA, 25 bp, Homo sapien
tagacatgttagcttgtacaagtcc

SEQ ID NO: 4268223 - DNA, 25 bp, Homo sapien
gcttaagccaatggaggataccaga

SEQ ID NO: 4268224 - DNA, 25 bp, Homo sapien
tatggctggtttgcagaaggtcact

SEQ ID NO: 4268225 - DNA, 25 bp, Homo sapien
catctggctttataaggccctggaa

SEQ ID NO: 4268226 - DNA, 25 bp, Homo sapien
tagtaaagaggaacttaggtgccac

SEQ ID NO: 4268227 - DNA, 25 bp, Homo sapien
taacagctgctgactgaatggcagc

SEQ ID NO: 4268228 - DNA, 25 bp, Homo sapien
tcattttgtcctggcaccttagtag

SEQ ID NO: 4268229 - DNA, 25 bp, Homo sapien
gcagccagaagttcactaccaacaa

SEQ ID NO: 4268230 - DNA, 25 bp, Homo sapien
ggcatgacttcttggttgcatttca

SEQ ID NO: 4268231 - DNA, 25 bp, Homo sapien
ttaacaatgcgtggccatgcatacc

SEQ ID NO: 4268232 - DNA, 25 bp, Homo sapien
caatgcgtggccatgcataccagtc

SEQ ID NO: 4268233 - DNA, 25 bp, Homo sapien
aatgtttaacaatgcgtggccatgc

SEQ ID NO: 4268234 - DNA, 25 bp, Homo sapien
gagtgtggaatgtttaacaatgcgt

SEQ ID NO: 4268235 - DNA, 25 bp, Homo sapien
ccatcgctgtatttgcctccttccc

SEQ ID NO: 4268236 - DNA, 25 bp, Homo sapien
tggtccatcgctgtatttgcctcct

SEQ ID NO: 4268237 - DNA, 25 bp, Homo sapien
gtccatcgctgtatttgcctccttc

SEQ ID NO: 4268238 - DNA, 25 bp, Homo sapien
tgtggtccatcgctgtatttgcctc

SEQ ID NO: 4268239 - DNA, 25 bp, Homo sapien
cttaagagtatgaaaattgttacac

SEQ ID NO: 4268240 - DNA, 25 bp, Homo sapien
taagagtatgaaaattgttacacca

SEQ ID NO: 4268241 - DNA, 25 bp, Homo sapien
agagtatgaaaattgttacaccaat

SEQ ID NO: 4268242 - DNA, 25 bp, Homo sapien
ttaagagtatgaaaattgttacacc

SEQ ID NO: 4268243 - DNA, 25 bp, Homo sapien
attctgccaaactctcaagtatgaa

SEQ ID NO: 4268244 - DNA, 25 bp, Homo sapien
atattctgccaaactctcaagtatg

SEQ ID NO: 4268245 - DNA, 25 bp, Homo sapien
tcttaaagagggcatattctgccaa

SEQ ID NO: 4268246 - DNA, 25 bp, Homo sapien
ttaaagagggcatattctgccaaac

SEQ ID NO: 4268247 - DNA, 25 bp, Homo sapien
cctggttatcttctgacagatgcag

SEQ ID NO: 4268248 - DNA, 25 bp, Homo sapien
acgtagttaacctggttatcttctg

SEQ ID NO: 4268249 - DNA, 25 bp, Homo sapien
agttaacctggttatcttctgacag

SEQ ID NO: 4268250 - DNA, 25 bp, Homo sapien
ttctgacagatgcagttctttcttc

SEQ ID NO: 4268251 - DNA, 25 bp, Homo sapien
taactgaacccatcataggaggtct

SEQ ID NO: 4268252 - DNA, 25 bp, Homo sapien
agaaataatacccaggtcctgaagc

SEQ ID NO: 4268253 - DNA, 25 bp, Homo sapien
tcaacatcgggtctccttaacacct

SEQ ID NO: 4268254 - DNA, 25 bp, Homo sapien
tctgttgacagtatcagtgctgcca

SEQ ID NO: 4268255 - DNA, 25 bp, Homo sapien
agactctttaacctctttctatgtg

SEQ ID NO: 4268256 - DNA, 25 bp, Homo sapien
ttatcaagactctttaacctctttc

SEQ ID NO: 4268257 - DNA, 25 bp, Homo sapien
ctatgtgtgccactttgcttaaaag

SEQ ID NO: 4268258 - DNA, 25 bp, Homo sapien
taacctctttctatgtgtgccactt

SEQ ID NO: 4268259 - DNA, 25 bp, Homo sapien
ccactggatgctaaccagcatgctg

SEQ ID NO: 4268260 - DNA, 25 bp, Homo sapien
gcctgattgtggccccgtaacactc

SEQ ID NO: 4268261 - DNA, 25 bp, Homo sapien
ccaccactggatgctaaccagcatg

SEQ ID NO: 4268262 - DNA, 25 bp, Homo sapien
tgcctgattgtggccccgtaacact

SEQ ID NO: 4268263 - DNA, 25 bp, Homo sapien
tgggttaccctttgaagattcatat

SEQ ID NO: 4268264 - DNA, 25 bp, Homo sapien
tctctaattgacctgcaactttggg

SEQ ID NO: 4268265 - DNA, 25 bp, Homo sapien
catttataccatggccataatctct

SEQ ID NO: 4268266 - DNA, 25 bp, Homo sapien
tcatattcacgagcggagcatgcag

SEQ ID NO: 4268267 - DNA, 25 bp, Homo sapien
tttctttgtcaacagccttgcactg

SEQ ID NO: 4268268 - DNA, 25 bp, Homo sapien
cttgctgccgaacttgtgtctcttg

SEQ ID NO: 4268269 - DNA, 25 bp, Homo sapien
ttctttgtcaacagccttgcactgg

SEQ ID NO: 4268270 - DNA, 25 bp, Homo sapien
tgaaagcttgctgccgaacttgtgt

SEQ ID NO: 4268271 - DNA, 25 bp, Homo sapien
cagcatttccccgtccacttttgga

SEQ ID NO: 4268272 - DNA, 25 bp, Homo sapien
tccacttttggatgatatagttggg

SEQ ID NO: 4268273 - DNA, 25 bp, Homo sapien
cacagcatttccccgtccacttttg

SEQ ID NO: 4268274 - DNA, 25 bp, Homo sapien
gcatttccccgtccacttttggatg

SEQ ID NO: 4268275 - DNA, 25 bp, Homo sapien
ggcttgtttgacagtcaacaaggaa

SEQ ID NO: 4268276 - DNA, 25 bp, Homo sapien
tttgtagcacaaataaacaccatac

SEQ ID NO: 4268277 - DNA, 25 bp, Homo sapien
aacaaggaaattgaattgctcttga

SEQ ID NO: 4268278 - DNA, 25 bp, Homo sapien
tgaacaagtaaatgggttcccactc

SEQ ID NO: 4268279 - DNA, 25 bp, Homo sapien
tcgcagaatgtatcctaagaaaatg

SEQ ID NO: 4268280 - DNA, 25 bp, Homo sapien
tgtccagcacatacaacaagcaggt

SEQ ID NO: 4268281 - DNA, 25 bp, Homo sapien
taacatggtcattctactcgcagaa

SEQ ID NO: 4268282 - DNA, 25 bp, Homo sapien
tacacagtgggttactctgaaggat

SEQ ID NO: 4268283 - DNA, 25 bp, Homo sapien
tgtttcccaaagacttccactcttc

SEQ ID NO: 4268284 - DNA, 25 bp, Homo sapien
tgtgggtgtttcccaaagacttcca

SEQ ID NO: 4268285 - DNA, 25 bp, Homo sapien
cgcttagcaatattatgacttcaag

SEQ ID NO: 4268286 - DNA, 25 bp, Homo sapien
ttgctacgttctcgcttagcaatat

SEQ ID NO: 4268287 - DNA, 25 bp, Homo sapien
cccttttgaataaataagcctaatg

SEQ ID NO: 4268288 - DNA, 25 bp, Homo sapien
gcctaatgcattggaatcagtctga

SEQ ID NO: 4268289 - DNA, 25 bp, Homo sapien
gaataaataagcctaatgcattgga

SEQ ID NO: 4268290 - DNA, 25 bp, Homo sapien
aatcagtctgaaagtccacaatttg

SEQ ID NO: 4268291 - DNA, 25 bp, Homo sapien
cttgccttcaatgcaagagatccat

SEQ ID NO: 4268292 - DNA, 25 bp, Homo sapien
tccatagactccatttcagggacca

SEQ ID NO: 4268293 - DNA, 25 bp, Homo sapien
tagactccatttcagggaccatgca

SEQ ID NO: 4268294 - DNA, 25 bp, Homo sapien
caatgcaagagatccatagactcca

SEQ ID NO: 4268295 - DNA, 25 bp, Homo sapien
tgcggagcaagagtgtaaagtccat

SEQ ID NO: 4268296 - DNA, 25 bp, Homo sapien
tcatcacagagttgacagcctttgt

SEQ ID NO: 4268297 - DNA, 25 bp, Homo sapien
actttgcaaggtgctctgcggagca

SEQ ID NO: 4268298 - DNA, 25 bp, Homo sapien
cctttgtggcctaaattcattgagc

SEQ ID NO: 4268299 - DNA, 25 bp, Homo sapien
taactgcaggtctgactgttatcaa

SEQ ID NO: 4268300 - DNA, 25 bp, Homo sapien
aaccaaagaacagcagagccagagt

SEQ ID NO: 4268301 - DNA, 25 bp, Homo sapien
tcaagtgatcctgttctggtgtaat

SEQ ID NO: 4268302 - DNA, 25 bp, Homo sapien
ccctgggagacatcttgtgcagaat

SEQ ID NO: 4268303 - DNA, 25 bp, Homo sapien
aattggtctcttctatcttcaccat

SEQ ID NO: 4268304 - DNA, 25 bp, Homo sapien
taattggtctcttctatcttcacca

SEQ ID NO: 4268305 - DNA, 25 bp, Homo sapien
gccacttggttgaaagaatgtcata

SEQ ID NO: 4268306 - DNA, 25 bp, Homo sapien
tatgaaggagtgtatgtaatgagag

SEQ ID NO: 4268307 - DNA, 25 bp, Homo sapien
aacattaacacatacaaaggacggg

SEQ ID NO: 4268308 - DNA, 25 bp, Homo sapien
ggcacattagcctcataccagagag

SEQ ID NO: 4268309 - DNA, 25 bp, Homo sapien
gtaagtctgcattgttcagctgatg

SEQ ID NO: 4268310 - DNA, 25 bp, Homo sapien
aatgtattcctgaatatctgtatcc

SEQ ID NO: 4268311 - DNA, 25 bp, Homo sapien
aagtaagtctgcattgttcagctga

SEQ ID NO: 4268312 - DNA, 25 bp, Homo sapien
ttctctcccattgaggtttctagtt

SEQ ID NO: 4268313 - DNA, 25 bp, Homo sapien
gctttcagttctaggctaggttttg

SEQ ID NO: 4268314 - DNA, 25 bp, Homo sapien
aaacatcttttgtgggttccatagg

SEQ ID NO: 4268315 - DNA, 25 bp, Homo sapien
ccccacatatgcttctaatgctcct

SEQ ID NO: 4268316 - DNA, 25 bp, Homo sapien
caaacgctttgtgttgaagcaggtc

SEQ ID NO: 4268317 - DNA, 25 bp, Homo sapien
caaagaatctccaagagcgctgagg

SEQ ID NO: 4268318 - DNA, 25 bp, Homo sapien
gagaatacatgcctgctcgctggga

SEQ ID NO: 4268319 - DNA, 25 bp, Homo sapien
gaacaaggcttcgtcaagagtcccc

SEQ ID NO: 4268320 - DNA, 25 bp, Homo sapien
gattaatgatgctcacgctgctgcg

SEQ ID NO: 4268321 - DNA, 25 bp, Homo sapien
cgagcgaagcggccaggggcacaga

SEQ ID NO: 4268322 - DNA, 25 bp, Homo sapien
tactagcagttaaataaatcgacca

SEQ ID NO: 4268323 - DNA, 25 bp, Homo sapien
ttctgagcgcgtccggagcagagac

SEQ ID NO: 4268324 - DNA, 25 bp, Homo sapien
tgacagacgtgcagacggacagaag

SEQ ID NO: 4268325 - DNA, 25 bp, Homo sapien
ggatcccagccgacactgcagaaag

SEQ ID NO: 4268326 - DNA, 25 bp, Homo sapien
aacaaacaaatccagccaaatcaat

SEQ ID NO: 4268327 - DNA, 25 bp, Homo sapien
caaacaaatccagccaaatcaatca

SEQ ID NO: 4268328 - DNA, 25 bp, Homo sapien
aatccagccaaatcaatcattgaga

SEQ ID NO: 4268329 - DNA, 25 bp, Homo sapien
caaatccagccaaatcaatcattga

SEQ ID NO: 4268330 - DNA, 25 bp, Homo sapien
cgcaggggggatatccacagttcga

SEQ ID NO: 4268331 - DNA, 25 bp, Homo sapien
gggatatccacagttcgatcaaggt

SEQ ID NO: 4268332 - DNA, 25 bp, Homo sapien
aggtaataatcaaggtcttccgacg

SEQ ID NO: 4268333 - DNA, 25 bp, Homo sapien
cacagttcgatcaaggtaataatca

SEQ ID NO: 4268334 - DNA, 25 bp, Homo sapien
aagatgtagggtaaggacagaatcc

SEQ ID NO: 4268335 - DNA, 25 bp, Homo sapien
gatgtagggtaaggacagaatccaa

SEQ ID NO: 4268336 - DNA, 25 bp, Homo sapien
tgtagggtaaggacagaatccaagc

SEQ ID NO: 4268337 - DNA, 25 bp, Homo sapien
agatgtagggtaaggacagaatcca

SEQ ID NO: 4268338 - DNA, 25 bp, Homo sapien
gaaatcccagcgttgctagcatcag

SEQ ID NO: 4268339 - DNA, 25 bp, Homo sapien
aaactatactctgcatttacatgtt

SEQ ID NO: 4268340 - DNA, 25 bp, Homo sapien
tttctaaaactgcaagctaaagtcc

SEQ ID NO: 4268341 - DNA, 25 bp, Homo sapien
atatctatgtaactttgatggaaat

SEQ ID NO: 4268342 - DNA, 25 bp, Homo sapien
atatgctgatgttgtaagaaatttt

SEQ ID NO: 4268343 - DNA, 25 bp, Homo sapien
tatgctgatgttgtaagaaattttg

SEQ ID NO: 4268344 - DNA, 25 bp, Homo sapien
ctgatgttgtaagaaattttggaaa

SEQ ID NO: 4268345 - DNA, 25 bp, Homo sapien
tgctgatgttgtaagaaattttgga

SEQ ID NO: 4268346 - DNA, 25 bp, Homo sapien
actagctggtattaatgattcatca

SEQ ID NO: 4268347 - DNA, 25 bp, Homo sapien
aactagctggtattaatgattcatc

SEQ ID NO: 4268348 - DNA, 25 bp, Homo sapien
cacagcaaagaactagctggtatta

SEQ ID NO: 4268349 - DNA, 25 bp, Homo sapien
caaagaactagctggtattaatgat

SEQ ID NO: 4268350 - DNA, 25 bp, Homo sapien
gaaattttcacgtaatcactaacag

SEQ ID NO: 4268351 - DNA, 25 bp, Homo sapien
tgcatacacatgctgcagctatctg

SEQ ID NO: 4268352 - DNA, 25 bp, Homo sapien
tctgcttacccttagcattgttaag

SEQ ID NO: 4268353 - DNA, 25 bp, Homo sapien
taagttaatctagcatataatcatg

SEQ ID NO: 4268354 - DNA, 25 bp, Homo sapien
acttggcttgctctttctgcactct

SEQ ID NO: 4268355 - DNA, 25 bp, Homo sapien
gctctgcgggaattacttcacttgg

SEQ ID NO: 4268356 - DNA, 25 bp, Homo sapien
tctgctctgcgggaattacttcact

SEQ ID NO: 4268357 - DNA, 25 bp, Homo sapien
gttctgctctgcgggaattacttca

SEQ ID NO: 4268358 - DNA, 25 bp, Homo sapien
ttctgtagccttgtgagtattattt

SEQ ID NO: 4268359 - DNA, 25 bp, Homo sapien
tctgtagccttgtgagtattatttg

SEQ ID NO: 4268360 - DNA, 25 bp, Homo sapien
tctgagcacagtttaaccgtttttc

SEQ ID NO: 4268361 - DNA, 25 bp, Homo sapien
ttttcttcagtactgcatggaccat

SEQ ID NO: 4268362 - DNA, 25 bp, Homo sapien
cccagggagtttctgagcacagttt

SEQ ID NO: 4268363 - DNA, 25 bp, Homo sapien
tcagtactgcatggaccattcagcc

SEQ ID NO: 4268364 - DNA, 25 bp, Homo sapien
ttctagcaaatatgttgatctcaac

SEQ ID NO: 4268365 - DNA, 25 bp, Homo sapien
gcaaatatgttgatctcaacacagc

SEQ ID NO: 4268366 - DNA, 25 bp, Homo sapien
tttttctagcaaatatgttgatctc

SEQ ID NO: 4268367 - DNA, 25 bp, Homo sapien
tagcaaatatgttgatctcaacaca

SEQ ID NO: 4268368 - DNA, 25 bp, Homo sapien
tgatgctgtcggattcttggcttat

SEQ ID NO: 4268369 - DNA, 25 bp, Homo sapien
cttgatgctgtcggattcttggctt

SEQ ID NO: 4268370 - DNA, 25 bp, Homo sapien
gatgctgtcggattcttggcttatt

SEQ ID NO: 4268371 - DNA, 25 bp, Homo sapien
tgctgtcggattcttggcttatttt

SEQ ID NO: 4268372 - DNA, 25 bp, Homo sapien
gggagcagagcctttggcttctttc

SEQ ID NO: 4268373 - DNA, 25 bp, Homo sapien
tctctgtgacattgattttggtcaa

SEQ ID NO: 4268374 - DNA, 25 bp, Homo sapien
ttctttctctgtgacattgattttg

SEQ ID NO: 4268375 - DNA, 25 bp, Homo sapien
tttctctgtgacattgattttggtc

SEQ ID NO: 4268376 - DNA, 25 bp, Homo sapien
tgttactgtgttcaactctaaacta

SEQ ID NO: 4268377 - DNA, 25 bp, Homo sapien
acaacctgaattgttactgtgttca

SEQ ID NO: 4268378 - DNA, 25 bp, Homo sapien
atctccacaacctgaattgttactg

SEQ ID NO: 4268379 - DNA, 25 bp, Homo sapien
taagaaacagcgtgaatataaagtg

SEQ ID NO: 4268380 - DNA, 25 bp, Homo sapien
cccatttgacaaggtaccaggagga

SEQ ID NO: 4268381 - DNA, 25 bp, Homo sapien
tgcccactctggacctaagtctagt

SEQ ID NO: 4268382 - DNA, 25 bp, Homo sapien
gatggcttgtaatgtactgcacaca

SEQ ID NO: 4268383 - DNA, 25 bp, Homo sapien
gaaaccaagactagctttgtaggag

SEQ ID NO: 4268384 - DNA, 25 bp, Homo sapien
ctgcaagttcccaaataccactgga

SEQ ID NO: 4268385 - DNA, 25 bp, Homo sapien
tctggctagtaggtatcatattact

SEQ ID NO: 4268386 - DNA, 25 bp, Homo sapien
ttcaagcagctattggatagagcag

SEQ ID NO: 4268387 - DNA, 25 bp, Homo sapien
tagagcagatatggaacactgatat

SEQ ID NO: 4268388 - DNA, 25 bp, Homo sapien
tgttaatgtgtttatgagtgttagg

SEQ ID NO: 4268389 - DNA, 25 bp, Homo sapien
tgtttatgagtgttaggatttacct

SEQ ID NO: 4268390 - DNA, 25 bp, Homo sapien
gttaggatttacctccgttgcagga

SEQ ID NO: 4268391 - DNA, 25 bp, Homo sapien
ccgttgcaggaattactacaagaac

SEQ ID NO: 4268392 - DNA, 25 bp, Homo sapien
cagaagggtaacttagcacaaagcc

SEQ ID NO: 4268393 - DNA, 25 bp, Homo sapien
gccattcacacaattgtaaaagcaa

SEQ ID NO: 4268394 - DNA, 25 bp, Homo sapien
cagaaactcagaagggtaacttagc

SEQ ID NO: 4268395 - DNA, 25 bp, Homo sapien
tggatttcatcacccacccaaataa

SEQ ID NO: 4268396 - DNA, 25 bp, Homo sapien
ctggattccagtaggtgattccagt

SEQ ID NO: 4268397 - DNA, 25 bp, Homo sapien
gacagatatctcattactatcatct

SEQ ID NO: 4268398 - DNA, 25 bp, Homo sapien
ccagtaggtgattccagtaggagag

SEQ ID NO: 4268399 - DNA, 25 bp, Homo sapien
gattccagtaggtgattccagtagg

SEQ ID NO: 4268400 - DNA, 25 bp, Homo sapien
gagggcaagctccaatgaccagata

SEQ ID NO: 4268401 - DNA, 25 bp, Homo sapien
ttccagtaggggaggaacaagactg

SEQ ID NO: 4268402 - DNA, 25 bp, Homo sapien
agggcaagctccaatgaccagatat

SEQ ID NO: 4268403 - DNA, 25 bp, Homo sapien
tggattccagtaggggaggaacaag

SEQ ID NO: 4268404 - DNA, 25 bp, Homo sapien
tggagcagcacagactccgacagtt

SEQ ID NO: 4268405 - DNA, 25 bp, Homo sapien
catctgggagtcgacagagcagctc

SEQ ID NO: 4268406 - DNA, 25 bp, Homo sapien
tggtctgaccaccaaagggcctgga

SEQ ID NO: 4268407 - DNA, 25 bp, Homo sapien
catgcatgtaaggtaatcctgtccc

SEQ ID NO: 4268408 - DNA, 25 bp, Homo sapien
ccaagacggcgagttttgggggcat

SEQ ID NO: 4268409 - DNA, 25 bp, Homo sapien
caccttgatttttttgctccttggg

SEQ ID NO: 4268410 - DNA, 25 bp, Homo sapien
ttgtgcttctgctgttcttcacctt

SEQ ID NO: 4268411 - DNA, 25 bp, Homo sapien
tcattctttgtgcttctgctgttct

SEQ ID NO: 4268412 - DNA, 25 bp, Homo sapien
tctttgtgcttctgctgttcttcac

SEQ ID NO: 4268413 - DNA, 25 bp, Homo sapien
ccttcacatttatgctcctgtccaa

SEQ ID NO: 4268414 - DNA, 25 bp, Homo sapien
cttcacatttatgctcctgtccaaa

SEQ ID NO: 4268415 - DNA, 25 bp, Homo sapien
tctacctgctagaaaaggctcagct

SEQ ID NO: 4268416 - DNA, 25 bp, Homo sapien
actgctgagttcaattgatccttcc

SEQ ID NO: 4268417 - DNA, 25 bp, Homo sapien
tgaactgccgagctcaaataagcct

SEQ ID NO: 4268418 - DNA, 25 bp, Homo sapien
caggctagagtccactggcatgaga

SEQ ID NO: 4268419 - DNA, 25 bp, Homo sapien
gatcccagggagctgtcttcctgtc

SEQ ID NO: 4268420 - DNA, 25 bp, Homo sapien
gagctgtcttcctgtctctgctcac

SEQ ID NO: 4268421 - DNA, 25 bp, Homo sapien
aggatcccagggagctgtcttcctg

SEQ ID NO: 4268422 - DNA, 25 bp, Homo sapien
tcaggatcccagggagctgtcttcc

SEQ ID NO: 4268423 - DNA, 25 bp, Homo sapien
tggtgacagccagcacttgtacgat

SEQ ID NO: 4268424 - DNA, 25 bp, Homo sapien
actggtggccctcagggttggtggc

SEQ ID NO: 4268425 - DNA, 25 bp, Homo sapien
ggcattgtcttgaagactggatact

SEQ ID NO: 4268426 - DNA, 25 bp, Homo sapien
gcacttgtacgatgacaactgccat

SEQ ID NO: 4268427 - DNA, 25 bp, Homo sapien
tgagtactggctgaccctctgccat

SEQ ID NO: 4268428 - DNA, 25 bp, Homo sapien
ggagttgagtactggctgaccctct

SEQ ID NO: 4268429 - DNA, 25 bp, Homo sapien
caaggtgtggagttgagtactggct

SEQ ID NO: 4268430 - DNA, 25 bp, Homo sapien
gttgagtactggctgaccctctgcc

SEQ ID NO: 4268431 - DNA, 25 bp, Homo sapien
aattctaagcaggattgccttgccc

SEQ ID NO: 4268432 - DNA, 25 bp, Homo sapien
tctaagcaggattgccttgccctca

SEQ ID NO: 4268433 - DNA, 25 bp, Homo sapien
tcaaggtttacatctgtcaaaatgt

SEQ ID NO: 4268434 - DNA, 25 bp, Homo sapien
caaggtttacatctgtcaaaatgtc

SEQ ID NO: 4268435 - DNA, 25 bp, Homo sapien
tgtctaaaattcctccttttattca

SEQ ID NO: 4268436 - DNA, 25 bp, Homo sapien
tcatttctttttcttcatcaacttg

SEQ ID NO: 4268437 - DNA, 25 bp, Homo sapien
catttctttttcttcatcaacttgt

SEQ ID NO: 4268438 - DNA, 25 bp, Homo sapien
ttagttccgtagatgtctaaaattc

SEQ ID NO: 4268439 - DNA, 25 bp, Homo sapien
gccctgtaatagtctaacaagttag

SEQ ID NO: 4268440 - DNA, 25 bp, Homo sapien
caagggactcagatgtgttaggtac

SEQ ID NO: 4268441 - DNA, 25 bp, Homo sapien
tgttaggtactgagaagccctgtaa

SEQ ID NO: 4268442 - DNA, 25 bp, Homo sapien
taacaagttagaagacaagcccttc

SEQ ID NO: 4268443 - DNA, 25 bp, Homo sapien
tgtggaagccgtagaaggagcagtt

SEQ ID NO: 4268444 - DNA, 25 bp, Homo sapien
ctcttgtggaaatttagagtgtgga

SEQ ID NO: 4268445 - DNA, 25 bp, Homo sapien
gaaatttagagtgtggaagccgtag

SEQ ID NO: 4268446 - DNA, 25 bp, Homo sapien
tgtggaaatttagagtgtggaagcc

SEQ ID NO: 4268447 - DNA, 25 bp, Homo sapien
tcaaagattgtgaggaaagccatta

SEQ ID NO: 4268448 - DNA, 25 bp, Homo sapien
tgaaatggtcctagtaattaaaagc

SEQ ID NO: 4268449 - DNA, 25 bp, Homo sapien
ccagtagcctggaacagtcaaatca

SEQ ID NO: 4268450 - DNA, 25 bp, Homo sapien
tgtttgaatagcctcacccatacct

SEQ ID NO: 4268451 - DNA, 25 bp, Homo sapien
cagtataccgccttccctgtttcaa

SEQ ID NO: 4268452 - DNA, 25 bp, Homo sapien
tcagtataccgccttccctgtttca

SEQ ID NO: 4268453 - DNA, 25 bp, Homo sapien
gcacaaccagttcaaaagatctctt

SEQ ID NO: 4268454 - DNA, 25 bp, Homo sapien
ttcgcaggttaccagccagtcttgt

SEQ ID NO: 4268455 - DNA, 25 bp, Homo sapien
gatctcttttcttcgcaggttacca

SEQ ID NO: 4268456 - DNA, 25 bp, Homo sapien
tgcacaaccagttcaaaagatctct

SEQ ID NO: 4268457 - DNA, 25 bp, Homo sapien
gtggctggctgggtaatgcgtgctt

SEQ ID NO: 4268458 - DNA, 25 bp, Homo sapien
caggtgctcataagcagcttggaaa

SEQ ID NO: 4268459 - DNA, 25 bp, Homo sapien
acaatgtcttcttatcaggtgctca

SEQ ID NO: 4268460 - DNA, 25 bp, Homo sapien
gctgggtaatgcgtgcttggtccat

SEQ ID NO: 4268461 - DNA, 25 bp, Homo sapien
catcacaaggcatagtcactataat

SEQ ID NO: 4268462 - DNA, 25 bp, Homo sapien
tgcatcacaaggcatagtcactata

SEQ ID NO: 4268463 - DNA, 25 bp, Homo sapien
gcatcacaaggcatagtcactataa

SEQ ID NO: 4268464 - DNA, 25 bp, Homo sapien
ctgcatcacaaggcatagtcactat

SEQ ID NO: 4268465 - DNA, 25 bp, Homo sapien
cactaccttattgatatcgtaacag

SEQ ID NO: 4268466 - DNA, 25 bp, Homo sapien
cttctgtagaggaaaatcactacct

SEQ ID NO: 4268467 - DNA, 25 bp, Homo sapien
gaatgagaggcagctgatactcttc

SEQ ID NO: 4268468 - DNA, 25 bp, Homo sapien
gctgggcttgatggtgcttcctcta

SEQ ID NO: 4268469 - DNA, 25 bp, Homo sapien
tggcaagactcatattgtaccagag

SEQ ID NO: 4268470 - DNA, 25 bp, Homo sapien
gaggactaggatgtctgtattccat

SEQ ID NO: 4268471 - DNA, 25 bp, Homo sapien
tattgtaccagaggactaggatgtc

SEQ ID NO: 4268472 - DNA, 25 bp, Homo sapien
tacatgctggcaagactcatattgt

SEQ ID NO: 4268473 - DNA, 25 bp, Homo sapien
agtggcgttctaacaggaagcagag

SEQ ID NO: 4268474 - DNA, 25 bp, Homo sapien
agaagtggggcaagcaccaacctcg

SEQ ID NO: 4268475 - DNA, 25 bp, Homo sapien
caccaacctcgcaaagtaacacagt

SEQ ID NO: 4268476 - DNA, 25 bp, Homo sapien
gcccagggaaagtggcgttctaaca

SEQ ID NO: 4268477 - DNA, 25 bp, Homo sapien
tgacatgttattggggcagaggatt

SEQ ID NO: 4268478 - DNA, 25 bp, Homo sapien
gccagagccagatcttcagatagca

SEQ ID NO: 4268479 - DNA, 25 bp, Homo sapien
agccattagagataagattgactgg

SEQ ID NO: 4268480 - DNA, 25 bp, Homo sapien
gataagattgactggtgatacagaa

SEQ ID NO: 4268481 - DNA, 25 bp, Homo sapien
gaaggttgactagggtgagaaagac

SEQ ID NO: 4268482 - DNA, 25 bp, Homo sapien
cagaaggttgactagggtgagaaag

SEQ ID NO: 4268483 - DNA, 25 bp, Homo sapien
ctatcctttaagctccttttgtagt

SEQ ID NO: 4268484 - DNA, 25 bp, Homo sapien
tatcctttaagctccttttgtagta

SEQ ID NO: 4268485 - DNA, 25 bp, Homo sapien
taagctccttttgtagtaaaaggca

SEQ ID NO: 4268486 - DNA, 25 bp, Homo sapien
gctccttttgtagtaaaaggcagaa

SEQ ID NO: 4268487 - DNA, 25 bp, Homo sapien
ttgcagcctctaaaaaacagtgctt

SEQ ID NO: 4268488 - DNA, 25 bp, Homo sapien
tgcagcctctaaaaaacagtgcttc

SEQ ID NO: 4268489 - DNA, 25 bp, Homo sapien
agtgcttccttcaatttaagttttg

SEQ ID NO: 4268490 - DNA, 25 bp, Homo sapien
aacagtgcttccttcaatttaagtt

SEQ ID NO: 4268491 - DNA, 25 bp, Homo sapien
ccttcagatctgagttctttaaact

SEQ ID NO: 4268492 - DNA, 25 bp, Homo sapien
gataaatggtgttggtttagctgtt

SEQ ID NO: 4268493 - DNA, 25 bp, Homo sapien
tagctgttttaatctgtccttcaga

SEQ ID NO: 4268494 - DNA, 25 bp, Homo sapien
tcatgctttccctgaacttcttgga

SEQ ID NO: 4268495 - DNA, 25 bp, Homo sapien
tcaactcaatttttacaggagatgt

SEQ ID NO: 4268496 - DNA, 25 bp, Homo sapien
actcaatttttacaggagatgtgta

SEQ ID NO: 4268497 - DNA, 25 bp, Homo sapien
tttacaggagatgtgtaaaggagtt

SEQ ID NO: 4268498 - DNA, 25 bp, Homo sapien
tttttacaggagatgtgtaaaggag

SEQ ID NO: 4268499 - DNA, 25 bp, Homo sapien
ttctcctctggtcttgtgaattgtg

SEQ ID NO: 4268500 - DNA, 25 bp, Homo sapien
ttgtgaattgtgagttactgcagtg

SEQ ID NO: 4268501 - DNA, 25 bp, Homo sapien
ggtcttgtgaattgtgagttactgc

SEQ ID NO: 4268502 - DNA, 25 bp, Homo sapien
tctggtcttgtgaattgtgagttac

SEQ ID NO: 4268503 - DNA, 25 bp, Homo sapien
tacagatcccaagtccttgttctgc

SEQ ID NO: 4268504 - DNA, 25 bp, Homo sapien
gctgagcaagtatggagacaggtac

SEQ ID NO: 4268505 - DNA, 25 bp, Homo sapien
agctgagcaagtatggagacaggta

SEQ ID NO: 4268506 - DNA, 25 bp, Homo sapien
acagatcccaagtccttgttctgca

SEQ ID NO: 4268507 - DNA, 25 bp, Homo sapien
accagggattccgggtctctgttca

SEQ ID NO: 4268508 - DNA, 25 bp, Homo sapien
ccagggattccgggtctctgttcat

SEQ ID NO: 4268509 - DNA, 25 bp, Homo sapien
cagctgtgtctccattgcaaaccag

SEQ ID NO: 4268510 - DNA, 25 bp, Homo sapien
caaaccagggattccgggtctctgt

SEQ ID NO: 4268511 - DNA, 25 bp, Homo sapien
aaaatgggtctattgtaggcagcat

SEQ ID NO: 4268512 - DNA, 25 bp, Homo sapien
tatatcctttagttgtattgacccc

SEQ ID NO: 4268513 - DNA, 25 bp, Homo sapien
tcagtgtatgtgtgtccttataggg

SEQ ID NO: 4268514 - DNA, 25 bp, Homo sapien
tcttatccatccagacactccatgt

SEQ ID NO: 4268515 - DNA, 25 bp, Homo sapien
ccttactagaaagcatatgccccat

SEQ ID NO: 4268516 - DNA, 25 bp, Homo sapien
cccttactagaaagcatatgcccca

SEQ ID NO: 4268517 - DNA, 25 bp, Homo sapien
acccttactagaaagcatatgcccc

SEQ ID NO: 4268518 - DNA, 25 bp, Homo sapien
gtttagtcagtctctcatacctcat

SEQ ID NO: 4268519 - DNA, 25 bp, Homo sapien
tcatcacactgtttagtcagtctct

SEQ ID NO: 4268520 - DNA, 25 bp, Homo sapien
gtacgacaatccgtcatcacactgt

SEQ ID NO: 4268521 - DNA, 25 bp, Homo sapien
ctgagtaggtacgacaatccgtcat

SEQ ID NO: 4268522 - DNA, 25 bp, Homo sapien
gcagtaatacattgtaaaggccacc

SEQ ID NO: 4268523 - DNA, 25 bp, Homo sapien
gcaagaaagccccagatttttgatc

SEQ ID NO: 4268524 - DNA, 25 bp, Homo sapien
gagagagacttcctcacagctaatg

SEQ ID NO: 4268525 - DNA, 25 bp, Homo sapien
ggtatgcagtagtcaccctaaatga

SEQ ID NO: 4268526 - DNA, 25 bp, Homo sapien
tttgttcaggtatcgtatttgagcc

SEQ ID NO: 4268527 - DNA, 25 bp, Homo sapien
tctttgttcaggtatcgtatttgag

SEQ ID NO: 4268528 - DNA, 25 bp, Homo sapien
ctttgttcaggtatcgtatttgagc

SEQ ID NO: 4268529 - DNA, 25 bp, Homo sapien
aggtagtatcacattagatgtagaa

SEQ ID NO: 4268530 - DNA, 25 bp, Homo sapien
caagcacctactacaaataggtagt

SEQ ID NO: 4268531 - DNA, 25 bp, Homo sapien
gatgtagaactgtggcacaagatca

SEQ ID NO: 4268532 - DNA, 25 bp, Homo sapien
tctgtaggtggacatatactttccc

SEQ ID NO: 4268533 - DNA, 25 bp, Homo sapien
gaattactacctcatcaatatttcc

SEQ ID NO: 4268534 - DNA, 25 bp, Homo sapien
gatgtagaacacacatagcacttgt

SEQ ID NO: 4268535 - DNA, 25 bp, Homo sapien
ggagtcctgatggtctggtatttaa

SEQ ID NO: 4268536 - DNA, 25 bp, Homo sapien
gaacacacatagcacttgtcttttt

SEQ ID NO: 4268537 - DNA, 25 bp, Homo sapien
caggttgtatagctgggctgcctgc

SEQ ID NO: 4268538 - DNA, 25 bp, Homo sapien
ctttttttcccacagtgccatggca

SEQ ID NO: 4268539 - DNA, 25 bp, Homo sapien
taatcccgtgaagcttctgaccagc

SEQ ID NO: 4268540 - DNA, 25 bp, Homo sapien
catggcacacccatggcgggattca

SEQ ID NO: 4268541 - DNA, 25 bp, Homo sapien
tcattactgacactctcagcctgaa

SEQ ID NO: 4268542 - DNA, 25 bp, Homo sapien
gctgctgccctagatgtggacattt

SEQ ID NO: 4268543 - DNA, 25 bp, Homo sapien
gctgccctagatgtggacattttat

SEQ ID NO: 4268544 - DNA, 25 bp, Homo sapien
cctagatgtggacattttatcctgg

SEQ ID NO: 4268545 - DNA, 25 bp, Homo sapien
cgggctgctgccctagatgtggaca

SEQ ID NO: 4268546 - DNA, 25 bp, Homo sapien
tggtgtccagctgaatccaagggag

SEQ ID NO: 4268547 - DNA, 25 bp, Homo sapien
tgacaagtctttggcactagggcag

SEQ ID NO: 4268548 - DNA, 25 bp, Homo sapien
tcttgctggaggaagcgactcatca

SEQ ID NO: 4268549 - DNA, 25 bp, Homo sapien
tagagttgaccctaactatggctgt

SEQ ID NO: 4268550 - DNA, 25 bp, Homo sapien
ggccttggagatttacagctgttgg

SEQ ID NO: 4268551 - DNA, 25 bp, Homo sapien
aggccttggagatttacagctgttg

SEQ ID NO: 4268552 - DNA, 25 bp, Homo sapien
gccttggagatttacagctgttggg

SEQ ID NO: 4268553 - DNA, 25 bp, Homo sapien
gctttttgtcctttgggacgacata

SEQ ID NO: 4268554 - DNA, 25 bp, Homo sapien
cttggtatgatctaatccaaagagg

SEQ ID NO: 4268555 - DNA, 25 bp, Homo sapien
tatgatctaatccaaagaggctcca

SEQ ID NO: 4268556 - DNA, 25 bp, Homo sapien
cgacatacccagtctccaggcataa

SEQ ID NO: 4268557 - DNA, 25 bp, Homo sapien
catggtgtcaaccaatccggaaaac

SEQ ID NO: 4268558 - DNA, 25 bp, Homo sapien
agctgtcaccccgtttcttcttctg

SEQ ID NO: 4268559 - DNA, 25 bp, Homo sapien
agaagcatcatccatggtgtcaacc

SEQ ID NO: 4268560 - DNA, 25 bp, Homo sapien
tcaaccaatccggaaaaccagaagc

SEQ ID NO: 4268561 - DNA, 25 bp, Homo sapien
ctgttgcctgtttctaatggccctc

SEQ ID NO: 4268562 - DNA, 25 bp, Homo sapien
tgcctgtttctaatggccctcatag

SEQ ID NO: 4268563 - DNA, 25 bp, Homo sapien
cctgtttctaatggccctcatagct

SEQ ID NO: 4268564 - DNA, 25 bp, Homo sapien
ttctaatggccctcatagctgaagt

SEQ ID NO: 4268565 - DNA, 25 bp, Homo sapien
gagccaagagcaaaatgccaagcca

SEQ ID NO: 4268566 - DNA, 25 bp, Homo sapien
tagctccatggcaggatctttcctg

SEQ ID NO: 4268567 - DNA, 25 bp, Homo sapien
tgtccatagcctggttggacagcta

SEQ ID NO: 4268568 - DNA, 25 bp, Homo sapien
tggctctcaattggaccttcactgg

SEQ ID NO: 4268569 - DNA, 25 bp, Homo sapien
ttgtggaaaagagtctccattcctt

SEQ ID NO: 4268570 - DNA, 25 bp, Homo sapien
cattttggagtcactttttgtggaa

SEQ ID NO: 4268571 - DNA, 25 bp, Homo sapien
actttttgtggaaaagagtctccat

SEQ ID NO: 4268572 - DNA, 25 bp, Homo sapien
tatgtttacattttggagtcacttt

SEQ ID NO: 4268573 - DNA, 25 bp, Homo sapien
ccacccatgcttaaacccgaatgca

SEQ ID NO: 4268574 - DNA, 25 bp, Homo sapien
cccatgcttaaacccgaatgcaaac

SEQ ID NO: 4268575 - DNA, 25 bp, Homo sapien
catgcttaaacccgaatgcaaaccc

SEQ ID NO: 4268576 - DNA, 25 bp, Homo sapien
taaacccgaatgcaaacccctcagc

SEQ ID NO: 4268577 - DNA, 25 bp, Homo sapien
tgttccaaccctccaccatgtgctc

SEQ ID NO: 4268578 - DNA, 25 bp, Homo sapien
gttccaaccctccaccatgtgctct

SEQ ID NO: 4268579 - DNA, 25 bp, Homo sapien
tttcattgttggtcataagggtctc

SEQ ID NO: 4268580 - DNA, 25 bp, Homo sapien
tcatcacctctcgacattttgtgaa

SEQ ID NO: 4268581 - DNA, 25 bp, Homo sapien
ctcgacattttgtgaaggtctcatg

SEQ ID NO: 4268582 - DNA, 25 bp, Homo sapien
gctttcattgttggtcataagggtc

SEQ ID NO: 4268583 - DNA, 25 bp, Homo sapien
gaggtaggaagggtgataacatatt

SEQ ID NO: 4268584 - DNA, 25 bp, Homo sapien
catgctgcatactgggggtcacgta

SEQ ID NO: 4268585 - DNA, 25 bp, Homo sapien
ttacacatgctgcatactgggggtc

SEQ ID NO: 4268586 - DNA, 25 bp, Homo sapien
cgtaggagggaccatccagaagcac

SEQ ID NO: 4268587 - DNA, 25 bp, Homo sapien
tacggagcaaaagtgctgacaactt

SEQ ID NO: 4268588 - DNA, 25 bp, Homo sapien
tcaagaccaagagtttacggagcaa

SEQ ID NO: 4268589 - DNA, 25 bp, Homo sapien
gatccattgatcgtaagagagactg

SEQ ID NO: 4268590 - DNA, 25 bp, Homo sapien
cagcgaaccaacagcgaagacatga

SEQ ID NO: 4268591 - DNA, 25 bp, Homo sapien
caaaggcctatactgggctgtagta

SEQ ID NO: 4268592 - DNA, 25 bp, Homo sapien
caccagcttggagggcttagcaata

SEQ ID NO: 4268593 - DNA, 25 bp, Homo sapien
taggaatctattatgggtacccaca

SEQ ID NO: 4268594 - DNA, 25 bp, Homo sapien
ggccaggatagttgcagccccagaa

SEQ ID NO: 4268595 - DNA, 25 bp, Homo sapien
tcacaccttaagctctgggcacagt

SEQ ID NO: 4268596 - DNA, 25 bp, Homo sapien
ctgcatagccatgctctgtccagac

SEQ ID NO: 4268597 - DNA, 25 bp, Homo sapien
cacagtttgccgttttctgcatagc

SEQ ID NO: 4268598 - DNA, 25 bp, Homo sapien
agacaacatctgtccaagcttctgg

SEQ ID NO: 4268599 - DNA, 25 bp, Homo sapien
cgtccacttatactggcactggttc

SEQ ID NO: 4268600 - DNA, 25 bp, Homo sapien
tcaccgtccacttatactggcactg

SEQ ID NO: 4268601 - DNA, 25 bp, Homo sapien
cactggttccaccagtagatatttg

SEQ ID NO: 4268602 - DNA, 25 bp, Homo sapien
gttggagtttagctctgtgaaggca

SEQ ID NO: 4268603 - DNA, 25 bp, Homo sapien
ccaagcctgagcctgctatagacac

SEQ ID NO: 4268604 - DNA, 25 bp, Homo sapien
cacagatataacattgttcatccca

SEQ ID NO: 4268605 - DNA, 25 bp, Homo sapien
aaagtatctgctcaattgaccacag

SEQ ID NO: 4268606 - DNA, 25 bp, Homo sapien
ctcttacaccaaagtatctgctcaa

SEQ ID NO: 4268607 - DNA, 25 bp, Homo sapien
tctttcctccaagacttcagatctt

SEQ ID NO: 4268608 - DNA, 25 bp, Homo sapien
gagacttgcatgataatgctttaag

SEQ ID NO: 4268609 - DNA, 25 bp, Homo sapien
cttctcctcactaactgcgctggaa

SEQ ID NO: 4268610 - DNA, 25 bp, Homo sapien
taactgcgctggaaacatttggtcc

SEQ ID NO: 4268611 - DNA, 25 bp, Homo sapien
tgcgctggaaacatttggtccttgg

SEQ ID NO: 4268612 - DNA, 25 bp, Homo sapien
tgtatctaatgacctgcaaggctgg

SEQ ID NO: 4268613 - DNA, 25 bp, Homo sapien
tctccatgtgaaaaagtaagtccat

SEQ ID NO: 4268614 - DNA, 25 bp, Homo sapien
taaggagttcccaggtggcactgac

SEQ ID NO: 4268615 - DNA, 25 bp, Homo sapien
gacccattacagatgaacacctatg

SEQ ID NO: 4268616 - DNA, 25 bp, Homo sapien
gaaggcgtaaattttggtcgcagtg

SEQ ID NO: 4268617 - DNA, 25 bp, Homo sapien
cgtaaattttggtcgcagtgaccgc

SEQ ID NO: 4268618 - DNA, 25 bp, Homo sapien
tggtcgcagtgaccgctggctttgt

SEQ ID NO: 4268619 - DNA, 25 bp, Homo sapien
aaattttggtcgcagtgaccgctgg

SEQ ID NO: 4268620 - DNA, 25 bp, Homo sapien
cagcttgaaacactgtcggtaaccg

SEQ ID NO: 4268621 - DNA, 25 bp, Homo sapien
gcttgaaacactgtcggtaaccgtg

SEQ ID NO: 4268622 - DNA, 25 bp, Homo sapien
ctgtcggtaaccgtgacaggaagaa

SEQ ID NO: 4268623 - DNA, 25 bp, Homo sapien
gaaacactgtcggtaaccgtgacag

SEQ ID NO: 4268624 - DNA, 25 bp, Homo sapien
taacctccaaatcctaatttcagaa

SEQ ID NO: 4268625 - DNA, 25 bp, Homo sapien
tagctcctctacatggaactaacct

SEQ ID NO: 4268626 - DNA, 25 bp, Homo sapien
catggaactaacctccaaatcctaa

SEQ ID NO: 4268627 - DNA, 25 bp, Homo sapien
aggctctttgggaatagctcctcta

SEQ ID NO: 4268628 - DNA, 25 bp, Homo sapien
cttgaaggcaaggaaatctgcatgc

SEQ ID NO: 4268629 - DNA, 25 bp, Homo sapien
ctgtttcagaacacttgaggcatga

SEQ ID NO: 4268630 - DNA, 25 bp, Homo sapien
ccagtctgaacttgctcaacagcag

SEQ ID NO: 4268631 - DNA, 25 bp, Homo sapien
caatgacttgacactcatgcatgtt

SEQ ID NO: 4268632 - DNA, 25 bp, Homo sapien
ccacctgactatgccatagccataa

SEQ ID NO: 4268633 - DNA, 25 bp, Homo sapien
aatgcaccacctgactatgccatag

SEQ ID NO: 4268634 - DNA, 25 bp, Homo sapien
tggtggaggaaatgcaccacctgac

SEQ ID NO: 4268635 - DNA, 25 bp, Homo sapien
aatcagatttggctgtgaaggtccg

SEQ ID NO: 4268636 - DNA, 25 bp, Homo sapien
catgtgaagattgcacctctgacag

SEQ ID NO: 4268637 - DNA, 25 bp, Homo sapien
tacaactgagcaccagggtacttgg

SEQ ID NO: 4268638 - DNA, 25 bp, Homo sapien
tcaaaccgttgatccagctgcaatt

SEQ ID NO: 4268639 - DNA, 25 bp, Homo sapien
tgtgcatgtgaagattgcacctctg

SEQ ID NO: 4268640 - DNA, 25 bp, Homo sapien
caaaatgcccatctctgatgtccct

SEQ ID NO: 4268641 - DNA, 25 bp, Homo sapien
acccagtacaccaggccacaaagac

SEQ ID NO: 4268642 - DNA, 25 bp, Homo sapien
gacagacatgtaaacgaagacgatg

SEQ ID NO: 4268643 - DNA, 25 bp, Homo sapien
gacgatgtcacctttcatgtctgtg

SEQ ID NO: 4268644 - DNA, 25 bp, Homo sapien
cagggagagcctactggagctggat

SEQ ID NO: 4268645 - DNA, 25 bp, Homo sapien
agagcctactggagctggatttccc

SEQ ID NO: 4268646 - DNA, 25 bp, Homo sapien
gcaggacctttctgctcctgacttt

SEQ ID NO: 4268647 - DNA, 25 bp, Homo sapien
acagcccaattcagagcagaacctc

SEQ ID NO: 4268648 - DNA, 25 bp, Homo sapien
gaaagtgcctggtgacaacggagtc

SEQ ID NO: 4268649 - DNA, 25 bp, Homo sapien
tcaggcctatcttgatacccacatc

SEQ ID NO: 4268650 - DNA, 25 bp, Homo sapien
tgatacccacatcccactcttgtga

SEQ ID NO: 4268651 - DNA, 25 bp, Homo sapien
aagtgcctggtgacaacggagtcac

SEQ ID NO: 4268652 - DNA, 25 bp, Homo sapien
tgtaagcctggtggcagtcacatag

SEQ ID NO: 4268653 - DNA, 25 bp, Homo sapien
cagtgcgtcctctgagacatcgagt

SEQ ID NO: 4268654 - DNA, 25 bp, Homo sapien
ggtcatattcaattgaaggagtcaa

SEQ ID NO: 4268655 - DNA, 25 bp, Homo sapien
caagtaactttcatccagtgcgtcc

SEQ ID NO: 4268656 - DNA, 25 bp, Homo sapien
aagataaacaccagagggaagcaaa

SEQ ID NO: 4268657 - DNA, 25 bp, Homo sapien
gaagaagactgaagataaacaccag

SEQ ID NO: 4268658 - DNA, 25 bp, Homo sapien
ctctcagggagatagaacaatcctt

SEQ ID NO: 4268659 - DNA, 25 bp, Homo sapien
aggtgctcggtgcactgagcagaca

SEQ ID NO: 4268660 - DNA, 25 bp, Homo sapien
tgctcggtgcactgagcagacaatg

SEQ ID NO: 4268661 - DNA, 25 bp, Homo sapien
atagaacaatccttccccgtatggg

SEQ ID NO: 4268662 - DNA, 25 bp, Homo sapien
aaggatgaaggagatggaacgatcc

SEQ ID NO: 4268663 - DNA, 25 bp, Homo sapien
taaggatgaaggagatggaacgatc

SEQ ID NO: 4268664 - DNA, 25 bp, Homo sapien
ctaaggatgaaggagatggaacgat

SEQ ID NO: 4268665 - DNA, 25 bp, Homo sapien
ctcagggtgcaaggattatgaggtc

SEQ ID NO: 4268666 - DNA, 25 bp, Homo sapien
ggggctcagggtgcaaggattatga

SEQ ID NO: 4268667 - DNA, 25 bp, Homo sapien
ggctcagggtgcaaggattatgagg

SEQ ID NO: 4268668 - DNA, 25 bp, Homo sapien
ctggggctcagggtgcaaggattat

SEQ ID NO: 4268669 - DNA, 25 bp, Homo sapien
cattcacagtggagtactcctcccc

SEQ ID NO: 4268670 - DNA, 25 bp, Homo sapien
cacattcacagtggagtactcctcc

SEQ ID NO: 4268671 - DNA, 25 bp, Homo sapien
tttctcaaatgagtacaaggtgctt

SEQ ID NO: 4268672 - DNA, 25 bp, Homo sapien
gtttctcaaatgagtacaaggtgct

SEQ ID NO: 4268673 - DNA, 25 bp, Homo sapien
gggacactggctgtttcccgtcctc

SEQ ID NO: 4268674 - DNA, 25 bp, Homo sapien
cctcttcctcattatcattttgatt

SEQ ID NO: 4268675 - DNA, 25 bp, Homo sapien
gtcctcttcctcattatcattttga

SEQ ID NO: 4268676 - DNA, 25 bp, Homo sapien
gacactggctgtttcccgtcctctt

SEQ ID NO: 4268677 - DNA, 25 bp, Homo sapien
gatactggggccagagagactaagg

SEQ ID NO: 4268678 - DNA, 25 bp, Homo sapien
tgatactggggccagagagactaag

SEQ ID NO: 4268679 - DNA, 25 bp, Homo sapien
atactggggccagagagactaaggc

SEQ ID NO: 4268680 - DNA, 25 bp, Homo sapien
tattcctccagtgagttctaaggga

SEQ ID NO: 4268681 - DNA, 25 bp, Homo sapien
tgtacctccaccgatgagccaggtg

SEQ ID NO: 4268682 - DNA, 25 bp, Homo sapien
catggcaaattgagcaagtggcaga

SEQ ID NO: 4268683 - DNA, 25 bp, Homo sapien
gtgggaatccgaagagtcatggcaa

SEQ ID NO: 4268684 - DNA, 25 bp, Homo sapien
acaggaggcataagtgagtggtccc

SEQ ID NO: 4268685 - DNA, 25 bp, Homo sapien
ctgttttgacaggaggcataagtga

SEQ ID NO: 4268686 - DNA, 25 bp, Homo sapien
gcaacagagtgtggctgccacaggg

SEQ ID NO: 4268687 - DNA, 25 bp, Homo sapien
cataagtgagtggtcccaaaaagca

SEQ ID NO: 4268688 - DNA, 25 bp, Homo sapien
gcaagtggtccttggactttttcaa

SEQ ID NO: 4268689 - DNA, 25 bp, Homo sapien
gcagtagtgtccattcagatatttc

SEQ ID NO: 4268690 - DNA, 25 bp, Homo sapien
tatttctgtagctggcagaagcttc

SEQ ID NO: 4268691 - DNA, 25 bp, Homo sapien
ctgctatgctgacatttgtggcaga

SEQ ID NO: 4268692 - DNA, 25 bp, Homo sapien
gtctcggaactgctgttcgctcatt

SEQ ID NO: 4268693 - DNA, 25 bp, Homo sapien
gattctgctatgctgacatttgtgg

SEQ ID NO: 4268694 - DNA, 25 bp, Homo sapien
aaaacttgatcagcaccccacaaca

SEQ ID NO: 4268695 - DNA, 25 bp, Homo sapien
caacacctgaaagtccttaaccaca

SEQ ID NO: 4268696 - DNA, 25 bp, Homo sapien
ttcagaaaaacttgatcagcacccc

SEQ ID NO: 4268697 - DNA, 25 bp, Homo sapien
aacaaagtttaaggagccagagctt

SEQ ID NO: 4268698 - DNA, 25 bp, Homo sapien
cgtcgctattacagaattagaaggt

SEQ ID NO: 4268699 - DNA, 25 bp, Homo sapien
ggtcaggtaacggtctgccgtcgct

SEQ ID NO: 4268700 - DNA, 25 bp, Homo sapien
ccagtgggtcaggtaacggtctgcc

SEQ ID NO: 4268701 - DNA, 25 bp, Homo sapien
taacggtctgccgtcgctattacag

SEQ ID NO: 4268702 - DNA, 25 bp, Homo sapien
cctcctcctgctgaacaatctccat

SEQ ID NO: 4268703 - DNA, 25 bp, Homo sapien
gtccaacaccaccagcaattccagc

SEQ ID NO: 4268704 - DNA, 25 bp, Homo sapien
acaccaccagcaattccagctctcc

SEQ ID NO: 4268705 - DNA, 25 bp, Homo sapien
gcactgtccaacaccaccagcaatt

SEQ ID NO: 4268706 - DNA, 25 bp, Homo sapien
accagcaattccagctctcccttgg

SEQ ID NO: 4268707 - DNA, 25 bp, Homo sapien
tagaaactgcctgagatccaacaac

SEQ ID NO: 4268708 - DNA, 25 bp, Homo sapien
gcctgagatccaacaacagtccaga

SEQ ID NO: 4268709 - DNA, 25 bp, Homo sapien
aactgcctgagatccaacaacagtc

SEQ ID NO: 4268710 - DNA, 25 bp, Homo sapien
gaaactgcctgagatccaacaacag

SEQ ID NO: 4268711 - DNA, 25 bp, Homo sapien
ttgaaaaatgggtcattaggagcat

SEQ ID NO: 4268712 - DNA, 25 bp, Homo sapien
ctcttgtcatgattgcatccaaaac

SEQ ID NO: 4268713 - DNA, 25 bp, Homo sapien
tcattaggagcatccctcttgtcat

SEQ ID NO: 4268714 - DNA, 25 bp, Homo sapien
cttgtcatgattgcatccaaaactc

SEQ ID NO: 4268715 - DNA, 25 bp, Homo sapien
tttttttcacagttacatcgtatag

SEQ ID NO: 4268716 - DNA, 25 bp, Homo sapien
gtttttttcacagttacatcgtata

SEQ ID NO: 4268717 - DNA, 25 bp, Homo sapien
aatttcccactagattcctcccctg

SEQ ID NO: 4268718 - DNA, 25 bp, Homo sapien
atttcccactagattcctcccctgc

SEQ ID NO: 4268719 - DNA, 25 bp, Homo sapien
agggctgcctcaactttctctccaa

SEQ ID NO: 4268720 - DNA, 25 bp, Homo sapien
tccaagggctgcctcaactttctct

SEQ ID NO: 4268721 - DNA, 25 bp, Homo sapien
ctgggttccaagggctgcctcaact

SEQ ID NO: 4268722 - DNA, 25 bp, Homo sapien
tctccaacttcagagcctccgctag

SEQ ID NO: 4268723 - DNA, 25 bp, Homo sapien
gggtgacctgcaccaagcctcctgc

SEQ ID NO: 4268724 - DNA, 25 bp, Homo sapien
aagaggggtgacctgcaccaagcct

SEQ ID NO: 4268725 - DNA, 25 bp, Homo sapien
gaagaggggtgacctgcaccaagcc

SEQ ID NO: 4268726 - DNA, 25 bp, Homo sapien
gaggggtgacctgcaccaagcctcc

SEQ ID NO: 4268727 - DNA, 25 bp, Homo sapien
tgaaacaggcatcaagaggcaaagc

SEQ ID NO: 4268728 - DNA, 25 bp, Homo sapien
ctgatgaaacaggcatcaagaggca

SEQ ID NO: 4268729 - DNA, 25 bp, Homo sapien
gatgaaacaggcatcaagaggcaaa

SEQ ID NO: 4268730 - DNA, 25 bp, Homo sapien
tgatgaaacaggcatcaagaggcaa

SEQ ID NO: 4268731 - DNA, 25 bp, Homo sapien
gcaaggaggaatcatcagtgtggcc

SEQ ID NO: 4268732 - DNA, 25 bp, Homo sapien
tggccatggaaagagggccacgggc

SEQ ID NO: 4268733 - DNA, 25 bp, Homo sapien
gccacgggcagttgtacagagtatt

SEQ ID NO: 4268734 - DNA, 25 bp, Homo sapien
tcaggacggcaaggaggaatcatca

SEQ ID NO: 4268735 - DNA, 25 bp, Homo sapien
agagaatcagaaactcccgtgccac

SEQ ID NO: 4268736 - DNA, 25 bp, Homo sapien
agagagaatcagaaactcccgtgcc

SEQ ID NO: 4268737 - DNA, 25 bp, Homo sapien
gagagaatcagaaactcccgtgcca

SEQ ID NO: 4268738 - DNA, 25 bp, Homo sapien
caaagctgttgccttatgattgccc

SEQ ID NO: 4268739 - DNA, 25 bp, Homo sapien
tgccttatgattgcccaactcaaga

SEQ ID NO: 4268740 - DNA, 25 bp, Homo sapien
ggtaagaaacacaaagctgttgcct

SEQ ID NO: 4268741 - DNA, 25 bp, Homo sapien
tgattgcccaactcaagaggcactg

SEQ ID NO: 4268742 - DNA, 25 bp, Homo sapien
ggaaggaccaaccatgactcctaag

SEQ ID NO: 4268743 - DNA, 25 bp, Homo sapien
ttgggttgcatgtgatgcccctggc

SEQ ID NO: 4268744 - DNA, 25 bp, Homo sapien
ccaggtctcatgaagtggaaggact

SEQ ID NO: 4268745 - DNA, 25 bp, Homo sapien
caaatctgtaggtgattgggttgca

SEQ ID NO: 4268746 - DNA, 25 bp, Homo sapien
taatgtactaaatggctccctcgtg

SEQ ID NO: 4268747 - DNA, 25 bp, Homo sapien
tgttaacacggtcacagcctgagcg

SEQ ID NO: 4268748 - DNA, 25 bp, Homo sapien
ccagcagcaatgtacgggaagttcc

SEQ ID NO: 4268749 - DNA, 25 bp, Homo sapien
tcttggaggacctgagtggcatact

SEQ ID NO: 4268750 - DNA, 25 bp, Homo sapien
taaaatatactcagtgtctctccct

SEQ ID NO: 4268751 - DNA, 25 bp, Homo sapien
gagtttagaccctggtaagcaccac

SEQ ID NO: 4268752 - DNA, 25 bp, Homo sapien
caattatgtgaagaagcctctttca

SEQ ID NO: 4268753 - DNA, 25 bp, Homo sapien
gctggacagattcccaaggtggtga

SEQ ID NO: 4268754 - DNA, 25 bp, Homo sapien
tcttgtgctggctccggaagtgacc

SEQ ID NO: 4268755 - DNA, 25 bp, Homo sapien
tgcttctgtcgtttcactgtattgg

SEQ ID NO: 4268756 - DNA, 25 bp, Homo sapien
cactgtattggtcttgccagctgtt

SEQ ID NO: 4268757 - DNA, 25 bp, Homo sapien
acaaccctcttgtgctggctccgga

SEQ ID NO: 4268758 - DNA, 25 bp, Homo sapien
gctttttggggtctaccaccagcaa

SEQ ID NO: 4268759 - DNA, 25 bp, Homo sapien
tgaagaacctgatgagctgtgtagc

SEQ ID NO: 4268760 - DNA, 25 bp, Homo sapien
tgatgagctgtgtagcgctttttgg

SEQ ID NO: 4268761 - DNA, 25 bp, Homo sapien
taccaccagcaaccggctcaccaga

SEQ ID NO: 4268762 - DNA, 25 bp, Homo sapien
cagctggatgatgttaaagagctcg

SEQ ID NO: 4268763 - DNA, 25 bp, Homo sapien
gagctcgtcctggtccctctcaggg

SEQ ID NO: 4268764 - DNA, 25 bp, Homo sapien
acacagcaggatatagaggatcacg

SEQ ID NO: 4268765 - DNA, 25 bp, Homo sapien
aggatcacgccagcagcccacatgt

SEQ ID NO: 4268766 - DNA, 25 bp, Homo sapien
tagatttgtcctcatttcgctgaac

SEQ ID NO: 4268767 - DNA, 25 bp, Homo sapien
cacagtaaatataggtctcaccaca

SEQ ID NO: 4268768 - DNA, 25 bp, Homo sapien
tctcaccacatgctttgcaagtcca

SEQ ID NO: 4268769 - DNA, 25 bp, Homo sapien
agaatttcgggagctacgtaagttg

SEQ ID NO: 4268770 - DNA, 25 bp, Homo sapien
ctggggcaaaggctctcaatgctcc

SEQ ID NO: 4268771 - DNA, 25 bp, Homo sapien
gggcaaaggctctcaatgctcctac

SEQ ID NO: 4268772 - DNA, 25 bp, Homo sapien
tctcctggaactggggcaaaggctc

SEQ ID NO: 4268773 - DNA, 25 bp, Homo sapien
ggaactggggcaaaggctctcaatg

SEQ ID NO: 4268774 - DNA, 25 bp, Homo sapien
ggtttctgccagtgagcttacatct

SEQ ID NO: 4268775 - DNA, 25 bp, Homo sapien
aacacctagaatggcagggtggagc

SEQ ID NO: 4268776 - DNA, 25 bp, Homo sapien
gcttacatctccataagcagcatgt

SEQ ID NO: 4268777 - DNA, 25 bp, Homo sapien
tgtcttaattgctgagccccagtca

SEQ ID NO: 4268778 - DNA, 25 bp, Homo sapien
ccctccaaggtccattttcaactgg

SEQ ID NO: 4268779 - DNA, 25 bp, Homo sapien
atcatcactactccagctcctgttt

SEQ ID NO: 4268780 - DNA, 25 bp, Homo sapien
tggtatttctgcaagctggaaattc

SEQ ID NO: 4268781 - DNA, 25 bp, Homo sapien
ttaacactggtatttctgcaagctg

SEQ ID NO: 4268782 - DNA, 25 bp, Homo sapien
gcagaagcagcaattaacactggta

SEQ ID NO: 4268783 - DNA, 25 bp, Homo sapien
cacagcagccatccattaaaggaag

SEQ ID NO: 4268784 - DNA, 25 bp, Homo sapien
aatcagccatgtaatcaaaagttag

SEQ ID NO: 4268785 - DNA, 25 bp, Homo sapien
gacataatcacttcccgaagcttaa

SEQ ID NO: 4268786 - DNA, 25 bp, Homo sapien
acaaagacaggtcttaatggacaca

SEQ ID NO: 4268787 - DNA, 25 bp, Homo sapien
cacttgcaggatttgcctcgggaga

SEQ ID NO: 4268788 - DNA, 25 bp, Homo sapien
tgatggcgtcaaaaaggtctcctcc

SEQ ID NO: 4268789 - DNA, 25 bp, Homo sapien
tgtcatctagtgaaagctcctcggg

SEQ ID NO: 4268790 - DNA, 25 bp, Homo sapien
gatcttcatcgcataggcctgcctg

SEQ ID NO: 4268791 - DNA, 25 bp, Homo sapien
tagagaatggtcacataggccttgc

SEQ ID NO: 4268792 - DNA, 25 bp, Homo sapien
gaaggccattccgagggcagaacaa

SEQ ID NO: 4268793 - DNA, 25 bp, Homo sapien
tgcactgatcgcctgttgaggagca

SEQ ID NO: 4268794 - DNA, 25 bp, Homo sapien
taagagctgctcgaacgtctgcact

SEQ ID NO: 4268795 - DNA, 25 bp, Homo sapien
tccaatggaagtaccaggagaatga

SEQ ID NO: 4268796 - DNA, 25 bp, Homo sapien
aaaacctagaggcataaagaggatg

SEQ ID NO: 4268797 - DNA, 25 bp, Homo sapien
taccaggagaatgagcaaccaagag

SEQ ID NO: 4268798 - DNA, 25 bp, Homo sapien
gaggatgtaatgaaatccaatggaa

SEQ ID NO: 4268799 - DNA, 25 bp, Homo sapien
gcagctctttgtgccaatgcatggg

SEQ ID NO: 4268800 - DNA, 25 bp, Homo sapien
ccctgcgttgtctttctctgagaca

SEQ ID NO: 4268801 - DNA, 25 bp, Homo sapien
catccgatgctggttggctttgacc

SEQ ID NO: 4268802 - DNA, 25 bp, Homo sapien
tcagtctcaccctaggtttcatgtt

SEQ ID NO: 4268803 - DNA, 25 bp, Homo sapien
agggagtagcctagggccttgtact

SEQ ID NO: 4268804 - DNA, 25 bp, Homo sapien
gcctagggccttgtactcaaaatgt

SEQ ID NO: 4268805 - DNA, 25 bp, Homo sapien
ccaagagggagtagcctagggcctt

SEQ ID NO: 4268806 - DNA, 25 bp, Homo sapien
ctttacccaagagggagtagcctag

SEQ ID NO: 4268807 - DNA, 25 bp, Homo sapien
gacgcggctcgacggtcgagcaggc

SEQ ID NO: 4268808 - DNA, 25 bp, Homo sapien
ctggagtggcggcgggcatggcgcg

SEQ ID NO: 4268809 - DNA, 25 bp, Homo sapien
agtggcggcgggcatggcgcggcgg

SEQ ID NO: 4268810 - DNA, 25 bp, Homo sapien
gcggggacgcggctcgacggtcgag

SEQ ID NO: 4268811 - DNA, 25 bp, Homo sapien
tctctgcgccggtcccgccatgcgc

SEQ ID NO: 4268812 - DNA, 25 bp, Homo sapien
gccgggctttgaacttgctcccaca

SEQ ID NO: 4268813 - DNA, 25 bp, Homo sapien
cggtcccgccatgcgcgccgctcct

SEQ ID NO: 4268814 - DNA, 25 bp, Homo sapien
gcggggccgggctttgaacttgctc

SEQ ID NO: 4268815 - DNA, 25 bp, Homo sapien
cagcggagtccagcctttctgctct

SEQ ID NO: 4268816 - DNA, 25 bp, Homo sapien
cttctccagtgagcgcccaaaggcg

SEQ ID NO: 4268817 - DNA, 25 bp, Homo sapien
ttccccgcgcagttccgcggtggaa

SEQ ID NO: 4268818 - DNA, 25 bp, Homo sapien
cctggctgcgctgggttttgaacgt

SEQ ID NO: 4268819 - DNA, 25 bp, Homo sapien
aggaccaccagccatcctcgtgcct

SEQ ID NO: 4268820 - DNA, 25 bp, Homo sapien
gaccaccagccatcctcgtgcctcc

SEQ ID NO: 4268821 - DNA, 25 bp, Homo sapien
ggaccaccagccatcctcgtgcctc

SEQ ID NO: 4268822 - DNA, 25 bp, Homo sapien
cagagacctgcttacactctggtcc

SEQ ID NO: 4268823 - DNA, 25 bp, Homo sapien
ttgttgccccccagattcagagacc

SEQ ID NO: 4268824 - DNA, 25 bp, Homo sapien
gttctactctaacacccttgttgcc

SEQ ID NO: 4268825 - DNA, 25 bp, Homo sapien
gtcccagggccgttctactctaaca

SEQ ID NO: 4268826 - DNA, 25 bp, Homo sapien
aaggcagctcgatggccccttgctt

SEQ ID NO: 4268827 - DNA, 25 bp, Homo sapien
tctgaaggcagctcgatggcccctt

SEQ ID NO: 4268828 - DNA, 25 bp, Homo sapien
ctgaaggcagctcgatggccccttg

SEQ ID NO: 4268829 - DNA, 25 bp, Homo sapien
tgaaggcagctcgatggccccttgc

SEQ ID NO: 4268830 - DNA, 25 bp, Homo sapien
tcctcatatttgcaggtccctcagg

SEQ ID NO: 4268831 - DNA, 25 bp, Homo sapien
catattcccgggtactgactcccag

SEQ ID NO: 4268832 - DNA, 25 bp, Homo sapien
ttcccgggtactgactcccagatct

SEQ ID NO: 4268833 - DNA, 25 bp, Homo sapien
gacccatattcccgggtactgactc

SEQ ID NO: 4268834 - DNA, 25 bp, Homo sapien
taaagtattgataggcatggacaat

SEQ ID NO: 4268835 - DNA, 25 bp, Homo sapien
ccgaccctagtagcatcataaccaa

SEQ ID NO: 4268836 - DNA, 25 bp, Homo sapien
aaatctccgaccctagtagcatcat

SEQ ID NO: 4268837 - DNA, 25 bp, Homo sapien
cacaaaatctccgaccctagtagca

SEQ ID NO: 4268838 - DNA, 25 bp, Homo sapien
tctccgaccctagtagcatcataac

SEQ ID NO: 4268839 - DNA, 25 bp, Homo sapien
tttgagtgttgttttgattgtttat

SEQ ID NO: 4268840 - DNA, 25 bp, Homo sapien
ttgagtgttgttttgattgtttata

SEQ ID NO: 4268841 - DNA, 25 bp, Homo sapien
tcttttcattcgcttcaacatcact

SEQ ID NO: 4268842 - DNA, 25 bp, Homo sapien
caaggctggaatgcaccaaagcagg

SEQ ID NO: 4268843 - DNA, 25 bp, Homo sapien
cttgtcccaccaacctttggcatag

SEQ ID NO: 4268844 - DNA, 25 bp, Homo sapien
caattagtttatcttcattagctgg

SEQ ID NO: 4268845 - DNA, 25 bp, Homo sapien
cattcagtttttccttttcatattc

SEQ ID NO: 4268846 - DNA, 25 bp, Homo sapien
ctgaaagttttgccagtcattcagt

SEQ ID NO: 4268847 - DNA, 25 bp, Homo sapien
ttcagtttttccttttcatattcac

SEQ ID NO: 4268848 - DNA, 25 bp, Homo sapien
gaaagttttgccagtcattcagttt

SEQ ID NO: 4268849 - DNA, 25 bp, Homo sapien
gtttttcaatttgagcattgccacc

SEQ ID NO: 4268850 - DNA, 25 bp, Homo sapien
caatttgagcattgccaccttttcc

SEQ ID NO: 4268851 - DNA, 25 bp, Homo sapien
cttttcctaagtcatgaggctgaac

SEQ ID NO: 4268852 - DNA, 25 bp, Homo sapien
tatgtttttcaatttgagcattgcc

SEQ ID NO: 4268853 - DNA, 25 bp, Homo sapien
cttcaaaatgtaggatcaacccctc

SEQ ID NO: 4268854 - DNA, 25 bp, Homo sapien
ctggttctttgtcacaaaaccctgg

SEQ ID NO: 4268855 - DNA, 25 bp, Homo sapien
gctggttctttgtcacaaaaccctg

SEQ ID NO: 4268856 - DNA, 25 bp, Homo sapien
tggttctttgtcacaaaaccctgga

SEQ ID NO: 4268857 - DNA, 25 bp, Homo sapien
aatcaatctttaggctgttcaagac

SEQ ID NO: 4268858 - DNA, 25 bp, Homo sapien
gaaaatcaatctttaggctgttcaa

SEQ ID NO: 4268859 - DNA, 25 bp, Homo sapien
ctgaaaatcaatctttaggctgttc

SEQ ID NO: 4268860 - DNA, 25 bp, Homo sapien
aaaatcaatctttaggctgttcaag

SEQ ID NO: 4268861 - DNA, 25 bp, Homo sapien
ttcagtgattatgaccaaaggctta

SEQ ID NO: 4268862 - DNA, 25 bp, Homo sapien
cttcagtgattatgaccaaaggctt

SEQ ID NO: 4268863 - DNA, 25 bp, Homo sapien
tcagtgattatgaccaaaggcttac

SEQ ID NO: 4268864 - DNA, 25 bp, Homo sapien
aaacatagcctcgatcaaacttcaa

SEQ ID NO: 4268865 - DNA, 25 bp, Homo sapien
actcaacagaacatatgcctcctgg

SEQ ID NO: 4268866 - DNA, 25 bp, Homo sapien
gatcaaacttcaagctttcaataat

SEQ ID NO: 4268867 - DNA, 25 bp, Homo sapien
taaagtatggagaaacatagcctcg

SEQ ID NO: 4268868 - DNA, 25 bp, Homo sapien
ctgcatcagagaggatatggccaat

SEQ ID NO: 4268869 - DNA, 25 bp, Homo sapien
cactgcatcagagaggatatggcca

SEQ ID NO: 4268870 - DNA, 25 bp, Homo sapien
tcttgaacgagtttagcttcaatat

SEQ ID NO: 4268871 - DNA, 25 bp, Homo sapien
ttttcactgcatcagagaggatatg

SEQ ID NO: 4268872 - DNA, 25 bp, Homo sapien
cagtttgtgagcaaggctccggttc

SEQ ID NO: 4268873 - DNA, 25 bp, Homo sapien
caggtgaccattgcaacagtttgtg

SEQ ID NO: 4268874 - DNA, 25 bp, Homo sapien
ccggttccacgagggagggcgaatg

SEQ ID NO: 4268875 - DNA, 25 bp, Homo sapien
tctactgtgccttaagcaggtgacc

SEQ ID NO: 4268876 - DNA, 25 bp, Homo sapien
tgttctctttgctacccagcaagaa

SEQ ID NO: 4268877 - DNA, 25 bp, Homo sapien
agcaagaacggccccagcttccaaa

SEQ ID NO: 4268878 - DNA, 25 bp, Homo sapien
gaacggccccagcttccaaaagagc

SEQ ID NO: 4268879 - DNA, 25 bp, Homo sapien
gctgttctctttgctacccagcaag

SEQ ID NO: 4268880 - DNA, 25 bp, Homo sapien
gtgcctaggtggtcttggccagtag

SEQ ID NO: 4268881 - DNA, 25 bp, Homo sapien
tgcctaggtggtcttggccagtagg

SEQ ID NO: 4268882 - DNA, 25 bp, Homo sapien
aagcacttgtgagtgggcagagtca

SEQ ID NO: 4268883 - DNA, 25 bp, Homo sapien
aaaagcacttgtgagtgggcagagt

SEQ ID NO: 4268884 - DNA, 25 bp, Homo sapien
agtcagctgttctaactcttggtac

SEQ ID NO: 4268885 - DNA, 25 bp, Homo sapien
ggcagagtcagctgttctaactctt

SEQ ID NO: 4268886 - DNA, 25 bp, Homo sapien
gctggtatgacactcctcatggtga

SEQ ID NO: 4268887 - DNA, 25 bp, Homo sapien
tccagtttccttctatctagaactc

SEQ ID NO: 4268888 - DNA, 25 bp, Homo sapien
tgtccccctgtctctagcaatcttg

SEQ ID NO: 4268889 - DNA, 25 bp, Homo sapien
tgccatgccactttatgatccaaga

SEQ ID NO: 4268890 - DNA, 25 bp, Homo sapien
ctaatagctgagttctgacaagtga

SEQ ID NO: 4268891 - DNA, 25 bp, Homo sapien
caaagaagaaacagagggataagaa

SEQ ID NO: 4268892 - DNA, 25 bp, Homo sapien
gcctgacagcccagcatctgtcagt

SEQ ID NO: 4268893 - DNA, 25 bp, Homo sapien
gttacaagccgaggtctccctgaca

SEQ ID NO: 4268894 - DNA, 25 bp, Homo sapien
ttaggaatatccatgcaagagactc

SEQ ID NO: 4268895 - DNA, 25 bp, Homo sapien
ctgccttgtgaaattaggaatatcc

SEQ ID NO: 4268896 - DNA, 25 bp, Homo sapien
ccttcccttccttggatctgactaa

SEQ ID NO: 4268897 - DNA, 25 bp, Homo sapien
tctgactaagccctctgttgtccca

SEQ ID NO: 4268898 - DNA, 25 bp, Homo sapien
cattggaagtaagctgacatctgct

SEQ ID NO: 4268899 - DNA, 25 bp, Homo sapien
tgccagacctgcagtcaaaacagcc

SEQ ID NO: 4268900 - DNA, 25 bp, Homo sapien
ggactctggatcattggaagtaagc

SEQ ID NO: 4268901 - DNA, 25 bp, Homo sapien
tggcaaattagcacctgccagacct

SEQ ID NO: 4268902 - DNA, 25 bp, Homo sapien
cctggtacaacagggacgggccttg

SEQ ID NO: 4268903 - DNA, 25 bp, Homo sapien
ctggtgttcagtgggtgccgtttcc

SEQ ID NO: 4268904 - DNA, 25 bp, Homo sapien
tgccgtttccagtttgcaagatgga

SEQ ID NO: 4268905 - DNA, 25 bp, Homo sapien
gagtagttaattcacagagacaaag

SEQ ID NO: 4268906 - DNA, 25 bp, Homo sapien
gacccgggacacaggtttctacatg

SEQ ID NO: 4268907 - DNA, 25 bp, Homo sapien
tagacctgggacacaactacatggt

SEQ ID NO: 4268908 - DNA, 25 bp, Homo sapien
catgatcttacagatgacccgggac

SEQ ID NO: 4268909 - DNA, 25 bp, Homo sapien
tcctgaacagggttagaattctgca

SEQ ID NO: 4268910 - DNA, 25 bp, Homo sapien
agagacgttgggcattgagcagatg

SEQ ID NO: 4268911 - DNA, 25 bp, Homo sapien
tgggagagagacgttgggcattgag

SEQ ID NO: 4268912 - DNA, 25 bp, Homo sapien
gagcagatgatgatggttatggctg

SEQ ID NO: 4268913 - DNA, 25 bp, Homo sapien
atgatgatggttatggctggagaat

SEQ ID NO: 4268914 - DNA, 25 bp, Homo sapien
aaatttgggcaggtctcagccggtg

SEQ ID NO: 4268915 - DNA, 25 bp, Homo sapien
cagaaatttgggcaggtctcagccg

SEQ ID NO: 4268916 - DNA, 25 bp, Homo sapien
ggggtcactgactcagccgcatcct

SEQ ID NO: 4268917 - DNA, 25 bp, Homo sapien
tggggtcactgactcagccgcatcc

SEQ ID NO: 4268918 - DNA, 25 bp, Homo sapien
aaatgttcaggagggcttcacttac

SEQ ID NO: 4268919 - DNA, 25 bp, Homo sapien
tctgcacagcatgttggtctcaggg

SEQ ID NO: 4268920 - DNA, 25 bp, Homo sapien
tgcacagcatgttggtctcagggta

SEQ ID NO: 4268921 - DNA, 25 bp, Homo sapien
gcacagcatgttggtctcagggtat

SEQ ID NO: 4268922 - DNA, 25 bp, Homo sapien
ttctgcacagcatgttggtctcagg

SEQ ID NO: 4268923 - DNA, 25 bp, Homo sapien
ggaaagggcaccatatcatctctgc

SEQ ID NO: 4268924 - DNA, 25 bp, Homo sapien
ttggaaagggcaccatatcatctct

SEQ ID NO: 4268925 - DNA, 25 bp, Homo sapien
aagggcaccatatcatctctgctgc

SEQ ID NO: 4268926 - DNA, 25 bp, Homo sapien
gctgcattctgttggctaaagcaag

SEQ ID NO: 4268927 - DNA, 25 bp, Homo sapien
taagttacacggagctcgttggcag

SEQ ID NO: 4268928 - DNA, 25 bp, Homo sapien
caaaccaactatgtgacccagggca

SEQ ID NO: 4268929 - DNA, 25 bp, Homo sapien
tcttgagggtcagaggctaagctgc

SEQ ID NO: 4268930 - DNA, 25 bp, Homo sapien
gattccaaagaagcagagggtcctc

SEQ ID NO: 4268931 - DNA, 25 bp, Homo sapien
gtgggccctcgagaacaccaaccag

SEQ ID NO: 4268932 - DNA, 25 bp, Homo sapien
ttctctatcccttgatttctgaatc

SEQ ID NO: 4268933 - DNA, 25 bp, Homo sapien
ccaaaccgtgcatgcttgggagcat

SEQ ID NO: 4268934 - DNA, 25 bp, Homo sapien
gaaagaatgtgcacgaggtgggccc

SEQ ID NO: 4268935 - DNA, 25 bp, Homo sapien
acaatcaaagaccaacgtgcacctt

SEQ ID NO: 4268936 - DNA, 25 bp, Homo sapien
tttccataccaggctgagctgaggg

SEQ ID NO: 4268937 - DNA, 25 bp, Homo sapien
cgtgcaccttgctttccataccagg

SEQ ID NO: 4268938 - DNA, 25 bp, Homo sapien
ttcaaggaaacaatttggaaagata

SEQ ID NO: 4268939 - DNA, 25 bp, Homo sapien
tttcccaggtgggatcagctgatgg

SEQ ID NO: 4268940 - DNA, 25 bp, Homo sapien
agagggtaggcaatggcctcctgca

SEQ ID NO: 4268941 - DNA, 25 bp, Homo sapien
ggcccagatccgccctcttataagg

SEQ ID NO: 4268942 - DNA, 25 bp, Homo sapien
aggcaatggcctcctgcaaacgggc

SEQ ID NO: 4268943 - DNA, 25 bp, Homo sapien
taagctagggtagcgaacttgccag

SEQ ID NO: 4268944 - DNA, 25 bp, Homo sapien
tcatcagaacgtcagcctaagctag

SEQ ID NO: 4268945 - DNA, 25 bp, Homo sapien
gcaatggtgttgttagactccccta

SEQ ID NO: 4268946 - DNA, 25 bp, Homo sapien
tgccccagcgctcagaattctaagt

SEQ ID NO: 4268947 - DNA, 25 bp, Homo sapien
tgctttccacatttccgagaacgcc

SEQ ID NO: 4268948 - DNA, 25 bp, Homo sapien
gaacgccttctaggccgaagctcac

SEQ ID NO: 4268949 - DNA, 25 bp, Homo sapien
cacatttccgagaacgccttctagg

SEQ ID NO: 4268950 - DNA, 25 bp, Homo sapien
tccgagaacgccttctaggccgaag

SEQ ID NO: 4268951 - DNA, 25 bp, Homo sapien
cttcaacttcattttcataatcatc

SEQ ID NO: 4268952 - DNA, 25 bp, Homo sapien
caaagtcttcaacttcattttcata

SEQ ID NO: 4268953 - DNA, 25 bp, Homo sapien
caacttcattttcataatcatcttc

SEQ ID NO: 4268954 - DNA, 25 bp, Homo sapien
tcttcaacttcattttcataatcat

SEQ ID NO: 4268955 - DNA, 25 bp, Homo sapien
ttctttaagcgggtctctgttttca

SEQ ID NO: 4268956 - DNA, 25 bp, Homo sapien
agtctcgtgcatccctgactgacag

SEQ ID NO: 4268957 - DNA, 25 bp, Homo sapien
gaatgttgaccagccgagtcatcgc

SEQ ID NO: 4268958 - DNA, 25 bp, Homo sapien
ctgacaggatcagaatgttgaccag

SEQ ID NO: 4268959 - DNA, 25 bp, Homo sapien
gattattctggcaagaatcattctg

SEQ ID NO: 4268960 - DNA, 25 bp, Homo sapien
aagattattctggcaagaatcattc

SEQ ID NO: 4268961 - DNA, 25 bp, Homo sapien
agattattctggcaagaatcattct

SEQ ID NO: 4268962 - DNA, 25 bp, Homo sapien
aatctcccggaagtggcgatacagg

SEQ ID NO: 4268963 - DNA, 25 bp, Homo sapien
gatatgctgctcgtaagactcgctg

SEQ ID NO: 4268964 - DNA, 25 bp, Homo sapien
ggcaatacttggcatccacctggga

SEQ ID NO: 4268965 - DNA, 25 bp, Homo sapien
cagggtccaaacagagcaggcggtt

SEQ ID NO: 4268966 - DNA, 25 bp, Homo sapien
tctgaaagcgtctttgtagcactgg

SEQ ID NO: 4268967 - DNA, 25 bp, Homo sapien
cattttgagtgctagatcaaattcc

SEQ ID NO: 4268968 - DNA, 25 bp, Homo sapien
cactggcttcgcttatagaaatagg

SEQ ID NO: 4268969 - DNA, 25 bp, Homo sapien
tgtagcactggcttcgcttatagaa

SEQ ID NO: 4268970 - DNA, 25 bp, Homo sapien
tccttggcatagctcagacacttaa

SEQ ID NO: 4268971 - DNA, 25 bp, Homo sapien
caaataggtcttagccaattccaaa

SEQ ID NO: 4268972 - DNA, 25 bp, Homo sapien
gctcagacacttaagggacagtgtt

SEQ ID NO: 4268973 - DNA, 25 bp, Homo sapien
tgttggctctttgcactccaaatag

SEQ ID NO: 4268974 - DNA, 25 bp, Homo sapien
tgctcagggcagtgtcatgggccag

SEQ ID NO: 4268975 - DNA, 25 bp, Homo sapien
gactttcttggatttcatgctcagg

SEQ ID NO: 4268976 - DNA, 25 bp, Homo sapien
cctttctggtaacacttggctgcaa

SEQ ID NO: 4268977 - DNA, 25 bp, Homo sapien
tctcaaatgcacctcctttctggta

SEQ ID NO: 4268978 - DNA, 25 bp, Homo sapien
accatgatgtgaaacctgcctgtga

SEQ ID NO: 4268979 - DNA, 25 bp, Homo sapien
gaaaaggagcaggacaggaagctct

SEQ ID NO: 4268980 - DNA, 25 bp, Homo sapien
tcatcttgaggtgacctgatgtttc

SEQ ID NO: 4268981 - DNA, 25 bp, Homo sapien
gatgtttcagaacacgtggcacaag

SEQ ID NO: 4268982 - DNA, 25 bp, Homo sapien
ggagttgaggtcttaacgaacatgc

SEQ ID NO: 4268983 - DNA, 25 bp, Homo sapien
ccagcactggtgcttggcgtagtaa

SEQ ID NO: 4268984 - DNA, 25 bp, Homo sapien
cctgtgcaatccactccgcaggagt

SEQ ID NO: 4268985 - DNA, 25 bp, Homo sapien
cttggcgtagtaatctccctgtgca

SEQ ID NO: 4268986 - DNA, 25 bp, Homo sapien
tcatctgtctttacaacttggacaa

SEQ ID NO: 4268987 - DNA, 25 bp, Homo sapien
cgtttctctcggttttcatcaaaga

SEQ ID NO: 4268988 - DNA, 25 bp, Homo sapien
gaaatatttgaatgcgggagcccgt

SEQ ID NO: 4268989 - DNA, 25 bp, Homo sapien
caaagatccagaggttgacccgagc

SEQ ID NO: 4268990 - DNA, 25 bp, Homo sapien
tctggagtcagttgaggtaggtgtg

SEQ ID NO: 4268991 - DNA, 25 bp, Homo sapien
agagatcgaccctgagaagagcctg

SEQ ID NO: 4268992 - DNA, 25 bp, Homo sapien
caggggtacttcaaccaatggccgg

SEQ ID NO: 4268993 - DNA, 25 bp, Homo sapien
accatgagagatcgaccctgagaag

SEQ ID NO: 4268994 - DNA, 25 bp, Homo sapien
tccagggaagaatgctaagggctca

SEQ ID NO: 4268995 - DNA, 25 bp, Homo sapien
taagagatgcacatagggtcagccg

SEQ ID NO: 4268996 - DNA, 25 bp, Homo sapien
ggagggagattaacttgcacaagca

SEQ ID NO: 4268997 - DNA, 25 bp, Homo sapien
tacaccaagaagctaagaagccagg

SEQ ID NO: 4268998 - DNA, 25 bp, Homo sapien
tataagcccagataacagctgcttc

SEQ ID NO: 4268999 - DNA, 25 bp, Homo sapien
ccacattacctgatccagagggcag

SEQ ID NO: 4269000 - DNA, 25 bp, Homo sapien
gaaaaacccacaaggactcaggagc

SEQ ID NO: 4269001 - DNA, 25 bp, Homo sapien
tagaaaacccaggacaacggctgtg

SEQ ID NO: 4269002 - DNA, 25 bp, Homo sapien
tctgcaacaaggactgggacacagc

SEQ ID NO: 4269003 - DNA, 25 bp, Homo sapien
ttcatctgtaaggctctccttagag

SEQ ID NO: 4269004 - DNA, 25 bp, Homo sapien
cttcatctgtaaggctctccttaga

SEQ ID NO: 4269005 - DNA, 25 bp, Homo sapien
tctgtcatcacagggtggacattgc

SEQ ID NO: 4269006 - DNA, 25 bp, Homo sapien
tttgcttcataaattgttagcacaa

SEQ ID NO: 4269007 - DNA, 25 bp, Homo sapien
tctcctttgccgtttcattggccac

SEQ ID NO: 4269008 - DNA, 25 bp, Homo sapien
tagcacaagtgctaaccccagctct

SEQ ID NO: 4269009 - DNA, 25 bp, Homo sapien
tttgccgtttcattggccacaagga

SEQ ID NO: 4269010 - DNA, 25 bp, Homo sapien
tattccctcgtagcaaaattgccaa

SEQ ID NO: 4269011 - DNA, 25 bp, Homo sapien
tacaagactccagaacagttggctt

SEQ ID NO: 4269012 - DNA, 25 bp, Homo sapien
cccttggaaggcgatcaaaagattc

SEQ ID NO: 4269013 - DNA, 25 bp, Homo sapien
ttggcttaggaccatcaaagaggcc

SEQ ID NO: 4269014 - DNA, 25 bp, Homo sapien
cagcctccgggatatgttgtacaga

SEQ ID NO: 4269015 - DNA, 25 bp, Homo sapien
tcgtggatggaccatgggagcaccc

SEQ ID NO: 4269016 - DNA, 25 bp, Homo sapien
taatggaacagagagcgcagatcgc

SEQ ID NO: 4269017 - DNA, 25 bp, Homo sapien
gaagaggctgtagatctcactccgg

SEQ ID NO: 4269018 - DNA, 25 bp, Homo sapien
caggcttcatactcctgctcatcta

SEQ ID NO: 4269019 - DNA, 25 bp, Homo sapien
gctcctcctgcgcaggcttcatact

SEQ ID NO: 4269020 - DNA, 25 bp, Homo sapien
tgcgcaggcttcatactcctgctca

SEQ ID NO: 4269021 - DNA, 25 bp, Homo sapien
ggcttcatactcctgctcatctatg

SEQ ID NO: 4269022 - DNA, 25 bp, Homo sapien
tcaatagaatcttcctcttcctcgt

SEQ ID NO: 4269023 - DNA, 25 bp, Homo sapien
caatagaatcttcctcttcctcgtc

SEQ ID NO: 4269024 - DNA, 25 bp, Homo sapien
gccacttcgcccaataaggatgatg

SEQ ID NO: 4269025 - DNA, 25 bp, Homo sapien
ttccacaatctgtacaagcagcagg

SEQ ID NO: 4269026 - DNA, 25 bp, Homo sapien
ctgggattgaggtcgatcaccgcgt

SEQ ID NO: 4269027 - DNA, 25 bp, Homo sapien
ccagacctgtttggccagcaatggg

SEQ ID NO: 4269028 - DNA, 25 bp, Homo sapien
gccagtttgcagtgatctaagacga

SEQ ID NO: 4269029 - DNA, 25 bp, Homo sapien
tctaagacgatgtcccaaatccgga

SEQ ID NO: 4269030 - DNA, 25 bp, Homo sapien
caagccccggttgtaggcattgcag

SEQ ID NO: 4269031 - DNA, 25 bp, Homo sapien
tgatttccgtgtagatccgccctga

SEQ ID NO: 4269032 - DNA, 25 bp, Homo sapien
ttttcttcttgatgaccttggtcat

SEQ ID NO: 4269033 - DNA, 25 bp, Homo sapien
ctgaatggcaaggatgattttcttc

SEQ ID NO: 4269034 - DNA, 25 bp, Homo sapien
tgaatggcaaggatgattttcttct

SEQ ID NO: 4269035 - DNA, 25 bp, Homo sapien
tcttcttgatgaccttggtcattac

SEQ ID NO: 4269036 - DNA, 25 bp, Homo sapien
gtcatgttatcgaagtcctggaggc

SEQ ID NO: 4269037 - DNA, 25 bp, Homo sapien
catgttatcgaagtcctggaggcag

SEQ ID NO: 4269038 - DNA, 25 bp, Homo sapien
tgaagtgcactcgatctcccaggtc

SEQ ID NO: 4269039 - DNA, 25 bp, Homo sapien
cagcatttctgaagtgcactcgatc

SEQ ID NO: 4269040 - DNA, 25 bp, Homo sapien
tcctctgggaaagacggatccactt

SEQ ID NO: 4269041 - DNA, 25 bp, Homo sapien
ttatcatcaggcacaagctgcaagg

SEQ ID NO: 4269042 - DNA, 25 bp, Homo sapien
tcagggactgcacttccttcaggca

SEQ ID NO: 4269043 - DNA, 25 bp, Homo sapien
caggcagtgttctggcagtggcacc

SEQ ID NO: 4269044 - DNA, 25 bp, Homo sapien
gaggatgtgcatcagcgtgttccca

SEQ ID NO: 4269045 - DNA, 25 bp, Homo sapien
tgacttgaatgaaccctgggacttg

SEQ ID NO: 4269046 - DNA, 25 bp, Homo sapien
gagctttgttccaggccaagagcag

SEQ ID NO: 4269047 - DNA, 25 bp, Homo sapien
gagtcgttcttcttaatccggtgcc

SEQ ID NO: 4269048 - DNA, 25 bp, Homo sapien
caaaggagtatcaccttccgtgaga

SEQ ID NO: 4269049 - DNA, 25 bp, Homo sapien
ggaaagccaactcgaagtcctcatg

SEQ ID NO: 4269050 - DNA, 25 bp, Homo sapien
catgtttcaggcacgtgacaactgg

SEQ ID NO: 4269051 - DNA, 25 bp, Homo sapien
tctgcgcccttggtcaagagaagga

SEQ ID NO: 4269052 - DNA, 25 bp, Homo sapien
agtgcttgccgaatcaagaaataaa

SEQ ID NO: 4269053 - DNA, 25 bp, Homo sapien
atgtgctctataagtgcttgccgaa

SEQ ID NO: 4269054 - DNA, 25 bp, Homo sapien
tgtgggcttggttcctagcacctga

SEQ ID NO: 4269055 - DNA, 25 bp, Homo sapien
gttcctagcacctgatcctgagatg

SEQ ID NO: 4269056 - DNA, 25 bp, Homo sapien
tggtttccaggcaaagaaagtaaca

SEQ ID NO: 4269057 - DNA, 25 bp, Homo sapien
tttccaggcaaagaaagtaacactc

SEQ ID NO: 4269058 - DNA, 25 bp, Homo sapien
tccaggcaaagaaagtaacactcca

SEQ ID NO: 4269059 - DNA, 25 bp, Homo sapien
ctgtggtttccaggcaaagaaagta

SEQ ID NO: 4269060 - DNA, 25 bp, Homo sapien
ataagaatttgaagacggtggtggc

SEQ ID NO: 4269061 - DNA, 25 bp, Homo sapien
gatgatggtacagatgtcgaggtct

SEQ ID NO: 4269062 - DNA, 25 bp, Homo sapien
tccacttactttgcgggtcagcagc

SEQ ID NO: 4269063 - DNA, 25 bp, Homo sapien
tttgatgaggcaatccccaagcggt

SEQ ID NO: 4269064 - DNA, 25 bp, Homo sapien
atatcacagaccaggtcaggaggaa

SEQ ID NO: 4269065 - DNA, 25 bp, Homo sapien
taatatcacagaccaggtcaggagg

SEQ ID NO: 4269066 - DNA, 25 bp, Homo sapien
ttgattaatatcacagaccaggtca

SEQ ID NO: 4269067 - DNA, 25 bp, Homo sapien
gattaatatcacagaccaggtcagg

SEQ ID NO: 4269068 - DNA, 25 bp, Homo sapien
gaccttcctgaaaatgtcgttttca

SEQ ID NO: 4269069 - DNA, 25 bp, Homo sapien
tgaactacttcctgcttcagaaagt

SEQ ID NO: 4269070 - DNA, 25 bp, Homo sapien
cagagtagaaaggagacgcaagaac

SEQ ID NO: 4269071 - DNA, 25 bp, Homo sapien
tgcaataaccggtttcctgagttca

SEQ ID NO: 4269072 - DNA, 25 bp, Homo sapien
gctgactcgaaaaggccaagaacta

SEQ ID NO: 4269073 - DNA, 25 bp, Homo sapien
gagcagcaacatcaggtagagaaag

SEQ ID NO: 4269074 - DNA, 25 bp, Homo sapien
ttcttggtcccaaggaaagagctga

SEQ ID NO: 4269075 - DNA, 25 bp, Homo sapien
cagaggcctgatgtaagctgactcg

SEQ ID NO: 4269076 - DNA, 25 bp, Homo sapien
aagcagccccatcctaagagataag

SEQ ID NO: 4269077 - DNA, 25 bp, Homo sapien
ttctcacctagatgccaaaagcagc

SEQ ID NO: 4269078 - DNA, 25 bp, Homo sapien
tagcggcagctcttcctaaagacaa

SEQ ID NO: 4269079 - DNA, 25 bp, Homo sapien
aatgttaggcacagatacagctccc

SEQ ID NO: 4269080 - DNA, 25 bp, Homo sapien
cacgtagctagcttttctaagtgac

SEQ ID NO: 4269081 - DNA, 25 bp, Homo sapien
ccagcaaagtgggatctgccccaaa

SEQ ID NO: 4269082 - DNA, 25 bp, Homo sapien
gaccgagactgtcgatccagcaaag

SEQ ID NO: 4269083 - DNA, 25 bp, Homo sapien
tgataggtccttagaacacgtagct

SEQ ID NO: 4269084 - DNA, 25 bp, Homo sapien
ggggtgtttgtcatggttccttcca

SEQ ID NO: 4269085 - DNA, 25 bp, Homo sapien
aaatgagaaggggtgtttgtcatgg

SEQ ID NO: 4269086 - DNA, 25 bp, Homo sapien
ggtgtttgtcatggttccttccata

SEQ ID NO: 4269087 - DNA, 25 bp, Homo sapien
agaaggggtgtttgtcatggttcct

SEQ ID NO: 4269088 - DNA, 25 bp, Homo sapien
ttcaggattaagacctctagccagc

SEQ ID NO: 4269089 - DNA, 25 bp, Homo sapien
gcatcaagttggccccatttgagtc

SEQ ID NO: 4269090 - DNA, 25 bp, Homo sapien
tcaagttggccccatttgagtcttt

SEQ ID NO: 4269091 - DNA, 25 bp, Homo sapien
tctttcaggattaagacctctagcc

SEQ ID NO: 4269092 - DNA, 25 bp, Homo sapien
taatttgggaattaataaatgcttc

SEQ ID NO: 4269093 - DNA, 25 bp, Homo sapien
tgggaattaataaatgcttcaatta

SEQ ID NO: 4269094 - DNA, 25 bp, Homo sapien
atgcttcaattaactctggagaatc

SEQ ID NO: 4269095 - DNA, 25 bp, Homo sapien
tgcttcaattaactctggagaatct

SEQ ID NO: 4269096 - DNA, 25 bp, Homo sapien
tccccatccttctggttaatgcggc

SEQ ID NO: 4269097 - DNA, 25 bp, Homo sapien
tccactcgggcttgtgatccattaa

SEQ ID NO: 4269098 - DNA, 25 bp, Homo sapien
cagcgacgacgtgcaggacagtgca

SEQ ID NO: 4269099 - DNA, 25 bp, Homo sapien
gatccattaaccaccggaaaagatg

SEQ ID NO: 4269100 - DNA, 25 bp, Homo sapien
ttggatacagagtcgcatgagggca

SEQ ID NO: 4269101 - DNA, 25 bp, Homo sapien
gggatacggtcctatagtctcaaca

SEQ ID NO: 4269102 - DNA, 25 bp, Homo sapien
cttgcaccaatggagatgagccact

SEQ ID NO: 4269103 - DNA, 25 bp, Homo sapien
tgagccactggactaacttgggcac

SEQ ID NO: 4269104 - DNA, 25 bp, Homo sapien
agtgataactctgggacatgaatat

SEQ ID NO: 4269105 - DNA, 25 bp, Homo sapien
tcagtgataactctgggacatgaat

SEQ ID NO: 4269106 - DNA, 25 bp, Homo sapien
gataactctgggacatgaatatttc

SEQ ID NO: 4269107 - DNA, 25 bp, Homo sapien
tgaatatttcttggtaatcggtctt

SEQ ID NO: 4269108 - DNA, 25 bp, Homo sapien
cacttctgttgggaatccagttgtg

SEQ ID NO: 4269109 - DNA, 25 bp, Homo sapien
ccacacttctgttgggaatccagtt

SEQ ID NO: 4269110 - DNA, 25 bp, Homo sapien
ctgttgggaatccagttgtgaaaat

SEQ ID NO: 4269111 - DNA, 25 bp, Homo sapien
cttctgttgggaatccagttgtgaa

SEQ ID NO: 4269112 - DNA, 25 bp, Homo sapien
gcttcgtaaggctggtgcaacctca

SEQ ID NO: 4269113 - DNA, 25 bp, Homo sapien
caaaaaacatgcgagcggcttcgta

SEQ ID NO: 4269114 - DNA, 25 bp, Homo sapien
gcaaggaataaccagctcggtagta

SEQ ID NO: 4269115 - DNA, 25 bp, Homo sapien
caaggaaatcagcaaccggtgcctg

SEQ ID NO: 4269116 - DNA, 25 bp, Homo sapien
tgcgaacggcaaagaacatgcacag

SEQ ID NO: 4269117 - DNA, 25 bp, Homo sapien
gcatttcaacactaggcgatccttg

SEQ ID NO: 4269118 - DNA, 25 bp, Homo sapien
agataatgatcacatgccccatggg

SEQ ID NO: 4269119 - DNA, 25 bp, Homo sapien
tgctcagatgaaacttgcgaacggc

SEQ ID NO: 4269120 - DNA, 25 bp, Homo sapien
accaccccaatactctcaagtcatc

SEQ ID NO: 4269121 - DNA, 25 bp, Homo sapien
caccaccccaatactctcaagtcat

SEQ ID NO: 4269122 - DNA, 25 bp, Homo sapien
gcacagccaagtccctcgggggaac

SEQ ID NO: 4269123 - DNA, 25 bp, Homo sapien
ccttggcagcaacaaatgcctcatt

SEQ ID NO: 4269124 - DNA, 25 bp, Homo sapien
taggttggatcccattggagacatt

SEQ ID NO: 4269125 - DNA, 25 bp, Homo sapien
cttcacgtaggttggatcccattgg

SEQ ID NO: 4269126 - DNA, 25 bp, Homo sapien
gcttcatcgtactttctgatggcca

SEQ ID NO: 4269127 - DNA, 25 bp, Homo sapien
acctggttgccggattctttcagca

SEQ ID NO: 4269128 - DNA, 25 bp, Homo sapien
ttcagcagctcagcgtaagctgtca

SEQ ID NO: 4269129 - DNA, 25 bp, Homo sapien
gctcagcgtaagctgtcaggtccat

SEQ ID NO: 4269130 - DNA, 25 bp, Homo sapien
gagacgcttgctgccagacccgtgc

SEQ ID NO: 4269131 - DNA, 25 bp, Homo sapien
gagacgggggagacgcttgctgcca

SEQ ID NO: 4269132 - DNA, 25 bp, Homo sapien
acgcttgctgccagacccgtgcagg

SEQ ID NO: 4269133 - DNA, 25 bp, Homo sapien
gggagacgcttgctgccagacccgt

SEQ ID NO: 4269134 - DNA, 25 bp, Homo sapien
aaggagttcgctcactatggcccca

SEQ ID NO: 4269135 - DNA, 25 bp, Homo sapien
tggagaaggagttcgctcactatgg

SEQ ID NO: 4269136 - DNA, 25 bp, Homo sapien
aggagttcgctcactatggccccac

SEQ ID NO: 4269137 - DNA, 25 bp, Homo sapien
agaaggagttcgctcactatggccc

SEQ ID NO: 4269138 - DNA, 25 bp, Homo sapien
attcaagccattctcttcccttagc

SEQ ID NO: 4269139 - DNA, 25 bp, Homo sapien
ttctcttcccttagcttccctagta

SEQ ID NO: 4269140 - DNA, 25 bp, Homo sapien
tcaagccattctcttcccttagctt

SEQ ID NO: 4269141 - DNA, 25 bp, Homo sapien
ctcttcccttagcttccctagtagc

SEQ ID NO: 4269142 - DNA, 25 bp, Homo sapien
tagattatagtgacagcgtggtgcc

SEQ ID NO: 4269143 - DNA, 25 bp, Homo sapien
tcctaagggtctgatgagcaaattt

SEQ ID NO: 4269144 - DNA, 25 bp, Homo sapien
tgaaccattcttgggacctttgaag

SEQ ID NO: 4269145 - DNA, 25 bp, Homo sapien
tgagtgtagggcacaattctggccc

SEQ ID NO: 4269146 - DNA, 25 bp, Homo sapien
caacagggtgagctagtacatatcc

SEQ ID NO: 4269147 - DNA, 25 bp, Homo sapien
ggtaccacgtatctctttcataaaa

SEQ ID NO: 4269148 - DNA, 25 bp, Homo sapien
tgtggctctataatggtaggtggcc

SEQ ID NO: 4269149 - DNA, 25 bp, Homo sapien
tgctgggtttgccaaacaacagggt

SEQ ID NO: 4269150 - DNA, 25 bp, Homo sapien
ccaaaaacacaggtctaggagagag

SEQ ID NO: 4269151 - DNA, 25 bp, Homo sapien
tagactataccgtttacatgcacac

SEQ ID NO: 4269152 - DNA, 25 bp, Homo sapien
catccaccgtgacaaagcaaatagg

SEQ ID NO: 4269153 - DNA, 25 bp, Homo sapien
gacctgggccaatcgatccctcatg

SEQ ID NO: 4269154 - DNA, 25 bp, Homo sapien
ccttcaccaaccagtacttcaaaag

SEQ ID NO: 4269155 - DNA, 25 bp, Homo sapien
caccaaccagtacttcaaaagatgc

SEQ ID NO: 4269156 - DNA, 25 bp, Homo sapien
tgtcccttcaccaaccagtacttca

SEQ ID NO: 4269157 - DNA, 25 bp, Homo sapien
tcttgtcccttcaccaaccagtact

SEQ ID NO: 4269158 - DNA, 25 bp, Homo sapien
gcacatcaatggaacaaagtagaat

SEQ ID NO: 4269159 - DNA, 25 bp, Homo sapien
gagtgaccgccaccgggcctataaa

SEQ ID NO: 4269160 - DNA, 25 bp, Homo sapien
gagtgaatcatttggtacaactcac

SEQ ID NO: 4269161 - DNA, 25 bp, Homo sapien
taaagtcaggtactaacatgaaagt

SEQ ID NO: 4269162 - DNA, 25 bp, Homo sapien
gggaaagggtacaggcgcacttgct

SEQ ID NO: 4269163 - DNA, 25 bp, Homo sapien
ggaaagggtacaggcgcacttgctt

SEQ ID NO: 4269164 - DNA, 25 bp, Homo sapien
agaatttacggcctgaacccagcca

SEQ ID NO: 4269165 - DNA, 25 bp, Homo sapien
gattagtttagaatttacggcctga

SEQ ID NO: 4269166 - DNA, 25 bp, Homo sapien
ctagactcggtgagcccaggctgat

SEQ ID NO: 4269167 - DNA, 25 bp, Homo sapien
agttgggaggaaacgcaacgcgcct

SEQ ID NO: 4269168 - DNA, 25 bp, Homo sapien
cagaaacaccccgatctgggagaaa

SEQ ID NO: 4269169 - DNA, 25 bp, Homo sapien
gggctctatctcagccgggttgcaa

SEQ ID NO: 4269170 - DNA, 25 bp, Homo sapien
gggcgcgctcgctggtcaggaacct

SEQ ID NO: 4269171 - DNA, 25 bp, Homo sapien
ccaagaatgcttgccccgggggcgc

SEQ ID NO: 4269172 - DNA, 25 bp, Homo sapien
tcccaggtttctgcccgccaagaat

SEQ ID NO: 4269173 - DNA, 25 bp, Homo sapien
ccgggaagaggccagcgcgctccaa

SEQ ID NO: 4269174 - DNA, 25 bp, Homo sapien
gtctgcacctagatggctgtgggcc

SEQ ID NO: 4269175 - DNA, 25 bp, Homo sapien
gcgcaactggctcgggtctgcacct

SEQ ID NO: 4269176 - DNA, 25 bp, Homo sapien
cgagagctgcggcttcgatgccggg

SEQ ID NO: 4269177 - DNA, 25 bp, Homo sapien
agtcctgtcgcagcgcgtgccctgg

SEQ ID NO: 4269178 - DNA, 25 bp, Homo sapien
ggctgcggccggagggtccgcacca

SEQ ID NO: 4269179 - DNA, 25 bp, Homo sapien
gctgcggccggagggtccgcaccag

SEQ ID NO: 4269180 - DNA, 25 bp, Homo sapien
gcgcgatgcagaggcggcgttcggg

SEQ ID NO: 4269181 - DNA, 25 bp, Homo sapien
gcgggcagtgcggaagcccgaaagc

SEQ ID NO: 4269182 - DNA, 25 bp, Homo sapien
gcggaagcccgaaagctaccggagc

SEQ ID NO: 4269183 - DNA, 25 bp, Homo sapien
cggcgcgatgcagaggcggcgttcg

SEQ ID NO: 4269184 - DNA, 25 bp, Homo sapien
cgcagacctattccaagtttccacg

SEQ ID NO: 4269185 - DNA, 25 bp, Homo sapien
gcagacctattccaagtttccacgt

SEQ ID NO: 4269186 - DNA, 25 bp, Homo sapien
agacctattccaagtttccacgtag

SEQ ID NO: 4269187 - DNA, 25 bp, Homo sapien
gtttccacgtagttgcgagagccca

SEQ ID NO: 4269188 - DNA, 25 bp, Homo sapien
ggccgcctttgaataaacgagtgct

SEQ ID NO: 4269189 - DNA, 25 bp, Homo sapien
gagtgcttcgaaccctttaccagga

SEQ ID NO: 4269190 - DNA, 25 bp, Homo sapien
tgtctcccgtcatgcaagcaaatgg

SEQ ID NO: 4269191 - DNA, 25 bp, Homo sapien
aagcaaatggtatggctctcggccg

SEQ ID NO: 4269192 - DNA, 25 bp, Homo sapien
cccagtgatgatcgacagagtagtg

SEQ ID NO: 4269193 - DNA, 25 bp, Homo sapien
atggagagtaagtgcgcacaggcct

SEQ ID NO: 4269194 - DNA, 25 bp, Homo sapien
gcacaggcctgagcaggcaacaaaa

SEQ ID NO: 4269195 - DNA, 25 bp, Homo sapien
acgctcaccgtcgtgtccatggaga

SEQ ID NO: 4269196 - DNA, 25 bp, Homo sapien
cctggggcaaggttcggcctacact

SEQ ID NO: 4269197 - DNA, 25 bp, Homo sapien
gaatccacccaatcagagagctaag

SEQ ID NO: 4269198 - DNA, 25 bp, Homo sapien
ggttcggcctacactgcatcccggt

SEQ ID NO: 4269199 - DNA, 25 bp, Homo sapien
atcccggtggttcgcccatccttct

SEQ ID NO: 4269200 - DNA, 25 bp, Homo sapien
ctaaggcacacagtatacttctctc

SEQ ID NO: 4269201 - DNA, 25 bp, Homo sapien
atccccctctgggtggcgctctaca

SEQ ID NO: 4269202 - DNA, 25 bp, Homo sapien
ctctgggtggcgctctacacaacca

SEQ ID NO: 4269203 - DNA, 25 bp, Homo sapien
ctgggtggcgctctacacaaccaac

SEQ ID NO: 4269204 - DNA, 25 bp, Homo sapien
gggtggcgctctacacaaccaacct

SEQ ID NO: 4269205 - DNA, 25 bp, Homo sapien
aaaacgatagttagatgccacgaac

SEQ ID NO: 4269206 - DNA, 25 bp, Homo sapien
aaaaacgatagttagatgccacgaa

SEQ ID NO: 4269207 - DNA, 25 bp, Homo sapien
aaaaaacgatagttagatgccacga

SEQ ID NO: 4269208 - DNA, 25 bp, Homo sapien
tgtcaaggggagtactaaccttctc

SEQ ID NO: 4269209 - DNA, 25 bp, Homo sapien
gtggcaatgccttaaccgtatgtgt

SEQ ID NO: 4269210 - DNA, 25 bp, Homo sapien
gtatgtgtgttgtcaggcctgaggg

SEQ ID NO: 4269211 - DNA, 25 bp, Homo sapien
tactaaccttctcccctttcataca

SEQ ID NO: 4269212 - DNA, 25 bp, Homo sapien
tcaggctaaagttcggcgagcgaca

SEQ ID NO: 4269213 - DNA, 25 bp, Homo sapien
caaggacttcggtggtatctttcac

SEQ ID NO: 4269214 - DNA, 25 bp, Homo sapien
tatgagcagattcaccttgtccctg

SEQ ID NO: 4269215 - DNA, 25 bp, Homo sapien
tgtactttcaagtgctgagtcctgg

SEQ ID NO: 4269216 - DNA, 25 bp, Homo sapien
gacaatgcggttgacaatgacagct

SEQ ID NO: 4269217 - DNA, 25 bp, Homo sapien
tccaagactcgggtggtccaagagc

SEQ ID NO: 4269218 - DNA, 25 bp, Homo sapien
tcagccgagaggctacatgatccgc

SEQ ID NO: 4269219 - DNA, 25 bp, Homo sapien
ggccgtgatcatctctgacaatgcg

SEQ ID NO: 4269220 - DNA, 25 bp, Homo sapien
tactgtgccgcttcttagcttgatg

SEQ ID NO: 4269221 - DNA, 25 bp, Homo sapien
aaatttgcccagatcactgtcctga

SEQ ID NO: 4269222 - DNA, 25 bp, Homo sapien
cctgtgccgttgaggtcttacacaa

SEQ ID NO: 4269223 - DNA, 25 bp, Homo sapien
tgtcctgaagaagaaactgtctcca

SEQ ID NO: 4269224 - DNA, 25 bp, Homo sapien
ctgggtggatttacatgagttctct

SEQ ID NO: 4269225 - DNA, 25 bp, Homo sapien
ttcccagtaacacttactgaagaga

SEQ ID NO: 4269226 - DNA, 25 bp, Homo sapien
ttggctgggtggatttacatgagtt

SEQ ID NO: 4269227 - DNA, 25 bp, Homo sapien
ccagtaacacttactgaagagactg

SEQ ID NO: 4269228 - DNA, 25 bp, Homo sapien
tgtgtgtttgtgacctcctcaactt

SEQ ID NO: 4269229 - DNA, 25 bp, Homo sapien
cctcaacttcttttatgctttatag

SEQ ID NO: 4269230 - DNA, 25 bp, Homo sapien
tatctgcagctattgtaattgggac

SEQ ID NO: 4269231 - DNA, 25 bp, Homo sapien
gcgagccatcgcattcagctatcat

SEQ ID NO: 4269232 - DNA, 25 bp, Homo sapien
tataagcactgagagataacctgtc

SEQ ID NO: 4269233 - DNA, 25 bp, Homo sapien
tagccattgctagtcagaaccaaag

SEQ ID NO: 4269234 - DNA, 25 bp, Homo sapien
agaaatggaggcatgaaggcagtca

SEQ ID NO: 4269235 - DNA, 25 bp, Homo sapien
cctaaaggatttctgtataagcact

SEQ ID NO: 4269236 - DNA, 25 bp, Homo sapien
taaggacacctactgaagtgctaga

SEQ ID NO: 4269237 - DNA, 25 bp, Homo sapien
tgaccacaagctggaaacaacctaa

SEQ ID NO: 4269238 - DNA, 25 bp, Homo sapien
caatgttgaacaagacacggaagag

SEQ ID NO: 4269239 - DNA, 25 bp, Homo sapien
tctcccaggtatatgcaaggatcac

SEQ ID NO: 4269240 - DNA, 25 bp, Homo sapien
ctttaagagtccttaagtgatttgc

SEQ ID NO: 4269241 - DNA, 25 bp, Homo sapien
gaatgaaggcaacttagagcacaaa

SEQ ID NO: 4269242 - DNA, 25 bp, Homo sapien
gtgatttgccatactcttttttcat

SEQ ID NO: 4269243 - DNA, 25 bp, Homo sapien
ggcaacttagagcacaaattggtga

SEQ ID NO: 4269244 - DNA, 25 bp, Homo sapien
tgagatgtacacactctgtagcaac

SEQ ID NO: 4269245 - DNA, 25 bp, Homo sapien
actctgtagcaactactcagctgtg

SEQ ID NO: 4269246 - DNA, 25 bp, Homo sapien
tacacactctgtagcaactactcag

SEQ ID NO: 4269247 - DNA, 25 bp, Homo sapien
tagcaactactcagctgtgccattg

SEQ ID NO: 4269248 - DNA, 25 bp, Homo sapien
tatgatctaaaccaaagtccctagg

SEQ ID NO: 4269249 - DNA, 25 bp, Homo sapien
tacttactgggtaggatgaggcaac

SEQ ID NO: 4269250 - DNA, 25 bp, Homo sapien
tagcccatgctgacacagaaattgg

SEQ ID NO: 4269251 - DNA, 25 bp, Homo sapien
gaaactgccccttgagataacctga

SEQ ID NO: 4269252 - DNA, 25 bp, Homo sapien
tatagtgaccagaagggctgagtca

SEQ ID NO: 4269253 - DNA, 25 bp, Homo sapien
cactggatgactatgacacctactg

SEQ ID NO: 4269254 - DNA, 25 bp, Homo sapien
tatgcctcagactaaaactccaact

SEQ ID NO: 4269255 - DNA, 25 bp, Homo sapien
cacctaagcctgaaaagcctcagtt

SEQ ID NO: 4269256 - DNA, 25 bp, Homo sapien
ccagaagagccaaaaatcatctgta

SEQ ID NO: 4269257 - DNA, 25 bp, Homo sapien
atagcatgccattttctcctagtgt

SEQ ID NO: 4269258 - DNA, 25 bp, Homo sapien
ccctctatatgtaggttcctttgga

SEQ ID NO: 4269259 - DNA, 25 bp, Homo sapien
gattattaactcttaggcggcatta

SEQ ID NO: 4269260 - DNA, 25 bp, Homo sapien
tatgcaaacttaatattacatagtg

SEQ ID NO: 4269261 - DNA, 25 bp, Homo sapien
tggatatgcaaacttaatattacat

SEQ ID NO: 4269262 - DNA, 25 bp, Homo sapien
aatcctgagtttactacttactgtg

SEQ ID NO: 4269263 - DNA, 25 bp, Homo sapien
acatggatatgcaaacttaatatta

SEQ ID NO: 4269264 - DNA, 25 bp, Homo sapien
aattctgagaatacaacgaggtccc

SEQ ID NO: 4269265 - DNA, 25 bp, Homo sapien
cagtctaaggcagaatgactgtgaa

SEQ ID NO: 4269266 - DNA, 25 bp, Homo sapien
tgtggataaaagttacccaatggac

SEQ ID NO: 4269267 - DNA, 25 bp, Homo sapien
gtttaacagtcacataatacatatt

SEQ ID NO: 4269268 - DNA, 25 bp, Homo sapien
tggcaatacgggacactgggaatac

SEQ ID NO: 4269269 - DNA, 25 bp, Homo sapien
gctaattcttcattgtgccaggctg

SEQ ID NO: 4269270 - DNA, 25 bp, Homo sapien
tcaatgacatgtagtgcctgagaca

SEQ ID NO: 4269271 - DNA, 25 bp, Homo sapien
tactgcctctagttgaaagccactg

SEQ ID NO: 4269272 - DNA, 25 bp, Homo sapien
caaagtgtgttggtttcgagtcaaa

SEQ ID NO: 4269273 - DNA, 25 bp, Homo sapien
ggttactatcaaacaaggatgccac

SEQ ID NO: 4269274 - DNA, 25 bp, Homo sapien
tacaggcaacccctttgataattgg

SEQ ID NO: 4269275 - DNA, 25 bp, Homo sapien
tcagttgtggcaacccgaaacaggg

SEQ ID NO: 4269276 - DNA, 25 bp, Homo sapien
agggcaggaaagtctgttagatttt

SEQ ID NO: 4269277 - DNA, 25 bp, Homo sapien
tctcgaaggtgttccataatgtcca

SEQ ID NO: 4269278 - DNA, 25 bp, Homo sapien
tactaactcgtaattcttcactgag

SEQ ID NO: 4269279 - DNA, 25 bp, Homo sapien
aacttcgaaagtacaaatatggtca

SEQ ID NO: 4269280 - DNA, 25 bp, Homo sapien
tctaggattgccgacatgagcgcac

SEQ ID NO: 4269281 - DNA, 25 bp, Homo sapien
tacaccgcggataaagaccaggagg

SEQ ID NO: 4269282 - DNA, 25 bp, Homo sapien
tcaaagtatgggtcgtggtcagtcc

SEQ ID NO: 4269283 - DNA, 25 bp, Homo sapien
caggaggtagttctcataggccaca

SEQ ID NO: 4269284 - DNA, 25 bp, Homo sapien
ggctggatatttcgtattccccgag

SEQ ID NO: 4269285 - DNA, 25 bp, Homo sapien
ctgcgccagatcacctcagcagagg

SEQ ID NO: 4269286 - DNA, 25 bp, Homo sapien
caagagcagggccaacgttagaaag

SEQ ID NO: 4269287 - DNA, 25 bp, Homo sapien
aacgaaccaataggaagagcggaca

SEQ ID NO: 4269288 - DNA, 25 bp, Homo sapien
tccgttgagcatctagacgtttcct

SEQ ID NO: 4269289 - DNA, 25 bp, Homo sapien
tccttggctcttctggcgccaaaat

SEQ ID NO: 4269290 - DNA, 25 bp, Homo sapien
tggacgagacagtggtgaaccgcat

SEQ ID NO: 4269291 - DNA, 25 bp, Homo sapien
cgccaaaatgtcgttcgtggcaggg

SEQ ID NO: 4269292 - DNA, 25 bp, Homo sapien
tacaaatagcacaggaggaccagcc

SEQ ID NO: 4269293 - DNA, 25 bp, Homo sapien
aggaccagccccatgcagatggtag

SEQ ID NO: 4269294 - DNA, 25 bp, Homo sapien
tcctgcctcaggtttatttgtacaa

SEQ ID NO: 4269295 - DNA, 25 bp, Homo sapien
tctgtcctcatgttggcagagatat

SEQ ID NO: 4269296 - DNA, 25 bp, Homo sapien
tggcaatacgggcacgagcacgctt

SEQ ID NO: 4269297 - DNA, 25 bp, Homo sapien
gcaatacgggcacgagcacgcttcc

SEQ ID NO: 4269298 - DNA, 25 bp, Homo sapien
ccttggcaatacgggcacgagcacg

SEQ ID NO: 4269299 - DNA, 25 bp, Homo sapien
gagccccttggcaatacgggcacga

SEQ ID NO: 4269300 - DNA, 25 bp, Homo sapien
ggctcccgaagcacctagaaccgga

SEQ ID NO: 4269301 - DNA, 25 bp, Homo sapien
ttaagccgcggctcccgaagcacct

SEQ ID NO: 4269302 - DNA, 25 bp, Homo sapien
gctcccgaagcacctagaaccggaa

SEQ ID NO: 4269303 - DNA, 25 bp, Homo sapien
cccgaagcacctagaaccggaagag

SEQ ID NO: 4269304 - DNA, 25 bp, Homo sapien
ctggccacttggggttggaattagt

SEQ ID NO: 4269305 - DNA, 25 bp, Homo sapien
cacacacgtctataatagtgctggc

SEQ ID NO: 4269306 - DNA, 25 bp, Homo sapien
cacacgtctataatagtgctggcca

SEQ ID NO: 4269307 - DNA, 25 bp, Homo sapien
cacacacacgtctataatagtgctg

SEQ ID NO: 4269308 - DNA, 25 bp, Homo sapien
tagtttgttaatatagtgaattaca

SEQ ID NO: 4269309 - DNA, 25 bp, Homo sapien
ttcctgggatgaactctgcttggtt

SEQ ID NO: 4269310 - DNA, 25 bp, Homo sapien
ggatgaactctgcttggttataata

SEQ ID NO: 4269311 - DNA, 25 bp, Homo sapien
taattattttatctgtgctcatgat

SEQ ID NO: 4269312 - DNA, 25 bp, Homo sapien
gatgtagaacatacctccagagtga

SEQ ID NO: 4269313 - DNA, 25 bp, Homo sapien
gtcagcttgacacaaaaagggtgcc

SEQ ID NO: 4269314 - DNA, 25 bp, Homo sapien
taaaacctcatgttggctggacaca

SEQ ID NO: 4269315 - DNA, 25 bp, Homo sapien
cagtcaggcatgctcgaggattcca

SEQ ID NO: 4269316 - DNA, 25 bp, Homo sapien
tatggttatttatgcactgtgggat

SEQ ID NO: 4269317 - DNA, 25 bp, Homo sapien
tacaaagtgtaccaacataagtgtt

SEQ ID NO: 4269318 - DNA, 25 bp, Homo sapien
tctgtattccgatacaaagtgttgt

SEQ ID NO: 4269319 - DNA, 25 bp, Homo sapien
tgttggtagcacttaagacttatac

SEQ ID NO: 4269320 - DNA, 25 bp, Homo sapien
cacttggaaagactaggaagacaaa

SEQ ID NO: 4269321 - DNA, 25 bp, Homo sapien
caatttcacttggaaagactaggaa

SEQ ID NO: 4269322 - DNA, 25 bp, Homo sapien
cagactactctcatcttatgaagaa

SEQ ID NO: 4269323 - DNA, 25 bp, Homo sapien
taaagaacagactactctcatctta

SEQ ID NO: 4269324 - DNA, 25 bp, Homo sapien
tagaccagggcatctcagaagtgag

SEQ ID NO: 4269325 - DNA, 25 bp, Homo sapien
gatggagttctagaacaaacctgca

SEQ ID NO: 4269326 - DNA, 25 bp, Homo sapien
aagaggggttttctgagcttcaaga

SEQ ID NO: 4269327 - DNA, 25 bp, Homo sapien
agaagtgaggttccatgagcccagg

SEQ ID NO: 4269328 - DNA, 25 bp, Homo sapien
aacttgctactattagtaaatgtat

SEQ ID NO: 4269329 - DNA, 25 bp, Homo sapien
acttgctactattagtaaatgtata

SEQ ID NO: 4269330 - DNA, 25 bp, Homo sapien
tctcaattcagaagattggtatcca

SEQ ID NO: 4269331 - DNA, 25 bp, Homo sapien
cagaagattggtatccatatttttt

SEQ ID NO: 4269332 - DNA, 25 bp, Homo sapien
tcatctcaattcagaagattggtat

SEQ ID NO: 4269333 - DNA, 25 bp, Homo sapien
caattcagaagattggtatccatat

SEQ ID NO: 4269334 - DNA, 25 bp, Homo sapien
gcaaagtagttgcactccatgattt

SEQ ID NO: 4269335 - DNA, 25 bp, Homo sapien
ctcttggacagggtacctctaaagg

SEQ ID NO: 4269336 - DNA, 25 bp, Homo sapien
tcttatgtgcctttagtcactagat

SEQ ID NO: 4269337 - DNA, 25 bp, Homo sapien
tagtcactagattttcccccaatat

SEQ ID NO: 4269338 - DNA, 25 bp, Homo sapien
tactttacaaggtacagcacagttg

SEQ ID NO: 4269339 - DNA, 25 bp, Homo sapien
gtgaaacatagattccccacccgag

SEQ ID NO: 4269340 - DNA, 25 bp, Homo sapien
gaagtctgaattgcaccgtggagaa

SEQ ID NO: 4269341 - DNA, 25 bp, Homo sapien
tccagcaagtatctcagtgagcact

SEQ ID NO: 4269342 - DNA, 25 bp, Homo sapien
taccctagaatcaaactacaacaaa

SEQ ID NO: 4269343 - DNA, 25 bp, Homo sapien
tgttcattcatgtagattcaaaatg

SEQ ID NO: 4269344 - DNA, 25 bp, Homo sapien
agcatggactggttctaccctagaa

SEQ ID NO: 4269345 - DNA, 25 bp, Homo sapien
catgattctacaattacggagataa

SEQ ID NO: 4269346 - DNA, 25 bp, Homo sapien
taggtagggccccaaggagcatcac

SEQ ID NO: 4269347 - DNA, 25 bp, Homo sapien
acaaaagtcagtccctctaggtagg

SEQ ID NO: 4269348 - DNA, 25 bp, Homo sapien
cccaaggagcatcacccaggttgaa

SEQ ID NO: 4269349 - DNA, 25 bp, Homo sapien
ggtttgtgtcaatggacaaaagtca

SEQ ID NO: 4269350 - DNA, 25 bp, Homo sapien
aagtgctgtcctattggccttcatc

SEQ ID NO: 4269351 - DNA, 25 bp, Homo sapien
ccagaagtgctgtcctattggcctt

SEQ ID NO: 4269352 - DNA, 25 bp, Homo sapien
gctgggccagaagtgctgtcctatt

SEQ ID NO: 4269353 - DNA, 25 bp, Homo sapien
ggtggctgttggtcatctccatctc

SEQ ID NO: 4269354 - DNA, 25 bp, Homo sapien
ttttaggaatgtattctccaagaaa

SEQ ID NO: 4269355 - DNA, 25 bp, Homo sapien
tttaggaatgtattctccaagaaac

SEQ ID NO: 4269356 - DNA, 25 bp, Homo sapien
tcagcagcagttttatatctcagaa

SEQ ID NO: 4269357 - DNA, 25 bp, Homo sapien
ctctcgttgtagcttccgtttttct

SEQ ID NO: 4269358 - DNA, 25 bp, Homo sapien
gaacctgtccctcaagccggctaat

SEQ ID NO: 4269359 - DNA, 25 bp, Homo sapien
tgtagcttccgtttttctgctttca

SEQ ID NO: 4269360 - DNA, 25 bp, Homo sapien
tcccctaagggtgactcataagtcc

SEQ ID NO: 4269361 - DNA, 25 bp, Homo sapien
gctgtagagtcattttagggccaat

SEQ ID NO: 4269362 - DNA, 25 bp, Homo sapien
ccacttagatgcaggaaggacattt

SEQ ID NO: 4269363 - DNA, 25 bp, Homo sapien
tagtactgggcactagaagtcacca

SEQ ID NO: 4269364 - DNA, 25 bp, Homo sapien
tccaaggtagttatatcctgttctg

SEQ ID NO: 4269365 - DNA, 25 bp, Homo sapien
caaggtagttatatcctgttctgct

SEQ ID NO: 4269366 - DNA, 25 bp, Homo sapien
tcgctaatttgtctattggcatctc

SEQ ID NO: 4269367 - DNA, 25 bp, Homo sapien
ttgaaagcttaaatttgtattcgct

SEQ ID NO: 4269368 - DNA, 25 bp, Homo sapien
cagaagaagacaatgaattatcttc

SEQ ID NO: 4269369 - DNA, 25 bp, Homo sapien
gaagaagacaatgaattatcttcac

SEQ ID NO: 4269370 - DNA, 25 bp, Homo sapien
ctagaacagaagaagacaatgaatt

SEQ ID NO: 4269371 - DNA, 25 bp, Homo sapien
aacagaagaagacaatgaattatct

SEQ ID NO: 4269372 - DNA, 25 bp, Homo sapien
gaaaggagccctgccaattcagcag

SEQ ID NO: 4269373 - DNA, 25 bp, Homo sapien
tatgagccatcaggcagtacctctg

SEQ ID NO: 4269374 - DNA, 25 bp, Homo sapien
ggactgggccctctagttccctgaa

SEQ ID NO: 4269375 - DNA, 25 bp, Homo sapien
tgtgtgtaaccttgtggagcctccc

SEQ ID NO: 4269376 - DNA, 25 bp, Homo sapien
catcgtatgtgtaagcaagaagagg

SEQ ID NO: 4269377 - DNA, 25 bp, Homo sapien
tgctgttcagtaatgtgataatgtg

SEQ ID NO: 4269378 - DNA, 25 bp, Homo sapien
tatgtacctagccaagtgcacacag

SEQ ID NO: 4269379 - DNA, 25 bp, Homo sapien
ttggccttcctaaatctacctatgt

SEQ ID NO: 4269380 - DNA, 25 bp, Homo sapien
gactgctgacagctactgaactggt

SEQ ID NO: 4269381 - DNA, 25 bp, Homo sapien
ggttcaggctcaccactgtagtagc

SEQ ID NO: 4269382 - DNA, 25 bp, Homo sapien
caagtgtcctaactgatgtccaaca

SEQ ID NO: 4269383 - DNA, 25 bp, Homo sapien
gctgcttaaggacaatctctcagat

SEQ ID NO: 4269384 - DNA, 25 bp, Homo sapien
tggagcatttctgtcgttcctcctc

SEQ ID NO: 4269385 - DNA, 25 bp, Homo sapien
gccattctgcagtcctgccaggtca

SEQ ID NO: 4269386 - DNA, 25 bp, Homo sapien
gcatttcgatgaactgcaagtctga

SEQ ID NO: 4269387 - DNA, 25 bp, Homo sapien
tttctgtcgttcctcctctaactga

SEQ ID NO: 4269388 - DNA, 25 bp, Homo sapien
tcctagaattgacaggggcccagca

SEQ ID NO: 4269389 - DNA, 25 bp, Homo sapien
atgaaaacttcaaatcacatgacta

SEQ ID NO: 4269390 - DNA, 25 bp, Homo sapien
atagtgcatgttaaatagtagaatc

SEQ ID NO: 4269391 - DNA, 25 bp, Homo sapien
cactgaaatatcccagtgcctagaa

SEQ ID NO: 4269392 - DNA, 25 bp, Homo sapien
ccagcaagttttcgtagccttacat

SEQ ID NO: 4269393 - DNA, 25 bp, Homo sapien
tccagcaagttttcgtagccttaca

SEQ ID NO: 4269394 - DNA, 25 bp, Homo sapien
tctctccagcaagttttcgtagcct

SEQ ID NO: 4269395 - DNA, 25 bp, Homo sapien
tctccagcaagttttcgtagcctta

SEQ ID NO: 4269396 - DNA, 25 bp, Homo sapien
tccaagcagatctgcctgcttggac

SEQ ID NO: 4269397 - DNA, 25 bp, Homo sapien
cttccaagcagatctgcctgcttgg

SEQ ID NO: 4269398 - DNA, 25 bp, Homo sapien
ttccaagcagatctgcctgcttgga

SEQ ID NO: 4269399 - DNA, 25 bp, Homo sapien
ccagccactggttcatgactgacat

SEQ ID NO: 4269400 - DNA, 25 bp, Homo sapien
cctgagacacaacagtgatggctcc

SEQ ID NO: 4269401 - DNA, 25 bp, Homo sapien
gccatcggggattataactaagcca

SEQ ID NO: 4269402 - DNA, 25 bp, Homo sapien
catcaccattgggagtgccatcggg

SEQ ID NO: 4269403 - DNA, 25 bp, Homo sapien
caaaaggcccgtatggaagctgtaa

SEQ ID NO: 4269404 - DNA, 25 bp, Homo sapien
tgaggtcactctgcaacaatacatg

SEQ ID NO: 4269405 - DNA, 25 bp, Homo sapien
aatagcttcaacctaccaaatctgg

SEQ ID NO: 4269406 - DNA, 25 bp, Homo sapien
gtaaaacagtgagggacctgaattc

SEQ ID NO: 4269407 - DNA, 25 bp, Homo sapien
gagcatatctcgctcattcctaagg

SEQ ID NO: 4269408 - DNA, 25 bp, Homo sapien
gcatatctcgctcattcctaaggca

SEQ ID NO: 4269409 - DNA, 25 bp, Homo sapien
tcctctctgagcatatctcgctcat

SEQ ID NO: 4269410 - DNA, 25 bp, Homo sapien
tctgagcatatctcgctcattccta

SEQ ID NO: 4269411 - DNA, 25 bp, Homo sapien
tattcaagctggatctaaaaccctc

SEQ ID NO: 4269412 - DNA, 25 bp, Homo sapien
tacacccaaggtaagtagtctatgc

SEQ ID NO: 4269413 - DNA, 25 bp, Homo sapien
aatcaggcttttgggttctggcaca

SEQ ID NO: 4269414 - DNA, 25 bp, Homo sapien
gacctctgaggaacaggccaatttg

SEQ ID NO: 4269415 - DNA, 25 bp, Homo sapien
tggtgacagtagcacaacaacatga

SEQ ID NO: 4269416 - DNA, 25 bp, Homo sapien
gaatcttgagggacttatacagagt

SEQ ID NO: 4269417 - DNA, 25 bp, Homo sapien
ggagaaatcccttatattgatggaa

SEQ ID NO: 4269418 - DNA, 25 bp, Homo sapien
aatggtagttgccattccaccaggg

SEQ ID NO: 4269419 - DNA, 25 bp, Homo sapien
gaaatcctgggcctacagatctgtg

SEQ ID NO: 4269420 - DNA, 25 bp, Homo sapien
gaagcccattctagacagtgaccag

SEQ ID NO: 4269421 - DNA, 25 bp, Homo sapien
tattaaggcactcatacaagctaga

SEQ ID NO: 4269422 - DNA, 25 bp, Homo sapien
tgtgaagtcctaaaagaagcccatt

SEQ ID NO: 4269423 - DNA, 25 bp, Homo sapien
caagcctagtgtttgctgaaaagaa

SEQ ID NO: 4269424 - DNA, 25 bp, Homo sapien
agttcttccaggcacaacgtcaggt

SEQ ID NO: 4269425 - DNA, 25 bp, Homo sapien
tgtgtaaatgctcaagaagaatcaa

SEQ ID NO: 4269426 - DNA, 25 bp, Homo sapien
gagcttctaaccaaagcccaatttc

SEQ ID NO: 4269427 - DNA, 25 bp, Homo sapien
ggtcaaacacctcttttgtcatggt

SEQ ID NO: 4269428 - DNA, 25 bp, Homo sapien
gtcaaacacctcttttgtcatggtg

SEQ ID NO: 4269429 - DNA, 25 bp, Homo sapien
gaggtcaaacacctcttttgtcatg

SEQ ID NO: 4269430 - DNA, 25 bp, Homo sapien
tggaggtcaaacacctcttttgtca

SEQ ID NO: 4269431 - DNA, 25 bp, Homo sapien
agaggaagaggggaagagaagtaat

SEQ ID NO: 4269432 - DNA, 25 bp, Homo sapien
ggaagagaagtaataaaagagcaga

SEQ ID NO: 4269433 - DNA, 25 bp, Homo sapien
gagaggaggtttgagggaggaaaca

SEQ ID NO: 4269434 - DNA, 25 bp, Homo sapien
ggggaagagaagtaataaaagagca

SEQ ID NO: 4269435 - DNA, 25 bp, Homo sapien
gcttttaaagaagccacagtgatga

SEQ ID NO: 4269436 - DNA, 25 bp, Homo sapien
caaaatctatgacagcaagaacacc

SEQ ID NO: 4269437 - DNA, 25 bp, Homo sapien
caatggtgcttaacaggttttcttc

SEQ ID NO: 4269438 - DNA, 25 bp, Homo sapien
caaagtttgtatacctagcacccta

SEQ ID NO: 4269439 - DNA, 25 bp, Homo sapien
gccgcaggccttctttaagttcttc

SEQ ID NO: 4269440 - DNA, 25 bp, Homo sapien
taagctcatctctttgccgcaggcc

SEQ ID NO: 4269441 - DNA, 25 bp, Homo sapien
gcagcacactacacatatgtttctg

SEQ ID NO: 4269442 - DNA, 25 bp, Homo sapien
ttccatcttatgctgcagcacacta

SEQ ID NO: 4269443 - DNA, 25 bp, Homo sapien
tagaatagggaactctatagataga

SEQ ID NO: 4269444 - DNA, 25 bp, Homo sapien
agtagatcagtggttacttaagact

SEQ ID NO: 4269445 - DNA, 25 bp, Homo sapien
aaagaccatgtattatatgactcct

SEQ ID NO: 4269446 - DNA, 25 bp, Homo sapien
gaaaggaagatgatactaaagggta

SEQ ID NO: 4269447 - DNA, 25 bp, Homo sapien
catccttgagtgtgtctacttggta

SEQ ID NO: 4269448 - DNA, 25 bp, Homo sapien
tctacttggtagatcaaattgttct

SEQ ID NO: 4269449 - DNA, 25 bp, Homo sapien
tgctcttcaataacatccttgagtg

SEQ ID NO: 4269450 - DNA, 25 bp, Homo sapien
agatcaaattgttcttctcattgtc

SEQ ID NO: 4269451 - DNA, 25 bp, Homo sapien
ttgtatttttcttccacttcagaca

SEQ ID NO: 4269452 - DNA, 25 bp, Homo sapien
tttcttccacttcagacaaagattc

SEQ ID NO: 4269453 - DNA, 25 bp, Homo sapien
tttttcttccacttcagacaaagat

SEQ ID NO: 4269454 - DNA, 25 bp, Homo sapien
gtatttttcttccacttcagacaaa

SEQ ID NO: 4269455 - DNA, 25 bp, Homo sapien
catccatctgagaggctaatagcag

SEQ ID NO: 4269456 - DNA, 25 bp, Homo sapien
accagaattaagttgtcagggaaga

SEQ ID NO: 4269457 - DNA, 25 bp, Homo sapien
aactggattgaaggtatgagtcacc

SEQ ID NO: 4269458 - DNA, 25 bp, Homo sapien
aaccacatgaacaccagaatttaag

SEQ ID NO: 4269459 - DNA, 25 bp, Homo sapien
aatgtaccgatttgtttgatccaag

SEQ ID NO: 4269460 - DNA, 25 bp, Homo sapien
ctggcatgaattaggacaagggatc

SEQ ID NO: 4269461 - DNA, 25 bp, Homo sapien
tcaagtgtcaaggataaacgtaatc

SEQ ID NO: 4269462 - DNA, 25 bp, Homo sapien
taaaatgccagtaagaatgcccctg

SEQ ID NO: 4269463 - DNA, 25 bp, Homo sapien
tgtgcagttggttaacagaacttgc

SEQ ID NO: 4269464 - DNA, 25 bp, Homo sapien
gttggttaacagaacttgcaaagcc

SEQ ID NO: 4269465 - DNA, 25 bp, Homo sapien
tgcagttggttaacagaacttgcaa

SEQ ID NO: 4269466 - DNA, 25 bp, Homo sapien
gcagttggttaacagaacttgcaaa

SEQ ID NO: 4269467 - DNA, 25 bp, Homo sapien
attgccaacacttctgcatacagag

SEQ ID NO: 4269468 - DNA, 25 bp, Homo sapien
atgcttgggctgcagaatgggccct

SEQ ID NO: 4269469 - DNA, 25 bp, Homo sapien
cttctgcatacagagcatgcttggg

SEQ ID NO: 4269470 - DNA, 25 bp, Homo sapien
cagagcatgcttgggctgcagaatg

SEQ ID NO: 4269471 - DNA, 25 bp, Homo sapien
tgtatctggtccttaaggtcataga

SEQ ID NO: 4269472 - DNA, 25 bp, Homo sapien
atcctgtatctggtccttaaggtca

SEQ ID NO: 4269473 - DNA, 25 bp, Homo sapien
tctttaagcccctgcatgtatctcc

SEQ ID NO: 4269474 - DNA, 25 bp, Homo sapien
tgtatctcccttctacatcctgtat

SEQ ID NO: 4269475 - DNA, 25 bp, Homo sapien
tcaagtgaagcaatgaaggtggaga

SEQ ID NO: 4269476 - DNA, 25 bp, Homo sapien
attacttgtaaacattactgcactc

SEQ ID NO: 4269477 - DNA, 25 bp, Homo sapien
gtaaacattactgcactcagactag

SEQ ID NO: 4269478 - DNA, 25 bp, Homo sapien
aaacattactgcactcagactagcc

SEQ ID NO: 4269479 - DNA, 25 bp, Homo sapien
ctgaggcagaatttcgagatgaagg

SEQ ID NO: 4269480 - DNA, 25 bp, Homo sapien
tgtctggatctattaagctgctggt

SEQ ID NO: 4269481 - DNA, 25 bp, Homo sapien
tgtccccacttcctcgtctggatga

SEQ ID NO: 4269482 - DNA, 25 bp, Homo sapien
gaagtgtctggatctattaagctgc

SEQ ID NO: 4269483 - DNA, 25 bp, Homo sapien
aacaggcacgcaaaaccatgactgg

SEQ ID NO: 4269484 - DNA, 25 bp, Homo sapien
tagtctggcctagtaattttatatt

SEQ ID NO: 4269485 - DNA, 25 bp, Homo sapien
catgagctacctagtctggcctagt

SEQ ID NO: 4269486 - DNA, 25 bp, Homo sapien
acaacaggcacgcaaaaccatgact

SEQ ID NO: 4269487 - DNA, 25 bp, Homo sapien
acagatagcaagtttaattgacctt

SEQ ID NO: 4269488 - DNA, 25 bp, Homo sapien
taatgaacaagttacagatagcaag

SEQ ID NO: 4269489 - DNA, 25 bp, Homo sapien
tagcaagtttaattgaccttgagaa

SEQ ID NO: 4269490 - DNA, 25 bp, Homo sapien
aatgaacaagttacagatagcaagt

SEQ ID NO: 4269491 - DNA, 25 bp, Homo sapien
tcttgtataattttcagcatactgt

SEQ ID NO: 4269492 - DNA, 25 bp, Homo sapien
tataattttcagcatactgtttgtc

SEQ ID NO: 4269493 - DNA, 25 bp, Homo sapien
ttgtataattttcagcatactgttt

SEQ ID NO: 4269494 - DNA, 25 bp, Homo sapien
gtataattttcagcatactgtttgt

SEQ ID NO: 4269495 - DNA, 25 bp, Homo sapien
agatgcttagcaagttgactttttt

SEQ ID NO: 4269496 - DNA, 25 bp, Homo sapien
tgcttagcaagttgactttttttgg

SEQ ID NO: 4269497 - DNA, 25 bp, Homo sapien
aagatgcttagcaagttgacttttt

SEQ ID NO: 4269498 - DNA, 25 bp, Homo sapien
gatgcttagcaagttgacttttttt

SEQ ID NO: 4269499 - DNA, 25 bp, Homo sapien
tttcaaagcaggtaatgacagcgat

SEQ ID NO: 4269500 - DNA, 25 bp, Homo sapien
gcagagctgaatccaacccttagtt

SEQ ID NO: 4269501 - DNA, 25 bp, Homo sapien
tagtagcctgttatctcaacttgcc

SEQ ID NO: 4269502 - DNA, 25 bp, Homo sapien
taggccttaaggttgtttcagacag

SEQ ID NO: 4269503 - DNA, 25 bp, Homo sapien
tagctgttagtcacaagcctgggac

SEQ ID NO: 4269504 - DNA, 25 bp, Homo sapien
gcctgggacaacataaccaaccacc

SEQ ID NO: 4269505 - DNA, 25 bp, Homo sapien
taacatattagctgttagtcacaag

SEQ ID NO: 4269506 - DNA, 25 bp, Homo sapien
taagacaataaatcaagttcccact

SEQ ID NO: 4269507 - DNA, 25 bp, Homo sapien
caacacttcccctacgattggagcg

SEQ ID NO: 4269508 - DNA, 25 bp, Homo sapien
gggatactgatatcatccacctcag

SEQ ID NO: 4269509 - DNA, 25 bp, Homo sapien
gctggacaaatctgggatactgata

SEQ ID NO: 4269510 - DNA, 25 bp, Homo sapien
gactgaaataatcagcggcagatac

SEQ ID NO: 4269511 - DNA, 25 bp, Homo sapien
tatttatcaccctgaacagaggcat

SEQ ID NO: 4269512 - DNA, 25 bp, Homo sapien
ttaactagagtcctatgctacagag

SEQ ID NO: 4269513 - DNA, 25 bp, Homo sapien
ggctttgaatacaacaggtactcca

SEQ ID NO: 4269514 - DNA, 25 bp, Homo sapien
agttctccctcaccttaggccttgg

SEQ ID NO: 4269515 - DNA, 25 bp, Homo sapien
catgagccaccctgactggattaca

SEQ ID NO: 4269516 - DNA, 25 bp, Homo sapien
tacaggtcttaacaggtggataaac

SEQ ID NO: 4269517 - DNA, 25 bp, Homo sapien
taatgaaagcttgcacagcccacag

SEQ ID NO: 4269518 - DNA, 25 bp, Homo sapien
tggtgaactgcacacacatgtatgt

SEQ ID NO: 4269519 - DNA, 25 bp, Homo sapien
tggcacgatcagaagacacaatgct

SEQ ID NO: 4269520 - DNA, 25 bp, Homo sapien
ttcgtccacgactggcacgatcaga

SEQ ID NO: 4269521 - DNA, 25 bp, Homo sapien
gaagacacaatgcttgcagtgtcat

SEQ ID NO: 4269522 - DNA, 25 bp, Homo sapien
tgcttgcagtgtcatcgttggtaaa

SEQ ID NO: 4269523 - DNA, 25 bp, Homo sapien
tacctcattataagtacattaagga

SEQ ID NO: 4269524 - DNA, 25 bp, Homo sapien
gcaattttgctatggtgttacctca

SEQ ID NO: 4269525 - DNA, 25 bp, Homo sapien
ctatataagcagcataattggtata

SEQ ID NO: 4269526 - DNA, 25 bp, Homo sapien
tagtgggcaccttatatattaataa

SEQ ID NO: 4269527 - DNA, 25 bp, Homo sapien
cttttaaaatgtatacttacgcact

SEQ ID NO: 4269528 - DNA, 25 bp, Homo sapien
tcgggctgaacttattcttgatgaa

SEQ ID NO: 4269529 - DNA, 25 bp, Homo sapien
gactgcttcgggctgaacttattct

SEQ ID NO: 4269530 - DNA, 25 bp, Homo sapien
ccctggactgcttcgggctgaactt

SEQ ID NO: 4269531 - DNA, 25 bp, Homo sapien
tgcttcgggctgaacttattcttga

SEQ ID NO: 4269532 - DNA, 25 bp, Homo sapien
accctcaagatccaccagcccttgg

SEQ ID NO: 4269533 - DNA, 25 bp, Homo sapien
ctcatccccaccctcaagatccacc

SEQ ID NO: 4269534 - DNA, 25 bp, Homo sapien
ccaccctcaagatccaccagccctt

SEQ ID NO: 4269535 - DNA, 25 bp, Homo sapien
ccccaccctcaagatccaccagccc

SEQ ID NO: 4269536 - DNA, 25 bp, Homo sapien
accataagggttatataatccacca

SEQ ID NO: 4269537 - DNA, 25 bp, Homo sapien
ccataagggttatataatccaccat

SEQ ID NO: 4269538 - DNA, 25 bp, Homo sapien
actggcacttctcagcagaccagaa

SEQ ID NO: 4269539 - DNA, 25 bp, Homo sapien
agaccagaatttgcagtaggagagg

SEQ ID NO: 4269540 - DNA, 25 bp, Homo sapien
cacttctcagcagaccagaatttgc

SEQ ID NO: 4269541 - DNA, 25 bp, Homo sapien
gaccagaatttgcagtaggagaggc

SEQ ID NO: 4269542 - DNA, 25 bp, Homo sapien
ctcttatatgttgccagagggtcac

SEQ ID NO: 4269543 - DNA, 25 bp, Homo sapien
tcactcttatatgttgccagagggt

SEQ ID NO: 4269544 - DNA, 25 bp, Homo sapien
tatatgttgccagagggtcactgta

SEQ ID NO: 4269545 - DNA, 25 bp, Homo sapien
tatgttgccagagggtcactgtaca

SEQ ID NO: 4269546 - DNA, 25 bp, Homo sapien
cactctgaagtatatggatgcttac

SEQ ID NO: 4269547 - DNA, 25 bp, Homo sapien
taagagtacttaagttgcgtgtgca

SEQ ID NO: 4269548 - DNA, 25 bp, Homo sapien
gtactagtcaatgaatccatgcact

SEQ ID NO: 4269549 - DNA, 25 bp, Homo sapien
caagccatggacaaagtgccttagt

SEQ ID NO: 4269550 - DNA, 25 bp, Homo sapien
ggtttgctatgtctaagactgctat

SEQ ID NO: 4269551 - DNA, 25 bp, Homo sapien
ttctctggtcaaagtagaggccact

SEQ ID NO: 4269552 - DNA, 25 bp, Homo sapien
tagtttctctggtcaaagtagaggc

SEQ ID NO: 4269553 - DNA, 25 bp, Homo sapien
tgtctaagactgctatagtttctct

SEQ ID NO: 4269554 - DNA, 25 bp, Homo sapien
ccatgagagtgactgtaagaatgat

SEQ ID NO: 4269555 - DNA, 25 bp, Homo sapien
ttcattccatgagagtgactgtaag

SEQ ID NO: 4269556 - DNA, 25 bp, Homo sapien
agtaggtctttatgagaatcagaag

SEQ ID NO: 4269557 - DNA, 25 bp, Homo sapien
tgagaatcagaagacctcttcttca

SEQ ID NO: 4269558 - DNA, 25 bp, Homo sapien
ttccaagttaacttcaatgattgca

SEQ ID NO: 4269559 - DNA, 25 bp, Homo sapien
tccaagttaacttcaatgattgcat

SEQ ID NO: 4269560 - DNA, 25 bp, Homo sapien
ggcaacctattgacaaaatattaac

SEQ ID NO: 4269561 - DNA, 25 bp, Homo sapien
taatgacataccataaaaaactaac

SEQ ID NO: 4269562 - DNA, 25 bp, Homo sapien
cataactgatgtcttaggtgtcctc

SEQ ID NO: 4269563 - DNA, 25 bp, Homo sapien
ggtgtcctctaacactactggatgt

SEQ ID NO: 4269564 - DNA, 25 bp, Homo sapien
atgatctatccttgaacatatcata

SEQ ID NO: 4269565 - DNA, 25 bp, Homo sapien
tgatgatctatccttgaacatatca

SEQ ID NO: 4269566 - DNA, 25 bp, Homo sapien
gatgatctatccttgaacatatcat

SEQ ID NO: 4269567 - DNA, 25 bp, Homo sapien
gctactaatgttctgcactattaat

SEQ ID NO: 4269568 - DNA, 25 bp, Homo sapien
aactaatagacacagattgtttcaa

SEQ ID NO: 4269569 - DNA, 25 bp, Homo sapien
atgtataaagcaatgaccaagcagc

SEQ ID NO: 4269570 - DNA, 25 bp, Homo sapien
attttggatctttaccttactgtct

SEQ ID NO: 4269571 - DNA, 25 bp, Homo sapien
aattagggtcttggcataatacaag

SEQ ID NO: 4269572 - DNA, 25 bp, Homo sapien
tcaataactagtatgccagagcaca

SEQ ID NO: 4269573 - DNA, 25 bp, Homo sapien
tatacatacagcattatcaatgtgc

SEQ ID NO: 4269574 - DNA, 25 bp, Homo sapien
cagagcacactcagtttattagagt

SEQ ID NO: 4269575 - DNA, 25 bp, Homo sapien
cacttcgaatggacaatgcatcctc

SEQ ID NO: 4269576 - DNA, 25 bp, Homo sapien
tgccaacacttcgaatggacaatgc

SEQ ID NO: 4269577 - DNA, 25 bp, Homo sapien
gaatggacaatgcatcctcaactcc

SEQ ID NO: 4269578 - DNA, 25 bp, Homo sapien
aacacttcgaatggacaatgcatcc

SEQ ID NO: 4269579 - DNA, 25 bp, Homo sapien
gtattagaggcaagtgtataggtta

SEQ ID NO: 4269580 - DNA, 25 bp, Homo sapien
ctaatgaggaaaagtattagaggca

SEQ ID NO: 4269581 - DNA, 25 bp, Homo sapien
aagtattagaggcaagtgtataggt

SEQ ID NO: 4269582 - DNA, 25 bp, Homo sapien
gaggaaaagtattagaggcaagtgt

SEQ ID NO: 4269583 - DNA, 25 bp, Homo sapien
gactggaccggtgggaatacctggc

SEQ ID NO: 4269584 - DNA, 25 bp, Homo sapien
atggtgactggaccggtgggaatac

SEQ ID NO: 4269585 - DNA, 25 bp, Homo sapien
cagataaggacgatggtgactggac

SEQ ID NO: 4269586 - DNA, 25 bp, Homo sapien
agataaggacgatggtgactggacc

SEQ ID NO: 4269587 - DNA, 25 bp, Homo sapien
tatcaggcgtatgtatgtcagacca

SEQ ID NO: 4269588 - DNA, 25 bp, Homo sapien
gaatggtctgtataagaccaagaga

SEQ ID NO: 4269589 - DNA, 25 bp, Homo sapien
gatcatcagtttatgcaggtaggaa

SEQ ID NO: 4269590 - DNA, 25 bp, Homo sapien
ccaagagagttcaatataccaagat

SEQ ID NO: 4269591 - DNA, 25 bp, Homo sapien
cacccctttcaatgaaaatctagcg

SEQ ID NO: 4269592 - DNA, 25 bp, Homo sapien
ggattagtcactacctgaattttaa

SEQ ID NO: 4269593 - DNA, 25 bp, Homo sapien
aagacttggattagtcactacctga

SEQ ID NO: 4269594 - DNA, 25 bp, Homo sapien
tactcactgcctaaactatacaaat

SEQ ID NO: 4269595 - DNA, 25 bp, Homo sapien
tttagcagcaatcagacagtggttc

SEQ ID NO: 4269596 - DNA, 25 bp, Homo sapien
tggcaggactccaagtatacctctg

SEQ ID NO: 4269597 - DNA, 25 bp, Homo sapien
tttaggttcacacaggccaaacact

SEQ ID NO: 4269598 - DNA, 25 bp, Homo sapien
tatacctctggtccactatagacag

SEQ ID NO: 4269599 - DNA, 25 bp, Homo sapien
tgtccccacttccgatcaaaggaat

SEQ ID NO: 4269600 - DNA, 25 bp, Homo sapien
ccacttccgatcaaaggaatgaaga

SEQ ID NO: 4269601 - DNA, 25 bp, Homo sapien
cccacttccgatcaaaggaatgaag

SEQ ID NO: 4269602 - DNA, 25 bp, Homo sapien
tccccacttccgatcaaaggaatga

SEQ ID NO: 4269603 - DNA, 25 bp, Homo sapien
tcataaaccaaatagtttctaacat

SEQ ID NO: 4269604 - DNA, 25 bp, Homo sapien
cataaaccaaatagtttctaacata

SEQ ID NO: 4269605 - DNA, 25 bp, Homo sapien
ttcataaaccaaatagtttctaaca

SEQ ID NO: 4269606 - DNA, 25 bp, Homo sapien
tgttgtcgttccagttctctcatgc

SEQ ID NO: 4269607 - DNA, 25 bp, Homo sapien
atatctcttgcttctgcccgggcag

SEQ ID NO: 4269608 - DNA, 25 bp, Homo sapien
tctgcccgggcagcccgttttgctg

SEQ ID NO: 4269609 - DNA, 25 bp, Homo sapien
gttctctcatgcgtatatctcttgc

SEQ ID NO: 4269610 - DNA, 25 bp, Homo sapien
tcataaagtaaggctctatacccat

SEQ ID NO: 4269611 - DNA, 25 bp, Homo sapien
tttcataaagtaaggctctataccc

SEQ ID NO: 4269612 - DNA, 25 bp, Homo sapien
ttcataaagtaaggctctataccca

SEQ ID NO: 4269613 - DNA, 25 bp, Homo sapien
ctttcataaagtaaggctctatacc

SEQ ID NO: 4269614 - DNA, 25 bp, Homo sapien
catgagcatcacttcgggagaaaac

SEQ ID NO: 4269615 - DNA, 25 bp, Homo sapien
tcacgacgtggtgctttcaacacaa

SEQ ID NO: 4269616 - DNA, 25 bp, Homo sapien
tcataacatgtagatagggccaaca

SEQ ID NO: 4269617 - DNA, 25 bp, Homo sapien
caacattcacagaggataagggcat

SEQ ID NO: 4269618 - DNA, 25 bp, Homo sapien
acctaaatacgttttcttgctgtct

SEQ ID NO: 4269619 - DNA, 25 bp, Homo sapien
tcgtcaggacaacatggtcacagga

SEQ ID NO: 4269620 - DNA, 25 bp, Homo sapien
atgaagatggtcttcgtcaggacaa

SEQ ID NO: 4269621 - DNA, 25 bp, Homo sapien
tgttgaattctccatctacaacggg

SEQ ID NO: 4269622 - DNA, 25 bp, Homo sapien
atgtagtcatcgactttattcaaga

SEQ ID NO: 4269623 - DNA, 25 bp, Homo sapien
tcgactttattcaagaagtcctcct

SEQ ID NO: 4269624 - DNA, 25 bp, Homo sapien
tttatcatctggcattaacacttga

SEQ ID NO: 4269625 - DNA, 25 bp, Homo sapien
tcatctggcattaacacttgatgta

SEQ ID NO: 4269626 - DNA, 25 bp, Homo sapien
cagccagtgctgtcaatcgaatgtc

SEQ ID NO: 4269627 - DNA, 25 bp, Homo sapien
tgatgttagggtaccagatcctggt

SEQ ID NO: 4269628 - DNA, 25 bp, Homo sapien
ccacattgtatgcatcaggaagtcc

SEQ ID NO: 4269629 - DNA, 25 bp, Homo sapien
gggttacagtcagcagaaagcaatg

SEQ ID NO: 4269630 - DNA, 25 bp, Homo sapien
tgagagaggactttatacaacccaa

SEQ ID NO: 4269631 - DNA, 25 bp, Homo sapien
tcaaatgggtgaatgttagccttgc

SEQ ID NO: 4269632 - DNA, 25 bp, Homo sapien
tctgagcataaacaccaacatgtag

SEQ ID NO: 4269633 - DNA, 25 bp, Homo sapien
tactcggagaccttttgacagcaaa

SEQ ID NO: 4269634 - DNA, 25 bp, Homo sapien
cgattcaataggtgacgccccttcc

SEQ ID NO: 4269635 - DNA, 25 bp, Homo sapien
taccacgtctgaagcatattaactg

SEQ ID NO: 4269636 - DNA, 25 bp, Homo sapien
taagtaagaaatcccagctggcagt

SEQ ID NO: 4269637 - DNA, 25 bp, Homo sapien
tccaatatacggcaggaaatgttgc

SEQ ID NO: 4269638 - DNA, 25 bp, Homo sapien
tttacctaccacagtcactcacaaa

SEQ ID NO: 4269639 - DNA, 25 bp, Homo sapien
tgtgtgtatgcccaaattacaattc

SEQ ID NO: 4269640 - DNA, 25 bp, Homo sapien
caaaaacttcgctagtgccaatgca

SEQ ID NO: 4269641 - DNA, 25 bp, Homo sapien
cagtcactcacaaatcagagcatgc

SEQ ID NO: 4269642 - DNA, 25 bp, Homo sapien
catcttctgcagaaaatcggtcttt

SEQ ID NO: 4269643 - DNA, 25 bp, Homo sapien
gaaaatcggtctttcacaggtgttc

SEQ ID NO: 4269644 - DNA, 25 bp, Homo sapien
tcatcttctgcagaaaatcggtctt

SEQ ID NO: 4269645 - DNA, 25 bp, Homo sapien
aaaatcggtctttcacaggtgttct

SEQ ID NO: 4269646 - DNA, 25 bp, Homo sapien
gaaagtgatttaactgtgttttcag

SEQ ID NO: 4269647 - DNA, 25 bp, Homo sapien
aagtgatttaactgtgttttcagcc

SEQ ID NO: 4269648 - DNA, 25 bp, Homo sapien
aaagtgatttaactgtgttttcagc

SEQ ID NO: 4269649 - DNA, 25 bp, Homo sapien
ggaacgcagtgcctattcatagatg

SEQ ID NO: 4269650 - DNA, 25 bp, Homo sapien
gacatgctgcacaagtttatggccc

SEQ ID NO: 4269651 - DNA, 25 bp, Homo sapien
tcatgtgctgcataaggatgttcca

SEQ ID NO: 4269652 - DNA, 25 bp, Homo sapien
tggagctgtcctatacacgtgtgcc

SEQ ID NO: 4269653 - DNA, 25 bp, Homo sapien
taggtcacttaactgggatactcac

SEQ ID NO: 4269654 - DNA, 25 bp, Homo sapien
tctggcaagacaagaacaatgccct

SEQ ID NO: 4269655 - DNA, 25 bp, Homo sapien
catgaaccttggtctaagggtggaa

SEQ ID NO: 4269656 - DNA, 25 bp, Homo sapien
cctctgagaaagcaccctggtatgt

SEQ ID NO: 4269657 - DNA, 25 bp, Homo sapien
taaaacatttgaccgattcttggca

SEQ ID NO: 4269658 - DNA, 25 bp, Homo sapien
cgaaggtctctgaattggactgcta

SEQ ID NO: 4269659 - DNA, 25 bp, Homo sapien
gaagataacatcaatgctggcacaa

SEQ ID NO: 4269660 - DNA, 25 bp, Homo sapien
tcttaacgacaaatacgaaggtctc

SEQ ID NO: 4269661 - DNA, 25 bp, Homo sapien
tcctgccttgagaaagtaatccatc

SEQ ID NO: 4269662 - DNA, 25 bp, Homo sapien
aaatgcttctatatgacagtaccag

SEQ ID NO: 4269663 - DNA, 25 bp, Homo sapien
tgcagggcaagaatttaaactatac

SEQ ID NO: 4269664 - DNA, 25 bp, Homo sapien
tatagtagccgacttatgcagggca

SEQ ID NO: 4269665 - DNA, 25 bp, Homo sapien
cattacagcagtgtttgtagaaggc

SEQ ID NO: 4269666 - DNA, 25 bp, Homo sapien
ccactaggctaaaacaaatgcatac

SEQ ID NO: 4269667 - DNA, 25 bp, Homo sapien
tgaacccatgaaataagcattctcc

SEQ ID NO: 4269668 - DNA, 25 bp, Homo sapien
tatggttcatctacactagcaaggc

SEQ ID NO: 4269669 - DNA, 25 bp, Homo sapien
caaaaagttcacaaggcaagttttg

SEQ ID NO: 4269670 - DNA, 25 bp, Homo sapien
agttttgttcaattccttccttctg

SEQ ID NO: 4269671 - DNA, 25 bp, Homo sapien
ctgtagtcaaagctactgggtaggc

SEQ ID NO: 4269672 - DNA, 25 bp, Homo sapien
tttgaagtccagcataatttattat

SEQ ID NO: 4269673 - DNA, 25 bp, Homo sapien
gactgtcagttacggtgatttccaa

SEQ ID NO: 4269674 - DNA, 25 bp, Homo sapien
gaccaacaggatagacttgccatta

SEQ ID NO: 4269675 - DNA, 25 bp, Homo sapien
caaaaatgggtgatgctttccactc

SEQ ID NO: 4269676 - DNA, 25 bp, Homo sapien
aaagcaacattagggaacactctga

SEQ ID NO: 4269677 - DNA, 25 bp, Homo sapien
gacatttacatctagaccccttcat

SEQ ID NO: 4269678 - DNA, 25 bp, Homo sapien
acatctagaccccttcatttatctt

SEQ ID NO: 4269679 - DNA, 25 bp, Homo sapien
cactgacatttacatctagacccct

SEQ ID NO: 4269680 - DNA, 25 bp, Homo sapien
tccactgacatttacatctagaccc

SEQ ID NO: 4269681 - DNA, 25 bp, Homo sapien
cgccctacaccgtcctgacaccgtt

SEQ ID NO: 4269682 - DNA, 25 bp, Homo sapien
cgtcctgggacagaaccgtagtgtg

SEQ ID NO: 4269683 - DNA, 25 bp, Homo sapien
tcctgacaccgttccctgggggtgc

SEQ ID NO: 4269684 - DNA, 25 bp, Homo sapien
ggtgctcgtcctgggacagaaccgt

SEQ ID NO: 4269685 - DNA, 25 bp, Homo sapien
ttccccagcgcggtggaagggtgag

SEQ ID NO: 4269686 - DNA, 25 bp, Homo sapien
agacgggatgtctgagaacgccgca

SEQ ID NO: 4269687 - DNA, 25 bp, Homo sapien
gaagggtgagcgttagaaatcagac

SEQ ID NO: 4269688 - DNA, 25 bp, Homo sapien
cccctagccgaggtcggaggcggcg

SEQ ID NO: 4269689 - DNA, 25 bp, Homo sapien
gttagggcgcgcgctgcgactgcgt

SEQ ID NO: 4269690 - DNA, 25 bp, Homo sapien
tagggcgcgcgctgcgactgcgtcg

SEQ ID NO: 4269691 - DNA, 25 bp, Homo sapien
gtgttagggcgcgcgctgcgactgc

SEQ ID NO: 4269692 - DNA, 25 bp, Homo sapien
ctgtgttagggcgcgcgctgcgact

SEQ ID NO: 4269693 - DNA, 25 bp, Homo sapien
gccgaagagctgctcgcccgcccgg

SEQ ID NO: 4269694 - DNA, 25 bp, Homo sapien
agggccgaagagctgctcgcccgcc

SEQ ID NO: 4269695 - DNA, 25 bp, Homo sapien
ccgctggggctatgggcgaggggcg

SEQ ID NO: 4269696 - DNA, 25 bp, Homo sapien
gctggggctatgggcgaggggcgca

SEQ ID NO: 4269697 - DNA, 25 bp, Homo sapien
ggtcaggccgatgtgccctctgcgc

SEQ ID NO: 4269698 - DNA, 25 bp, Homo sapien
gcactggcagccggctagtcggtca

SEQ ID NO: 4269699 - DNA, 25 bp, Homo sapien
ctgagacagcgggaaccggccccgg

SEQ ID NO: 4269700 - DNA, 25 bp, Homo sapien
tctgcgccgcggctgagacagcggg

SEQ ID NO: 4269701 - DNA, 25 bp, Homo sapien
gcgactgcccgggagtggcgcttgc

SEQ ID NO: 4269702 - DNA, 25 bp, Homo sapien
gcttgcaccccgctgggcaaagtac

SEQ ID NO: 4269703 - DNA, 25 bp, Homo sapien
ctgtcacacggcgagctgagccctg

SEQ ID NO: 4269704 - DNA, 25 bp, Homo sapien
ccggaagcagttgtggccgcgactg

SEQ ID NO: 4269705 - DNA, 25 bp, Homo sapien
tgggccacagagtaagactttgctt

SEQ ID NO: 4269706 - DNA, 25 bp, Homo sapien
ccacagagtaagactttgcttcaaa

SEQ ID NO: 4269707 - DNA, 25 bp, Homo sapien
ggccacagagtaagactttgcttca

SEQ ID NO: 4269708 - DNA, 25 bp, Homo sapien
aaaagaattcatttttggccaggtg

SEQ ID NO: 4269709 - DNA, 25 bp, Homo sapien
tctgagtagtcctgcaagcatgttt

SEQ ID NO: 4269710 - DNA, 25 bp, Homo sapien
ttctgagtagtcctgcaagcatgtt

SEQ ID NO: 4269711 - DNA, 25 bp, Homo sapien
tgagtagtcctgcaagcatgtttct

SEQ ID NO: 4269712 - DNA, 25 bp, Homo sapien
attctgagtagtcctgcaagcatgt

SEQ ID NO: 4269713 - DNA, 25 bp, Homo sapien
gcaattctctttcatcagcctcctg

SEQ ID NO: 4269714 - DNA, 25 bp, Homo sapien
tcaggctagagtgcaggagcgtgat

SEQ ID NO: 4269715 - DNA, 25 bp, Homo sapien
aggcgtgcacccacacccagctaat

SEQ ID NO: 4269716 - DNA, 25 bp, Homo sapien
cccctgacctcaagggatctgctca

SEQ ID NO: 4269717 - DNA, 25 bp, Homo sapien
tggggacagaggtctgactctggac

SEQ ID NO: 4269718 - DNA, 25 bp, Homo sapien
gaagctgccactggaactgtctcat

SEQ ID NO: 4269719 - DNA, 25 bp, Homo sapien
acttgaagctgccactggaactgtc

SEQ ID NO: 4269720 - DNA, 25 bp, Homo sapien
agaacttgaagctgccactggaact

SEQ ID NO: 4269721 - DNA, 25 bp, Homo sapien
gatgcaatcataggtgcaaccttga

SEQ ID NO: 4269722 - DNA, 25 bp, Homo sapien
aacaatccaattatagtcttaaaat

SEQ ID NO: 4269723 - DNA, 25 bp, Homo sapien
aagtgtgcaccatcacggccatcta

SEQ ID NO: 4269724 - DNA, 25 bp, Homo sapien
caatcataggtgcaaccttgacctc

SEQ ID NO: 4269725 - DNA, 25 bp, Homo sapien
cagtcctttgatcaggacttccctc

SEQ ID NO: 4269726 - DNA, 25 bp, Homo sapien
tcccttcttgtctggagggaagtcc

SEQ ID NO: 4269727 - DNA, 25 bp, Homo sapien
ggaagtcctcagatttcatagccat

SEQ ID NO: 4269728 - DNA, 25 bp, Homo sapien
tgatcaggacttccctcagtccctt

SEQ ID NO: 4269729 - DNA, 25 bp, Homo sapien
taacatctccaaggcctgataaagg

SEQ ID NO: 4269730 - DNA, 25 bp, Homo sapien
gaacactatcaattagggcccgcgt

SEQ ID NO: 4269731 - DNA, 25 bp, Homo sapien
ttcacaggcagccaaagttcagggt

SEQ ID NO: 4269732 - DNA, 25 bp, Homo sapien
caaaggtacagcatgcaaaagtggg

SEQ ID NO: 4269733 - DNA, 25 bp, Homo sapien
aaatcaggcaggaccgaaccttgcg

SEQ ID NO: 4269734 - DNA, 25 bp, Homo sapien
ccagtgcagcgagttcggaagcgac

SEQ ID NO: 4269735 - DNA, 25 bp, Homo sapien
gtctccgcacgcaacgaaatcaggc

SEQ ID NO: 4269736 - DNA, 25 bp, Homo sapien
cattgtgcttgtcccatccggtgct

SEQ ID NO: 4269737 - DNA, 25 bp, Homo sapien
ccgacaccctcaggacgagtgtccg

SEQ ID NO: 4269738 - DNA, 25 bp, Homo sapien
acgagtgtccggacttgcccacagc

SEQ ID NO: 4269739 - DNA, 25 bp, Homo sapien
cagccagtggcacccggaagaaaga

SEQ ID NO: 4269740 - DNA, 25 bp, Homo sapien
agtggcacccggaagaaagagacgc

SEQ ID NO: 4269741 - DNA, 25 bp, Homo sapien
gtgtaaagaagtcgccgtagccgtc

SEQ ID NO: 4269742 - DNA, 25 bp, Homo sapien
tccctggtgtaaagaagtcgccgta

SEQ ID NO: 4269743 - DNA, 25 bp, Homo sapien
cctggtgtaaagaagtcgccgtagc

SEQ ID NO: 4269744 - DNA, 25 bp, Homo sapien
tgtccctggtgtaaagaagtcgccg

SEQ ID NO: 4269745 - DNA, 25 bp, Homo sapien
tcaggtttcgttgacactcaggacc

SEQ ID NO: 4269746 - DNA, 25 bp, Homo sapien
cgttgacactcaggaccgtacgtac

SEQ ID NO: 4269747 - DNA, 25 bp, Homo sapien
cttcaggtttcgttgacactcagga

SEQ ID NO: 4269748 - DNA, 25 bp, Homo sapien
ggtttcgttgacactcaggaccgta

SEQ ID NO: 4269749 - DNA, 25 bp, Homo sapien
gctcaggtacgatggccgccgctct

SEQ ID NO: 4269750 - DNA, 25 bp, Homo sapien
agcaaaagatcagcgaggagcagca

SEQ ID NO: 4269751 - DNA, 25 bp, Homo sapien
tgaagcaaaagatcagcgaggagca

SEQ ID NO: 4269752 - DNA, 25 bp, Homo sapien
tcctgctcaggtacgatggccgccg

SEQ ID NO: 4269753 - DNA, 25 bp, Homo sapien
taaggccagagtccgaacttgcatg

SEQ ID NO: 4269754 - DNA, 25 bp, Homo sapien
cgtgacattccatctccgttaagag

SEQ ID NO: 4269755 - DNA, 25 bp, Homo sapien
aaacttcatccagtcaatgagtgga

SEQ ID NO: 4269756 - DNA, 25 bp, Homo sapien
ggtcgtccgtaactcctgacctgga

SEQ ID NO: 4269757 - DNA, 25 bp, Homo sapien
tcgacggaagtctcctaattccaaa

SEQ ID NO: 4269758 - DNA, 25 bp, Homo sapien
cctctcttttgccagtcgtgagatt

SEQ ID NO: 4269759 - DNA, 25 bp, Homo sapien
aggatcccgcacaattgaccctcga

SEQ ID NO: 4269760 - DNA, 25 bp, Homo sapien
gagattttgtatggaatggccagga

SEQ ID NO: 4269761 - DNA, 25 bp, Homo sapien
tgtatatccacaaggcttactgtag

SEQ ID NO: 4269762 - DNA, 25 bp, Homo sapien
ttatctttagactcagtgcaatccc

SEQ ID NO: 4269763 - DNA, 25 bp, Homo sapien
gtgcaatcccagtcaaaatccttat

SEQ ID NO: 4269764 - DNA, 25 bp, Homo sapien
tctgtcctatagaacaatagcattt

SEQ ID NO: 4269765 - DNA, 25 bp, Homo sapien
ggtacgaacatcttccagagaatcc

SEQ ID NO: 4269766 - DNA, 25 bp, Homo sapien
gacttgacctggacagttctactgc

SEQ ID NO: 4269767 - DNA, 25 bp, Homo sapien
gagaatccctgaatcgacttgacct

SEQ ID NO: 4269768 - DNA, 25 bp, Homo sapien
cctccgtggagtctttgtttcgaag

SEQ ID NO: 4269769 - DNA, 25 bp, Homo sapien
tacatttaaacctttgccttggatg

SEQ ID NO: 4269770 - DNA, 25 bp, Homo sapien
ctacatttaaacctttgccttggat

SEQ ID NO: 4269771 - DNA, 25 bp, Homo sapien
acatttaaacctttgccttggatga

SEQ ID NO: 4269772 - DNA, 25 bp, Homo sapien
ggacaattgtactactcccatagtt

SEQ ID NO: 4269773 - DNA, 25 bp, Homo sapien
aagggacaattgtactactcccata

SEQ ID NO: 4269774 - DNA, 25 bp, Homo sapien
atttaaattatactggaggatgtgt

SEQ ID NO: 4269775 - DNA, 25 bp, Homo sapien
gagctcctgcggattttggtattaa

SEQ ID NO: 4269776 - DNA, 25 bp, Homo sapien
aaaacaaaatagtgaaatggagcaa

SEQ ID NO: 4269777 - DNA, 25 bp, Homo sapien
gtctatgagtccaaacttgaagatg

SEQ ID NO: 4269778 - DNA, 25 bp, Homo sapien
tctatgagtccaaacttgaagatgg

SEQ ID NO: 4269779 - DNA, 25 bp, Homo sapien
agtctatgagtccaaacttgaagat

SEQ ID NO: 4269780 - DNA, 25 bp, Homo sapien
taataaagctagaacatgctgaggc

SEQ ID NO: 4269781 - DNA, 25 bp, Homo sapien
gaaaatgtgtttgacgacgtccaga

SEQ ID NO: 4269782 - DNA, 25 bp, Homo sapien
tatgataggtcatcttcaagaggag

SEQ ID NO: 4269783 - DNA, 25 bp, Homo sapien
tccttgatagtagcccagcatgtgg

SEQ ID NO: 4269784 - DNA, 25 bp, Homo sapien
tcgcagtggtatcttctgagtaaac

SEQ ID NO: 4269785 - DNA, 25 bp, Homo sapien
catgtggtgagtgaagaacaatgtc

SEQ ID NO: 4269786 - DNA, 25 bp, Homo sapien
caaaatcctgtaaagcctgagtcaa

SEQ ID NO: 4269787 - DNA, 25 bp, Homo sapien
cagtctgtgcttagttaacatgtgg

SEQ ID NO: 4269788 - DNA, 25 bp, Homo sapien
cacagataagttgcagactgccttt

SEQ ID NO: 4269789 - DNA, 25 bp, Homo sapien
tcagggcccctcatgtagccaaaag

SEQ ID NO: 4269790 - DNA, 25 bp, Homo sapien
tgtccacacttgctactctttgaga

SEQ ID NO: 4269791 - DNA, 25 bp, Homo sapien
gcagtctctagaccatggaatagaa

SEQ ID NO: 4269792 - DNA, 25 bp, Homo sapien
caaatctgtgattgttggcagtgtc

SEQ ID NO: 4269793 - DNA, 25 bp, Homo sapien
cactactgtaaattgtgaatagcca

SEQ ID NO: 4269794 - DNA, 25 bp, Homo sapien
tacattttgaggtgaaacttagtgg

SEQ ID NO: 4269795 - DNA, 25 bp, Homo sapien
aatcccaaatggcagtacctcattg

SEQ ID NO: 4269796 - DNA, 25 bp, Homo sapien
gttctattagtctgttggtgaccac

SEQ ID NO: 4269797 - DNA, 25 bp, Homo sapien
caggatttcctgagcctaaagccag

SEQ ID NO: 4269798 - DNA, 25 bp, Homo sapien
gatgctgtgtcaagctgaactctag

SEQ ID NO: 4269799 - DNA, 25 bp, Homo sapien
taaccttggctctaagtctgttgga

SEQ ID NO: 4269800 - DNA, 25 bp, Homo sapien
gttcatgaacgtgaaatatctttcc

SEQ ID NO: 4269801 - DNA, 25 bp, Homo sapien
ggattacgttgaatctacagactgc

SEQ ID NO: 4269802 - DNA, 25 bp, Homo sapien
ttcttttagttcatgaacgtgaaat

SEQ ID NO: 4269803 - DNA, 25 bp, Homo sapien
gattacgttgaatctacagactgct

SEQ ID NO: 4269804 - DNA, 25 bp, Homo sapien
cataccatctatgaacaatgataat

SEQ ID NO: 4269805 - DNA, 25 bp, Homo sapien
aatataagatcataccatctatgaa

SEQ ID NO: 4269806 - DNA, 25 bp, Homo sapien
gatcataccatctatgaacaatgat

SEQ ID NO: 4269807 - DNA, 25 bp, Homo sapien
aaatataagatcataccatctatga

SEQ ID NO: 4269808 - DNA, 25 bp, Homo sapien
tgccctcctttggtgaatgaatctg

SEQ ID NO: 4269809 - DNA, 25 bp, Homo sapien
tacaaaatacgatggatgccccact

SEQ ID NO: 4269810 - DNA, 25 bp, Homo sapien
gaatctgatcattcagatgtggaga

SEQ ID NO: 4269811 - DNA, 25 bp, Homo sapien
acagtgtagccatgaacacaagcag

SEQ ID NO: 4269812 - DNA, 25 bp, Homo sapien
ccatggataaccttggatctacctt

SEQ ID NO: 4269813 - DNA, 25 bp, Homo sapien
catagcagatcatgcgttcctgaag

SEQ ID NO: 4269814 - DNA, 25 bp, Homo sapien
cggttctcgtggcttcatggatgga

SEQ ID NO: 4269815 - DNA, 25 bp, Homo sapien
gattgaccccgtctgaatcagagag

SEQ ID NO: 4269816 - DNA, 25 bp, Homo sapien
tattccaagcagtcgtacggcatca

SEQ ID NO: 4269817 - DNA, 25 bp, Homo sapien
tgagatgtttgctcggaaatgttct

SEQ ID NO: 4269818 - DNA, 25 bp, Homo sapien
cctcaccgggaaagttgtgtcctgt

SEQ ID NO: 4269819 - DNA, 25 bp, Homo sapien
caaacttggtttgcagtgagatgtt

SEQ ID NO: 4269820 - DNA, 25 bp, Homo sapien
caagttagtcttaggcatggctccc

SEQ ID NO: 4269821 - DNA, 25 bp, Homo sapien
gaagatggcaaaagtctggtgagag

SEQ ID NO: 4269822 - DNA, 25 bp, Homo sapien
ggtggaagatggcaaaagtctggtg

SEQ ID NO: 4269823 - DNA, 25 bp, Homo sapien
agatggcaaaagtctggtgagaggg

SEQ ID NO: 4269824 - DNA, 25 bp, Homo sapien
gttggtggaagatggcaaaagtctg

SEQ ID NO: 4269825 - DNA, 25 bp, Homo sapien
gtcattcagggatcaccattcaggg

SEQ ID NO: 4269826 - DNA, 25 bp, Homo sapien
gaatttcacacatcgctgtcttagt

SEQ ID NO: 4269827 - DNA, 25 bp, Homo sapien
gacaaggattcaagtgcaagtggct

SEQ ID NO: 4269828 - DNA, 25 bp, Homo sapien
ccattcagggactggagaagtaaga

SEQ ID NO: 4269829 - DNA, 25 bp, Homo sapien
agtttgcccttcgtatcagttcctc

SEQ ID NO: 4269830 - DNA, 25 bp, Homo sapien
tttgcccttcgtatcagttcctcct

SEQ ID NO: 4269831 - DNA, 25 bp, Homo sapien
taagtttgcccttcgtatcagttcc

SEQ ID NO: 4269832 - DNA, 25 bp, Homo sapien
gtaagtttgcccttcgtatcagttc

SEQ ID NO: 4269833 - DNA, 25 bp, Homo sapien
gctggaaccatcaaagtgctgaacc

SEQ ID NO: 4269834 - DNA, 25 bp, Homo sapien
tgctgaaccttacggacaacaccta

SEQ ID NO: 4269835 - DNA, 25 bp, Homo sapien
aatgacttacatctttagccagggc

SEQ ID NO: 4269836 - DNA, 25 bp, Homo sapien
tgaacaggcggtacacctacctggg

SEQ ID NO: 4269837 - DNA, 25 bp, Homo sapien
ccttttagccccacagttgatttct

SEQ ID NO: 4269838 - DNA, 25 bp, Homo sapien
ctccttttagccccacagttgattt

SEQ ID NO: 4269839 - DNA, 25 bp, Homo sapien
ttcttattgagcctttggaaagttc

SEQ ID NO: 4269840 - DNA, 25 bp, Homo sapien
tccttttagccccacagttgatttc

SEQ ID NO: 4269841 - DNA, 25 bp, Homo sapien
gtaaacaggtcagcgtccttgtcct

SEQ ID NO: 4269842 - DNA, 25 bp, Homo sapien
tccttgtcctcaagggcgtcatcct

SEQ ID NO: 4269843 - DNA, 25 bp, Homo sapien
taatgacaaaatgtgggccagcgcc

SEQ ID NO: 4269844 - DNA, 25 bp, Homo sapien
ggcgtcatcctccagggaggacata

SEQ ID NO: 4269845 - DNA, 25 bp, Homo sapien
gactgtagttacgtacacaggctct

SEQ ID NO: 4269846 - DNA, 25 bp, Homo sapien
cgtggcattctggagcatgaggacc

SEQ ID NO: 4269847 - DNA, 25 bp, Homo sapien
tctggagcatgaggacccaaggctg

SEQ ID NO: 4269848 - DNA, 25 bp, Homo sapien
gagcatcatcctcgtggcattctgg

SEQ ID NO: 4269849 - DNA, 25 bp, Homo sapien
ctttgccaaagttcagatgtccccc

SEQ ID NO: 4269850 - DNA, 25 bp, Homo sapien
ttgccaaagttcagatgtccccctt

SEQ ID NO: 4269851 - DNA, 25 bp, Homo sapien
gccaaagttcagatgtccccctttc

SEQ ID NO: 4269852 - DNA, 25 bp, Homo sapien
gcttgggcggccttgtctggtgctg

SEQ ID NO: 4269853 - DNA, 25 bp, Homo sapien
tgctgccacacgtggggccaagggt

SEQ ID NO: 4269854 - DNA, 25 bp, Homo sapien
agggagcctgggatcggagttccag

SEQ ID NO: 4269855 - DNA, 25 bp, Homo sapien
cacgtggggccaagggtgacaaggt

SEQ ID NO: 4269856 - DNA, 25 bp, Homo sapien
agcctgggatcggagttccagggcc

SEQ ID NO: 4269857 - DNA, 25 bp, Homo sapien
tgttggttttccctgagtgcaaaag

SEQ ID NO: 4269858 - DNA, 25 bp, Homo sapien
aagaggtggtgagtctttctaaatc

SEQ ID NO: 4269859 - DNA, 25 bp, Homo sapien
tcttgttggttttccctgagtgcaa

SEQ ID NO: 4269860 - DNA, 25 bp, Homo sapien
ctcttgttggttttccctgagtgca

SEQ ID NO: 4269861 - DNA, 25 bp, Homo sapien
tgcagaagggtgcaatgtgaacaga

SEQ ID NO: 4269862 - DNA, 25 bp, Homo sapien
ctatttctccctccgtgacatcttt

SEQ ID NO: 4269863 - DNA, 25 bp, Homo sapien
ccttatctgttccatgggtgcagaa

SEQ ID NO: 4269864 - DNA, 25 bp, Homo sapien
gaacagaaacagcaagtctctggaa

SEQ ID NO: 4269865 - DNA, 25 bp, Homo sapien
tctgagaattccagaaagaatattg

SEQ ID NO: 4269866 - DNA, 25 bp, Homo sapien
aaagaatattgataattttcagaca

SEQ ID NO: 4269867 - DNA, 25 bp, Homo sapien
ccagaaagaatattgataattttca

SEQ ID NO: 4269868 - DNA, 25 bp, Homo sapien
agaatattgataattttcagacacc

SEQ ID NO: 4269869 - DNA, 25 bp, Homo sapien
cccctatacccagtgtgccagacat

SEQ ID NO: 4269870 - DNA, 25 bp, Homo sapien
gggccatgtggcaagagctcttgct

SEQ ID NO: 4269871 - DNA, 25 bp, Homo sapien
acacgtagtgatggacccccctata

SEQ ID NO: 4269872 - DNA, 25 bp, Homo sapien
ctcttgcttcaccaaacacgtagtg

SEQ ID NO: 4269873 - DNA, 25 bp, Homo sapien
cagagaaatgttcattgatacttag

SEQ ID NO: 4269874 - DNA, 25 bp, Homo sapien
cttcgttgtacttttgggcccatag

SEQ ID NO: 4269875 - DNA, 25 bp, Homo sapien
cttttggccgaatcctccattaaag

SEQ ID NO: 4269876 - DNA, 25 bp, Homo sapien
caaaatagccttttggccgaatcct

SEQ ID NO: 4269877 - DNA, 25 bp, Homo sapien
aacaggactcccatgaagatctgca

SEQ ID NO: 4269878 - DNA, 25 bp, Homo sapien
gagaacaggactcccatgaagatct

SEQ ID NO: 4269879 - DNA, 25 bp, Homo sapien
tggagaacaggactcccatgaagat

SEQ ID NO: 4269880 - DNA, 25 bp, Homo sapien
gtatggagaacaggactcccatgaa

SEQ ID NO: 4269881 - DNA, 25 bp, Homo sapien
atgactgtgtagacagttggtccat

SEQ ID NO: 4269882 - DNA, 25 bp, Homo sapien
tgatgactgtgtagacagttggtcc

SEQ ID NO: 4269883 - DNA, 25 bp, Homo sapien
aaagtcgaagcaaaggggtcacaga

SEQ ID NO: 4269884 - DNA, 25 bp, Homo sapien
gaaaagtcgaagcaaaggggtcaca

SEQ ID NO: 4269885 - DNA, 25 bp, Homo sapien
ctctgaatacccaccagactgagga

SEQ ID NO: 4269886 - DNA, 25 bp, Homo sapien
ggcctctgaatacccaccagactga

SEQ ID NO: 4269887 - DNA, 25 bp, Homo sapien
gcctctgaatacccaccagactgag

SEQ ID NO: 4269888 - DNA, 25 bp, Homo sapien
cctctgaatacccaccagactgagg

SEQ ID NO: 4269889 - DNA, 25 bp, Homo sapien
cgctttgtccccagtagtcactggc

SEQ ID NO: 4269890 - DNA, 25 bp, Homo sapien
tcgctttgtccccagtagtcactgg

SEQ ID NO: 4269891 - DNA, 25 bp, Homo sapien
ttcgctttgtccccagtagtcactg

SEQ ID NO: 4269892 - DNA, 25 bp, Homo sapien
gctttgtccccagtagtcactggcc

SEQ ID NO: 4269893 - DNA, 25 bp, Homo sapien
tcttgctgatctgtgaacccggata

SEQ ID NO: 4269894 - DNA, 25 bp, Homo sapien
gttatagcattagatttacctccag

SEQ ID NO: 4269895 - DNA, 25 bp, Homo sapien
tccccttagggtcattaactcagtc

SEQ ID NO: 4269896 - DNA, 25 bp, Homo sapien
cctggagtctatgtcctcttgctga

SEQ ID NO: 4269897 - DNA, 25 bp, Homo sapien
cagggtcagataaggtggtaagctt

SEQ ID NO: 4269898 - DNA, 25 bp, Homo sapien
gataaggtggtaagctttgaacaga

SEQ ID NO: 4269899 - DNA, 25 bp, Homo sapien
aggacagggtcagataaggtggtaa

SEQ ID NO: 4269900 - DNA, 25 bp, Homo sapien
tgaacagaagaaagcgtatcatagg

SEQ ID NO: 4269901 - DNA, 25 bp, Homo sapien
aaagctgacataggatcctgtagca

SEQ ID NO: 4269902 - DNA, 25 bp, Homo sapien
ccattctcctattcagaaagctgac

SEQ ID NO: 4269903 - DNA, 25 bp, Homo sapien
gcaggaatgatcagtgctggctgca

SEQ ID NO: 4269904 - DNA, 25 bp, Homo sapien
tcagaaagctgacataggatcctgt

SEQ ID NO: 4269905 - DNA, 25 bp, Homo sapien
tggtcttccccatccgcttatcaga

SEQ ID NO: 4269906 - DNA, 25 bp, Homo sapien
atcagatggaaactcggcattcctc

SEQ ID NO: 4269907 - DNA, 25 bp, Homo sapien
gaaactcggcattcctcagagaccc

SEQ ID NO: 4269908 - DNA, 25 bp, Homo sapien
tccccatccgcttatcagatggaaa

SEQ ID NO: 4269909 - DNA, 25 bp, Homo sapien
ttgttctgaaggatatattacaagc

SEQ ID NO: 4269910 - DNA, 25 bp, Homo sapien
cttgttctgaaggatatattacaag

SEQ ID NO: 4269911 - DNA, 25 bp, Homo sapien
gcccaatatcactgggaaaaaccca

SEQ ID NO: 4269912 - DNA, 25 bp, Homo sapien
caggcccaatatcactgggaaaaac

SEQ ID NO: 4269913 - DNA, 25 bp, Homo sapien
aactcaggcccaatatcactgggaa

SEQ ID NO: 4269914 - DNA, 25 bp, Homo sapien
ccaactcaggcccaatatcactggg

SEQ ID NO: 4269915 - DNA, 25 bp, Homo sapien
gataggacgagagattcccaggacc

SEQ ID NO: 4269916 - DNA, 25 bp, Homo sapien
ccatccttaatgtttggcgggtgga

SEQ ID NO: 4269917 - DNA, 25 bp, Homo sapien
tcctggtttgcttgaaactggctgc

SEQ ID NO: 4269918 - DNA, 25 bp, Homo sapien
ccccattgaagcatgagataggacg

SEQ ID NO: 4269919 - DNA, 25 bp, Homo sapien
tctgattagctccacaggcagtgct

SEQ ID NO: 4269920 - DNA, 25 bp, Homo sapien
tctgtctgggtcaagtccacggtca

SEQ ID NO: 4269921 - DNA, 25 bp, Homo sapien
gcattgttggaaagcaggaccctgg

SEQ ID NO: 4269922 - DNA, 25 bp, Homo sapien
gtggagacctgaaacaacctgtgtc

SEQ ID NO: 4269923 - DNA, 25 bp, Homo sapien
taggactcaggctagagaatccagc

SEQ ID NO: 4269924 - DNA, 25 bp, Homo sapien
taaactcctccgtgatccattgcct

SEQ ID NO: 4269925 - DNA, 25 bp, Homo sapien
gaagtgcacagcattcaatccaggg

SEQ ID NO: 4269926 - DNA, 25 bp, Homo sapien
ggtatgcagcttatccttccagttg

SEQ ID NO: 4269927 - DNA, 25 bp, Homo sapien
ttgcctttgccagcctctaagggct

SEQ ID NO: 4269928 - DNA, 25 bp, Homo sapien
ttttgaggtcgcttgattagcaacc

SEQ ID NO: 4269929 - DNA, 25 bp, Homo sapien
gcaatggctggtcaagtcttaggat

SEQ ID NO: 4269930 - DNA, 25 bp, Homo sapien
aaaccaaagtatcagggcctgtgtt

SEQ ID NO: 4269931 - DNA, 25 bp, Homo sapien
gtttcttcctcgagtttcatgttca

SEQ ID NO: 4269932 - DNA, 25 bp, Homo sapien
tctgtttcttcctcgagtttcatgt

SEQ ID NO: 4269933 - DNA, 25 bp, Homo sapien
cttcctcgagtttcatgttcagctt

SEQ ID NO: 4269934 - DNA, 25 bp, Homo sapien
attctgtttcttcctcgagtttcat

SEQ ID NO: 4269935 - DNA, 25 bp, Homo sapien
tttgggatgacccacttggtccttg

SEQ ID NO: 4269936 - DNA, 25 bp, Homo sapien
gagctgcagattgcctggaaaccaa

SEQ ID NO: 4269937 - DNA, 25 bp, Homo sapien
tctgtgggtctcaagtggtggttcc

SEQ ID NO: 4269938 - DNA, 25 bp, Homo sapien
aaatgctagggaaaacaagagaggc

SEQ ID NO: 4269939 - DNA, 25 bp, Homo sapien
tgagccagacagcttatgggaggca

SEQ ID NO: 4269940 - DNA, 25 bp, Homo sapien
tgagtgagccagacagcttatggga

SEQ ID NO: 4269941 - DNA, 25 bp, Homo sapien
aatgagtgagccagacagcttatgg

SEQ ID NO: 4269942 - DNA, 25 bp, Homo sapien
tccaggaataaaatgagtgagccag

SEQ ID NO: 4269943 - DNA, 25 bp, Homo sapien
cagagaagcaggcgataagtcaggg

SEQ ID NO: 4269944 - DNA, 25 bp, Homo sapien
ggtcatgtttacccggttgccgtca

SEQ ID NO: 4269945 - DNA, 25 bp, Homo sapien
aagcaggcgataagtcagggggtgg

SEQ ID NO: 4269946 - DNA, 25 bp, Homo sapien
gtcatgtttacccggttgccgtcag

SEQ ID NO: 4269947 - DNA, 25 bp, Homo sapien
atggtggcacacacccatcatccca

SEQ ID NO: 4269948 - DNA, 25 bp, Homo sapien
tcgcttgaacccggaaggcagaggt

SEQ ID NO: 4269949 - DNA, 25 bp, Homo sapien
tgtggtgagctgagattgcaccatt

SEQ ID NO: 4269950 - DNA, 25 bp, Homo sapien
tactcgggaggctgaggcaggagaa

SEQ ID NO: 4269951 - DNA, 25 bp, Homo sapien
gagcgacgttaatccacatgatcta

SEQ ID NO: 4269952 - DNA, 25 bp, Homo sapien
ccagtgcttgacctgtgttgaactc

SEQ ID NO: 4269953 - DNA, 25 bp, Homo sapien
tacctccacccacgccatgtgtaag

SEQ ID NO: 4269954 - DNA, 25 bp, Homo sapien
tctttaattttgagcgacgttaatc

SEQ ID NO: 4269955 - DNA, 25 bp, Homo sapien
tggactccggtagcctgggaaataa

SEQ ID NO: 4269956 - DNA, 25 bp, Homo sapien
gccttggtagaatacagccttgtca

SEQ ID NO: 4269957 - DNA, 25 bp, Homo sapien
tgtcatgagaagcatttggactccg

SEQ ID NO: 4269958 - DNA, 25 bp, Homo sapien
ccttgtttgggtgcctggtgaagtc

SEQ ID NO: 4269959 - DNA, 25 bp, Homo sapien
tgaaagcccttagacttgttagatg

SEQ ID NO: 4269960 - DNA, 25 bp, Homo sapien
gactgtttgccacttgaaaggttgg

SEQ ID NO: 4269961 - DNA, 25 bp, Homo sapien
ggaatgacaatgctttccaaagcct

SEQ ID NO: 4269962 - DNA, 25 bp, Homo sapien
tatagttacgactctgtctggctga

SEQ ID NO: 4269963 - DNA, 25 bp, Homo sapien
cattctgggcctggttaggtcataa

SEQ ID NO: 4269964 - DNA, 25 bp, Homo sapien
ttcctaatattggtacatgccatgc

SEQ ID NO: 4269965 - DNA, 25 bp, Homo sapien
gtcatatattctcaccgggcgcttg

SEQ ID NO: 4269966 - DNA, 25 bp, Homo sapien
catgccatgctaataagtgtgctaa

SEQ ID NO: 4269967 - DNA, 25 bp, Homo sapien
gggtcatctgaccaatttaagagtt

SEQ ID NO: 4269968 - DNA, 25 bp, Homo sapien
gatgtactgattagacatgctgaca

SEQ ID NO: 4269969 - DNA, 25 bp, Homo sapien
ggtatgatgtgcctaaaatagcaaa

SEQ ID NO: 4269970 - DNA, 25 bp, Homo sapien
gaaaatgtcagccttacgagtcagg

SEQ ID NO: 4269971 - DNA, 25 bp, Homo sapien
tgagaaaatagtcaggatgagggat

SEQ ID NO: 4269972 - DNA, 25 bp, Homo sapien
gctgttggtagaggggtgcctggga

SEQ ID NO: 4269973 - DNA, 25 bp, Homo sapien
ctgctctcacaggaggctgttggta

SEQ ID NO: 4269974 - DNA, 25 bp, Homo sapien
ttggtagaggggtgcctgggagcag

SEQ ID NO: 4269975 - DNA, 25 bp, Homo sapien
gctctcacaggaggctgttggtaga

SEQ ID NO: 4269976 - DNA, 25 bp, Homo sapien
tgagggcttgctaagagccaggcac

SEQ ID NO: 4269977 - DNA, 25 bp, Homo sapien
tgagaaggaattcgcttgccaagca

SEQ ID NO: 4269978 - DNA, 25 bp, Homo sapien
gaaccatggtagacctaggcagggt

SEQ ID NO: 4269979 - DNA, 25 bp, Homo sapien
ccagttgaggttagtccccagggag

SEQ ID NO: 4269980 - DNA, 25 bp, Homo sapien
gctattagatggaatcagaatcggg

SEQ ID NO: 4269981 - DNA, 25 bp, Homo sapien
ggaaatgtcatctcactgtcacaga

SEQ ID NO: 4269982 - DNA, 25 bp, Homo sapien
tgtcgtctccataagtctccctgtg

SEQ ID NO: 4269983 - DNA, 25 bp, Homo sapien
tgagttctgagagccatctgaggca

SEQ ID NO: 4269984 - DNA, 25 bp, Homo sapien
tccatcatgctctgcgcacttctgt

SEQ ID NO: 4269985 - DNA, 25 bp, Homo sapien
tctgtttaggaaacgttttcagctg

SEQ ID NO: 4269986 - DNA, 25 bp, Homo sapien
tctgcgcacttctgtttaggaaacg

SEQ ID NO: 4269987 - DNA, 25 bp, Homo sapien
tttaggaaacgttttcagctggcac

SEQ ID NO: 4269988 - DNA, 25 bp, Homo sapien
gagtatcctgttagagcttccttca

SEQ ID NO: 4269989 - DNA, 25 bp, Homo sapien
ccttgaggccattcacaactgagga

SEQ ID NO: 4269990 - DNA, 25 bp, Homo sapien
tcatggcaccggtacagtgaaggac

SEQ ID NO: 4269991 - DNA, 25 bp, Homo sapien
catcagtttgttggtgggaatcctc

SEQ ID NO: 4269992 - DNA, 25 bp, Homo sapien
aaggtcataccaattcaccctccca

SEQ ID NO: 4269993 - DNA, 25 bp, Homo sapien
gtttgccaatagtggatgttacctt

SEQ ID NO: 4269994 - DNA, 25 bp, Homo sapien
ccttttattactattgcagattgcc

SEQ ID NO: 4269995 - DNA, 25 bp, Homo sapien
tgcagattgccctgtagaaaggtca

SEQ ID NO: 4269996 - DNA, 25 bp, Homo sapien
tatttaatccacatcgccagataga

SEQ ID NO: 4269997 - DNA, 25 bp, Homo sapien
ccacatcgccagatagattcttaat

SEQ ID NO: 4269998 - DNA, 25 bp, Homo sapien
tgttgtttatttaatccacatcgcc

SEQ ID NO: 4269999 - DNA, 25 bp, Homo sapien
cgccagatagattcttaattctcct

SEQ ID NO: 4270000 - DNA, 25 bp, Homo sapien
gagagaatccacctggcccaatgtg

SEQ ID NO: 4270001 - DNA, 25 bp, Homo sapien
tagccacagacgcagaatgatcagc

SEQ ID NO: 4270002 - DNA, 25 bp, Homo sapien
tgaatgaggccacctgggtcacaac

SEQ ID NO: 4270003 - DNA, 25 bp, Homo sapien
tagcactgcgcttagcacacagaag

SEQ ID NO: 4270004 - DNA, 25 bp, Homo sapien
tcatgcctggcaccttggtagggac

SEQ ID NO: 4270005 - DNA, 25 bp, Homo sapien
gctggattcagtcaagtccttcttc

SEQ ID NO: 4270006 - DNA, 25 bp, Homo sapien
ctgactttttatgtggtggcttagg

SEQ ID NO: 4270007 - DNA, 25 bp, Homo sapien
cttccagcagatggtctgacttttt

SEQ ID NO: 4270008 - DNA, 25 bp, Homo sapien
gacagagccaccactagactatagg

SEQ ID NO: 4270009 - DNA, 25 bp, Homo sapien
taggcagagacgaagacactatggc

SEQ ID NO: 4270010 - DNA, 25 bp, Homo sapien
gaatcccattgatctcttaggcaga

SEQ ID NO: 4270011 - DNA, 25 bp, Homo sapien
ccttagtgtgagtcctgagtaccca

SEQ ID NO: 4270012 - DNA, 25 bp, Homo sapien
acctttgaacagctctcagtaactg

SEQ ID NO: 4270013 - DNA, 25 bp, Homo sapien
tggaaaacactacaccagatgcatt

SEQ ID NO: 4270014 - DNA, 25 bp, Homo sapien
tcagtaactggtattccccagcaca

SEQ ID NO: 4270015 - DNA, 25 bp, Homo sapien
gaaggaacaaacagcttacgtaata

SEQ ID NO: 4270016 - DNA, 25 bp, Homo sapien
atgggcttctttcgccgaaggtaca

SEQ ID NO: 4270017 - DNA, 25 bp, Homo sapien
gcttctttcgccgaaggtacaaaga

SEQ ID NO: 4270018 - DNA, 25 bp, Homo sapien
gggtcacaatggctgattcttcagc

SEQ ID NO: 4270019 - DNA, 25 bp, Homo sapien
cagatgggcttctttcgccgaaggt

SEQ ID NO: 4270020 - DNA, 25 bp, Homo sapien
caaacatatctaaagttttggcaaa

SEQ ID NO: 4270021 - DNA, 25 bp, Homo sapien
tttggcaaaattatgagggtgatgg

SEQ ID NO: 4270022 - DNA, 25 bp, Homo sapien
aatacacatacttggctaatactca

SEQ ID NO: 4270023 - DNA, 25 bp, Homo sapien
tggctaatactcacaaacatatcta

SEQ ID NO: 4270024 - DNA, 25 bp, Homo sapien
ggagcaggtgtgtcttttggtttct

SEQ ID NO: 4270025 - DNA, 25 bp, Homo sapien
tttggtttcttatgcagttgactct

SEQ ID NO: 4270026 - DNA, 25 bp, Homo sapien
ttttggtttcttatgcagttgactc

SEQ ID NO: 4270027 - DNA, 25 bp, Homo sapien
tgtacgtctgtggtttgaggtcttt

SEQ ID NO: 4270028 - DNA, 25 bp, Homo sapien
cttttctgcttgcaatttgctgtac

SEQ ID NO: 4270029 - DNA, 25 bp, Homo sapien
tgcaatttgctgtacgtctgtggtt

SEQ ID NO: 4270030 - DNA, 25 bp, Homo sapien
tgctgtacgtctgtggtttgaggtc

SEQ ID NO: 4270031 - DNA, 25 bp, Homo sapien
ctggtcttgaattcccaacctcaaa

SEQ ID NO: 4270032 - DNA, 25 bp, Homo sapien
tgaattcccaacctcaaatgatctg

SEQ ID NO: 4270033 - DNA, 25 bp, Homo sapien
aaatgatctgcctgcctcggcctcc

SEQ ID NO: 4270034 - DNA, 25 bp, Homo sapien
tcttgaattcccaacctcaaatgat

SEQ ID NO: 4270035 - DNA, 25 bp, Homo sapien
caaacaggaggtgcgctactgagct

SEQ ID NO: 4270036 - DNA, 25 bp, Homo sapien
ggacaacagtcacgagaattctagg

SEQ ID NO: 4270037 - DNA, 25 bp, Homo sapien
ggatcccagtggtcaaaatttgcct

SEQ ID NO: 4270038 - DNA, 25 bp, Homo sapien
gacctcgtagggctgaacttctgca

SEQ ID NO: 4270039 - DNA, 25 bp, Homo sapien
attttaaatgggatgccacagttcc

SEQ ID NO: 4270040 - DNA, 25 bp, Homo sapien
cacggtttcgctttccgagctttca

SEQ ID NO: 4270041 - DNA, 25 bp, Homo sapien
tgcttatccacggtttcgctttccg

SEQ ID NO: 4270042 - DNA, 25 bp, Homo sapien
aatgggatgccacagttcccctgct

SEQ ID NO: 4270043 - DNA, 25 bp, Homo sapien
ttggttaacagctcgactgcagtgg

SEQ ID NO: 4270044 - DNA, 25 bp, Homo sapien
cttacttgaatgaatagtggcccca

SEQ ID NO: 4270045 - DNA, 25 bp, Homo sapien
ctgggatgtgaatcagccacgcggc

SEQ ID NO: 4270046 - DNA, 25 bp, Homo sapien
ccaaagcagaagagaagcgacgctg

SEQ ID NO: 4270047 - DNA, 25 bp, Homo sapien
gaaactaataactccaaagacacag

SEQ ID NO: 4270048 - DNA, 25 bp, Homo sapien
tatttagcctaccaaaaatgttgaa

SEQ ID NO: 4270049 - DNA, 25 bp, Homo sapien
ggtgtaaatagaatggcttgacatt

SEQ ID NO: 4270050 - DNA, 25 bp, Homo sapien
gaatggcttgacatttgagaatttt

SEQ ID NO: 4270051 - DNA, 25 bp, Homo sapien
ggaggtacagtgacctgagattgca

SEQ ID NO: 4270052 - DNA, 25 bp, Homo sapien
attcaggtatgaagaggccaacagg

SEQ ID NO: 4270053 - DNA, 25 bp, Homo sapien
gaggccaacaggtcaagagacgact

SEQ ID NO: 4270054 - DNA, 25 bp, Homo sapien
tatgaagaggccaacaggtcaagag

SEQ ID NO: 4270055 - DNA, 25 bp, Homo sapien
ttgactggcttgcatatgaaagaca

SEQ ID NO: 4270056 - DNA, 25 bp, Homo sapien
caagtcatgcaggaacacacgcaga

SEQ ID NO: 4270057 - DNA, 25 bp, Homo sapien
tctctaggaatctgctatcaaaggg

SEQ ID NO: 4270058 - DNA, 25 bp, Homo sapien
agtctggtacttggcccctgggtga

SEQ ID NO: 4270059 - DNA, 25 bp, Homo sapien
tatgtcagcatataggcaaggacag

SEQ ID NO: 4270060 - DNA, 25 bp, Homo sapien
cttgaatgtgctgtaaggactggga

SEQ ID NO: 4270061 - DNA, 25 bp, Homo sapien
tcctcatggataggtacttgtccca

SEQ ID NO: 4270062 - DNA, 25 bp, Homo sapien
gagatccccagtgtctagagcagaa

SEQ ID NO: 4270063 - DNA, 25 bp, Homo sapien
ggatgcttcatcgaccaggcagcag

SEQ ID NO: 4270064 - DNA, 25 bp, Homo sapien
agccctcaagcatgttaatcagtga

SEQ ID NO: 4270065 - DNA, 25 bp, Homo sapien
ttgccctcgctgatggactatttgg

SEQ ID NO: 4270066 - DNA, 25 bp, Homo sapien
gaagctctggaagtactcccacctc

SEQ ID NO: 4270067 - DNA, 25 bp, Homo sapien
ggccctaatgtggtctgtattaggg

SEQ ID NO: 4270068 - DNA, 25 bp, Homo sapien
ccctaatgtggtctgtattagggag

SEQ ID NO: 4270069 - DNA, 25 bp, Homo sapien
gggccctaatgtggtctgtattagg

SEQ ID NO: 4270070 - DNA, 25 bp, Homo sapien
gccctaatgtggtctgtattaggga

SEQ ID NO: 4270071 - DNA, 25 bp, Homo sapien
caaaggtgcccttggaaaagcagct

SEQ ID NO: 4270072 - DNA, 25 bp, Homo sapien
tctaccccatgaggtgattcactgg

SEQ ID NO: 4270073 - DNA, 25 bp, Homo sapien
tcctggatttggagcagaacgccca

SEQ ID NO: 4270074 - DNA, 25 bp, Homo sapien
ttaatactttggagaggctcgccgg

SEQ ID NO: 4270075 - DNA, 25 bp, Homo sapien
cctgtgtcggccccgctcccctctc

SEQ ID NO: 4270076 - DNA, 25 bp, Homo sapien
ctgtgtcggccccgctcccctctcc

SEQ ID NO: 4270077 - DNA, 25 bp, Homo sapien
cccccaccaggcgagcaggcgagcg

SEQ ID NO: 4270078 - DNA, 25 bp, Homo sapien
tctcccccaccaggcgagcaggcga

SEQ ID NO: 4270079 - DNA, 25 bp, Homo sapien
cgcctctcccagagcgcggggccgg

SEQ ID NO: 4270080 - DNA, 25 bp, Homo sapien
ggcccgggccgcctctcccagagcg

SEQ ID NO: 4270081 - DNA, 25 bp, Homo sapien
cgggccgcctctcccagagcgcggg

SEQ ID NO: 4270082 - DNA, 25 bp, Homo sapien
cccgggccgcctctcccagagcgcg

SEQ ID NO: 4270083 - DNA, 25 bp, Homo sapien
gccgcgccgcgcacccatggacggc

SEQ ID NO: 4270084 - DNA, 25 bp, Homo sapien
ggacggcccggccatcatcacccag

SEQ ID NO: 4270085 - DNA, 25 bp, Homo sapien
tcatcacccaggtgaccaaccccaa

SEQ ID NO: 4270086 - DNA, 25 bp, Homo sapien
gcgcacccatggacggcccggccat

SEQ ID NO: 4270087 - DNA, 25 bp, Homo sapien
cccctatgttgttcagttgggtaat

SEQ ID NO: 4270088 - DNA, 25 bp, Homo sapien
cttctagtctgttattgagcacatc

SEQ ID NO: 4270089 - DNA, 25 bp, Homo sapien
gttatagtcccacagatttatccat

SEQ ID NO: 4270090 - DNA, 25 bp, Homo sapien
tccttctgagactatgatgacataa

SEQ ID NO: 4270091 - DNA, 25 bp, Homo sapien
aatgctgttataacgatctcctggc

SEQ ID NO: 4270092 - DNA, 25 bp, Homo sapien
tttccaaatgctgttataacgatct

SEQ ID NO: 4270093 - DNA, 25 bp, Homo sapien
tgttataacgatctcctggcatcct

SEQ ID NO: 4270094 - DNA, 25 bp, Homo sapien
ttctgattcaaagtgagtggtcact

SEQ ID NO: 4270095 - DNA, 25 bp, Homo sapien
ttatccttagctaggttgcttagcg

SEQ ID NO: 4270096 - DNA, 25 bp, Homo sapien
ttgcttagcgtctgccccatgcatg

SEQ ID NO: 4270097 - DNA, 25 bp, Homo sapien
gaggcactacctcaattctcggctt

SEQ ID NO: 4270098 - DNA, 25 bp, Homo sapien
tgctgtctattggagttttagccat

SEQ ID NO: 4270099 - DNA, 25 bp, Homo sapien
gcttagacttagttccggaaatcca

SEQ ID NO: 4270100 - DNA, 25 bp, Homo sapien
aaaagttgtacgatatgggaatgca

SEQ ID NO: 4270101 - DNA, 25 bp, Homo sapien
gccattagtaagtttgccattgccg

SEQ ID NO: 4270102 - DNA, 25 bp, Homo sapien
tatttttggagtgccggttatacac

SEQ ID NO: 4270103 - DNA, 25 bp, Homo sapien
gtctggttcaaggaaagccccatgt

SEQ ID NO: 4270104 - DNA, 25 bp, Homo sapien
actcatagcctgaattacgaccatc

SEQ ID NO: 4270105 - DNA, 25 bp, Homo sapien
tgccaactcatagcctgaattacga

SEQ ID NO: 4270106 - DNA, 25 bp, Homo sapien
ggtctggttcaaggaaagccccatg

SEQ ID NO: 4270107 - DNA, 25 bp, Homo sapien
tcacattcaaaccccccacaaggag

SEQ ID NO: 4270108 - DNA, 25 bp, Homo sapien
cacattcaaaccccccacaaggagg

SEQ ID NO: 4270109 - DNA, 25 bp, Homo sapien
gtggccatttatggccttctaaaag

SEQ ID NO: 4270110 - DNA, 25 bp, Homo sapien
cttgagggtcttaggtggccattta

SEQ ID NO: 4270111 - DNA, 25 bp, Homo sapien
ggccatttatggccttctaaaagca

SEQ ID NO: 4270112 - DNA, 25 bp, Homo sapien
gccatttatggccttctaaaagcag

SEQ ID NO: 4270113 - DNA, 25 bp, Homo sapien
agcccccgccaagtgggcgaatgtc

SEQ ID NO: 4270114 - DNA, 25 bp, Homo sapien
tggtagcccccgccaagtgggcgaa

SEQ ID NO: 4270115 - DNA, 25 bp, Homo sapien
gtagcccccgccaagtgggcgaatg

SEQ ID NO: 4270116 - DNA, 25 bp, Homo sapien
ccccgccaagtgggcgaatgtccat

SEQ ID NO: 4270117 - DNA, 25 bp, Homo sapien
tcaggatagtggagtctccatcagc

SEQ ID NO: 4270118 - DNA, 25 bp, Homo sapien
gatagtggagtctccatcagcatct

SEQ ID NO: 4270119 - DNA, 25 bp, Homo sapien
attccaggagttgtgcttcgctggg

SEQ ID NO: 4270120 - DNA, 25 bp, Homo sapien
tccaggagttgtgcttcgctgggcc

SEQ ID NO: 4270121 - DNA, 25 bp, Homo sapien
atcttctggcagcgggcagcacagg

SEQ ID NO: 4270122 - DNA, 25 bp, Homo sapien
ctggcagcgggcagcacagggccat

SEQ ID NO: 4270123 - DNA, 25 bp, Homo sapien
cttctggcagcgggcagcacagggc

SEQ ID NO: 4270124 - DNA, 25 bp, Homo sapien
tctggcagcgggcagcacagggcca

SEQ ID NO: 4270125 - DNA, 25 bp, Homo sapien
agatatcccacaggacgatgatcat

SEQ ID NO: 4270126 - DNA, 25 bp, Homo sapien
ggtgggaaagatatcccacaggacg

SEQ ID NO: 4270127 - DNA, 25 bp, Homo sapien
gaaagatatcccacaggacgatgat

SEQ ID NO: 4270128 - DNA, 25 bp, Homo sapien
cagagcgggtgggaaagatatccca

SEQ ID NO: 4270129 - DNA, 25 bp, Homo sapien
gcggttggcgaaggcttcctgggtg

SEQ ID NO: 4270130 - DNA, 25 bp, Homo sapien
ggtgaggttggctttgagccaggct

SEQ ID NO: 4270131 - DNA, 25 bp, Homo sapien
gacacacgttcatttgggagtttag

SEQ ID NO: 4270132 - DNA, 25 bp, Homo sapien
gaacaaatgatctccatggggcggt

SEQ ID NO: 4270133 - DNA, 25 bp, Homo sapien
gttttgagtttggtgggtatgttca

SEQ ID NO: 4270134 - DNA, 25 bp, Homo sapien
catgggcctcctccggttttgagtt

SEQ ID NO: 4270135 - DNA, 25 bp, Homo sapien
ttcttttcacatgggcctcctccgg

SEQ ID NO: 4270136 - DNA, 25 bp, Homo sapien
ttttgagtttggtgggtatgttcat

SEQ ID NO: 4270137 - DNA, 25 bp, Homo sapien
tatgagcaaatcaaggaccttctgg

SEQ ID NO: 4270138 - DNA, 25 bp, Homo sapien
cagtttatgagcaaatcaaggacct

SEQ ID NO: 4270139 - DNA, 25 bp, Homo sapien
tcaaggaccttctggatgatagctg

SEQ ID NO: 4270140 - DNA, 25 bp, Homo sapien
gcaaatcaaggaccttctggatgat

SEQ ID NO: 4270141 - DNA, 25 bp, Homo sapien
cccagtgtgcttccgccactggtgg

SEQ ID NO: 4270142 - DNA, 25 bp, Homo sapien
ccgtgattacaatgtggaggcccct

SEQ ID NO: 4270143 - DNA, 25 bp, Homo sapien
cttctgctgcttccgtgattacaat

SEQ ID NO: 4270144 - DNA, 25 bp, Homo sapien
tgctgcttccgtgattacaatgtgg

SEQ ID NO: 4270145 - DNA, 25 bp, Homo sapien
gtgaccagaggcaggtcattcccat

SEQ ID NO: 4270146 - DNA, 25 bp, Homo sapien
gaggcaggtcattcccataccaagt

SEQ ID NO: 4270147 - DNA, 25 bp, Homo sapien
cagaggcaggtcattcccataccaa

SEQ ID NO: 4270148 - DNA, 25 bp, Homo sapien
gaccagaggcaggtcattcccatac

SEQ ID NO: 4270149 - DNA, 25 bp, Homo sapien
aacattggtgcacagttcgtttaag

SEQ ID NO: 4270150 - DNA, 25 bp, Homo sapien
tgacggtgcttgactatggaaagaa

SEQ ID NO: 4270151 - DNA, 25 bp, Homo sapien
gctaagtaccttcttccagaggtga

SEQ ID NO: 4270152 - DNA, 25 bp, Homo sapien
tgatttagatgaaacattggtgcac

SEQ ID NO: 4270153 - DNA, 25 bp, Homo sapien
tgaaatcgatggaactatacatcag

SEQ ID NO: 4270154 - DNA, 25 bp, Homo sapien
tccggttgaaatcgatggaactata

SEQ ID NO: 4270155 - DNA, 25 bp, Homo sapien
tattgttccggttgaaatcgatgga

SEQ ID NO: 4270156 - DNA, 25 bp, Homo sapien
ctgattttattgttccggttgaaat

SEQ ID NO: 4270157 - DNA, 25 bp, Homo sapien
gctctttactgccagcttggccaag

SEQ ID NO: 4270158 - DNA, 25 bp, Homo sapien
tgtggacgagttcctccagaggatg

SEQ ID NO: 4270159 - DNA, 25 bp, Homo sapien
gtgtgctctttactgccagcttggc

SEQ ID NO: 4270160 - DNA, 25 bp, Homo sapien
gtgtatgtgctgaagcggccacatg

SEQ ID NO: 4270161 - DNA, 25 bp, Homo sapien
gtggctgacctcctagaccgctggg

SEQ ID NO: 4270162 - DNA, 25 bp, Homo sapien
gcccggctcttcagagaatcatgtg

SEQ ID NO: 4270163 - DNA, 25 bp, Homo sapien
gatcattgttgacaattcccctgcc

SEQ ID NO: 4270164 - DNA, 25 bp, Homo sapien
tacgtgaaggacctgagtcgccttg

SEQ ID NO: 4270165 - DNA, 25 bp, Homo sapien
tagagagatgtacagttataacacc

SEQ ID NO: 4270166 - DNA, 25 bp, Homo sapien
taattgatctgtagtgtatgtttaa

SEQ ID NO: 4270167 - DNA, 25 bp, Homo sapien
tcagtagcggtactaaattatggct

SEQ ID NO: 4270168 - DNA, 25 bp, Homo sapien
taagacaactctatgcagtttagga

SEQ ID NO: 4270169 - DNA, 25 bp, Homo sapien
gactctgcaataggtagccctggcc

SEQ ID NO: 4270170 - DNA, 25 bp, Homo sapien
tcgatgacatgacggacacggagct

SEQ ID NO: 4270171 - DNA, 25 bp, Homo sapien
aaagtgaggatactccgtgctccag

SEQ ID NO: 4270172 - DNA, 25 bp, Homo sapien
aggacgacgtgtacagcatgctgca

SEQ ID NO: 4270173 - DNA, 25 bp, Homo sapien
tgctaagctacaaactcggacaggg

SEQ ID NO: 4270174 - DNA, 25 bp, Homo sapien
cccagtttggtgtttaagcagtgcc

SEQ ID NO: 4270175 - DNA, 25 bp, Homo sapien
caaatggaattgaccagcggctgtt

SEQ ID NO: 4270176 - DNA, 25 bp, Homo sapien
gcacagcctatttctgagccaaggg

SEQ ID NO: 4270177 - DNA, 25 bp, Homo sapien
aatagaattctaacataaggccaag

SEQ ID NO: 4270178 - DNA, 25 bp, Homo sapien
tctttagccaaaagagaaccctgac

SEQ ID NO: 4270179 - DNA, 25 bp, Homo sapien
tgtgggctttgaaacctaatgaaac

SEQ ID NO: 4270180 - DNA, 25 bp, Homo sapien
accttgggtttgtggactgcagccc

SEQ ID NO: 4270181 - DNA, 25 bp, Homo sapien
gccctatggtcaaacaatcctacgt

SEQ ID NO: 4270182 - DNA, 25 bp, Homo sapien
acgtttgtgcctctgcttttaaagg

SEQ ID NO: 4270183 - DNA, 25 bp, Homo sapien
tgctgtgctggacagttggcatgcc

SEQ ID NO: 4270184 - DNA, 25 bp, Homo sapien
gtaagtctgtaacctggcaacattt

SEQ ID NO: 4270185 - DNA, 25 bp, Homo sapien
tacatgcggaatgtgcacgtttcca

SEQ ID NO: 4270186 - DNA, 25 bp, Homo sapien
tgtctgggtagtcatggatttctgc

SEQ ID NO: 4270187 - DNA, 25 bp, Homo sapien
gctgcctctgttcctactgtactgt

SEQ ID NO: 4270188 - DNA, 25 bp, Homo sapien
taaacaatccagcattacttaggaa

SEQ ID NO: 4270189 - DNA, 25 bp, Homo sapien
tacagagttcagctctgtttcaaga

SEQ ID NO: 4270190 - DNA, 25 bp, Homo sapien
gagttcagctctgtttcaagaattt

SEQ ID NO: 4270191 - DNA, 25 bp, Homo sapien
cagagttcagctctgtttcaagaat

SEQ ID NO: 4270192 - DNA, 25 bp, Homo sapien
tatacagagttcagctctgtttcaa

SEQ ID NO: 4270193 - DNA, 25 bp, Homo sapien
tacaggtagccaggtgtcggtctcc

SEQ ID NO: 4270194 - DNA, 25 bp, Homo sapien
catttgtgtgtttacagagccctcc

SEQ ID NO: 4270195 - DNA, 25 bp, Homo sapien
tgtgtcgtcccatattcctgcctgg

SEQ ID NO: 4270196 - DNA, 25 bp, Homo sapien
tctgaggtgagaggcacgaccaaat

SEQ ID NO: 4270197 - DNA, 25 bp, Homo sapien
tattcctaacggaatgaaggacagc

SEQ ID NO: 4270198 - DNA, 25 bp, Homo sapien
agggactgggctagctcctggtccc

SEQ ID NO: 4270199 - DNA, 25 bp, Homo sapien
gacactatgttagggctgaaggcaa

SEQ ID NO: 4270200 - DNA, 25 bp, Homo sapien
cttgaccactcgctggccggagggt

SEQ ID NO: 4270201 - DNA, 25 bp, Homo sapien
tgatggatgctggtccccgttctta

SEQ ID NO: 4270202 - DNA, 25 bp, Homo sapien
tgctggtccccgttcttagacatga

SEQ ID NO: 4270203 - DNA, 25 bp, Homo sapien
cccgttcttagacatgaggtggaca

SEQ ID NO: 4270204 - DNA, 25 bp, Homo sapien
caaagagggtggctgatggatgctg

SEQ ID NO: 4270205 - DNA, 25 bp, Homo sapien
gcaggagggaacacagagagagttc

SEQ ID NO: 4270206 - DNA, 25 bp, Homo sapien
acaggcaggagggaacacagagaga

SEQ ID NO: 4270207 - DNA, 25 bp, Homo sapien
gtggacaggcaggagggaacacaga

SEQ ID NO: 4270208 - DNA, 25 bp, Homo sapien
caggagggaacacagagagagttct

SEQ ID NO: 4270209 - DNA, 25 bp, Homo sapien
gcaaggtcaggcacaactacctcaa

SEQ ID NO: 4270210 - DNA, 25 bp, Homo sapien
aactacctcaaacgcaaactccgtg

SEQ ID NO: 4270211 - DNA, 25 bp, Homo sapien
tccgtgtcccaccatgggttgaaac

SEQ ID NO: 4270212 - DNA, 25 bp, Homo sapien
tcaaggggatggtactctggccaat

SEQ ID NO: 4270213 - DNA, 25 bp, Homo sapien
agggggacaggcaccatatcagcag

SEQ ID NO: 4270214 - DNA, 25 bp, Homo sapien
ctagggggacaggcaccatatcagc

SEQ ID NO: 4270215 - DNA, 25 bp, Homo sapien
ggggacaggcaccatatcagcagca

SEQ ID NO: 4270216 - DNA, 25 bp, Homo sapien
atggacaccagccctagtagcccag

SEQ ID NO: 4270217 - DNA, 25 bp, Homo sapien
ttggtgatgacagcagtctggcggc

SEQ ID NO: 4270218 - DNA, 25 bp, Homo sapien
ggctcacgccatggatctccactgt

SEQ ID NO: 4270219 - DNA, 25 bp, Homo sapien
ccacgtcccggctcacgccatggat

SEQ ID NO: 4270220 - DNA, 25 bp, Homo sapien
tggtgatgacagcagtctggcggct

SEQ ID NO: 4270221 - DNA, 25 bp, Homo sapien
ggaagcggccctggtacacgtccat

SEQ ID NO: 4270222 - DNA, 25 bp, Homo sapien
acaggccccgttgtcctggaagcgg

SEQ ID NO: 4270223 - DNA, 25 bp, Homo sapien
tctggcccaggtgtctggaaattca

SEQ ID NO: 4270224 - DNA, 25 bp, Homo sapien
aggaaggcgggcttcagcacgtacc

SEQ ID NO: 4270225 - DNA, 25 bp, Homo sapien
gctcagggtacactaaggcctaggg

SEQ ID NO: 4270226 - DNA, 25 bp, Homo sapien
gtacactaaggcctagggtcacatg

SEQ ID NO: 4270227 - DNA, 25 bp, Homo sapien
ctgctcagggtacactaaggcctag

SEQ ID NO: 4270228 - DNA, 25 bp, Homo sapien
cagggtacactaaggcctagggtca

SEQ ID NO: 4270229 - DNA, 25 bp, Homo sapien
ccatccagccgggtagattctgctc

SEQ ID NO: 4270230 - DNA, 25 bp, Homo sapien
gggtagattctgctcaggtgcccca

SEQ ID NO: 4270231 - DNA, 25 bp, Homo sapien
cacgttgtggcggacaaagccgttt

SEQ ID NO: 4270232 - DNA, 25 bp, Homo sapien
ctcaggtgccccacgttgtggcgga

SEQ ID NO: 4270233 - DNA, 25 bp, Homo sapien
gtggacactcttgcagtaaatgacc

SEQ ID NO: 4270234 - DNA, 25 bp, Homo sapien
gattcttggagcagtcgaagggcac

SEQ ID NO: 4270235 - DNA, 25 bp, Homo sapien
tctcagagaaggacgccatctcgta

SEQ ID NO: 4270236 - DNA, 25 bp, Homo sapien
ccatctcgtagaaggcctgtccagg

SEQ ID NO: 4270237 - DNA, 25 bp, Homo sapien
tagattcagtggttggggtagggta

SEQ ID NO: 4270238 - DNA, 25 bp, Homo sapien
agattcagtggttggggtagggtag

SEQ ID NO: 4270239 - DNA, 25 bp, Homo sapien
gcttgtgctgcacacggctcctcac

SEQ ID NO: 4270240 - DNA, 25 bp, Homo sapien
cttgggcttgtgctgcacacggctc

SEQ ID NO: 4270241 - DNA, 25 bp, Homo sapien
ggcttgtgctgcacacggctcctca

SEQ ID NO: 4270242 - DNA, 25 bp, Homo sapien
tgggcttgtgctgcacacggctcct

SEQ ID NO: 4270243 - DNA, 25 bp, Homo sapien
cagcagcctcgtcttcgtctgacac

SEQ ID NO: 4270244 - DNA, 25 bp, Homo sapien
agcagcctcgtcttcgtctgacacc

SEQ ID NO: 4270245 - DNA, 25 bp, Homo sapien
tctcagcagcctcgtcttcgtctga

SEQ ID NO: 4270246 - DNA, 25 bp, Homo sapien
tcagcagcctcgtcttcgtctgaca

SEQ ID NO: 4270247 - DNA, 25 bp, Homo sapien
cccttcagcaggatcttccccttca

SEQ ID NO: 4270248 - DNA, 25 bp, Homo sapien
tccccttcagcaggatcttcccctt

SEQ ID NO: 4270249 - DNA, 25 bp, Homo sapien
cttcagcaggatcttccccttcagt

SEQ ID NO: 4270250 - DNA, 25 bp, Homo sapien
tcagcaggatcttccccttcagttg

SEQ ID NO: 4270251 - DNA, 25 bp, Homo sapien
gggcaactggtcaagacacacctag

SEQ ID NO: 4270252 - DNA, 25 bp, Homo sapien
aactggtcaagacacacctagcgcc

SEQ ID NO: 4270253 - DNA, 25 bp, Homo sapien
gcaactggtcaagacacacctagcg

SEQ ID NO: 4270254 - DNA, 25 bp, Homo sapien
ggaggggcaactggtcaagacacac

SEQ ID NO: 4270255 - DNA, 25 bp, Homo sapien
ccagtggtcggttcaacagcatggg

SEQ ID NO: 4270256 - DNA, 25 bp, Homo sapien
aggtgccgcgccatcacgcgctgct

SEQ ID NO: 4270257 - DNA, 25 bp, Homo sapien
ccatccagtggtcggttcaacagca

SEQ ID NO: 4270258 - DNA, 25 bp, Homo sapien
gaccccatccagtggtcggttcaac

SEQ ID NO: 4270259 - DNA, 25 bp, Homo sapien
attaggagtggtgggccacccctag

SEQ ID NO: 4270260 - DNA, 25 bp, Homo sapien
agggcacattaggagtggtgggcca

SEQ ID NO: 4270261 - DNA, 25 bp, Homo sapien
acattaggagtggtgggccacccct

SEQ ID NO: 4270262 - DNA, 25 bp, Homo sapien
gcacattaggagtggtgggccaccc

SEQ ID NO: 4270263 - DNA, 25 bp, Homo sapien
gatggccctgagcacatcgcagaag

SEQ ID NO: 4270264 - DNA, 25 bp, Homo sapien
tgaaggcatagtcccggatggccct

SEQ ID NO: 4270265 - DNA, 25 bp, Homo sapien
ccggatggccctgagcacatcgcag

SEQ ID NO: 4270266 - DNA, 25 bp, Homo sapien
ttgaaggcatagtcccggatggccc

SEQ ID NO: 4270267 - DNA, 25 bp, Homo sapien
cgtggtagatgattggttcctggtt

SEQ ID NO: 4270268 - DNA, 25 bp, Homo sapien
gaagtgaaagtatagccgtggtaga

SEQ ID NO: 4270269 - DNA, 25 bp, Homo sapien
tccaggcatcggcagcctttgcaca

SEQ ID NO: 4270270 - DNA, 25 bp, Homo sapien
gcagtcaagctccaggcatcggcag

SEQ ID NO: 4270271 - DNA, 25 bp, Homo sapien
tcctggtagacacggcggtgtgcca

SEQ ID NO: 4270272 - DNA, 25 bp, Homo sapien
gacaccaggtagtggctaagtggct

SEQ ID NO: 4270273 - DNA, 25 bp, Homo sapien
gccgtcagccgacagtaagtacatg

SEQ ID NO: 4270274 - DNA, 25 bp, Homo sapien
taagtacatgaggaagccgtccttg

SEQ ID NO: 4270275 - DNA, 25 bp, Homo sapien
cctcggcgaaggtgcggtcgatctc

SEQ ID NO: 4270276 - DNA, 25 bp, Homo sapien
ggtcagcatcttgtagaaggcctca

SEQ ID NO: 4270277 - DNA, 25 bp, Homo sapien
ctggtgctgcaggaacgtcactaac

SEQ ID NO: 4270278 - DNA, 25 bp, Homo sapien
tcgctgggctcgtagcgctcaatga

SEQ ID NO: 4270279 - DNA, 25 bp, Homo sapien
gggagtctgtctgggagtggtcaca

SEQ ID NO: 4270280 - DNA, 25 bp, Homo sapien
cctgaagatcttccgggcatagctg

SEQ ID NO: 4270281 - DNA, 25 bp, Homo sapien
agatcttccgggcatagctgtcgtc

SEQ ID NO: 4270282 - DNA, 25 bp, Homo sapien
catagctgtcgtccacctggatgtt

SEQ ID NO: 4270283 - DNA, 25 bp, Homo sapien
tagctgtcgtccacctggatgttga

SEQ ID NO: 4270284 - DNA, 25 bp, Homo sapien
cttttcgcaagcaggagtgaatcca

SEQ ID NO: 4270285 - DNA, 25 bp, Homo sapien
ttttcgcaagcaggagtgaatccag

SEQ ID NO: 4270286 - DNA, 25 bp, Homo sapien
tgaatagccttcagcacacgaatct

SEQ ID NO: 4270287 - DNA, 25 bp, Homo sapien
gagccatctggactggttttcaaca

SEQ ID NO: 4270288 - DNA, 25 bp, Homo sapien
cacgaatctcgtgcttggctggacc

SEQ ID NO: 4270289 - DNA, 25 bp, Homo sapien
tggctggaccattctaaacttgact

SEQ ID NO: 4270290 - DNA, 25 bp, Homo sapien
cctaaggagtggacatacaccagca

SEQ ID NO: 4270291 - DNA, 25 bp, Homo sapien
tcttaaggtctaggcagcaggactc

SEQ ID NO: 4270292 - DNA, 25 bp, Homo sapien
caatcaggcagatgtgccattgaga

SEQ ID NO: 4270293 - DNA, 25 bp, Homo sapien
ctctgccaaaggtgggattatgaca

SEQ ID NO: 4270294 - DNA, 25 bp, Homo sapien
cccagagggaaatcgtgtggtaact

SEQ ID NO: 4270295 - DNA, 25 bp, Homo sapien
tatttgggctctggtcagactagac

SEQ ID NO: 4270296 - DNA, 25 bp, Homo sapien
cttcgaatcataaaccagtgtgtca

SEQ ID NO: 4270297 - DNA, 25 bp, Homo sapien
tgaagccctaatgcccaacgtgatg

SEQ ID NO: 4270298 - DNA, 25 bp, Homo sapien
ccaagttgccctggggataaccaca

SEQ ID NO: 4270299 - DNA, 25 bp, Homo sapien
ccctggggataaccacagccagtgt

SEQ ID NO: 4270300 - DNA, 25 bp, Homo sapien
aaccagcttccatacccaagttgcc

SEQ ID NO: 4270301 - DNA, 25 bp, Homo sapien
gcttccatacccaagttgccctggg

SEQ ID NO: 4270302 - DNA, 25 bp, Homo sapien
agtgtattgcgctggtccttgaaga

SEQ ID NO: 4270303 - DNA, 25 bp, Homo sapien
gtggatgatcttgtgcagccccagc

SEQ ID NO: 4270304 - DNA, 25 bp, Homo sapien
tctgacgctggtccatggagcctga

SEQ ID NO: 4270305 - DNA, 25 bp, Homo sapien
cgatgaggtctagtgtattgcgctg

SEQ ID NO: 4270306 - DNA, 25 bp, Homo sapien
ctcgggcacatcacgggcgaacttc

SEQ ID NO: 4270307 - DNA, 25 bp, Homo sapien
tgccccattcgcacctcctgaatgt

SEQ ID NO: 4270308 - DNA, 25 bp, Homo sapien
acatcacgggcgaacttctccagac

SEQ ID NO: 4270309 - DNA, 25 bp, Homo sapien
cagaccctccgtgcggtgccccatt

SEQ ID NO: 4270310 - DNA, 25 bp, Homo sapien
aggaaatcccatatcagggcaagag

SEQ ID NO: 4270311 - DNA, 25 bp, Homo sapien
aatcccatatcagggcaagagcccc

SEQ ID NO: 4270312 - DNA, 25 bp, Homo sapien
catctaacaggaaatcccatatcag

SEQ ID NO: 4270313 - DNA, 25 bp, Homo sapien
tatcagggcaagagccccatgaagg

SEQ ID NO: 4270314 - DNA, 25 bp, Homo sapien
gccctgagcagattccacactctat

SEQ ID NO: 4270315 - DNA, 25 bp, Homo sapien
agccctgagcagattccacactcta

SEQ ID NO: 4270316 - DNA, 25 bp, Homo sapien
gcagattccacactctatcccctcc

SEQ ID NO: 4270317 - DNA, 25 bp, Homo sapien
tgagcagattccacactctatcccc

SEQ ID NO: 4270318 - DNA, 25 bp, Homo sapien
gggtccgcatgaccttgcgggactc

SEQ ID NO: 4270319 - DNA, 25 bp, Homo sapien
tgggactccggggtccgcatgacct

SEQ ID NO: 4270320 - DNA, 25 bp, Homo sapien
tccgcatgaccttgcgggactcctg

SEQ ID NO: 4270321 - DNA, 25 bp, Homo sapien
tgaccttgcgggactcctgccagat

SEQ ID NO: 4270322 - DNA, 25 bp, Homo sapien
tgcccttcagcagcgcctgtagatc

SEQ ID NO: 4270323 - DNA, 25 bp, Homo sapien
ctcctccatgagctggacttcacct

SEQ ID NO: 4270324 - DNA, 25 bp, Homo sapien
tgcaacttgtagaagcgctctctcc

SEQ ID NO: 4270325 - DNA, 25 bp, Homo sapien
gcagcgcctgtagatcctcatcatc

SEQ ID NO: 4270326 - DNA, 25 bp, Homo sapien
attgagcgccgccaccttaaggctc

SEQ ID NO: 4270327 - DNA, 25 bp, Homo sapien
ggctccggatccccaggcactgcat

SEQ ID NO: 4270328 - DNA, 25 bp, Homo sapien
accttaaggctccgctcctgcaggt

SEQ ID NO: 4270329 - DNA, 25 bp, Homo sapien
ccagcctccgtccattgagcgccgc

SEQ ID NO: 4270330 - DNA, 25 bp, Homo sapien
ctccagtgttttatgctcacaacac

SEQ ID NO: 4270331 - DNA, 25 bp, Homo sapien
tgttttatgctcacaacaccctctg

SEQ ID NO: 4270332 - DNA, 25 bp, Homo sapien
cagtgttttatgctcacaacaccct

SEQ ID NO: 4270333 - DNA, 25 bp, Homo sapien
ttttatgctcacaacaccctctgct

SEQ ID NO: 4270334 - DNA, 25 bp, Homo sapien
gaggaggggcgcacttcggaggggc

SEQ ID NO: 4270335 - DNA, 25 bp, Homo sapien
aggaggggcgcacttcggaggggcg

SEQ ID NO: 4270336 - DNA, 25 bp, Homo sapien
agggaggagctagagttcgagagga

SEQ ID NO: 4270337 - DNA, 25 bp, Homo sapien
ggcgcacttcggaggggcgggacga

SEQ ID NO: 4270338 - DNA, 25 bp, Homo sapien
caaggagccggagcggcgaattcta

SEQ ID NO: 4270339 - DNA, 25 bp, Homo sapien
acctttgaggctggcgcagaaccga

SEQ ID NO: 4270340 - DNA, 25 bp, Homo sapien
aattctaacgccacctttgaggctg

SEQ ID NO: 4270341 - DNA, 25 bp, Homo sapien
gccggagcggcgaattctaacgcca

SEQ ID NO: 4270342 - DNA, 25 bp, Homo sapien
gtgcagggtcaggaagtcccggccc

SEQ ID NO: 4270343 - DNA, 25 bp, Homo sapien
tcaggaagtcccggcccgagtccat

SEQ ID NO: 4270344 - DNA, 25 bp, Homo sapien
gtcaggaagtcccggcccgagtcca

SEQ ID NO: 4270345 - DNA, 25 bp, Homo sapien
cagggtcaggaagtcccggcccgag

SEQ ID NO: 4270346 - DNA, 25 bp, Homo sapien
ggcggcgcggcgggaggggcaccgc

SEQ ID NO: 4270347 - DNA, 25 bp, Homo sapien
gcgcggcgggaggggcaccgcggga

SEQ ID NO: 4270348 - DNA, 25 bp, Homo sapien
ggcgggaggggcaccgcgggactca

SEQ ID NO: 4270349 - DNA, 25 bp, Homo sapien
gacgggcggcgcggcgggaggggca

SEQ ID NO: 4270350 - DNA, 25 bp, Homo sapien
tgagtagcgacagcaccggcggcct

SEQ ID NO: 4270351 - DNA, 25 bp, Homo sapien
cttgagtagcgacagcaccggcggc

SEQ ID NO: 4270352 - DNA, 25 bp, Homo sapien
gtagcgacagcaccggcggcctggg

SEQ ID NO: 4270353 - DNA, 25 bp, Homo sapien
agtagcgacagcaccggcggcctgg

SEQ ID NO: 4270354 - DNA, 25 bp, Homo sapien
tacgctaacactaacagcgataagc

SEQ ID NO: 4270355 - DNA, 25 bp, Homo sapien
cattatatacatcaccacagataag

SEQ ID NO: 4270356 - DNA, 25 bp, Homo sapien
atttgtttttatacacaggtgtcca

SEQ ID NO: 4270357 - DNA, 25 bp, Homo sapien
ccatgcataatgttcattatataca

SEQ ID NO: 4270358 - DNA, 25 bp, Homo sapien
taaagtgagatacgtacgactcttc

SEQ ID NO: 4270359 - DNA, 25 bp, Homo sapien
cctggctaagccaatggatcttcag

SEQ ID NO: 4270360 - DNA, 25 bp, Homo sapien
ccatcattaaggattgcattgcacg

SEQ ID NO: 4270361 - DNA, 25 bp, Homo sapien
tgtgcagggatttcaagcagcagtt

SEQ ID NO: 4270362 - DNA, 25 bp, Homo sapien
gacattgggccacatccctaaggga

SEQ ID NO: 4270363 - DNA, 25 bp, Homo sapien
taacagtaagtcatgctgcagaggt

SEQ ID NO: 4270364 - DNA, 25 bp, Homo sapien
gacaaatacagacagacggccaata

SEQ ID NO: 4270365 - DNA, 25 bp, Homo sapien
aatcctatattgttcgctgggtgca

SEQ ID NO: 4270366 - DNA, 25 bp, Homo sapien
tgagctgtacgagtccacgatggtg

SEQ ID NO: 4270367 - DNA, 25 bp, Homo sapien
cacatgctccccacaggagtagtga

SEQ ID NO: 4270368 - DNA, 25 bp, Homo sapien
tgtgctcggtgagaagtcctgcacc

SEQ ID NO: 4270369 - DNA, 25 bp, Homo sapien
gtgagaagtcctgcaccctgcggct

SEQ ID NO: 4270370 - DNA, 25 bp, Homo sapien
tcttgcacagctaaagagggtctga

SEQ ID NO: 4270371 - DNA, 25 bp, Homo sapien
taagaattaaccatggccttgtggc

SEQ ID NO: 4270372 - DNA, 25 bp, Homo sapien
tcctataccatgtcatcagtgttca

SEQ ID NO: 4270373 - DNA, 25 bp, Homo sapien
ggtctgatgggtggctcaacacccc

SEQ ID NO: 4270374 - DNA, 25 bp, Homo sapien
ccaccagtgctgagttttcccatgt

SEQ ID NO: 4270375 - DNA, 25 bp, Homo sapien
tgtggtgttactgccttgctgctag

SEQ ID NO: 4270376 - DNA, 25 bp, Homo sapien
agcaggactgtctgcgtagcgcctc

SEQ ID NO: 4270377 - DNA, 25 bp, Homo sapien
ccaaatgagttgaagtgccttgatc

SEQ ID NO: 4270378 - DNA, 25 bp, Homo sapien
ggtattcaaagacggcagcggctcc

SEQ ID NO: 4270379 - DNA, 25 bp, Homo sapien
cagggtattcaaagacggcagcggc

SEQ ID NO: 4270380 - DNA, 25 bp, Homo sapien
agacggcagcggctcccattccagt

SEQ ID NO: 4270381 - DNA, 25 bp, Homo sapien
gttcccagggtattcaaagacggca

SEQ ID NO: 4270382 - DNA, 25 bp, Homo sapien
tccagggccccaggcaattagctga

SEQ ID NO: 4270383 - DNA, 25 bp, Homo sapien
tagctgatgcctgccaacactgagg

SEQ ID NO: 4270384 - DNA, 25 bp, Homo sapien
ttaaggaaaacagggatcatgcccc

SEQ ID NO: 4270385 - DNA, 25 bp, Homo sapien
aaaaaagtgtgtcccggctctgaga

SEQ ID NO: 4270386 - DNA, 25 bp, Homo sapien
tagtcaagtgtagaagtaagaaggg

SEQ ID NO: 4270387 - DNA, 25 bp, Homo sapien
tgactagtcaagtgtagaagtaaga

SEQ ID NO: 4270388 - DNA, 25 bp, Homo sapien
agggggtaaagagtagaacatggag

SEQ ID NO: 4270389 - DNA, 25 bp, Homo sapien
tgatctgtaactgaacaatcaagat

SEQ ID NO: 4270390 - DNA, 25 bp, Homo sapien
tcaggtgccctaacttggatatccc

SEQ ID NO: 4270391 - DNA, 25 bp, Homo sapien
cttagggactttgatcttttgggat

SEQ ID NO: 4270392 - DNA, 25 bp, Homo sapien
agattatgatccaaagcccacctac

SEQ ID NO: 4270393 - DNA, 25 bp, Homo sapien
catttgggattatggtgctcaggac

SEQ ID NO: 4270394 - DNA, 25 bp, Homo sapien
agtgggtgccctaaggccactgcac

SEQ ID NO: 4270395 - DNA, 25 bp, Homo sapien
ccacggcgcttcagctcattgagca

SEQ ID NO: 4270396 - DNA, 25 bp, Homo sapien
gtgatgacctgtcgtgccccagtgc

SEQ ID NO: 4270397 - DNA, 25 bp, Homo sapien
tcaggggggagtcgtagcttctcca

SEQ ID NO: 4270398 - DNA, 25 bp, Homo sapien
caaaggcctcattgatctcgaagat

SEQ ID NO: 4270399 - DNA, 25 bp, Homo sapien
tcattgatctcgaagatgtccacgt

SEQ ID NO: 4270400 - DNA, 25 bp, Homo sapien
aagatgtccacgtcactcactgtca

SEQ ID NO: 4270401 - DNA, 25 bp, Homo sapien
gaagatgtccacgtcactcactgtc

SEQ ID NO: 4270402 - DNA, 25 bp, Homo sapien
gaagggtgagccaatcccagctgtg

SEQ ID NO: 4270403 - DNA, 25 bp, Homo sapien
ccagatactatatgaaggagccacc

SEQ ID NO: 4270404 - DNA, 25 bp, Homo sapien
taaagacctgagctgacacactggc

SEQ ID NO: 4270405 - DNA, 25 bp, Homo sapien
tgaagtatgggacactagcctgccc

SEQ ID NO: 4270406 - DNA, 25 bp, Homo sapien
gaaggcccaactcttctgccttgga

SEQ ID NO: 4270407 - DNA, 25 bp, Homo sapien
aagacctcaggaccccaaggatggg

SEQ ID NO: 4270408 - DNA, 25 bp, Homo sapien
ggtccaatgcccatgatgtcaggtg

SEQ ID NO: 4270409 - DNA, 25 bp, Homo sapien
caaagctactgggatggcataggca

SEQ ID NO: 4270410 - DNA, 25 bp, Homo sapien
aggttcccagagtacagcacccagc

SEQ ID NO: 4270411 - DNA, 25 bp, Homo sapien
ttcccagagtacagcacccagcatg

SEQ ID NO: 4270412 - DNA, 25 bp, Homo sapien
gttcccagagtacagcacccagcat

SEQ ID NO: 4270413 - DNA, 25 bp, Homo sapien
cccagagtacagcacccagcatggc

SEQ ID NO: 4270414 - DNA, 25 bp, Homo sapien
tgctggggcggataccctcatcctg

SEQ ID NO: 4270415 - DNA, 25 bp, Homo sapien
caggcttcagtttggccaggccctc

SEQ ID NO: 4270416 - DNA, 25 bp, Homo sapien
ttggtgcccttgtcatcatggaccg

SEQ ID NO: 4270417 - DNA, 25 bp, Homo sapien
cagctgtggtagaaccatctttctt

SEQ ID NO: 4270418 - DNA, 25 bp, Homo sapien
acttcagaccacttagatagactca

SEQ ID NO: 4270419 - DNA, 25 bp, Homo sapien
taaccacgaaatggtgccacttcag

SEQ ID NO: 4270420 - DNA, 25 bp, Homo sapien
tcactgcccagcagtaaccacgaaa

SEQ ID NO: 4270421 - DNA, 25 bp, Homo sapien
aacattcctccccaatcagcactca

SEQ ID NO: 4270422 - DNA, 25 bp, Homo sapien
ttctcccgtgaaatgccaaaccgct

SEQ ID NO: 4270423 - DNA, 25 bp, Homo sapien
tatcctgcttctcccgtgaaatgcc

SEQ ID NO: 4270424 - DNA, 25 bp, Homo sapien
cagggcaaaggtatcctgcttctcc

SEQ ID NO: 4270425 - DNA, 25 bp, Homo sapien
tgaaatgccaaaccgctcagccaca

SEQ ID NO: 4270426 - DNA, 25 bp, Homo sapien
tgatgactcaggatatggtacagcc

SEQ ID NO: 4270427 - DNA, 25 bp, Homo sapien
taaaggcacagatagggaagtcagc

SEQ ID NO: 4270428 - DNA, 25 bp, Homo sapien
cagcctgccctgaaagtggatataa

SEQ ID NO: 4270429 - DNA, 25 bp, Homo sapien
gctggccagatcctgagaagctcat

SEQ ID NO: 4270430 - DNA, 25 bp, Homo sapien
gcgcgaagtaatatttccagggttc

SEQ ID NO: 4270431 - DNA, 25 bp, Homo sapien
ataggaatcaggcaatctctggcct

SEQ ID NO: 4270432 - DNA, 25 bp, Homo sapien
ccttctccatcaagcgcgaagtaat

SEQ ID NO: 4270433 - DNA, 25 bp, Homo sapien
ggaatcaggcaatctctggccttct

SEQ ID NO: 4270434 - DNA, 25 bp, Homo sapien
tgtcacaagttggttaataagctcc

SEQ ID NO: 4270435 - DNA, 25 bp, Homo sapien
cacaagttggttaataagctccggc

SEQ ID NO: 4270436 - DNA, 25 bp, Homo sapien
tggttaataagctccggcagaaaaa

SEQ ID NO: 4270437 - DNA, 25 bp, Homo sapien
caagttggttaataagctccggcag

SEQ ID NO: 4270438 - DNA, 25 bp, Homo sapien
gccatgccaatgtcataagacccat

SEQ ID NO: 4270439 - DNA, 25 bp, Homo sapien
gccaatgtcataagacccatttctg

SEQ ID NO: 4270440 - DNA, 25 bp, Homo sapien
ggccatgccaatgtcataagaccca

SEQ ID NO: 4270441 - DNA, 25 bp, Homo sapien
catgccaatgtcataagacccattt

SEQ ID NO: 4270442 - DNA, 25 bp, Homo sapien
cccgacgaacactgtctattgacag

SEQ ID NO: 4270443 - DNA, 25 bp, Homo sapien
tagccccgacgaacactgtctattg

SEQ ID NO: 4270444 - DNA, 25 bp, Homo sapien
tgcctgtagccccgacgaacactgt

SEQ ID NO: 4270445 - DNA, 25 bp, Homo sapien
ctgtagccccgacgaacactgtcta

SEQ ID NO: 4270446 - DNA, 25 bp, Homo sapien
tgatcccacctagacgaagcactct

SEQ ID NO: 4270447 - DNA, 25 bp, Homo sapien
cccctcaagggatgtaaagggcagg

SEQ ID NO: 4270448 - DNA, 25 bp, Homo sapien
tgtttgggccacagggatccttctc

SEQ ID NO: 4270449 - DNA, 25 bp, Homo sapien
tgccaggctctcatggaaagcagtc

SEQ ID NO: 4270450 - DNA, 25 bp, Homo sapien
gatgctgcgatgcttataacactgt

SEQ ID NO: 4270451 - DNA, 25 bp, Homo sapien
ggatgctgcgatgcttataacactg

SEQ ID NO: 4270452 - DNA, 25 bp, Homo sapien
agggatgctgcgatgcttataacac

SEQ ID NO: 4270453 - DNA, 25 bp, Homo sapien
gctgcgatgcttataacactgtgcc

SEQ ID NO: 4270454 - DNA, 25 bp, Homo sapien
cagaaactgggcgattcgggccatg

SEQ ID NO: 4270455 - DNA, 25 bp, Homo sapien
gattcgggccatgattgccccggcc

SEQ ID NO: 4270456 - DNA, 25 bp, Homo sapien
ggcgattcgggccatgattgccccg

SEQ ID NO: 4270457 - DNA, 25 bp, Homo sapien
aactgggcgattcgggccatgattg

SEQ ID NO: 4270458 - DNA, 25 bp, Homo sapien
tcattcagtgccaggcggtggtgtt

SEQ ID NO: 4270459 - DNA, 25 bp, Homo sapien
tgagaaccgcggtcatgactgccga

SEQ ID NO: 4270460 - DNA, 25 bp, Homo sapien
agctgttccggcctcagattcacgt

SEQ ID NO: 4270461 - DNA, 25 bp, Homo sapien
atgactgccgagagaagctcgtcgg

SEQ ID NO: 4270462 - DNA, 25 bp, Homo sapien
tcacgtccttgagaaccgcggtcat

SEQ ID NO: 4270463 - DNA, 25 bp, Homo sapien
gtcttcccacactcggcgcccagac

SEQ ID NO: 4270464 - DNA, 25 bp, Homo sapien
actcggcgcccagaccctcgggcct

SEQ ID NO: 4270465 - DNA, 25 bp, Homo sapien
gcccgcgccggcgtcttcccacact

SEQ ID NO: 4270466 - DNA, 25 bp, Homo sapien
cgccggcgtcttcccacactcggcg

SEQ ID NO: 4270467 - DNA, 25 bp, Homo sapien
tgcggggcaccgctcaggcaaggcg

SEQ ID NO: 4270468 - DNA, 25 bp, Homo sapien
accaccaccacgtccgcggccgagg

SEQ ID NO: 4270469 - DNA, 25 bp, Homo sapien
cggcccgcccggcagatggccgtgc

SEQ ID NO: 4270470 - DNA, 25 bp, Homo sapien
ggcagatggccgtgcgccgcccgtg

SEQ ID NO: 4270471 - DNA, 25 bp, Homo sapien
agccggaatcggccggacccctcag

SEQ ID NO: 4270472 - DNA, 25 bp, Homo sapien
cagccggaatcggccggacccctca

SEQ ID NO: 4270473 - DNA, 25 bp, Homo sapien
gagttaacagacagccgtccgcaca

SEQ ID NO: 4270474 - DNA, 25 bp, Homo sapien
agaccagccaccagtccgggaactg

SEQ ID NO: 4270475 - DNA, 25 bp, Homo sapien
tgcgcaggtcaaccctgcagaccag

SEQ ID NO: 4270476 - DNA, 25 bp, Homo sapien
cagtccgggaactgaccgcggagtt

SEQ ID NO: 4270477 - DNA, 25 bp, Homo sapien
caaggcagagaggtaccatgtatcc

SEQ ID NO: 4270478 - DNA, 25 bp, Homo sapien
tgcgacacccttgacacttagtaga

SEQ ID NO: 4270479 - DNA, 25 bp, Homo sapien
cagggccatgtcttcacctgagacc

SEQ ID NO: 4270480 - DNA, 25 bp, Homo sapien
ttagtgcccatttcccgtgctaggc

SEQ ID NO: 4270481 - DNA, 25 bp, Homo sapien
cacctggcatgagaagggatcctgg

SEQ ID NO: 4270482 - DNA, 25 bp, Homo sapien
taatgatgtgagcagggagccttcc

SEQ ID NO: 4270483 - DNA, 25 bp, Homo sapien
tgggcacatgggcacatacagactc

SEQ ID NO: 4270484 - DNA, 25 bp, Homo sapien
gaacagctaggtgggaaagtcccat

SEQ ID NO: 4270485 - DNA, 25 bp, Homo sapien
catgttttgtacgcattaaaataat

SEQ ID NO: 4270486 - DNA, 25 bp, Homo sapien
ctacatgttttgtacgcattaaaat

SEQ ID NO: 4270487 - DNA, 25 bp, Homo sapien
gagaaaagccgatatttgccattct

SEQ ID NO: 4270488 - DNA, 25 bp, Homo sapien
agaaaagccgatatttgccattctt

SEQ ID NO: 4270489 - DNA, 25 bp, Homo sapien
gggaggcacaggttctactttgcta

SEQ ID NO: 4270490 - DNA, 25 bp, Homo sapien
tccagggacgttgcatcaattttca

SEQ ID NO: 4270491 - DNA, 25 bp, Homo sapien
tattttgattgtataccaggagtgg

SEQ ID NO: 4270492 - DNA, 25 bp, Homo sapien
tactttgctaggtaataccaaactg

SEQ ID NO: 4270493 - DNA, 25 bp, Homo sapien
cagagttaggttggagtcagatgac

SEQ ID NO: 4270494 - DNA, 25 bp, Homo sapien
ggtggaaattggctagatgctcacc

SEQ ID NO: 4270495 - DNA, 25 bp, Homo sapien
gtggtggaaattggctagatgctca

SEQ ID NO: 4270496 - DNA, 25 bp, Homo sapien
ttgtggtggaaattggctagatgct

SEQ ID NO: 4270497 - DNA, 25 bp, Homo sapien
catcacaaagggcttctcattgtct

SEQ ID NO: 4270498 - DNA, 25 bp, Homo sapien
tcattaggtggacgtggatcatcac

SEQ ID NO: 4270499 - DNA, 25 bp, Homo sapien
cattaggtggacgtggatcatcaca

SEQ ID NO: 4270500 - DNA, 25 bp, Homo sapien
ggatcatcacaaagggcttctcatt

SEQ ID NO: 4270501 - DNA, 25 bp, Homo sapien
gaacatgggccaattaacatcttga

SEQ ID NO: 4270502 - DNA, 25 bp, Homo sapien
taacctctatcaggctacatggaga

SEQ ID NO: 4270503 - DNA, 25 bp, Homo sapien
agaaactgagtctgctttggtcacc

SEQ ID NO: 4270504 - DNA, 25 bp, Homo sapien
gaacagaatccattggtgaccctgg

SEQ ID NO: 4270505 - DNA, 25 bp, Homo sapien
tatcctagttggcagtggtccacac

SEQ ID NO: 4270506 - DNA, 25 bp, Homo sapien
taaagctgcgaatggacagaacccg

SEQ ID NO: 4270507 - DNA, 25 bp, Homo sapien
tgtagagcctttcgcacgtctcgag

SEQ ID NO: 4270508 - DNA, 25 bp, Homo sapien
caagcgttagagagaacgtccgcct

SEQ ID NO: 4270509 - DNA, 25 bp, Homo sapien
cacctcaggctgcaatatgaagaat

SEQ ID NO: 4270510 - DNA, 25 bp, Homo sapien
aacaggagagcgagtgatgattcat

SEQ ID NO: 4270511 - DNA, 25 bp, Homo sapien
gcaaaaccatcaggctgcttgaata

SEQ ID NO: 4270512 - DNA, 25 bp, Homo sapien
tggagttgccatccgctcagatggg

SEQ ID NO: 4270513 - DNA, 25 bp, Homo sapien
gctttgctgctgctaagggcagatt

SEQ ID NO: 4270514 - DNA, 25 bp, Homo sapien
tggcttgacattgccgcacgtgtgg

SEQ ID NO: 4270515 - DNA, 25 bp, Homo sapien
acctggctggcgctgtggagaatct

SEQ ID NO: 4270516 - DNA, 25 bp, Homo sapien
cgctgtggagaatctggcctgctac

SEQ ID NO: 4270517 - DNA, 25 bp, Homo sapien
aggttttaatgctgacactgcagaa

SEQ ID NO: 4270518 - DNA, 25 bp, Homo sapien
gagtcatcacaagtttatagtatat

SEQ ID NO: 4270519 - DNA, 25 bp, Homo sapien
acactgcagaacgatcctccttctt

SEQ ID NO: 4270520 - DNA, 25 bp, Homo sapien
gaaaaatcttgaccacaatagttaa

SEQ ID NO: 4270521 - DNA, 25 bp, Homo sapien
tttcctctccagaataaagaatttc

SEQ ID NO: 4270522 - DNA, 25 bp, Homo sapien
cctctccagaataaagaatttcttc

SEQ ID NO: 4270523 - DNA, 25 bp, Homo sapien
atttcttcaagaaaaaacattgcag

SEQ ID NO: 4270524 - DNA, 25 bp, Homo sapien
gaatttcttcaagaaaaaacattgc

SEQ ID NO: 4270525 - DNA, 25 bp, Homo sapien
gcttgaggagtattttcctgcctct

SEQ ID NO: 4270526 - DNA, 25 bp, Homo sapien
gcctctccacatctagtaatctgat

SEQ ID NO: 4270527 - DNA, 25 bp, Homo sapien
tcgaagttgtctcacagcccactgt

SEQ ID NO: 4270528 - DNA, 25 bp, Homo sapien
tgctaatcccatccagttcctgttt

SEQ ID NO: 4270529 - DNA, 25 bp, Homo sapien
tagccttaacttcagctggtgcaaa

SEQ ID NO: 4270530 - DNA, 25 bp, Homo sapien
tacagcaataaaggagacacacact

SEQ ID NO: 4270531 - DNA, 25 bp, Homo sapien
tatgagtgggatactcaatctggcc

SEQ ID NO: 4270532 - DNA, 25 bp, Homo sapien
aagtgaaaccacatgtgccgtgacc

SEQ ID NO: 4270533 - DNA, 25 bp, Homo sapien
aggatccccttgtccctggagtagg

SEQ ID NO: 4270534 - DNA, 25 bp, Homo sapien
tctgcatgatgtgtggtagactccc

SEQ ID NO: 4270535 - DNA, 25 bp, Homo sapien
gagatgatcagacaccggagttcaa

SEQ ID NO: 4270536 - DNA, 25 bp, Homo sapien
ggagttcaacgtcccagcagtcttg

SEQ ID NO: 4270537 - DNA, 25 bp, Homo sapien
cagtggtctgtaagactgctctcag

SEQ ID NO: 4270538 - DNA, 25 bp, Homo sapien
gctctcaggctctgcaattcaccag

SEQ ID NO: 4270539 - DNA, 25 bp, Homo sapien
tcaaccagcctcctatgtatatgga

SEQ ID NO: 4270540 - DNA, 25 bp, Homo sapien
tgtgatacaatcaatgctgcagtgt

SEQ ID NO: 4270541 - DNA, 25 bp, Homo sapien
tcatccttgtgcagaggtcatgcta

SEQ ID NO: 4270542 - DNA, 25 bp, Homo sapien
atcttctctatatcgttccaatttt

SEQ ID NO: 4270543 - DNA, 25 bp, Homo sapien
atggaacactttacaaatttgtgtg

SEQ ID NO: 4270544 - DNA, 25 bp, Homo sapien
tagtatatgtgctaccgaagccagc

SEQ ID NO: 4270545 - DNA, 25 bp, Homo sapien
gaatagctctggttcgactcctcat

SEQ ID NO: 4270546 - DNA, 25 bp, Homo sapien
agagaatagctctggttcgactcct

SEQ ID NO: 4270547 - DNA, 25 bp, Homo sapien
gctctggttcgactcctcatagcct

SEQ ID NO: 4270548 - DNA, 25 bp, Homo sapien
gaagatcatgggcttgcagagaata

SEQ ID NO: 4270549 - DNA, 25 bp, Homo sapien
acagggtacagaccttcttgccaag

SEQ ID NO: 4270550 - DNA, 25 bp, Homo sapien
agggtacagaccttcttgccaagca

SEQ ID NO: 4270551 - DNA, 25 bp, Homo sapien
agaccttcttgccaagcacttcttg

SEQ ID NO: 4270552 - DNA, 25 bp, Homo sapien
accttcttgccaagcacttcttgca

SEQ ID NO: 4270553 - DNA, 25 bp, Homo sapien
tgaaggtcaccgtgtctttggccag

SEQ ID NO: 4270554 - DNA, 25 bp, Homo sapien
gaccttgaaggtcaccgtgtctttg

SEQ ID NO: 4270555 - DNA, 25 bp, Homo sapien
ccactatttggagagaccttgaagg

SEQ ID NO: 4270556 - DNA, 25 bp, Homo sapien
agcagcccactatttggagagacct

SEQ ID NO: 4270557 - DNA, 25 bp, Homo sapien
ttcctggggcgtcatcttctctcca

SEQ ID NO: 4270558 - DNA, 25 bp, Homo sapien
ccttcctggggcgtcatcttctctc

SEQ ID NO: 4270559 - DNA, 25 bp, Homo sapien
tcctggggcgtcatcttctctccag

SEQ ID NO: 4270560 - DNA, 25 bp, Homo sapien
ctggggcgtcatcttctctccagtt

SEQ ID NO: 4270561 - DNA, 25 bp, Homo sapien
tgctcaggtgcattaggtagacctc

SEQ ID NO: 4270562 - DNA, 25 bp, Homo sapien
gtgcattaggtagacctcccagact

SEQ ID NO: 4270563 - DNA, 25 bp, Homo sapien
agctgctcaggtgcattaggtagac

SEQ ID NO: 4270564 - DNA, 25 bp, Homo sapien
tcaggtgcattaggtagacctccca

SEQ ID NO: 4270565 - DNA, 25 bp, Homo sapien
ggtcctaaagtccacccagctggtg

SEQ ID NO: 4270566 - DNA, 25 bp, Homo sapien
taaagtccacccagctggtggagag

SEQ ID NO: 4270567 - DNA, 25 bp, Homo sapien
gcaggtcctaaagtccacccagctg

SEQ ID NO: 4270568 - DNA, 25 bp, Homo sapien
aaagcaggtcctaaagtccacccag

SEQ ID NO: 4270569 - DNA, 25 bp, Homo sapien
gcagctcaggcacggtcactatggc

SEQ ID NO: 4270570 - DNA, 25 bp, Homo sapien
aggcacggtcactatggcctgcagg

SEQ ID NO: 4270571 - DNA, 25 bp, Homo sapien
gctcaggcacggtcactatggcctg

SEQ ID NO: 4270572 - DNA, 25 bp, Homo sapien
gcacggtcactatggcctgcaggag

SEQ ID NO: 4270573 - DNA, 25 bp, Homo sapien
tctctctccactcgcgctctgctga

SEQ ID NO: 4270574 - DNA, 25 bp, Homo sapien
tccactcgcgctctgctgaatgtcc

SEQ ID NO: 4270575 - DNA, 25 bp, Homo sapien
cactcgcgctctgctgaatgtccac

SEQ ID NO: 4270576 - DNA, 25 bp, Homo sapien
ctctccactcgcgctctgctgaatg

SEQ ID NO: 4270577 - DNA, 25 bp, Homo sapien
gcgagaaggatacattcacctgagc

SEQ ID NO: 4270578 - DNA, 25 bp, Homo sapien
gagcgagaaggatacattcacctga

SEQ ID NO: 4270579 - DNA, 25 bp, Homo sapien
ggagagcgagaaggatacattcacc

SEQ ID NO: 4270580 - DNA, 25 bp, Homo sapien
gagagcgagaaggatacattcacct

SEQ ID NO: 4270581 - DNA, 25 bp, Homo sapien
atgtaaatggactaaatgctccaat

SEQ ID NO: 4270582 - DNA, 25 bp, Homo sapien
aaatgtaaatggactaaatgctcca

SEQ ID NO: 4270583 - DNA, 25 bp, Homo sapien
tgtaaatggactaaatgctccaatt

SEQ ID NO: 4270584 - DNA, 25 bp, Homo sapien
ttaaatgtaaatggactaaatgctc

SEQ ID NO: 4270585 - DNA, 25 bp, Homo sapien
gggccgcaccagtatccaagaggaa

SEQ ID NO: 4270586 - DNA, 25 bp, Homo sapien
tccctcaatagttaaatgtacctgg

SEQ ID NO: 4270587 - DNA, 25 bp, Homo sapien
gccgaccagggcaggagattaacac

SEQ ID NO: 4270588 - DNA, 25 bp, Homo sapien
ttggattgggcgggcatttttgccc

SEQ ID NO: 4270589 - DNA, 25 bp, Homo sapien
cagtttttggtcacccgatgtctga

SEQ ID NO: 4270590 - DNA, 25 bp, Homo sapien
gcaatcttgtagtcgttcaaaagaa

SEQ ID NO: 4270591 - DNA, 25 bp, Homo sapien
atccattatcacctttctcaaccag

SEQ ID NO: 4270592 - DNA, 25 bp, Homo sapien
tagaactcgtttttcaaatatccat

SEQ ID NO: 4270593 - DNA, 25 bp, Homo sapien
gcaagaatgaattcagaggaccagt

SEQ ID NO: 4270594 - DNA, 25 bp, Homo sapien
gttcactgctattgcaacagtccag

SEQ ID NO: 4270595 - DNA, 25 bp, Homo sapien
gaggaccagttaagctcccttctgg

SEQ ID NO: 4270596 - DNA, 25 bp, Homo sapien
caagtattgttaccgaaacaccagg

SEQ ID NO: 4270597 - DNA, 25 bp, Homo sapien
tgcagattgaagctcagggccgctg

SEQ ID NO: 4270598 - DNA, 25 bp, Homo sapien
acacagatatttgggcagcttggac

SEQ ID NO: 4270599 - DNA, 25 bp, Homo sapien
aatctgagacagagaacgatggccc

SEQ ID NO: 4270600 - DNA, 25 bp, Homo sapien
aatgttatctgaggatctcggagcc

SEQ ID NO: 4270601 - DNA, 25 bp, Homo sapien
tgtgcagtcatctgcgggattctgg

SEQ ID NO: 4270602 - DNA, 25 bp, Homo sapien
gggcacgatcttgtctgtgcagtca

SEQ ID NO: 4270603 - DNA, 25 bp, Homo sapien
ctcagggtcggagttcgggctacgc

SEQ ID NO: 4270604 - DNA, 25 bp, Homo sapien
attctggttcctagaggcgcccctg

SEQ ID NO: 4270605 - DNA, 25 bp, Homo sapien
ttcttcataagacacgatgctgtaa

SEQ ID NO: 4270606 - DNA, 25 bp, Homo sapien
gctgtaaatacccttaatggacgaa

SEQ ID NO: 4270607 - DNA, 25 bp, Homo sapien
cacaggttaggaatacattcttcat

SEQ ID NO: 4270608 - DNA, 25 bp, Homo sapien
tgtttcctcttggagcagttcaggg

SEQ ID NO: 4270609 - DNA, 25 bp, Homo sapien
taaacaggcccagtaattcagttga

SEQ ID NO: 4270610 - DNA, 25 bp, Homo sapien
gcaaccagcagtctacctatgaatg

SEQ ID NO: 4270611 - DNA, 25 bp, Homo sapien
tcatcctgggcgaacagccaaaaag

SEQ ID NO: 4270612 - DNA, 25 bp, Homo sapien
gatggcacacctttggagagatggc

SEQ ID NO: 4270613 - DNA, 25 bp, Homo sapien
gagtaatccaccagactgaattatc

SEQ ID NO: 4270614 - DNA, 25 bp, Homo sapien
tatctaagatcacattatccaggtt

SEQ ID NO: 4270615 - DNA, 25 bp, Homo sapien
gagaatctggtggtttgagtaatcc

SEQ ID NO: 4270616 - DNA, 25 bp, Homo sapien
gcagaattacccagttaagtaattg

SEQ ID NO: 4270617 - DNA, 25 bp, Homo sapien
aacacatacggttaaagaacacagc

SEQ ID NO: 4270618 - DNA, 25 bp, Homo sapien
aaaatctgcttatgaactggacatg

SEQ ID NO: 4270619 - DNA, 25 bp, Homo sapien
tcttaatggtagtgtcaaaggccaa

SEQ ID NO: 4270620 - DNA, 25 bp, Homo sapien
gggttaccgcagagtagaaatatat

SEQ ID NO: 4270621 - DNA, 25 bp, Homo sapien
ttagttgtaaacaccactgcactta

SEQ ID NO: 4270622 - DNA, 25 bp, Homo sapien
gaagtatgtaactggttgtgaacaa

SEQ ID NO: 4270623 - DNA, 25 bp, Homo sapien
aaacaccactgcacttataccagcc

SEQ ID NO: 4270624 - DNA, 25 bp, Homo sapien
aaagaagtatgtaactggttgtgaa

SEQ ID NO: 4270625 - DNA, 25 bp, Homo sapien
cagtggtgtccatcatgctggtgga

SEQ ID NO: 4270626 - DNA, 25 bp, Homo sapien
tcctcggtgaggaactcgaagaagt

SEQ ID NO: 4270627 - DNA, 25 bp, Homo sapien
aaagttatgaccatccccttcttgc

SEQ ID NO: 4270628 - DNA, 25 bp, Homo sapien
gctgtggctgcggttctcctcagtg

SEQ ID NO: 4270629 - DNA, 25 bp, Homo sapien
gacctactcagcaccatggtcaggc

SEQ ID NO: 4270630 - DNA, 25 bp, Homo sapien
tggtcaggcccgctacacccatcat

SEQ ID NO: 4270631 - DNA, 25 bp, Homo sapien
cagtggacctactcagcaccatggt

SEQ ID NO: 4270632 - DNA, 25 bp, Homo sapien
ctcagtggacctactcagcaccatg

SEQ ID NO: 4270633 - DNA, 25 bp, Homo sapien
tcccatccttgggtttgcccaggat

SEQ ID NO: 4270634 - DNA, 25 bp, Homo sapien
atgctgcccttgttctgtgctccct

SEQ ID NO: 4270635 - DNA, 25 bp, Homo sapien
gatggaggctgtggcgcagagccat

SEQ ID NO: 4270636 - DNA, 25 bp, Homo sapien
ggcccatgctcccatccttgggttt

SEQ ID NO: 4270637 - DNA, 25 bp, Homo sapien
ggcaagttcgtgtctagctctagga

SEQ ID NO: 4270638 - DNA, 25 bp, Homo sapien
tcgtgtctagctctaggaagggcat

SEQ ID NO: 4270639 - DNA, 25 bp, Homo sapien
agttcgtgtctagctctaggaaggg

SEQ ID NO: 4270640 - DNA, 25 bp, Homo sapien
gcaggcaagttcgtgtctagctcta

SEQ ID NO: 4270641 - DNA, 25 bp, Homo sapien
tgtggcttgtgcggatagtgcagta

SEQ ID NO: 4270642 - DNA, 25 bp, Homo sapien
aagtgtggcttgtgcggatagtgca

SEQ ID NO: 4270643 - DNA, 25 bp, Homo sapien
gtggcttgtgcggatagtgcagtac

SEQ ID NO: 4270644 - DNA, 25 bp, Homo sapien
agtgtggcttgtgcggatagtgcag

SEQ ID NO: 4270645 - DNA, 25 bp, Homo sapien
tcatggaactgcttgacggctggcc

SEQ ID NO: 4270646 - DNA, 25 bp, Homo sapien
agtcatggaactgcttgacggctgg

SEQ ID NO: 4270647 - DNA, 25 bp, Homo sapien
cagcaggaagttgatcttggagtca

SEQ ID NO: 4270648 - DNA, 25 bp, Homo sapien
ggagtcatggaactgcttgacggct

SEQ ID NO: 4270649 - DNA, 25 bp, Homo sapien
aggtccccatattcccggcacatgt

SEQ ID NO: 4270650 - DNA, 25 bp, Homo sapien
ggtcaggtccccatattcccggcac

SEQ ID NO: 4270651 - DNA, 25 bp, Homo sapien
tcaggtccccatattcccggcacat

SEQ ID NO: 4270652 - DNA, 25 bp, Homo sapien
ggtccccatattcccggcacatgtt

SEQ ID NO: 4270653 - DNA, 25 bp, Homo sapien
ccacagtagcaatctctcctgaaga

SEQ ID NO: 4270654 - DNA, 25 bp, Homo sapien
gcccacagtagcaatctctcctgaa

SEQ ID NO: 4270655 - DNA, 25 bp, Homo sapien
ctgcccacagtagcaatctctcctg

SEQ ID NO: 4270656 - DNA, 25 bp, Homo sapien
cacagtagcaatctctcctgaagac

SEQ ID NO: 4270657 - DNA, 25 bp, Homo sapien
tgagataccaagtaccaaaagcagg

SEQ ID NO: 4270658 - DNA, 25 bp, Homo sapien
ctgagataccaagtaccaaaagcag

SEQ ID NO: 4270659 - DNA, 25 bp, Homo sapien
gagataccaagtaccaaaagcagga

SEQ ID NO: 4270660 - DNA, 25 bp, Homo sapien
ttcatggcgtcctgtctgccctcac

SEQ ID NO: 4270661 - DNA, 25 bp, Homo sapien
caaaaggacagatcaatgaagtttc

SEQ ID NO: 4270662 - DNA, 25 bp, Homo sapien
cacctgcaaaaggacagatcaatga

SEQ ID NO: 4270663 - DNA, 25 bp, Homo sapien
ggacagatcaatgaagtttcttagg

SEQ ID NO: 4270664 - DNA, 25 bp, Homo sapien
cttctgtatcctcactatagttcat

SEQ ID NO: 4270665 - DNA, 25 bp, Homo sapien
tccttccccgtcctggcacacttcc

SEQ ID NO: 4270666 - DNA, 25 bp, Homo sapien
gtcctggcacacttccaagtgcctt

SEQ ID NO: 4270667 - DNA, 25 bp, Homo sapien
tccccgtcctggcacacttccaagt

SEQ ID NO: 4270668 - DNA, 25 bp, Homo sapien
cttagcatagtgtgaggctaactgc

SEQ ID NO: 4270669 - DNA, 25 bp, Homo sapien
tctggagactctgccatgctgacat

SEQ ID NO: 4270670 - DNA, 25 bp, Homo sapien
gggtaaggctgtccttagcatagtg

SEQ ID NO: 4270671 - DNA, 25 bp, Homo sapien
gaggctaactgctgggagctctgga

SEQ ID NO: 4270672 - DNA, 25 bp, Homo sapien
tgcccaagggaaagttcaaacagct

SEQ ID NO: 4270673 - DNA, 25 bp, Homo sapien
cctcaacaggtattgggaacttgct

SEQ ID NO: 4270674 - DNA, 25 bp, Homo sapien
cacagataccagagacgccagtgtc

SEQ ID NO: 4270675 - DNA, 25 bp, Homo sapien
tccattttgcttgccgagggctctg

SEQ ID NO: 4270676 - DNA, 25 bp, Homo sapien
cacatccggggaagggggctccact

SEQ ID NO: 4270677 - DNA, 25 bp, Homo sapien
tccggggaagggggctccactctga

SEQ ID NO: 4270678 - DNA, 25 bp, Homo sapien
cagcccacatccggggaagggggct

SEQ ID NO: 4270679 - DNA, 25 bp, Homo sapien
tcagcccacatccggggaagggggc

SEQ ID NO: 4270680 - DNA, 25 bp, Homo sapien
gatggggcttttctctccggcagca

SEQ ID NO: 4270681 - DNA, 25 bp, Homo sapien
cttgcatgcctttctggaatccgag

SEQ ID NO: 4270682 - DNA, 25 bp, Homo sapien
cgagccggcctgtctgtccacagag

SEQ ID NO: 4270683 - DNA, 25 bp, Homo sapien
tttctggaatccgagccggcctgtc

SEQ ID NO: 4270684 - DNA, 25 bp, Homo sapien
taagggttgggtctagctcacctcc

SEQ ID NO: 4270685 - DNA, 25 bp, Homo sapien
acctgtctcaaagctcccgggctgt

SEQ ID NO: 4270686 - DNA, 25 bp, Homo sapien
tgacagccaggctaaaagctaaggg

SEQ ID NO: 4270687 - DNA, 25 bp, Homo sapien
gagaagtgctcgattagttcagaca

SEQ ID NO: 4270688 - DNA, 25 bp, Homo sapien
gtaggttaggagcagccagcccaga

SEQ ID NO: 4270689 - DNA, 25 bp, Homo sapien
tcggcgaggtaggttaggagcagcc

SEQ ID NO: 4270690 - DNA, 25 bp, Homo sapien
ctgccacaaatgtccagccctccga

SEQ ID NO: 4270691 - DNA, 25 bp, Homo sapien
tccgacagctcggcgaggtaggtta

SEQ ID NO: 4270692 - DNA, 25 bp, Homo sapien
aaagaggtcctctgtgtgggtgcca

SEQ ID NO: 4270693 - DNA, 25 bp, Homo sapien
agaactctgcctggttgatccgcgg

SEQ ID NO: 4270694 - DNA, 25 bp, Homo sapien
tttatatttcgcctcagcagctggg

SEQ ID NO: 4270695 - DNA, 25 bp, Homo sapien
cagaaaactcctccgcgtatggtcc

SEQ ID NO: 4270696 - DNA, 25 bp, Homo sapien
gaagttctcactcatcacgtaggcg

SEQ ID NO: 4270697 - DNA, 25 bp, Homo sapien
tcagacagggcatcggcaaagtcag

SEQ ID NO: 4270698 - DNA, 25 bp, Homo sapien
tcggcgagatcttcactgtggctgt

SEQ ID NO: 4270699 - DNA, 25 bp, Homo sapien
tatcgctggtggctctagtgacact

SEQ ID NO: 4270700 - DNA, 25 bp, Homo sapien
aaagagcaggttgatcttggccaag

SEQ ID NO: 4270701 - DNA, 25 bp, Homo sapien
tacactcgcctgtgaagatggccac

SEQ ID NO: 4270702 - DNA, 25 bp, Homo sapien
ggtcaccatattcaagcagatcaga

SEQ ID NO: 4270703 - DNA, 25 bp, Homo sapien
gcagggcagccagcttgacaataca

SEQ ID NO: 4270704 - DNA, 25 bp, Homo sapien
ccgtgggatgggcttctggggcttc

SEQ ID NO: 4270705 - DNA, 25 bp, Homo sapien
cttcttcatggcattgtagtacttc

SEQ ID NO: 4270706 - DNA, 25 bp, Homo sapien
cttcatggcattgtagtacttcttc

SEQ ID NO: 4270707 - DNA, 25 bp, Homo sapien
gggcttcttggagcccagcttcttc

SEQ ID NO: 4270708 - DNA, 25 bp, Homo sapien
tagaggttgtattcccactgaggct

SEQ ID NO: 4270709 - DNA, 25 bp, Homo sapien
gaggttgtattcccactgaggctgc

SEQ ID NO: 4270710 - DNA, 25 bp, Homo sapien
agaggttgtattcccactgaggctg

SEQ ID NO: 4270711 - DNA, 25 bp, Homo sapien
gtagaggttgtattcccactgaggc

SEQ ID NO: 4270712 - DNA, 25 bp, Homo sapien
cctggagtccacagctgcatacata

SEQ ID NO: 4270713 - DNA, 25 bp, Homo sapien
gcatacataatgtccatccagcctt

SEQ ID NO: 4270714 - DNA, 25 bp, Homo sapien
cccctggagtccacagctgcataca

SEQ ID NO: 4270715 - DNA, 25 bp, Homo sapien
cataatgtccatccagcctttaaat

SEQ ID NO: 4270716 - DNA, 25 bp, Homo sapien
atggtgtagttcaaaggcaagtctc

SEQ ID NO: 4270717 - DNA, 25 bp, Homo sapien
tgtctggttgatgcacctcccaaac

SEQ ID NO: 4270718 - DNA, 25 bp, Homo sapien
cactggctcttgttgttcacgatgg

SEQ ID NO: 4270719 - DNA, 25 bp, Homo sapien
ggtccagtacaattctccggtcaag

SEQ ID NO: 4270720 - DNA, 25 bp, Homo sapien
atggcgcccaccagggcattgacca

SEQ ID NO: 4270721 - DNA, 25 bp, Homo sapien
gatggacgggatggcgcccaccagg

SEQ ID NO: 4270722 - DNA, 25 bp, Homo sapien
acgggatggcgcccaccagggcatt

SEQ ID NO: 4270723 - DNA, 25 bp, Homo sapien
cgcccaccagggcattgaccaccac

SEQ ID NO: 4270724 - DNA, 25 bp, Homo sapien
cactggccatcacagacagagggct

SEQ ID NO: 4270725 - DNA, 25 bp, Homo sapien
cctcccgaccacagccccactggcc

SEQ ID NO: 4270726 - DNA, 25 bp, Homo sapien
cccactggccatcacagacagaggg

SEQ ID NO: 4270727 - DNA, 25 bp, Homo sapien
gccatcacagacagagggctggcag

SEQ ID NO: 4270728 - DNA, 25 bp, Homo sapien
tcaaatcgtgacagagctctcagag

SEQ ID NO: 4270729 - DNA, 25 bp, Homo sapien
cgcagcgtccgcagtgacttgatgg

SEQ ID NO: 4270730 - DNA, 25 bp, Homo sapien
cctcatgccctcaaatcgtgacaga

SEQ ID NO: 4270731 - DNA, 25 bp, Homo sapien
agctctcagaggacggagtgcacgc

SEQ ID NO: 4270732 - DNA, 25 bp, Homo sapien
tgttcccttcgggtgcccacactca

SEQ ID NO: 4270733 - DNA, 25 bp, Homo sapien
ctgttcccttcgggtgcccacactc

SEQ ID NO: 4270734 - DNA, 25 bp, Homo sapien
cctgttcccttcgggtgcccacact

SEQ ID NO: 4270735 - DNA, 25 bp, Homo sapien
gttcccttcgggtgcccacactcac

SEQ ID NO: 4270736 - DNA, 25 bp, Homo sapien
gctcctctaggtagatgtcctcgaa

SEQ ID NO: 4270737 - DNA, 25 bp, Homo sapien
tgtcggcatactcaagcagaacctt

SEQ ID NO: 4270738 - DNA, 25 bp, Homo sapien
gcagaaccttgatggtcttccgctc

SEQ ID NO: 4270739 - DNA, 25 bp, Homo sapien
caggcattggtgaagtacttcttga

SEQ ID NO: 4270740 - DNA, 25 bp, Homo sapien
ccagacaaggtggacatgaagcctg

SEQ ID NO: 4270741 - DNA, 25 bp, Homo sapien
gccagacaaggtggacatgaagcct

SEQ ID NO: 4270742 - DNA, 25 bp, Homo sapien
ggccagacaaggtggacatgaagcc

SEQ ID NO: 4270743 - DNA, 25 bp, Homo sapien
tgggccttcctgtccgacttcaggg

SEQ ID NO: 4270744 - DNA, 25 bp, Homo sapien
ttttcctaatatggtactattttca

SEQ ID NO: 4270745 - DNA, 25 bp, Homo sapien
tatatttctagatcctatctgcatg

SEQ ID NO: 4270746 - DNA, 25 bp, Homo sapien
tgcatcagtattcagaagtatggag

SEQ ID NO: 4270747 - DNA, 25 bp, Homo sapien
catttgtcatatgatgtactcaatc

SEQ ID NO: 4270748 - DNA, 25 bp, Homo sapien
gattcaccagatgcttgccaaaact

SEQ ID NO: 4270749 - DNA, 25 bp, Homo sapien
cccagacgaaatggctctggctgcc

SEQ ID NO: 4270750 - DNA, 25 bp, Homo sapien
attagattcaccagatgcttgccaa

SEQ ID NO: 4270751 - DNA, 25 bp, Homo sapien
tccacagcccagacgaaatggctct

SEQ ID NO: 4270752 - DNA, 25 bp, Homo sapien
tccagccgtccctgccacaaccctg

SEQ ID NO: 4270753 - DNA, 25 bp, Homo sapien
cctgccacaaccctgcatccccagg

SEQ ID NO: 4270754 - DNA, 25 bp, Homo sapien
agctggagacctcctttccctgccc

SEQ ID NO: 4270755 - DNA, 25 bp, Homo sapien
acaaccctgcatccccaggagggta

SEQ ID NO: 4270756 - DNA, 25 bp, Homo sapien
agcgctccactgctgagtaggatca

SEQ ID NO: 4270757 - DNA, 25 bp, Homo sapien
gatgaatgtctcgaaccagctgtgc

SEQ ID NO: 4270758 - DNA, 25 bp, Homo sapien
tgtggtagcaggtcttgcgcaaccg

SEQ ID NO: 4270759 - DNA, 25 bp, Homo sapien
gctgtgctccacgatgtggtagcag

SEQ ID NO: 4270760 - DNA, 25 bp, Homo sapien
gagctcagcggtgttggtcatgtct

SEQ ID NO: 4270761 - DNA, 25 bp, Homo sapien
ttcagtgaagcagtcctctgggtcc

SEQ ID NO: 4270762 - DNA, 25 bp, Homo sapien
tggccgaggtcagggatctgctcca

SEQ ID NO: 4270763 - DNA, 25 bp, Homo sapien
cttcagtgaagcagtcctctgggtc

SEQ ID NO: 4270764 - DNA, 25 bp, Homo sapien
ctggggttccgctttccactgctgc

SEQ ID NO: 4270765 - DNA, 25 bp, Homo sapien
tcctggaatccggaggggcctctgg

SEQ ID NO: 4270766 - DNA, 25 bp, Homo sapien
gcctctgggccaccggacacaggct

SEQ ID NO: 4270767 - DNA, 25 bp, Homo sapien
tgctgccgccagtcggcctgagatg

SEQ ID NO: 4270768 - DNA, 25 bp, Homo sapien
ctcaaaccgtgtttccttgcgggtg

SEQ ID NO: 4270769 - DNA, 25 bp, Homo sapien
ggcctggttgctcgccttcctcaaa

SEQ ID NO: 4270770 - DNA, 25 bp, Homo sapien
tctgtgtctgactcggccacagcga

SEQ ID NO: 4270771 - DNA, 25 bp, Homo sapien
aatcccaggtggtccgcttgacaaa

SEQ ID NO: 4270772 - DNA, 25 bp, Homo sapien
ctgaggcccaggtctgccacacttt

SEQ ID NO: 4270773 - DNA, 25 bp, Homo sapien
acactttccaggtgagggacgctgg

SEQ ID NO: 4270774 - DNA, 25 bp, Homo sapien
gacagggcagagaaaggtgcaatag

SEQ ID NO: 4270775 - DNA, 25 bp, Homo sapien
ttccaggtgagggacgctgggacag

SEQ ID NO: 4270776 - DNA, 25 bp, Homo sapien
gatgatggctagcaccagtgtcagg

SEQ ID NO: 4270777 - DNA, 25 bp, Homo sapien
gaccagcaggcataatgactgcccc

SEQ ID NO: 4270778 - DNA, 25 bp, Homo sapien
tcagctccgagtagttcttgccaaa

SEQ ID NO: 4270779 - DNA, 25 bp, Homo sapien
caaggttgccaatgaccataacaag

SEQ ID NO: 4270780 - DNA, 25 bp, Homo sapien
gctccatgaggctaaggatgacgat

SEQ ID NO: 4270781 - DNA, 25 bp, Homo sapien
tcgagggcaatgatcttgaaggtca

SEQ ID NO: 4270782 - DNA, 25 bp, Homo sapien
gacaagttgctcatgcgggacaggc

SEQ ID NO: 4270783 - DNA, 25 bp, Homo sapien
gaaggtcatctctgctgtgaaaatc

SEQ ID NO: 4270784 - DNA, 25 bp, Homo sapien
gggcccttcgcaggctccacagaga

SEQ ID NO: 4270785 - DNA, 25 bp, Homo sapien
gaatggcctgggcccttcgcaggct

SEQ ID NO: 4270786 - DNA, 25 bp, Homo sapien
tggcctgggcccttcgcaggctcca

SEQ ID NO: 4270787 - DNA, 25 bp, Homo sapien
agagactcacagctctagggggcac

SEQ ID NO: 4270788 - DNA, 25 bp, Homo sapien
tgtgccaattgatgggagcctggtt

SEQ ID NO: 4270789 - DNA, 25 bp, Homo sapien
catggtgcagtggaccagaaacctg

SEQ ID NO: 4270790 - DNA, 25 bp, Homo sapien
acctgtggtcaaggatcccatggtg

SEQ ID NO: 4270791 - DNA, 25 bp, Homo sapien
tgcagtgtgccaattgatgggagcc

SEQ ID NO: 4270792 - DNA, 25 bp, Homo sapien
gtcatgttgtagtgctccagcgcca

SEQ ID NO: 4270793 - DNA, 25 bp, Homo sapien
ttgatggacatccacagcgggcagc

SEQ ID NO: 4270794 - DNA, 25 bp, Homo sapien
gacacttgtggcgagactcctctaa

SEQ ID NO: 4270795 - DNA, 25 bp, Homo sapien
tccagcgccatgaagagtgtgttga

SEQ ID NO: 4270796 - DNA, 25 bp, Homo sapien
gaggggacagccaatgagttagttt

SEQ ID NO: 4270797 - DNA, 25 bp, Homo sapien
ctgaggggacagccaatgagttagt

SEQ ID NO: 4270798 - DNA, 25 bp, Homo sapien
tgaggggacagccaatgagttagtt

SEQ ID NO: 4270799 - DNA, 25 bp, Homo sapien
gtgaggacgctgactgcgctgaggg

SEQ ID NO: 4270800 - DNA, 25 bp, Homo sapien
cgtgctcctggctcctcgaagccat

SEQ ID NO: 4270801 - DNA, 25 bp, Homo sapien
acgctgactgcgctgagggcccgct

SEQ ID NO: 4270802 - DNA, 25 bp, Homo sapien
ctggtgaggacgctgactgcgctga

SEQ ID NO: 4270803 - DNA, 25 bp, Homo sapien
ccgcctggctcctccgatggcgtgg

SEQ ID NO: 4270804 - DNA, 25 bp, Homo sapien
cgcctggctcctccgatggcgtggt

SEQ ID NO: 4270805 - DNA, 25 bp, Homo sapien
gtgcttgaacttggattcctcccga

SEQ ID NO: 4270806 - DNA, 25 bp, Homo sapien
tcctcccgacatgtgcagtacaatg

SEQ ID NO: 4270807 - DNA, 25 bp, Homo sapien
acttggattcctcccgacatgtgca

SEQ ID NO: 4270808 - DNA, 25 bp, Homo sapien
ctcccgacatgtgcagtacaatgag

SEQ ID NO: 4270809 - DNA, 25 bp, Homo sapien
cttgggggttgagccagatgttcag

SEQ ID NO: 4270810 - DNA, 25 bp, Homo sapien
cttcctctccaagtgcgctctgcag

SEQ ID NO: 4270811 - DNA, 25 bp, Homo sapien
ttcctctccaagtgcgctctgcagg

SEQ ID NO: 4270812 - DNA, 25 bp, Homo sapien
gccttgggggttgagccagatgttc

SEQ ID NO: 4270813 - DNA, 25 bp, Homo sapien
tgctgtggtgcctgcatctcggggc

SEQ ID NO: 4270814 - DNA, 25 bp, Homo sapien
ggtgcctgcatctcggggctggctc

SEQ ID NO: 4270815 - DNA, 25 bp, Homo sapien
ctgctgtggtgcctgcatctcgggg

SEQ ID NO: 4270816 - DNA, 25 bp, Homo sapien
tgtggtgcctgcatctcggggctgg

SEQ ID NO: 4270817 - DNA, 25 bp, Homo sapien
tgctctagcatcacagggcggagga

SEQ ID NO: 4270818 - DNA, 25 bp, Homo sapien
tctttttgccatggagggcgtggcc

SEQ ID NO: 4270819 - DNA, 25 bp, Homo sapien
cgcggctggaacgtggcttcataga

SEQ ID NO: 4270820 - DNA, 25 bp, Homo sapien
tctcgcctgcgaaaggtgaaaatgc

SEQ ID NO: 4270821 - DNA, 25 bp, Homo sapien
gggccaaaggggacatctccaagga

SEQ ID NO: 4270822 - DNA, 25 bp, Homo sapien
tctcatggctgtttactggggccaa

SEQ ID NO: 4270823 - DNA, 25 bp, Homo sapien
agttcctgaagacatccgttttctc

SEQ ID NO: 4270824 - DNA, 25 bp, Homo sapien
tctccaaggagctacgggacacggt

SEQ ID NO: 4270825 - DNA, 25 bp, Homo sapien
tcctcggtctcagcgatggtggctt

SEQ ID NO: 4270826 - DNA, 25 bp, Homo sapien
aggccattgcgaccacggccaggat

SEQ ID NO: 4270827 - DNA, 25 bp, Homo sapien
tagatcttccctgcggacctgaggg

SEQ ID NO: 4270828 - DNA, 25 bp, Homo sapien
gaagatcatgtagatcttccctgcg

SEQ ID NO: 4270829 - DNA, 25 bp, Homo sapien
agcaagggggcagaggtcaccctca

SEQ ID NO: 4270830 - DNA, 25 bp, Homo sapien
ggagcaagggggcagaggtcaccct

SEQ ID NO: 4270831 - DNA, 25 bp, Homo sapien
gggggagcaagggggcagaggtcac

SEQ ID NO: 4270832 - DNA, 25 bp, Homo sapien
ctgggggagcaagggggcagaggtc

SEQ ID NO: 4270833 - DNA, 25 bp, Homo sapien
gccccttctgggttatggcatttcc

SEQ ID NO: 4270834 - DNA, 25 bp, Homo sapien
cttctgggttatggcatttccaagt

SEQ ID NO: 4270835 - DNA, 25 bp, Homo sapien
ggccccttctgggttatggcatttc

SEQ ID NO: 4270836 - DNA, 25 bp, Homo sapien
ctggggccccttctgggttatggca

SEQ ID NO: 4270837 - DNA, 25 bp, Homo sapien
catcaggcggaagagtgcaagaaag

SEQ ID NO: 4270838 - DNA, 25 bp, Homo sapien
gggttctcgcctgcctttaggcacc

SEQ ID NO: 4270839 - DNA, 25 bp, Homo sapien
caaaggaatcgaagctggtgtagcc

SEQ ID NO: 4270840 - DNA, 25 bp, Homo sapien
ttaggcaccggtagccctccggaca

SEQ ID NO: 4270841 - DNA, 25 bp, Homo sapien
ctttctccagaagctgtctcctctg

SEQ ID NO: 4270842 - DNA, 25 bp, Homo sapien
ttctccagaagctgtctcctctgtg

SEQ ID NO: 4270843 - DNA, 25 bp, Homo sapien
tttctccagaagctgtctcctctgt

SEQ ID NO: 4270844 - DNA, 25 bp, Homo sapien
cacagtaacacatcagaggtgccgt

SEQ ID NO: 4270845 - DNA, 25 bp, Homo sapien
ccacacagtaacacatcagaggtgc

SEQ ID NO: 4270846 - DNA, 25 bp, Homo sapien
cagaggtgccgttcttgagcaggta

SEQ ID NO: 4270847 - DNA, 25 bp, Homo sapien
taacacatcagaggtgccgttcttg

SEQ ID NO: 4270848 - DNA, 25 bp, Homo sapien
tgcaatagtcaccatgctaacgctg

SEQ ID NO: 4270849 - DNA, 25 bp, Homo sapien
gcctgcaatagtcaccatgctaacg

SEQ ID NO: 4270850 - DNA, 25 bp, Homo sapien
gatgcctgcaatagtcaccatgcta

SEQ ID NO: 4270851 - DNA, 25 bp, Homo sapien
aatagtcaccatgctaacgctgtgg

SEQ ID NO: 4270852 - DNA, 25 bp, Homo sapien
tgtgccttaggttgcccatgaagag

SEQ ID NO: 4270853 - DNA, 25 bp, Homo sapien
tgaagttgcgcacgcacttgtgcct

SEQ ID NO: 4270854 - DNA, 25 bp, Homo sapien
cgatgagggcaaagacgctgaggca

SEQ ID NO: 4270855 - DNA, 25 bp, Homo sapien
cacggagccgttggtgccgttgagc

SEQ ID NO: 4270856 - DNA, 25 bp, Homo sapien
tccacatcaggtgcggatgtagcca

SEQ ID NO: 4270857 - DNA, 25 bp, Homo sapien
caggttccacatcaggtgcggatgt

SEQ ID NO: 4270858 - DNA, 25 bp, Homo sapien
ggttccacatcaggtgcggatgtag

SEQ ID NO: 4270859 - DNA, 25 bp, Homo sapien
ttccacatcaggtgcggatgtagcc

SEQ ID NO: 4270860 - DNA, 25 bp, Homo sapien
ccagttctaagtgtggctgctttcg

SEQ ID NO: 4270861 - DNA, 25 bp, Homo sapien
agttcctccaaacaggaggagcttt

SEQ ID NO: 4270862 - DNA, 25 bp, Homo sapien
tggctgctttcggaaaagacttctg

SEQ ID NO: 4270863 - DNA, 25 bp, Homo sapien
tgcccctccagagcaagttcctcca

SEQ ID NO: 4270864 - DNA, 25 bp, Homo sapien
aaatgactgatatagttttcagggc

SEQ ID NO: 4270865 - DNA, 25 bp, Homo sapien
gcccaggtccacaaattcagttgtg

SEQ ID NO: 4270866 - DNA, 25 bp, Homo sapien
ggtgcgtaaggctgagacattgccc

SEQ ID NO: 4270867 - DNA, 25 bp, Homo sapien
gcccggaggactcggaaggtgcgta

SEQ ID NO: 4270868 - DNA, 25 bp, Homo sapien
aatagtttttagagctctcaggact

SEQ ID NO: 4270869 - DNA, 25 bp, Homo sapien
ggataactgaaatagtttttagagc

SEQ ID NO: 4270870 - DNA, 25 bp, Homo sapien
aactgaaatagtttttagagctctc

SEQ ID NO: 4270871 - DNA, 25 bp, Homo sapien
ctgggataactgaaatagtttttag

SEQ ID NO: 4270872 - DNA, 25 bp, Homo sapien
gaagagccgacaaattgcctagttt

SEQ ID NO: 4270873 - DNA, 25 bp, Homo sapien
gagccgacaaattgcctagttttat

SEQ ID NO: 4270874 - DNA, 25 bp, Homo sapien
gaaagttcgaagagccgacaaattg

SEQ ID NO: 4270875 - DNA, 25 bp, Homo sapien
gttcgaagagccgacaaattgccta

SEQ ID NO: 4270876 - DNA, 25 bp, Homo sapien
agtgctgtggatagcccagggcctc

SEQ ID NO: 4270877 - DNA, 25 bp, Homo sapien
taacataggacttcggcttgagtgc

SEQ ID NO: 4270878 - DNA, 25 bp, Homo sapien
tcccggtggctctcttggtgatggt

SEQ ID NO: 4270879 - DNA, 25 bp, Homo sapien
gcagaatcaaaccacagttattggg

SEQ ID NO: 4270880 - DNA, 25 bp, Homo sapien
aggtggcctgaatactcattggaaa

SEQ ID NO: 4270881 - DNA, 25 bp, Homo sapien
gaaaaaacagagttcccaagacaga

SEQ ID NO: 4270882 - DNA, 25 bp, Homo sapien
aaaaacagagttcccaagacagagg

SEQ ID NO: 4270883 - DNA, 25 bp, Homo sapien
gaggtggcctgaatactcattggaa

SEQ ID NO: 4270884 - DNA, 25 bp, Homo sapien
gagcttgctttcctctgatgacacc

SEQ ID NO: 4270885 - DNA, 25 bp, Homo sapien
tcgcaaagccctacacagatgggac

SEQ ID NO: 4270886 - DNA, 25 bp, Homo sapien
catctttctccagcgtggcagtcag

SEQ ID NO: 4270887 - DNA, 25 bp, Homo sapien
cagatgggacgtcagcagacacact

SEQ ID NO: 4270888 - DNA, 25 bp, Homo sapien
ctgttctaccgggtgtggctaagga

SEQ ID NO: 4270889 - DNA, 25 bp, Homo sapien
tctaccgggtgtggctaaggacagc

SEQ ID NO: 4270890 - DNA, 25 bp, Homo sapien
aggacagcagctccccttgcctagg

SEQ ID NO: 4270891 - DNA, 25 bp, Homo sapien
ggatactggtttcgcggctgtctct

SEQ ID NO: 4270892 - DNA, 25 bp, Homo sapien
aatgcttggtatgacacagggccag

SEQ ID NO: 4270893 - DNA, 25 bp, Homo sapien
cttggtgtgctactgcctcttttat

SEQ ID NO: 4270894 - DNA, 25 bp, Homo sapien
ggggtcagagctttgcccctctcag

SEQ ID NO: 4270895 - DNA, 25 bp, Homo sapien
tattctacccagatccccactgagg

SEQ ID NO: 4270896 - DNA, 25 bp, Homo sapien
tgcccctcccttatcttgagatggt

SEQ ID NO: 4270897 - DNA, 25 bp, Homo sapien
gctaactagcaggtaatgcccttct

SEQ ID NO: 4270898 - DNA, 25 bp, Homo sapien
aaggtgggaggctatgctaactagc

SEQ ID NO: 4270899 - DNA, 25 bp, Homo sapien
tggtgaagcccacgccgttagtgac

SEQ ID NO: 4270900 - DNA, 25 bp, Homo sapien
gataatcacactaaagtccagccag

SEQ ID NO: 4270901 - DNA, 25 bp, Homo sapien
catgggtcccgaaggaaagtgaacg

SEQ ID NO: 4270902 - DNA, 25 bp, Homo sapien
gcagaagcctcgagccagaatcttg

SEQ ID NO: 4270903 - DNA, 25 bp, Homo sapien
aagtgaacgcgtgcaggcagaagcc

SEQ ID NO: 4270904 - DNA, 25 bp, Homo sapien
agggtggagggtcgtgctgggccat

SEQ ID NO: 4270905 - DNA, 25 bp, Homo sapien
cgacatacttggtccagggtggagg

SEQ ID NO: 4270906 - DNA, 25 bp, Homo sapien
tccagggtggagggtcgtgctgggc

SEQ ID NO: 4270907 - DNA, 25 bp, Homo sapien
tcgacatacttggtccagggtggag

SEQ ID NO: 4270908 - DNA, 25 bp, Homo sapien
ttggtgaggatggtgcacatgatga

SEQ ID NO: 4270909 - DNA, 25 bp, Homo sapien
ggtgaggatggtgcacatgatgagc

SEQ ID NO: 4270910 - DNA, 25 bp, Homo sapien
gaacacgcagttggtgaggatggtg

SEQ ID NO: 4270911 - DNA, 25 bp, Homo sapien
tgaggatggtgcacatgatgagcat

SEQ ID NO: 4270912 - DNA, 25 bp, Homo sapien
ctgagcagcatgggccggccacgcc

SEQ ID NO: 4270913 - DNA, 25 bp, Homo sapien
agcagcatgggccggccacgccacc

SEQ ID NO: 4270914 - DNA, 25 bp, Homo sapien
agcatgggccggccacgccaccacc

SEQ ID NO: 4270915 - DNA, 25 bp, Homo sapien
tgagcagcatgggccggccacgcca

SEQ ID NO: 4270916 - DNA, 25 bp, Homo sapien
ctaagtggcgctgtcgaggtccagc

SEQ ID NO: 4270917 - DNA, 25 bp, Homo sapien
tgtcgaggtccagcaatgtgctccc

SEQ ID NO: 4270918 - DNA, 25 bp, Homo sapien
ggtccagcaatgtgctcccatcccc

SEQ ID NO: 4270919 - DNA, 25 bp, Homo sapien
tccagcaatgtgctcccatccccag

SEQ ID NO: 4270920 - DNA, 25 bp, Homo sapien
cactgatgcttgacaattccctggg

SEQ ID NO: 4270921 - DNA, 25 bp, Homo sapien
ctgatgcttgacaattccctggggc

SEQ ID NO: 4270922 - DNA, 25 bp, Homo sapien
tcactgatgcttgacaattccctgg

SEQ ID NO: 4270923 - DNA, 25 bp, Homo sapien
actgatgcttgacaattccctgggg

SEQ ID NO: 4270924 - DNA, 25 bp, Homo sapien
tttcatttgccccacgacccagctc

SEQ ID NO: 4270925 - DNA, 25 bp, Homo sapien
tcatttgccccacgacccagctcag

SEQ ID NO: 4270926 - DNA, 25 bp, Homo sapien
ctttcatttgccccacgacccagct

SEQ ID NO: 4270927 - DNA, 25 bp, Homo sapien
atttgccccacgacccagctcagca

SEQ ID NO: 4270928 - DNA, 25 bp, Homo sapien
cctcccggaaggctccatctatggg

SEQ ID NO: 4270929 - DNA, 25 bp, Homo sapien
ccaggccctcgcagtgaaatactca

SEQ ID NO: 4270930 - DNA, 25 bp, Homo sapien
tgaaatactcatgcctctgactgca

SEQ ID NO: 4270931 - DNA, 25 bp, Homo sapien
tcgcagtgaaatactcatgcctctg

SEQ ID NO: 4270932 - DNA, 25 bp, Homo sapien
ctaaactagaatggaggtggggtgg

SEQ ID NO: 4270933 - DNA, 25 bp, Homo sapien
ctagaatggaggtggggtgggggca

SEQ ID NO: 4270934 - DNA, 25 bp, Homo sapien
aatggaggtggggtgggggcagcac

SEQ ID NO: 4270935 - DNA, 25 bp, Homo sapien
cctaaactagaatggaggtggggtg

SEQ ID NO: 4270936 - DNA, 25 bp, Homo sapien
gggggtactcagcaggtattaactg

SEQ ID NO: 4270937 - DNA, 25 bp, Homo sapien
cagggggtactcagcaggtattaac

SEQ ID NO: 4270938 - DNA, 25 bp, Homo sapien
ccccagggggtactcagcaggtatt

SEQ ID NO: 4270939 - DNA, 25 bp, Homo sapien
ggtactcagcaggtattaactgcaa

SEQ ID NO: 4270940 - DNA, 25 bp, Homo sapien
tcttcacagccgctctccggatggg

SEQ ID NO: 4270941 - DNA, 25 bp, Homo sapien
actgaggacatacaaggcgttggtg

SEQ ID NO: 4270942 - DNA, 25 bp, Homo sapien
aatcttcacagccgctctccggatg

SEQ ID NO: 4270943 - DNA, 25 bp, Homo sapien
cagaatcttcacagccgctctccgg

SEQ ID NO: 4270944 - DNA, 25 bp, Homo sapien
ttgagccgcgggcttgcttctctgc

SEQ ID NO: 4270945 - DNA, 25 bp, Homo sapien
tgctggtgccccgaggtaataggaa

SEQ ID NO: 4270946 - DNA, 25 bp, Homo sapien
gcttctctgccatgcgcttctcgat

SEQ ID NO: 4270947 - DNA, 25 bp, Homo sapien
gggactcccgtgtgaacctgcggaa

SEQ ID NO: 4270948 - DNA, 25 bp, Homo sapien
tgcttctgggcacaggctctcctca

SEQ ID NO: 4270949 - DNA, 25 bp, Homo sapien
ctgcttctgggcacaggctctcctc

SEQ ID NO: 4270950 - DNA, 25 bp, Homo sapien
ttctgggcacaggctctcctcacgt

SEQ ID NO: 4270951 - DNA, 25 bp, Homo sapien
tgggcacaggctctcctcacgttgc

SEQ ID NO: 4270952 - DNA, 25 bp, Homo sapien
tggaagacacagacaatgggcctga

SEQ ID NO: 4270953 - DNA, 25 bp, Homo sapien
gaagacacagacaatgggcctgatt

SEQ ID NO: 4270954 - DNA, 25 bp, Homo sapien
ctggaagacacagacaatgggcctg

SEQ ID NO: 4270955 - DNA, 25 bp, Homo sapien
ggaagacacagacaatgggcctgat

SEQ ID NO: 4270956 - DNA, 25 bp, Homo sapien
tgtaataaccaaataaaattctagc

SEQ ID NO: 4270957 - DNA, 25 bp, Homo sapien
aataaaattctagcaataaattgaa

SEQ ID NO: 4270958 - DNA, 25 bp, Homo sapien
taaaattctagcaataaattgaatc

SEQ ID NO: 4270959 - DNA, 25 bp, Homo sapien
aaattctagcaataaattgaatcat

SEQ ID NO: 4270960 - DNA, 25 bp, Homo sapien
catcaaaccagggaatggtgggcac

SEQ ID NO: 4270961 - DNA, 25 bp, Homo sapien
caaaacaggatgtggtcggagcagc

SEQ ID NO: 4270962 - DNA, 25 bp, Homo sapien
cgggaggctgcatcgctaatgacca

SEQ ID NO: 4270963 - DNA, 25 bp, Homo sapien
ctgactgtgacaccaagccgggagg

SEQ ID NO: 4270964 - DNA, 25 bp, Homo sapien
caacgagctgctgccgtaccaaccc

SEQ ID NO: 4270965 - DNA, 25 bp, Homo sapien
gcaaaacatgtcaccgatgacccca

SEQ ID NO: 4270966 - DNA, 25 bp, Homo sapien
ccccaacgagctgctgccgtaccaa

SEQ ID NO: 4270967 - DNA, 25 bp, Homo sapien
atgaccccaacgagctgctgccgta

SEQ ID NO: 4270968 - DNA, 25 bp, Homo sapien
acatggccagcaaacggcctggact

SEQ ID NO: 4270969 - DNA, 25 bp, Homo sapien
ccctgaattgctgtgaagcaggcac

SEQ ID NO: 4270970 - DNA, 25 bp, Homo sapien
ctgcacatggccagcaaacggcctg

SEQ ID NO: 4270971 - DNA, 25 bp, Homo sapien
ctgaaccctgaattgctgtgaagca

SEQ ID NO: 4270972 - DNA, 25 bp, Homo sapien
ggtgtggattgggaccccagtctgc

SEQ ID NO: 4270973 - DNA, 25 bp, Homo sapien
acgccctgctgtggccaagcctggc

SEQ ID NO: 4270974 - DNA, 25 bp, Homo sapien
gcccacgccctgctgtggccaagcc

SEQ ID NO: 4270975 - DNA, 25 bp, Homo sapien
ccacgccctgctgtggccaagcctg

SEQ ID NO: 4270976 - DNA, 25 bp, Homo sapien
gccctgctgtggccaagcctggctg

SEQ ID NO: 4270977 - DNA, 25 bp, Homo sapien
tctccttggaatcggagcctctgga

SEQ ID NO: 4270978 - DNA, 25 bp, Homo sapien
attttggtctccttggaatcggagc

SEQ ID NO: 4270979 - DNA, 25 bp, Homo sapien
cttggaatcggagcctctggaacac

SEQ ID NO: 4270980 - DNA, 25 bp, Homo sapien
tgccatgtaaatttatgcaaagcat

SEQ ID NO: 4270981 - DNA, 25 bp, Homo sapien
tggccggctgagctcccgtgtcttc

SEQ ID NO: 4270982 - DNA, 25 bp, Homo sapien
gtcgctgcaaatggccggctgagct

SEQ ID NO: 4270983 - DNA, 25 bp, Homo sapien
acagtggtgaggctgtcgctgcaaa

SEQ ID NO: 4270984 - DNA, 25 bp, Homo sapien
aggctgtcgctgcaaatggccggct

SEQ ID NO: 4270985 - DNA, 25 bp, Homo sapien
aagctgccagtcgcctctccttcaa

SEQ ID NO: 4270986 - DNA, 25 bp, Homo sapien
tggtaagctgccagtcgcctctcct

SEQ ID NO: 4270987 - DNA, 25 bp, Homo sapien
gtaagctgccagtcgcctctccttc

SEQ ID NO: 4270988 - DNA, 25 bp, Homo sapien
gtggtaagctgccagtcgcctctcc

SEQ ID NO: 4270989 - DNA, 25 bp, Homo sapien
tttggattgcctgggcaccagcctc

SEQ ID NO: 4270990 - DNA, 25 bp, Homo sapien
tggtgcttcccactagtcctccaag

SEQ ID NO: 4270991 - DNA, 25 bp, Homo sapien
gtctctggtgcttcccactagtcct

SEQ ID NO: 4270992 - DNA, 25 bp, Homo sapien
gactcccttctctttggattgcctg

SEQ ID NO: 4270993 - DNA, 25 bp, Homo sapien
gccgtctcggctccgcggctctgtt

SEQ ID NO: 4270994 - DNA, 25 bp, Homo sapien
tccgcggctctgttcgggctcccgg

SEQ ID NO: 4270995 - DNA, 25 bp, Homo sapien
gagcgatccctgcatcctacgggcg

SEQ ID NO: 4270996 - DNA, 25 bp, Homo sapien
ccgggggagcgatccctgcatccta

SEQ ID NO: 4270997 - DNA, 25 bp, Homo sapien
gcaggctgcatgctgtaatgagcaa

SEQ ID NO: 4270998 - DNA, 25 bp, Homo sapien
caagcagcaccaagaggactgtgga

SEQ ID NO: 4270999 - DNA, 25 bp, Homo sapien
catttgcgattttctctcttggatt

SEQ ID NO: 4271000 - DNA, 25 bp, Homo sapien
ccacaggaactaggcttagaaggag

SEQ ID NO: 4271001 - DNA, 25 bp, Homo sapien
gtgaacacagggcttgatgtttgtt

SEQ ID NO: 4271002 - DNA, 25 bp, Homo sapien
acacagggcttgatgtttgttcttt

SEQ ID NO: 4271003 - DNA, 25 bp, Homo sapien
gattctactgaatagctctcattca

SEQ ID NO: 4271004 - DNA, 25 bp, Homo sapien
aagattctactgaatagctctcatt

SEQ ID NO: 4271005 - DNA, 25 bp, Homo sapien
ttttcatgacataggccacaggtgt

SEQ ID NO: 4271006 - DNA, 25 bp, Homo sapien
tctgtatggtgctccacagaggact

SEQ ID NO: 4271007 - DNA, 25 bp, Homo sapien
ggtcagagcagttgtccgacagctc

SEQ ID NO: 4271008 - DNA, 25 bp, Homo sapien
acaggtgttaccctgggtcagagca

SEQ ID NO: 4271009 - DNA, 25 bp, Homo sapien
tcataactgaacatatccaggctgg

SEQ ID NO: 4271010 - DNA, 25 bp, Homo sapien
gtggttaccagttgcattccctgcc

SEQ ID NO: 4271011 - DNA, 25 bp, Homo sapien
tctgacattgtgaccagtggcatgc

SEQ ID NO: 4271012 - DNA, 25 bp, Homo sapien
cagagcagaaggacgcatcataact

SEQ ID NO: 4271013 - DNA, 25 bp, Homo sapien
gatgtcctcatgttgactctatcac

SEQ ID NO: 4271014 - DNA, 25 bp, Homo sapien
agggcccaggggcaatcagctccat

SEQ ID NO: 4271015 - DNA, 25 bp, Homo sapien
attttgtattgagctagatgtcctc

SEQ ID NO: 4271016 - DNA, 25 bp, Homo sapien
cagctccatactggtggcttcatct

SEQ ID NO: 4271017 - DNA, 25 bp, Homo sapien
gcaacaaaaccttcatctgggagtg

SEQ ID NO: 4271018 - DNA, 25 bp, Homo sapien
gacactctcataggacggtgggaat

SEQ ID NO: 4271019 - DNA, 25 bp, Homo sapien
tatctccagggaccaaaggcaggtc

SEQ ID NO: 4271020 - DNA, 25 bp, Homo sapien
tcagtctgaggatgcggccaattcg

SEQ ID NO: 4271021 - DNA, 25 bp, Homo sapien
tttagaagagcatcccaaagacccc

SEQ ID NO: 4271022 - DNA, 25 bp, Homo sapien
tccttggttttagaagagcatccca

SEQ ID NO: 4271023 - DNA, 25 bp, Homo sapien
tcttggaaagctgcaaatacagggt

SEQ ID NO: 4271024 - DNA, 25 bp, Homo sapien
cagggttcttctaacataaacacgt

SEQ ID NO: 4271025 - DNA, 25 bp, Homo sapien
gaagacggccacaaagaactggttg

SEQ ID NO: 4271026 - DNA, 25 bp, Homo sapien
gatgtcaaaagcttgtctggtcacg

SEQ ID NO: 4271027 - DNA, 25 bp, Homo sapien
gacacattcgcctgtgaagacggcc

SEQ ID NO: 4271028 - DNA, 25 bp, Homo sapien
aagtagtactgcctcaaagcgaaca

SEQ ID NO: 4271029 - DNA, 25 bp, Homo sapien
cagtgtggactcagctgcttgcttc

SEQ ID NO: 4271030 - DNA, 25 bp, Homo sapien
ttctcagtaagtcttagggtcctcc

SEQ ID NO: 4271031 - DNA, 25 bp, Homo sapien
gattcaatcttactccagccacaag

SEQ ID NO: 4271032 - DNA, 25 bp, Homo sapien
ttagggtcctcctctcattacccat

SEQ ID NO: 4271033 - DNA, 25 bp, Homo sapien
tggagcccaacttcttcatggcatt

SEQ ID NO: 4271034 - DNA, 25 bp, Homo sapien
gggcttcttggagcccaacttcttc

SEQ ID NO: 4271035 - DNA, 25 bp, Homo sapien
gcccaacttcttcatggcattgtag

SEQ ID NO: 4271036 - DNA, 25 bp, Homo sapien
cttcttcatggcattgtagtatttc

SEQ ID NO: 4271037 - DNA, 25 bp, Homo sapien
gggccacactgttactaaagcaaga

SEQ ID NO: 4271038 - DNA, 25 bp, Homo sapien
gagagggccacactgttactaaagc

SEQ ID NO: 4271039 - DNA, 25 bp, Homo sapien
cactgttactaaagcaagaggaacc

SEQ ID NO: 4271040 - DNA, 25 bp, Homo sapien
gccacactgttactaaagcaagagg

SEQ ID NO: 4271041 - DNA, 25 bp, Homo sapien
cagcagaaaccagaaactcctgagc

SEQ ID NO: 4271042 - DNA, 25 bp, Homo sapien
agcagaaaccagaaactcctgagca

SEQ ID NO: 4271043 - DNA, 25 bp, Homo sapien
tgtacacgttgtcctcccacttggg

SEQ ID NO: 4271044 - DNA, 25 bp, Homo sapien
cagtgtgaagaagcctccaaaaatg

SEQ ID NO: 4271045 - DNA, 25 bp, Homo sapien
gaccccaacaaagagattcagtgtg

SEQ ID NO: 4271046 - DNA, 25 bp, Homo sapien
tgtcaattatgaccccaacaaagag

SEQ ID NO: 4271047 - DNA, 25 bp, Homo sapien
taatgtccatccagcctttaaaggt

SEQ ID NO: 4271048 - DNA, 25 bp, Homo sapien
cataatgtccatccagcctttaaag

SEQ ID NO: 4271049 - DNA, 25 bp, Homo sapien
tgtccatccagcctttaaaggttgc

SEQ ID NO: 4271050 - DNA, 25 bp, Homo sapien
gcatacataatgtccatccagcctt

SEQ ID NO: 4271051 - DNA, 25 bp, Homo sapien
ttcacaatcgacaaaggtacaaggg

SEQ ID NO: 4271052 - DNA, 25 bp, Homo sapien
caaaacttccctgcgaagaggttca

SEQ ID NO: 4271053 - DNA, 25 bp, Homo sapien
tcggtatagttgatgcacctccaaa

SEQ ID NO: 4271054 - DNA, 25 bp, Homo sapien
agggaaaactctccatcggtatagt

SEQ ID NO: 4271055 - DNA, 25 bp, Homo sapien
ggctttgatgggagccacttcagaa

SEQ ID NO: 4271056 - DNA, 25 bp, Homo sapien
tcgctgtgagacttatcagtgagat

SEQ ID NO: 4271057 - DNA, 25 bp, Homo sapien
cgcatgccttcaaatcgagaaagag

SEQ ID NO: 4271058 - DNA, 25 bp, Homo sapien
cgcgaagggttcgaagggctttgat

SEQ ID NO: 4271059 - DNA, 25 bp, Homo sapien
ccaaaccccacgtgttcccactgag

SEQ ID NO: 4271060 - DNA, 25 bp, Homo sapien
caaaccccacgtgttcccactgagc

SEQ ID NO: 4271061 - DNA, 25 bp, Homo sapien
accccacgtgttcccactgagccac

SEQ ID NO: 4271062 - DNA, 25 bp, Homo sapien
cacgtgttcccactgagccactcac

SEQ ID NO: 4271063 - DNA, 25 bp, Homo sapien
ggtccaggtaatagtcttcaaaggc

SEQ ID NO: 4271064 - DNA, 25 bp, Homo sapien
acacaaagataaaggtgaagaccct

SEQ ID NO: 4271065 - DNA, 25 bp, Homo sapien
ccctgtcagtgtactccagcaaagc

SEQ ID NO: 4271066 - DNA, 25 bp, Homo sapien
tttgaagccataggccacccactta

SEQ ID NO: 4271067 - DNA, 25 bp, Homo sapien
cacgatacggtagcaagtcttgcgc

SEQ ID NO: 4271068 - DNA, 25 bp, Homo sapien
aaaccagctgtgctccacgatacgg

SEQ ID NO: 4271069 - DNA, 25 bp, Homo sapien
cagcagggacagtggcgaatgcatc

SEQ ID NO: 4271070 - DNA, 25 bp, Homo sapien
gtagcaagtcttgcgcacctgccag

SEQ ID NO: 4271071 - DNA, 25 bp, Homo sapien
tctgtgaagcagtcatctggttctt

SEQ ID NO: 4271072 - DNA, 25 bp, Homo sapien
ctcagaggagcttgtgtcgtccact

SEQ ID NO: 4271073 - DNA, 25 bp, Homo sapien
tcagaggagcttgtgtcgtccactc

SEQ ID NO: 4271074 - DNA, 25 bp, Homo sapien
cagaggagcttgtgtcgtccactcc

SEQ ID NO: 4271075 - DNA, 25 bp, Homo sapien
tttccacgtctcacccagggatgga

SEQ ID NO: 4271076 - DNA, 25 bp, Homo sapien
gccaggtcctcagaagatgttccag

SEQ ID NO: 4271077 - DNA, 25 bp, Homo sapien
ccacacctctcgacttgctgcagct

SEQ ID NO: 4271078 - DNA, 25 bp, Homo sapien
agcagggacctgaggaacagactca

SEQ ID NO: 4271079 - DNA, 25 bp, Homo sapien
gagtgggagtttcaccaccagctca

SEQ ID NO: 4271080 - DNA, 25 bp, Homo sapien
caaagagcctgtttggtacgatggc

SEQ ID NO: 4271081 - DNA, 25 bp, Homo sapien
tcagattcaccctcagcaatgggca

SEQ ID NO: 4271082 - DNA, 25 bp, Homo sapien
cacagtcggattagcgatgaagtca

SEQ ID NO: 4271083 - DNA, 25 bp, Homo sapien
agttcaatagcagggcgatgaacag

SEQ ID NO: 4271084 - DNA, 25 bp, Homo sapien
gttcaatagcagggcgatgaacagg

SEQ ID NO: 4271085 - DNA, 25 bp, Homo sapien
agcaccatcaccgtcaagaaaagga

SEQ ID NO: 4271086 - DNA, 25 bp, Homo sapien
tgaggcatatggatttttggccaac

SEQ ID NO: 4271087 - DNA, 25 bp, Homo sapien
ccgatgatcttgatgagtgtgttta

SEQ ID NO: 4271088 - DNA, 25 bp, Homo sapien
tccacagaggatacggaagacaatg

SEQ ID NO: 4271089 - DNA, 25 bp, Homo sapien
agaaacagagaccgtcaggttttgg

SEQ ID NO: 4271090 - DNA, 25 bp, Homo sapien
cgtcaggttttggtagctgtgctca

SEQ ID NO: 4271091 - DNA, 25 bp, Homo sapien
gaccgtcaggttttggtagctgtgc

SEQ ID NO: 4271092 - DNA, 25 bp, Homo sapien
cagagaccgtcaggttttggtagct

SEQ ID NO: 4271093 - DNA, 25 bp, Homo sapien
ccacgcccagctctagcagactcac

SEQ ID NO: 4271094 - DNA, 25 bp, Homo sapien
gccacgcccagctctagcagactca

SEQ ID NO: 4271095 - DNA, 25 bp, Homo sapien
tctggaaataatagtatgggtcgaa

SEQ ID NO: 4271096 - DNA, 25 bp, Homo sapien
tagtatgggtcgaaggcaatgattt

SEQ ID NO: 4271097 - DNA, 25 bp, Homo sapien
aaataatagtatgggtcgaaggcaa

SEQ ID NO: 4271098 - DNA, 25 bp, Homo sapien
tgaagaccatttcagcagtaaaaaa

SEQ ID NO: 4271099 - DNA, 25 bp, Homo sapien
cacgatgcacaaggtgatggtgagc

SEQ ID NO: 4271100 - DNA, 25 bp, Homo sapien
gcttcgaaggtagggctcatgccat

SEQ ID NO: 4271101 - DNA, 25 bp, Homo sapien
gccatgaagatggtgttcaccacga

SEQ ID NO: 4271102 - DNA, 25 bp, Homo sapien
gatgttgcctatctggagcatggct

SEQ ID NO: 4271103 - DNA, 25 bp, Homo sapien
gatccgtcacaagcccaaagagaat

SEQ ID NO: 4271104 - DNA, 25 bp, Homo sapien
ctgcaaagggatccgtcacaagccc

SEQ ID NO: 4271105 - DNA, 25 bp, Homo sapien
agggatccgtcacaagcccaaagag

SEQ ID NO: 4271106 - DNA, 25 bp, Homo sapien
aaagggatccgtcacaagcccaaag

SEQ ID NO: 4271107 - DNA, 25 bp, Homo sapien
gggcagcaatcccagatcagatact

SEQ ID NO: 4271108 - DNA, 25 bp, Homo sapien
ctgagacaagctggtcaagcagggt

SEQ ID NO: 4271109 - DNA, 25 bp, Homo sapien
cagatacttctgagacaagctggtc

SEQ ID NO: 4271110 - DNA, 25 bp, Homo sapien
cagatcagatacttctgagacaagc

SEQ ID NO: 4271111 - DNA, 25 bp, Homo sapien
cctcaaggacggaggttatgatact

SEQ ID NO: 4271112 - DNA, 25 bp, Homo sapien
caacactcattgccctttgggcccg

SEQ ID NO: 4271113 - DNA, 25 bp, Homo sapien
acaacactcattgccctttgggccc

SEQ ID NO: 4271114 - DNA, 25 bp, Homo sapien
ggttatgatactgacaacactcatt

SEQ ID NO: 4271115 - DNA, 25 bp, Homo sapien
taagtattctgctgacaagaaagtc

SEQ ID NO: 4271116 - DNA, 25 bp, Homo sapien
ctaagtattctgctgacaagaaagt

SEQ ID NO: 4271117 - DNA, 25 bp, Homo sapien
aaagtcttcttttgtcctgcatcga

SEQ ID NO: 4271118 - DNA, 25 bp, Homo sapien
tcttcttttgtcctgcatcgaatgc

SEQ ID NO: 4271119 - DNA, 25 bp, Homo sapien
cgagacatcgacagctccaggggca

SEQ ID NO: 4271120 - DNA, 25 bp, Homo sapien
catcgacagctccaggggcaagctc

SEQ ID NO: 4271121 - DNA, 25 bp, Homo sapien
tcgacagctccaggggcaagctcac

SEQ ID NO: 4271122 - DNA, 25 bp, Homo sapien
gacatcgacagctccaggggcaagc

SEQ ID NO: 4271123 - DNA, 25 bp, Homo sapien
gcagagagccccgatggctttcgtg

SEQ ID NO: 4271124 - DNA, 25 bp, Homo sapien
tccctcagggagtgagatatctcgg

SEQ ID NO: 4271125 - DNA, 25 bp, Homo sapien
gggaccggaaatggaacacactgcc

SEQ ID NO: 4271126 - DNA, 25 bp, Homo sapien
tagcccggcgttttccagaggcgag

SEQ ID NO: 4271127 - DNA, 25 bp, Homo sapien
catcctgcgctggttgtaaggatca

SEQ ID NO: 4271128 - DNA, 25 bp, Homo sapien
ctgcgctggttgtaaggatcagagc

SEQ ID NO: 4271129 - DNA, 25 bp, Homo sapien
tcctgcgctggttgtaaggatcaga

SEQ ID NO: 4271130 - DNA, 25 bp, Homo sapien
cagagcggggtgatttgttgtcttc

SEQ ID NO: 4271131 - DNA, 25 bp, Homo sapien
gcatttttggaggttaaaggtgatc

SEQ ID NO: 4271132 - DNA, 25 bp, Homo sapien
tgtcaatccctagtgctgctagcac

SEQ ID NO: 4271133 - DNA, 25 bp, Homo sapien
gagaggttgtgtcaatccctagtgc

SEQ ID NO: 4271134 - DNA, 25 bp, Homo sapien
ttaaaggtgatccattgtgggagtg

SEQ ID NO: 4271135 - DNA, 25 bp, Homo sapien
tgaagtggctagtccagaacagtat

SEQ ID NO: 4271136 - DNA, 25 bp, Homo sapien
taaacggtgccctaattgaagtggc

SEQ ID NO: 4271137 - DNA, 25 bp, Homo sapien
tatagctccctaaacggtgccctaa

SEQ ID NO: 4271138 - DNA, 25 bp, Homo sapien
caagaatggacagtctgcaaccttc

SEQ ID NO: 4271139 - DNA, 25 bp, Homo sapien
aagatcatatagattttcccagaag

SEQ ID NO: 4271140 - DNA, 25 bp, Homo sapien
tacgccatggtgactacagccaaga

SEQ ID NO: 4271141 - DNA, 25 bp, Homo sapien
tcccaggaagattacgagcacaaaa

SEQ ID NO: 4271142 - DNA, 25 bp, Homo sapien
caagttgaccaggtagaaagatccc

SEQ ID NO: 4271143 - DNA, 25 bp, Homo sapien
caaaggaatcaaagctggtgtagtt

SEQ ID NO: 4271144 - DNA, 25 bp, Homo sapien
tgtagttaaaatccgggttgtcaga

SEQ ID NO: 4271145 - DNA, 25 bp, Homo sapien
tggtagaggcgttcccaggaatcct

SEQ ID NO: 4271146 - DNA, 25 bp, Homo sapien
gcagatataaccatcagggcagtgg

SEQ ID NO: 4271147 - DNA, 25 bp, Homo sapien
gtgcctcgcttatttatgtagatat

SEQ ID NO: 4271148 - DNA, 25 bp, Homo sapien
cctgagtcagatccattgccacaca

SEQ ID NO: 4271149 - DNA, 25 bp, Homo sapien
cacagtaaggggtcagaagtgcctc

SEQ ID NO: 4271150 - DNA, 25 bp, Homo sapien
gtcagatccattgccacacagtaag

SEQ ID NO: 4271151 - DNA, 25 bp, Homo sapien
tgaggttgcccttgaagagttgcag

SEQ ID NO: 4271152 - DNA, 25 bp, Homo sapien
tatttttgaggttgcccttgaagag

SEQ ID NO: 4271153 - DNA, 25 bp, Homo sapien
ttgaagagttgcagccccaccaagg

SEQ ID NO: 4271154 - DNA, 25 bp, Homo sapien
gatggtgaggatggtcacatcagcc

SEQ ID NO: 4271155 - DNA, 25 bp, Homo sapien
gaactctgaatgtccgcaggcctga

SEQ ID NO: 4271156 - DNA, 25 bp, Homo sapien
ttttaatgctctaagaactctgaat

SEQ ID NO: 4271157 - DNA, 25 bp, Homo sapien
taatgctctaagaactctgaatgtc

SEQ ID NO: 4271158 - DNA, 25 bp, Homo sapien
tgaatgtccgcaggcctgagatccc

SEQ ID NO: 4271159 - DNA, 25 bp, Homo sapien
tgtaggaccagaagttagtcagcat

SEQ ID NO: 4271160 - DNA, 25 bp, Homo sapien
ttccaaggatctctcaggtacgtga

SEQ ID NO: 4271161 - DNA, 25 bp, Homo sapien
tagacaaaatcctcttgccagtatc

SEQ ID NO: 4271162 - DNA, 25 bp, Homo sapien
caaggcttcaaaggtgtaaatgaca

SEQ ID NO: 4271163 - DNA, 25 bp, Homo sapien
ccagggtaatgacgctaaaatccag

SEQ ID NO: 4271164 - DNA, 25 bp, Homo sapien
ccccagctgcgttccgtgaataagg

SEQ ID NO: 4271165 - DNA, 25 bp, Homo sapien
tccgtgaataaggtatgcactagca

SEQ ID NO: 4271166 - DNA, 25 bp, Homo sapien
tatgcactagcattgggatctggga

SEQ ID NO: 4271167 - DNA, 25 bp, Homo sapien
tctggaggcatattacagaccccca

SEQ ID NO: 4271168 - DNA, 25 bp, Homo sapien
acacacaattaaccaaaatagtgac

SEQ ID NO: 4271169 - DNA, 25 bp, Homo sapien
ggtcagttcgggtcatgcacacaca

SEQ ID NO: 4271170 - DNA, 25 bp, Homo sapien
aatagtgaccgtaataaataaactg

SEQ ID NO: 4271171 - DNA, 25 bp, Homo sapien
cagttcgggtcatgcacacacaatt

SEQ ID NO: 4271172 - DNA, 25 bp, Homo sapien
gacacagtaggcaaggtctaattgt

SEQ ID NO: 4271173 - DNA, 25 bp, Homo sapien
acagtaggcaaggtctaattgtaac

SEQ ID NO: 4271174 - DNA, 25 bp, Homo sapien
tggacacagtaggcaaggtctaatt

SEQ ID NO: 4271175 - DNA, 25 bp, Homo sapien
cacagtaggcaaggtctaattgtaa

SEQ ID NO: 4271176 - DNA, 25 bp, Homo sapien
tggaagaggcaatcgtgcaaaggat

SEQ ID NO: 4271177 - DNA, 25 bp, Homo sapien
cgtggaagaggcaatcgtgcaaagg

SEQ ID NO: 4271178 - DNA, 25 bp, Homo sapien
gaagaggcaatcgtgcaaaggatat

SEQ ID NO: 4271179 - DNA, 25 bp, Homo sapien
acgtggaagaggcaatcgtgcaaag

SEQ ID NO: 4271180 - DNA, 25 bp, Homo sapien
tccctttgttcagcaccataaatgt

SEQ ID NO: 4271181 - DNA, 25 bp, Homo sapien
gatggccgttcttctgatcaggttg

SEQ ID NO: 4271182 - DNA, 25 bp, Homo sapien
actgaatagccacagggcccgagtg

SEQ ID NO: 4271183 - DNA, 25 bp, Homo sapien
cgagtggcactaaaccgggaaatgg

SEQ ID NO: 4271184 - DNA, 25 bp, Homo sapien
gagggtactttaatggacagacagc

SEQ ID NO: 4271185 - DNA, 25 bp, Homo sapien
ctggtaagaggtgttatgcccaggg

SEQ ID NO: 4271186 - DNA, 25 bp, Homo sapien
agtgcaccaagatgagcccactgag

SEQ ID NO: 4271187 - DNA, 25 bp, Homo sapien
agacagccaatcctcaggctggtaa

SEQ ID NO: 4271188 - DNA, 25 bp, Homo sapien
cagtgactccggagtaaagcgacgg

SEQ ID NO: 4271189 - DNA, 25 bp, Homo sapien
tgctgtagaacggatctagatcctc

SEQ ID NO: 4271190 - DNA, 25 bp, Homo sapien
tgttagtttcgagggatccaatggg

SEQ ID NO: 4271191 - DNA, 25 bp, Homo sapien
tggtccttctgctccctatgcttct

SEQ ID NO: 4271192 - DNA, 25 bp, Homo sapien
cattcctcttccttaatgtcctcca

SEQ ID NO: 4271193 - DNA, 25 bp, Homo sapien
tgctctgacaccattcctcttcctt

SEQ ID NO: 4271194 - DNA, 25 bp, Homo sapien
gacaccattcctcttccttaatgtc

SEQ ID NO: 4271195 - DNA, 25 bp, Homo sapien
tctgacaccattcctcttccttaat

SEQ ID NO: 4271196 - DNA, 25 bp, Homo sapien
agctggcagcctgagtgctgctgtc

SEQ ID NO: 4271197 - DNA, 25 bp, Homo sapien
ctggcagcctgagtgctgctgtccc

SEQ ID NO: 4271198 - DNA, 25 bp, Homo sapien
gctggcagcctgagtgctgctgtcc

SEQ ID NO: 4271199 - DNA, 25 bp, Homo sapien
ccatggtgactgccaataagctcca

SEQ ID NO: 4271200 - DNA, 25 bp, Homo sapien
tataatgtagactagtgtttgcccc

SEQ ID NO: 4271201 - DNA, 25 bp, Homo sapien
tttgactcaatctcctctttccatg

SEQ ID NO: 4271202 - DNA, 25 bp, Homo sapien
ttctctagccaaccagagactttta

SEQ ID NO: 4271203 - DNA, 25 bp, Homo sapien
catgctatagtacaggaatcttcct

SEQ ID NO: 4271204 - DNA, 25 bp, Homo sapien
tcttcccagataagttacaatcttc

SEQ ID NO: 4271205 - DNA, 25 bp, Homo sapien
tccttaagaaaagtgtgaccatgtc

SEQ ID NO: 4271206 - DNA, 25 bp, Homo sapien
cataggtgtatgtcttgtgttcatc

SEQ ID NO: 4271207 - DNA, 25 bp, Homo sapien
gtgtgaccatgtctattctggcatg

SEQ ID NO: 4271208 - DNA, 25 bp, Homo sapien
tcatgatgtgccctggacacgggct

SEQ ID NO: 4271209 - DNA, 25 bp, Homo sapien
cagaataagatctcctggtccaagg

SEQ ID NO: 4271210 - DNA, 25 bp, Homo sapien
caaacaacacttctatgaggccagg

SEQ ID NO: 4271211 - DNA, 25 bp, Homo sapien
tcaccgttgacgtcaggctatgaaa

SEQ ID NO: 4271212 - DNA, 25 bp, Homo sapien
acatggttcccatggggacggctgt

SEQ ID NO: 4271213 - DNA, 25 bp, Homo sapien
tcggagcttcgcctgacatggttcc

SEQ ID NO: 4271214 - DNA, 25 bp, Homo sapien
gagtcggagcttcgcctgacatggt

SEQ ID NO: 4271215 - DNA, 25 bp, Homo sapien
agcttcgcctgacatggttcccatg

SEQ ID NO: 4271216 - DNA, 25 bp, Homo sapien
gtcaacttcatccttggtccaagag

SEQ ID NO: 4271217 - DNA, 25 bp, Homo sapien
gaggtctctgccaatcaagaaggtc

SEQ ID NO: 4271218 - DNA, 25 bp, Homo sapien
cagtctgtgtccagtaggcctgtga

SEQ ID NO: 4271219 - DNA, 25 bp, Homo sapien
ttcctgctctgggagtatccacaca

SEQ ID NO: 4271220 - DNA, 25 bp, Homo sapien
ggatgtggcgctgggttccttcatc

SEQ ID NO: 4271221 - DNA, 25 bp, Homo sapien
gcaatggccttctgcagtaagctgt

SEQ ID NO: 4271222 - DNA, 25 bp, Homo sapien
ccatcagctgggagccagtcatctg

SEQ ID NO: 4271223 - DNA, 25 bp, Homo sapien
gggagccagtcatctggtaaaaagc

SEQ ID NO: 4271224 - DNA, 25 bp, Homo sapien
taaaaagcaagtatgcctgtgtcct

SEQ ID NO: 4271225 - DNA, 25 bp, Homo sapien
tctggtaaaaagcaagtatgcctgt

SEQ ID NO: 4271226 - DNA, 25 bp, Homo sapien
tggacccctcagcatagcggtgtag

SEQ ID NO: 4271227 - DNA, 25 bp, Homo sapien
ggatactcccgtcccacatgagcag

SEQ ID NO: 4271228 - DNA, 25 bp, Homo sapien
caggaaggatactcccgtcccacat

SEQ ID NO: 4271229 - DNA, 25 bp, Homo sapien
cccctcagcatagcggtgtagagaa

SEQ ID NO: 4271230 - DNA, 25 bp, Homo sapien
gggccccctgcgcagtaatgcctgg

SEQ ID NO: 4271231 - DNA, 25 bp, Homo sapien
acgatggaggatgctgtccatctcc

SEQ ID NO: 4271232 - DNA, 25 bp, Homo sapien
aggccgcacagccatacaaaggggc

SEQ ID NO: 4271233 - DNA, 25 bp, Homo sapien
agagaggaaagtgccccgcccacga

SEQ ID NO: 4271234 - DNA, 25 bp, Homo sapien
ggggaatattagtgtactacctgaa

SEQ ID NO: 4271235 - DNA, 25 bp, Homo sapien
gcaagcaaagcaccacatttaaacc

SEQ ID NO: 4271236 - DNA, 25 bp, Homo sapien
atttaaaccactactcacacaacca

SEQ ID NO: 4271237 - DNA, 25 bp, Homo sapien
tgtcagatacaccactggttctagt

SEQ ID NO: 4271238 - DNA, 25 bp, Homo sapien
gctaatttggtgaatccactccctg

SEQ ID NO: 4271239 - DNA, 25 bp, Homo sapien
gatacactaagctgctgacccctgg

SEQ ID NO: 4271240 - DNA, 25 bp, Homo sapien
tagtaccactggttgtcaagtagcc

SEQ ID NO: 4271241 - DNA, 25 bp, Homo sapien
gacaagtcaagattgtgcctctagg

SEQ ID NO: 4271242 - DNA, 25 bp, Homo sapien
cagtcacagtggaccttgcccttgg

SEQ ID NO: 4271243 - DNA, 25 bp, Homo sapien
tcacagtggaccttgcccttggcca

SEQ ID NO: 4271244 - DNA, 25 bp, Homo sapien
acagtggaccttgcccttggccacc

SEQ ID NO: 4271245 - DNA, 25 bp, Homo sapien
ttggccaccccaaagctagacaagt

SEQ ID NO: 4271246 - DNA, 25 bp, Homo sapien
tccaagtcattttggtcaccttggt

SEQ ID NO: 4271247 - DNA, 25 bp, Homo sapien
gaatgaggcccgttttccaagtcat

SEQ ID NO: 4271248 - DNA, 25 bp, Homo sapien
attttggtcaccttggtcacccttg

SEQ ID NO: 4271249 - DNA, 25 bp, Homo sapien
gagtggtgaatgaggcccgttttcc

SEQ ID NO: 4271250 - DNA, 25 bp, Homo sapien
aaggccttttgaataatagcagcac

SEQ ID NO: 4271251 - DNA, 25 bp, Homo sapien
cctcttcctttctcttggtggtggt

SEQ ID NO: 4271252 - DNA, 25 bp, Homo sapien
ctttcctcttcctttctcttggtgg

SEQ ID NO: 4271253 - DNA, 25 bp, Homo sapien
tcttcctttctcttggtggtggtga

SEQ ID NO: 4271254 - DNA, 25 bp, Homo sapien
ttcctcttcctttctcttggtggtg

SEQ ID NO: 4271255 - DNA, 25 bp, Homo sapien
tccatgcagtggaggcgatcttcac

SEQ ID NO: 4271256 - DNA, 25 bp, Homo sapien
ccgagtaccctagcggtgaaggcga

SEQ ID NO: 4271257 - DNA, 25 bp, Homo sapien
catacaacttcttgagaggattggc

SEQ ID NO: 4271258 - DNA, 25 bp, Homo sapien
tcatactatctaggccatcagagcc

SEQ ID NO: 4271259 - DNA, 25 bp, Homo sapien
gcaagtccattactagaaattgata

SEQ ID NO: 4271260 - DNA, 25 bp, Homo sapien
tgggcaagtccattactagaaattg

SEQ ID NO: 4271261 - DNA, 25 bp, Homo sapien
tatttatttggctttgcgacacgca

SEQ ID NO: 4271262 - DNA, 25 bp, Homo sapien
tgcgacacgcaaaggctcaggcaag

SEQ ID NO: 4271263 - DNA, 25 bp, Homo sapien
gggaatcccaacctgctgatgtgct

SEQ ID NO: 4271264 - DNA, 25 bp, Homo sapien
gagaaggaagcgacatcatcagagc

SEQ ID NO: 4271265 - DNA, 25 bp, Homo sapien
catcagagcaaagaggagagtcctg

SEQ ID NO: 4271266 - DNA, 25 bp, Homo sapien
gacaaagtaggatgtggctatgcca

SEQ ID NO: 4271267 - DNA, 25 bp, Homo sapien
ctgaagagcgtcggagggaaaggaa

SEQ ID NO: 4271268 - DNA, 25 bp, Homo sapien
gaagagcgtcggagggaaaggaatg

SEQ ID NO: 4271269 - DNA, 25 bp, Homo sapien
tgaagagcgtcggagggaaaggaat

SEQ ID NO: 4271270 - DNA, 25 bp, Homo sapien
gctcatagggcttatagttgcacag

SEQ ID NO: 4271271 - DNA, 25 bp, Homo sapien
tctgagatcgcaaaaaagcttccat

SEQ ID NO: 4271272 - DNA, 25 bp, Homo sapien
taattgtgatctggcacccatgtgg

SEQ ID NO: 4271273 - DNA, 25 bp, Homo sapien
gccttttagttaaccctgcgtgtga

SEQ ID NO: 4271274 - DNA, 25 bp, Homo sapien
ttctggttcttaaagtccctctgac

SEQ ID NO: 4271275 - DNA, 25 bp, Homo sapien
gttcttaaagtccctctgactgctg

SEQ ID NO: 4271276 - DNA, 25 bp, Homo sapien
cttaaagtccctctgactgctgatt

SEQ ID NO: 4271277 - DNA, 25 bp, Homo sapien
tggttcttaaagtccctctgactgc

SEQ ID NO: 4271278 - DNA, 25 bp, Homo sapien
gactatgtcgaacacgagaccttga

SEQ ID NO: 4271279 - DNA, 25 bp, Homo sapien
taacaatggaaagaagcacgaccac

SEQ ID NO: 4271280 - DNA, 25 bp, Homo sapien
gatgaccacaaagacccagttgaga

SEQ ID NO: 4271281 - DNA, 25 bp, Homo sapien
caaagatctggcttgtgactatgtc

SEQ ID NO: 4271282 - DNA, 25 bp, Homo sapien
ggtagaagtatgagtttggagtgca

SEQ ID NO: 4271283 - DNA, 25 bp, Homo sapien
caatgggcaggtagaagtatgagtt

SEQ ID NO: 4271284 - DNA, 25 bp, Homo sapien
gggcaatgggcaggtagaagtatga

SEQ ID NO: 4271285 - DNA, 25 bp, Homo sapien
ggtccaagggcaatgggcaggtaga

SEQ ID NO: 4271286 - DNA, 25 bp, Homo sapien
tttttcattgcattatagtatttct

SEQ ID NO: 4271287 - DNA, 25 bp, Homo sapien
tctgtcataaaaatgtcttggccac

SEQ ID NO: 4271288 - DNA, 25 bp, Homo sapien
cagaggccgtggaatgggtttttga

SEQ ID NO: 4271289 - DNA, 25 bp, Homo sapien
ttcttctgtcataaaaatgtcttgg

SEQ ID NO: 4271290 - DNA, 25 bp, Homo sapien
ccgagtgaattgctctcaaactctg

SEQ ID NO: 4271291 - DNA, 25 bp, Homo sapien
agactacgaagtaaatgtaaccgag

SEQ ID NO: 4271292 - DNA, 25 bp, Homo sapien
aatgataacgccaatgaagagattc

SEQ ID NO: 4271293 - DNA, 25 bp, Homo sapien
aaagatgataaagactacgaagtaa

SEQ ID NO: 4271294 - DNA, 25 bp, Homo sapien
tatccatccagcccttaaatgttgc

SEQ ID NO: 4271295 - DNA, 25 bp, Homo sapien
ctctgtggaatcaacagctgcatat

SEQ ID NO: 4271296 - DNA, 25 bp, Homo sapien
atcaacagctgcatatataatatcc

SEQ ID NO: 4271297 - DNA, 25 bp, Homo sapien
tgcatatataatatccatccagccc

SEQ ID NO: 4271298 - DNA, 25 bp, Homo sapien
gcagcagagcgaggtaagcatttcc

SEQ ID NO: 4271299 - DNA, 25 bp, Homo sapien
tctgttccattaatgcatttcccaa

SEQ ID NO: 4271300 - DNA, 25 bp, Homo sapien
caaagttgactttctggttgatcca

SEQ ID NO: 4271301 - DNA, 25 bp, Homo sapien
gaaattgccactttcacattgactt

SEQ ID NO: 4271302 - DNA, 25 bp, Homo sapien
attcagaatggcaggtatggcacct

SEQ ID NO: 4271303 - DNA, 25 bp, Homo sapien
tcccagaatacaaaatacgagccag

SEQ ID NO: 4271304 - DNA, 25 bp, Homo sapien
aaatacgagccagaaaatgaggcag

SEQ ID NO: 4271305 - DNA, 25 bp, Homo sapien
aatggcaggtatggcacctatgaga

SEQ ID NO: 4271306 - DNA, 25 bp, Homo sapien
gaggcctcagtgctcgtagagtccg

SEQ ID NO: 4271307 - DNA, 25 bp, Homo sapien
ttcaaactgggacagcgcacgaaga

SEQ ID NO: 4271308 - DNA, 25 bp, Homo sapien
cagcgcacgaagaggcctcagtgct

SEQ ID NO: 4271309 - DNA, 25 bp, Homo sapien
tcagtgctcgtagagtccggaagga

SEQ ID NO: 4271310 - DNA, 25 bp, Homo sapien
agttaatgagggtggtcacagagac

SEQ ID NO: 4271311 - DNA, 25 bp, Homo sapien
aagttaatgagggtggtcacagaga

SEQ ID NO: 4271312 - DNA, 25 bp, Homo sapien
caatttagtaattcttggattttgg

SEQ ID NO: 4271313 - DNA, 25 bp, Homo sapien
ggctacccattttagtaccatctcc

SEQ ID NO: 4271314 - DNA, 25 bp, Homo sapien
cgaaggctacccattttagtaccat

SEQ ID NO: 4271315 - DNA, 25 bp, Homo sapien
acccattttagtaccatctccagga

SEQ ID NO: 4271316 - DNA, 25 bp, Homo sapien
tggagactagggtaagcccacagct

SEQ ID NO: 4271317 - DNA, 25 bp, Homo sapien
tgttggagactagggtaagcccaca

SEQ ID NO: 4271318 - DNA, 25 bp, Homo sapien
ttgctgttggagactagggtaagcc

SEQ ID NO: 4271319 - DNA, 25 bp, Homo sapien
agactagggtaagcccacagctcca

SEQ ID NO: 4271320 - DNA, 25 bp, Homo sapien
tgtgtttcactatttggtagcaggt

SEQ ID NO: 4271321 - DNA, 25 bp, Homo sapien
ctcaaaccagctgtgtttcactatt

SEQ ID NO: 4271322 - DNA, 25 bp, Homo sapien
tccgcaggttccaccaaatgaccca

SEQ ID NO: 4271323 - DNA, 25 bp, Homo sapien
actatttggtagcaggttttccgca

SEQ ID NO: 4271324 - DNA, 25 bp, Homo sapien
tcttgtccacgctacagcatggaaa

SEQ ID NO: 4271325 - DNA, 25 bp, Homo sapien
ttctcttgtccacgctacagcatgg

SEQ ID NO: 4271326 - DNA, 25 bp, Homo sapien
tgtccacgctacagcatggaaagca

SEQ ID NO: 4271327 - DNA, 25 bp, Homo sapien
ctttctcttgtccacgctacagcat

SEQ ID NO: 4271328 - DNA, 25 bp, Homo sapien
tacattctgatagtatactggtaac

SEQ ID NO: 4271329 - DNA, 25 bp, Homo sapien
gttgctttttgggaaccatctcagg

SEQ ID NO: 4271330 - DNA, 25 bp, Homo sapien
gatagtatactggtaacatcagact

SEQ ID NO: 4271331 - DNA, 25 bp, Homo sapien
catctcaggtaaccatccaaagcca

SEQ ID NO: 4271332 - DNA, 25 bp, Homo sapien
tgaactctctggctcgtgggcttct

SEQ ID NO: 4271333 - DNA, 25 bp, Homo sapien
ctggctcgtgggcttcttgttctcc

SEQ ID NO: 4271334 - DNA, 25 bp, Homo sapien
cagatgaggctcatcttcagagaac

SEQ ID NO: 4271335 - DNA, 25 bp, Homo sapien
ctttcggggatcctgtatggtcaga

SEQ ID NO: 4271336 - DNA, 25 bp, Homo sapien
cttcctcctccgcaagtggtgccaa

SEQ ID NO: 4271337 - DNA, 25 bp, Homo sapien
gtggtgccaaccaagtccaatcatg

SEQ ID NO: 4271338 - DNA, 25 bp, Homo sapien
gaaaattcaacgtcatcttcctcct

SEQ ID NO: 4271339 - DNA, 25 bp, Homo sapien
caggttgtgtgatgcgctgtgcatt

SEQ ID NO: 4271340 - DNA, 25 bp, Homo sapien
aggttagtataccaagctcctcctg

SEQ ID NO: 4271341 - DNA, 25 bp, Homo sapien
ctttggtacagaggttagtatacca

SEQ ID NO: 4271342 - DNA, 25 bp, Homo sapien
gaatgatgtctttgctttgtgcagc

SEQ ID NO: 4271343 - DNA, 25 bp, Homo sapien
tctttgctttgtgcagcacagcctc

SEQ ID NO: 4271344 - DNA, 25 bp, Homo sapien
agaaatgctcaagagtgtgtctcac

SEQ ID NO: 4271345 - DNA, 25 bp, Homo sapien
cggcggaatcgatccagtgctaact

SEQ ID NO: 4271346 - DNA, 25 bp, Homo sapien
caaaaagcccggcggaatcgatcca

SEQ ID NO: 4271347 - DNA, 25 bp, Homo sapien
aaaagcccggcggaatcgatccagt

SEQ ID NO: 4271348 - DNA, 25 bp, Homo sapien
agcccggcggaatcgatccagtgct

SEQ ID NO: 4271349 - DNA, 25 bp, Homo sapien
aattgagcagtaaggcaatgaagag

SEQ ID NO: 4271350 - DNA, 25 bp, Homo sapien
aaggaattgagcagtaaggcaatga

SEQ ID NO: 4271351 - DNA, 25 bp, Homo sapien
attgctaaaggaattgagcagtaag

SEQ ID NO: 4271352 - DNA, 25 bp, Homo sapien
ctaaaggaattgagcagtaaggcaa

SEQ ID NO: 4271353 - DNA, 25 bp, Homo sapien
acgaatcctttctcggtgctctcct

SEQ ID NO: 4271354 - DNA, 25 bp, Homo sapien
tcttctcaagttctgtaatcttcca

SEQ ID NO: 4271355 - DNA, 25 bp, Homo sapien
caagttctgtaatcttccacgaatc

SEQ ID NO: 4271356 - DNA, 25 bp, Homo sapien
taatcttccacgaatcctttctcgg

SEQ ID NO: 4271357 - DNA, 25 bp, Homo sapien
gatgatgatgcattcgcttcttgca

SEQ ID NO: 4271358 - DNA, 25 bp, Homo sapien
gaataccactaggaaggagtgccag

SEQ ID NO: 4271359 - DNA, 25 bp, Homo sapien
tatcaccgtgatcaatatgaagaca

SEQ ID NO: 4271360 - DNA, 25 bp, Homo sapien
tattttcgatccattccccgcagag

SEQ ID NO: 4271361 - DNA, 25 bp, Homo sapien
gctacggccaaaaagctgcatgcca

SEQ ID NO: 4271362 - DNA, 25 bp, Homo sapien
agactgtcgggcctgtcgggttaca

SEQ ID NO: 4271363 - DNA, 25 bp, Homo sapien
gtgccagtgccgtaaacatgagact

SEQ ID NO: 4271364 - DNA, 25 bp, Homo sapien
tcttttgggaattgaagctacggcc

SEQ ID NO: 4271365 - DNA, 25 bp, Homo sapien
aataaagatcacaatgaccaggacc

SEQ ID NO: 4271366 - DNA, 25 bp, Homo sapien
gcttccaagggctccgacagagttg

SEQ ID NO: 4271367 - DNA, 25 bp, Homo sapien
taattagtgtgttcaaagttggcca

SEQ ID NO: 4271368 - DNA, 25 bp, Homo sapien
gatttggctaacttgaagaccctga

SEQ ID NO: 4271369 - DNA, 25 bp, Homo sapien
ccagttaaggacaaactccatctgc

SEQ ID NO: 4271370 - DNA, 25 bp, Homo sapien
tccatctgctcatctataaagcaaa

SEQ ID NO: 4271371 - DNA, 25 bp, Homo sapien
cagttaaggacaaactccatctgct

SEQ ID NO: 4271372 - DNA, 25 bp, Homo sapien
gccagttaaggacaaactccatctg

SEQ ID NO: 4271373 - DNA, 25 bp, Homo sapien
gatcgctgtcataatctaatgctca

SEQ ID NO: 4271374 - DNA, 25 bp, Homo sapien
acatagccatcagatcgctgtcata

SEQ ID NO: 4271375 - DNA, 25 bp, Homo sapien
tcaaagttaaatctatcctgaacat

SEQ ID NO: 4271376 - DNA, 25 bp, Homo sapien
aatctaatgctcacctgtatctact

SEQ ID NO: 4271377 - DNA, 25 bp, Homo sapien
ctgaaggaacgcaagaatggccagc

SEQ ID NO: 4271378 - DNA, 25 bp, Homo sapien
ccagcttctcttttgaagtacacag

SEQ ID NO: 4271379 - DNA, 25 bp, Homo sapien
gaatggccagcttctcttttgaagt

SEQ ID NO: 4271380 - DNA, 25 bp, Homo sapien
tctcttttgaagtacacagttcatt

SEQ ID NO: 4271381 - DNA, 25 bp, Homo sapien
aagagcaacaatgctgtcaaaaatg

SEQ ID NO: 4271382 - DNA, 25 bp, Homo sapien
cgagcgcaatgatttttaggcacat

SEQ ID NO: 4271383 - DNA, 25 bp, Homo sapien
ccagcctcggcgaaagtagtggtag

SEQ ID NO: 4271384 - DNA, 25 bp, Homo sapien
gcaaaactcagaagagcaacaatgc

SEQ ID NO: 4271385 - DNA, 25 bp, Homo sapien
atgcttacataaagcttgcaaatat

SEQ ID NO: 4271386 - DNA, 25 bp, Homo sapien
acatgcttacataaagcttgcaaat

SEQ ID NO: 4271387 - DNA, 25 bp, Homo sapien
catgcttacataaagcttgcaaata

SEQ ID NO: 4271388 - DNA, 25 bp, Homo sapien
aacagccatcttttccctcactcca

SEQ ID NO: 4271389 - DNA, 25 bp, Homo sapien
gtaacagccatcttttccctcactc

SEQ ID NO: 4271390 - DNA, 25 bp, Homo sapien
cgtaacagccatcttttccctcact

SEQ ID NO: 4271391 - DNA, 25 bp, Homo sapien
accgtaacagccatcttttccctca

SEQ ID NO: 4271392 - DNA, 25 bp, Homo sapien
tgatggccagctcagtaaacgggtc

SEQ ID NO: 4271393 - DNA, 25 bp, Homo sapien
gggcaacagttccacacgaggtact

SEQ ID NO: 4271394 - DNA, 25 bp, Homo sapien
acgggtcagtcatcacagttctcag

SEQ ID NO: 4271395 - DNA, 25 bp, Homo sapien
accttcttaacgcacagccactggg

SEQ ID NO: 4271396 - DNA, 25 bp, Homo sapien
ctggaggagaatgagcgagaggttg

SEQ ID NO: 4271397 - DNA, 25 bp, Homo sapien
gaatgagcgagaggttgaggagtta

SEQ ID NO: 4271398 - DNA, 25 bp, Homo sapien
tgagcgagaggttgaggagttagct

SEQ ID NO: 4271399 - DNA, 25 bp, Homo sapien
ggagaatgagcgagaggttgaggag

SEQ ID NO: 4271400 - DNA, 25 bp, Homo sapien
tgggacagtcgtttggtttgctcta

SEQ ID NO: 4271401 - DNA, 25 bp, Homo sapien
cagtcgtttggtttgctctaggagc

SEQ ID NO: 4271402 - DNA, 25 bp, Homo sapien
gacagtcgtttggtttgctctagga

SEQ ID NO: 4271403 - DNA, 25 bp, Homo sapien
cgtttggtttgctctaggagctgtg

SEQ ID NO: 4271404 - DNA, 25 bp, Homo sapien
caagggaagtaagtgaacttctgtc

SEQ ID NO: 4271405 - DNA, 25 bp, Homo sapien
gtaagtgaacttctgtcaattccca

SEQ ID NO: 4271406 - DNA, 25 bp, Homo sapien
gctggtctttcccagactctctcaa

SEQ ID NO: 4271407 - DNA, 25 bp, Homo sapien
aatatgatgtttcaagggaagtaag

SEQ ID NO: 4271408 - DNA, 25 bp, Homo sapien
cagccagggttaagttaatcaggta

SEQ ID NO: 4271409 - DNA, 25 bp, Homo sapien
tcctcatatgccatggtaacaacag

SEQ ID NO: 4271410 - DNA, 25 bp, Homo sapien
aagaagactgagtagagcccagtag

SEQ ID NO: 4271411 - DNA, 25 bp, Homo sapien
tgcagctacattcttgttctgctcc

SEQ ID NO: 4271412 - DNA, 25 bp, Homo sapien
cttgggtcatcagccggaacatggc

SEQ ID NO: 4271413 - DNA, 25 bp, Homo sapien
aagaccagccaaagttgtcaaaatt

SEQ ID NO: 4271414 - DNA, 25 bp, Homo sapien
caaaattcgtataattatagtcagg

SEQ ID NO: 4271415 - DNA, 25 bp, Homo sapien
caggattaattttggtgtgcttaca

SEQ ID NO: 4271416 - DNA, 25 bp, Homo sapien
gatccttattctttctaccacagtc

SEQ ID NO: 4271417 - DNA, 25 bp, Homo sapien
tgtctcctaaacgtctctggaatgc

SEQ ID NO: 4271418 - DNA, 25 bp, Homo sapien
ccactgtacatcttcatgatcctta

SEQ ID NO: 4271419 - DNA, 25 bp, Homo sapien
gatatgtcctagtctttctgtctcc

SEQ ID NO: 4271420 - DNA, 25 bp, Homo sapien
tccagatgccacacattttgaattc

SEQ ID NO: 4271421 - DNA, 25 bp, Homo sapien
catccagatgccacacattttgaat

SEQ ID NO: 4271422 - DNA, 25 bp, Homo sapien
ccagatgccacacattttgaattca

SEQ ID NO: 4271423 - DNA, 25 bp, Homo sapien
atccagatgccacacattttgaatt

SEQ ID NO: 4271424 - DNA, 25 bp, Homo sapien
cataagcttccgggttactgatatt

SEQ ID NO: 4271425 - DNA, 25 bp, Homo sapien
ataagcttccgggttactgatattt

SEQ ID NO: 4271426 - DNA, 25 bp, Homo sapien
tcgagatgcatttcaggttcagact

SEQ ID NO: 4271427 - DNA, 25 bp, Homo sapien
caggttcagacttcccatgaagagc

SEQ ID NO: 4271428 - DNA, 25 bp, Homo sapien
gatgcatttcaggttcagacttccc

SEQ ID NO: 4271429 - DNA, 25 bp, Homo sapien
agtccctcgagatgcatttcaggtt

SEQ ID NO: 4271430 - DNA, 25 bp, Homo sapien
taatcacgttgaccagcttcttcac

SEQ ID NO: 4271431 - DNA, 25 bp, Homo sapien
tcttcacagagcgtagcaaggcccc

SEQ ID NO: 4271432 - DNA, 25 bp, Homo sapien
gcttcttcacagagcgtagcaaggc

SEQ ID NO: 4271433 - DNA, 25 bp, Homo sapien
gcaaaagaaggtgaggataatcacg

SEQ ID NO: 4271434 - DNA, 25 bp, Homo sapien
gtacgcaggggcaatagtttgatgg

SEQ ID NO: 4271435 - DNA, 25 bp, Homo sapien
ctgaacacacggaaggtacgcaggg

SEQ ID NO: 4271436 - DNA, 25 bp, Homo sapien
tacgcaggggcaatagtttgatggt

SEQ ID NO: 4271437 - DNA, 25 bp, Homo sapien
agctctgaacacacggaaggtacgc

SEQ ID NO: 4271438 - DNA, 25 bp, Homo sapien
ccatggatctcgaaggaaagaaaac

SEQ ID NO: 4271439 - DNA, 25 bp, Homo sapien
catccagaatgaaacctcttgccaa

SEQ ID NO: 4271440 - DNA, 25 bp, Homo sapien
aatataaatcccagtgaagacacac

SEQ ID NO: 4271441 - DNA, 25 bp, Homo sapien
tccaatgacaatggagtccagccag

SEQ ID NO: 4271442 - DNA, 25 bp, Homo sapien
gatgataacggtgccgataatgaac

SEQ ID NO: 4271443 - DNA, 25 bp, Homo sapien
tgtagccatgaacacgcagttgatg

SEQ ID NO: 4271444 - DNA, 25 bp, Homo sapien
tctgcaatgtcagtattgttactgt

SEQ ID NO: 4271445 - DNA, 25 bp, Homo sapien
ctgttgctgtttttagcaggccctg

SEQ ID NO: 4271446 - DNA, 25 bp, Homo sapien
tccatccaataacatgaacaccgtg

SEQ ID NO: 4271447 - DNA, 25 bp, Homo sapien
caataacatgaacaccgtggggcac

SEQ ID NO: 4271448 - DNA, 25 bp, Homo sapien
catccaataacatgaacaccgtggg

SEQ ID NO: 4271449 - DNA, 25 bp, Homo sapien
atttgcttccatccaataacatgaa

SEQ ID NO: 4271450 - DNA, 25 bp, Homo sapien
ttagtaaaaggtgcaatgaaaggat

SEQ ID NO: 4271451 - DNA, 25 bp, Homo sapien
tctttctgtttaacaccataaatgt

SEQ ID NO: 4271452 - DNA, 25 bp, Homo sapien
gaagcggtagattgtcctctttctg

SEQ ID NO: 4271453 - DNA, 25 bp, Homo sapien
gcccaaaaatgaacaaggcatgctt

SEQ ID NO: 4271454 - DNA, 25 bp, Homo sapien
gaatggactgagactctaatggcta

SEQ ID NO: 4271455 - DNA, 25 bp, Homo sapien
gaaggagacctctacagttaactca

SEQ ID NO: 4271456 - DNA, 25 bp, Homo sapien
tgatgcagaaggagacctctacagt

SEQ ID NO: 4271457 - DNA, 25 bp, Homo sapien
gctgcctgactcatgcgtctcctct

SEQ ID NO: 4271458 - DNA, 25 bp, Homo sapien
agcattgatgcagaaggagacctct

SEQ ID NO: 4271459 - DNA, 25 bp, Homo sapien
ctatacctccaagaaggccctggaa

SEQ ID NO: 4271460 - DNA, 25 bp, Homo sapien
tatacctccaagaaggccctggaat

SEQ ID NO: 4271461 - DNA, 25 bp, Homo sapien
atacctccaagaaggccctggaatc

SEQ ID NO: 4271462 - DNA, 25 bp, Homo sapien
cttatgatttcggtagaatgggtcc

SEQ ID NO: 4271463 - DNA, 25 bp, Homo sapien
tccagaggctttcctatgagctcac

SEQ ID NO: 4271464 - DNA, 25 bp, Homo sapien
tatgatttcggtagaatgggtccaa

SEQ ID NO: 4271465 - DNA, 25 bp, Homo sapien
gatttcggtagaatgggtccaagtc

SEQ ID NO: 4271466 - DNA, 25 bp, Homo sapien
gcggaaattccgctcatctggaaag

SEQ ID NO: 4271467 - DNA, 25 bp, Homo sapien
agagcttgggcaacttcctggaggc

SEQ ID NO: 4271468 - DNA, 25 bp, Homo sapien
gattactgggtagcatctgtcatcc

SEQ ID NO: 4271469 - DNA, 25 bp, Homo sapien
cttctcaattgcagccagagagtcg

SEQ ID NO: 4271470 - DNA, 25 bp, Homo sapien
gatcagaagagatgaccaccactgt

SEQ ID NO: 4271471 - DNA, 25 bp, Homo sapien
gggaataaaacagcctgccctagga

SEQ ID NO: 4271472 - DNA, 25 bp, Homo sapien
gacaagccacagatcctcagaaagg

SEQ ID NO: 4271473 - DNA, 25 bp, Homo sapien
taaaggatggtgtcataaggatcta

SEQ ID NO: 4271474 - DNA, 25 bp, Homo sapien
tgtaatggcacctcactctcaccaa

SEQ ID NO: 4271475 - DNA, 25 bp, Homo sapien
gtgtaatggcacctcactctcacca

SEQ ID NO: 4271476 - DNA, 25 bp, Homo sapien
gggtgtaatggcacctcactctcac

SEQ ID NO: 4271477 - DNA, 25 bp, Homo sapien
tggggtgtaatggcacctcactctc

SEQ ID NO: 4271478 - DNA, 25 bp, Homo sapien
tttgctcaacagaagagaaagccgc

SEQ ID NO: 4271479 - DNA, 25 bp, Homo sapien
ctgctgggtgctcgtaaatgctgga

SEQ ID NO: 4271480 - DNA, 25 bp, Homo sapien
tctcagaggtgcagacaacccttgc

SEQ ID NO: 4271481 - DNA, 25 bp, Homo sapien
acttaggcacaactcacagtaggtg

SEQ ID NO: 4271482 - DNA, 25 bp, Homo sapien
cagtttcaccttgcaatttgtcagc

SEQ ID NO: 4271483 - DNA, 25 bp, Homo sapien
cattatcttagtgaaatccttcatg

SEQ ID NO: 4271484 - DNA, 25 bp, Homo sapien
caccttgcaatttgtcagcataata

SEQ ID NO: 4271485 - DNA, 25 bp, Homo sapien
catgtttgtgagattggcagtttca

SEQ ID NO: 4271486 - DNA, 25 bp, Homo sapien
ctagacaacttctgaaaacagctgg

SEQ ID NO: 4271487 - DNA, 25 bp, Homo sapien
gacaacttctgaaaacagctggccc

SEQ ID NO: 4271488 - DNA, 25 bp, Homo sapien
agctggccctccaaatcaagactgc

SEQ ID NO: 4271489 - DNA, 25 bp, Homo sapien
tcaagactgcctgatgccacttcct

SEQ ID NO: 4271490 - DNA, 25 bp, Homo sapien
gaaagacatactggatactttcact

SEQ ID NO: 4271491 - DNA, 25 bp, Homo sapien
ggtaaacaagatgccaactctaggg

SEQ ID NO: 4271492 - DNA, 25 bp, Homo sapien
cgctcccctctggtaaacaagatgc

SEQ ID NO: 4271493 - DNA, 25 bp, Homo sapien
ctagggtacggtggaaagacatact

SEQ ID NO: 4271494 - DNA, 25 bp, Homo sapien
agccaaaaacatgcgaagcactggg

SEQ ID NO: 4271495 - DNA, 25 bp, Homo sapien
caaaaacatgcgaagcactgggaca

SEQ ID NO: 4271496 - DNA, 25 bp, Homo sapien
aaaacatgcgaagcactgggacaat

SEQ ID NO: 4271497 - DNA, 25 bp, Homo sapien
ccaaaaacatgcgaagcactgggac

SEQ ID NO: 4271498 - DNA, 25 bp, Homo sapien
gatcctggtactgatcaacatggaa

SEQ ID NO: 4271499 - DNA, 25 bp, Homo sapien
tcctggtactgatcaacatggaagg

SEQ ID NO: 4271500 - DNA, 25 bp, Homo sapien
cctggtactgatcaacatggaaggt

SEQ ID NO: 4271501 - DNA, 25 bp, Homo sapien
tggtactgatcaacatggaaggttt

SEQ ID NO: 4271502 - DNA, 25 bp, Homo sapien
ggcaacattgaagttttgacttgct

SEQ ID NO: 4271503 - DNA, 25 bp, Homo sapien
cttgggctagtccaatcctccttag

SEQ ID NO: 4271504 - DNA, 25 bp, Homo sapien
caaatttagtgcagaaacttgattg

SEQ ID NO: 4271505 - DNA, 25 bp, Homo sapien
tgcctggcaacattgaagttttgac

SEQ ID NO: 4271506 - DNA, 25 bp, Homo sapien
tctttagccaatggaccatgcagtg

SEQ ID NO: 4271507 - DNA, 25 bp, Homo sapien
gctgtctgctgttgagccttcacca

SEQ ID NO: 4271508 - DNA, 25 bp, Homo sapien
cagaccaggctccttagtgcactca

SEQ ID NO: 4271509 - DNA, 25 bp, Homo sapien
ggtgaacccaacagtaggaagctga

SEQ ID NO: 4271510 - DNA, 25 bp, Homo sapien
gctcagcagtcatcagcttgtgggt

SEQ ID NO: 4271511 - DNA, 25 bp, Homo sapien
gaagcttgcggttagtggcattaac

SEQ ID NO: 4271512 - DNA, 25 bp, Homo sapien
tggcagctccagaactaattgagtg

SEQ ID NO: 4271513 - DNA, 25 bp, Homo sapien
aactaagtcatcagtctttcaggga

SEQ ID NO: 4271514 - DNA, 25 bp, Homo sapien
catgtaaagttgaagatctgggcaa

SEQ ID NO: 4271515 - DNA, 25 bp, Homo sapien
cagagtcctgtgtttttaggtgtga

SEQ ID NO: 4271516 - DNA, 25 bp, Homo sapien
gactgtttcacttagacacatgtga

SEQ ID NO: 4271517 - DNA, 25 bp, Homo sapien
tgtgccaaattggttctcagtagac

SEQ ID NO: 4271518 - DNA, 25 bp, Homo sapien
tgcagtagatatgaaggctttttcc

SEQ ID NO: 4271519 - DNA, 25 bp, Homo sapien
gagacacctcagtcgggccacaact

SEQ ID NO: 4271520 - DNA, 25 bp, Homo sapien
ctttaagcccacacactctgtagct

SEQ ID NO: 4271521 - DNA, 25 bp, Homo sapien
cttgttagagacacctcagtcgggc

SEQ ID NO: 4271522 - DNA, 25 bp, Homo sapien
gaagaagtgagcaaagacgtggcca

SEQ ID NO: 4271523 - DNA, 25 bp, Homo sapien
gacaagcctcctgtatgaagccaga

SEQ ID NO: 4271524 - DNA, 25 bp, Homo sapien
tcatagcacttggactgttgggccg

SEQ ID NO: 4271525 - DNA, 25 bp, Homo sapien
tatttacacaaagcgagctgagacc

SEQ ID NO: 4271526 - DNA, 25 bp, Homo sapien
agccagaacctttgggtgagggcaa

SEQ ID NO: 4271527 - DNA, 25 bp, Homo sapien
gactgccaggctacagagttaaggg

SEQ ID NO: 4271528 - DNA, 25 bp, Homo sapien
cagtcctgtggcgattctgttctac

SEQ ID NO: 4271529 - DNA, 25 bp, Homo sapien
tgagggcaactttgggtcagactgc

SEQ ID NO: 4271530 - DNA, 25 bp, Homo sapien
tatgcacacgtatcagctgctctgg

SEQ ID NO: 4271531 - DNA, 25 bp, Homo sapien
tgagttccctgcatgtacaccagca

SEQ ID NO: 4271532 - DNA, 25 bp, Homo sapien
gagtgcagggcctaacctagcctta

SEQ ID NO: 4271533 - DNA, 25 bp, Homo sapien
tgggaccctccctccatatagttgg

SEQ ID NO: 4271534 - DNA, 25 bp, Homo sapien
cgtggatagacctagtcaggtagac

SEQ ID NO: 4271535 - DNA, 25 bp, Homo sapien
tagacctagtcaggtagactggctt

SEQ ID NO: 4271536 - DNA, 25 bp, Homo sapien
cgtgcgtggatagacctagtcaggt

SEQ ID NO: 4271537 - DNA, 25 bp, Homo sapien
aaccgtgcgtggatagacctagtca

SEQ ID NO: 4271538 - DNA, 25 bp, Homo sapien
caaggaatcctgaccgcatagtgca

SEQ ID NO: 4271539 - DNA, 25 bp, Homo sapien
gctgaagggcctagaatttccaacg

SEQ ID NO: 4271540 - DNA, 25 bp, Homo sapien
cattgtagcctagggacaaggacac

SEQ ID NO: 4271541 - DNA, 25 bp, Homo sapien
tggtctgggcacaaatgggtctctg

SEQ ID NO: 4271542 - DNA, 25 bp, Homo sapien
ctcagcctccgtcccagtatctagg

SEQ ID NO: 4271543 - DNA, 25 bp, Homo sapien
cctcagcctccgtcccagtatctag

SEQ ID NO: 4271544 - DNA, 25 bp, Homo sapien
ttattctgtggtagagatctgggcc

SEQ ID NO: 4271545 - DNA, 25 bp, Homo sapien
ttctgtggtagagatctgggcctgg

SEQ ID NO: 4271546 - DNA, 25 bp, Homo sapien
ctgagcttcaagcagctcggcggac

SEQ ID NO: 4271547 - DNA, 25 bp, Homo sapien
aggtggtccgcctgggcttgggcac

SEQ ID NO: 4271548 - DNA, 25 bp, Homo sapien
actgtcaggaagagtcagctgaggc

SEQ ID NO: 4271549 - DNA, 25 bp, Homo sapien
agactgtcaggaagagtcagctgag

SEQ ID NO: 4271550 - DNA, 25 bp, Homo sapien
agctgaggcaggtggtccgcctggg

SEQ ID NO: 4271551 - DNA, 25 bp, Homo sapien
ctcaaactctgacccagaccatgta

SEQ ID NO: 4271552 - DNA, 25 bp, Homo sapien
ggagacctcaaactctgacccagac

SEQ ID NO: 4271553 - DNA, 25 bp, Homo sapien
aggagacctcaaactctgacccaga

SEQ ID NO: 4271554 - DNA, 25 bp, Homo sapien
aactctgacccagaccatgtagcct

SEQ ID NO: 4271555 - DNA, 25 bp, Homo sapien
cagatgtcctctggccctgaggttg

SEQ ID NO: 4271556 - DNA, 25 bp, Homo sapien
gatgtcctctggccctgaggttgag

SEQ ID NO: 4271557 - DNA, 25 bp, Homo sapien
caccccgctcatgagaactgctgct

SEQ ID NO: 4271558 - DNA, 25 bp, Homo sapien
agatgtcctctggccctgaggttga

SEQ ID NO: 4271559 - DNA, 25 bp, Homo sapien
gaaattcccgacacgtccaggaagc

SEQ ID NO: 4271560 - DNA, 25 bp, Homo sapien
agagaaattcccgacacgtccagga

SEQ ID NO: 4271561 - DNA, 25 bp, Homo sapien
gtccaagagagaaattcccgacacg

SEQ ID NO: 4271562 - DNA, 25 bp, Homo sapien
aagagagaaattcccgacacgtcca

SEQ ID NO: 4271563 - DNA, 25 bp, Homo sapien
gcctggggaaagttttgacatagct

SEQ ID NO: 4271564 - DNA, 25 bp, Homo sapien
atagctgccaaagtccagccccaag

SEQ ID NO: 4271565 - DNA, 25 bp, Homo sapien
gcaaggcctggggaaagttttgaca

SEQ ID NO: 4271566 - DNA, 25 bp, Homo sapien
ttgacatagctgccaaagtccagcc

SEQ ID NO: 4271567 - DNA, 25 bp, Homo sapien
gtgggggctgaagaggagtctccat

SEQ ID NO: 4271568 - DNA, 25 bp, Homo sapien
ctgggtccataactcgctgcactgg

SEQ ID NO: 4271569 - DNA, 25 bp, Homo sapien
cataactcgctgcactggaggtggg

SEQ ID NO: 4271570 - DNA, 25 bp, Homo sapien
gtccataactcgctgcactggaggt

SEQ ID NO: 4271571 - DNA, 25 bp, Homo sapien
caggaaggggatcctccatggagga

SEQ ID NO: 4271572 - DNA, 25 bp, Homo sapien
cccaggaaggggatcctccatggag

SEQ ID NO: 4271573 - DNA, 25 bp, Homo sapien
aaggggatcctccatggaggagcca

SEQ ID NO: 4271574 - DNA, 25 bp, Homo sapien
gaaggggatcctccatggaggagcc

SEQ ID NO: 4271575 - DNA, 25 bp, Homo sapien
ccagtgcccaaaggtgctctcagag

SEQ ID NO: 4271576 - DNA, 25 bp, Homo sapien
cccaaaggtgctctcagaggaccca

SEQ ID NO: 4271577 - DNA, 25 bp, Homo sapien
ctggagaacatccttgaatactccc

SEQ ID NO: 4271578 - DNA, 25 bp, Homo sapien
ttgaatactccctggcctagaccca

SEQ ID NO: 4271579 - DNA, 25 bp, Homo sapien
gggggtgggtccaggtggtagagca

SEQ ID NO: 4271580 - DNA, 25 bp, Homo sapien
gtctccagggaaggagagtcctcgg

SEQ ID NO: 4271581 - DNA, 25 bp, Homo sapien
cagggaaggagagtcctcgggggtg

SEQ ID NO: 4271582 - DNA, 25 bp, Homo sapien
ctggaacctgtctccagggaaggag

SEQ ID NO: 4271583 - DNA, 25 bp, Homo sapien
tggtggggcaccaagtggtagagca

SEQ ID NO: 4271584 - DNA, 25 bp, Homo sapien
caccaagtggtagagcagaaggtgg

SEQ ID NO: 4271585 - DNA, 25 bp, Homo sapien
ccaggtggcttcttgtggtagctgg

SEQ ID NO: 4271586 - DNA, 25 bp, Homo sapien
gccaggtggcttcttgtggtagctg

SEQ ID NO: 4271587 - DNA, 25 bp, Homo sapien
gtgtagatacccatagccaatgcca

SEQ ID NO: 4271588 - DNA, 25 bp, Homo sapien
ccggtgtagatacccatagccaatg

SEQ ID NO: 4271589 - DNA, 25 bp, Homo sapien
gggatccggtgtagatacccatagc

SEQ ID NO: 4271590 - DNA, 25 bp, Homo sapien
ctgagttgggatccggtgtagatac

SEQ ID NO: 4271591 - DNA, 25 bp, Homo sapien
cgaaggccagaaacattcaatccag

SEQ ID NO: 4271592 - DNA, 25 bp, Homo sapien
ttctgaaataccggtcagcctcagg

SEQ ID NO: 4271593 - DNA, 25 bp, Homo sapien
gctgaaaagggtacttctgaaatac

SEQ ID NO: 4271594 - DNA, 25 bp, Homo sapien
gaggtccatgcccaatggtcaggcc

SEQ ID NO: 4271595 - DNA, 25 bp, Homo sapien
gcagccctccaaccccacgaagtac

SEQ ID NO: 4271596 - DNA, 25 bp, Homo sapien
tgcagccctccaaccccacgaagta

SEQ ID NO: 4271597 - DNA, 25 bp, Homo sapien
ccccaggctgcgttgggagttacag

SEQ ID NO: 4271598 - DNA, 25 bp, Homo sapien
tccaccccaggctgcgttgggagtt

SEQ ID NO: 4271599 - DNA, 25 bp, Homo sapien
ccaggctgcgttgggagttacagtc

SEQ ID NO: 4271600 - DNA, 25 bp, Homo sapien
aggctgcgttgggagttacagtcac

SEQ ID NO: 4271601 - DNA, 25 bp, Homo sapien
gacttggagttatacaccatcagct

SEQ ID NO: 4271602 - DNA, 25 bp, Homo sapien
caagggcttcccctcatgagactcg

SEQ ID NO: 4271603 - DNA, 25 bp, Homo sapien
catgagactcgatgagcgtaaagaa

SEQ ID NO: 4271604 - DNA, 25 bp, Homo sapien
cgatgagcgtaaagaagtcctcgga

SEQ ID NO: 4271605 - DNA, 25 bp, Homo sapien
tgagaaacgcatagcacctgaggcc

SEQ ID NO: 4271606 - DNA, 25 bp, Homo sapien
tgtgagaaacgcatagcacctgagg

SEQ ID NO: 4271607 - DNA, 25 bp, Homo sapien
ctgtgagaaacgcatagcacctgag

SEQ ID NO: 4271608 - DNA, 25 bp, Homo sapien
gagaaacgcatagcacctgaggcct

SEQ ID NO: 4271609 - DNA, 25 bp, Homo sapien
ggacagcacccttctcttcacacca

SEQ ID NO: 4271610 - DNA, 25 bp, Homo sapien
ttcacaccacatccagagggtctgg

SEQ ID NO: 4271611 - DNA, 25 bp, Homo sapien
gaggggcaaattgcgggttcctcac

SEQ ID NO: 4271612 - DNA, 25 bp, Homo sapien
ctaaagcctcaacaaaaccagacac

SEQ ID NO: 4271613 - DNA, 25 bp, Homo sapien
cagcaggtgaagatggttccacatc

SEQ ID NO: 4271614 - DNA, 25 bp, Homo sapien
gaatctggtccgaaccaaccacata

SEQ ID NO: 4271615 - DNA, 25 bp, Homo sapien
ctcctggagaatctggtccgaacca

SEQ ID NO: 4271616 - DNA, 25 bp, Homo sapien
aaccaaccacatagtctgtgtaggg

SEQ ID NO: 4271617 - DNA, 25 bp, Homo sapien
tccctcatgggcagattaaggcagg

SEQ ID NO: 4271618 - DNA, 25 bp, Homo sapien
gaaaagcacaccttggctacaggag

SEQ ID NO: 4271619 - DNA, 25 bp, Homo sapien
gctgcaggcatgtggctaaagactc

SEQ ID NO: 4271620 - DNA, 25 bp, Homo sapien
tacaggagcacccactacattgctg

SEQ ID NO: 4271621 - DNA, 25 bp, Homo sapien
accctcatggtcttcatattgaaca

SEQ ID NO: 4271622 - DNA, 25 bp, Homo sapien
tattgaacacctccagcttcacggg

SEQ ID NO: 4271623 - DNA, 25 bp, Homo sapien
tgcggaagctgcagaagcgcacact

SEQ ID NO: 4271624 - DNA, 25 bp, Homo sapien
tggctttcagtagtgccttcagggt

SEQ ID NO: 4271625 - DNA, 25 bp, Homo sapien
gcccaggctaggaccctcagacaag

SEQ ID NO: 4271626 - DNA, 25 bp, Homo sapien
caagggccttagtgggcagcagccc

SEQ ID NO: 4271627 - DNA, 25 bp, Homo sapien
gctaggaccctcagacaagtctggg

SEQ ID NO: 4271628 - DNA, 25 bp, Homo sapien
gaccctcagacaagtctgggcctga

SEQ ID NO: 4271629 - DNA, 25 bp, Homo sapien
cctcgagtgcccaatggtgatgatg

SEQ ID NO: 4271630 - DNA, 25 bp, Homo sapien
cagcctcgagtgcccaatggtgatg

SEQ ID NO: 4271631 - DNA, 25 bp, Homo sapien
tcgagtgcccaatggtgatgatgaa

SEQ ID NO: 4271632 - DNA, 25 bp, Homo sapien
gcctcgagtgcccaatggtgatgat

SEQ ID NO: 4271633 - DNA, 25 bp, Homo sapien
agggctggttggctgagtgccaggg

SEQ ID NO: 4271634 - DNA, 25 bp, Homo sapien
taagggctggttggctgagtgccag

SEQ ID NO: 4271635 - DNA, 25 bp, Homo sapien
ggctggttggctgagtgccagggca

SEQ ID NO: 4271636 - DNA, 25 bp, Homo sapien
gctggttggctgagtgccagggcat

SEQ ID NO: 4271637 - DNA, 25 bp, Homo sapien
ggctggatgcattccactgtccacg

SEQ ID NO: 4271638 - DNA, 25 bp, Homo sapien
tgcctttaatcaaacctgttggaag

SEQ ID NO: 4271639 - DNA, 25 bp, Homo sapien
gcacaaatcctgtcaactctgggtt

SEQ ID NO: 4271640 - DNA, 25 bp, Homo sapien
ggtgtctcaccataagaaagcccat

SEQ ID NO: 4271641 - DNA, 25 bp, Homo sapien
actgtcctcggcgtggctgactctc

SEQ ID NO: 4271642 - DNA, 25 bp, Homo sapien
gcaggcgagcgtaaatgtgtgctaa

SEQ ID NO: 4271643 - DNA, 25 bp, Homo sapien
ccgactggtagtggtgcattcttca

SEQ ID NO: 4271644 - DNA, 25 bp, Homo sapien
tgtgtgctaagtgcacgagtgcgtc

SEQ ID NO: 4271645 - DNA, 25 bp, Homo sapien
tcggcgccgcctgcgggctgctcag

SEQ ID NO: 4271646 - DNA, 25 bp, Homo sapien
ctcggcgccgcctgcgggctgctca

SEQ ID NO: 4271647 - DNA, 25 bp, Homo sapien
gaagccctcggcgccgcctgcgggc

SEQ ID NO: 4271648 - DNA, 25 bp, Homo sapien
gccctcggcgccgcctgcgggctgc

SEQ ID NO: 4271649 - DNA, 25 bp, Homo sapien
cctcagttatatcaggcggtcctgc

SEQ ID NO: 4271650 - DNA, 25 bp, Homo sapien
tggacgctcctagcaaccggctagc

SEQ ID NO: 4271651 - DNA, 25 bp, Homo sapien
gacgtgaggcgttttgttcctccca

SEQ ID NO: 4271652 - DNA, 25 bp, Homo sapien
gctagcagctcggtttccaaggact

SEQ ID NO: 4271653 - DNA, 25 bp, Homo sapien
cattcccatgtagcagataagtctc

SEQ ID NO: 4271654 - DNA, 25 bp, Homo sapien
gccctttgtaataagcattgtgaca

SEQ ID NO: 4271655 - DNA, 25 bp, Homo sapien
ctctctaaagagtgcagtgcagggc

SEQ ID NO: 4271656 - DNA, 25 bp, Homo sapien
tgctaacatgcttgctccggtctct

SEQ ID NO: 4271657 - DNA, 25 bp, Homo sapien
ggaacagtgtaactcggatggtgct

SEQ ID NO: 4271658 - DNA, 25 bp, Homo sapien
gaacagtggacagataagggtccct

SEQ ID NO: 4271659 - DNA, 25 bp, Homo sapien
ccagtgactaaggtttgggaacagt

SEQ ID NO: 4271660 - DNA, 25 bp, Homo sapien
cagagttttcaagagcagttgtcca

SEQ ID NO: 4271661 - DNA, 25 bp, Homo sapien
taatcgctacagaagggtgtctagg

SEQ ID NO: 4271662 - DNA, 25 bp, Homo sapien
gacaggacaactcaatgtaccaggg

SEQ ID NO: 4271663 - DNA, 25 bp, Homo sapien
tgagtcctctaatggcactgatatg

SEQ ID NO: 4271664 - DNA, 25 bp, Homo sapien
gaccatgcatgtccagaggcaagag

SEQ ID NO: 4271665 - DNA, 25 bp, Homo sapien
cctctttattggtacctgtaagctc

SEQ ID NO: 4271666 - DNA, 25 bp, Homo sapien
tctttattggtacctgtaagctcag

SEQ ID NO: 4271667 - DNA, 25 bp, Homo sapien
gcctctttattggtacctgtaagct

SEQ ID NO: 4271668 - DNA, 25 bp, Homo sapien
ctctttattggtacctgtaagctca

SEQ ID NO: 4271669 - DNA, 25 bp, Homo sapien
cagagcctgcgtttcttggcacaga

SEQ ID NO: 4271670 - DNA, 25 bp, Homo sapien
cgaaaagtggtctgccaagctccag

SEQ ID NO: 4271671 - DNA, 25 bp, Homo sapien
gatttagccacccatgggtctaggg

SEQ ID NO: 4271672 - DNA, 25 bp, Homo sapien
tgtctcaccgtctttgggctaagga

SEQ ID NO: 4271673 - DNA, 25 bp, Homo sapien
ccaggacgcctgatgtgaagctaca

SEQ ID NO: 4271674 - DNA, 25 bp, Homo sapien
gggtcactagtaccaaagatgtcag

SEQ ID NO: 4271675 - DNA, 25 bp, Homo sapien
caggttggcattctcatccaggacg

SEQ ID NO: 4271676 - DNA, 25 bp, Homo sapien
caaactggctgtcaataaagggatc

SEQ ID NO: 4271677 - DNA, 25 bp, Homo sapien
tgaaactcaagatgcgtgccaggct

SEQ ID NO: 4271678 - DNA, 25 bp, Homo sapien
gctgtcatcatcaacgccaggctgg

SEQ ID NO: 4271679 - DNA, 25 bp, Homo sapien
gaaactcaagatgcgtgccaggctg

SEQ ID NO: 4271680 - DNA, 25 bp, Homo sapien
tcatcatcaacgccaggctggaagc

SEQ ID NO: 4271681 - DNA, 25 bp, Homo sapien
tcactagtgcccgatgctgatgaag

SEQ ID NO: 4271682 - DNA, 25 bp, Homo sapien
gatgaaatgggtctgaactcttgcc

SEQ ID NO: 4271683 - DNA, 25 bp, Homo sapien
gattaaattccacacggcccatggg

SEQ ID NO: 4271684 - DNA, 25 bp, Homo sapien
tcctgttccaactgcaggcgggtga

SEQ ID NO: 4271685 - DNA, 25 bp, Homo sapien
aatcctcccgggattggcgcagtgc

SEQ ID NO: 4271686 - DNA, 25 bp, Homo sapien
agatcctatcgcagtgacagccaca

SEQ ID NO: 4271687 - DNA, 25 bp, Homo sapien
cgatcgatccttcgcacacctgaag

SEQ ID NO: 4271688 - DNA, 25 bp, Homo sapien
cacagaggcgtcatcaatggcatcc

SEQ ID NO: 4271689 - DNA, 25 bp, Homo sapien
aaagagaagcgacggcaagcactgt

SEQ ID NO: 4271690 - DNA, 25 bp, Homo sapien
tctttcaagcgctggcggagcttct

SEQ ID NO: 4271691 - DNA, 25 bp, Homo sapien
gcgagcccgcttcaggatagacagg

SEQ ID NO: 4271692 - DNA, 25 bp, Homo sapien
ggaagtagaagacggtgatcccatc

SEQ ID NO: 4271693 - DNA, 25 bp, Homo sapien
cacccatgtcagaactggcttattg

SEQ ID NO: 4271694 - DNA, 25 bp, Homo sapien
tgcaacaggcttaaaaaggctttcc

SEQ ID NO: 4271695 - DNA, 25 bp, Homo sapien
tgtttattagccatgtacaggtcct

SEQ ID NO: 4271696 - DNA, 25 bp, Homo sapien
gaaatgtgaatttaggagcctgtgt

SEQ ID NO: 4271697 - DNA, 25 bp, Homo sapien
agtcccaggcacgggagacagaaga

SEQ ID NO: 4271698 - DNA, 25 bp, Homo sapien
aggagcgagactggcacccagagga

SEQ ID NO: 4271699 - DNA, 25 bp, Homo sapien
gtcctcatccagctggtcaaatttc

SEQ ID NO: 4271700 - DNA, 25 bp, Homo sapien
gaggagaccgaggagttgtcctcat

SEQ ID NO: 4271701 - DNA, 25 bp, Homo sapien
ggtggtgccggacgtgctctggggt

SEQ ID NO: 4271702 - DNA, 25 bp, Homo sapien
ttgtcttaagacctcatagggttgg

SEQ ID NO: 4271703 - DNA, 25 bp, Homo sapien
tataagtcagagcagtggttcccca

SEQ ID NO: 4271704 - DNA, 25 bp, Homo sapien
gaaggcagacacgaaatacatgcaa

SEQ ID NO: 4271705 - DNA, 25 bp, Homo sapien
gctcctggatgcacacgacacagat

SEQ ID NO: 4271706 - DNA, 25 bp, Homo sapien
cctccaaatctgcagagcgggaatg

SEQ ID NO: 4271707 - DNA, 25 bp, Homo sapien
caggttctagtgatgaacaatcccc

SEQ ID NO: 4271708 - DNA, 25 bp, Homo sapien
ttatgacctccaagcctacagacag

SEQ ID NO: 4271709 - DNA, 25 bp, Homo sapien
gacacagggaagctacggtcatgct

SEQ ID NO: 4271710 - DNA, 25 bp, Homo sapien
gggaagtgcccctggttctcatgtt

SEQ ID NO: 4271711 - DNA, 25 bp, Homo sapien
cctgatactcctctggagaggcggg

SEQ ID NO: 4271712 - DNA, 25 bp, Homo sapien
tgttcctctgttccacctcggaatc

SEQ ID NO: 4271713 - DNA, 25 bp, Homo sapien
tctgttccacctcggaatccagagg

SEQ ID NO: 4271714 - DNA, 25 bp, Homo sapien
agcagctacccaggaatcaagatcc

SEQ ID NO: 4271715 - DNA, 25 bp, Homo sapien
cacagttatccacacgctcaggtca

SEQ ID NO: 4271716 - DNA, 25 bp, Homo sapien
gaatctaagaaaagtgtcagacagt

SEQ ID NO: 4271717 - DNA, 25 bp, Homo sapien
gggatctgagccctgacaatcaggc

SEQ ID NO: 4271718 - DNA, 25 bp, Homo sapien
tctccaaaaggcttgagacttctgg

SEQ ID NO: 4271719 - DNA, 25 bp, Homo sapien
gagagagtctacgtgtgcctgcggg

SEQ ID NO: 4271720 - DNA, 25 bp, Homo sapien
gcatctccacagtgcgtgcctgtga

SEQ ID NO: 4271721 - DNA, 25 bp, Homo sapien
tgccgggagcgggagtgactaagtg

SEQ ID NO: 4271722 - DNA, 25 bp, Homo sapien
ggaggacaacgacgcgacccgcgtc

SEQ ID NO: 4271723 - DNA, 25 bp, Homo sapien
ctgcaatccggacgctcgcggagga

SEQ ID NO: 4271724 - DNA, 25 bp, Homo sapien
cctgcgccgcgactctgtgcgctcg

SEQ ID NO: 4271725 - DNA, 25 bp, Homo sapien
ctcgctctgcgcgtccggcagcggc

SEQ ID NO: 4271726 - DNA, 25 bp, Homo sapien
ctcctcgtcagtggaaaactccggg

SEQ ID NO: 4271727 - DNA, 25 bp, Homo sapien
cctcctcgtcagtggaaaactccgg

SEQ ID NO: 4271728 - DNA, 25 bp, Homo sapien
ctcgtcagtggaaaactccggggct

SEQ ID NO: 4271729 - DNA, 25 bp, Homo sapien
cgtcagtggaaaactccggggctca

SEQ ID NO: 4271730 - DNA, 25 bp, Homo sapien
gagcgtttccaccctcacgctttta

SEQ ID NO: 4271731 - DNA, 25 bp, Homo sapien
ctcacgcttttactgcagccggtct

SEQ ID NO: 4271732 - DNA, 25 bp, Homo sapien
tactgcagccggtcttctcgactgg

SEQ ID NO: 4271733 - DNA, 25 bp, Homo sapien
cagccggtcttctcgactggaatgc

SEQ ID NO: 4271734 - DNA, 25 bp, Homo sapien
gaagataaaggccctgtccttccgc

SEQ ID NO: 4271735 - DNA, 25 bp, Homo sapien
aagataaaggccctgtccttccgca

SEQ ID NO: 4271736 - DNA, 25 bp, Homo sapien
agataaaggccctgtccttccgcat

SEQ ID NO: 4271737 - DNA, 25 bp, Homo sapien
agatgttactgatgatgggaaacat

SEQ ID NO: 4271738 - DNA, 25 bp, Homo sapien
cctagatgcaagcaatcccaaactg

SEQ ID NO: 4271739 - DNA, 25 bp, Homo sapien
ctcctagatgcaagcaatcccaaac

SEQ ID NO: 4271740 - DNA, 25 bp, Homo sapien
tcctagatgcaagcaatcccaaact

SEQ ID NO: 4271741 - DNA, 25 bp, Homo sapien
cactgaggacagggagctcctggca

SEQ ID NO: 4271742 - DNA, 25 bp, Homo sapien
tggaagatccactgaggacagggag

SEQ ID NO: 4271743 - DNA, 25 bp, Homo sapien
ctggaagatccactgaggacaggga

SEQ ID NO: 4271744 - DNA, 25 bp, Homo sapien
tgaggacagggagctcctggcataa

SEQ ID NO: 4271745 - DNA, 25 bp, Homo sapien
aggtttattaccttgtgtcacaggg

SEQ ID NO: 4271746 - DNA, 25 bp, Homo sapien
ttcatcatccacgtactaagcttag

SEQ ID NO: 4271747 - DNA, 25 bp, Homo sapien
tactaagcttagtatccactagttg

SEQ ID NO: 4271748 - DNA, 25 bp, Homo sapien
gtgcaggtttattaccttgtgtcac

SEQ ID NO: 4271749 - DNA, 25 bp, Homo sapien
tagggacatgctgattgctgactct

SEQ ID NO: 4271750 - DNA, 25 bp, Homo sapien
ataaaacttggatttattcagaccg

SEQ ID NO: 4271751 - DNA, 25 bp, Homo sapien
aggcagtgcatttggcttctaggga

SEQ ID NO: 4271752 - DNA, 25 bp, Homo sapien
tcagaccgtatgcttcccatttggg

SEQ ID NO: 4271753 - DNA, 25 bp, Homo sapien
agaactgcgaaagggaaatggccca

SEQ ID NO: 4271754 - DNA, 25 bp, Homo sapien
aaaactctgggtagagggacactct

SEQ ID NO: 4271755 - DNA, 25 bp, Homo sapien
aattcacacatgtcgatgcgtgggc

SEQ ID NO: 4271756 - DNA, 25 bp, Homo sapien
gaagaactgggcctattgaaagaac

SEQ ID NO: 4271757 - DNA, 25 bp, Homo sapien
tactgttcagtcacggttctcatgg

SEQ ID NO: 4271758 - DNA, 25 bp, Homo sapien
cagcttctgtcaggtcactgctgaa

SEQ ID NO: 4271759 - DNA, 25 bp, Homo sapien
tggaagacatgaggactgtgttccc

SEQ ID NO: 4271760 - DNA, 25 bp, Homo sapien
gttctcatggctccatagtgttgtg

SEQ ID NO: 4271761 - DNA, 25 bp, Homo sapien
ttggacacctttctggtggagcagg

SEQ ID NO: 4271762 - DNA, 25 bp, Homo sapien
tgtagctccagaacactcttttgcc

SEQ ID NO: 4271763 - DNA, 25 bp, Homo sapien
tgggagtctctagaggcttccttgt

SEQ ID NO: 4271764 - DNA, 25 bp, Homo sapien
gaggggcaggttcaggttgcacaga

SEQ ID NO: 4271765 - DNA, 25 bp, Homo sapien
gggcacaaatactctcttgatgtct

SEQ ID NO: 4271766 - DNA, 25 bp, Homo sapien
ggagggcacaaatactctcttgatg

SEQ ID NO: 4271767 - DNA, 25 bp, Homo sapien
cgaggagggcacaaatactctcttg

SEQ ID NO: 4271768 - DNA, 25 bp, Homo sapien
tcaaccttggcttggttcttgactg

SEQ ID NO: 4271769 - DNA, 25 bp, Homo sapien
ggcactgtggtcttttggaggtccc

SEQ ID NO: 4271770 - DNA, 25 bp, Homo sapien
cctggcgctactgctgactgtgaca

SEQ ID NO: 4271771 - DNA, 25 bp, Homo sapien
tgtgacactgatcttgtgggcactg

SEQ ID NO: 4271772 - DNA, 25 bp, Homo sapien
ccactgggcctggcgctactgctga

SEQ ID NO: 4271773 - DNA, 25 bp, Homo sapien
gccttgccaaggtctgttccttcag

SEQ ID NO: 4271774 - DNA, 25 bp, Homo sapien
tccgcagggcctgcacgtccacact

SEQ ID NO: 4271775 - DNA, 25 bp, Homo sapien
aacttccgtgctgacccgtgtcagc

SEQ ID NO: 4271776 - DNA, 25 bp, Homo sapien
gttccttcagttgagcaacttccgt

SEQ ID NO: 4271777 - DNA, 25 bp, Homo sapien
gggcttgcacctggttcaggaggcc

SEQ ID NO: 4271778 - DNA, 25 bp, Homo sapien
agggcttgcacctggttcaggaggc

SEQ ID NO: 4271779 - DNA, 25 bp, Homo sapien
gctgagggatggctgtatctctctc

SEQ ID NO: 4271780 - DNA, 25 bp, Homo sapien
gggcattgctgcctgtagcctgatt

SEQ ID NO: 4271781 - DNA, 25 bp, Homo sapien
ggtatgtggccctggtctacagtag

SEQ ID NO: 4271782 - DNA, 25 bp, Homo sapien
ccatgttgtaagctgggctggctat

SEQ ID NO: 4271783 - DNA, 25 bp, Homo sapien
cctcagcacggtgggctccagctgg

SEQ ID NO: 4271784 - DNA, 25 bp, Homo sapien
tcagaggcttgctggatggagtcct

SEQ ID NO: 4271785 - DNA, 25 bp, Homo sapien
gagggtggctctgggttaggtgtgc

SEQ ID NO: 4271786 - DNA, 25 bp, Homo sapien
gctctgggttaggtgtgcaggttta

SEQ ID NO: 4271787 - DNA, 25 bp, Homo sapien
gactggggttccctctgagaaagct

SEQ ID NO: 4271788 - DNA, 25 bp, Homo sapien
caaaggtcctcacgggatgagcggt

SEQ ID NO: 4271789 - DNA, 25 bp, Homo sapien
tgggcagacttctgccatcgccttc

SEQ ID NO: 4271790 - DNA, 25 bp, Homo sapien
gcctggactgagagggcagtctccc

SEQ ID NO: 4271791 - DNA, 25 bp, Homo sapien
cacccccaggccttatgttgctttg

SEQ ID NO: 4271792 - DNA, 25 bp, Homo sapien
tgggatccggggatcacttccaccc

SEQ ID NO: 4271793 - DNA, 25 bp, Homo sapien
cccaggccttatgttgctttgggta

SEQ ID NO: 4271794 - DNA, 25 bp, Homo sapien
gctttccgaagaccgtcctggatgg

SEQ ID NO: 4271795 - DNA, 25 bp, Homo sapien
gggcttcagctgttgccatccgcag

SEQ ID NO: 4271796 - DNA, 25 bp, Homo sapien
cctttctgtccagagtgactgtctt

SEQ ID NO: 4271797 - DNA, 25 bp, Homo sapien
tccctttctgtccagagtgactgtc

SEQ ID NO: 4271798 - DNA, 25 bp, Homo sapien
catccctttctgtccagagtgactg

SEQ ID NO: 4271799 - DNA, 25 bp, Homo sapien
aggggtagtcgtggctccttctgac

SEQ ID NO: 4271800 - DNA, 25 bp, Homo sapien
cactcattgggcaagtctcgaacaa

SEQ ID NO: 4271801 - DNA, 25 bp, Homo sapien
ctttcgtatataagggtgcccctgc

SEQ ID NO: 4271802 - DNA, 25 bp, Homo sapien
tgaacatccaggtgcaggactgtgc

SEQ ID NO: 4271803 - DNA, 25 bp, Homo sapien
gatggtctgcacatcgccctttggg

SEQ ID NO: 4271804 - DNA, 25 bp, Homo sapien
ctgctaacagaggtcagggcatgga

SEQ ID NO: 4271805 - DNA, 25 bp, Homo sapien
atcacctccgactatctgctctctg

SEQ ID NO: 4271806 - DNA, 25 bp, Homo sapien
cttcctgccgggtgatgccccgcac

SEQ ID NO: 4271807 - DNA, 25 bp, Homo sapien
cccgcaccacgtcgatggtactggg

SEQ ID NO: 4271808 - DNA, 25 bp, Homo sapien
gggcctgcccagcagaatcagttcc

SEQ ID NO: 4271809 - DNA, 25 bp, Homo sapien
aaggagccttcctcaaacttgcggg

SEQ ID NO: 4271810 - DNA, 25 bp, Homo sapien
agttctcaaagatccagcgcatgca

SEQ ID NO: 4271811 - DNA, 25 bp, Homo sapien
tttgtctcaaatagccagcgggctg

SEQ ID NO: 4271812 - DNA, 25 bp, Homo sapien
tgtccaatgctgtccaagggaaggg

SEQ ID NO: 4271813 - DNA, 25 bp, Homo sapien
gttggtgtgggggccacctgtgtct

SEQ ID NO: 4271814 - DNA, 25 bp, Homo sapien
gggccacctgtgtctgggtgtcggc

SEQ ID NO: 4271815 - DNA, 25 bp, Homo sapien
ccacctgtgtctgggtgtcggccat

SEQ ID NO: 4271816 - DNA, 25 bp, Homo sapien
ggttggtgtgggggccacctgtgtc

SEQ ID NO: 4271817 - DNA, 25 bp, Homo sapien
tgggagccttagatctagatgttca

SEQ ID NO: 4271818 - DNA, 25 bp, Homo sapien
gatgggattgggagccttagatcta

SEQ ID NO: 4271819 - DNA, 25 bp, Homo sapien
gatgaggatgggattgggagcctta

SEQ ID NO: 4271820 - DNA, 25 bp, Homo sapien
gattgggagccttagatctagatgt

SEQ ID NO: 4271821 - DNA, 25 bp, Homo sapien
gggtgtttgtggtctgtagcagctg

SEQ ID NO: 4271822 - DNA, 25 bp, Homo sapien
ttcctctggaggttcttgttcaaat

SEQ ID NO: 4271823 - DNA, 25 bp, Homo sapien
gctgtggtctcagggttcgtcgttc

SEQ ID NO: 4271824 - DNA, 25 bp, Homo sapien
ttcaaattggttctgttctgctggc

SEQ ID NO: 4271825 - DNA, 25 bp, Homo sapien
aggtgaagggtctgctcagcctctt

SEQ ID NO: 4271826 - DNA, 25 bp, Homo sapien
gctggctctgttccaagcctgcagg

SEQ ID NO: 4271827 - DNA, 25 bp, Homo sapien
tcagcctcttgataccagagaagaa

SEQ ID NO: 4271828 - DNA, 25 bp, Homo sapien
ccaagcctgcaggtgaagggtctgc

SEQ ID NO: 4271829 - DNA, 25 bp, Homo sapien
ttaatacttccacatcgttaagccc

SEQ ID NO: 4271830 - DNA, 25 bp, Homo sapien
acttccacatcgttaagcccaactg

SEQ ID NO: 4271831 - DNA, 25 bp, Homo sapien
aatacttccacatcgttaagcccaa

SEQ ID NO: 4271832 - DNA, 25 bp, Homo sapien
tacttccacatcgttaagcccaact

SEQ ID NO: 4271833 - DNA, 25 bp, Homo sapien
tgggtgccatcgtaagaaccagcct

SEQ ID NO: 4271834 - DNA, 25 bp, Homo sapien
tacggaaggctatcactctgtagac

SEQ ID NO: 4271835 - DNA, 25 bp, Homo sapien
gatgggcacctgatacaaacttggc

SEQ ID NO: 4271836 - DNA, 25 bp, Homo sapien
cactagtcagcatcaggttcaggaa

SEQ ID NO: 4271837 - DNA, 25 bp, Homo sapien
agaaatcaacgtggactgagcgccc

SEQ ID NO: 4271838 - DNA, 25 bp, Homo sapien
tggttcttgcaggaaaacagcgtct

SEQ ID NO: 4271839 - DNA, 25 bp, Homo sapien
tcaaatagtgagtccagaagggcaa

SEQ ID NO: 4271840 - DNA, 25 bp, Homo sapien
tgtttccacattgcggagcacgggc

SEQ ID NO: 4271841 - DNA, 25 bp, Homo sapien
ctgtcactgattcagggaactgatc

SEQ ID NO: 4271842 - DNA, 25 bp, Homo sapien
tgtcactgattcagggaactgatcc

SEQ ID NO: 4271843 - DNA, 25 bp, Homo sapien
gtcactgattcagggaactgatcca

SEQ ID NO: 4271844 - DNA, 25 bp, Homo sapien
tcactgattcagggaactgatccat

SEQ ID NO: 4271845 - DNA, 25 bp, Homo sapien
gcccatcccacagctagaagcaggg

SEQ ID NO: 4271846 - DNA, 25 bp, Homo sapien
tgtgctgttcccactctcccttgaa

SEQ ID NO: 4271847 - DNA, 25 bp, Homo sapien
caggactgaggccaaggcctgtgct

SEQ ID NO: 4271848 - DNA, 25 bp, Homo sapien
atggaggagactcgggccctgggct

SEQ ID NO: 4271849 - DNA, 25 bp, Homo sapien
ggcccagatgtgttcggcctcagca

SEQ ID NO: 4271850 - DNA, 25 bp, Homo sapien
tgctgcacataataagtggtagcca

SEQ ID NO: 4271851 - DNA, 25 bp, Homo sapien
gaataacttgttcgaggtgatgcag

SEQ ID NO: 4271852 - DNA, 25 bp, Homo sapien
gtggtagccaacatataaaaggatc

SEQ ID NO: 4271853 - DNA, 25 bp, Homo sapien
gactttgcagtgtctacccagctgg

SEQ ID NO: 4271854 - DNA, 25 bp, Homo sapien
tagcaaggcgctttttaaggaagac

SEQ ID NO: 4271855 - DNA, 25 bp, Homo sapien
ccacaagggttgtaagacgcatgca

SEQ ID NO: 4271856 - DNA, 25 bp, Homo sapien
tcaaggtttgggagctgagcctaag

SEQ ID NO: 4271857 - DNA, 25 bp, Homo sapien
gcagggcttcggggaaggatgcaga

SEQ ID NO: 4271858 - DNA, 25 bp, Homo sapien
caagagaaataacaagccgtggtca

SEQ ID NO: 4271859 - DNA, 25 bp, Homo sapien
tcaactattagcaacccatggtcaa

SEQ ID NO: 4271860 - DNA, 25 bp, Homo sapien
tgtctgcacgtaagcaaacaggcat

SEQ ID NO: 4271861 - DNA, 25 bp, Homo sapien
gcagtttcctagaatcaaccacagt

SEQ ID NO: 4271862 - DNA, 25 bp, Homo sapien
ccaagggaacctctggatctgccag

SEQ ID NO: 4271863 - DNA, 25 bp, Homo sapien
ggactgccaagggaacctctggatc

SEQ ID NO: 4271864 - DNA, 25 bp, Homo sapien
ctgctcagactttaccagagacgag

SEQ ID NO: 4271865 - DNA, 25 bp, Homo sapien
tcagactttaccagagacgagtatt

SEQ ID NO: 4271866 - DNA, 25 bp, Homo sapien
cgctgtggtgttccgaggacagcgg

SEQ ID NO: 4271867 - DNA, 25 bp, Homo sapien
gtgttccgaggacagcgggtgctct

SEQ ID NO: 4271868 - DNA, 25 bp, Homo sapien
gttccgaggacagcgggtgctctgt

SEQ ID NO: 4271869 - DNA, 25 bp, Homo sapien
tgtggtgttccgaggacagcgggtg

SEQ ID NO: 4271870 - DNA, 25 bp, Homo sapien
gtctcagtgtttggccacctttccc

SEQ ID NO: 4271871 - DNA, 25 bp, Homo sapien
tggaagaagtccaccagcagttttc

SEQ ID NO: 4271872 - DNA, 25 bp, Homo sapien
tgctcatggtggaagaagtccacca

SEQ ID NO: 4271873 - DNA, 25 bp, Homo sapien
tgttcttggtctcagtgtttggcca

SEQ ID NO: 4271874 - DNA, 25 bp, Homo sapien
tggcttcactctctgttggagctga

SEQ ID NO: 4271875 - DNA, 25 bp, Homo sapien
tattccttagatccccgtcttcatc

SEQ ID NO: 4271876 - DNA, 25 bp, Homo sapien
ttggagctgacccttgttcacaagt

SEQ ID NO: 4271877 - DNA, 25 bp, Homo sapien
tggtacagccttattccttagatcc

SEQ ID NO: 4271878 - DNA, 25 bp, Homo sapien
cagcaggcggagcagccaatcagca

SEQ ID NO: 4271879 - DNA, 25 bp, Homo sapien
agcaggcggagcagccaatcagcag

SEQ ID NO: 4271880 - DNA, 25 bp, Homo sapien
gtcctctttcaatatctggaggtaa

SEQ ID NO: 4271881 - DNA, 25 bp, Homo sapien
tgtgaatgaccaggccacaaaggca

SEQ ID NO: 4271882 - DNA, 25 bp, Homo sapien
cactggtaggctttgaagattccac

SEQ ID NO: 4271883 - DNA, 25 bp, Homo sapien
ggctttgaagattccacactgtgaa

SEQ ID NO: 4271884 - DNA, 25 bp, Homo sapien
ccacactgtgaatgaccaggccaca

SEQ ID NO: 4271885 - DNA, 25 bp, Homo sapien
cagactaacagcaaatcactctgca

SEQ ID NO: 4271886 - DNA, 25 bp, Homo sapien
tcagactaacagcaaatcactctgc

SEQ ID NO: 4271887 - DNA, 25 bp, Homo sapien
taacagcaaatcactctgcagaaac

SEQ ID NO: 4271888 - DNA, 25 bp, Homo sapien
cagcaaatcactctgcagaaaccct

SEQ ID NO: 4271889 - DNA, 25 bp, Homo sapien
gggatgcaagctgtttcaacacaca

SEQ ID NO: 4271890 - DNA, 25 bp, Homo sapien
ataaaattcaacactcgctcatgct

SEQ ID NO: 4271891 - DNA, 25 bp, Homo sapien
ggatgcaagctgtttcaacacacac

SEQ ID NO: 4271892 - DNA, 25 bp, Homo sapien
aattcaacactcgctcatgctaaaa

SEQ ID NO: 4271893 - DNA, 25 bp, Homo sapien
tatgtatttcataggtcagacagtc

SEQ ID NO: 4271894 - DNA, 25 bp, Homo sapien
cttatgtatttcataggtcagacag

SEQ ID NO: 4271895 - DNA, 25 bp, Homo sapien
tatttcataggtcagacagtcattt

SEQ ID NO: 4271896 - DNA, 25 bp, Homo sapien
tgtatttcataggtcagacagtcat

SEQ ID NO: 4271897 - DNA, 25 bp, Homo sapien
gacaaatacttatgtgtatgagcaa

SEQ ID NO: 4271898 - DNA, 25 bp, Homo sapien
tatgtgtatgagcaaaaatcttgag

SEQ ID NO: 4271899 - DNA, 25 bp, Homo sapien
cttatgtgtatgagcaaaaatcttg

SEQ ID NO: 4271900 - DNA, 25 bp, Homo sapien
atacttatgtgtatgagcaaaaatc

SEQ ID NO: 4271901 - DNA, 25 bp, Homo sapien
tgcatacagtacatatcaattccac

SEQ ID NO: 4271902 - DNA, 25 bp, Homo sapien
gattttacctcaccagtcttagaca

SEQ ID NO: 4271903 - DNA, 25 bp, Homo sapien
tcaattccacactaaattttcagca

SEQ ID NO: 4271904 - DNA, 25 bp, Homo sapien
ttgctttgtcgtccacgctggtctc

SEQ ID NO: 4271905 - DNA, 25 bp, Homo sapien
taatagcgctgacgctgagaagccg

SEQ ID NO: 4271906 - DNA, 25 bp, Homo sapien
tgctgcaaccccaagatgtcggaga

SEQ ID NO: 4271907 - DNA, 25 bp, Homo sapien
gaaacgcttatggtgagggcactgc

SEQ ID NO: 4271908 - DNA, 25 bp, Homo sapien
taattcccgcagcaagattgttccg

SEQ ID NO: 4271909 - DNA, 25 bp, Homo sapien
gcggagaacaaagtgtcgccctgtt

SEQ ID NO: 4271910 - DNA, 25 bp, Homo sapien
cactgaaactatgcctaggaaatgg

SEQ ID NO: 4271911 - DNA, 25 bp, Homo sapien
cactacctaggcatggcactgaaac

SEQ ID NO: 4271912 - DNA, 25 bp, Homo sapien
gaacatgggctctaatccaggcagc

SEQ ID NO: 4271913 - DNA, 25 bp, Homo sapien
gggaaattttcacaatgtccggagc

SEQ ID NO: 4271914 - DNA, 25 bp, Homo sapien
ttttcacaatgtccggagcccttga

SEQ ID NO: 4271915 - DNA, 25 bp, Homo sapien
aaattttcacaatgtccggagccct

SEQ ID NO: 4271916 - DNA, 25 bp, Homo sapien
gaaattttcacaatgtccggagccc

SEQ ID NO: 4271917 - DNA, 25 bp, Homo sapien
gcatctatatcataaatctcaagag

SEQ ID NO: 4271918 - DNA, 25 bp, Homo sapien
catctatatcataaatctcaagagg

SEQ ID NO: 4271919 - DNA, 25 bp, Homo sapien
ctgctggcagctcgtgcaattgttg

SEQ ID NO: 4271920 - DNA, 25 bp, Homo sapien
cttctgctggcagctcgtgcaattg

SEQ ID NO: 4271921 - DNA, 25 bp, Homo sapien
gagccactccaattgctggccgctt

SEQ ID NO: 4271922 - DNA, 25 bp, Homo sapien
tggagccactccaattgctggccgc

SEQ ID NO: 4271923 - DNA, 25 bp, Homo sapien
ccactccaattgctggccgcttcac

SEQ ID NO: 4271924 - DNA, 25 bp, Homo sapien
ctggagccactccaattgctggccg

SEQ ID NO: 4271925 - DNA, 25 bp, Homo sapien
acaggtgccctctgtgcctattcag

SEQ ID NO: 4271926 - DNA, 25 bp, Homo sapien
gcctgaggttgcagactggtctgaa

SEQ ID NO: 4271927 - DNA, 25 bp, Homo sapien
tgcataggctcttaagcagcatgga

SEQ ID NO: 4271928 - DNA, 25 bp, Homo sapien
gaatgggtaggagcaaccactgact

SEQ ID NO: 4271929 - DNA, 25 bp, Homo sapien
gctgttcttgcataggctcttaagc

SEQ ID NO: 4271930 - DNA, 25 bp, Homo sapien
gactggtcttaagctgttcttgcat

SEQ ID NO: 4271931 - DNA, 25 bp, Homo sapien
tgctcaaacaggtccggaaacagcc

SEQ ID NO: 4271932 - DNA, 25 bp, Homo sapien
gacaggaaactgtatccagtccagc

SEQ ID NO: 4271933 - DNA, 25 bp, Homo sapien
tccttgttttgagcagtcacggccc

SEQ ID NO: 4271934 - DNA, 25 bp, Homo sapien
ggacttgaggacaagctgagccccg

SEQ ID NO: 4271935 - DNA, 25 bp, Homo sapien
cgaggtgttcattgcctttgagggc

SEQ ID NO: 4271936 - DNA, 25 bp, Homo sapien
ctccagccctactgtttccaggggc

SEQ ID NO: 4271937 - DNA, 25 bp, Homo sapien
tgcgaggtgttcattgcctttgagg

SEQ ID NO: 4271938 - DNA, 25 bp, Homo sapien
ggtgttcattgcctttgagggctct

SEQ ID NO: 4271939 - DNA, 25 bp, Homo sapien
agaggcactcttggggaacccccag

SEQ ID NO: 4271940 - DNA, 25 bp, Homo sapien
cccccagtaggcggggtgctggtct

SEQ ID NO: 4271941 - DNA, 25 bp, Homo sapien
cagggagaatatccttataggaacc

SEQ ID NO: 4271942 - DNA, 25 bp, Homo sapien
tccagggagaatatccttataggaa

SEQ ID NO: 4271943 - DNA, 25 bp, Homo sapien
gcagcaggtgaagcacaggaagttc

SEQ ID NO: 4271944 - DNA, 25 bp, Homo sapien
cagcaggtgaagcacaggaagttct

SEQ ID NO: 4271945 - DNA, 25 bp, Homo sapien
tcactctcccttctaggacttcaca

SEQ ID NO: 4271946 - DNA, 25 bp, Homo sapien
actctcccttctaggacttcacaga

SEQ ID NO: 4271947 - DNA, 25 bp, Homo sapien
ttgagggtccctgatcactctccct

SEQ ID NO: 4271948 - DNA, 25 bp, Homo sapien
tgatcactctcccttctaggacttc

SEQ ID NO: 4271949 - DNA, 25 bp, Homo sapien
gatgcaacgcttcactgaagggcat

SEQ ID NO: 4271950 - DNA, 25 bp, Homo sapien
cagcactgtgatgcaacgcttcact

SEQ ID NO: 4271951 - DNA, 25 bp, Homo sapien
ctgggtctgcggtcaagagcagcac

SEQ ID NO: 4271952 - DNA, 25 bp, Homo sapien
tctgcggtcaagagcagcactgtga

SEQ ID NO: 4271953 - DNA, 25 bp, Homo sapien
tctgagtcaaccaggtgactgcaag

SEQ ID NO: 4271954 - DNA, 25 bp, Homo sapien
ttttctgagtcaaccaggtgactgc

SEQ ID NO: 4271955 - DNA, 25 bp, Homo sapien
aagactgtgcaaggacgattttact

SEQ ID NO: 4271956 - DNA, 25 bp, Homo sapien
gactgtgcaaggacgattttacttc

SEQ ID NO: 4271957 - DNA, 25 bp, Homo sapien
ctttgtccacgtggtcaaatgaagc

SEQ ID NO: 4271958 - DNA, 25 bp, Homo sapien
tgagatggtcgcagatcggatcctg

SEQ ID NO: 4271959 - DNA, 25 bp, Homo sapien
tatgtgtttgctttccgaagacgac

SEQ ID NO: 4271960 - DNA, 25 bp, Homo sapien
tcactaatggaaaggagcctgtttc

SEQ ID NO: 4271961 - DNA, 25 bp, Homo sapien
ggtgcaagatttaggctcggggccc

SEQ ID NO: 4271962 - DNA, 25 bp, Homo sapien
tgcgacagcatgaataggacataag

SEQ ID NO: 4271963 - DNA, 25 bp, Homo sapien
ctcccagaatctgcgacagcatgaa

SEQ ID NO: 4271964 - DNA, 25 bp, Homo sapien
gaatctgcgacagcatgaataggac

SEQ ID NO: 4271965 - DNA, 25 bp, Homo sapien
cagcatgaataggacataagggtgg

SEQ ID NO: 4271966 - DNA, 25 bp, Homo sapien
tgtgtgttatagtccctgaagaact

SEQ ID NO: 4271967 - DNA, 25 bp, Homo sapien
cttcctgaggtgttccagaagaaga

SEQ ID NO: 4271968 - DNA, 25 bp, Homo sapien
tatataatgggttttaagctaagtg

SEQ ID NO: 4271969 - DNA, 25 bp, Homo sapien
gctatataatgggttttaagctaag

SEQ ID NO: 4271970 - DNA, 25 bp, Homo sapien
tcacaggtatctcatccgtgcccga

SEQ ID NO: 4271971 - DNA, 25 bp, Homo sapien
ttgactgactcctcgctgagttcac

SEQ ID NO: 4271972 - DNA, 25 bp, Homo sapien
tatctcatccgtgcccgacgttgtg

SEQ ID NO: 4271973 - DNA, 25 bp, Homo sapien
cctcgctgagttcacaggtatctca

SEQ ID NO: 4271974 - DNA, 25 bp, Homo sapien
tttgatgatcacaaacagaggtgca

SEQ ID NO: 4271975 - DNA, 25 bp, Homo sapien
cccctgtgggcttcggtgttttgca

SEQ ID NO: 4271976 - DNA, 25 bp, Homo sapien
cctgaccctgagtttgttgagagca

SEQ ID NO: 4271977 - DNA, 25 bp, Homo sapien
gatagtcacgtaagtcccctgtggg

SEQ ID NO: 4271978 - DNA, 25 bp, Homo sapien
aagaggaggactggatctgctgcgc

SEQ ID NO: 4271979 - DNA, 25 bp, Homo sapien
tacagcatctgtaagagcggctgct

SEQ ID NO: 4271980 - DNA, 25 bp, Homo sapien
gaaggagatagtggatcggaaatac

SEQ ID NO: 4271981 - DNA, 25 bp, Homo sapien
gaagtactccgaacacttcagcata

SEQ ID NO: 4271982 - DNA, 25 bp, Homo sapien
tgcctcagggagataacgaatggtg

SEQ ID NO: 4271983 - DNA, 25 bp, Homo sapien
gaagccgtgttgtttgagatttacc

SEQ ID NO: 4271984 - DNA, 25 bp, Homo sapien
tgtttactaacaccgggctgtctcc

SEQ ID NO: 4271985 - DNA, 25 bp, Homo sapien
tgccagcgtcgcttaagcagcagag

SEQ ID NO: 4271986 - DNA, 25 bp, Homo sapien
caagctatgaacatgattctctgga

SEQ ID NO: 4271987 - DNA, 25 bp, Homo sapien
gaagcacacaattgactctcgtcag

SEQ ID NO: 4271988 - DNA, 25 bp, Homo sapien
ccatgatgcagatttcaagctatga

SEQ ID NO: 4271989 - DNA, 25 bp, Homo sapien
ctctcgtcagctggcacaagctggt

SEQ ID NO: 4271990 - DNA, 25 bp, Homo sapien
ttaggttggtgttgtcaaaatgaca

SEQ ID NO: 4271991 - DNA, 25 bp, Homo sapien
tcattaccattgtactcataaagac

SEQ ID NO: 4271992 - DNA, 25 bp, Homo sapien
tgtcaaaatgacaacagttgactta

SEQ ID NO: 4271993 - DNA, 25 bp, Homo sapien
caacagttgacttatcattaccatt

SEQ ID NO: 4271994 - DNA, 25 bp, Homo sapien
caagtacaacggattagattggttt

SEQ ID NO: 4271995 - DNA, 25 bp, Homo sapien
taacaagtacaacggattagattgg

SEQ ID NO: 4271996 - DNA, 25 bp, Homo sapien
caattaacaagtacaacggattaga

SEQ ID NO: 4271997 - DNA, 25 bp, Homo sapien
catctcaattaacaagtacaacgga

SEQ ID NO: 4271998 - DNA, 25 bp, Homo sapien
tccaccaaaagcttgctgaggtatg

SEQ ID NO: 4271999 - DNA, 25 bp, Homo sapien
cgcagtggcctctttgtggtggaaa

SEQ ID NO: 4272000 - DNA, 25 bp, Homo sapien
gatcgtcctcccagatggatttctg

SEQ ID NO: 4272001 - DNA, 25 bp, Homo sapien
tctgacttggtatccctgaaatgga

SEQ ID NO: 4272002 - DNA, 25 bp, Homo sapien
tacacaatagctctaaccagtttct

SEQ ID NO: 4272003 - DNA, 25 bp, Homo sapien
atgcagacttgtttatatgtattcg

SEQ ID NO: 4272004 - DNA, 25 bp, Homo sapien
ttcacaatgttgcccgagttatcct

SEQ ID NO: 4272005 - DNA, 25 bp, Homo sapien
aatgttgcccgagttatcctttgaa

SEQ ID NO: 4272006 - DNA, 25 bp, Homo sapien
ccaggcttgaagcagaagtaaggtg

SEQ ID NO: 4272007 - DNA, 25 bp, Homo sapien
tcaagttcaccaggcttgaagcaga

SEQ ID NO: 4272008 - DNA, 25 bp, Homo sapien
tgtcaagttcaccaggcttgaagca

SEQ ID NO: 4272009 - DNA, 25 bp, Homo sapien
cttgtcaagttcaccaggcttgaag

SEQ ID NO: 4272010 - DNA, 25 bp, Homo sapien
agatccacactgatgtaaagattta

SEQ ID NO: 4272011 - DNA, 25 bp, Homo sapien
gatttatgaagtctgttgagctttc

SEQ ID NO: 4272012 - DNA, 25 bp, Homo sapien
tatcctggtggtgacttgtgctggg

SEQ ID NO: 4272013 - DNA, 25 bp, Homo sapien
tatgaccacccatacttcagatcca

SEQ ID NO: 4272014 - DNA, 25 bp, Homo sapien
gtttccctacattaccactcggtga

SEQ ID NO: 4272015 - DNA, 25 bp, Homo sapien
tgtgctatagccttgaggcctgaat

SEQ ID NO: 4272016 - DNA, 25 bp, Homo sapien
taccactcggtgatatagaagtttc

SEQ ID NO: 4272017 - DNA, 25 bp, Homo sapien
tagaagccgacttctccactgggag

SEQ ID NO: 4272018 - DNA, 25 bp, Homo sapien
acttcatgataagggctctccgaaa

SEQ ID NO: 4272019 - DNA, 25 bp, Homo sapien
caacagcaataacttcatgatgtaa

SEQ ID NO: 4272020 - DNA, 25 bp, Homo sapien
taagggctctccgaaatgtcagcat

SEQ ID NO: 4272021 - DNA, 25 bp, Homo sapien
ctaattaattgagactcaacagcaa

SEQ ID NO: 4272022 - DNA, 25 bp, Homo sapien
gtgttgcatctggggtcagttctcc

SEQ ID NO: 4272023 - DNA, 25 bp, Homo sapien
ttctgtgttgcatctggggtcagtt

SEQ ID NO: 4272024 - DNA, 25 bp, Homo sapien
tctgtgttgcatctggggtcagttc

SEQ ID NO: 4272025 - DNA, 25 bp, Homo sapien
tgtgttgcatctggggtcagttctc

SEQ ID NO: 4272026 - DNA, 25 bp, Homo sapien
cagcacactgagctgctatagtcat

SEQ ID NO: 4272027 - DNA, 25 bp, Homo sapien
tctgtggaatcagtgcaaaccgggg

SEQ ID NO: 4272028 - DNA, 25 bp, Homo sapien
aatcagtgcaaaccggggaatcacc

SEQ ID NO: 4272029 - DNA, 25 bp, Homo sapien
aaaccggggaatcaccaccagcaca

SEQ ID NO: 4272030 - DNA, 25 bp, Homo sapien
ttggaaggagtggaccgttagcctc

SEQ ID NO: 4272031 - DNA, 25 bp, Homo sapien
tgagacatcccctgcttgtcagcat

SEQ ID NO: 4272032 - DNA, 25 bp, Homo sapien
cagccaatttctcagagagctggga

SEQ ID NO: 4272033 - DNA, 25 bp, Homo sapien
ggaagttggaacagacccacaagtg

SEQ ID NO: 4272034 - DNA, 25 bp, Homo sapien
gcatcctctaaagccttgaagttcc

SEQ ID NO: 4272035 - DNA, 25 bp, Homo sapien
acagcatcctctaaagccttgaagt

SEQ ID NO: 4272036 - DNA, 25 bp, Homo sapien
tttctgatactgcttagcagccacc

SEQ ID NO: 4272037 - DNA, 25 bp, Homo sapien
tctgatactgcttagcagccaccat

SEQ ID NO: 4272038 - DNA, 25 bp, Homo sapien
agaagcaggcgagggaagttttgca

SEQ ID NO: 4272039 - DNA, 25 bp, Homo sapien
agttttgcagaaacagcagaagcat

SEQ ID NO: 4272040 - DNA, 25 bp, Homo sapien
gagggctttcaccaggatagccaaa

SEQ ID NO: 4272041 - DNA, 25 bp, Homo sapien
aaatcaagagggctttcaccaggat

SEQ ID NO: 4272042 - DNA, 25 bp, Homo sapien
caatctatacaccattaagaaacag

SEQ ID NO: 4272043 - DNA, 25 bp, Homo sapien
caggtgattctatcatttgttgaag

SEQ ID NO: 4272044 - DNA, 25 bp, Homo sapien
gggctgcgcaggtgattctatcatt

SEQ ID NO: 4272045 - DNA, 25 bp, Homo sapien
tcaatctatacaccattaagaaaca

SEQ ID NO: 4272046 - DNA, 25 bp, Homo sapien
gcatcaatttgtagaaagactactc

SEQ ID NO: 4272047 - DNA, 25 bp, Homo sapien
tttgagacaaggcccatggattttc

SEQ ID NO: 4272048 - DNA, 25 bp, Homo sapien
gaaagactactcttcccactacctg

SEQ ID NO: 4272049 - DNA, 25 bp, Homo sapien
caagatatctcaaatcctaacagtt

SEQ ID NO: 4272050 - DNA, 25 bp, Homo sapien
tctcagagagttgaagagctgccat

SEQ ID NO: 4272051 - DNA, 25 bp, Homo sapien
gtctcagagagttgaagagctgcca

SEQ ID NO: 4272052 - DNA, 25 bp, Homo sapien
ctgtctcagagagttgaagagctgc

SEQ ID NO: 4272053 - DNA, 25 bp, Homo sapien
tgtctcagagagttgaagagctgcc

SEQ ID NO: 4272054 - DNA, 25 bp, Homo sapien
tcctggactttgagctgtcttcgtg

SEQ ID NO: 4272055 - DNA, 25 bp, Homo sapien
atcctggactttgagctgtcttcgt

SEQ ID NO: 4272056 - DNA, 25 bp, Homo sapien
tggactttgagctgtcttcgtggtc

SEQ ID NO: 4272057 - DNA, 25 bp, Homo sapien
cctggactttgagctgtcttcgtgg

SEQ ID NO: 4272058 - DNA, 25 bp, Homo sapien
tcaggcgaccattaccgttgaatta

SEQ ID NO: 4272059 - DNA, 25 bp, Homo sapien
gaccattaccgttgaattaccactg

SEQ ID NO: 4272060 - DNA, 25 bp, Homo sapien
attaccgttgaattaccactgccca

SEQ ID NO: 4272061 - DNA, 25 bp, Homo sapien
gcgaccattaccgttgaattaccac

SEQ ID NO: 4272062 - DNA, 25 bp, Homo sapien
caagtttgggctccatgcatactcc

SEQ ID NO: 4272063 - DNA, 25 bp, Homo sapien
tttgggctccatgcatactccttct

SEQ ID NO: 4272064 - DNA, 25 bp, Homo sapien
tgcatactccttctgatgtgtatgc

SEQ ID NO: 4272065 - DNA, 25 bp, Homo sapien
ctgaatttccaagtttgggctccat

SEQ ID NO: 4272066 - DNA, 25 bp, Homo sapien
ctaattaggagacagctggagtaac

SEQ ID NO: 4272067 - DNA, 25 bp, Homo sapien
tcacacttgaggtggcacacttcat

SEQ ID NO: 4272068 - DNA, 25 bp, Homo sapien
tgcaagtactcctcatctgagtcac

SEQ ID NO: 4272069 - DNA, 25 bp, Homo sapien
taaaaggttcctcctgcaagtactc

SEQ ID NO: 4272070 - DNA, 25 bp, Homo sapien
ccatcattatagccagaaacgggga

SEQ ID NO: 4272071 - DNA, 25 bp, Homo sapien
tatagccagaaacggggaatgagtc

SEQ ID NO: 4272072 - DNA, 25 bp, Homo sapien
ttatagccagaaacggggaatgagt

SEQ ID NO: 4272073 - DNA, 25 bp, Homo sapien
tcattatagccagaaacggggaatg

SEQ ID NO: 4272074 - DNA, 25 bp, Homo sapien
tgagccatcgcacttagccatcttt

SEQ ID NO: 4272075 - DNA, 25 bp, Homo sapien
gccatcgcacttagccatctttaac

SEQ ID NO: 4272076 - DNA, 25 bp, Homo sapien
gaggctgtctatattgtctaggctg

SEQ ID NO: 4272077 - DNA, 25 bp, Homo sapien
ttgtacagaggctgtctatattgtc

SEQ ID NO: 4272078 - DNA, 25 bp, Homo sapien
gaaaggacaatgagagtcttgaagg

SEQ ID NO: 4272079 - DNA, 25 bp, Homo sapien
tgcatgagatataagttgagagcca

SEQ ID NO: 4272080 - DNA, 25 bp, Homo sapien
taaggaagactctctagaagaaagg

SEQ ID NO: 4272081 - DNA, 25 bp, Homo sapien
tgtaagaaatcttcaggtagctggt

SEQ ID NO: 4272082 - DNA, 25 bp, Homo sapien
gaagctgtcctaggacctccgagaa

SEQ ID NO: 4272083 - DNA, 25 bp, Homo sapien
ttccggaggtactggtgacaaggca

SEQ ID NO: 4272084 - DNA, 25 bp, Homo sapien
cactgaggaatgcataccgctggct

SEQ ID NO: 4272085 - DNA, 25 bp, Homo sapien
agggaccacgtcctcaagaagctgt

SEQ ID NO: 4272086 - DNA, 25 bp, Homo sapien
cagctcgtgtgatgtttttaattgg

SEQ ID NO: 4272087 - DNA, 25 bp, Homo sapien
cactgcctctcatgtgagaattcag

SEQ ID NO: 4272088 - DNA, 25 bp, Homo sapien
ccatagataccagggccagtcatcc

SEQ ID NO: 4272089 - DNA, 25 bp, Homo sapien
tgtcatcaccatagataccagggcc

SEQ ID NO: 4272090 - DNA, 25 bp, Homo sapien
cacagcaagcagaatgcattgaact

SEQ ID NO: 4272091 - DNA, 25 bp, Homo sapien
gcttagtccagtggcgtgcatcctg

SEQ ID NO: 4272092 - DNA, 25 bp, Homo sapien
cttttgaagcttagtccagtggcgt

SEQ ID NO: 4272093 - DNA, 25 bp, Homo sapien
actatgtttcctatttatctgctgc

SEQ ID NO: 4272094 - DNA, 25 bp, Homo sapien
taaaccttagtcagttgtgcagttt

SEQ ID NO: 4272095 - DNA, 25 bp, Homo sapien
aaagaaagaatgccatgccctgcta

SEQ ID NO: 4272096 - DNA, 25 bp, Homo sapien
tatgaaaagtatctcttcatgtact

SEQ ID NO: 4272097 - DNA, 25 bp, Homo sapien
ccctgcctgagcctttatatgtttg

SEQ ID NO: 4272098 - DNA, 25 bp, Homo sapien
tcccaggtctgaatccttccttttg

SEQ ID NO: 4272099 - DNA, 25 bp, Homo sapien
tcatgctcccaggtctgaatccttc

SEQ ID NO: 4272100 - DNA, 25 bp, Homo sapien
caggtctgaatccttccttttgcag

SEQ ID NO: 4272101 - DNA, 25 bp, Homo sapien
gctcccaggtctgaatccttccttt

SEQ ID NO: 4272102 - DNA, 25 bp, Homo sapien
caatgctgacattttccccttctct

SEQ ID NO: 4272103 - DNA, 25 bp, Homo sapien
ctgatgcatgttcttcccactcccc

SEQ ID NO: 4272104 - DNA, 25 bp, Homo sapien
ggttgcttttccctcaggctgctgc

SEQ ID NO: 4272105 - DNA, 25 bp, Homo sapien
tgctgctgatggtggatggggatgc

SEQ ID NO: 4272106 - DNA, 25 bp, Homo sapien
gatactcatcgtaagcaccttcctg

SEQ ID NO: 4272107 - DNA, 25 bp, Homo sapien
gaaggctagagggtactgcaaaagc

SEQ ID NO: 4272108 - DNA, 25 bp, Homo sapien
taccgttgaaggctagagggtactg

SEQ ID NO: 4272109 - DNA, 25 bp, Homo sapien
gaactgctctgactgatactcatcg

SEQ ID NO: 4272110 - DNA, 25 bp, Homo sapien
tacatgatattaaggcagggactct

SEQ ID NO: 4272111 - DNA, 25 bp, Homo sapien
cagggactctgagtcagaccaagac

SEQ ID NO: 4272112 - DNA, 25 bp, Homo sapien
caagacacagtcaaatcccaggttg

SEQ ID NO: 4272113 - DNA, 25 bp, Homo sapien
tcccaggttgccattgtcttagaca

SEQ ID NO: 4272114 - DNA, 25 bp, Homo sapien
aggtactgttggacagcttttggac

SEQ ID NO: 4272115 - DNA, 25 bp, Homo sapien
tcagtgtggtatttatagctgcacc

SEQ ID NO: 4272116 - DNA, 25 bp, Homo sapien
gtatttatagctgcaccaggtactg

SEQ ID NO: 4272117 - DNA, 25 bp, Homo sapien
gtactgttggacagcttttggacaa

SEQ ID NO: 4272118 - DNA, 25 bp, Homo sapien
tattttctgtaactgcgactggcgc

SEQ ID NO: 4272119 - DNA, 25 bp, Homo sapien
caaaggttgctggtgctctaatgga

SEQ ID NO: 4272120 - DNA, 25 bp, Homo sapien
gagtgtgagatagcacttcctgctg

SEQ ID NO: 4272121 - DNA, 25 bp, Homo sapien
gactgttaattgtacaatcctctgg

SEQ ID NO: 4272122 - DNA, 25 bp, Homo sapien
caccccccccattgctcaggtctaa

SEQ ID NO: 4272123 - DNA, 25 bp, Homo sapien
ccccccattgctcaggtctaagtgt

SEQ ID NO: 4272124 - DNA, 25 bp, Homo sapien
ccccccccattgctcaggtctaagt

SEQ ID NO: 4272125 - DNA, 25 bp, Homo sapien
cccccattgctcaggtctaagtgtt

SEQ ID NO: 4272126 - DNA, 25 bp, Homo sapien
aacagatccacctcctggtccgttt

SEQ ID NO: 4272127 - DNA, 25 bp, Homo sapien
gtcagggtgacttataatgagcttc

SEQ ID NO: 4272128 - DNA, 25 bp, Homo sapien
cgtttctgaacctgatacctgcaga

SEQ ID NO: 4272129 - DNA, 25 bp, Homo sapien
ggtccgtttctgaacctgatacctg

SEQ ID NO: 4272130 - DNA, 25 bp, Homo sapien
tgaaactctgatcagagcaatatca

SEQ ID NO: 4272131 - DNA, 25 bp, Homo sapien
aaaatccctgcaccagatggattca

SEQ ID NO: 4272132 - DNA, 25 bp, Homo sapien
cttcagttgatgttggacaaattcc

SEQ ID NO: 4272133 - DNA, 25 bp, Homo sapien
gatcagagcaatatcaagttccaaa

SEQ ID NO: 4272134 - DNA, 25 bp, Homo sapien
aactttccttggagcattggcacac

SEQ ID NO: 4272135 - DNA, 25 bp, Homo sapien
tccttggagcattggcacaccgtct

SEQ ID NO: 4272136 - DNA, 25 bp, Homo sapien
tggagcattggcacaccgtctgaat

SEQ ID NO: 4272137 - DNA, 25 bp, Homo sapien
ggcacaccgtctgaattagatattt

SEQ ID NO: 4272138 - DNA, 25 bp, Homo sapien
tacatcagctttgtctgcaagcctg

SEQ ID NO: 4272139 - DNA, 25 bp, Homo sapien
acatcagctttgtctgcaagcctgg

SEQ ID NO: 4272140 - DNA, 25 bp, Homo sapien
agtacatcagctttgtctgcaagcc

SEQ ID NO: 4272141 - DNA, 25 bp, Homo sapien
tcagtacatcagctttgtctgcaag

SEQ ID NO: 4272142 - DNA, 25 bp, Homo sapien
aagctttaagatgtgcacaatctgg

SEQ ID NO: 4272143 - DNA, 25 bp, Homo sapien
agctttaagatgtgcacaatctggc

SEQ ID NO: 4272144 - DNA, 25 bp, Homo sapien
caaacaagacatggtagggtggact

SEQ ID NO: 4272145 - DNA, 25 bp, Homo sapien
acttgagagccccagtatctccaag

SEQ ID NO: 4272146 - DNA, 25 bp, Homo sapien
tccagttctggaataatgatgcctc

SEQ ID NO: 4272147 - DNA, 25 bp, Homo sapien
gagaacattcgccttggcctgtgct

SEQ ID NO: 4272148 - DNA, 25 bp, Homo sapien
ttgtactgggctacatgatctagaa

SEQ ID NO: 4272149 - DNA, 25 bp, Homo sapien
gtactgggctacatgatctagaaac

SEQ ID NO: 4272150 - DNA, 25 bp, Homo sapien
gattgtactgggctacatgatctag

SEQ ID NO: 4272151 - DNA, 25 bp, Homo sapien
tgattgtactgggctacatgatcta

SEQ ID NO: 4272152 - DNA, 25 bp, Homo sapien
cataggcccagtaattatagcaatc

SEQ ID NO: 4272153 - DNA, 25 bp, Homo sapien
gtaattatagcaatccagggactcc

SEQ ID NO: 4272154 - DNA, 25 bp, Homo sapien
ggcaatgcttctaacattatggaca

SEQ ID NO: 4272155 - DNA, 25 bp, Homo sapien
caaaaagaggttacttccataggca

SEQ ID NO: 4272156 - DNA, 25 bp, Homo sapien
tcttccctgatgctctcagcttttg

SEQ ID NO: 4272157 - DNA, 25 bp, Homo sapien
tgatgctctcagcttttgtaaccat

SEQ ID NO: 4272158 - DNA, 25 bp, Homo sapien
ctggtcttccctgatgctctcagct

SEQ ID NO: 4272159 - DNA, 25 bp, Homo sapien
ggtcttccctgatgctctcagcttt

SEQ ID NO: 4272160 - DNA, 25 bp, Homo sapien
gcccatggctatcaaggggtggcaa

SEQ ID NO: 4272161 - DNA, 25 bp, Homo sapien
acttacaggaatggatgagtcaccc

SEQ ID NO: 4272162 - DNA, 25 bp, Homo sapien
cgggaccagctaagtgagtttggaa

SEQ ID NO: 4272163 - DNA, 25 bp, Homo sapien
tgagtttggaagtcaatttcacaaa

SEQ ID NO: 4272164 - DNA, 25 bp, Homo sapien
atcacttcctgctacgcccatggca

SEQ ID NO: 4272165 - DNA, 25 bp, Homo sapien
cccaactccattgagcctgtgtgtg

SEQ ID NO: 4272166 - DNA, 25 bp, Homo sapien
ctgctacgcccatggcagacactgc

SEQ ID NO: 4272167 - DNA, 25 bp, Homo sapien
tgacacccaactccattgagcctgt

SEQ ID NO: 4272168 - DNA, 25 bp, Homo sapien
atagaaatgggccacctggtcctgg

SEQ ID NO: 4272169 - DNA, 25 bp, Homo sapien
catagatttctaaatccagtagcag

SEQ ID NO: 4272170 - DNA, 25 bp, Homo sapien
tccagtagcagggtaagatgagctg

SEQ ID NO: 4272171 - DNA, 25 bp, Homo sapien
taatctaatatagaaatgggccacc

SEQ ID NO: 4272172 - DNA, 25 bp, Homo sapien
agttaggtcgcagctttggataatt

SEQ ID NO: 4272173 - DNA, 25 bp, Homo sapien
cagttaggtcgcagctttggataat

SEQ ID NO: 4272174 - DNA, 25 bp, Homo sapien
gttaggtcgcagctttggataattt

SEQ ID NO: 4272175 - DNA, 25 bp, Homo sapien
ttcctctaaccagccatgaagggcc

SEQ ID NO: 4272176 - DNA, 25 bp, Homo sapien
gaagcacgaaaaggcctgggtctgc

SEQ ID NO: 4272177 - DNA, 25 bp, Homo sapien
tttgtggagcactgctgcatgcgct

SEQ ID NO: 4272178 - DNA, 25 bp, Homo sapien
tcgtcaacaccaagcgccagtgtgg

SEQ ID NO: 4272179 - DNA, 25 bp, Homo sapien
tgctgctcctaccagaagcacgaaa

SEQ ID NO: 4272180 - DNA, 25 bp, Homo sapien
ctacccatgggtggatttgagcaaa

SEQ ID NO: 4272181 - DNA, 25 bp, Homo sapien
tgcagttgtaaagcaagaatgaggt

SEQ ID NO: 4272182 - DNA, 25 bp, Homo sapien
tacccatgggtggatttgagcaaag

SEQ ID NO: 4272183 - DNA, 25 bp, Homo sapien
ggctgtgtgcagttgtaaagcaaga

SEQ ID NO: 4272184 - DNA, 25 bp, Homo sapien
tggttcctaacaaatcagcgatggc

SEQ ID NO: 4272185 - DNA, 25 bp, Homo sapien
aagtggttcgcagtatctttccaag

SEQ ID NO: 4272186 - DNA, 25 bp, Homo sapien
ttaaaaagcgtaactccacaagagc

SEQ ID NO: 4272187 - DNA, 25 bp, Homo sapien
taccggtctgcaagctgttaggaac

SEQ ID NO: 4272188 - DNA, 25 bp, Homo sapien
cacattccagcaggtagtacatagc

SEQ ID NO: 4272189 - DNA, 25 bp, Homo sapien
tacatagcagcaagcggttctcggg

SEQ ID NO: 4272190 - DNA, 25 bp, Homo sapien
gcactgcggctgcttggcattcaga

SEQ ID NO: 4272191 - DNA, 25 bp, Homo sapien
cagagaagaggttttgacagccatg

SEQ ID NO: 4272192 - DNA, 25 bp, Homo sapien
gggtaggaacaagggaagccagcgc

SEQ ID NO: 4272193 - DNA, 25 bp, Homo sapien
ctggggtaggaacaagggaagccag

SEQ ID NO: 4272194 - DNA, 25 bp, Homo sapien
gtaggaacaagggaagccagcgcca

SEQ ID NO: 4272195 - DNA, 25 bp, Homo sapien
ggaacaagggaagccagcgccatgc

SEQ ID NO: 4272196 - DNA, 25 bp, Homo sapien
caccaaagttgtgaagggtatgatt

SEQ ID NO: 4272197 - DNA, 25 bp, Homo sapien
cattccatgcccttggaattggaga

SEQ ID NO: 4272198 - DNA, 25 bp, Homo sapien
ccaaagttgtgaagggtatgattgt

SEQ ID NO: 4272199 - DNA, 25 bp, Homo sapien
tgttcaggcattccatgcccttgga

SEQ ID NO: 4272200 - DNA, 25 bp, Homo sapien
ccagtctgtgctcattctgaagaca

SEQ ID NO: 4272201 - DNA, 25 bp, Homo sapien
ctgccagtctgtgctcattctgaag

SEQ ID NO: 4272202 - DNA, 25 bp, Homo sapien
caacctgccagtctgtgctcattct

SEQ ID NO: 4272203 - DNA, 25 bp, Homo sapien
ttttccccaacctgccagtctgtgc

SEQ ID NO: 4272204 - DNA, 25 bp, Homo sapien
gaaccaacttatgtacagaagcagt

SEQ ID NO: 4272205 - DNA, 25 bp, Homo sapien
cccagtagtgatgggctagacagga

SEQ ID NO: 4272206 - DNA, 25 bp, Homo sapien
tcgggctagacaagatatccacctt

SEQ ID NO: 4272207 - DNA, 25 bp, Homo sapien
agcagttcagtgtcatcgggctaga

SEQ ID NO: 4272208 - DNA, 25 bp, Homo sapien
cagcttagtgtcatacttccagaca

SEQ ID NO: 4272209 - DNA, 25 bp, Homo sapien
tggcacatccagcttagtgtcatac

SEQ ID NO: 4272210 - DNA, 25 bp, Homo sapien
catccagcttagtgtcatacttcca

SEQ ID NO: 4272211 - DNA, 25 bp, Homo sapien
tagtgtcatacttccagacacccag

SEQ ID NO: 4272212 - DNA, 25 bp, Homo sapien
caactcagtaaaaggctcctctgtt

SEQ ID NO: 4272213 - DNA, 25 bp, Homo sapien
ctgccaacaactcagtaaaaggctc

SEQ ID NO: 4272214 - DNA, 25 bp, Homo sapien
acaactcagtaaaaggctcctctgt

SEQ ID NO: 4272215 - DNA, 25 bp, Homo sapien
ccaacaactcagtaaaaggctcctc

SEQ ID NO: 4272216 - DNA, 25 bp, Homo sapien
gcatggtggcatctgtttcttggga

SEQ ID NO: 4272217 - DNA, 25 bp, Homo sapien
gagcaggcgtctcactggcaagaac

SEQ ID NO: 4272218 - DNA, 25 bp, Homo sapien
ttagggagcctttactcatggtgga

SEQ ID NO: 4272219 - DNA, 25 bp, Homo sapien
gcaaagctggagcaggcgtctcact

SEQ ID NO: 4272220 - DNA, 25 bp, Homo sapien
ttcttgacagagctcatcactgggc

SEQ ID NO: 4272221 - DNA, 25 bp, Homo sapien
agcagaggggactatgagagcatag

SEQ ID NO: 4272222 - DNA, 25 bp, Homo sapien
ggctgatcttggaggtcttcttgac

SEQ ID NO: 4272223 - DNA, 25 bp, Homo sapien
tcactgggctgaatcagatgaggag

SEQ ID NO: 4272224 - DNA, 25 bp, Homo sapien
cagcccttaggatgcgatggacata

SEQ ID NO: 4272225 - DNA, 25 bp, Homo sapien
tcagtgtagaggcagaagagcaaca

SEQ ID NO: 4272226 - DNA, 25 bp, Homo sapien
ggcagctttatagccagacctcagt

SEQ ID NO: 4272227 - DNA, 25 bp, Homo sapien
catattgatgttctgacgtagtcca

SEQ ID NO: 4272228 - DNA, 25 bp, Homo sapien
tactccaaaggccccttttgaatgc

SEQ ID NO: 4272229 - DNA, 25 bp, Homo sapien
acttgggccgggatcctccactact

SEQ ID NO: 4272230 - DNA, 25 bp, Homo sapien
caaaggccccttttgaatgctttct

SEQ ID NO: 4272231 - DNA, 25 bp, Homo sapien
catctttacagccatgaatggctct

SEQ ID NO: 4272232 - DNA, 25 bp, Homo sapien
aattgcgcatagagggcctaggagc

SEQ ID NO: 4272233 - DNA, 25 bp, Homo sapien
ttgctgtagggatcggagaaattgc

SEQ ID NO: 4272234 - DNA, 25 bp, Homo sapien
agcagctgcgggtaaatcacacaca

SEQ ID NO: 4272235 - DNA, 25 bp, Homo sapien
cctaggagcagctgcgggtaaatca

SEQ ID NO: 4272236 - DNA, 25 bp, Homo sapien
gcttcacattaatggcagttgtcat

SEQ ID NO: 4272237 - DNA, 25 bp, Homo sapien
tccggcatctcacccttagcaagat

SEQ ID NO: 4272238 - DNA, 25 bp, Homo sapien
caagatgcttcacattaatggcagt

SEQ ID NO: 4272239 - DNA, 25 bp, Homo sapien
tcttccttctcgctatttgtcagct

SEQ ID NO: 4272240 - DNA, 25 bp, Homo sapien
tattcgttggccatgtgtgtatgtc

SEQ ID NO: 4272241 - DNA, 25 bp, Homo sapien
aaaaatggagatccatccccttaag

SEQ ID NO: 4272242 - DNA, 25 bp, Homo sapien
tgctaattggggtgagataatacct

SEQ ID NO: 4272243 - DNA, 25 bp, Homo sapien
tagacttacaatctaattttatgat

SEQ ID NO: 4272244 - DNA, 25 bp, Homo sapien
gcagtgctcccaagcgaacctttct

SEQ ID NO: 4272245 - DNA, 25 bp, Homo sapien
cagcagtgctcccaagcgaaccttt

SEQ ID NO: 4272246 - DNA, 25 bp, Homo sapien
agctcacagcagctgaccagattag

SEQ ID NO: 4272247 - DNA, 25 bp, Homo sapien
ctcacagcagctgaccagattaggc

SEQ ID NO: 4272248 - DNA, 25 bp, Homo sapien
tgtatcataagccaaaacagtgggc

SEQ ID NO: 4272249 - DNA, 25 bp, Homo sapien
aacagaggcgtttcattcatccaca

SEQ ID NO: 4272250 - DNA, 25 bp, Homo sapien
ggtgagcacctctcctggcttaaca

SEQ ID NO: 4272251 - DNA, 25 bp, Homo sapien
tgttatgtacccagcgggtcccgga

SEQ ID NO: 4272252 - DNA, 25 bp, Homo sapien
cttctataatctgttaatgttgtaa

SEQ ID NO: 4272253 - DNA, 25 bp, Homo sapien
ctataatctgttaatgttgtaaatc

SEQ ID NO: 4272254 - DNA, 25 bp, Homo sapien
ttttcttctataatctgttaatgtt

SEQ ID NO: 4272255 - DNA, 25 bp, Homo sapien
tcttctataatctgttaatgttgta

SEQ ID NO: 4272256 - DNA, 25 bp, Homo sapien
tggccttggccatcaagacctggat

SEQ ID NO: 4272257 - DNA, 25 bp, Homo sapien
gtcagttctcctctaatctctgtta

SEQ ID NO: 4272258 - DNA, 25 bp, Homo sapien
caaaccttcctagaggtcagttctc

SEQ ID NO: 4272259 - DNA, 25 bp, Homo sapien
aaatgtttcagtgcattacatatgc

SEQ ID NO: 4272260 - DNA, 25 bp, Homo sapien
gattaaaatatcaaccatgtcaggt

SEQ ID NO: 4272261 - DNA, 25 bp, Homo sapien
ttttcttgtctctaaagatgggatt

SEQ ID NO: 4272262 - DNA, 25 bp, Homo sapien
taaagatgggattaaaatatcaacc

SEQ ID NO: 4272263 - DNA, 25 bp, Homo sapien
cttgtctctaaagatgggattaaaa

SEQ ID NO: 4272264 - DNA, 25 bp, Homo sapien
tggatgtccactgtccctaatagtt

SEQ ID NO: 4272265 - DNA, 25 bp, Homo sapien
ggatgtccactgtccctaatagttc

SEQ ID NO: 4272266 - DNA, 25 bp, Homo sapien
gatgtccactgtccctaatagttcc

SEQ ID NO: 4272267 - DNA, 25 bp, Homo sapien
tgtccactgtccctaatagttcccc

SEQ ID NO: 4272268 - DNA, 25 bp, Homo sapien
tctttatgaaattgtagtggcaggc

SEQ ID NO: 4272269 - DNA, 25 bp, Homo sapien
gggtcccctcgaggctatgacatac

SEQ ID NO: 4272270 - DNA, 25 bp, Homo sapien
tgtgtatggtttggtctgctcccag

SEQ ID NO: 4272271 - DNA, 25 bp, Homo sapien
tgcagggcccaatgcagtgccttgg

SEQ ID NO: 4272272 - DNA, 25 bp, Homo sapien
tgcagtacataatgagaggcagcta

SEQ ID NO: 4272273 - DNA, 25 bp, Homo sapien
gaggcagctaaaccaccaggcactc

SEQ ID NO: 4272274 - DNA, 25 bp, Homo sapien
gtacataatgagaggcagctaaacc

SEQ ID NO: 4272275 - DNA, 25 bp, Homo sapien
aggcagctaaaccaccaggcactca

SEQ ID NO: 4272276 - DNA, 25 bp, Homo sapien
cagcattgtgcccatctccagccag

SEQ ID NO: 4272277 - DNA, 25 bp, Homo sapien
ttgtgcccatctccagccaggaagt

SEQ ID NO: 4272278 - DNA, 25 bp, Homo sapien
agcattgtgcccatctccagccagg

SEQ ID NO: 4272279 - DNA, 25 bp, Homo sapien
tgcccatctccagccaggaagtgtg

SEQ ID NO: 4272280 - DNA, 25 bp, Homo sapien
tccagatcagcaagacaagggccac

SEQ ID NO: 4272281 - DNA, 25 bp, Homo sapien
tgcttgaggagaggcgcacaactct

SEQ ID NO: 4272282 - DNA, 25 bp, Homo sapien
ccccatggatatctagagctgacag

SEQ ID NO: 4272283 - DNA, 25 bp, Homo sapien
tgggtggacacctgacacatgcctt

SEQ ID NO: 4272284 - DNA, 25 bp, Homo sapien
tgggcttgcaacaccagtgtgcttc

SEQ ID NO: 4272285 - DNA, 25 bp, Homo sapien
ctctggtggttgtgaagctgacctt

SEQ ID NO: 4272286 - DNA, 25 bp, Homo sapien
gtggactgtttcagctctggtggtt

SEQ ID NO: 4272287 - DNA, 25 bp, Homo sapien
tgaccttgtagatttggtgttctgc

SEQ ID NO: 4272288 - DNA, 25 bp, Homo sapien
ttgtgtcagctgactctctccatgc

SEQ ID NO: 4272289 - DNA, 25 bp, Homo sapien
gcaaagcctcctattgtgtcagctg

SEQ ID NO: 4272290 - DNA, 25 bp, Homo sapien
gttctgcaaagcctcctattgtgtc

SEQ ID NO: 4272291 - DNA, 25 bp, Homo sapien
gcctcctattgtgtcagctgactct

SEQ ID NO: 4272292 - DNA, 25 bp, Homo sapien
caacagtcctcagagtgtgacattc

SEQ ID NO: 4272293 - DNA, 25 bp, Homo sapien
cacaacagtcctcagagtgtgacat

SEQ ID NO: 4272294 - DNA, 25 bp, Homo sapien
acaacagtcctcagagtgtgacatt

SEQ ID NO: 4272295 - DNA, 25 bp, Homo sapien
aacagtcctcagagtgtgacattcc

SEQ ID NO: 4272296 - DNA, 25 bp, Homo sapien
tggttactcaggtggttctgtgccc

SEQ ID NO: 4272297 - DNA, 25 bp, Homo sapien
gccttgttgaaccaagagccagtga

SEQ ID NO: 4272298 - DNA, 25 bp, Homo sapien
tgctctaaggtcaaataagtctggg

SEQ ID NO: 4272299 - DNA, 25 bp, Homo sapien
taagtctgggaagcttgcacactct

SEQ ID NO: 4272300 - DNA, 25 bp, Homo sapien
ctgactgagctagaagatgccgccc

SEQ ID NO: 4272301 - DNA, 25 bp, Homo sapien
ccatctggcggatctggaggaccag

SEQ ID NO: 4272302 - DNA, 25 bp, Homo sapien
gcactgtgtatggactggagaccca

SEQ ID NO: 4272303 - DNA, 25 bp, Homo sapien
tgctgaactccaggtgagaactctc

SEQ ID NO: 4272304 - DNA, 25 bp, Homo sapien
tgagcttatcagatagatggccctg

SEQ ID NO: 4272305 - DNA, 25 bp, Homo sapien
tgaaagggcacaattctccactctg

SEQ ID NO: 4272306 - DNA, 25 bp, Homo sapien
taaccactctagagaatgaaagggc

SEQ ID NO: 4272307 - DNA, 25 bp, Homo sapien
cactctgtggatgggtcaatgctgt

SEQ ID NO: 4272308 - DNA, 25 bp, Homo sapien
gacaccatggaattccactgccagt

SEQ ID NO: 4272309 - DNA, 25 bp, Homo sapien
tgctctggagtcagctgtgatgtac

SEQ ID NO: 4272310 - DNA, 25 bp, Homo sapien
cttgacccaacagccatcgagtact

SEQ ID NO: 4272311 - DNA, 25 bp, Homo sapien
cgtacacgacagtgccttgacccaa

SEQ ID NO: 4272312 - DNA, 25 bp, Homo sapien
catgggaacgtcttagtcaactgaa

SEQ ID NO: 4272313 - DNA, 25 bp, Homo sapien
taactttagggctcttgcattgtca

SEQ ID NO: 4272314 - DNA, 25 bp, Homo sapien
taaggaacactatggccagaagtca

SEQ ID NO: 4272315 - DNA, 25 bp, Homo sapien
gaaaataacttgaggtgatggcagc

SEQ ID NO: 4272316 - DNA, 25 bp, Homo sapien
ctccagcggctgtggtggtcctggc

SEQ ID NO: 4272317 - DNA, 25 bp, Homo sapien
ggtcctggctctaggctgtggttac

SEQ ID NO: 4272318 - DNA, 25 bp, Homo sapien
tgtggtggtcctggctctaggctgt

SEQ ID NO: 4272319 - DNA, 25 bp, Homo sapien
ggtggtcctggctctaggctgtggt

SEQ ID NO: 4272320 - DNA, 25 bp, Homo sapien
atgtgactgaactgcatgaagatca

SEQ ID NO: 4272321 - DNA, 25 bp, Homo sapien
ctgtccatgtgactgaactgcatga

SEQ ID NO: 4272322 - DNA, 25 bp, Homo sapien
gtgactgaactgcatgaagatcatg

SEQ ID NO: 4272323 - DNA, 25 bp, Homo sapien
gtccatgtgactgaactgcatgaag

SEQ ID NO: 4272324 - DNA, 25 bp, Homo sapien
ctcttttagagagggtgacataacc

SEQ ID NO: 4272325 - DNA, 25 bp, Homo sapien
gtagtaatgagtggtccaggaacct

SEQ ID NO: 4272326 - DNA, 25 bp, Homo sapien
cccagagtctggtacaagcccgtgt

SEQ ID NO: 4272327 - DNA, 25 bp, Homo sapien
gtatttccagattctcatgacccat

SEQ ID NO: 4272328 - DNA, 25 bp, Homo sapien
ttggaaactctagcatacaaaggcc

SEQ ID NO: 4272329 - DNA, 25 bp, Homo sapien
caaaggcctctattctgatatgggc

SEQ ID NO: 4272330 - DNA, 25 bp, Homo sapien
tccccacaaacgataagatcccaag

SEQ ID NO: 4272331 - DNA, 25 bp, Homo sapien
gagagagccctactcaaaatttgct

SEQ ID NO: 4272332 - DNA, 25 bp, Homo sapien
gaatgggaacatgtcactgctggca

SEQ ID NO: 4272333 - DNA, 25 bp, Homo sapien
caaaatactaatgggtcgcagccgg

SEQ ID NO: 4272334 - DNA, 25 bp, Homo sapien
tgtactgagcttgcgctactggccc

SEQ ID NO: 4272335 - DNA, 25 bp, Homo sapien
gttacagctcctttcgcatccgggc

SEQ ID NO: 4272336 - DNA, 25 bp, Homo sapien
cataccagaatagatgtaagtctac

SEQ ID NO: 4272337 - DNA, 25 bp, Homo sapien
gacaacattcctaaaagacagatga

SEQ ID NO: 4272338 - DNA, 25 bp, Homo sapien
tcgaaaagcagttaggcagttctct

SEQ ID NO: 4272339 - DNA, 25 bp, Homo sapien
acaattcagcaagaccagttctcag

SEQ ID NO: 4272340 - DNA, 25 bp, Homo sapien
cctcgcaaggaaagctgtgaaacgt

SEQ ID NO: 4272341 - DNA, 25 bp, Homo sapien
ttcagagagtccctaccagcaagaa

SEQ ID NO: 4272342 - DNA, 25 bp, Homo sapien
cgtagtatagtcttttagctgggca

SEQ ID NO: 4272343 - DNA, 25 bp, Homo sapien
tgtcaccacgtgatgccatgtgcca

SEQ ID NO: 4272344 - DNA, 25 bp, Homo sapien
ttgctgagtcattccatggcagaaa

SEQ ID NO: 4272345 - DNA, 25 bp, Homo sapien
gctgagtcattccatggcagaaagc

SEQ ID NO: 4272346 - DNA, 25 bp, Homo sapien
ccaaggtcaagaagagtgcatctgg

SEQ ID NO: 4272347 - DNA, 25 bp, Homo sapien
aagtccaaggtcaagaagagtgcat

SEQ ID NO: 4272348 - DNA, 25 bp, Homo sapien
cctggccagggctcttttttatgga

SEQ ID NO: 4272349 - DNA, 25 bp, Homo sapien
tgggaatagtggctcatgccaccat

SEQ ID NO: 4272350 - DNA, 25 bp, Homo sapien
gccagggctcttttttatggaacta

SEQ ID NO: 4272351 - DNA, 25 bp, Homo sapien
aggctctggttctgtcaaccaggct

SEQ ID NO: 4272352 - DNA, 25 bp, Homo sapien
tgtcattgaggtaagtcagctacaa

SEQ ID NO: 4272353 - DNA, 25 bp, Homo sapien
ctggctcatgagtaaggaaaaggtg

SEQ ID NO: 4272354 - DNA, 25 bp, Homo sapien
aaaatccagggaagatagcgcagtt

SEQ ID NO: 4272355 - DNA, 25 bp, Homo sapien
taggctcagacactggtcatgtcat

SEQ ID NO: 4272356 - DNA, 25 bp, Homo sapien
gcttgaacacttcgcgggtcttccg

SEQ ID NO: 4272357 - DNA, 25 bp, Homo sapien
gcgggcgcggctaaatagtctccat

SEQ ID NO: 4272358 - DNA, 25 bp, Homo sapien
tcatagagattagccctgagcgtcg

SEQ ID NO: 4272359 - DNA, 25 bp, Homo sapien
gagagacgcttgagtcccttgactg

SEQ ID NO: 4272360 - DNA, 25 bp, Homo sapien
gttcatacggtgaaataaaacctca

SEQ ID NO: 4272361 - DNA, 25 bp, Homo sapien
agtgattgggtgctttatgtgtaac

SEQ ID NO: 4272362 - DNA, 25 bp, Homo sapien
gattgaacatcctgaatacggagag

SEQ ID NO: 4272363 - DNA, 25 bp, Homo sapien
gaaatttgcctgtaatggtactgtg

SEQ ID NO: 4272364 - DNA, 25 bp, Homo sapien
caaatacgtgttgaattgttggcta

SEQ ID NO: 4272365 - DNA, 25 bp, Homo sapien
cagcttaaggttcatggattctaaa

SEQ ID NO: 4272366 - DNA, 25 bp, Homo sapien
tacacacacaggctatttcttggca

SEQ ID NO: 4272367 - DNA, 25 bp, Homo sapien
tgcagtaagctgttgatagtgattc

SEQ ID NO: 4272368 - DNA, 25 bp, Homo sapien
gactagtaacacataagaaaattgc

SEQ ID NO: 4272369 - DNA, 25 bp, Homo sapien
aaaccatgtacgttgcagcttaaca

SEQ ID NO: 4272370 - DNA, 25 bp, Homo sapien
cattcacatctgcatgattacagaa

SEQ ID NO: 4272371 - DNA, 25 bp, Homo sapien
tcatattgtctttacatgtttccaa

SEQ ID NO: 4272372 - DNA, 25 bp, Homo sapien
ggttgggctccatcagaggtgatga

SEQ ID NO: 4272373 - DNA, 25 bp, Homo sapien
tagacgggatggttgggctccatca

SEQ ID NO: 4272374 - DNA, 25 bp, Homo sapien
tgggctccatcagaggtgatgagac

SEQ ID NO: 4272375 - DNA, 25 bp, Homo sapien
ttagacgggatggttgggctccatc

SEQ ID NO: 4272376 - DNA, 25 bp, Homo sapien
gcttctgctttattaaggccaatta

SEQ ID NO: 4272377 - DNA, 25 bp, Homo sapien
ggccaattagaaccccatagtggca

SEQ ID NO: 4272378 - DNA, 25 bp, Homo sapien
tccacatctggtcaatggcatccag

SEQ ID NO: 4272379 - DNA, 25 bp, Homo sapien
ccagatctttaccaaggcctcctca

SEQ ID NO: 4272380 - DNA, 25 bp, Homo sapien
gtgcagatggtccagatggcttttt

SEQ ID NO: 4272381 - DNA, 25 bp, Homo sapien
ctgtgcagatggtccagatggcttt

SEQ ID NO: 4272382 - DNA, 25 bp, Homo sapien
atggtccagatggctttttcttcca

SEQ ID NO: 4272383 - DNA, 25 bp, Homo sapien
agatggtccagatggctttttcttc

SEQ ID NO: 4272384 - DNA, 25 bp, Homo sapien
ctgtaatgaaactgctgccaccctg

SEQ ID NO: 4272385 - DNA, 25 bp, Homo sapien
tcctgtaatgaaactgctgccaccc

SEQ ID NO: 4272386 - DNA, 25 bp, Homo sapien
cctgtaatgaaactgctgccaccct

SEQ ID NO: 4272387 - DNA, 25 bp, Homo sapien
gagtcagaccctatctgcactcctg

SEQ ID NO: 4272388 - DNA, 25 bp, Homo sapien
taattagaatcacttactcaccagg

SEQ ID NO: 4272389 - DNA, 25 bp, Homo sapien
cacaacagggtattcttagagcact

SEQ ID NO: 4272390 - DNA, 25 bp, Homo sapien
tgttgtcttaagctccacacctggt

SEQ ID NO: 4272391 - DNA, 25 bp, Homo sapien
caactgaattagcatgagtactgag

SEQ ID NO: 4272392 - DNA, 25 bp, Homo sapien
cctctggaccagaagctcttgtcag

SEQ ID NO: 4272393 - DNA, 25 bp, Homo sapien
gactttctaaagatgcctgattgct

SEQ ID NO: 4272394 - DNA, 25 bp, Homo sapien
tcttgtcaggatagaaaaaggctgc

SEQ ID NO: 4272395 - DNA, 25 bp, Homo sapien
gttcctgtggagtcgctcctcagtg

SEQ ID NO: 4272396 - DNA, 25 bp, Homo sapien
ctgtggagtcgctcctcagtgcatg

SEQ ID NO: 4272397 - DNA, 25 bp, Homo sapien
aacctgtgagcacagcagttcctgt

SEQ ID NO: 4272398 - DNA, 25 bp, Homo sapien
tcagaaacctgtgagcacagcagtt

SEQ ID NO: 4272399 - DNA, 25 bp, Homo sapien
gatgccaagtatcagacatgttccc

SEQ ID NO: 4272400 - DNA, 25 bp, Homo sapien
tacaatctggctcacgtaacacagg

SEQ ID NO: 4272401 - DNA, 25 bp, Homo sapien
agcaagcttgcatatcagtagacac

SEQ ID NO: 4272402 - DNA, 25 bp, Homo sapien
acacgtgtttgtttatatgccagca

SEQ ID NO: 4272403 - DNA, 25 bp, Homo sapien
gaagggctctgctccatagacgtag

SEQ ID NO: 4272404 - DNA, 25 bp, Homo sapien
tctagactgtactgagggaacaaac

SEQ ID NO: 4272405 - DNA, 25 bp, Homo sapien
tagctgcaccaatgagtacatacga

SEQ ID NO: 4272406 - DNA, 25 bp, Homo sapien
tagacgtagtcactgggaacccaga

SEQ ID NO: 4272407 - DNA, 25 bp, Homo sapien
gatagacattctttagtcatgcccc

SEQ ID NO: 4272408 - DNA, 25 bp, Homo sapien
acagaagacttaggaggccagccac

SEQ ID NO: 4272409 - DNA, 25 bp, Homo sapien
ggtcaggaaactgcatacatatcac

SEQ ID NO: 4272410 - DNA, 25 bp, Homo sapien
gccagccacgtagctgtggtcagga

SEQ ID NO: 4272411 - DNA, 25 bp, Homo sapien
tctacaaagaataccagtgcctggt

SEQ ID NO: 4272412 - DNA, 25 bp, Homo sapien
ccagatccacaagcaagaggtcctc

SEQ ID NO: 4272413 - DNA, 25 bp, Homo sapien
aattggctgccgtggtagcaggcac

SEQ ID NO: 4272414 - DNA, 25 bp, Homo sapien
tgtgggtctcgctaacaccagagaa

SEQ ID NO: 4272415 - DNA, 25 bp, Homo sapien
aaaatttgtaaccaagagttgcaga

SEQ ID NO: 4272416 - DNA, 25 bp, Homo sapien
tctccaaggactgtgtagtcttgct

SEQ ID NO: 4272417 - DNA, 25 bp, Homo sapien
aagttagtgtaagacgcaagggaga

SEQ ID NO: 4272418 - DNA, 25 bp, Homo sapien
caaattgagggtagtgactgacacc

SEQ ID NO: 4272419 - DNA, 25 bp, Homo sapien
tccacgagttcgagactagcttggg

SEQ ID NO: 4272420 - DNA, 25 bp, Homo sapien
tgagtccacgagttcgagactagct

SEQ ID NO: 4272421 - DNA, 25 bp, Homo sapien
agtccacgagttcgagactagcttg

SEQ ID NO: 4272422 - DNA, 25 bp, Homo sapien
ttgggcaacatggtgaaacccatct

SEQ ID NO: 4272423 - DNA, 25 bp, Homo sapien
gaccttgtgcttagtcccagaggcc

SEQ ID NO: 4272424 - DNA, 25 bp, Homo sapien
cagaggcccctcttagttctcaaca

SEQ ID NO: 4272425 - DNA, 25 bp, Homo sapien
gaatcataatatatccccaggcttg

SEQ ID NO: 4272426 - DNA, 25 bp, Homo sapien
tgattccatgagaggctgacaaggg

SEQ ID NO: 4272427 - DNA, 25 bp, Homo sapien
aaatcgagaatccatctgagtcagc

SEQ ID NO: 4272428 - DNA, 25 bp, Homo sapien
catcttctgtgggacaggctaggtt

SEQ ID NO: 4272429 - DNA, 25 bp, Homo sapien
ccagtccagcatcataaaatcgaga

SEQ ID NO: 4272430 - DNA, 25 bp, Homo sapien
aggcctctggatgccctaggatgac

SEQ ID NO: 4272431 - DNA, 25 bp, Homo sapien
ctgggagccacggctgggatgcgct

SEQ ID NO: 4272432 - DNA, 25 bp, Homo sapien
gggagccacggctgggatgcgcttg

SEQ ID NO: 4272433 - DNA, 25 bp, Homo sapien
tgggagccacggctgggatgcgctt

SEQ ID NO: 4272434 - DNA, 25 bp, Homo sapien
gtgccctggacttaggtggtgcctc

SEQ ID NO: 4272435 - DNA, 25 bp, Homo sapien
catggagtggaaaccacgggtgccc

SEQ ID NO: 4272436 - DNA, 25 bp, Homo sapien
cacccgcatggagtggaaaccacgg

SEQ ID NO: 4272437 - DNA, 25 bp, Homo sapien
accacgggtgccctggacttaggtg

SEQ ID NO: 4272438 - DNA, 25 bp, Homo sapien
tagatgcctgatagggtggctctgc

SEQ ID NO: 4272439 - DNA, 25 bp, Homo sapien
agcctctcacagtcagctcacaggg

SEQ ID NO: 4272440 - DNA, 25 bp, Homo sapien
gaggcttctgactcatgcaagagga

SEQ ID NO: 4272441 - DNA, 25 bp, Homo sapien
tatctatgtatccagcagtccacag

SEQ ID NO: 4272442 - DNA, 25 bp, Homo sapien
caggcttttgcaggattctactaca

SEQ ID NO: 4272443 - DNA, 25 bp, Homo sapien
gttaccctcgggattatagcatcag

SEQ ID NO: 4272444 - DNA, 25 bp, Homo sapien
cagccagtgctttaaatctttcagg

SEQ ID NO: 4272445 - DNA, 25 bp, Homo sapien
cacagaattggagtcaggtcagtat

SEQ ID NO: 4272446 - DNA, 25 bp, Homo sapien
gaattcccacttagggctctggtca

SEQ ID NO: 4272447 - DNA, 25 bp, Homo sapien
ccaaagtcgaatgagaaagaactcc

SEQ ID NO: 4272448 - DNA, 25 bp, Homo sapien
gcaacctgtgtgtttgtcatcatcc

SEQ ID NO: 4272449 - DNA, 25 bp, Homo sapien
tctggtcactagattgcaacctgtg

SEQ ID NO: 4272450 - DNA, 25 bp, Homo sapien
gatttcagcctactgagaccctaag

SEQ ID NO: 4272451 - DNA, 25 bp, Homo sapien
tggagaacccagttgagcccactct

SEQ ID NO: 4272452 - DNA, 25 bp, Homo sapien
cagataagagtccaggtcagatcat

SEQ ID NO: 4272453 - DNA, 25 bp, Homo sapien
gcatgggttcagaggtaaaagtacc

SEQ ID NO: 4272454 - DNA, 25 bp, Homo sapien
gatgaaaaggcggtgtgatgaatac

SEQ ID NO: 4272455 - DNA, 25 bp, Homo sapien
aaaggcggtgtgatgaatacaagta

SEQ ID NO: 4272456 - DNA, 25 bp, Homo sapien
gaaaaggcggtgtgatgaatacaag

SEQ ID NO: 4272457 - DNA, 25 bp, Homo sapien
cacagatgaaaaggcggtgtgatga

SEQ ID NO: 4272458 - DNA, 25 bp, Homo sapien
ggagctggctccacatacatcatgg

SEQ ID NO: 4272459 - DNA, 25 bp, Homo sapien
caactttagtagcatagcctggatc

SEQ ID NO: 4272460 - DNA, 25 bp, Homo sapien
gcaatataattacccacacgtcaga

SEQ ID NO: 4272461 - DNA, 25 bp, Homo sapien
tacagatgtttaagtccaggacaca

SEQ ID NO: 4272462 - DNA, 25 bp, Homo sapien
gcagcaggttgcttgccatactgaa

SEQ ID NO: 4272463 - DNA, 25 bp, Homo sapien
gatcagaccgtgaaaggccttgcag

SEQ ID NO: 4272464 - DNA, 25 bp, Homo sapien
caacacatattactgagcgcaagca

SEQ ID NO: 4272465 - DNA, 25 bp, Homo sapien
ccagcaggcaagatatgggagccct

SEQ ID NO: 4272466 - DNA, 25 bp, Homo sapien
tctgggcacaatttcgctgagtcct

SEQ ID NO: 4272467 - DNA, 25 bp, Homo sapien
agtcatctcaaggatccactgcaga

SEQ ID NO: 4272468 - DNA, 25 bp, Homo sapien
gcttcacttgggcaactgtcagcag

SEQ ID NO: 4272469 - DNA, 25 bp, Homo sapien
tggttcagggtccttcacaggcagc

SEQ ID NO: 4272470 - DNA, 25 bp, Homo sapien
ggctactgcagttatccaaacaaga

SEQ ID NO: 4272471 - DNA, 25 bp, Homo sapien
caagagatagtggtggcttgcacaa

SEQ ID NO: 4272472 - DNA, 25 bp, Homo sapien
gagacaaacagaggtgtcacagtct

SEQ ID NO: 4272473 - DNA, 25 bp, Homo sapien
tagaagtgtccaccacagaggctac

SEQ ID NO: 4272474 - DNA, 25 bp, Homo sapien
gaacttccccattgatataatgctc

SEQ ID NO: 4272475 - DNA, 25 bp, Homo sapien
gaataccttcttgctataccatcag

SEQ ID NO: 4272476 - DNA, 25 bp, Homo sapien
ccattgatataatgctcagaatacc

SEQ ID NO: 4272477 - DNA, 25 bp, Homo sapien
tcagaataccttcttgctataccat

SEQ ID NO: 4272478 - DNA, 25 bp, Homo sapien
ttgtctgctaaactgacgcccccat

SEQ ID NO: 4272479 - DNA, 25 bp, Homo sapien
atattttgtctgctaaactgacgcc

SEQ ID NO: 4272480 - DNA, 25 bp, Homo sapien
attttgtctgctaaactgacgcccc

SEQ ID NO: 4272481 - DNA, 25 bp, Homo sapien
gggctacaggtaaatattttgtctg

SEQ ID NO: 4272482 - DNA, 25 bp, Homo sapien
tgggacaagtggacgtgctcctact

SEQ ID NO: 4272483 - DNA, 25 bp, Homo sapien
taagcctgagtgtctaggcccctgc

SEQ ID NO: 4272484 - DNA, 25 bp, Homo sapien
cgggcgacggtttacaggacagctc

SEQ ID NO: 4272485 - DNA, 25 bp, Homo sapien
gccccttggtgattggacgtccgga

SEQ ID NO: 4272486 - DNA, 25 bp, Homo sapien
gacatctggagccactagcagttat

SEQ ID NO: 4272487 - DNA, 25 bp, Homo sapien
tccctctccgtgattggacgagcag

SEQ ID NO: 4272488 - DNA, 25 bp, Homo sapien
tagaggccaagcaaactatcgagcc

SEQ ID NO: 4272489 - DNA, 25 bp, Homo sapien
gatctgcgcgtgctcgatctggtca

SEQ ID NO: 4272490 - DNA, 25 bp, Homo sapien
tgaggagcgaacagacctagccatg

SEQ ID NO: 4272491 - DNA, 25 bp, Homo sapien
taaaagaatgtaacgccaggcacgg

SEQ ID NO: 4272492 - DNA, 25 bp, Homo sapien
caaatggcatgcgaccaacggaaga

SEQ ID NO: 4272493 - DNA, 25 bp, Homo sapien
aaattactaagcgatgaccctcctg

SEQ ID NO: 4272494 - DNA, 25 bp, Homo sapien
tgagtcttactgttgcgggctccgg

SEQ ID NO: 4272495 - DNA, 25 bp, Homo sapien
agagccttgtcctgccgtgtgggcc

SEQ ID NO: 4272496 - DNA, 25 bp, Homo sapien
tgctgatttcgtccatccaggttgg

SEQ ID NO: 4272497 - DNA, 25 bp, Homo sapien
gaaccgggcttaagctactgaggcg

SEQ ID NO: 4272498 - DNA, 25 bp, Homo sapien
tcaccgccgcgagtaaaaaggctcc

SEQ ID NO: 4272499 - DNA, 25 bp, Homo sapien
ccaaaagctcagaagggtcaaaaag

SEQ ID NO: 4272500 - DNA, 25 bp, Homo sapien
aagcacctggtactaagggtactgc

SEQ ID NO: 4272501 - DNA, 25 bp, Homo sapien
catctggcaagaaagcataagtggc

SEQ ID NO: 4272502 - DNA, 25 bp, Homo sapien
ccttctgagtagttgggactatagg

SEQ ID NO: 4272503 - DNA, 25 bp, Homo sapien
tacaggtgtgagccactgtgcccgg

SEQ ID NO: 4272504 - DNA, 25 bp, Homo sapien
tgtgtgccaccacgtctggctagtt

SEQ ID NO: 4272505 - DNA, 25 bp, Homo sapien
gggctcaagcggttctcctgctcag

SEQ ID NO: 4272506 - DNA, 25 bp, Homo sapien
ttctgaatgcatacagtccacctgc

SEQ ID NO: 4272507 - DNA, 25 bp, Homo sapien
ctcccggatgagtaccacactgtct

SEQ ID NO: 4272508 - DNA, 25 bp, Homo sapien
caaataactgtttggaacattgccc

SEQ ID NO: 4272509 - DNA, 25 bp, Homo sapien
tacacgtcaggtatagaaaatctca

SEQ ID NO: 4272510 - DNA, 25 bp, Homo sapien
tggattgcagtagtgcgatcatgga

SEQ ID NO: 4272511 - DNA, 25 bp, Homo sapien
gattgcagtagtgcgatcatggatc

SEQ ID NO: 4272512 - DNA, 25 bp, Homo sapien
ggctggattgcagtagtgcgatcat

SEQ ID NO: 4272513 - DNA, 25 bp, Homo sapien
gctggattgcagtagtgcgatcatg

SEQ ID NO: 4272514 - DNA, 25 bp, Homo sapien
gagaaacctgaccatgacttgctgt

SEQ ID NO: 4272515 - DNA, 25 bp, Homo sapien
ccctttagggtagatgcctgagtat

SEQ ID NO: 4272516 - DNA, 25 bp, Homo sapien
ctctaaagctgtacatggatggaac

SEQ ID NO: 4272517 - DNA, 25 bp, Homo sapien
gatggaacttgttggcatcacactg

SEQ ID NO: 4272518 - DNA, 25 bp, Homo sapien
gaggtgttcctctccatggaaatct

SEQ ID NO: 4272519 - DNA, 25 bp, Homo sapien
atgatctgaagagaagccagagtat

SEQ ID NO: 4272520 - DNA, 25 bp, Homo sapien
gtatcttaagactcagaggtgttcc

SEQ ID NO: 4272521 - DNA, 25 bp, Homo sapien
tgaaagatttatatgatctgaagag

SEQ ID NO: 4272522 - DNA, 25 bp, Homo sapien
gctaaaacggcgagtggaaaccatg

SEQ ID NO: 4272523 - DNA, 25 bp, Homo sapien
tagcaactgtatgtagccacgggtg

SEQ ID NO: 4272524 - DNA, 25 bp, Homo sapien
tagagatgacaaagcaggcgccatt

SEQ ID NO: 4272525 - DNA, 25 bp, Homo sapien
tacgcacatctaggtccttggaagg

SEQ ID NO: 4272526 - DNA, 25 bp, Homo sapien
caagttctgatagaagttcaaatac

SEQ ID NO: 4272527 - DNA, 25 bp, Homo sapien
aaatacaagtctggtatcagcacag

SEQ ID NO: 4272528 - DNA, 25 bp, Homo sapien
tatgtcctaaacagcatatgtggtt

SEQ ID NO: 4272529 - DNA, 25 bp, Homo sapien
ttaccctgaaacgattcaacactgg

SEQ ID NO: 4272530 - DNA, 25 bp, Homo sapien
ggatccattactccatgggtcaagg

SEQ ID NO: 4272531 - DNA, 25 bp, Homo sapien
tattactgctcgttgataatgtgtc

SEQ ID NO: 4272532 - DNA, 25 bp, Homo sapien
taatgtgtctggtcacccaagagtt

SEQ ID NO: 4272533 - DNA, 25 bp, Homo sapien
attctgcaggatccattactccatg

SEQ ID NO: 4272534 - DNA, 25 bp, Homo sapien
cagaatcataagcagggaatctgtt

SEQ ID NO: 4272535 - DNA, 25 bp, Homo sapien
aatgttttccacgttgtgttcatct

SEQ ID NO: 4272536 - DNA, 25 bp, Homo sapien
tgttttccacgttgtgttcatctct

SEQ ID NO: 4272537 - DNA, 25 bp, Homo sapien
atgttttccacgttgtgttcatctc

SEQ ID NO: 4272538 - DNA, 25 bp, Homo sapien
aagcctgcaggccagcagcaagcca

SEQ ID NO: 4272539 - DNA, 25 bp, Homo sapien
gccagacttactgagaagcctgcag

SEQ ID NO: 4272540 - DNA, 25 bp, Homo sapien
cctgcaggccagcagcaagccagta

SEQ ID NO: 4272541 - DNA, 25 bp, Homo sapien
caggccagcagcaagccagtacaat

SEQ ID NO: 4272542 - DNA, 25 bp, Homo sapien
ggtgagttcttcaaggaagtgatac

SEQ ID NO: 4272543 - DNA, 25 bp, Homo sapien
cttcaaggaagtgatactctgagaa

SEQ ID NO: 4272544 - DNA, 25 bp, Homo sapien
ctgggtgagttcttcaaggaagtga

SEQ ID NO: 4272545 - DNA, 25 bp, Homo sapien
caaggaagtgatactctgagaacca

SEQ ID NO: 4272546 - DNA, 25 bp, Homo sapien
ctgcactgaaatttatccaacacaa

SEQ ID NO: 4272547 - DNA, 25 bp, Homo sapien
cttggatggtaagtgaaggggtcct

SEQ ID NO: 4272548 - DNA, 25 bp, Homo sapien
cttccttttccatggggtgtcctgt

SEQ ID NO: 4272549 - DNA, 25 bp, Homo sapien
ctcacacagactcacttccccacaa

SEQ ID NO: 4272550 - DNA, 25 bp, Homo sapien
ctggtggaaagaagcctccaggacc

SEQ ID NO: 4272551 - DNA, 25 bp, Homo sapien
tggtggaaagaagcctccaggacct

SEQ ID NO: 4272552 - DNA, 25 bp, Homo sapien
aagcctccaggacctgcttatagag

SEQ ID NO: 4272553 - DNA, 25 bp, Homo sapien
tggaaagaagcctccaggacctgct

SEQ ID NO: 4272554 - DNA, 25 bp, Homo sapien
agaaaagtcctcatcttcaagtgag

SEQ ID NO: 4272555 - DNA, 25 bp, Homo sapien
tcctcatcttcaagtgagcatgcag

SEQ ID NO: 4272556 - DNA, 25 bp, Homo sapien
aagtcctcatcttcaagtgagcatg

SEQ ID NO: 4272557 - DNA, 25 bp, Homo sapien
atcttcaagtgagcatgcagcagcc

SEQ ID NO: 4272558 - DNA, 25 bp, Homo sapien
tgttatgctgcatgatgcccacggt

SEQ ID NO: 4272559 - DNA, 25 bp, Homo sapien
tttttgttatgctgcatgatgccca

SEQ ID NO: 4272560 - DNA, 25 bp, Homo sapien
tatgctgcatgatgcccacggtgag

SEQ ID NO: 4272561 - DNA, 25 bp, Homo sapien
ctgcatgatgcccacggtgaggaac

SEQ ID NO: 4272562 - DNA, 25 bp, Homo sapien
tgcagctcctcatagtaggcaatgg

SEQ ID NO: 4272563 - DNA, 25 bp, Homo sapien
aacttgccggcaagaaacttgcaga

SEQ ID NO: 4272564 - DNA, 25 bp, Homo sapien
cggagagcacgtggacctgagactc

SEQ ID NO: 4272565 - DNA, 25 bp, Homo sapien
ctgtactgagtagcaatgaacacct

SEQ ID NO: 4272566 - DNA, 25 bp, Homo sapien
gaaacttgccggcaagaaacttgca

SEQ ID NO: 4272567 - DNA, 25 bp, Homo sapien
aggaaggcctataggcagactttct

SEQ ID NO: 4272568 - DNA, 25 bp, Homo sapien
ggcctataggcagactttctatcac

SEQ ID NO: 4272569 - DNA, 25 bp, Homo sapien
tttatcatatgcctgattgaggccc

SEQ ID NO: 4272570 - DNA, 25 bp, Homo sapien
ttatcatatgcctgattgaggccct

SEQ ID NO: 4272571 - DNA, 25 bp, Homo sapien
cctttggagacaatctcttacagtg

SEQ ID NO: 4272572 - DNA, 25 bp, Homo sapien
gggcacctttggagacaatctctta

SEQ ID NO: 4272573 - DNA, 25 bp, Homo sapien
gacaatctcttacagtgtatgagca

SEQ ID NO: 4272574 - DNA, 25 bp, Homo sapien
tcttacagtgtatgagcatatatcc

SEQ ID NO: 4272575 - DNA, 25 bp, Homo sapien
ggacatgaatccctacggtgttgaa

SEQ ID NO: 4272576 - DNA, 25 bp, Homo sapien
gcaagacttccagtgctagacccag

SEQ ID NO: 4272577 - DNA, 25 bp, Homo sapien
ggtccttggatcagcaccactggaa

SEQ ID NO: 4272578 - DNA, 25 bp, Homo sapien
gaggcagtgctagtctccaggaaag

SEQ ID NO: 4272579 - DNA, 25 bp, Homo sapien
aagacctggctcgaggtaatgatcc

SEQ ID NO: 4272580 - DNA, 25 bp, Homo sapien
cagtcttagagttccagtacccagc

SEQ ID NO: 4272581 - DNA, 25 bp, Homo sapien
agtacccagcacaagacctggctcg

SEQ ID NO: 4272582 - DNA, 25 bp, Homo sapien
agtcttagagttccagtacccagca

SEQ ID NO: 4272583 - DNA, 25 bp, Homo sapien
tttttgcaacaaatacctgagtacg

SEQ ID NO: 4272584 - DNA, 25 bp, Homo sapien
cctttcattggtaaagggattgtat

SEQ ID NO: 4272585 - DNA, 25 bp, Homo sapien
agtacgtgtctctatctggcttaaa

SEQ ID NO: 4272586 - DNA, 25 bp, Homo sapien
ttttgtgacctcatggcattcccat

SEQ ID NO: 4272587 - DNA, 25 bp, Homo sapien
gaactaattccttagatcgaggaga

SEQ ID NO: 4272588 - DNA, 25 bp, Homo sapien
taattccttagatcgaggagatgcc

SEQ ID NO: 4272589 - DNA, 25 bp, Homo sapien
ccttagatcgaggagatgccatgag

SEQ ID NO: 4272590 - DNA, 25 bp, Homo sapien
ccctgaactaattccttagatcgag

SEQ ID NO: 4272591 - DNA, 25 bp, Homo sapien
ccgagttcctcagctgaggattcag

SEQ ID NO: 4272592 - DNA, 25 bp, Homo sapien
gctgctggtaaagggaataggattc

SEQ ID NO: 4272593 - DNA, 25 bp, Homo sapien
cagaggtgttagcatcttctgagat

SEQ ID NO: 4272594 - DNA, 25 bp, Homo sapien
tgggaaccaatatgtctgactctgt

SEQ ID NO: 4272595 - DNA, 25 bp, Homo sapien
actggacattccagcagggtgcttc

SEQ ID NO: 4272596 - DNA, 25 bp, Homo sapien
tgttaggccaccactgtcggctggg

SEQ ID NO: 4272597 - DNA, 25 bp, Homo sapien
gcacctttttcgaagaagtcactac

SEQ ID NO: 4272598 - DNA, 25 bp, Homo sapien
ccagacgaaggactggacattccag

SEQ ID NO: 4272599 - DNA, 25 bp, Homo sapien
ggattctcggcactgatctctgtgc

SEQ ID NO: 4272600 - DNA, 25 bp, Homo sapien
cacgcagttaatccgggattctcgg

SEQ ID NO: 4272601 - DNA, 25 bp, Homo sapien
cagctccacgcagttaatccgggat

SEQ ID NO: 4272602 - DNA, 25 bp, Homo sapien
cgggattctcggcactgatctctgt

SEQ ID NO: 4272603 - DNA, 25 bp, Homo sapien
agcctgcgcaatctgcaggcgccat

SEQ ID NO: 4272604 - DNA, 25 bp, Homo sapien
ctgtgtgccagcctgcgcaatctgc

SEQ ID NO: 4272605 - DNA, 25 bp, Homo sapien
tgccagcctgcgcaatctgcaggcg

SEQ ID NO: 4272606 - DNA, 25 bp, Homo sapien
gtgtgccagcctgcgcaatctgcag

SEQ ID NO: 4272607 - DNA, 25 bp, Homo sapien
ttctcatttctcattaccgtcaggc

SEQ ID NO: 4272608 - DNA, 25 bp, Homo sapien
ttttcagcacttttctcatttctca

SEQ ID NO: 4272609 - DNA, 25 bp, Homo sapien
tcatttctcattaccgtcaggccca

SEQ ID NO: 4272610 - DNA, 25 bp, Homo sapien
catttctcattaccgtcaggcccat

SEQ ID NO: 4272611 - DNA, 25 bp, Homo sapien
actgggacatgtgagattaaaccgc

SEQ ID NO: 4272612 - DNA, 25 bp, Homo sapien
tggtctgcagacaatcagctactct

SEQ ID NO: 4272613 - DNA, 25 bp, Homo sapien
gaactatgttgtcccaggcaactgg

SEQ ID NO: 4272614 - DNA, 25 bp, Homo sapien
tagtgttcgtcctgtagcagggtgc

SEQ ID NO: 4272615 - DNA, 25 bp, Homo sapien
tcaggtacagcccttggtgatgccc

SEQ ID NO: 4272616 - DNA, 25 bp, Homo sapien
catcttcagtacacccgttcctcca

SEQ ID NO: 4272617 - DNA, 25 bp, Homo sapien
cacaccagcaggccttaggctcccc

SEQ ID NO: 4272618 - DNA, 25 bp, Homo sapien
ccacaccagcaggccttaggctccc

SEQ ID NO: 4272619 - DNA, 25 bp, Homo sapien
accagcaggccttaggctcccccag

SEQ ID NO: 4272620 - DNA, 25 bp, Homo sapien
acaccagcaggccttaggctccccc

SEQ ID NO: 4272621 - DNA, 25 bp, Homo sapien
caggcagtggcataggcatggacac

SEQ ID NO: 4272622 - DNA, 25 bp, Homo sapien
ggcagtggcataggcatggacacac

SEQ ID NO: 4272623 - DNA, 25 bp, Homo sapien
aggcagtggcataggcatggacaca

SEQ ID NO: 4272624 - DNA, 25 bp, Homo sapien
tcaggcagtggcataggcatggaca

SEQ ID NO: 4272625 - DNA, 25 bp, Homo sapien
tcgctgaatcaagtgtggctggcca

SEQ ID NO: 4272626 - DNA, 25 bp, Homo sapien
gaagatgaggctggtcaagaaaatt

SEQ ID NO: 4272627 - DNA, 25 bp, Homo sapien
catttagggacagcaagtgttcgct

SEQ ID NO: 4272628 - DNA, 25 bp, Homo sapien
ggtaagagtattgggaagatgaggc

SEQ ID NO: 4272629 - DNA, 25 bp, Homo sapien
tcacataacagtaataactgagtct

SEQ ID NO: 4272630 - DNA, 25 bp, Homo sapien
cacataacagtaataactgagtctg

SEQ ID NO: 4272631 - DNA, 25 bp, Homo sapien
acataacagtaataactgagtctga

SEQ ID NO: 4272632 - DNA, 25 bp, Homo sapien
cataacagtaataactgagtctgac

SEQ ID NO: 4272633 - DNA, 25 bp, Homo sapien
gtgccatggtccgcattgactggtt

SEQ ID NO: 4272634 - DNA, 25 bp, Homo sapien
agtgccatggtccgcattgactggt

SEQ ID NO: 4272635 - DNA, 25 bp, Homo sapien
gcagtgtagaggaagtgggcagtgt

SEQ ID NO: 4272636 - DNA, 25 bp, Homo sapien
tgtagaggaagtgggcagtgtgctc

SEQ ID NO: 4272637 - DNA, 25 bp, Homo sapien
ctgcagtgtagaggaagtgggcagt

SEQ ID NO: 4272638 - DNA, 25 bp, Homo sapien
agaggaagtgggcagtgtgctccat

SEQ ID NO: 4272639 - DNA, 25 bp, Homo sapien
gaaggagaaagtgtgtgactcaatt

SEQ ID NO: 4272640 - DNA, 25 bp, Homo sapien
ggagaaagtgtgtgactcaattaag

SEQ ID NO: 4272641 - DNA, 25 bp, Homo sapien
tcagggacaggatctgcatgaagga

SEQ ID NO: 4272642 - DNA, 25 bp, Homo sapien
tgtgtgactcaattaagatacaatt

SEQ ID NO: 4272643 - DNA, 25 bp, Homo sapien
ggtctcccttttatctagtgtcctc

SEQ ID NO: 4272644 - DNA, 25 bp, Homo sapien
gtctcccttttatctagtgtcctca

SEQ ID NO: 4272645 - DNA, 25 bp, Homo sapien
tctcccttttatctagtgtcctcat

SEQ ID NO: 4272646 - DNA, 25 bp, Homo sapien
tgtggcccaacttctgaactagaga

SEQ ID NO: 4272647 - DNA, 25 bp, Homo sapien
ggtacctgcctatctaaagtgagtt

SEQ ID NO: 4272648 - DNA, 25 bp, Homo sapien
gatttaagcttctctagccagccct

SEQ ID NO: 4272649 - DNA, 25 bp, Homo sapien
ccttgatagacccaagattgagtgc

SEQ ID NO: 4272650 - DNA, 25 bp, Homo sapien
cagccactatctggtgttcctagat

SEQ ID NO: 4272651 - DNA, 25 bp, Homo sapien
tcagccactatctggtgttcctaga

SEQ ID NO: 4272652 - DNA, 25 bp, Homo sapien
agccactatctggtgttcctagatg

SEQ ID NO: 4272653 - DNA, 25 bp, Homo sapien
ccactatctggtgttcctagatgtc

SEQ ID NO: 4272654 - DNA, 25 bp, Homo sapien
gcgcatctcattccaagtcaaacta

SEQ ID NO: 4272655 - DNA, 25 bp, Homo sapien
tcattccaagtcaaactaccacctt

SEQ ID NO: 4272656 - DNA, 25 bp, Homo sapien
ggtgcaggcgcatctcattccaagt

SEQ ID NO: 4272657 - DNA, 25 bp, Homo sapien
tgaacttggcaggtgcaggcgcatc

SEQ ID NO: 4272658 - DNA, 25 bp, Homo sapien
ttgggaagggccctgtgtacaacca

SEQ ID NO: 4272659 - DNA, 25 bp, Homo sapien
gtgccaggcctgccactggtcatga

SEQ ID NO: 4272660 - DNA, 25 bp, Homo sapien
tgaccgttggaagtgaatattgtcc

SEQ ID NO: 4272661 - DNA, 25 bp, Homo sapien
tgtgtacaaccactgaccgttggaa

SEQ ID NO: 4272662 - DNA, 25 bp, Homo sapien
tagccccagcgagtcatctgttgct

SEQ ID NO: 4272663 - DNA, 25 bp, Homo sapien
tgctttagacaaataagtggttgtt

SEQ ID NO: 4272664 - DNA, 25 bp, Homo sapien
cagcttcccggccagaagttcaagt

SEQ ID NO: 4272665 - DNA, 25 bp, Homo sapien
tgccactttggcacatacctgagtg

SEQ ID NO: 4272666 - DNA, 25 bp, Homo sapien
aaatgaccccagcagtttttgtgcc

SEQ ID NO: 4272667 - DNA, 25 bp, Homo sapien
cacatcccttagcagtgtctgccat

SEQ ID NO: 4272668 - DNA, 25 bp, Homo sapien
ttgtcacatcccttagcagtgtctg

SEQ ID NO: 4272669 - DNA, 25 bp, Homo sapien
tcacatcccttagcagtgtctgcca

SEQ ID NO: 4272670 - DNA, 25 bp, Homo sapien
tgtcacatcccttagcagtgtctgc

SEQ ID NO: 4272671 - DNA, 25 bp, Homo sapien
cacagttataaaaaatgcacatgct

SEQ ID NO: 4272672 - DNA, 25 bp, Homo sapien
gtacacagttataaaaaatgcacat

SEQ ID NO: 4272673 - DNA, 25 bp, Homo sapien
aaagtacacagttataaaaaatgca

SEQ ID NO: 4272674 - DNA, 25 bp, Homo sapien
caaaagtacacagttataaaaaatg

SEQ ID NO: 4272675 - DNA, 25 bp, Homo sapien
ttggcatctccgttttctgcagggt

SEQ ID NO: 4272676 - DNA, 25 bp, Homo sapien
cctggtctgttttggcatctccgtt

SEQ ID NO: 4272677 - DNA, 25 bp, Homo sapien
ggtctgttttggcatctccgttttc

SEQ ID NO: 4272678 - DNA, 25 bp, Homo sapien
cctttgggtatcttctctcccttct

SEQ ID NO: 4272679 - DNA, 25 bp, Homo sapien
catggatcttctctgtggttcatcc

SEQ ID NO: 4272680 - DNA, 25 bp, Homo sapien
gcaggtttagcagaaaacctcatgg

SEQ ID NO: 4272681 - DNA, 25 bp, Homo sapien
cctcatggatcttctctgtggttca

SEQ ID NO: 4272682 - DNA, 25 bp, Homo sapien
agcaggtttagcagaaaacctcatg

SEQ ID NO: 4272683 - DNA, 25 bp, Homo sapien
ttggctttatctcctttagcatccc

SEQ ID NO: 4272684 - DNA, 25 bp, Homo sapien
cttggctttatctcctttagcatcc

SEQ ID NO: 4272685 - DNA, 25 bp, Homo sapien
ctcttgggcacggtgttgttgacga

SEQ ID NO: 4272686 - DNA, 25 bp, Homo sapien
ttgttgacgatggtggtgggacata

SEQ ID NO: 4272687 - DNA, 25 bp, Homo sapien
tgacgatggtggtgggacataagcg

SEQ ID NO: 4272688 - DNA, 25 bp, Homo sapien
tcttgggcacggtgttgttgacgat

SEQ ID NO: 4272689 - DNA, 25 bp, Homo sapien
ctgggcgtgggatgcagcaacacac

SEQ ID NO: 4272690 - DNA, 25 bp, Homo sapien
tgggatgcagcaacacacttgcttt

SEQ ID NO: 4272691 - DNA, 25 bp, Homo sapien
gatgcagcaacacacttgctttcat

SEQ ID NO: 4272692 - DNA, 25 bp, Homo sapien
ggcgtgggatgcagcaacacacttg

SEQ ID NO: 4272693 - DNA, 25 bp, Homo sapien
tctgaatactggtagcaactggctc

SEQ ID NO: 4272694 - DNA, 25 bp, Homo sapien
gatgcctcatggctccgtcaaggag

SEQ ID NO: 4272695 - DNA, 25 bp, Homo sapien
tgccttaggcaatggacactgagat

SEQ ID NO: 4272696 - DNA, 25 bp, Homo sapien
ctgaaggctgaagctaactgctgcc

SEQ ID NO: 4272697 - DNA, 25 bp, Homo sapien
ttgggtagcactgcagactggctct

SEQ ID NO: 4272698 - DNA, 25 bp, Homo sapien
gactggctctgttgtatgggaatcc

SEQ ID NO: 4272699 - DNA, 25 bp, Homo sapien
taaggcctctaaacatcttgaccag

SEQ ID NO: 4272700 - DNA, 25 bp, Homo sapien
tagggtgacatcttaacagtctcag

SEQ ID NO: 4272701 - DNA, 25 bp, Homo sapien
cttttaacacaagtggacctggagg

SEQ ID NO: 4272702 - DNA, 25 bp, Homo sapien
gagaagtggagacagtggttcgcag

SEQ ID NO: 4272703 - DNA, 25 bp, Homo sapien
gccagagaggtggcggagatggaga

SEQ ID NO: 4272704 - DNA, 25 bp, Homo sapien
ccagacctgcctgggcactaatggg

SEQ ID NO: 4272705 - DNA, 25 bp, Homo sapien
tggagacagtggttcgcagtctgca

SEQ ID NO: 4272706 - DNA, 25 bp, Homo sapien
aagagactggaggtgtgcgtgtgga

SEQ ID NO: 4272707 - DNA, 25 bp, Homo sapien
tggtgcccaagcttgcaagcctcta

SEQ ID NO: 4272708 - DNA, 25 bp, Homo sapien
cctctatacttgcatagggatcatc

SEQ ID NO: 4272709 - DNA, 25 bp, Homo sapien
tgtggactaaaagagagttactacc

SEQ ID NO: 4272710 - DNA, 25 bp, Homo sapien
tgaacacagtttgtgttgatgcata

SEQ ID NO: 4272711 - DNA, 25 bp, Homo sapien
actgctgaattgcacagccctgccc

SEQ ID NO: 4272712 - DNA, 25 bp, Homo sapien
aaaagaatgactgctgaattgcaca

SEQ ID NO: 4272713 - DNA, 25 bp, Homo sapien
gaatgactgctgaattgcacagccc

SEQ ID NO: 4272714 - DNA, 25 bp, Homo sapien
tttataaggtcctggttcctggcca

SEQ ID NO: 4272715 - DNA, 25 bp, Homo sapien
cagcttttataaggtcctggttcct

SEQ ID NO: 4272716 - DNA, 25 bp, Homo sapien
ttcctggccaggcagctggcaggtc

SEQ ID NO: 4272717 - DNA, 25 bp, Homo sapien
ctggccaggcagctggcaggtccac

SEQ ID NO: 4272718 - DNA, 25 bp, Homo sapien
tgcatcctcaatctggatgcaggtc

SEQ ID NO: 4272719 - DNA, 25 bp, Homo sapien
tcctcaatctggatgcaggtcaaca

SEQ ID NO: 4272720 - DNA, 25 bp, Homo sapien
aaccagattgtagtagcctaatggg

SEQ ID NO: 4272721 - DNA, 25 bp, Homo sapien
ctggcaaccagattgtagtagccta

SEQ ID NO: 4272722 - DNA, 25 bp, Homo sapien
tcctgcttgtataggggagctctaa

SEQ ID NO: 4272723 - DNA, 25 bp, Homo sapien
aggcactgacggaagctccctttcc

SEQ ID NO: 4272724 - DNA, 25 bp, Homo sapien
atttgaaggtacaggagtatcctgc

SEQ ID NO: 4272725 - DNA, 25 bp, Homo sapien
tggaattaaaggcactgacggaagc

SEQ ID NO: 4272726 - DNA, 25 bp, Homo sapien
ccaaccactcacacctagccttttc

SEQ ID NO: 4272727 - DNA, 25 bp, Homo sapien
ttcttccaatcttagttggctttgg

SEQ ID NO: 4272728 - DNA, 25 bp, Homo sapien
aatcttagttggctttggtccttgg

SEQ ID NO: 4272729 - DNA, 25 bp, Homo sapien
tgatgtaactaattccaccgtaccc

SEQ ID NO: 4272730 - DNA, 25 bp, Homo sapien
gcaagtcagaaggtctcccagatcc

SEQ ID NO: 4272731 - DNA, 25 bp, Homo sapien
aagacttgaggaagctgtaggccac

SEQ ID NO: 4272732 - DNA, 25 bp, Homo sapien
cccgcttaataggaggagctacaaa

SEQ ID NO: 4272733 - DNA, 25 bp, Homo sapien
aaaggaaagttaggatggcagagca

SEQ ID NO: 4272734 - DNA, 25 bp, Homo sapien
cttctttcctgagggatctccagga

SEQ ID NO: 4272735 - DNA, 25 bp, Homo sapien
ggtgctgaaaggctaaatctccatg

SEQ ID NO: 4272736 - DNA, 25 bp, Homo sapien
ggcagccttgtcatgacacttcttt

SEQ ID NO: 4272737 - DNA, 25 bp, Homo sapien
tgtatagggctgagactctggacag

SEQ ID NO: 4272738 - DNA, 25 bp, Homo sapien
tgaagattgcttttttgaggtaggc

SEQ ID NO: 4272739 - DNA, 25 bp, Homo sapien
ggaagaatgggcaattaaacatgag

SEQ ID NO: 4272740 - DNA, 25 bp, Homo sapien
gcttttttgaggtaggccagtctcg

SEQ ID NO: 4272741 - DNA, 25 bp, Homo sapien
ttaaacatgagtttgaagattgctt

SEQ ID NO: 4272742 - DNA, 25 bp, Homo sapien
tggttaagctgcaggggtgtcgaca

SEQ ID NO: 4272743 - DNA, 25 bp, Homo sapien
aaggtaccttggttaagctgcaggg

SEQ ID NO: 4272744 - DNA, 25 bp, Homo sapien
aggaaggtaccttggttaagctgca

SEQ ID NO: 4272745 - DNA, 25 bp, Homo sapien
ggttaagctgcaggggtgtcgacat

SEQ ID NO: 4272746 - DNA, 25 bp, Homo sapien
catagcaacccttgtagccaagttc

SEQ ID NO: 4272747 - DNA, 25 bp, Homo sapien
gcaacccttgtagccaagttcccag

SEQ ID NO: 4272748 - DNA, 25 bp, Homo sapien
ctgaacaagtttcacaagacaccag

SEQ ID NO: 4272749 - DNA, 25 bp, Homo sapien
gctgaacaagtttcacaagacacca

SEQ ID NO: 4272750 - DNA, 25 bp, Homo sapien
gggaagggtgaaattacacatccag

SEQ ID NO: 4272751 - DNA, 25 bp, Homo sapien
gaagggtgaaattacacatccagcc

SEQ ID NO: 4272752 - DNA, 25 bp, Homo sapien
agggtgaaattacacatccagcccc

SEQ ID NO: 4272753 - DNA, 25 bp, Homo sapien
ggtgaaattacacatccagcccctc

SEQ ID NO: 4272754 - DNA, 25 bp, Homo sapien
tcaggaaccaacacagatggtagga

SEQ ID NO: 4272755 - DNA, 25 bp, Homo sapien
aaccctaggacattgaaggtggtag

SEQ ID NO: 4272756 - DNA, 25 bp, Homo sapien
cccacatttcctgggtggaggattg

SEQ ID NO: 4272757 - DNA, 25 bp, Homo sapien
tttcctgggtggaggattgcccact

SEQ ID NO: 4272758 - DNA, 25 bp, Homo sapien
tcaggattgccagggctgggaaact

SEQ ID NO: 4272759 - DNA, 25 bp, Homo sapien
cctcaggattgccagggctgggaaa

SEQ ID NO: 4272760 - DNA, 25 bp, Homo sapien
gattgccagggctgggaaactctac

SEQ ID NO: 4272761 - DNA, 25 bp, Homo sapien
ggattgccagggctgggaaactcta

SEQ ID NO: 4272762 - DNA, 25 bp, Homo sapien
ttccttgacaatgttgaggaagagg

SEQ ID NO: 4272763 - DNA, 25 bp, Homo sapien
cagctagagggactctgttcacagc

SEQ ID NO: 4272764 - DNA, 25 bp, Homo sapien
ccttgacaatgttgaggaagaggtc

SEQ ID NO: 4272765 - DNA, 25 bp, Homo sapien
ttgacaatgttgaggaagaggtcag

SEQ ID NO: 4272766 - DNA, 25 bp, Homo sapien
caccaatgagtttggtgatgaactc

SEQ ID NO: 4272767 - DNA, 25 bp, Homo sapien
gtttggtgatgaactctgaacctgg

SEQ ID NO: 4272768 - DNA, 25 bp, Homo sapien
tgctttctctgggacaccaatgagt

SEQ ID NO: 4272769 - DNA, 25 bp, Homo sapien
ctggtatcgtaacattcccaagccc

SEQ ID NO: 4272770 - DNA, 25 bp, Homo sapien
gtggtttgtagttctgcacagcaaa

SEQ ID NO: 4272771 - DNA, 25 bp, Homo sapien
gaaactaccatcagagtgaacaggc

SEQ ID NO: 4272772 - DNA, 25 bp, Homo sapien
tggtttgtagttctgcacagcaaaa

SEQ ID NO: 4272773 - DNA, 25 bp, Homo sapien
actaccatcagagtgaacaggcaac

SEQ ID NO: 4272774 - DNA, 25 bp, Homo sapien
aatgcccaggatgctataaaatcac

SEQ ID NO: 4272775 - DNA, 25 bp, Homo sapien
tgaaatgcccaggatgctataaaat

SEQ ID NO: 4272776 - DNA, 25 bp, Homo sapien
tggatgtgaaatgcccaggatgcta

SEQ ID NO: 4272777 - DNA, 25 bp, Homo sapien
catggatgtgaaatgcccaggatgc

SEQ ID NO: 4272778 - DNA, 25 bp, Homo sapien
tttagccatgcacaaacggtagttt

SEQ ID NO: 4272779 - DNA, 25 bp, Homo sapien
acggtctttagccatgcacaaacgg

SEQ ID NO: 4272780 - DNA, 25 bp, Homo sapien
tgcacaaacggtagttttgtgtgtt

SEQ ID NO: 4272781 - DNA, 25 bp, Homo sapien
catgcacaaacggtagttttgtgtg

SEQ ID NO: 4272782 - DNA, 25 bp, Homo sapien
gaggaagcagcactaaaagcactct

SEQ ID NO: 4272783 - DNA, 25 bp, Homo sapien
tctgagtcaagatgagtgggaaacc

SEQ ID NO: 4272784 - DNA, 25 bp, Homo sapien
aaaagcactctgagtcaagatgagt

SEQ ID NO: 4272785 - DNA, 25 bp, Homo sapien
caagatgagtgggaaaccatctcaa

SEQ ID NO: 4272786 - DNA, 25 bp, Homo sapien
tcatcttagtttaacaaaccccata

SEQ ID NO: 4272787 - DNA, 25 bp, Homo sapien
tgtcacttccttattcatacttcaa

SEQ ID NO: 4272788 - DNA, 25 bp, Homo sapien
gaagacttctcagtgtccattctga

SEQ ID NO: 4272789 - DNA, 25 bp, Homo sapien
taacttgtagagattgctgaagact

SEQ ID NO: 4272790 - DNA, 25 bp, Homo sapien
ccttgcagaacaggttgagtttgtg

SEQ ID NO: 4272791 - DNA, 25 bp, Homo sapien
cttgacacaaacgcccagctgcccc

SEQ ID NO: 4272792 - DNA, 25 bp, Homo sapien
gccttgcagaacaggttgagtttgt

SEQ ID NO: 4272793 - DNA, 25 bp, Homo sapien
tccttctctgcatagtgggcacctt

SEQ ID NO: 4272794 - DNA, 25 bp, Homo sapien
cttttgccctacactgatagctgcc

SEQ ID NO: 4272795 - DNA, 25 bp, Homo sapien
tttgcttttgccctacactgatagc

SEQ ID NO: 4272796 - DNA, 25 bp, Homo sapien
agtgggtccttctctgcatagtggg

SEQ ID NO: 4272797 - DNA, 25 bp, Homo sapien
agtgctagagccttccatatgacaa

SEQ ID NO: 4272798 - DNA, 25 bp, Homo sapien
ctagagccttccatatgacaaaatg

SEQ ID NO: 4272799 - DNA, 25 bp, Homo sapien
gaaagtgctagagccttccatatga

SEQ ID NO: 4272800 - DNA, 25 bp, Homo sapien
agagaaagtgctagagccttccata

SEQ ID NO: 4272801 - DNA, 25 bp, Homo sapien
tccattttccctcgtagcactcttt

SEQ ID NO: 4272802 - DNA, 25 bp, Homo sapien
ttccattttccctcgtagcactctt

SEQ ID NO: 4272803 - DNA, 25 bp, Homo sapien
tagcactctttcttccagcgatcac

SEQ ID NO: 4272804 - DNA, 25 bp, Homo sapien
tcttccagcgatcacatgaatccat

SEQ ID NO: 4272805 - DNA, 25 bp, Homo sapien
cagtgatgggcagtcgctgtcttca

SEQ ID NO: 4272806 - DNA, 25 bp, Homo sapien
gggcactaagaattcacccactgca

SEQ ID NO: 4272807 - DNA, 25 bp, Homo sapien
ggctgcgacttgaaagagctcccat

SEQ ID NO: 4272808 - DNA, 25 bp, Homo sapien
cacctcgaggcagtttcctgtgtgc

SEQ ID NO: 4272809 - DNA, 25 bp, Homo sapien
ctgctttcccggaacgtgtccagag

SEQ ID NO: 4272810 - DNA, 25 bp, Homo sapien
tctcccaacggaatggtgtgatttg

SEQ ID NO: 4272811 - DNA, 25 bp, Homo sapien
ctttcccggaacgtgtccagagact

SEQ ID NO: 4272812 - DNA, 25 bp, Homo sapien
aagccactctcccaacggaatggtg

SEQ ID NO: 4272813 - DNA, 25 bp, Homo sapien
ccagacaccaagtacagcgacgaaa

SEQ ID NO: 4272814 - DNA, 25 bp, Homo sapien
taaagggaatgtcttggatatggaa

SEQ ID NO: 4272815 - DNA, 25 bp, Homo sapien
tccccatggaatataagccccagtt

SEQ ID NO: 4272816 - DNA, 25 bp, Homo sapien
tttcacagttaaagcagcccccaga

SEQ ID NO: 4272817 - DNA, 25 bp, Homo sapien
gtggactggacgtgggcagcctgct

SEQ ID NO: 4272818 - DNA, 25 bp, Homo sapien
agcgtggtaaccagcttctccatgc

SEQ ID NO: 4272819 - DNA, 25 bp, Homo sapien
aggagtgttgctcatgtaattcaca

SEQ ID NO: 4272820 - DNA, 25 bp, Homo sapien
ggtgcctgcatgcagcgtggtaacc

SEQ ID NO: 4272821 - DNA, 25 bp, Homo sapien
tagtgcggccaagagactctaagcc

SEQ ID NO: 4272822 - DNA, 25 bp, Homo sapien
caagagactctaagccgaggttaag

SEQ ID NO: 4272823 - DNA, 25 bp, Homo sapien
caggatatagtgcggccaagagact

SEQ ID NO: 4272824 - DNA, 25 bp, Homo sapien
gccgaggttaaggtggtagagagga

SEQ ID NO: 4272825 - DNA, 25 bp, Homo sapien
ctgctgccaagcgttccgacgactg

SEQ ID NO: 4272826 - DNA, 25 bp, Homo sapien
tccgacgactgctttgggttccgag

SEQ ID NO: 4272827 - DNA, 25 bp, Homo sapien
gccttactctgcctcgctttcctct

SEQ ID NO: 4272828 - DNA, 25 bp, Homo sapien
tttgggttccgagtggttcctctgc

SEQ ID NO: 4272829 - DNA, 25 bp, Homo sapien
tggccttcctgagcgcttctccatg

SEQ ID NO: 4272830 - DNA, 25 bp, Homo sapien
ggtcaagaaatcctgtctgagtcca

SEQ ID NO: 4272831 - DNA, 25 bp, Homo sapien
cagagactgtgaatcccagacacta

SEQ ID NO: 4272832 - DNA, 25 bp, Homo sapien
gataacctgagaagtagtgcgtaag

SEQ ID NO: 4272833 - DNA, 25 bp, Homo sapien
acactgggaaagatccacaaatgtc

SEQ ID NO: 4272834 - DNA, 25 bp, Homo sapien
gggaaagatccacaaatgtcaatat

SEQ ID NO: 4272835 - DNA, 25 bp, Homo sapien
gaccacactgggaaagatccacaaa

SEQ ID NO: 4272836 - DNA, 25 bp, Homo sapien
ccacactgggaaagatccacaaatg

SEQ ID NO: 4272837 - DNA, 25 bp, Homo sapien
atccttctcctaggaccgaactttg

SEQ ID NO: 4272838 - DNA, 25 bp, Homo sapien
tccaggtaggcatgttgttcattga

SEQ ID NO: 4272839 - DNA, 25 bp, Homo sapien
gagggatcccttgtagctggcttga

SEQ ID NO: 4272840 - DNA, 25 bp, Homo sapien
gacacgacatatgctcagagcaagg

SEQ ID NO: 4272841 - DNA, 25 bp, Homo sapien
cacaactcttcagattagagacctt

SEQ ID NO: 4272842 - DNA, 25 bp, Homo sapien
aactcttcagattagagaccttcat

SEQ ID NO: 4272843 - DNA, 25 bp, Homo sapien
tccacaactcttcagattagagacc

SEQ ID NO: 4272844 - DNA, 25 bp, Homo sapien
gctttccacaactcttcagattaga

SEQ ID NO: 4272845 - DNA, 25 bp, Homo sapien
cgtgtgaaccatgtctgggaatgac

SEQ ID NO: 4272846 - DNA, 25 bp, Homo sapien
aagatagatggtggccgtgtgaacc

SEQ ID NO: 4272847 - DNA, 25 bp, Homo sapien
tccttcatggttccctaaaggagcc

SEQ ID NO: 4272848 - DNA, 25 bp, Homo sapien
gcccctatgtcagtctttttacaaa

SEQ ID NO: 4272849 - DNA, 25 bp, Homo sapien
gaagtctgtggttactgactatcat

SEQ ID NO: 4272850 - DNA, 25 bp, Homo sapien
ttctttcgaatgaggaatattcgaa

SEQ ID NO: 4272851 - DNA, 25 bp, Homo sapien
gaatgaggaatattcgaaagaaata

SEQ ID NO: 4272852 - DNA, 25 bp, Homo sapien
ttttctttcgaatgaggaatattcg

SEQ ID NO: 4272853 - DNA, 25 bp, Homo sapien
tcgaatgaggaatattcgaaagaaa

SEQ ID NO: 4272854 - DNA, 25 bp, Homo sapien
tctctatgtcttcccaaaacgtggg

SEQ ID NO: 4272855 - DNA, 25 bp, Homo sapien
ttgcaggagtttgcaccagctcgcc

SEQ ID NO: 4272856 - DNA, 25 bp, Homo sapien
gaacagaaggccctccagaattagg

SEQ ID NO: 4272857 - DNA, 25 bp, Homo sapien
ctgggttccctcgaggactatctga

SEQ ID NO: 4272858 - DNA, 25 bp, Homo sapien
tgtcaaatgcgagtggaccttgggc

SEQ ID NO: 4272859 - DNA, 25 bp, Homo sapien
caaatgcgagtggaccttgggcctt

SEQ ID NO: 4272860 - DNA, 25 bp, Homo sapien
ttgcttccaatagaagattccctgg

SEQ ID NO: 4272861 - DNA, 25 bp, Homo sapien
cttgtgtcaaatgcgagtggacctt

SEQ ID NO: 4272862 - DNA, 25 bp, Homo sapien
agcaaggaggataccagggaggctc

SEQ ID NO: 4272863 - DNA, 25 bp, Homo sapien
gaagcaaggaggataccagggaggc

SEQ ID NO: 4272864 - DNA, 25 bp, Homo sapien
ttgaagcaaggaggataccagggag

SEQ ID NO: 4272865 - DNA, 25 bp, Homo sapien
tgaagcaaggaggataccagggagg

SEQ ID NO: 4272866 - DNA, 25 bp, Homo sapien
tctttctctgtcgtatctatgatca

SEQ ID NO: 4272867 - DNA, 25 bp, Homo sapien
caaggatagctccatgaaatcttta

SEQ ID NO: 4272868 - DNA, 25 bp, Homo sapien
tggttttacctctgcacagagtcaa

SEQ ID NO: 4272869 - DNA, 25 bp, Homo sapien
tatgagatcatagatggatagttcc

SEQ ID NO: 4272870 - DNA, 25 bp, Homo sapien
tattaatacttctcactcctagcca

SEQ ID NO: 4272871 - DNA, 25 bp, Homo sapien
tatgctctggtgaccgcacctctta

SEQ ID NO: 4272872 - DNA, 25 bp, Homo sapien
gcacctcttagataacgcaggccaa

SEQ ID NO: 4272873 - DNA, 25 bp, Homo sapien
taacgcaggccaactgctgtcctgt

SEQ ID NO: 4272874 - DNA, 25 bp, Homo sapien
aggccaactgctgtcctgtttgtcc

SEQ ID NO: 4272875 - DNA, 25 bp, Homo sapien
aactcctgctccaaggtaaggtgag

SEQ ID NO: 4272876 - DNA, 25 bp, Homo sapien
tatgtgaacttctggataaggatca

SEQ ID NO: 4272877 - DNA, 25 bp, Homo sapien
tgccattcaaacaacgcatcaacag

SEQ ID NO: 4272878 - DNA, 25 bp, Homo sapien
aagcagtttgtattgcttgaactcc

SEQ ID NO: 4272879 - DNA, 25 bp, Homo sapien
ccaaatacttcaaagctgcttggag

SEQ ID NO: 4272880 - DNA, 25 bp, Homo sapien
caaatacttcaaagctgcttggaga

SEQ ID NO: 4272881 - DNA, 25 bp, Homo sapien
aaatacttcaaagctgcttggagac

SEQ ID NO: 4272882 - DNA, 25 bp, Homo sapien
tgagtttccgtttcttataatatct

SEQ ID NO: 4272883 - DNA, 25 bp, Homo sapien
ggctagacttgcttactggctctca

SEQ ID NO: 4272884 - DNA, 25 bp, Homo sapien
gggcgttacctctccatacttgcag

SEQ ID NO: 4272885 - DNA, 25 bp, Homo sapien
tagagatggctcctagggcgttacc

SEQ ID NO: 4272886 - DNA, 25 bp, Homo sapien
gagtgtgcatcattaaggttgctgc

SEQ ID NO: 4272887 - DNA, 25 bp, Homo sapien
gagcaattcagttgaccacaaagga

SEQ ID NO: 4272888 - DNA, 25 bp, Homo sapien
tgtgcaacctcaagtggcctcagtg

SEQ ID NO: 4272889 - DNA, 25 bp, Homo sapien
acatgcagccatgtggtcagggcaa

SEQ ID NO: 4272890 - DNA, 25 bp, Homo sapien
gagaatcatccaacgctgcctagaa

SEQ ID NO: 4272891 - DNA, 25 bp, Homo sapien
actagctgtgtaggcttgtctgatc

SEQ ID NO: 4272892 - DNA, 25 bp, Homo sapien
gatctagccccctggatgtgaacaa

SEQ ID NO: 4272893 - DNA, 25 bp, Homo sapien
tgtgtaggcttgtctgatctagccc

SEQ ID NO: 4272894 - DNA, 25 bp, Homo sapien
ctgctactagctgtgtaggcttgtc

SEQ ID NO: 4272895 - DNA, 25 bp, Homo sapien
tcagtcccagcatgcaataaccgta

SEQ ID NO: 4272896 - DNA, 25 bp, Homo sapien
cgtaacaggtaataagcaccttgga

SEQ ID NO: 4272897 - DNA, 25 bp, Homo sapien
gcctggttctgataattctgtttca

SEQ ID NO: 4272898 - DNA, 25 bp, Homo sapien
ccagcatgcaataaccgtaacaggt

SEQ ID NO: 4272899 - DNA, 25 bp, Homo sapien
tgtgttagcgccttgtttcatgagc

SEQ ID NO: 4272900 - DNA, 25 bp, Homo sapien
gcaggaaatgtgttaaatgagacaa

SEQ ID NO: 4272901 - DNA, 25 bp, Homo sapien
ttcccacccacaatttgaaactgac

SEQ ID NO: 4272902 - DNA, 25 bp, Homo sapien
aatgagacaatgtttgtgttagcgc

SEQ ID NO: 4272903 - DNA, 25 bp, Homo sapien
tctggcgtctcctctctagcctctt

SEQ ID NO: 4272904 - DNA, 25 bp, Homo sapien
ctggcgtctcctctctagcctcttc

SEQ ID NO: 4272905 - DNA, 25 bp, Homo sapien
ttaaggctgcaggcgtagccactac

SEQ ID NO: 4272906 - DNA, 25 bp, Homo sapien
cttaaggctgcaggcgtagccacta

SEQ ID NO: 4272907 - DNA, 25 bp, Homo sapien
tcctgatgctgaacccttaaggctg

SEQ ID NO: 4272908 - DNA, 25 bp, Homo sapien
aaatataactccttgtcccctcttg

SEQ ID NO: 4272909 - DNA, 25 bp, Homo sapien
atcccatagttgagtcctctgattc

SEQ ID NO: 4272910 - DNA, 25 bp, Homo sapien
tggcatcccatagttgagtcctctg

SEQ ID NO: 4272911 - DNA, 25 bp, Homo sapien
ctccagcccctgctaggagtgcttg

SEQ ID NO: 4272912 - DNA, 25 bp, Homo sapien
taggagtgcttgtgtcaatcagggc

SEQ ID NO: 4272913 - DNA, 25 bp, Homo sapien
cctgctaggagtgcttgtgtcaatc

SEQ ID NO: 4272914 - DNA, 25 bp, Homo sapien
cagcccctgctaggagtgcttgtgt

SEQ ID NO: 4272915 - DNA, 25 bp, Homo sapien
tgctgagggtccaccggagccttgc

SEQ ID NO: 4272916 - DNA, 25 bp, Homo sapien
tatccataagcctgttcctaagctt

SEQ ID NO: 4272917 - DNA, 25 bp, Homo sapien
ggagccttgctctggcaagtgacca

SEQ ID NO: 4272918 - DNA, 25 bp, Homo sapien
taagcctgttcctaagcttccactt

SEQ ID NO: 4272919 - DNA, 25 bp, Homo sapien
gctagaggggtcctaatgacagcag

SEQ ID NO: 4272920 - DNA, 25 bp, Homo sapien
cctccaaactgcaagggtccctcat

SEQ ID NO: 4272921 - DNA, 25 bp, Homo sapien
cagcaatgtaagcaaagtgggggct

SEQ ID NO: 4272922 - DNA, 25 bp, Homo sapien
atacctcatgcaaaaccatcccctg

SEQ ID NO: 4272923 - DNA, 25 bp, Homo sapien
tccttcttcaccacacaatgtttct

SEQ ID NO: 4272924 - DNA, 25 bp, Homo sapien
taggcattccaccttaaaatcctga

SEQ ID NO: 4272925 - DNA, 25 bp, Homo sapien
tcaggaaaagttcaccagggagtcc

SEQ ID NO: 4272926 - DNA, 25 bp, Homo sapien
cattaggcattccaccttaaaatcc

SEQ ID NO: 4272927 - DNA, 25 bp, Homo sapien
ctgcttttcctatatttcataagtt

SEQ ID NO: 4272928 - DNA, 25 bp, Homo sapien
acatgcctaggtactggggagccaa

SEQ ID NO: 4272929 - DNA, 25 bp, Homo sapien
tctgaatccaacatgcctaggtact

SEQ ID NO: 4272930 - DNA, 25 bp, Homo sapien
tgaatccaacatgcctaggtactgg

SEQ ID NO: 4272931 - DNA, 25 bp, Homo sapien
caacatgcctaggtactggggagcc

SEQ ID NO: 4272932 - DNA, 25 bp, Homo sapien
ttgggagatgtagtaagttctttct

SEQ ID NO: 4272933 - DNA, 25 bp, Homo sapien
gagatgtagtaagttctttcttttc

SEQ ID NO: 4272934 - DNA, 25 bp, Homo sapien
cttcagtcctgataggattgggaga

SEQ ID NO: 4272935 - DNA, 25 bp, Homo sapien
cagtcctgataggattgggagatgt

SEQ ID NO: 4272936 - DNA, 25 bp, Homo sapien
tattatcacggaggtgtccactgga

SEQ ID NO: 4272937 - DNA, 25 bp, Homo sapien
tggacagccctatatacagaccttt

SEQ ID NO: 4272938 - DNA, 25 bp, Homo sapien
caatagttctttgaggtagtttatc

SEQ ID NO: 4272939 - DNA, 25 bp, Homo sapien
atggcttgataattcctttcttgct

SEQ ID NO: 4272940 - DNA, 25 bp, Homo sapien
agtccagaaaacagttgtttccagg

SEQ ID NO: 4272941 - DNA, 25 bp, Homo sapien
gttgtttccaggaccagcacagtca

SEQ ID NO: 4272942 - DNA, 25 bp, Homo sapien
tgtgtcagccttcacgtcgtctagt

SEQ ID NO: 4272943 - DNA, 25 bp, Homo sapien
ttctctcacttgatgtgtcagcctt

SEQ ID NO: 4272944 - DNA, 25 bp, Homo sapien
tgtaaaatggttgtagcattttggc

SEQ ID NO: 4272945 - DNA, 25 bp, Homo sapien
gcattttggctggcaacagcatctc

SEQ ID NO: 4272946 - DNA, 25 bp, Homo sapien
ttttggctggcaacagcatctctca

SEQ ID NO: 4272947 - DNA, 25 bp, Homo sapien
ggctggcaacagcatctctcatatt

SEQ ID NO: 4272948 - DNA, 25 bp, Homo sapien
tcttggaatattcctggcaggagat

SEQ ID NO: 4272949 - DNA, 25 bp, Homo sapien
tagggtggcgaattctgagtgtgag

SEQ ID NO: 4272950 - DNA, 25 bp, Homo sapien
caggagatggtagggtggcgaattc

SEQ ID NO: 4272951 - DNA, 25 bp, Homo sapien
ctccacattcttggaatattcctgg

SEQ ID NO: 4272952 - DNA, 25 bp, Homo sapien
agagctgcccgtgttgggttttctt

SEQ ID NO: 4272953 - DNA, 25 bp, Homo sapien
ctagaagagctgcccgtgttgggtt

SEQ ID NO: 4272954 - DNA, 25 bp, Homo sapien
gaagagctgcccgtgttgggttttc

SEQ ID NO: 4272955 - DNA, 25 bp, Homo sapien
tagaagagctgcccgtgttgggttt

SEQ ID NO: 4272956 - DNA, 25 bp, Homo sapien
cagatggttcccacaggcttgcctg

SEQ ID NO: 4272957 - DNA, 25 bp, Homo sapien
gggtggttgcttttcccagatgcca

SEQ ID NO: 4272958 - DNA, 25 bp, Homo sapien
cagatgccagtgacgcagatggttc

SEQ ID NO: 4272959 - DNA, 25 bp, Homo sapien
agttgcttatgctcccctgtcccgt

SEQ ID NO: 4272960 - DNA, 25 bp, Homo sapien
aggaaggtgacagcacggtggcctc

SEQ ID NO: 4272961 - DNA, 25 bp, Homo sapien
ggtggcctccaataacctggtctga

SEQ ID NO: 4272962 - DNA, 25 bp, Homo sapien
gtctgacacgtgttcacacaagcca

SEQ ID NO: 4272963 - DNA, 25 bp, Homo sapien
tccaataacctggtctgacacgtgt

SEQ ID NO: 4272964 - DNA, 25 bp, Homo sapien
tgcccattgcatactgagtcatctg

SEQ ID NO: 4272965 - DNA, 25 bp, Homo sapien
tgttcacactcagggatgttgttgt

SEQ ID NO: 4272966 - DNA, 25 bp, Homo sapien
cagcctagtaggctcctaatgcaca

SEQ ID NO: 4272967 - DNA, 25 bp, Homo sapien
gagtcatctgcaatacagcctagta

SEQ ID NO: 4272968 - DNA, 25 bp, Homo sapien
agtgtgcagctcctatattctctag

SEQ ID NO: 4272969 - DNA, 25 bp, Homo sapien
cagcccacgactgttgagtgtgcag

SEQ ID NO: 4272970 - DNA, 25 bp, Homo sapien
atggaatccacttctcaaaccagcc

SEQ ID NO: 4272971 - DNA, 25 bp, Homo sapien
gatacatctggtacttctaaatcgg

SEQ ID NO: 4272972 - DNA, 25 bp, Homo sapien
tgcagctagcgctacttgaggaaaa

SEQ ID NO: 4272973 - DNA, 25 bp, Homo sapien
cttcatgggcaatgtaaccattgca

SEQ ID NO: 4272974 - DNA, 25 bp, Homo sapien
gacaggacgtggactgaccatccaa

SEQ ID NO: 4272975 - DNA, 25 bp, Homo sapien
cagacagagctgaggtaggtccttc

SEQ ID NO: 4272976 - DNA, 25 bp, Homo sapien
ggtctggctgcaggacataattcct

SEQ ID NO: 4272977 - DNA, 25 bp, Homo sapien
cctgctcatcgaagacacaaaggag

SEQ ID NO: 4272978 - DNA, 25 bp, Homo sapien
tacatcctcctgctcatcgaagaca

SEQ ID NO: 4272979 - DNA, 25 bp, Homo sapien
agtacatcctcctgctcatcgaaga

SEQ ID NO: 4272980 - DNA, 25 bp, Homo sapien
ctttccacgactcagttcagatttg

SEQ ID NO: 4272981 - DNA, 25 bp, Homo sapien
aagcatgaagcacgtgtggagctcc

SEQ ID NO: 4272982 - DNA, 25 bp, Homo sapien
tcagtctctttgaaaagactcatgt

SEQ ID NO: 4272983 - DNA, 25 bp, Homo sapien
aatggaagcatgaagcacgtgtgga

SEQ ID NO: 4272984 - DNA, 25 bp, Homo sapien
gactcatgtgatgtaggaaggaccc

SEQ ID NO: 4272985 - DNA, 25 bp, Homo sapien
gagacaggttaaagtcagacggcac

SEQ ID NO: 4272986 - DNA, 25 bp, Homo sapien
tggaaactcatagccccttgaactg

SEQ ID NO: 4272987 - DNA, 25 bp, Homo sapien
gccaagaagcagcaaggtgtagcat

SEQ ID NO: 4272988 - DNA, 25 bp, Homo sapien
tgaactgctcgatgctgccaagaag

SEQ ID NO: 4272989 - DNA, 25 bp, Homo sapien
cagcaggttgcaggaacttttcagc

SEQ ID NO: 4272990 - DNA, 25 bp, Homo sapien
gcaggttgcaggaacttttcagcag

SEQ ID NO: 4272991 - DNA, 25 bp, Homo sapien
caccagaacggtacataaacaaagt

SEQ ID NO: 4272992 - DNA, 25 bp, Homo sapien
ttcaccagaacggtacataaacaaa

SEQ ID NO: 4272993 - DNA, 25 bp, Homo sapien
agctagaaccatgtttttcttcctc

SEQ ID NO: 4272994 - DNA, 25 bp, Homo sapien
agaaccatgtttttcttcctccaag

SEQ ID NO: 4272995 - DNA, 25 bp, Homo sapien
aggccccaggttctcctcccaccat

SEQ ID NO: 4272996 - DNA, 25 bp, Homo sapien
tcttcctccaaggccccaggttctc

SEQ ID NO: 4272997 - DNA, 25 bp, Homo sapien
actgagaagttcttgtgtctttggg

SEQ ID NO: 4272998 - DNA, 25 bp, Homo sapien
ctcttccctgattggatgaggtcga

SEQ ID NO: 4272999 - DNA, 25 bp, Homo sapien
cctgctccccaaatgtagggtcggc

SEQ ID NO: 4273000 - DNA, 25 bp, Homo sapien
tgaggtcgaaaaaagctactgagaa

SEQ ID NO: 4273001 - DNA, 25 bp, Homo sapien
tcagtcaggccaagggtacggctcc

SEQ ID NO: 4273002 - DNA, 25 bp, Homo sapien
ctcagtcaggccaagggtacggctc

SEQ ID NO: 4273003 - DNA, 25 bp, Homo sapien
gccggggcacttgagacacgcttcc

SEQ ID NO: 4273004 - DNA, 25 bp, Homo sapien
ttgagacacgcttccttttccccta

SEQ ID NO: 4273005 - DNA, 25 bp, Homo sapien
tgagatttgcctgcctgcttatcac

SEQ ID NO: 4273006 - DNA, 25 bp, Homo sapien
atttgcctgcctgcttatcacacag

SEQ ID NO: 4273007 - DNA, 25 bp, Homo sapien
agatttgcctgcctgcttatcacac

SEQ ID NO: 4273008 - DNA, 25 bp, Homo sapien
ggtgagatttgcctgcctgcttatc

SEQ ID NO: 4273009 - DNA, 25 bp, Homo sapien
tccagtatcttcctatcatcctttg

SEQ ID NO: 4273010 - DNA, 25 bp, Homo sapien
tctggatccttccacatatcccaca

SEQ ID NO: 4273011 - DNA, 25 bp, Homo sapien
tttctgcatcgtctttcactctcca

SEQ ID NO: 4273012 - DNA, 25 bp, Homo sapien
cagcattttctgcatcgtctttcac

SEQ ID NO: 4273013 - DNA, 25 bp, Homo sapien
caatgacaaatctgtgacaagcttg

SEQ ID NO: 4273014 - DNA, 25 bp, Homo sapien
aagcttggcagtgactttggaccag

SEQ ID NO: 4273015 - DNA, 25 bp, Homo sapien
tctgtgacaagcttggcagtgactt

SEQ ID NO: 4273016 - DNA, 25 bp, Homo sapien
aggcagagcagcaacgagaccccat

SEQ ID NO: 4273017 - DNA, 25 bp, Homo sapien
aaaaacgatgctgtggtgaacattc

SEQ ID NO: 4273018 - DNA, 25 bp, Homo sapien
taaactcatgtgatagcaaaccctg

SEQ ID NO: 4273019 - DNA, 25 bp, Homo sapien
gctctctagaaaggttgactatccc

SEQ ID NO: 4273020 - DNA, 25 bp, Homo sapien
ttaaagaatcccctactggtagaca

SEQ ID NO: 4273021 - DNA, 25 bp, Homo sapien
ttgatgaagtgtcacaagtcaccat

SEQ ID NO: 4273022 - DNA, 25 bp, Homo sapien
gatgaagtgtcacaagtcaccataa

SEQ ID NO: 4273023 - DNA, 25 bp, Homo sapien
cattgatgaagtgtcacaagtcacc

SEQ ID NO: 4273024 - DNA, 25 bp, Homo sapien
gaagtgtcacaagtcaccataattt

SEQ ID NO: 4273025 - DNA, 25 bp, Homo sapien
tttgactgtctctggagtgcttgct

SEQ ID NO: 4273026 - DNA, 25 bp, Homo sapien
gagaaaacccgctcgcttgtagttg

SEQ ID NO: 4273027 - DNA, 25 bp, Homo sapien
ttcctgcccaggtcgctcaagttct

SEQ ID NO: 4273028 - DNA, 25 bp, Homo sapien
gcttgtagttggagtcacaggaaac

SEQ ID NO: 4273029 - DNA, 25 bp, Homo sapien
taaggagcacctctatgcccaatag

SEQ ID NO: 4273030 - DNA, 25 bp, Homo sapien
aagaatcccagctttgtccccaagg

SEQ ID NO: 4273031 - DNA, 25 bp, Homo sapien
gcaaccttgatgacttcggccctaa

SEQ ID NO: 4273032 - DNA, 25 bp, Homo sapien
gcacactgctacatgggccaaaatc

SEQ ID NO: 4273033 - DNA, 25 bp, Homo sapien
catgagtgaaggattccagatgcaa

SEQ ID NO: 4273034 - DNA, 25 bp, Homo sapien
ttctcccagaagtagacatgagtga

SEQ ID NO: 4273035 - DNA, 25 bp, Homo sapien
catttgcctggtacagttgagccct

SEQ ID NO: 4273036 - DNA, 25 bp, Homo sapien
gactgtcttagatgcttctcccaga

SEQ ID NO: 4273037 - DNA, 25 bp, Homo sapien
ggaaccagggactcaacagcagttc

SEQ ID NO: 4273038 - DNA, 25 bp, Homo sapien
tggaaccagggactcaacagcagtt

SEQ ID NO: 4273039 - DNA, 25 bp, Homo sapien
ggacgagaaacaagaccagagccct

SEQ ID NO: 4273040 - DNA, 25 bp, Homo sapien
tttatgtgtccttttagggacgaga

SEQ ID NO: 4273041 - DNA, 25 bp, Homo sapien
tttggattctctcaattgtcctatt

SEQ ID NO: 4273042 - DNA, 25 bp, Homo sapien
tttagggacgagaaacaagaccaga

SEQ ID NO: 4273043 - DNA, 25 bp, Homo sapien
tctttgacctagaacacaggctttc

SEQ ID NO: 4273044 - DNA, 25 bp, Homo sapien
aattctctgcatagtgacacctgac

SEQ ID NO: 4273045 - DNA, 25 bp, Homo sapien
ggcttgggctcttccagtaactagc

SEQ ID NO: 4273046 - DNA, 25 bp, Homo sapien
gagtttgggagtgtccccagtccat

SEQ ID NO: 4273047 - DNA, 25 bp, Homo sapien
gccctcttgtctcctgctgacagct

SEQ ID NO: 4273048 - DNA, 25 bp, Homo sapien
cctcctttgccagagtggaggctcc

SEQ ID NO: 4273049 - DNA, 25 bp, Homo sapien
ctcctttgccagagtggaggctcct

SEQ ID NO: 4273050 - DNA, 25 bp, Homo sapien
ctcctcctttgccagagtggaggct

SEQ ID NO: 4273051 - DNA, 25 bp, Homo sapien
gccagccacctagagcctcttgcca

SEQ ID NO: 4273052 - DNA, 25 bp, Homo sapien
tctgaagccaaaatggttagggtct

SEQ ID NO: 4273053 - DNA, 25 bp, Homo sapien
tcttctgaagccaaaatggttaggg

SEQ ID NO: 4273054 - DNA, 25 bp, Homo sapien
ttctgaagccaaaatggttagggtc

SEQ ID NO: 4273055 - DNA, 25 bp, Homo sapien
ctgaagccaaaatggttagggtctc

SEQ ID NO: 4273056 - DNA, 25 bp, Homo sapien
cccacagccagttgagatgcacaga

SEQ ID NO: 4273057 - DNA, 25 bp, Homo sapien
gatccccacagccagttgagatgca

SEQ ID NO: 4273058 - DNA, 25 bp, Homo sapien
cagccagttgagatgcacagaccag

SEQ ID NO: 4273059 - DNA, 25 bp, Homo sapien
ccagttgagatgcacagaccagttc

SEQ ID NO: 4273060 - DNA, 25 bp, Homo sapien
tgcgaaatttcactaaatgggaacc

SEQ ID NO: 4273061 - DNA, 25 bp, Homo sapien
ggcatacaaagagtaggtttttcat

SEQ ID NO: 4273062 - DNA, 25 bp, Homo sapien
tgttcttaagaagttgccctctgcg

SEQ ID NO: 4273063 - DNA, 25 bp, Homo sapien
gtctgcacagcagggatgttcttaa

SEQ ID NO: 4273064 - DNA, 25 bp, Homo sapien
caccatgttgcctactaaccaaaag

SEQ ID NO: 4273065 - DNA, 25 bp, Homo sapien
gttgcctactaaccaaaagatcaaa

SEQ ID NO: 4273066 - DNA, 25 bp, Homo sapien
tgcagtccctgcaatagctcaccat

SEQ ID NO: 4273067 - DNA, 25 bp, Homo sapien
gtccctgcaatagctcaccatgttg

SEQ ID NO: 4273068 - DNA, 25 bp, Homo sapien
gaatttaggattttgccgcagtata

SEQ ID NO: 4273069 - DNA, 25 bp, Homo sapien
tcttgcgatgggaaacgcctttaac

SEQ ID NO: 4273070 - DNA, 25 bp, Homo sapien
gccgcagtatacatctgcagtccca

SEQ ID NO: 4273071 - DNA, 25 bp, Homo sapien
cagaatcctccggtaagttaatcct

SEQ ID NO: 4273072 - DNA, 25 bp, Homo sapien
tagtgtactgcatgcctagcctata

SEQ ID NO: 4273073 - DNA, 25 bp, Homo sapien
tagcacggtgaattttgaagtatcc

SEQ ID NO: 4273074 - DNA, 25 bp, Homo sapien
tgttagaattacaagccacttcgcc

SEQ ID NO: 4273075 - DNA, 25 bp, Homo sapien
tcccattgactttgactggagacat

SEQ ID NO: 4273076 - DNA, 25 bp, Homo sapien
gccctaggtcttgcttggcagtcta

SEQ ID NO: 4273077 - DNA, 25 bp, Homo sapien
taattgggagcactagaattgggcc

SEQ ID NO: 4273078 - DNA, 25 bp, Homo sapien
gaattgggcccttaatggttggcag

SEQ ID NO: 4273079 - DNA, 25 bp, Homo sapien
ccttagtccaaaggctcaggccaga

SEQ ID NO: 4273080 - DNA, 25 bp, Homo sapien
ggtcaagttactaggtcagcccaca

SEQ ID NO: 4273081 - DNA, 25 bp, Homo sapien
agcccacacagagtttacccagtaa

SEQ ID NO: 4273082 - DNA, 25 bp, Homo sapien
tgggaagtcccagtgtacaaatggc

SEQ ID NO: 4273083 - DNA, 25 bp, Homo sapien
tgagtgagtctatgctgttacctaa

SEQ ID NO: 4273084 - DNA, 25 bp, Homo sapien
tgttatccaaaggggatctgtgaat

SEQ ID NO: 4273085 - DNA, 25 bp, Homo sapien
tctgttatccaaaggggatctgtga

SEQ ID NO: 4273086 - DNA, 25 bp, Homo sapien
ttatccaaaggggatctgtgaattt

SEQ ID NO: 4273087 - DNA, 25 bp, Homo sapien
ctctgttatccaaaggggatctgtg

SEQ ID NO: 4273088 - DNA, 25 bp, Homo sapien
gaagaggatgtggatacctcccaag

SEQ ID NO: 4273089 - DNA, 25 bp, Homo sapien
cattctggtgccactaccacagctc

SEQ ID NO: 4273090 - DNA, 25 bp, Homo sapien
tctggtgccactaccacagctcctt

SEQ ID NO: 4273091 - DNA, 25 bp, Homo sapien
tgagtggtaaaggcaatcctgagga

SEQ ID NO: 4273092 - DNA, 25 bp, Homo sapien
catcgtgagggcttactggccatct

SEQ ID NO: 4273093 - DNA, 25 bp, Homo sapien
tgcagaatacaaatgatgtagaaac

SEQ ID NO: 4273094 - DNA, 25 bp, Homo sapien
aaacagctcgttgtaccgctgggac

SEQ ID NO: 4273095 - DNA, 25 bp, Homo sapien
ccgctgggaccttgcataacctttc

SEQ ID NO: 4273096 - DNA, 25 bp, Homo sapien
tagaaggaaagagattggtcaggca

SEQ ID NO: 4273097 - DNA, 25 bp, Homo sapien
ttagaaggaaagagattggtcaggc

SEQ ID NO: 4273098 - DNA, 25 bp, Homo sapien
cttagaaggaaagagattggtcagg

SEQ ID NO: 4273099 - DNA, 25 bp, Homo sapien
gaaggaaagagattggtcaggcacg

SEQ ID NO: 4273100 - DNA, 25 bp, Homo sapien
gagaaccccttggatatcgccagga

SEQ ID NO: 4273101 - DNA, 25 bp, Homo sapien
gattaactccagatcaagctaaagt

SEQ ID NO: 4273102 - DNA, 25 bp, Homo sapien
gaagagccggtttgctcatctggga

SEQ ID NO: 4273103 - DNA, 25 bp, Homo sapien
gaaaccagtgttggcagaaaagtag

SEQ ID NO: 4273104 - DNA, 25 bp, Homo sapien
tgttttggacagtttaccagttgcc

SEQ ID NO: 4273105 - DNA, 25 bp, Homo sapien
gttatagtgaatactgctacagcaa

SEQ ID NO: 4273106 - DNA, 25 bp, Homo sapien
taacctgctgtgatacgatgcttca

SEQ ID NO: 4273107 - DNA, 25 bp, Homo sapien
ctgtaatggtactgactttgcttgc

SEQ ID NO: 4273108 - DNA, 25 bp, Homo sapien
tgttgtagcgatagagagggcccta

SEQ ID NO: 4273109 - DNA, 25 bp, Homo sapien
tgagggtggtaagtaagtttatcca

SEQ ID NO: 4273110 - DNA, 25 bp, Homo sapien
tttaattcattcgattgtgtcactc

SEQ ID NO: 4273111 - DNA, 25 bp, Homo sapien
gagggccctacttctctagatgcaa

SEQ ID NO: 4273112 - DNA, 25 bp, Homo sapien
tcttttgcctcaagcgccagtaagg

SEQ ID NO: 4273113 - DNA, 25 bp, Homo sapien
ttttaacataaagagccaccgcacg

SEQ ID NO: 4273114 - DNA, 25 bp, Homo sapien
ttcagagacagcgttggagatccga

SEQ ID NO: 4273115 - DNA, 25 bp, Homo sapien
tggtagggcacaacgctgacagtct

SEQ ID NO: 4273116 - DNA, 25 bp, Homo sapien
tacgagagccttagctaccagagcc

SEQ ID NO: 4273117 - DNA, 25 bp, Homo sapien
ccttgtacgagagccttagctacca

SEQ ID NO: 4273118 - DNA, 25 bp, Homo sapien
ttagctaccagagcccccattttct

SEQ ID NO: 4273119 - DNA, 25 bp, Homo sapien
atcaccttgtacgagagccttagct

SEQ ID NO: 4273120 - DNA, 25 bp, Homo sapien
tgcttgtcacctcctttgcctctca

SEQ ID NO: 4273121 - DNA, 25 bp, Homo sapien
gcttgtcacctcctttgcctctcac

SEQ ID NO: 4273122 - DNA, 25 bp, Homo sapien
ctattgcttgtcacctcctttgcct

SEQ ID NO: 4273123 - DNA, 25 bp, Homo sapien
attgcttgtcacctcctttgcctct

SEQ ID NO: 4273124 - DNA, 25 bp, Homo sapien
gccagtggattgtagctaataagca

SEQ ID NO: 4273125 - DNA, 25 bp, Homo sapien
cagtgacccattcatccctgaagag

SEQ ID NO: 4273126 - DNA, 25 bp, Homo sapien
ctgccagaatcctaagagctgaggg

SEQ ID NO: 4273127 - DNA, 25 bp, Homo sapien
tgtgggccctttgccactgccagaa

SEQ ID NO: 4273128 - DNA, 25 bp, Homo sapien
tccagcaggcaaagccactggagct

SEQ ID NO: 4273129 - DNA, 25 bp, Homo sapien
ccactcaatcccagaagtgcaggca

SEQ ID NO: 4273130 - DNA, 25 bp, Homo sapien
tcaatcccagaagtgcaggcaaaac

SEQ ID NO: 4273131 - DNA, 25 bp, Homo sapien
gctgctccatcaagtactccccact

SEQ ID NO: 4273132 - DNA, 25 bp, Homo sapien
cccaggattcgtggaatcagtttgc

SEQ ID NO: 4273133 - DNA, 25 bp, Homo sapien
ccagtcctccccaggattcgtggaa

SEQ ID NO: 4273134 - DNA, 25 bp, Homo sapien
gattcgtggaatcagtttgctcccg

SEQ ID NO: 4273135 - DNA, 25 bp, Homo sapien
tggaatcagtttgctcccgaaatga

SEQ ID NO: 4273136 - DNA, 25 bp, Homo sapien
tctggagctgcggttgggagagcat

SEQ ID NO: 4273137 - DNA, 25 bp, Homo sapien
tagcttccaaaggcttgctctggag

SEQ ID NO: 4273138 - DNA, 25 bp, Homo sapien
gcttccaaaggcttgctctggagct

SEQ ID NO: 4273139 - DNA, 25 bp, Homo sapien
gggagagcattcctgcctcgtcccg

SEQ ID NO: 4273140 - DNA, 25 bp, Homo sapien
atgctcacagatgctggcaggctga

SEQ ID NO: 4273141 - DNA, 25 bp, Homo sapien
gaggagagatgctcacagatgctgg

SEQ ID NO: 4273142 - DNA, 25 bp, Homo sapien
agagatgctcacagatgctggcagg

SEQ ID NO: 4273143 - DNA, 25 bp, Homo sapien
ggagagatgctcacagatgctggca

SEQ ID NO: 4273144 - DNA, 25 bp, Homo sapien
cacaggcagtgctaaccttagccca

SEQ ID NO: 4273145 - DNA, 25 bp, Homo sapien
ttaccacaggcagtgctaaccttag

SEQ ID NO: 4273146 - DNA, 25 bp, Homo sapien
acaggcagtgctaaccttagcccac

SEQ ID NO: 4273147 - DNA, 25 bp, Homo sapien
accacaggcagtgctaaccttagcc

SEQ ID NO: 4273148 - DNA, 25 bp, Homo sapien
cacaggaaccaaggaagtccattct

SEQ ID NO: 4273149 - DNA, 25 bp, Homo sapien
ctgagtcagttttctaggccctggg

SEQ ID NO: 4273150 - DNA, 25 bp, Homo sapien
tcccagatgcattccacaggaacca

SEQ ID NO: 4273151 - DNA, 25 bp, Homo sapien
tgagaacagctaacaaacctgggct

SEQ ID NO: 4273152 - DNA, 25 bp, Homo sapien
taagctgactttattaggtccaaag

SEQ ID NO: 4273153 - DNA, 25 bp, Homo sapien
gctgactttattaggtccaaagaca

SEQ ID NO: 4273154 - DNA, 25 bp, Homo sapien
ttctgggttaagctgactttattag

SEQ ID NO: 4273155 - DNA, 25 bp, Homo sapien
ggttaagctgactttattaggtcca

SEQ ID NO: 4273156 - DNA, 25 bp, Homo sapien
gatgtggcaaaggtgtctgggagct

SEQ ID NO: 4273157 - DNA, 25 bp, Homo sapien
tgtgaggggatgtggcaaaggtgtc

SEQ ID NO: 4273158 - DNA, 25 bp, Homo sapien
aggggatgtggcaaaggtgtctggg

SEQ ID NO: 4273159 - DNA, 25 bp, Homo sapien
gggatgtggcaaaggtgtctgggag

SEQ ID NO: 4273160 - DNA, 25 bp, Homo sapien
ttatgcatccgagggctggggccac

SEQ ID NO: 4273161 - DNA, 25 bp, Homo sapien
agggcgggcttgtgctaagcacctt

SEQ ID NO: 4273162 - DNA, 25 bp, Homo sapien
cttgcttatgcatccgagggctggg

SEQ ID NO: 4273163 - DNA, 25 bp, Homo sapien
cagggcgggcttgtgctaagcacct

SEQ ID NO: 4273164 - DNA, 25 bp, Homo sapien
agccaccgcactgtcggcaaatgaa

SEQ ID NO: 4273165 - DNA, 25 bp, Homo sapien
gcccaacggcttggaggatttccag

SEQ ID NO: 4273166 - DNA, 25 bp, Homo sapien
gccaagggagccaccgcactgtcgg

SEQ ID NO: 4273167 - DNA, 25 bp, Homo sapien
ctagtgcccaacggcttggaggatt

SEQ ID NO: 4273168 - DNA, 25 bp, Homo sapien
aaatcctggcccacagtcctggtgg

SEQ ID NO: 4273169 - DNA, 25 bp, Homo sapien
gagtatctggtggaccagctgcagc

SEQ ID NO: 4273170 - DNA, 25 bp, Homo sapien
tgcagcatcctcttgggaagcagaa

SEQ ID NO: 4273171 - DNA, 25 bp, Homo sapien
gtcctggtggggttcagaattggcc

SEQ ID NO: 4273172 - DNA, 25 bp, Homo sapien
catgaatacgaacttacttctatgg

SEQ ID NO: 4273173 - DNA, 25 bp, Homo sapien
cagaaaaccatgaatacgaacttac

SEQ ID NO: 4273174 - DNA, 25 bp, Homo sapien
tacgaacttacttctatggtttatg

SEQ ID NO: 4273175 - DNA, 25 bp, Homo sapien
ctcacagaaaaccatgaatacgaac

SEQ ID NO: 4273176 - DNA, 25 bp, Homo sapien
tcttgaggctctccaagtgcttctc

SEQ ID NO: 4273177 - DNA, 25 bp, Homo sapien
ccaagtgcttctcattggaggtgat

SEQ ID NO: 4273178 - DNA, 25 bp, Homo sapien
ggctctccaagtgcttctcattgga

SEQ ID NO: 4273179 - DNA, 25 bp, Homo sapien
agccgctccagagcccgcaggaggc

SEQ ID NO: 4273180 - DNA, 25 bp, Homo sapien
tgcatcaggtgtgatttctgcaaag

SEQ ID NO: 4273181 - DNA, 25 bp, Homo sapien
tcaactgcatcaggtgtgatttctg

SEQ ID NO: 4273182 - DNA, 25 bp, Homo sapien
tcctgagtatgccagagaacagctg

SEQ ID NO: 4273183 - DNA, 25 bp, Homo sapien
cttcctgagtatgccagagaacagc

SEQ ID NO: 4273184 - DNA, 25 bp, Homo sapien
caggcgtcttcagtgaggattccca

SEQ ID NO: 4273185 - DNA, 25 bp, Homo sapien
actccccatcaggcgtcttcagtga

SEQ ID NO: 4273186 - DNA, 25 bp, Homo sapien
ccatcaggcgtcttcagtgaggatt

SEQ ID NO: 4273187 - DNA, 25 bp, Homo sapien
gcgtcttcagtgaggattcccactt

SEQ ID NO: 4273188 - DNA, 25 bp, Homo sapien
gctgactacatccaggctcagtgcc

SEQ ID NO: 4273189 - DNA, 25 bp, Homo sapien
gtcagctgactacatccaggctcag

SEQ ID NO: 4273190 - DNA, 25 bp, Homo sapien
caggtcagctgactacatccaggct

SEQ ID NO: 4273191 - DNA, 25 bp, Homo sapien
aaacaggtcagctgactacatccag

SEQ ID NO: 4273192 - DNA, 25 bp, Homo sapien
tcttattcataacatcagctgttgt

SEQ ID NO: 4273193 - DNA, 25 bp, Homo sapien
ctgactcttattcataacatcagct

SEQ ID NO: 4273194 - DNA, 25 bp, Homo sapien
cttattcataacatcagctgttgtt

SEQ ID NO: 4273195 - DNA, 25 bp, Homo sapien
gactcttattcataacatcagctgt

SEQ ID NO: 4273196 - DNA, 25 bp, Homo sapien
gtgttgcagtgtgcattctgggtcc

SEQ ID NO: 4273197 - DNA, 25 bp, Homo sapien
catcacaccttccatgggatgctga

SEQ ID NO: 4273198 - DNA, 25 bp, Homo sapien
tgcatccaggcccatatgctcatca

SEQ ID NO: 4273199 - DNA, 25 bp, Homo sapien
aattttcatgcatggcctccagctg

SEQ ID NO: 4273200 - DNA, 25 bp, Homo sapien
tagcaaaagcaagtgaggccctgtc

SEQ ID NO: 4273201 - DNA, 25 bp, Homo sapien
caaaagcaagtgaggccctgtccat

SEQ ID NO: 4273202 - DNA, 25 bp, Homo sapien
cttagcaaaagcaagtgaggccctg

SEQ ID NO: 4273203 - DNA, 25 bp, Homo sapien
gcaaaagcaagtgaggccctgtcca

SEQ ID NO: 4273204 - DNA, 25 bp, Homo sapien
gcagcgatgagtctccatgtggtgt

SEQ ID NO: 4273205 - DNA, 25 bp, Homo sapien
gacaaaacccagatttcaggtagaa

SEQ ID NO: 4273206 - DNA, 25 bp, Homo sapien
cacagggcattagtagatgtgcggg

SEQ ID NO: 4273207 - DNA, 25 bp, Homo sapien
tgtactccagacaaaccgggtagga

SEQ ID NO: 4273208 - DNA, 25 bp, Homo sapien
gcaaagcaggaaccgcagaatctct

SEQ ID NO: 4273209 - DNA, 25 bp, Homo sapien
taaatggcttgcactgctctgccgg

SEQ ID NO: 4273210 - DNA, 25 bp, Homo sapien
tgtaaattgcatagcgccctttgct

SEQ ID NO: 4273211 - DNA, 25 bp, Homo sapien
cagtcattgttgctcatcctcatca

SEQ ID NO: 4273212 - DNA, 25 bp, Homo sapien
gtcccagggtgaacttgtgcttcaa

SEQ ID NO: 4273213 - DNA, 25 bp, Homo sapien
acttgtgcttcaaggtccttctggg

SEQ ID NO: 4273214 - DNA, 25 bp, Homo sapien
cctgtcccagggtgaacttgtgctt

SEQ ID NO: 4273215 - DNA, 25 bp, Homo sapien
ggttatatcctgtcccagggtgaac

SEQ ID NO: 4273216 - DNA, 25 bp, Homo sapien
accaagcgctcactggccacgctga

SEQ ID NO: 4273217 - DNA, 25 bp, Homo sapien
tagcctgactaactggcacacactt

SEQ ID NO: 4273218 - DNA, 25 bp, Homo sapien
agactgtatagcctgactaactggc

SEQ ID NO: 4273219 - DNA, 25 bp, Homo sapien
caggtagttcttttccccatatgat

SEQ ID NO: 4273220 - DNA, 25 bp, Homo sapien
tggccccagattttaatttggtatc

SEQ ID NO: 4273221 - DNA, 25 bp, Homo sapien
aattactttaccttctgtatacctg

SEQ ID NO: 4273222 - DNA, 25 bp, Homo sapien
cagtctgctggtaataaattacttt

SEQ ID NO: 4273223 - DNA, 25 bp, Homo sapien
tgcctgaagggcttcctgtagtacc

SEQ ID NO: 4273224 - DNA, 25 bp, Homo sapien
taaggctccacagtaacacagacag

SEQ ID NO: 4273225 - DNA, 25 bp, Homo sapien
gcgctgcccacttatctgactctga

SEQ ID NO: 4273226 - DNA, 25 bp, Homo sapien
ggccttggcctagaatacacggtta

SEQ ID NO: 4273227 - DNA, 25 bp, Homo sapien
cgtggattcatgtaccaaggacttc

SEQ ID NO: 4273228 - DNA, 25 bp, Homo sapien
taacatttccagagtccaaggtgac

SEQ ID NO: 4273229 - DNA, 25 bp, Homo sapien
taggtaacaaacaggactactgctg

SEQ ID NO: 4273230 - DNA, 25 bp, Homo sapien
cagtcctgacaagttggcatatcca

SEQ ID NO: 4273231 - DNA, 25 bp, Homo sapien
gaatgctcatgatagaacagcccag

SEQ ID NO: 4273232 - DNA, 25 bp, Homo sapien
tcttctcatgggatgcacatgggtg

SEQ ID NO: 4273233 - DNA, 25 bp, Homo sapien
aaatgggaacagctctactctgcag

SEQ ID NO: 4273234 - DNA, 25 bp, Homo sapien
gcagcagtctgggatcaacctgtaa

SEQ ID NO: 4273235 - DNA, 25 bp, Homo sapien
tacctggttcttctcatgggatgca

SEQ ID NO: 4273236 - DNA, 25 bp, Homo sapien
agtccatgctcagatcttcccacac

SEQ ID NO: 4273237 - DNA, 25 bp, Homo sapien
ctagtccatgctcagatcttcccac

SEQ ID NO: 4273238 - DNA, 25 bp, Homo sapien
tagtccatgctcagatcttcccaca

SEQ ID NO: 4273239 - DNA, 25 bp, Homo sapien
gtccatgctcagatcttcccacact

SEQ ID NO: 4273240 - DNA, 25 bp, Homo sapien
tcaaagtcgctctgtaaaaccttca

SEQ ID NO: 4273241 - DNA, 25 bp, Homo sapien
gatttgggtctcacggaagctgaga

SEQ ID NO: 4273242 - DNA, 25 bp, Homo sapien
agatttcctctcaaccaagtactca

SEQ ID NO: 4273243 - DNA, 25 bp, Homo sapien
tttcccagctagagatttgggtctc

SEQ ID NO: 4273244 - DNA, 25 bp, Homo sapien
gaagctgagatttcctctcaaccaa

SEQ ID NO: 4273245 - DNA, 25 bp, Homo sapien
cccaaacacaggaacgagagtcacc

SEQ ID NO: 4273246 - DNA, 25 bp, Homo sapien
gagcccaaacacaggaacgagagtc

SEQ ID NO: 4273247 - DNA, 25 bp, Homo sapien
agagcccaaacacaggaacgagagt

SEQ ID NO: 4273248 - DNA, 25 bp, Homo sapien
cctcctagcatgatattaacatttg

SEQ ID NO: 4273249 - DNA, 25 bp, Homo sapien
gctctctgtcagagcgccacgggga

SEQ ID NO: 4273250 - DNA, 25 bp, Homo sapien
ccacagctcggagcacacagtgggt

SEQ ID NO: 4273251 - DNA, 25 bp, Homo sapien
ggagcggcagagcagccggccactc

SEQ ID NO: 4273252 - DNA, 25 bp, Homo sapien
cacagctcggagcacacagtgggtg

SEQ ID NO: 4273253 - DNA, 25 bp, Homo sapien
cacagtgcaccgaaaggactggaac

SEQ ID NO: 4273254 - DNA, 25 bp, Homo sapien
aatgatgatgaatactgtcacgcag

SEQ ID NO: 4273255 - DNA, 25 bp, Homo sapien
aatatccacaaaatacaaggtggac

SEQ ID NO: 4273256 - DNA, 25 bp, Homo sapien
ggaacacatgattaaatccccaagg

SEQ ID NO: 4273257 - DNA, 25 bp, Homo sapien
cacccaggggcaagctttagcatca

SEQ ID NO: 4273258 - DNA, 25 bp, Homo sapien
ggaccttggccagggtgttcaccca

SEQ ID NO: 4273259 - DNA, 25 bp, Homo sapien
caagctttagcatcagcctggtgcg

SEQ ID NO: 4273260 - DNA, 25 bp, Homo sapien
agcctggtgcgtgctcgaggccaca

SEQ ID NO: 4273261 - DNA, 25 bp, Homo sapien
caggcaagaaaactctgcccaccag

SEQ ID NO: 4273262 - DNA, 25 bp, Homo sapien
ctgtagaacaggcaagaaaactctg

SEQ ID NO: 4273263 - DNA, 25 bp, Homo sapien
tgagaactctgtagggaggctgcca

SEQ ID NO: 4273264 - DNA, 25 bp, Homo sapien
tgcccaccaggtgagaactctgtag

SEQ ID NO: 4273265 - DNA, 25 bp, Homo sapien
gtcctgtgtaaaccatgctctgtaa

SEQ ID NO: 4273266 - DNA, 25 bp, Homo sapien
acgcagggatgccactattattacc

SEQ ID NO: 4273267 - DNA, 25 bp, Homo sapien
tcaactgttgcaagatcataaccca

SEQ ID NO: 4273268 - DNA, 25 bp, Homo sapien
tcttcctgggcactcaacaaagggt

SEQ ID NO: 4273269 - DNA, 25 bp, Homo sapien
tccctttataatgcaacgaacttgc

SEQ ID NO: 4273270 - DNA, 25 bp, Homo sapien
tcctcccaagatctcacatttctat

SEQ ID NO: 4273271 - DNA, 25 bp, Homo sapien
tgcaacgaacttgcaccccgggaag

SEQ ID NO: 4273272 - DNA, 25 bp, Homo sapien
cacatttctattaacgacctcaggg

SEQ ID NO: 4273273 - DNA, 25 bp, Homo sapien
gatcttaggagagtctcttttggtt

SEQ ID NO: 4273274 - DNA, 25 bp, Homo sapien
tcttgttttccaaccagcgcctcat

SEQ ID NO: 4273275 - DNA, 25 bp, Homo sapien
ccttcttcatcttgtacattgtgat

SEQ ID NO: 4273276 - DNA, 25 bp, Homo sapien
tcacaggcaatacaacggcatcttc

SEQ ID NO: 4273277 - DNA, 25 bp, Homo sapien
ctgcagaaagtgagctcggcactgg

SEQ ID NO: 4273278 - DNA, 25 bp, Homo sapien
caatatcaatgctatcctttttggc

SEQ ID NO: 4273279 - DNA, 25 bp, Homo sapien
cctttttggcatactgcagttcttg

SEQ ID NO: 4273280 - DNA, 25 bp, Homo sapien
tctctgcagaaagtgagctcggcac

SEQ ID NO: 4273281 - DNA, 25 bp, Homo sapien
gctttctccttgggacaaatccaag

SEQ ID NO: 4273282 - DNA, 25 bp, Homo sapien
tggctgcttaaagatgaggctttct

SEQ ID NO: 4273283 - DNA, 25 bp, Homo sapien
tggtgagtctccaagcaagatggga

SEQ ID NO: 4273284 - DNA, 25 bp, Homo sapien
gatccatatgcctggtgagtctcca

SEQ ID NO: 4273285 - DNA, 25 bp, Homo sapien
tgaaggtctatgagtactggcagcc

SEQ ID NO: 4273286 - DNA, 25 bp, Homo sapien
tagatgctgccgaaagctgtaggca

SEQ ID NO: 4273287 - DNA, 25 bp, Homo sapien
tcttctttggtagagggcgatggct

SEQ ID NO: 4273288 - DNA, 25 bp, Homo sapien
caccctggagttagtgagaaatgga

SEQ ID NO: 4273289 - DNA, 25 bp, Homo sapien
ttagcaagcaaatagagagcaaaca

SEQ ID NO: 4273290 - DNA, 25 bp, Homo sapien
caagatccataggtgcgctgtattc

SEQ ID NO: 4273291 - DNA, 25 bp, Homo sapien
ggtgcgctgtattcggagacccatc

SEQ ID NO: 4273292 - DNA, 25 bp, Homo sapien
gggatgaaggaagatttagcaagca

SEQ ID NO: 4273293 - DNA, 25 bp, Homo sapien
aaagctttcggaagattttgaggca

SEQ ID NO: 4273294 - DNA, 25 bp, Homo sapien
gaaagctttcggaagattttgaggc

SEQ ID NO: 4273295 - DNA, 25 bp, Homo sapien
aggcatttatcacagatggcaggcc

SEQ ID NO: 4273296 - DNA, 25 bp, Homo sapien
ttgaggcatttatcacagatggcag

SEQ ID NO: 4273297 - DNA, 25 bp, Homo sapien
gtccccggtttctgtgtgaactcac

SEQ ID NO: 4273298 - DNA, 25 bp, Homo sapien
cccacagtgtccccggtttctgtgt

SEQ ID NO: 4273299 - DNA, 25 bp, Homo sapien
gtgtccccggtttctgtgtgaactc

SEQ ID NO: 4273300 - DNA, 25 bp, Homo sapien
acagtgtccccggtttctgtgtgaa

SEQ ID NO: 4273301 - DNA, 25 bp, Homo sapien
agaatccttaacagaagcttctgct

SEQ ID NO: 4273302 - DNA, 25 bp, Homo sapien
ccagtatagacaggcacttggatga

SEQ ID NO: 4273303 - DNA, 25 bp, Homo sapien
ttttcaggagagaggctgtccgggt

SEQ ID NO: 4273304 - DNA, 25 bp, Homo sapien
cctccatacagctgaaccagtatag

SEQ ID NO: 4273305 - DNA, 25 bp, Homo sapien
caacaatgtgacaatgctgaattat

SEQ ID NO: 4273306 - DNA, 25 bp, Homo sapien
catggcaacaatgtgacaatgctga

SEQ ID NO: 4273307 - DNA, 25 bp, Homo sapien
tttaggcagtcttctgcgtaggttc

SEQ ID NO: 4273308 - DNA, 25 bp, Homo sapien
taggcagtcttctgcgtaggttcct

SEQ ID NO: 4273309 - DNA, 25 bp, Homo sapien
aaagttgatgaagttgctatcgaca

SEQ ID NO: 4273310 - DNA, 25 bp, Homo sapien
gaagttgctatcgacaaggatgtag

SEQ ID NO: 4273311 - DNA, 25 bp, Homo sapien
gttgatgaagttgctatcgacaagg

SEQ ID NO: 4273312 - DNA, 25 bp, Homo sapien
gatgaagttgctatcgacaaggatg

SEQ ID NO: 4273313 - DNA, 25 bp, Homo sapien
agagacagtgaagagtgaagcatac

SEQ ID NO: 4273314 - DNA, 25 bp, Homo sapien
tgaagcattctgttctgcacagcac

SEQ ID NO: 4273315 - DNA, 25 bp, Homo sapien
aaaagctttctactagtaactgagc

SEQ ID NO: 4273316 - DNA, 25 bp, Homo sapien
tccagaggcatcagacttagacgtg

SEQ ID NO: 4273317 - DNA, 25 bp, Homo sapien
tgcacagcacttgttccaggagaaa

SEQ ID NO: 4273318 - DNA, 25 bp, Homo sapien
gagatcatcagtgaaactctcaggg

SEQ ID NO: 4273319 - DNA, 25 bp, Homo sapien
ctagtaaggagagatcatcagtgaa

SEQ ID NO: 4273320 - DNA, 25 bp, Homo sapien
catcagtgaaactctcagggaagag

SEQ ID NO: 4273321 - DNA, 25 bp, Homo sapien
taaggagagatcatcagtgaaactc

SEQ ID NO: 4273322 - DNA, 25 bp, Homo sapien
ttctgaagagctcatacttaaataa

SEQ ID NO: 4273323 - DNA, 25 bp, Homo sapien
tctgaagagctcatacttaaataat

SEQ ID NO: 4273324 - DNA, 25 bp, Homo sapien
tgtgagctctgcttcgtgtgccttc

SEQ ID NO: 4273325 - DNA, 25 bp, Homo sapien
gagctctgcttcgtgtgccttcatg

SEQ ID NO: 4273326 - DNA, 25 bp, Homo sapien
gctctgcttcgtgtgccttcatgat

SEQ ID NO: 4273327 - DNA, 25 bp, Homo sapien
gtgagctctgcttcgtgtgccttca

SEQ ID NO: 4273328 - DNA, 25 bp, Homo sapien
tttctgagcttacaagcaatgaggt

SEQ ID NO: 4273329 - DNA, 25 bp, Homo sapien
gaggctgttcacaaagagagtttat

SEQ ID NO: 4273330 - DNA, 25 bp, Homo sapien
cccgggtacattacttcagcacatt

SEQ ID NO: 4273331 - DNA, 25 bp, Homo sapien
gagccataggcaggataattttgca

SEQ ID NO: 4273332 - DNA, 25 bp, Homo sapien
gatcaaatcaatcaaggctgactgg

SEQ ID NO: 4273333 - DNA, 25 bp, Homo sapien
taactactaatgatcacagggtgtc

SEQ ID NO: 4273334 - DNA, 25 bp, Homo sapien
taccagataatataggtgtggccca

SEQ ID NO: 4273335 - DNA, 25 bp, Homo sapien
tgctcctgatggtagaagcatctca

SEQ ID NO: 4273336 - DNA, 25 bp, Homo sapien
taattagctagactttgcttttggc

SEQ ID NO: 4273337 - DNA, 25 bp, Homo sapien
taactcccatctctcgcctatcggt

SEQ ID NO: 4273338 - DNA, 25 bp, Homo sapien
ggtctgtcccattgccctagtcttg

SEQ ID NO: 4273339 - DNA, 25 bp, Homo sapien
tctcgcctatcggtctgtcccattg

SEQ ID NO: 4273340 - DNA, 25 bp, Homo sapien
aacctctctaactcccatctctcgc

SEQ ID NO: 4273341 - DNA, 25 bp, Homo sapien
gtctgtcagaggtctgttgagcagc

SEQ ID NO: 4273342 - DNA, 25 bp, Homo sapien
cagtggaatgagcaggctaatcagg

SEQ ID NO: 4273343 - DNA, 25 bp, Homo sapien
aggtctgtcagaggtctgttgagca

SEQ ID NO: 4273344 - DNA, 25 bp, Homo sapien
gaatgagcaggctaatcaggtctgt

SEQ ID NO: 4273345 - DNA, 25 bp, Homo sapien
tggggccacagtacaagaaacactg

SEQ ID NO: 4273346 - DNA, 25 bp, Homo sapien
atggggccacagtacaagaaacact

SEQ ID NO: 4273347 - DNA, 25 bp, Homo sapien
cctccaagatctgcatagtcatacg

SEQ ID NO: 4273348 - DNA, 25 bp, Homo sapien
tccagatcctccaagatctgcatag

SEQ ID NO: 4273349 - DNA, 25 bp, Homo sapien
gatcctccaagatctgcatagtcat

SEQ ID NO: 4273350 - DNA, 25 bp, Homo sapien
caagatctgcatagtcatacgtcat

SEQ ID NO: 4273351 - DNA, 25 bp, Homo sapien
agaaacatcgacccagcctaccagt

SEQ ID NO: 4273352 - DNA, 25 bp, Homo sapien
atcgacccagcctaccagtattcat

SEQ ID NO: 4273353 - DNA, 25 bp, Homo sapien
agtcgccaagaaacatcgacccagc

SEQ ID NO: 4273354 - DNA, 25 bp, Homo sapien
aacatcgacccagcctaccagtatt

SEQ ID NO: 4273355 - DNA, 25 bp, Homo sapien
ggaaaagagcagtggagctgccatc

SEQ ID NO: 4273356 - DNA, 25 bp, Homo sapien
taccggaggtataggtcagcatgct

SEQ ID NO: 4273357 - DNA, 25 bp, Homo sapien
gcaaagccagccgtacaataccgga

SEQ ID NO: 4273358 - DNA, 25 bp, Homo sapien
tcagtgagcaggttacagatgtgac

SEQ ID NO: 4273359 - DNA, 25 bp, Homo sapien
cgggtatgacctgcttgattccaca

SEQ ID NO: 4273360 - DNA, 25 bp, Homo sapien
tgacctgcttgattccacatttcca

SEQ ID NO: 4273361 - DNA, 25 bp, Homo sapien
tgtacgggtatgacctgcttgattc

SEQ ID NO: 4273362 - DNA, 25 bp, Homo sapien
gtctttgtacgggtatgacctgctt

SEQ ID NO: 4273363 - DNA, 25 bp, Homo sapien
gtacaggaacacttgtaatttttgc

SEQ ID NO: 4273364 - DNA, 25 bp, Homo sapien
attggtgtacaggaacacttgtaat

SEQ ID NO: 4273365 - DNA, 25 bp, Homo sapien
ttccatttgttcgtgccctctctca

SEQ ID NO: 4273366 - DNA, 25 bp, Homo sapien
tttccatttgttcgtgccctctctc

SEQ ID NO: 4273367 - DNA, 25 bp, Homo sapien
aatgataaatgaattttcgagaaat

SEQ ID NO: 4273368 - DNA, 25 bp, Homo sapien
caatgataaatgaattttcgagaaa

SEQ ID NO: 4273369 - DNA, 25 bp, Homo sapien
atgataaatgaattttcgagaaata

SEQ ID NO: 4273370 - DNA, 25 bp, Homo sapien
agtagttccatattcgaatctttgc

SEQ ID NO: 4273371 - DNA, 25 bp, Homo sapien
ccatattcgaatctttgcaggcaac

SEQ ID NO: 4273372 - DNA, 25 bp, Homo sapien
cataaagtagttccatattcgaatc

SEQ ID NO: 4273373 - DNA, 25 bp, Homo sapien
cttgttcataaagtagttccatatt

SEQ ID NO: 4273374 - DNA, 25 bp, Homo sapien
caatcacactttgcatggtattacc

SEQ ID NO: 4273375 - DNA, 25 bp, Homo sapien
gagtaatgcaatcacactttgcatg

SEQ ID NO: 4273376 - DNA, 25 bp, Homo sapien
tagattgctgagtaatgcaatcaca

SEQ ID NO: 4273377 - DNA, 25 bp, Homo sapien
tgcatggtattacccagaatgctct

SEQ ID NO: 4273378 - DNA, 25 bp, Homo sapien
aaggtcatggctaccacagcccagt

SEQ ID NO: 4273379 - DNA, 25 bp, Homo sapien
tcacgtaggcccaaggtcatggcta

SEQ ID NO: 4273380 - DNA, 25 bp, Homo sapien
taccacagcccagtttctgtccaca

SEQ ID NO: 4273381 - DNA, 25 bp, Homo sapien
taggcccaaggtcatggctaccaca

SEQ ID NO: 4273382 - DNA, 25 bp, Homo sapien
gcccctgggcatttgctctgttagt

SEQ ID NO: 4273383 - DNA, 25 bp, Homo sapien
tctgccaacgtggtcggggcttcta

SEQ ID NO: 4273384 - DNA, 25 bp, Homo sapien
gtgcagcaggtaaacagcccctctg

SEQ ID NO: 4273385 - DNA, 25 bp, Homo sapien
tgtttggagtaggatgaaggtgctg

SEQ ID NO: 4273386 - DNA, 25 bp, Homo sapien
tggtattttaagcatgatcatattt

SEQ ID NO: 4273387 - DNA, 25 bp, Homo sapien
gtattttaagcatgatcatatttct

SEQ ID NO: 4273388 - DNA, 25 bp, Homo sapien
ggtattttaagcatgatcatatttc

SEQ ID NO: 4273389 - DNA, 25 bp, Homo sapien
ccgagcccaagaaagttattttgca

SEQ ID NO: 4273390 - DNA, 25 bp, Homo sapien
catttattcaggtaacgtggagctg

SEQ ID NO: 4273391 - DNA, 25 bp, Homo sapien
taatggtggtatatgttagcagcgt

SEQ ID NO: 4273392 - DNA, 25 bp, Homo sapien
tatcaatagattgtacccgagccca

SEQ ID NO: 4273393 - DNA, 25 bp, Homo sapien
agtgggatcagtttgctttcttcca

SEQ ID NO: 4273394 - DNA, 25 bp, Homo sapien
aaaaatgagtgggatcagtttgctt

SEQ ID NO: 4273395 - DNA, 25 bp, Homo sapien
tgagtgggatcagtttgctttcttc

SEQ ID NO: 4273396 - DNA, 25 bp, Homo sapien
aatgagtgggatcagtttgctttct

SEQ ID NO: 4273397 - DNA, 25 bp, Homo sapien
ggctgggatgattcaaggaaggctc

SEQ ID NO: 4273398 - DNA, 25 bp, Homo sapien
gggatgactcgtctttgtttcatga

SEQ ID NO: 4273399 - DNA, 25 bp, Homo sapien
ttcatgacgtttgcggcctcagctg

SEQ ID NO: 4273400 - DNA, 25 bp, Homo sapien
ggtcatgaatttcggcaggacacag

SEQ ID NO: 4273401 - DNA, 25 bp, Homo sapien
tcaatagatgtccaatacagccctg

SEQ ID NO: 4273402 - DNA, 25 bp, Homo sapien
gatgtccaatacagccctgtaatat

SEQ ID NO: 4273403 - DNA, 25 bp, Homo sapien
aatagatgtccaatacagccctgta

SEQ ID NO: 4273404 - DNA, 25 bp, Homo sapien
tagatgtccaatacagccctgtaat

SEQ ID NO: 4273405 - DNA, 25 bp, Homo sapien
ccagctgagggctttggcctctcac

SEQ ID NO: 4273406 - DNA, 25 bp, Homo sapien
gaaaccacatgtaagaagcatgctc

SEQ ID NO: 4273407 - DNA, 25 bp, Homo sapien
tggccacctttctctaatgattctt

SEQ ID NO: 4273408 - DNA, 25 bp, Homo sapien
caagacatgattctgtattcatccc

SEQ ID NO: 4273409 - DNA, 25 bp, Homo sapien
tgctcacatgtaagaggtatgcaca

SEQ ID NO: 4273410 - DNA, 25 bp, Homo sapien
gaggaatggttttggtgcaacctac

SEQ ID NO: 4273411 - DNA, 25 bp, Homo sapien
ttaatggaaacaagatactggagtg

SEQ ID NO: 4273412 - DNA, 25 bp, Homo sapien
caatgaaactgcaccaacatggcaa

SEQ ID NO: 4273413 - DNA, 25 bp, Homo sapien
tgcaacctactgtaaaattaaggag

SEQ ID NO: 4273414 - DNA, 25 bp, Homo sapien
ttaataacattttcacaacacataa

SEQ ID NO: 4273415 - DNA, 25 bp, Homo sapien
gaaagttgggttgtgttcagtcatc

SEQ ID NO: 4273416 - DNA, 25 bp, Homo sapien
caggttctaaaagaatgtgctcata

SEQ ID NO: 4273417 - DNA, 25 bp, Homo sapien
gtcatcgcgactagcagtttcagag

SEQ ID NO: 4273418 - DNA, 25 bp, Homo sapien
ctgggtcaggttctaaaagaatgtg

SEQ ID NO: 4273419 - DNA, 25 bp, Homo sapien
taactgggtacattgcactctgaca

SEQ ID NO: 4273420 - DNA, 25 bp, Homo sapien
tctgcccaaggaagtctatgagtac

SEQ ID NO: 4273421 - DNA, 25 bp, Homo sapien
gaggcacagtggactacccttatca

SEQ ID NO: 4273422 - DNA, 25 bp, Homo sapien
ccatgtgatttgctaggcagaggct

SEQ ID NO: 4273423 - DNA, 25 bp, Homo sapien
tgtggaggagacatctcaggtcctg

SEQ ID NO: 4273424 - DNA, 25 bp, Homo sapien
tcacattgcagatatccaaagcaca

SEQ ID NO: 4273425 - DNA, 25 bp, Homo sapien
taaatctgatccctactgtgtggag

SEQ ID NO: 4273426 - DNA, 25 bp, Homo sapien
aaatgtggtttcagattaacagagc

SEQ ID NO: 4273427 - DNA, 25 bp, Homo sapien
acacttctctgcatgaatacaactg

SEQ ID NO: 4273428 - DNA, 25 bp, Homo sapien
tctctgcatgaatacaactgcatga

SEQ ID NO: 4273429 - DNA, 25 bp, Homo sapien
acttctctgcatgaatacaactgca

SEQ ID NO: 4273430 - DNA, 25 bp, Homo sapien
gcatgaatacaactgcatgatactt

SEQ ID NO: 4273431 - DNA, 25 bp, Homo sapien
taagacatctcgaatgagagccaga

SEQ ID NO: 4273432 - DNA, 25 bp, Homo sapien
gtcagaatcaacactggccttctcc

SEQ ID NO: 4273433 - DNA, 25 bp, Homo sapien
tgagagccagaagattgctgtcaga

SEQ ID NO: 4273434 - DNA, 25 bp, Homo sapien
gggaagtaagacatctcgaatgaga

SEQ ID NO: 4273435 - DNA, 25 bp, Homo sapien
ctggttcacgagtagagatgtggtt

SEQ ID NO: 4273436 - DNA, 25 bp, Homo sapien
ccaagggtggcagtatatagtcaac

SEQ ID NO: 4273437 - DNA, 25 bp, Homo sapien
caccaagggtggcagtatatagtca

SEQ ID NO: 4273438 - DNA, 25 bp, Homo sapien
ggacaccaagggtggcagtatatag

SEQ ID NO: 4273439 - DNA, 25 bp, Homo sapien
agggtggcagtatatagtcaacaac

SEQ ID NO: 4273440 - DNA, 25 bp, Homo sapien
gtggagcgatagtctttcaataaaa

SEQ ID NO: 4273441 - DNA, 25 bp, Homo sapien
cgtggagcgatagtctttcaataaa

SEQ ID NO: 4273442 - DNA, 25 bp, Homo sapien
tcttgataaattcttctgatgctgt

SEQ ID NO: 4273443 - DNA, 25 bp, Homo sapien
atgtgatcttgataaattcttctga

SEQ ID NO: 4273444 - DNA, 25 bp, Homo sapien
tggctccatctatgttcgtttctcc

SEQ ID NO: 4273445 - DNA, 25 bp, Homo sapien
gtttctcctgagtctacagatttaa

SEQ ID NO: 4273446 - DNA, 25 bp, Homo sapien
catctatgttcgtttctcctgagtc

SEQ ID NO: 4273447 - DNA, 25 bp, Homo sapien
cctgagtctacagatttaatatgac

SEQ ID NO: 4273448 - DNA, 25 bp, Homo sapien
gtcacttccctagagacaaataaat

SEQ ID NO: 4273449 - DNA, 25 bp, Homo sapien
tattacagtcaacagataaaaatat

SEQ ID NO: 4273450 - DNA, 25 bp, Homo sapien
caaacagtagaggaagtcacaattt

SEQ ID NO: 4273451 - DNA, 25 bp, Homo sapien
ctacaaacagtagaggaagtcacaa

SEQ ID NO: 4273452 - DNA, 25 bp, Homo sapien
cagtagaggaagtcacaattttatt

SEQ ID NO: 4273453 - DNA, 25 bp, Homo sapien
aacagtagaggaagtcacaatttta

SEQ ID NO: 4273454 - DNA, 25 bp, Homo sapien
tcttctgtcacaacttgaggtcgaa

SEQ ID NO: 4273455 - DNA, 25 bp, Homo sapien
tagttccatagctgaaaagaaactc

SEQ ID NO: 4273456 - DNA, 25 bp, Homo sapien
aagaatagttccatagctgaaaaga

SEQ ID NO: 4273457 - DNA, 25 bp, Homo sapien
ctgtcacaacttgaggtcgaaatac

SEQ ID NO: 4273458 - DNA, 25 bp, Homo sapien
gaggtgaagcactacaggcatcagg

SEQ ID NO: 4273459 - DNA, 25 bp, Homo sapien
tgatgggtgtttacgtccagaaaca

SEQ ID NO: 4273460 - DNA, 25 bp, Homo sapien
cattagccaaggagttaagaatgtc

SEQ ID NO: 4273461 - DNA, 25 bp, Homo sapien
ggcatcagggggagacacaacttca

SEQ ID NO: 4273462 - DNA, 25 bp, Homo sapien
gggcctgaggatgagactccaattt

SEQ ID NO: 4273463 - DNA, 25 bp, Homo sapien
agaaatggggcctgaggatgagact

SEQ ID NO: 4273464 - DNA, 25 bp, Homo sapien
aatggggcctgaggatgagactcca

SEQ ID NO: 4273465 - DNA, 25 bp, Homo sapien
gcctgaggatgagactccaatttac

SEQ ID NO: 4273466 - DNA, 25 bp, Homo sapien
caggtattcattgccactttgctgc

SEQ ID NO: 4273467 - DNA, 25 bp, Homo sapien
ccaggcatttggacaggtattcatt

SEQ ID NO: 4273468 - DNA, 25 bp, Homo sapien
ctccttgcctggagtggtctttctg

SEQ ID NO: 4273469 - DNA, 25 bp, Homo sapien
ctgctccttgcctggagtggtcttt

SEQ ID NO: 4273470 - DNA, 25 bp, Homo sapien
agtctccctggttaccatcatccat

SEQ ID NO: 4273471 - DNA, 25 bp, Homo sapien
tgatttcaccatgcaaaaggccctg

SEQ ID NO: 4273472 - DNA, 25 bp, Homo sapien
caaaaggccctgtaaggcagtctcc

SEQ ID NO: 4273473 - DNA, 25 bp, Homo sapien
agggcaacaagtccactgatttcac

SEQ ID NO: 4273474 - DNA, 25 bp, Homo sapien
ttcaggactccagttgctagtgcag

SEQ ID NO: 4273475 - DNA, 25 bp, Homo sapien
catcctgggctaccgatatgaggct

SEQ ID NO: 4273476 - DNA, 25 bp, Homo sapien
taatggagcaaaggtcatcctgggc

SEQ ID NO: 4273477 - DNA, 25 bp, Homo sapien
gaatacaatacctgggctgcaaagc

SEQ ID NO: 4273478 - DNA, 25 bp, Homo sapien
catgttgaggggctgtcaagtaaac

SEQ ID NO: 4273479 - DNA, 25 bp, Homo sapien
tttgctctaatgcatgttgaggggc

SEQ ID NO: 4273480 - DNA, 25 bp, Homo sapien
gggctgtcaagtaaacggataattg

SEQ ID NO: 4273481 - DNA, 25 bp, Homo sapien
agtaaacggataattgtggagacaa

SEQ ID NO: 4273482 - DNA, 25 bp, Homo sapien
tgggacacacatgtagccatgaggg

SEQ ID NO: 4273483 - DNA, 25 bp, Homo sapien
tggtcctcctcaatcaaggaaggat

SEQ ID NO: 4273484 - DNA, 25 bp, Homo sapien
tctagcaagggagcatagctacctg

SEQ ID NO: 4273485 - DNA, 25 bp, Homo sapien
accgaagtatggtcctcctcaatca

SEQ ID NO: 4273486 - DNA, 25 bp, Homo sapien
tggttgtgattgttcacttttaaca

SEQ ID NO: 4273487 - DNA, 25 bp, Homo sapien
ggttgtgattgttcacttttaacat

SEQ ID NO: 4273488 - DNA, 25 bp, Homo sapien
gtggttgtgattgttcacttttaac

SEQ ID NO: 4273489 - DNA, 25 bp, Homo sapien
gttgtgattgttcacttttaacatc

SEQ ID NO: 4273490 - DNA, 25 bp, Homo sapien
acagttgttttggataaaggaatct

SEQ ID NO: 4273491 - DNA, 25 bp, Homo sapien
ggataaaggaatcttcttctattaa

SEQ ID NO: 4273492 - DNA, 25 bp, Homo sapien
tgttttggataaaggaatcttcttc

SEQ ID NO: 4273493 - DNA, 25 bp, Homo sapien
aggaatcttcttctattaaggacat

SEQ ID NO: 4273494 - DNA, 25 bp, Homo sapien
tcaagcactcatgatgcaaatggct

SEQ ID NO: 4273495 - DNA, 25 bp, Homo sapien
tttaagatgaaaacctggctacagt

SEQ ID NO: 4273496 - DNA, 25 bp, Homo sapien
catgtggcttaaacgactgctggat

SEQ ID NO: 4273497 - DNA, 25 bp, Homo sapien
tgacacccaagtagctaatgcagat

SEQ ID NO: 4273498 - DNA, 25 bp, Homo sapien
tggtacaaaggtttggcaaagttca

SEQ ID NO: 4273499 - DNA, 25 bp, Homo sapien
cactaaaaggctcttggaacatgtt

SEQ ID NO: 4273500 - DNA, 25 bp, Homo sapien
ggaacatgttcagatgaacattctg

SEQ ID NO: 4273501 - DNA, 25 bp, Homo sapien
aggcctcttgggataaaaaatgaat

SEQ ID NO: 4273502 - DNA, 25 bp, Homo sapien
tcttggattagtctttgaagatgaa

SEQ ID NO: 4273503 - DNA, 25 bp, Homo sapien
tggcagcgaataaggtcaacatgta

SEQ ID NO: 4273504 - DNA, 25 bp, Homo sapien
gattagtctttgaagatgaatccca

SEQ ID NO: 4273505 - DNA, 25 bp, Homo sapien
caacatggcagcgaataaggtcaac

SEQ ID NO: 4273506 - DNA, 25 bp, Homo sapien
ccagggagtttattactgagttcag

SEQ ID NO: 4273507 - DNA, 25 bp, Homo sapien
ggagtttattactgagttcagtccc

SEQ ID NO: 4273508 - DNA, 25 bp, Homo sapien
gcagaggccagggagtttattactg

SEQ ID NO: 4273509 - DNA, 25 bp, Homo sapien
gaggccagggagtttattactgagt

SEQ ID NO: 4273510 - DNA, 25 bp, Homo sapien
aaggcagtaggagaatggcgagtga

SEQ ID NO: 4273511 - DNA, 25 bp, Homo sapien
gagaatggcgagtgattctacacaa

SEQ ID NO: 4273512 - DNA, 25 bp, Homo sapien
aggagaatggcgagtgattctacac

SEQ ID NO: 4273513 - DNA, 25 bp, Homo sapien
aatggcgagtgattctacacaaggc

SEQ ID NO: 4273514 - DNA, 25 bp, Homo sapien
tgaataggtaccacaaaatgggtcc

SEQ ID NO: 4273515 - DNA, 25 bp, Homo sapien
cctaagagaatcagcagtggagtgt

SEQ ID NO: 4273516 - DNA, 25 bp, Homo sapien
gagcagaaaaggtggtacagacatt

SEQ ID NO: 4273517 - DNA, 25 bp, Homo sapien
tgccatgtgattcacaacacgctct

SEQ ID NO: 4273518 - DNA, 25 bp, Homo sapien
ttgcccttcaagtttgtgcccatta

SEQ ID NO: 4273519 - DNA, 25 bp, Homo sapien
cttcaagtttgtgcccattagcaaa

SEQ ID NO: 4273520 - DNA, 25 bp, Homo sapien
cccttcaagtttgtgcccattagca

SEQ ID NO: 4273521 - DNA, 25 bp, Homo sapien
tgctttgcccttcaagtttgtgccc

SEQ ID NO: 4273522 - DNA, 25 bp, Homo sapien
ttactgtttaatctaggtgatggaa

SEQ ID NO: 4273523 - DNA, 25 bp, Homo sapien
taataggttgtagaggattcagagt

SEQ ID NO: 4273524 - DNA, 25 bp, Homo sapien
ggaaacaaaggtgattattacagct

SEQ ID NO: 4273525 - DNA, 25 bp, Homo sapien
tataataataggttgtagaggattc

SEQ ID NO: 4273526 - DNA, 25 bp, Homo sapien
cccgaaggcacctcattagcactgt

SEQ ID NO: 4273527 - DNA, 25 bp, Homo sapien
actgtgtatgcagccaagggaacag

SEQ ID NO: 4273528 - DNA, 25 bp, Homo sapien
ttcccgaaggcacctcattagcact

SEQ ID NO: 4273529 - DNA, 25 bp, Homo sapien
atgcagccaagggaacagcccagca

SEQ ID NO: 4273530 - DNA, 25 bp, Homo sapien
ctgggtggctacaagatagatcagc

SEQ ID NO: 4273531 - DNA, 25 bp, Homo sapien
ttccctaattaattcagttaagaga

SEQ ID NO: 4273532 - DNA, 25 bp, Homo sapien
tggctacaagatagatcagctcccc

SEQ ID NO: 4273533 - DNA, 25 bp, Homo sapien
tacaagatagatcagctccccaagg

SEQ ID NO: 4273534 - DNA, 25 bp, Homo sapien
gagtgaaggaacagctgacgttcac

SEQ ID NO: 4273535 - DNA, 25 bp, Homo sapien
cacaacctaagttgcagccagcaag

SEQ ID NO: 4273536 - DNA, 25 bp, Homo sapien
tccccaaacaggactccaagagagt

SEQ ID NO: 4273537 - DNA, 25 bp, Homo sapien
tcttctcttggagcctttgaccttg

SEQ ID NO: 4273538 - DNA, 25 bp, Homo sapien
gacaggcactactgaaacaactgca

SEQ ID NO: 4273539 - DNA, 25 bp, Homo sapien
gatgctgactaactcaaaacctccc

SEQ ID NO: 4273540 - DNA, 25 bp, Homo sapien
tcctgataagagatcatggaccatg

SEQ ID NO: 4273541 - DNA, 25 bp, Homo sapien
catcttctgcttcacctagggccta

SEQ ID NO: 4273542 - DNA, 25 bp, Homo sapien
caaatttaggagcctcgggattctt

SEQ ID NO: 4273543 - DNA, 25 bp, Homo sapien
ggagcctcgggattcttcagttaac

SEQ ID NO: 4273544 - DNA, 25 bp, Homo sapien
atttaggagcctcgggattcttcag

SEQ ID NO: 4273545 - DNA, 25 bp, Homo sapien
taggagcctcgggattcttcagtta

SEQ ID NO: 4273546 - DNA, 25 bp, Homo sapien
caaatatgttagtctcatacctgct

SEQ ID NO: 4273547 - DNA, 25 bp, Homo sapien
atatgttagtctcatacctgctgcc

SEQ ID NO: 4273548 - DNA, 25 bp, Homo sapien
aaatatgttagtctcatacctgctg

SEQ ID NO: 4273549 - DNA, 25 bp, Homo sapien
aatatgttagtctcatacctgctgc

SEQ ID NO: 4273550 - DNA, 25 bp, Homo sapien
aacacttcattggttcccatgtgag

SEQ ID NO: 4273551 - DNA, 25 bp, Homo sapien
caaggaggcagtaacatatctctca

SEQ ID NO: 4273552 - DNA, 25 bp, Homo sapien
gactgccccactggagtattacttg

SEQ ID NO: 4273553 - DNA, 25 bp, Homo sapien
tggagtcagcacagttcagtttaag

SEQ ID NO: 4273554 - DNA, 25 bp, Homo sapien
aaagagatagcagaaacctggacag

SEQ ID NO: 4273555 - DNA, 25 bp, Homo sapien
gaacatgctcatcacagcgaaaggc

SEQ ID NO: 4273556 - DNA, 25 bp, Homo sapien
taatgataacttcccagtaaggacc

SEQ ID NO: 4273557 - DNA, 25 bp, Homo sapien
atggtaatgataacttcccagtaag

SEQ ID NO: 4273558 - DNA, 25 bp, Homo sapien
tccatagtggtcagaaaagaggctt

SEQ ID NO: 4273559 - DNA, 25 bp, Homo sapien
ttaatccatagtggtcagaaaagag

SEQ ID NO: 4273560 - DNA, 25 bp, Homo sapien
ttgtgatctaaaatgtggtctaacc

SEQ ID NO: 4273561 - DNA, 25 bp, Homo sapien
tctaaaatgtggtctaaccttgaga

SEQ ID NO: 4273562 - DNA, 25 bp, Homo sapien
tgtatcaaggcctctctctttaggt

SEQ ID NO: 4273563 - DNA, 25 bp, Homo sapien
cagtctctgtcttttgacgggagag

SEQ ID NO: 4273564 - DNA, 25 bp, Homo sapien
aactctatgccttaatatcatgccc

SEQ ID NO: 4273565 - DNA, 25 bp, Homo sapien
tatgtagtgaccttctttggctcct

SEQ ID NO: 4273566 - DNA, 25 bp, Homo sapien
tcgtaagacctccactatgctgtta

SEQ ID NO: 4273567 - DNA, 25 bp, Homo sapien
caccacatgcaagctatatgtacat

SEQ ID NO: 4273568 - DNA, 25 bp, Homo sapien
caagctatatgtacatcgtaagacc

SEQ ID NO: 4273569 - DNA, 25 bp, Homo sapien
tgtacatcgtaagacctccactatg

SEQ ID NO: 4273570 - DNA, 25 bp, Homo sapien
gttgtaaacaccatggcactatgat

SEQ ID NO: 4273571 - DNA, 25 bp, Homo sapien
ttgtaaacaccatggcactatgatt

SEQ ID NO: 4273572 - DNA, 25 bp, Homo sapien
tttcaggattttagctgccgccatt

SEQ ID NO: 4273573 - DNA, 25 bp, Homo sapien
tgtcccagacagtcttaaagtatta

SEQ ID NO: 4273574 - DNA, 25 bp, Homo sapien
tcccagacagtcttaaagtattact

SEQ ID NO: 4273575 - DNA, 25 bp, Homo sapien
tattactatttcaggattttagctg

SEQ ID NO: 4273576 - DNA, 25 bp, Homo sapien
gatacaagaacctcgggaattaaca

SEQ ID NO: 4273577 - DNA, 25 bp, Homo sapien
gcatttcgaactaataaagcatcag

SEQ ID NO: 4273578 - DNA, 25 bp, Homo sapien
tcctctcagttgaggcagcaccagg

SEQ ID NO: 4273579 - DNA, 25 bp, Homo sapien
tacccatgaagagaacagtactgga

SEQ ID NO: 4273580 - DNA, 25 bp, Homo sapien
gctgatacagttttatttattttga

SEQ ID NO: 4273581 - DNA, 25 bp, Homo sapien
tgatacagttttatttattttgaaa

SEQ ID NO: 4273582 - DNA, 25 bp, Homo sapien
tatttattttgaaatatttgtcagt

SEQ ID NO: 4273583 - DNA, 25 bp, Homo sapien
tgctgatacagttttatttattttg

SEQ ID NO: 4273584 - DNA, 25 bp, Homo sapien
gacagttcaaaatcccgattccaat

SEQ ID NO: 4273585 - DNA, 25 bp, Homo sapien
agacagttcaaaatcccgattccaa

SEQ ID NO: 4273586 - DNA, 25 bp, Homo sapien
acagttcaaaatcccgattccaatg

SEQ ID NO: 4273587 - DNA, 25 bp, Homo sapien
caacaacaggtgtattttcctggag

SEQ ID NO: 4273588 - DNA, 25 bp, Homo sapien
ctcaacaacaggtgtattttcctgg

SEQ ID NO: 4273589 - DNA, 25 bp, Homo sapien
tcaacaacaggtgtattttcctgga

SEQ ID NO: 4273590 - DNA, 25 bp, Homo sapien
aacaacaggtgtattttcctggagc

SEQ ID NO: 4273591 - DNA, 25 bp, Homo sapien
taaaccaattacgtgagcaaccttg

SEQ ID NO: 4273592 - DNA, 25 bp, Homo sapien
agccagtaaaccaattacgtgagca

SEQ ID NO: 4273593 - DNA, 25 bp, Homo sapien
aattacgtgagcaaccttggcccgt

SEQ ID NO: 4273594 - DNA, 25 bp, Homo sapien
accaattacgtgagcaaccttggcc

SEQ ID NO: 4273595 - DNA, 25 bp, Homo sapien
atcccagtttggagctatccgcaaa

SEQ ID NO: 4273596 - DNA, 25 bp, Homo sapien
atatcccagtttggagctatccgca

SEQ ID NO: 4273597 - DNA, 25 bp, Homo sapien
tatcccagtttggagctatccgcaa

SEQ ID NO: 4273598 - DNA, 25 bp, Homo sapien
tcccagtttggagctatccgcaaat

SEQ ID NO: 4273599 - DNA, 25 bp, Homo sapien
aaaggagattcagcttggctcggga

SEQ ID NO: 4273600 - DNA, 25 bp, Homo sapien
aaggagattcagcttggctcgggag

SEQ ID NO: 4273601 - DNA, 25 bp, Homo sapien
caaaggagattcagcttggctcggg

SEQ ID NO: 4273602 - DNA, 25 bp, Homo sapien
aggagattcagcttggctcgggagg

SEQ ID NO: 4273603 - DNA, 25 bp, Homo sapien
tcaaatttaactggtggctgtttca

SEQ ID NO: 4273604 - DNA, 25 bp, Homo sapien
tgcatcaaatttaactggtggctgt

SEQ ID NO: 4273605 - DNA, 25 bp, Homo sapien
catcaaatttaactggtggctgttt

SEQ ID NO: 4273606 - DNA, 25 bp, Homo sapien
ctgaatatgttggtagatgcaatat

SEQ ID NO: 4273607 - DNA, 25 bp, Homo sapien
caagtattatgccactccaattacc

SEQ ID NO: 4273608 - DNA, 25 bp, Homo sapien
attaatcaagtattatgccactcca

SEQ ID NO: 4273609 - DNA, 25 bp, Homo sapien
gaggaacagatagggattatcctgc

SEQ ID NO: 4273610 - DNA, 25 bp, Homo sapien
aggaggaacagatagggattatcct

SEQ ID NO: 4273611 - DNA, 25 bp, Homo sapien
caactcagttgttagagtgtctttc

SEQ ID NO: 4273612 - DNA, 25 bp, Homo sapien
ctacaactcagttgttagagtgtct

SEQ ID NO: 4273613 - DNA, 25 bp, Homo sapien
ctcagttgttagagtgtctttctgc

SEQ ID NO: 4273614 - DNA, 25 bp, Homo sapien
tacaactcagttgttagagtgtctt

SEQ ID NO: 4273615 - DNA, 25 bp, Homo sapien
ggtcctgctgactcaggtgtccact

SEQ ID NO: 4273616 - DNA, 25 bp, Homo sapien
tccaggtcctgctgactcaggtgtc

SEQ ID NO: 4273617 - DNA, 25 bp, Homo sapien
tgggattccaggtcctgctgactca

SEQ ID NO: 4273618 - DNA, 25 bp, Homo sapien
gggattccaggtcctgctgactcag

SEQ ID NO: 4273619 - DNA, 25 bp, Homo sapien
agaagtcttctgtggtgaacagtga

SEQ ID NO: 4273620 - DNA, 25 bp, Homo sapien
tgagtcatatcctcaccaggactta

SEQ ID NO: 4273621 - DNA, 25 bp, Homo sapien
ggacttacttccactgcagtgctag

SEQ ID NO: 4273622 - DNA, 25 bp, Homo sapien
ttggtcagaggagaagtcttctgtg

SEQ ID NO: 4273623 - DNA, 25 bp, Homo sapien
agttaacattattcaattccagaca

SEQ ID NO: 4273624 - DNA, 25 bp, Homo sapien
aattgaccctcaagagtactcttag

SEQ ID NO: 4273625 - DNA, 25 bp, Homo sapien
tggattcattcaattgaccctcaag

SEQ ID NO: 4273626 - DNA, 25 bp, Homo sapien
tcttaggccgaaactcagttggatt

SEQ ID NO: 4273627 - DNA, 25 bp, Homo sapien
ctcaagagtactcttaggccgaaac

SEQ ID NO: 4273628 - DNA, 25 bp, Homo sapien
gacctagtggttgaccactcttgtg

SEQ ID NO: 4273629 - DNA, 25 bp, Homo sapien
ctagtctgaaagagtgacctagtgg

SEQ ID NO: 4273630 - DNA, 25 bp, Homo sapien
tagtggttgaccactcttgtgccct

SEQ ID NO: 4273631 - DNA, 25 bp, Homo sapien
aagagtgacctagtggttgaccact

SEQ ID NO: 4273632 - DNA, 25 bp, Homo sapien
ttcgacgcttgattcctgatctgct

SEQ ID NO: 4273633 - DNA, 25 bp, Homo sapien
ctgagactgagatcttcgacgcttg

SEQ ID NO: 4273634 - DNA, 25 bp, Homo sapien
tgagatcttcgacgcttgattcctg

SEQ ID NO: 4273635 - DNA, 25 bp, Homo sapien
gctgcagtagccttgtccaagtcaa

SEQ ID NO: 4273636 - DNA, 25 bp, Homo sapien
tctttgaagtaacccatcaagcaaa

SEQ ID NO: 4273637 - DNA, 25 bp, Homo sapien
ttgaagtaacccatcaagcaaatta

SEQ ID NO: 4273638 - DNA, 25 bp, Homo sapien
gatctctttgaagtaacccatcaag

SEQ ID NO: 4273639 - DNA, 25 bp, Homo sapien
ctgaggatctctttgaagtaaccca

SEQ ID NO: 4273640 - DNA, 25 bp, Homo sapien
ctttcggaataggtggcaaaggatc

SEQ ID NO: 4273641 - DNA, 25 bp, Homo sapien
cggaataggtggcaaaggatcttca

SEQ ID NO: 4273642 - DNA, 25 bp, Homo sapien
gaataggtggcaaaggatcttcaca

SEQ ID NO: 4273643 - DNA, 25 bp, Homo sapien
ttcggaataggtggcaaaggatctt

SEQ ID NO: 4273644 - DNA, 25 bp, Homo sapien
gaaaagtcagcacccctcacaactt

SEQ ID NO: 4273645 - DNA, 25 bp, Homo sapien
atggaaaagtcagcacccctcacaa

SEQ ID NO: 4273646 - DNA, 25 bp, Homo sapien
cctcacaacttctggtgctgtatat

SEQ ID NO: 4273647 - DNA, 25 bp, Homo sapien
aagtcagcacccctcacaacttctg

SEQ ID NO: 4273648 - DNA, 25 bp, Homo sapien
aaagtatgaagaacagctcggttag

SEQ ID NO: 4273649 - DNA, 25 bp, Homo sapien
acagctcggttaggcatttgtattg

SEQ ID NO: 4273650 - DNA, 25 bp, Homo sapien
aagaacagctcggttaggcatttgt

SEQ ID NO: 4273651 - DNA, 25 bp, Homo sapien
tatgaagaacagctcggttaggcat

SEQ ID NO: 4273652 - DNA, 25 bp, Homo sapien
gcaaaagttgctaaacttcagtgtg

SEQ ID NO: 4273653 - DNA, 25 bp, Homo sapien
agcaaaagttgctaaacttcagtgt

SEQ ID NO: 4273654 - DNA, 25 bp, Homo sapien
aagcaaaagttgctaaacttcagtg

SEQ ID NO: 4273655 - DNA, 25 bp, Homo sapien
aagagaatgccaagtttatgaagat

SEQ ID NO: 4273656 - DNA, 25 bp, Homo sapien
ttctctcacaacatcttctgggagg

SEQ ID NO: 4273657 - DNA, 25 bp, Homo sapien
tccactaatcaggtcaattccaaat

SEQ ID NO: 4273658 - DNA, 25 bp, Homo sapien
gtttatgaagatgatgtaatccact

SEQ ID NO: 4273659 - DNA, 25 bp, Homo sapien
tgcaagaggttgattaaaatcaccc

SEQ ID NO: 4273660 - DNA, 25 bp, Homo sapien
ctgcaagaggttgattaaaatcacc

SEQ ID NO: 4273661 - DNA, 25 bp, Homo sapien
gcaagaggttgattaaaatcaccca

SEQ ID NO: 4273662 - DNA, 25 bp, Homo sapien
caagaggttgattaaaatcacccat

SEQ ID NO: 4273663 - DNA, 25 bp, Homo sapien
caaggtcccagttacttctctacca

SEQ ID NO: 4273664 - DNA, 25 bp, Homo sapien
tagctaaagtcaataataactgtac

SEQ ID NO: 4273665 - DNA, 25 bp, Homo sapien
tagtacaacaagtagctaaagtcaa

SEQ ID NO: 4273666 - DNA, 25 bp, Homo sapien
taaagggtcaagattacaacagcca

SEQ ID NO: 4273667 - DNA, 25 bp, Homo sapien
tattacatctggtcagagatcagaa

SEQ ID NO: 4273668 - DNA, 25 bp, Homo sapien
tgacgtgcagttacaaacgtaggca

SEQ ID NO: 4273669 - DNA, 25 bp, Homo sapien
tgtacatccatggaagtaatcaacc

SEQ ID NO: 4273670 - DNA, 25 bp, Homo sapien
aacgtaggcatgttttacagttagg

SEQ ID NO: 4273671 - DNA, 25 bp, Homo sapien
tgtgcagagttccaccactagccag

SEQ ID NO: 4273672 - DNA, 25 bp, Homo sapien
ccagaggtggttgcttgtttcatac

SEQ ID NO: 4273673 - DNA, 25 bp, Homo sapien
tgttttatttcacgggtgagacgga

SEQ ID NO: 4273674 - DNA, 25 bp, Homo sapien
ttgtgttttatttcacgggtgagac

SEQ ID NO: 4273675 - DNA, 25 bp, Homo sapien
gtatcaaagatctgaacctcaccag

SEQ ID NO: 4273676 - DNA, 25 bp, Homo sapien
ttccctggcaatacgtgtcacctca

SEQ ID NO: 4273677 - DNA, 25 bp, Homo sapien
cacacattgctacgtttctttcctg

SEQ ID NO: 4273678 - DNA, 25 bp, Homo sapien
tcacctcagtgattggttttctgag

SEQ ID NO: 4273679 - DNA, 25 bp, Homo sapien
atacctgggatgctactcaggacac

SEQ ID NO: 4273680 - DNA, 25 bp, Homo sapien
tacctgggatgctactcaggacact

SEQ ID NO: 4273681 - DNA, 25 bp, Homo sapien
acttatcagtacaaagaatggctac

SEQ ID NO: 4273682 - DNA, 25 bp, Homo sapien
tcaggccttttgcacttatcagtac

SEQ ID NO: 4273683 - DNA, 25 bp, Homo sapien
cgccctttatagacaacagtcttgc

SEQ ID NO: 4273684 - DNA, 25 bp, Homo sapien
attgattgttcccttccgtcgccct

SEQ ID NO: 4273685 - DNA, 25 bp, Homo sapien
gacttctcacatacaatagaataac

SEQ ID NO: 4273686 - DNA, 25 bp, Homo sapien
cgacttctcacatacaatagaataa

SEQ ID NO: 4273687 - DNA, 25 bp, Homo sapien
acttctcacatacaatagaataaca

SEQ ID NO: 4273688 - DNA, 25 bp, Homo sapien
tgggccgacttctcacatacaatag

SEQ ID NO: 4273689 - DNA, 25 bp, Homo sapien
taagagatggcgtccataaagcaca

SEQ ID NO: 4273690 - DNA, 25 bp, Homo sapien
tgtgcccttaactaacgcccggata

SEQ ID NO: 4273691 - DNA, 25 bp, Homo sapien
cacccaggtcctagaagaggcgtcc

SEQ ID NO: 4273692 - DNA, 25 bp, Homo sapien
gacgcggtccgctctgggaagttaa

SEQ ID NO: 4273693 - DNA, 25 bp, Homo sapien
caggcctgcgcgctcttccgcgacc

SEQ ID NO: 4273694 - DNA, 25 bp, Homo sapien
ccgccccggcaggcctgcgcgctct

SEQ ID NO: 4273695 - DNA, 25 bp, Homo sapien
cgccccggcaggcctgcgcgctctt

SEQ ID NO: 4273696 - DNA, 25 bp, Homo sapien
cggcaggcctgcgcgctcttccgcg

SEQ ID NO: 4273697 - DNA, 25 bp, Homo sapien
gcctctgcctcaggacaggtccaca

SEQ ID NO: 4273698 - DNA, 25 bp, Homo sapien
cgcggttgcgcgcatctcggcctct

SEQ ID NO: 4273699 - DNA, 25 bp, Homo sapien
tctgcctcaggacaggtccacaggc

SEQ ID NO: 4273700 - DNA, 25 bp, Homo sapien
ttggctgctcccgcggttgcgcgca

SEQ ID NO: 4273701 - DNA, 25 bp, Homo sapien
aagccgaccagccttacggaggcga

SEQ ID NO: 4273702 - DNA, 25 bp, Homo sapien
cggaagaagccgaccagccttacgg

SEQ ID NO: 4273703 - DNA, 25 bp, Homo sapien
aagaagccgaccagccttacggagg

SEQ ID NO: 4273704 - DNA, 25 bp, Homo sapien
agccgaccagccttacggaggcgac

SEQ ID NO: 4273705 - DNA, 25 bp, Homo sapien
taggtcactagggcgttgttgaaga

SEQ ID NO: 4273706 - DNA, 25 bp, Homo sapien
tcactagggcgttgttgaagagttt

SEQ ID NO: 4273707 - DNA, 25 bp, Homo sapien
ctaggtcactagggcgttgttgaag

SEQ ID NO: 4273708 - DNA, 25 bp, Homo sapien
ggtcactagggcgttgttgaagagt

SEQ ID NO: 4273709 - DNA, 25 bp, Homo sapien
ctacttctgcctcatgctggatgaa

SEQ ID NO: 4273710 - DNA, 25 bp, Homo sapien
ttctgcctcatgctggatgaaggga

SEQ ID NO: 4273711 - DNA, 25 bp, Homo sapien
catgctggatgaagggaggacttac

SEQ ID NO: 4273712 - DNA, 25 bp, Homo sapien
tcaagggaagccagttgcctctgtt

SEQ ID NO: 4273713 - DNA, 25 bp, Homo sapien
caagtagttcatcagctcagtcagg

SEQ ID NO: 4273714 - DNA, 25 bp, Homo sapien
tgctccaagtagttcatcagctcag

SEQ ID NO: 4273715 - DNA, 25 bp, Homo sapien
gcagctgctccaagtagttcatcag

SEQ ID NO: 4273716 - DNA, 25 bp, Homo sapien
tagttcatcagctcagtcaggccca

SEQ ID NO: 4273717 - DNA, 25 bp, Homo sapien
tttatgcatatacagaaccacggga

SEQ ID NO: 4273718 - DNA, 25 bp, Homo sapien
ttagaatagggatataggatctcac

SEQ ID NO: 4273719 - DNA, 25 bp, Homo sapien
tcctgagtagcatgcgtgctgccac

SEQ ID NO: 4273720 - DNA, 25 bp, Homo sapien
gaagttgtccatcagttcctctggt

SEQ ID NO: 4273721 - DNA, 25 bp, Homo sapien
tctggtgaataaaccccatacgtct

SEQ ID NO: 4273722 - DNA, 25 bp, Homo sapien
gagttttgaaatgtggcgttctttg

SEQ ID NO: 4273723 - DNA, 25 bp, Homo sapien
ccatgctattgtgttaccaagcctg

SEQ ID NO: 4273724 - DNA, 25 bp, Homo sapien
gttaccaagcctgagttttgaaatg

SEQ ID NO: 4273725 - DNA, 25 bp, Homo sapien
ggactgagagtgagagatcccagat

SEQ ID NO: 4273726 - DNA, 25 bp, Homo sapien
tcttcctggctgtcaggatgtgttg

SEQ ID NO: 4273727 - DNA, 25 bp, Homo sapien
gtcaggatgtgttgccctggactga

SEQ ID NO: 4273728 - DNA, 25 bp, Homo sapien
ggtaacttagctcaagaaaatgaga

SEQ ID NO: 4273729 - DNA, 25 bp, Homo sapien
gctggatcagggtaacttagctcaa

SEQ ID NO: 4273730 - DNA, 25 bp, Homo sapien
gactgctggatcagggtaacttagc

SEQ ID NO: 4273731 - DNA, 25 bp, Homo sapien
gggagaatgaaagccgtggaggaaa

SEQ ID NO: 4273732 - DNA, 25 bp, Homo sapien
gtagcctgtacaaacgcttcccggc

SEQ ID NO: 4273733 - DNA, 25 bp, Homo sapien
accactgccattacccgttccctgc

SEQ ID NO: 4273734 - DNA, 25 bp, Homo sapien
tgtacaaacgcttcccggctgacca

SEQ ID NO: 4273735 - DNA, 25 bp, Homo sapien
acctccatcgtagcctgtacaaacg

SEQ ID NO: 4273736 - DNA, 25 bp, Homo sapien
ctgtgagcagtgacatggagggcac

SEQ ID NO: 4273737 - DNA, 25 bp, Homo sapien
acatggagggcaccgctgtcctcag

SEQ ID NO: 4273738 - DNA, 25 bp, Homo sapien
cagtgacatggagggcaccgctgtc

SEQ ID NO: 4273739 - DNA, 25 bp, Homo sapien
tgagcagtgacatggagggcaccgc

SEQ ID NO: 4273740 - DNA, 25 bp, Homo sapien
tgcctatatagagaactctgcccac

SEQ ID NO: 4273741 - DNA, 25 bp, Homo sapien
ctctgcctatatagagaactctgcc

SEQ ID NO: 4273742 - DNA, 25 bp, Homo sapien
ctgcctatatagagaactctgccca

SEQ ID NO: 4273743 - DNA, 25 bp, Homo sapien
tctgcctatatagagaactctgccc

SEQ ID NO: 4273744 - DNA, 25 bp, Homo sapien
tgcggccccttgaaagtaaagggca

SEQ ID NO: 4273745 - DNA, 25 bp, Homo sapien
catctggcacttgacccaaagggca

SEQ ID NO: 4273746 - DNA, 25 bp, Homo sapien
taagtcagacctacggttggcctgg

SEQ ID NO: 4273747 - DNA, 25 bp, Homo sapien
tgctgatattttggtctgcggcccc

SEQ ID NO: 4273748 - DNA, 25 bp, Homo sapien
gctccagaccctgtgtcttgttttc

SEQ ID NO: 4273749 - DNA, 25 bp, Homo sapien
tgttgtctttggcttttcgccagtg

SEQ ID NO: 4273750 - DNA, 25 bp, Homo sapien
agccctgtgagcagacctctccagc

SEQ ID NO: 4273751 - DNA, 25 bp, Homo sapien
tccagcttctgatggatgttgtctt

SEQ ID NO: 4273752 - DNA, 25 bp, Homo sapien
agtaaaggggatcctggttttcatg

SEQ ID NO: 4273753 - DNA, 25 bp, Homo sapien
caactccccagagggggcacaggtt

SEQ ID NO: 4273754 - DNA, 25 bp, Homo sapien
ggcctgttaggatgacaggacccac

SEQ ID NO: 4273755 - DNA, 25 bp, Homo sapien
tctgcagcgtttggccatttctgag

SEQ ID NO: 4273756 - DNA, 25 bp, Homo sapien
tggtgggtcagcatggatccgatcc

SEQ ID NO: 4273757 - DNA, 25 bp, Homo sapien
gtagagccgatgtgggagcctcctc

SEQ ID NO: 4273758 - DNA, 25 bp, Homo sapien
taactgtatttagaagctggactca

SEQ ID NO: 4273759 - DNA, 25 bp, Homo sapien
gctaatgcgtaagctctggctgctg

SEQ ID NO: 4273760 - DNA, 25 bp, Homo sapien
ccaccagcagttattctgtgattct

SEQ ID NO: 4273761 - DNA, 25 bp, Homo sapien
cttatccccaccagcagttattctg

SEQ ID NO: 4273762 - DNA, 25 bp, Homo sapien
tatccccaccagcagttattctgtg

SEQ ID NO: 4273763 - DNA, 25 bp, Homo sapien
agctcttatccccaccagcagttat

SEQ ID NO: 4273764 - DNA, 25 bp, Homo sapien
gaatcaggcctatattccagggcca

SEQ ID NO: 4273765 - DNA, 25 bp, Homo sapien
gccaagactcttttacctgggatgg

SEQ ID NO: 4273766 - DNA, 25 bp, Homo sapien
ccagtggtccctaaactgaagggca

SEQ ID NO: 4273767 - DNA, 25 bp, Homo sapien
tagcgggagtccttgtgcctacaca

SEQ ID NO: 4273768 - DNA, 25 bp, Homo sapien
tgggccaacatctgcagcttatttt

SEQ ID NO: 4273769 - DNA, 25 bp, Homo sapien
cagctgagtggctattcgatggccc

SEQ ID NO: 4273770 - DNA, 25 bp, Homo sapien
tcagatgctcttagcagggacttcc

SEQ ID NO: 4273771 - DNA, 25 bp, Homo sapien
gatggcccacgacctgagtgaactg

SEQ ID NO: 4273772 - DNA, 25 bp, Homo sapien
ccttctgccactttggccgattgag

SEQ ID NO: 4273773 - DNA, 25 bp, Homo sapien
gattgagatccagcaacctcctggc

SEQ ID NO: 4273774 - DNA, 25 bp, Homo sapien
ccatgaatagaacagggacctggtg

SEQ ID NO: 4273775 - DNA, 25 bp, Homo sapien
ctgagccgtgcacagctgccatgaa

SEQ ID NO: 4273776 - DNA, 25 bp, Homo sapien
ggagcagacgaacttagattctggg

SEQ ID NO: 4273777 - DNA, 25 bp, Homo sapien
tctcatttgcatcttgggcaggcca

SEQ ID NO: 4273778 - DNA, 25 bp, Homo sapien
tcatttgcatcttgggcaggccaca

SEQ ID NO: 4273779 - DNA, 25 bp, Homo sapien
cagaaagggagcagacgaacttaga

SEQ ID NO: 4273780 - DNA, 25 bp, Homo sapien
gtgcgcactgctgtatctggctaat

SEQ ID NO: 4273781 - DNA, 25 bp, Homo sapien
ggtggtgcatcttcactggacctgg

SEQ ID NO: 4273782 - DNA, 25 bp, Homo sapien
cactgaacttgctttgtgccggaaa

SEQ ID NO: 4273783 - DNA, 25 bp, Homo sapien
tgctcgtaaaggttccattgtaaac

SEQ ID NO: 4273784 - DNA, 25 bp, Homo sapien
aggccagctgtacgcaggctctgca

SEQ ID NO: 4273785 - DNA, 25 bp, Homo sapien
caccttcaagtaggccccatcgtct

SEQ ID NO: 4273786 - DNA, 25 bp, Homo sapien
cactgtacctaatggaatgggtagt

SEQ ID NO: 4273787 - DNA, 25 bp, Homo sapien
ggtaattagcactgtacctaatgga

SEQ ID NO: 4273788 - DNA, 25 bp, Homo sapien
taatttcatcaactaggtaattagc

SEQ ID NO: 4273789 - DNA, 25 bp, Homo sapien
tagctggagttaaatgggaaggaag

SEQ ID NO: 4273790 - DNA, 25 bp, Homo sapien
agctggagttaaatgggaaggaaga

SEQ ID NO: 4273791 - DNA, 25 bp, Homo sapien
aaatgggaaggaagaggtgaggata

SEQ ID NO: 4273792 - DNA, 25 bp, Homo sapien
agttaaatgggaaggaagaggtgag

SEQ ID NO: 4273793 - DNA, 25 bp, Homo sapien
gcaggaaggctgaagaccgtgagtt

SEQ ID NO: 4273794 - DNA, 25 bp, Homo sapien
caggaaggctgaagaccgtgagttc

SEQ ID NO: 4273795 - DNA, 25 bp, Homo sapien
atccagaattgggttttgctgtatg

SEQ ID NO: 4273796 - DNA, 25 bp, Homo sapien
gagccttaggcaccagcgttgctgg

SEQ ID NO: 4273797 - DNA, 25 bp, Homo sapien
aagtgggcggtagaggccatgcaga

SEQ ID NO: 4273798 - DNA, 25 bp, Homo sapien
tgctgtatgggtgccgtgaaagtcc

SEQ ID NO: 4273799 - DNA, 25 bp, Homo sapien
tcacaacgtctgtaccaccaaggag

SEQ ID NO: 4273800 - DNA, 25 bp, Homo sapien
catataggaggctcttagcaagtca

SEQ ID NO: 4273801 - DNA, 25 bp, Homo sapien
gagtctacagtaacctccttggtag

SEQ ID NO: 4273802 - DNA, 25 bp, Homo sapien
caccaaggagatatgtggtatcata

SEQ ID NO: 4273803 - DNA, 25 bp, Homo sapien
atgatctgcagaccaccctccctga

SEQ ID NO: 4273804 - DNA, 25 bp, Homo sapien
tgcatatgatctgcagaccaccctc

SEQ ID NO: 4273805 - DNA, 25 bp, Homo sapien
ccctccctgagtttacctggagcag

SEQ ID NO: 4273806 - DNA, 25 bp, Homo sapien
cctgagtttacctggagcagctttt

SEQ ID NO: 4273807 - DNA, 25 bp, Homo sapien
gaccctgtccattctcataggtgcc

SEQ ID NO: 4273808 - DNA, 25 bp, Homo sapien
gtcatagaaactgaacgtgtgcttg

SEQ ID NO: 4273809 - DNA, 25 bp, Homo sapien
tgctaagtttgtacctcagtcctgg

SEQ ID NO: 4273810 - DNA, 25 bp, Homo sapien
tgcttgccatcctcacactagctgt

SEQ ID NO: 4273811 - DNA, 25 bp, Homo sapien
attgggagatagggtccatttctga

SEQ ID NO: 4273812 - DNA, 25 bp, Homo sapien
tggtgatgacatggcattgggagat

SEQ ID NO: 4273813 - DNA, 25 bp, Homo sapien
tctgtgacttcattggtgatgacat

SEQ ID NO: 4273814 - DNA, 25 bp, Homo sapien
ggtttaaggaagattctgtgacttc

SEQ ID NO: 4273815 - DNA, 25 bp, Homo sapien
tcaccactgttagttgacacagacg

SEQ ID NO: 4273816 - DNA, 25 bp, Homo sapien
caccactgttagttgacacagacgt

SEQ ID NO: 4273817 - DNA, 25 bp, Homo sapien
ccttttcccagtagggacaacattg

SEQ ID NO: 4273818 - DNA, 25 bp, Homo sapien
catgtggaacataagctagtgggcc

SEQ ID NO: 4273819 - DNA, 25 bp, Homo sapien
tctcctagattaatggcagccagtg

SEQ ID NO: 4273820 - DNA, 25 bp, Homo sapien
ctgcatagtgtttgaaatctcctag

SEQ ID NO: 4273821 - DNA, 25 bp, Homo sapien
agaactcttaaatactttggcttca

SEQ ID NO: 4273822 - DNA, 25 bp, Homo sapien
caggaactttgctaattggttcttc

SEQ ID NO: 4273823 - DNA, 25 bp, Homo sapien
tggcttcaggaactttgctaattgg

SEQ ID NO: 4273824 - DNA, 25 bp, Homo sapien
tgaaatgttctctgaagaactctta

SEQ ID NO: 4273825 - DNA, 25 bp, Homo sapien
aagtatccaaatgcgtcttcaatag

SEQ ID NO: 4273826 - DNA, 25 bp, Homo sapien
ttcttgatgaaaagcaatattgccg

SEQ ID NO: 4273827 - DNA, 25 bp, Homo sapien
aatgcgtcttcaatagctgatgtcc

SEQ ID NO: 4273828 - DNA, 25 bp, Homo sapien
tcttgatgaaaagcaatattgccgt

SEQ ID NO: 4273829 - DNA, 25 bp, Homo sapien
tctgtccagtattctggaagggcgg

SEQ ID NO: 4273830 - DNA, 25 bp, Homo sapien
gtgtgtttcgggatattcttctgtc

SEQ ID NO: 4273831 - DNA, 25 bp, Homo sapien
gaatgtacagcctaattctggtgtg

SEQ ID NO: 4273832 - DNA, 25 bp, Homo sapien
gctccagactgtcgttaagaatgta

SEQ ID NO: 4273833 - DNA, 25 bp, Homo sapien
agaggcaaggtcttcttcttgtcac

SEQ ID NO: 4273834 - DNA, 25 bp, Homo sapien
tagaggcaaggtcttcttcttgtca

SEQ ID NO: 4273835 - DNA, 25 bp, Homo sapien
actgttacaaaggtctcttggttca

SEQ ID NO: 4273836 - DNA, 25 bp, Homo sapien
aaccaagtaatgtgtgtcttagggc

SEQ ID NO: 4273837 - DNA, 25 bp, Homo sapien
caagtctaaattactgagggtcaac

SEQ ID NO: 4273838 - DNA, 25 bp, Homo sapien
ttcactaggactatttggtcaagtc

SEQ ID NO: 4273839 - DNA, 25 bp, Homo sapien
ggcttagtagttaattcactaggac

SEQ ID NO: 4273840 - DNA, 25 bp, Homo sapien
tctgtctgaggcagcatatttcccc

SEQ ID NO: 4273841 - DNA, 25 bp, Homo sapien
tcgggttggtagcataggagtcttc

SEQ ID NO: 4273842 - DNA, 25 bp, Homo sapien
gctgtgcgtgaagaagactaactcg

SEQ ID NO: 4273843 - DNA, 25 bp, Homo sapien
tacctggtgtataaagggtgctgca

SEQ ID NO: 4273844 - DNA, 25 bp, Homo sapien
gattctcattggaacggtgggcccc

SEQ ID NO: 4273845 - DNA, 25 bp, Homo sapien
gataacccgaggtcatttgagtgag

SEQ ID NO: 4273846 - DNA, 25 bp, Homo sapien
tgagagccccttaatagtgcagacc

SEQ ID NO: 4273847 - DNA, 25 bp, Homo sapien
tcatgtcccgtctgaacaagatgct

SEQ ID NO: 4273848 - DNA, 25 bp, Homo sapien
cacccctggccagaatattggaatt

SEQ ID NO: 4273849 - DNA, 25 bp, Homo sapien
gattctgccagcttagcctctcaag

SEQ ID NO: 4273850 - DNA, 25 bp, Homo sapien
tgtggcagaacagcttactaccagt

SEQ ID NO: 4273851 - DNA, 25 bp, Homo sapien
gctgaagccagggttctcacctttg

SEQ ID NO: 4273852 - DNA, 25 bp, Homo sapien
caaatttcgcattgtgaaggaggca

SEQ ID NO: 4273853 - DNA, 25 bp, Homo sapien
taaactccagggttgtgcccgcatt

SEQ ID NO: 4273854 - DNA, 25 bp, Homo sapien
tcaaccaggttgtcaagcagagatc

SEQ ID NO: 4273855 - DNA, 25 bp, Homo sapien
tacaaccatgcgttcgagtcctggg

SEQ ID NO: 4273856 - DNA, 25 bp, Homo sapien
tgtgttacacttacgatgcaaagcc

SEQ ID NO: 4273857 - DNA, 25 bp, Homo sapien
tgttaaagacccaagacatgactgg

SEQ ID NO: 4273858 - DNA, 25 bp, Homo sapien
aattattgtcccctctaaggagcct

SEQ ID NO: 4273859 - DNA, 25 bp, Homo sapien
tgcttcttgggagcaatattgcccc

SEQ ID NO: 4273860 - DNA, 25 bp, Homo sapien
gaagggaccaattatgaggactgac

SEQ ID NO: 4273861 - DNA, 25 bp, Homo sapien
tgattgggatgctcccctacagcct

SEQ ID NO: 4273862 - DNA, 25 bp, Homo sapien
tttttgtcatcagcaccagtgtccg

SEQ ID NO: 4273863 - DNA, 25 bp, Homo sapien
tggtggtgcagaaacatgatgcctg

SEQ ID NO: 4273864 - DNA, 25 bp, Homo sapien
caatcatggagacacaggcagacag

SEQ ID NO: 4273865 - DNA, 25 bp, Homo sapien
ggaactattgtctgcctgggaacac

SEQ ID NO: 4273866 - DNA, 25 bp, Homo sapien
tggaggtcccaagtagctctatgcc

SEQ ID NO: 4273867 - DNA, 25 bp, Homo sapien
tcagtagggagacactttggagaca

SEQ ID NO: 4273868 - DNA, 25 bp, Homo sapien
cacacttggctaaaattgcccttaa

SEQ ID NO: 4273869 - DNA, 25 bp, Homo sapien
caaggcgaaagccaggaatcagctt

SEQ ID NO: 4273870 - DNA, 25 bp, Homo sapien
gaatcagcttctttcgttgcctcct

SEQ ID NO: 4273871 - DNA, 25 bp, Homo sapien
tgtttgatacataggcccaaggtca

SEQ ID NO: 4273872 - DNA, 25 bp, Homo sapien
gaatcagcccgttgcttctctgtag

SEQ ID NO: 4273873 - DNA, 25 bp, Homo sapien
ttttggaagggccaaatctctggct

SEQ ID NO: 4273874 - DNA, 25 bp, Homo sapien
tagcaagcatgaggagcctctgatg

SEQ ID NO: 4273875 - DNA, 25 bp, Homo sapien
gatcttccttggtcttctacggcta

SEQ ID NO: 4273876 - DNA, 25 bp, Homo sapien
tcaagaaagcagctagcagctaggg

SEQ ID NO: 4273877 - DNA, 25 bp, Homo sapien
gagctcaggaccctagagagccctg

SEQ ID NO: 4273878 - DNA, 25 bp, Homo sapien
ggaactcttgccacgttgttgctga

SEQ ID NO: 4273879 - DNA, 25 bp, Homo sapien
gtgtgtcagaccagacctgatcctg

SEQ ID NO: 4273880 - DNA, 25 bp, Homo sapien
caaaatctccctagggatggccaca

SEQ ID NO: 4273881 - DNA, 25 bp, Homo sapien
ggccagttggttcccctagcttgta

SEQ ID NO: 4273882 - DNA, 25 bp, Homo sapien
aaagacctgctccagaatgggccct

SEQ ID NO: 4273883 - DNA, 25 bp, Homo sapien
ggccccttctctggtcatcgcaaag

SEQ ID NO: 4273884 - DNA, 25 bp, Homo sapien
ggcatttctgctgccgtgtacgacc

SEQ ID NO: 4273885 - DNA, 25 bp, Homo sapien
tggctgttgaaggagcggggcattt

SEQ ID NO: 4273886 - DNA, 25 bp, Homo sapien
gctgttgaaggagcggggcatttct

SEQ ID NO: 4273887 - DNA, 25 bp, Homo sapien
tgccgtgtacgacccccagagctgg

SEQ ID NO: 4273888 - DNA, 25 bp, Homo sapien
tcaacctcgtggacaaagtcaggag

SEQ ID NO: 4273889 - DNA, 25 bp, Homo sapien
caaactagcttacggtgaggactgg

SEQ ID NO: 4273890 - DNA, 25 bp, Homo sapien
caaagtggtgaactcagggcgagcc

SEQ ID NO: 4273891 - DNA, 25 bp, Homo sapien
gctcaatagtggcatccggcggaat

SEQ ID NO: 4273892 - DNA, 25 bp, Homo sapien
tgaatgcaacaagggaggctggtcc

SEQ ID NO: 4273893 - DNA, 25 bp, Homo sapien
tgaatttcgaacacaccaagccgct

SEQ ID NO: 4273894 - DNA, 25 bp, Homo sapien
ggcacgggtcataacacatctgggt

SEQ ID NO: 4273895 - DNA, 25 bp, Homo sapien
gctttttctgaaacccgaggctggc

SEQ ID NO: 4273896 - DNA, 25 bp, Homo sapien
gacttcatgcagattctccaggccg

SEQ ID NO: 4273897 - DNA, 25 bp, Homo sapien
catccaaggttataggagaagcccc

SEQ ID NO: 4273898 - DNA, 25 bp, Homo sapien
tggaagggatgccagcgttcaaccg

SEQ ID NO: 4273899 - DNA, 25 bp, Homo sapien
ttcaaccggtgtgggagcctttgtc

SEQ ID NO: 4273900 - DNA, 25 bp, Homo sapien
agcagcagtagccttggaccccgac

SEQ ID NO: 4273901 - DNA, 25 bp, Homo sapien
ctgtgacactaaggaccagagtagc

SEQ ID NO: 4273902 - DNA, 25 bp, Homo sapien
agcagtagccttggaccccgactct

SEQ ID NO: 4273903 - DNA, 25 bp, Homo sapien
tggaccccgactctcctgtttgcat

SEQ ID NO: 4273904 - DNA, 25 bp, Homo sapien
gctggggcaactggtctctttggca

SEQ ID NO: 4273905 - DNA, 25 bp, Homo sapien
gcttatcagagaggttcccatggca

SEQ ID NO: 4273906 - DNA, 25 bp, Homo sapien
tggcaataactgcttatcagagagg

SEQ ID NO: 4273907 - DNA, 25 bp, Homo sapien
cctgtgagcagaaaaaggacttcca

SEQ ID NO: 4273908 - DNA, 25 bp, Homo sapien
tagcataacaacattttcagaccag

SEQ ID NO: 4273909 - DNA, 25 bp, Homo sapien
aatagatacatacaatgtcaaactc

SEQ ID NO: 4273910 - DNA, 25 bp, Homo sapien
tccacagacaatgagttatgagtgt

SEQ ID NO: 4273911 - DNA, 25 bp, Homo sapien
tgcactggacaatcttacagacaca

SEQ ID NO: 4273912 - DNA, 25 bp, Homo sapien
gggtactcatactcctcggcactgc

SEQ ID NO: 4273913 - DNA, 25 bp, Homo sapien
tcggcactgcgacggccaaaatcca

SEQ ID NO: 4273914 - DNA, 25 bp, Homo sapien
gttctgcaggttcttaacgatggac

SEQ ID NO: 4273915 - DNA, 25 bp, Homo sapien
tgtagtcccggtcacttatcctgtg

SEQ ID NO: 4273916 - DNA, 25 bp, Homo sapien
cctggaacaccagttgggtaagaga

SEQ ID NO: 4273917 - DNA, 25 bp, Homo sapien
aacaccagttgggtaagagagcttc

SEQ ID NO: 4273918 - DNA, 25 bp, Homo sapien
gaaaaggcaacacacctaccacatc

SEQ ID NO: 4273919 - DNA, 25 bp, Homo sapien
cagttgggtaagagagcttcatgga

SEQ ID NO: 4273920 - DNA, 25 bp, Homo sapien
ttgtactgttcagcacactgctcca

SEQ ID NO: 4273921 - DNA, 25 bp, Homo sapien
ccacagccggtgttcatcattagtg

SEQ ID NO: 4273922 - DNA, 25 bp, Homo sapien
ctccacagccggtgttcatcattag

SEQ ID NO: 4273923 - DNA, 25 bp, Homo sapien
gctgtgtttgtactgttcagcacac

SEQ ID NO: 4273924 - DNA, 25 bp, Homo sapien
gatctcaggcattctcagcattgac

SEQ ID NO: 4273925 - DNA, 25 bp, Homo sapien
tatctgggtggctccaaggtccttt

SEQ ID NO: 4273926 - DNA, 25 bp, Homo sapien
catgttgcttgtttcctaccgagag

SEQ ID NO: 4273927 - DNA, 25 bp, Homo sapien
tgctacaaaggaccgccagaaatca

SEQ ID NO: 4273928 - DNA, 25 bp, Homo sapien
gggactcgccatccgttctctgcga

SEQ ID NO: 4273929 - DNA, 25 bp, Homo sapien
gggcctgctggatgtatcttgccag

SEQ ID NO: 4273930 - DNA, 25 bp, Homo sapien
agggcgcccaggtgcgctcgggact

SEQ ID NO: 4273931 - DNA, 25 bp, Homo sapien
tgcgataccctcagctgcctacggg

SEQ ID NO: 4273932 - DNA, 25 bp, Homo sapien
agcacgagggctcgccaagcgctga

SEQ ID NO: 4273933 - DNA, 25 bp, Homo sapien
gccgcaagcacgagggctcgccaag

SEQ ID NO: 4273934 - DNA, 25 bp, Homo sapien
agcgctgaccccagccgagtgccat

SEQ ID NO: 4273935 - DNA, 25 bp, Homo sapien
aggccgccgcaagcacgagggctcg

SEQ ID NO: 4273936 - DNA, 25 bp, Homo sapien
ctgttttctgccgtgttgagcagaa

SEQ ID NO: 4273937 - DNA, 25 bp, Homo sapien
tctttgggaactcctcacccagcgc

SEQ ID NO: 4273938 - DNA, 25 bp, Homo sapien
ctcacccagcgccaaggggcagaga

SEQ ID NO: 4273939 - DNA, 25 bp, Homo sapien
ccgtgttgagcagaaggaatgtttt

SEQ ID NO: 4273940 - DNA, 25 bp, Homo sapien
agctggcttggcgtttccaaccgga

SEQ ID NO: 4273941 - DNA, 25 bp, Homo sapien
cttttggattaggacgcagctggct

SEQ ID NO: 4273942 - DNA, 25 bp, Homo sapien
tgagccaagttcagggaggaccagc

SEQ ID NO: 4273943 - DNA, 25 bp, Homo sapien
gtttccaaccggagcagcccggcag

SEQ ID NO: 4273944 - DNA, 25 bp, Homo sapien
ccacccggcggcgtcggccagtcat

SEQ ID NO: 4273945 - DNA, 25 bp, Homo sapien
cccacccggcggcgtcggccagtca

SEQ ID NO: 4273946 - DNA, 25 bp, Homo sapien
acccggcggcgtcggccagtcatgt

SEQ ID NO: 4273947 - DNA, 25 bp, Homo sapien
cacccggcggcgtcggccagtcatg

SEQ ID NO: 4273948 - DNA, 25 bp, Homo sapien
agactggcagtaacacgtgctcaga

SEQ ID NO: 4273949 - DNA, 25 bp, Homo sapien
ccaacgctgacgcagactggcagta

SEQ ID NO: 4273950 - DNA, 25 bp, Homo sapien
tggcagtaacacgtgctcagagggc

SEQ ID NO: 4273951 - DNA, 25 bp, Homo sapien
ccactggggcgacaaccggttgaag

SEQ ID NO: 4273952 - DNA, 25 bp, Homo sapien
gtcggctctttcgaaggagagagga

SEQ ID NO: 4273953 - DNA, 25 bp, Homo sapien
ctgtgtcggctctttcgaaggagag

SEQ ID NO: 4273954 - DNA, 25 bp, Homo sapien
gagagaggaggagtcggggtcttca

SEQ ID NO: 4273955 - DNA, 25 bp, Homo sapien
cggctctttcgaaggagagaggagg

SEQ ID NO: 4273956 - DNA, 25 bp, Homo sapien
cagtgttctgggtcagtgaaagggc

SEQ ID NO: 4273957 - DNA, 25 bp, Homo sapien
ccaggtttccgagggccagtgttct

SEQ ID NO: 4273958 - DNA, 25 bp, Homo sapien
gcattaaaagccctcgcagttctcc

SEQ ID NO: 4273959 - DNA, 25 bp, Homo sapien
tcttctcagccgcattaaaagccct

SEQ ID NO: 4273960 - DNA, 25 bp, Homo sapien
caggccttgaaccttgggacctcaa

SEQ ID NO: 4273961 - DNA, 25 bp, Homo sapien
tgaaaccctttgagttcgagtccgc

SEQ ID NO: 4273962 - DNA, 25 bp, Homo sapien
tgctggtgcttgagttcgccgcgtc

SEQ ID NO: 4273963 - DNA, 25 bp, Homo sapien
tcagtcacccgtccggtggagggaa

SEQ ID NO: 4273964 - DNA, 25 bp, Homo sapien
tcattgccatccacgtacttgtgag

SEQ ID NO: 4273965 - DNA, 25 bp, Homo sapien
tgccatccacgtacttgtgagcatc

SEQ ID NO: 4273966 - DNA, 25 bp, Homo sapien
gtttcattgccatccacgtacttgt

SEQ ID NO: 4273967 - DNA, 25 bp, Homo sapien
ccatccacgtacttgtgagcatcag

SEQ ID NO: 4273968 - DNA, 25 bp, Homo sapien
cggcaagttgttaggaagatctcca

SEQ ID NO: 4273969 - DNA, 25 bp, Homo sapien
aggacggcaagttgttaggaagatc

SEQ ID NO: 4273970 - DNA, 25 bp, Homo sapien
caagttgttaggaagatctccatcc

SEQ ID NO: 4273971 - DNA, 25 bp, Homo sapien
tacaaaggacggcaagttgttagga

SEQ ID NO: 4273972 - DNA, 25 bp, Homo sapien
tcttgtttggtagggaacccagaga

SEQ ID NO: 4273973 - DNA, 25 bp, Homo sapien
ggaaagcacacctcaactccatggg

SEQ ID NO: 4273974 - DNA, 25 bp, Homo sapien
taaaggccaattagctaatcaagcc

SEQ ID NO: 4273975 - DNA, 25 bp, Homo sapien
gggacagacactcctgtgctcagga

SEQ ID NO: 4273976 - DNA, 25 bp, Homo sapien
tgctcaggacaattctaggccttct

SEQ ID NO: 4273977 - DNA, 25 bp, Homo sapien
tatgcgagtcatctgtggctggtac

SEQ ID NO: 4273978 - DNA, 25 bp, Homo sapien
agtcatctgtggctggtacagagtc

SEQ ID NO: 4273979 - DNA, 25 bp, Homo sapien
cagggtatgcgagtcatctgtggct

SEQ ID NO: 4273980 - DNA, 25 bp, Homo sapien
ccagggtatgcgagtcatctgtggc

SEQ ID NO: 4273981 - DNA, 25 bp, Homo sapien
gatggccatcccagtagaatgtggt

SEQ ID NO: 4273982 - DNA, 25 bp, Homo sapien
gatgttccaaggagttactcattcc

SEQ ID NO: 4273983 - DNA, 25 bp, Homo sapien
aaatataggtcctcagctcaggaac

SEQ ID NO: 4273984 - DNA, 25 bp, Homo sapien
gggttatgctatccagatgaacaaa

SEQ ID NO: 4273985 - DNA, 25 bp, Homo sapien
agcttggcgtccactttcaggcaga

SEQ ID NO: 4273986 - DNA, 25 bp, Homo sapien
cactgactgaaagtgattctgtggc

SEQ ID NO: 4273987 - DNA, 25 bp, Homo sapien
gagcttggcgtccactttcaggcag

SEQ ID NO: 4273988 - DNA, 25 bp, Homo sapien
tgtggcttgctttaagggtgcccag

SEQ ID NO: 4273989 - DNA, 25 bp, Homo sapien
catgaacccggcatccagagaggtt

SEQ ID NO: 4273990 - DNA, 25 bp, Homo sapien
ggatgccctgttcagtaccctgggt

SEQ ID NO: 4273991 - DNA, 25 bp, Homo sapien
tggacattgctgaccaagcacagga

SEQ ID NO: 4273992 - DNA, 25 bp, Homo sapien
acaggataattagagtggacattgc

SEQ ID NO: 4273993 - DNA, 25 bp, Homo sapien
cttctatgtcctcccctgggtggtg

SEQ ID NO: 4273994 - DNA, 25 bp, Homo sapien
gcttctatgtcctcccctgggtggt

SEQ ID NO: 4273995 - DNA, 25 bp, Homo sapien
agccaggaccctcggaggtgctcat

SEQ ID NO: 4273996 - DNA, 25 bp, Homo sapien
ttctgcatcctgcatccccggatga

SEQ ID NO: 4273997 - DNA, 25 bp, Homo sapien
gagtaactagtttggtttattctgc

SEQ ID NO: 4273998 - DNA, 25 bp, Homo sapien
tggtttattctgcatcctgcatccc

SEQ ID NO: 4273999 - DNA, 25 bp, Homo sapien
actagtttggtttattctgcatcct

SEQ ID NO: 4274000 - DNA, 25 bp, Homo sapien
tcacaagatgcaactggtgagtgct

SEQ ID NO: 4274001 - DNA, 25 bp, Homo sapien
agcaccttcattcacaagatgcaac

SEQ ID NO: 4274002 - DNA, 25 bp, Homo sapien
gaactcttaaagtggtgagatcatc

SEQ ID NO: 4274003 - DNA, 25 bp, Homo sapien
tcaaaaggattgactgaagcagcaa

SEQ ID NO: 4274004 - DNA, 25 bp, Homo sapien
agtactggcagtaccgggaccaggt

SEQ ID NO: 4274005 - DNA, 25 bp, Homo sapien
cagggtatcggagtactggcagtac

SEQ ID NO: 4274006 - DNA, 25 bp, Homo sapien
ctacagcttgcaaccatccagccac

SEQ ID NO: 4274007 - DNA, 25 bp, Homo sapien
atccagccaccgtgccagggtatcg

SEQ ID NO: 4274008 - DNA, 25 bp, Homo sapien
tcaataagatgtcaccagatatgac

SEQ ID NO: 4274009 - DNA, 25 bp, Homo sapien
ggtcttggcacatttaattgtcttc

SEQ ID NO: 4274010 - DNA, 25 bp, Homo sapien
tcacgtgtgttctcgtagatggcca

SEQ ID NO: 4274011 - DNA, 25 bp, Homo sapien
cttgctctcgaagtaggccaggcac

SEQ ID NO: 4274012 - DNA, 25 bp, Homo sapien
tgccacgcatctgaaagaggccaaa

SEQ ID NO: 4274013 - DNA, 25 bp, Homo sapien
aaagccagtgtagccctcacgtgtg

SEQ ID NO: 4274014 - DNA, 25 bp, Homo sapien
agttctcaaggctatagccctcaaa

SEQ ID NO: 4274015 - DNA, 25 bp, Homo sapien
taagcaccacttggaaccaccaggt

SEQ ID NO: 4274016 - DNA, 25 bp, Homo sapien
cctccatcgtggagtttcttagcca

SEQ ID NO: 4274017 - DNA, 25 bp, Homo sapien
tgtgcaacgccccaagatgtaagca

SEQ ID NO: 4274018 - DNA, 25 bp, Homo sapien
caggtcagggcaacggtggccagat

SEQ ID NO: 4274019 - DNA, 25 bp, Homo sapien
ggcaggtcagggcaacggtggccag

SEQ ID NO: 4274020 - DNA, 25 bp, Homo sapien
cagggcaacggtggccagatgagtg

SEQ ID NO: 4274021 - DNA, 25 bp, Homo sapien
gtcagggcaacggtggccagatgag

SEQ ID NO: 4274022 - DNA, 25 bp, Homo sapien
tgagcccctattgctctcagagtct

SEQ ID NO: 4274023 - DNA, 25 bp, Homo sapien
gcctttccccattcaaatgttgctg

SEQ ID NO: 4274024 - DNA, 25 bp, Homo sapien
tgatggatcctccataaaagttcca

SEQ ID NO: 4274025 - DNA, 25 bp, Homo sapien
caccccgggtgccaacttcttgaat

SEQ ID NO: 4274026 - DNA, 25 bp, Homo sapien
gattgtcctgttttgtgctctgtcc

SEQ ID NO: 4274027 - DNA, 25 bp, Homo sapien
acacactgcagatgattgtcctgtt

SEQ ID NO: 4274028 - DNA, 25 bp, Homo sapien
tgtcctgttttgtgctctgtcccat

SEQ ID NO: 4274029 - DNA, 25 bp, Homo sapien
gacacactgcagatgattgtcctgt

SEQ ID NO: 4274030 - DNA, 25 bp, Homo sapien
ctgcagcagcttcgacgtgtgttgc

SEQ ID NO: 4274031 - DNA, 25 bp, Homo sapien
cagcttcgacgtgtgttgcagggaa

SEQ ID NO: 4274032 - DNA, 25 bp, Homo sapien
gttgcagggaagttgctccacctac

SEQ ID NO: 4274033 - DNA, 25 bp, Homo sapien
acgtgtgttgcagggaagttgctcc

SEQ ID NO: 4274034 - DNA, 25 bp, Homo sapien
caagtggcccagaggggccatatca

SEQ ID NO: 4274035 - DNA, 25 bp, Homo sapien
gtccagcttgctgttcacacatgag

SEQ ID NO: 4274036 - DNA, 25 bp, Homo sapien
cagggcttgaggatgatgcatcctg

SEQ ID NO: 4274037 - DNA, 25 bp, Homo sapien
cagtcataggaccagaaccagaatc

SEQ ID NO: 4274038 - DNA, 25 bp, Homo sapien
ttcatctctgggcaaacaggggcca

SEQ ID NO: 4274039 - DNA, 25 bp, Homo sapien
gcagccggctccccggcgagggcat

SEQ ID NO: 4274040 - DNA, 25 bp, Homo sapien
tcttcatctctgggcaaacaggggc

SEQ ID NO: 4274041 - DNA, 25 bp, Homo sapien
cttcatctctgggcaaacaggggcc

SEQ ID NO: 4274042 - DNA, 25 bp, Homo sapien
acattgagttctgctcacggagaca

SEQ ID NO: 4274043 - DNA, 25 bp, Homo sapien
gggcatgtttgtgtctcttgcggac

SEQ ID NO: 4274044 - DNA, 25 bp, Homo sapien
tgggccacattgagttctgctcacg

SEQ ID NO: 4274045 - DNA, 25 bp, Homo sapien
tgtctcttgcggaccagatgtgggc

SEQ ID NO: 4274046 - DNA, 25 bp, Homo sapien
agtctggaaagttgacaaggctttg

SEQ ID NO: 4274047 - DNA, 25 bp, Homo sapien
ctctttcagcagaatcttaggtcca

SEQ ID NO: 4274048 - DNA, 25 bp, Homo sapien
gaaaacacgtactctgccatgggct

SEQ ID NO: 4274049 - DNA, 25 bp, Homo sapien
ccatgggtcacgaagtctggaaagt

SEQ ID NO: 4274050 - DNA, 25 bp, Homo sapien
gctgataaatttgactcccttgctc

SEQ ID NO: 4274051 - DNA, 25 bp, Homo sapien
ggcctgctggtaacaggacttataa

SEQ ID NO: 4274052 - DNA, 25 bp, Homo sapien
gttcatgccaaattccaaagcgatc

SEQ ID NO: 4274053 - DNA, 25 bp, Homo sapien
aaaggcccacggaaacagtggcatg

SEQ ID NO: 4274054 - DNA, 25 bp, Homo sapien
ggctgtgctctaccttctcagccaa

SEQ ID NO: 4274055 - DNA, 25 bp, Homo sapien
ctgggctgtgctctaccttctcagc

SEQ ID NO: 4274056 - DNA, 25 bp, Homo sapien
ttctctgggcgtttcttcagggtcc

SEQ ID NO: 4274057 - DNA, 25 bp, Homo sapien
ggtcctgaggtcctcgtcagagagg

SEQ ID NO: 4274058 - DNA, 25 bp, Homo sapien
gctggggtatggtaccagggagggc

SEQ ID NO: 4274059 - DNA, 25 bp, Homo sapien
tcggctggggtatggtaccagggag

SEQ ID NO: 4274060 - DNA, 25 bp, Homo sapien
tactcatcggctggggtatggtacc

SEQ ID NO: 4274061 - DNA, 25 bp, Homo sapien
catactcatcggctggggtatggta

SEQ ID NO: 4274062 - DNA, 25 bp, Homo sapien
gcacagtccttagggatttgaagga

SEQ ID NO: 4274063 - DNA, 25 bp, Homo sapien
gaaggaggtagagttcccggatgac

SEQ ID NO: 4274064 - DNA, 25 bp, Homo sapien
cagttcttccttgagcgtaagcgga

SEQ ID NO: 4274065 - DNA, 25 bp, Homo sapien
cgtaagcggattgggagcacagtcc

SEQ ID NO: 4274066 - DNA, 25 bp, Homo sapien
tgtgtatcgtaaccagccagatcct

SEQ ID NO: 4274067 - DNA, 25 bp, Homo sapien
aagatcccctcaggactgcaacagg

SEQ ID NO: 4274068 - DNA, 25 bp, Homo sapien
cagcgaatgctaggtctcggactaa

SEQ ID NO: 4274069 - DNA, 25 bp, Homo sapien
tcaagtgggatctgtcacaccagcc

SEQ ID NO: 4274070 - DNA, 25 bp, Homo sapien
ggcagaacacgcccaaaatcgtcct

SEQ ID NO: 4274071 - DNA, 25 bp, Homo sapien
agggctggcagaacacgcccaaaat

SEQ ID NO: 4274072 - DNA, 25 bp, Homo sapien
gctggcagaacacgcccaaaatcgt

SEQ ID NO: 4274073 - DNA, 25 bp, Homo sapien
gcagaacacgcccaaaatcgtcctc

SEQ ID NO: 4274074 - DNA, 25 bp, Homo sapien
tttgccctgactaaatcagcctcag

SEQ ID NO: 4274075 - DNA, 25 bp, Homo sapien
ggtcatatgtactaagcatgggtca

SEQ ID NO: 4274076 - DNA, 25 bp, Homo sapien
ccgtaagaagcttgtgtaacatgaa

SEQ ID NO: 4274077 - DNA, 25 bp, Homo sapien
aataacacttctgaagcaaccccag

SEQ ID NO: 4274078 - DNA, 25 bp, Homo sapien
gctgatgagatttccccagcagcag

SEQ ID NO: 4274079 - DNA, 25 bp, Homo sapien
taaaaggcgcttgtgggcaacagct

SEQ ID NO: 4274080 - DNA, 25 bp, Homo sapien
catgggcagatgtttccgaatccag

SEQ ID NO: 4274081 - DNA, 25 bp, Homo sapien
gatttcactgacatgcccttttcca

SEQ ID NO: 4274082 - DNA, 25 bp, Homo sapien
actgctcccggatgggagaatcaga

SEQ ID NO: 4274083 - DNA, 25 bp, Homo sapien
cagagctctcctcatttgggtcagg

SEQ ID NO: 4274084 - DNA, 25 bp, Homo sapien
agagctctcctcatttgggtcaggg

SEQ ID NO: 4274085 - DNA, 25 bp, Homo sapien
cgaggtttggtccaaccagcagaac

SEQ ID NO: 4274086 - DNA, 25 bp, Homo sapien
gaggtttggtccaaccagcagaacc

SEQ ID NO: 4274087 - DNA, 25 bp, Homo sapien
tcacgaggtttggtccaaccagcag

SEQ ID NO: 4274088 - DNA, 25 bp, Homo sapien
cacgaggtttggtccaaccagcaga

SEQ ID NO: 4274089 - DNA, 25 bp, Homo sapien
tttgtgcactgcgacataggactca

SEQ ID NO: 4274090 - DNA, 25 bp, Homo sapien
tgcatgtcacaatgagtggccaact

SEQ ID NO: 4274091 - DNA, 25 bp, Homo sapien
gctacaaggtgcagtgtgcaacccc

SEQ ID NO: 4274092 - DNA, 25 bp, Homo sapien
ggactcagtgaagagcctagccagc

SEQ ID NO: 4274093 - DNA, 25 bp, Homo sapien
gcctcggtggtcaggaagcattacc

SEQ ID NO: 4274094 - DNA, 25 bp, Homo sapien
tctggtactgagagggaatgccacc

SEQ ID NO: 4274095 - DNA, 25 bp, Homo sapien
tcccaagcggatctgtaaagtgcca

SEQ ID NO: 4274096 - DNA, 25 bp, Homo sapien
tcctaggtaaacgtgctgaactggc

SEQ ID NO: 4274097 - DNA, 25 bp, Homo sapien
cactgcaactgtttaacatccccaa

SEQ ID NO: 4274098 - DNA, 25 bp, Homo sapien
catccccaattcctggtttttcagt

SEQ ID NO: 4274099 - DNA, 25 bp, Homo sapien
gcaactgtttaacatccccaattcc

SEQ ID NO: 4274100 - DNA, 25 bp, Homo sapien
tcatgacttccactgcaactgttta

SEQ ID NO: 4274101 - DNA, 25 bp, Homo sapien
gaaacatagattgatcctcaaaaga

SEQ ID NO: 4274102 - DNA, 25 bp, Homo sapien
gaaagagaaacatagattgatcctc

SEQ ID NO: 4274103 - DNA, 25 bp, Homo sapien
tggaaactggagtgtaaagtagaga

SEQ ID NO: 4274104 - DNA, 25 bp, Homo sapien
ggaaactggagtgtaaagtagagaa

SEQ ID NO: 4274105 - DNA, 25 bp, Homo sapien
cctatgtggaaaaggatttgccaga

SEQ ID NO: 4274106 - DNA, 25 bp, Homo sapien
ggctggactgtagaacaggtacaaa

SEQ ID NO: 4274107 - DNA, 25 bp, Homo sapien
gagcagcataagcaccaccttcata

SEQ ID NO: 4274108 - DNA, 25 bp, Homo sapien
tcagcccgtgcaggtacatgttgcc

SEQ ID NO: 4274109 - DNA, 25 bp, Homo sapien
gacaaaggttcaatctacagaggga

SEQ ID NO: 4274110 - DNA, 25 bp, Homo sapien
taaaacatagctctaggaaactgcc

SEQ ID NO: 4274111 - DNA, 25 bp, Homo sapien
tgagccacgactacattgagcacca

SEQ ID NO: 4274112 - DNA, 25 bp, Homo sapien
ggagtgagctatccaaccaggaaca

SEQ ID NO: 4274113 - DNA, 25 bp, Homo sapien
tatgccaccccttagtacacagctt

SEQ ID NO: 4274114 - DNA, 25 bp, Homo sapien
caaggaaggagaattagagccacgc

SEQ ID NO: 4274115 - DNA, 25 bp, Homo sapien
tgcctatgagggactcaaaatcgcc

SEQ ID NO: 4274116 - DNA, 25 bp, Homo sapien
gctaaaatcctagtccatacggagg

SEQ ID NO: 4274117 - DNA, 25 bp, Homo sapien
ggaaaatgcaggctacgaaaggaac

SEQ ID NO: 4274118 - DNA, 25 bp, Homo sapien
aaaatgcaggctacgaaaggaacaa

SEQ ID NO: 4274119 - DNA, 25 bp, Homo sapien
ctggaaaatgcaggctacgaaagga

SEQ ID NO: 4274120 - DNA, 25 bp, Homo sapien
gaaaatgcaggctacgaaaggaaca

SEQ ID NO: 4274121 - DNA, 25 bp, Homo sapien
ctcccagtttcaagcgactctccca

SEQ ID NO: 4274122 - DNA, 25 bp, Homo sapien
tcccagtttcaagcgactctcccac

SEQ ID NO: 4274123 - DNA, 25 bp, Homo sapien
cccagtttcaagcgactctcccacc

SEQ ID NO: 4274124 - DNA, 25 bp, Homo sapien
ccagtttcaagcgactctcccacct

SEQ ID NO: 4274125 - DNA, 25 bp, Homo sapien
cctcgaatgagattcagggcagcac

SEQ ID NO: 4274126 - DNA, 25 bp, Homo sapien
atgttctgcaaggtgaactcctcga

SEQ ID NO: 4274127 - DNA, 25 bp, Homo sapien
ggctgtcactggttccattcggaaa

SEQ ID NO: 4274128 - DNA, 25 bp, Homo sapien
cagggcagcacacatgatgttgaga

SEQ ID NO: 4274129 - DNA, 25 bp, Homo sapien
aaaacaagtgtctagtgtaagtaat

SEQ ID NO: 4274130 - DNA, 25 bp, Homo sapien
aacaagtgtctagtgtaagtaattt

SEQ ID NO: 4274131 - DNA, 25 bp, Homo sapien
aaacaagtgtctagtgtaagtaatt

SEQ ID NO: 4274132 - DNA, 25 bp, Homo sapien
tccagagtgagaaccgctggaggct

SEQ ID NO: 4274133 - DNA, 25 bp, Homo sapien
tccatctgagaggaacttacatagt

SEQ ID NO: 4274134 - DNA, 25 bp, Homo sapien
ttcatcaccccatttgccacatctg

SEQ ID NO: 4274135 - DNA, 25 bp, Homo sapien
caggctccaagtgcatcggtgtgtg

SEQ ID NO: 4274136 - DNA, 25 bp, Homo sapien
gtgaattcccaccacagggtctcca

SEQ ID NO: 4274137 - DNA, 25 bp, Homo sapien
ggctaggccaatgcaggtagtgtca

SEQ ID NO: 4274138 - DNA, 25 bp, Homo sapien
atgcaggccacgtccccgaaagaag

SEQ ID NO: 4274139 - DNA, 25 bp, Homo sapien
caagaaaagcgtatggcctggaggc

SEQ ID NO: 4274140 - DNA, 25 bp, Homo sapien
cagttcgacctattcctgagactgt

SEQ ID NO: 4274141 - DNA, 25 bp, Homo sapien
tggctttaaacagtcctgtagctgt

SEQ ID NO: 4274142 - DNA, 25 bp, Homo sapien
gcttggctttaaacagtcctgtagc

SEQ ID NO: 4274143 - DNA, 25 bp, Homo sapien
gctgcaggtatattgtctcttcagt

SEQ ID NO: 4274144 - DNA, 25 bp, Homo sapien
gggggaattagcctcagacttctcc

SEQ ID NO: 4274145 - DNA, 25 bp, Homo sapien
gacagcctgtgatcactcttattta

SEQ ID NO: 4274146 - DNA, 25 bp, Homo sapien
gcatattctattgggggaattagcc

SEQ ID NO: 4274147 - DNA, 25 bp, Homo sapien
tatttattcatgcatgagggatgca

SEQ ID NO: 4274148 - DNA, 25 bp, Homo sapien
ttacgaggcgcaagaacaacatttc

SEQ ID NO: 4274149 - DNA, 25 bp, Homo sapien
ccaagtagaggtgagttaccctgta

SEQ ID NO: 4274150 - DNA, 25 bp, Homo sapien
caatcatttcaagttcagggtacag

SEQ ID NO: 4274151 - DNA, 25 bp, Homo sapien
tgctgagaactcatccctatgggac

SEQ ID NO: 4274152 - DNA, 25 bp, Homo sapien
gcagccttagggaactaacacactc

SEQ ID NO: 4274153 - DNA, 25 bp, Homo sapien
tattaaaagctatggtactgctcac

SEQ ID NO: 4274154 - DNA, 25 bp, Homo sapien
tagggaactaacacactccttacta

SEQ ID NO: 4274155 - DNA, 25 bp, Homo sapien
tccttactattaaaagctatggtac

SEQ ID NO: 4274156 - DNA, 25 bp, Homo sapien
acctggatactgggccagtcgcaag

SEQ ID NO: 4274157 - DNA, 25 bp, Homo sapien
aaccttctgcagaacctcgacctgg

SEQ ID NO: 4274158 - DNA, 25 bp, Homo sapien
tgtatactaaagtcacaaccttctg

SEQ ID NO: 4274159 - DNA, 25 bp, Homo sapien
ggctaaactcttgagccgtctcctc

SEQ ID NO: 4274160 - DNA, 25 bp, Homo sapien
tgggtgtggtaaaaatcagtagagg

SEQ ID NO: 4274161 - DNA, 25 bp, Homo sapien
gggtgtggtaaaaatcagtagaggc

SEQ ID NO: 4274162 - DNA, 25 bp, Homo sapien
ggctgagaggggcagtccatccctt

SEQ ID NO: 4274163 - DNA, 25 bp, Homo sapien
ttgggtgtggtaaaaatcagtagag

SEQ ID NO: 4274164 - DNA, 25 bp, Homo sapien
cacgcaggcaaaaaagatcacggac

SEQ ID NO: 4274165 - DNA, 25 bp, Homo sapien
cgcaggcaaaaaagatcacggacat

SEQ ID NO: 4274166 - DNA, 25 bp, Homo sapien
taccacgcaggcaaaaaagatcacg

SEQ ID NO: 4274167 - DNA, 25 bp, Homo sapien
ccgtaccacgcaggcaaaaaagatc

SEQ ID NO: 4274168 - DNA, 25 bp, Homo sapien
gtccacaagagaagtcatgaggaca

SEQ ID NO: 4274169 - DNA, 25 bp, Homo sapien
tccacaagagaagtcatgaggacac

SEQ ID NO: 4274170 - DNA, 25 bp, Homo sapien
ggtccacaagagaagtcatgaggac

SEQ ID NO: 4274171 - DNA, 25 bp, Homo sapien
tgcgcgtgcgcgagtcttgagccac

SEQ ID NO: 4274172 - DNA, 25 bp, Homo sapien
ggccttcggaagtcggcgcctgcca

SEQ ID NO: 4274173 - DNA, 25 bp, Homo sapien
caggcgcaggtaggccgtggtgcgc

SEQ ID NO: 4274174 - DNA, 25 bp, Homo sapien
aatcttagccgaccgggagggctcg

SEQ ID NO: 4274175 - DNA, 25 bp, Homo sapien
tgatctaagctcgattcctgccggg

SEQ ID NO: 4274176 - DNA, 25 bp, Homo sapien
ggcggtttgagatccaagcctgtaa

SEQ ID NO: 4274177 - DNA, 25 bp, Homo sapien
tgtaattctcacgtccggaggtgag

SEQ ID NO: 4274178 - DNA, 25 bp, Homo sapien
tagcaaccggactgacgtctggagg

SEQ ID NO: 4274179 - DNA, 25 bp, Homo sapien
ggaatcacaggaggctaactaggca

SEQ ID NO: 4274180 - DNA, 25 bp, Homo sapien
gaatttacagaagcttctaggctgg

SEQ ID NO: 4274181 - DNA, 25 bp, Homo sapien
ggcacccacagatggatgactggct

SEQ ID NO: 4274182 - DNA, 25 bp, Homo sapien
gattaggtaggtagcagagtccgtc

SEQ ID NO: 4274183 - DNA, 25 bp, Homo sapien
gcaactggtgtggttcaggcaccat

SEQ ID NO: 4274184 - DNA, 25 bp, Homo sapien
tggtgcaactggtgtggttcaggca

SEQ ID NO: 4274185 - DNA, 25 bp, Homo sapien
actctctgactggtgcaactggtgt

SEQ ID NO: 4274186 - DNA, 25 bp, Homo sapien
gtgcaactggtgtggttcaggcacc

SEQ ID NO: 4274187 - DNA, 25 bp, Homo sapien
gagatgtagtacctaaagtcctagc

SEQ ID NO: 4274188 - DNA, 25 bp, Homo sapien
tccacctctgaagttataaatgcag

SEQ ID NO: 4274189 - DNA, 25 bp, Homo sapien
tcttcagtcctccactcctagggta

SEQ ID NO: 4274190 - DNA, 25 bp, Homo sapien
ccaatcattgttcactttggctcca

SEQ ID NO: 4274191 - DNA, 25 bp, Homo sapien
tcccaggaacctccgttactgaaga

SEQ ID NO: 4274192 - DNA, 25 bp, Homo sapien
aatatcctgcatgctccccagatct

SEQ ID NO: 4274193 - DNA, 25 bp, Homo sapien
tcagcgctcctatttgccaaggcag

SEQ ID NO: 4274194 - DNA, 25 bp, Homo sapien
gatcagtgctacatacattgtcaac

SEQ ID NO: 4274195 - DNA, 25 bp, Homo sapien
ctgatagaaactttaatgatgttaa

SEQ ID NO: 4274196 - DNA, 25 bp, Homo sapien
aatgatgttaaaaaaccaatcagtc

SEQ ID NO: 4274197 - DNA, 25 bp, Homo sapien
gatgttaaaaaaccaatcagtccag

SEQ ID NO: 4274198 - DNA, 25 bp, Homo sapien
taaaaaaccaatcagtccaggtgcg

SEQ ID NO: 4274199 - DNA, 25 bp, Homo sapien
catcactgggatgttcaagtctact

SEQ ID NO: 4274200 - DNA, 25 bp, Homo sapien
gacagggtctttaccaactcaactg

SEQ ID NO: 4274201 - DNA, 25 bp, Homo sapien
gacttgataccttgctaaatggaca

SEQ ID NO: 4274202 - DNA, 25 bp, Homo sapien
ctctgtggctctttcgaaacgtgaa

SEQ ID NO: 4274203 - DNA, 25 bp, Homo sapien
taaaacctatttacattgaagcctg

SEQ ID NO: 4274204 - DNA, 25 bp, Homo sapien
ctaaacacggtaattacaaagctgg

SEQ ID NO: 4274205 - DNA, 25 bp, Homo sapien
ttgaagcctgatgtcctaaacacgg

SEQ ID NO: 4274206 - DNA, 25 bp, Homo sapien
gtcacataaccagtggcagaaagaa

SEQ ID NO: 4274207 - DNA, 25 bp, Homo sapien
tcacagcgctcggaaacagagaagt

SEQ ID NO: 4274208 - DNA, 25 bp, Homo sapien
gtatcggaaaatgcgcggcgctcac

SEQ ID NO: 4274209 - DNA, 25 bp, Homo sapien
acagagaagtctcgcggtatcggaa

SEQ ID NO: 4274210 - DNA, 25 bp, Homo sapien
cagaatggtcagtaagcacaggaca

SEQ ID NO: 4274211 - DNA, 25 bp, Homo sapien
cggctttcagattgggcgactgact

SEQ ID NO: 4274212 - DNA, 25 bp, Homo sapien
agggcgcaggcgcatccacggcttt

SEQ ID NO: 4274213 - DNA, 25 bp, Homo sapien
cgcaggtataggagcgctggctgga

SEQ ID NO: 4274214 - DNA, 25 bp, Homo sapien
ggcaaacagggaacgcgcaggtata

SEQ ID NO: 4274215 - DNA, 25 bp, Homo sapien
cgcagtgccacttcgacatcgagat

SEQ ID NO: 4274216 - DNA, 25 bp, Homo sapien
aggaccggccgcagtgccacttcga

SEQ ID NO: 4274217 - DNA, 25 bp, Homo sapien
cttcgacatcgagatcaaccgggag

SEQ ID NO: 4274218 - DNA, 25 bp, Homo sapien
tcttgccgccacctcggtcgcgatg

SEQ ID NO: 4274219 - DNA, 25 bp, Homo sapien
aaataagtgttactagaaagccttg

SEQ ID NO: 4274220 - DNA, 25 bp, Homo sapien
aataagtgttactagaaagccttga

SEQ ID NO: 4274221 - DNA, 25 bp, Homo sapien
tattttgtagtgaatccatgcttta

SEQ ID NO: 4274222 - DNA, 25 bp, Homo sapien
cagacgcgggtgtatcattttgagg

SEQ ID NO: 4274223 - DNA, 25 bp, Homo sapien
gcatggtggctctcttagtttttgc

SEQ ID NO: 4274224 - DNA, 25 bp, Homo sapien
tgaatccatgctttagataacaggg

SEQ ID NO: 4274225 - DNA, 25 bp, Homo sapien
ggctcaccacaccctctgccttcct

SEQ ID NO: 4274226 - DNA, 25 bp, Homo sapien
gctcaccacaccctctgccttcctg

SEQ ID NO: 4274227 - DNA, 25 bp, Homo sapien
cagggtttcttcatgatgcccaggc

SEQ ID NO: 4274228 - DNA, 25 bp, Homo sapien
gagacagggtttcttcatgatgccc

SEQ ID NO: 4274229 - DNA, 25 bp, Homo sapien
ttgaggctcttaggtgggtacatac

SEQ ID NO: 4274230 - DNA, 25 bp, Homo sapien
gtttcctttgcctcagatatgaata

SEQ ID NO: 4274231 - DNA, 25 bp, Homo sapien
ggattgttgtcttcttagtgaactc

SEQ ID NO: 4274232 - DNA, 25 bp, Homo sapien
gatatgaatatagttacttccgttt

SEQ ID NO: 4274233 - DNA, 25 bp, Homo sapien
tgtatcttaaagtccgagagacagt

SEQ ID NO: 4274234 - DNA, 25 bp, Homo sapien
tacttgtacaaagaattgaagcctg

SEQ ID NO: 4274235 - DNA, 25 bp, Homo sapien
tgtgcaggagtatggacactaagtc

SEQ ID NO: 4274236 - DNA, 25 bp, Homo sapien
cataggagttagaaacctaccagcc

SEQ ID NO: 4274237 - DNA, 25 bp, Homo sapien
ggcaaatcgagggaaacataccaat

SEQ ID NO: 4274238 - DNA, 25 bp, Homo sapien
cagagcgttccttttatcaatggca

SEQ ID NO: 4274239 - DNA, 25 bp, Homo sapien
tattctcaaacatgacagagcgttc

SEQ ID NO: 4274240 - DNA, 25 bp, Homo sapien
tataaggtctaacaactgcctcagc

SEQ ID NO: 4274241 - DNA, 25 bp, Homo sapien
tgaaagataactgtccagcatgagg

SEQ ID NO: 4274242 - DNA, 25 bp, Homo sapien
gattggaagtgaatctcagttgtcc

SEQ ID NO: 4274243 - DNA, 25 bp, Homo sapien
tgaggtctccatgcataattgaaat

SEQ ID NO: 4274244 - DNA, 25 bp, Homo sapien
ggtgacctgctgttgagcgagcatt

SEQ ID NO: 4274245 - DNA, 25 bp, Homo sapien
taaatagattcccacttagccacga

SEQ ID NO: 4274246 - DNA, 25 bp, Homo sapien
ttagccacgatgcttttcttaagca

SEQ ID NO: 4274247 - DNA, 25 bp, Homo sapien
aactggtagtaactggtcctgggca

SEQ ID NO: 4274248 - DNA, 25 bp, Homo sapien
gctattattggcactctatgttaca

SEQ ID NO: 4274249 - DNA, 25 bp, Homo sapien
gctgtgtatttatggctacaagtca

SEQ ID NO: 4274250 - DNA, 25 bp, Homo sapien
taagatggctactattgctgttttg

SEQ ID NO: 4274251 - DNA, 25 bp, Homo sapien
gaacacatcgtgtttgacatcatct

SEQ ID NO: 4274252 - DNA, 25 bp, Homo sapien
tgtttattacatagtaccacaaagc

SEQ ID NO: 4274253 - DNA, 25 bp, Homo sapien
gattggaccatggttgagccctcaa

SEQ ID NO: 4274254 - DNA, 25 bp, Homo sapien
gaagtgtttgggtggccagccataa

SEQ ID NO: 4274255 - DNA, 25 bp, Homo sapien
tggttgagccctcaagggagcgctc

SEQ ID NO: 4274256 - DNA, 25 bp, Homo sapien
cataaagagagattggaccatggtt

SEQ ID NO: 4274257 - DNA, 25 bp, Homo sapien
gttcccaagtaccaagcgaaatctg

SEQ ID NO: 4274258 - DNA, 25 bp, Homo sapien
catgtgtccctgtaaggaaggttcc

SEQ ID NO: 4274259 - DNA, 25 bp, Homo sapien
taagcagtacaatatcatgtgtccc

SEQ ID NO: 4274260 - DNA, 25 bp, Homo sapien
gaggcccagtttgcataatcgtttc

SEQ ID NO: 4274261 - DNA, 25 bp, Homo sapien
cagaccatatgcagatgtgcgagtt

SEQ ID NO: 4274262 - DNA, 25 bp, Homo sapien
agtctttggactggttatttctggt

SEQ ID NO: 4274263 - DNA, 25 bp, Homo sapien
tgaagaccgatgctgcaagcagacc

SEQ ID NO: 4274264 - DNA, 25 bp, Homo sapien
gaagtaatcgaacaaattgaaaatc

SEQ ID NO: 4274265 - DNA, 25 bp, Homo sapien
gaaggctcggattcctcttccaatt

SEQ ID NO: 4274266 - DNA, 25 bp, Homo sapien
taggcactgaatttagtactaatgt

SEQ ID NO: 4274267 - DNA, 25 bp, Homo sapien
tttttactctgaaaggtaggcactg

SEQ ID NO: 4274268 - DNA, 25 bp, Homo sapien
gaaaccaactcattcagaaggctcg

SEQ ID NO: 4274269 - DNA, 25 bp, Homo sapien
aggaaacataagaggaggccaaaag

SEQ ID NO: 4274270 - DNA, 25 bp, Homo sapien
ctaaaaagaggcgaaaggaagcaag

SEQ ID NO: 4274271 - DNA, 25 bp, Homo sapien
aaaaagaggcgaaaggaagcaagca

SEQ ID NO: 4274272 - DNA, 25 bp, Homo sapien
ttctaaaaagaggcgaaaggaagca

SEQ ID NO: 4274273 - DNA, 25 bp, Homo sapien
ctccaagatcaagatcctgttctga

SEQ ID NO: 4274274 - DNA, 25 bp, Homo sapien
tccaagatcaagatcctgttctgag

SEQ ID NO: 4274275 - DNA, 25 bp, Homo sapien
caagatcaagatcctgttctgagtc

SEQ ID NO: 4274276 - DNA, 25 bp, Homo sapien
aagatcaagatcctgttctgagtca

SEQ ID NO: 4274277 - DNA, 25 bp, Homo sapien
taaataggaaaacctgcactcggtg

SEQ ID NO: 4274278 - DNA, 25 bp, Homo sapien
gataggccccagaatagctagtgaa

SEQ ID NO: 4274279 - DNA, 25 bp, Homo sapien
tgaaaaatatactaatgggaccctg

SEQ ID NO: 4274280 - DNA, 25 bp, Homo sapien
gtagaagcggctcagacacagtggt

SEQ ID NO: 4274281 - DNA, 25 bp, Homo sapien
gaaatgcacggcttgataccccaga

SEQ ID NO: 4274282 - DNA, 25 bp, Homo sapien
ggaaatcaagcaaacagcgcacatc

SEQ ID NO: 4274283 - DNA, 25 bp, Homo sapien
tcagcacgttgaagaaagtgttccc

SEQ ID NO: 4274284 - DNA, 25 bp, Homo sapien
gatatggcaacggaacatcctcaag

SEQ ID NO: 4274285 - DNA, 25 bp, Homo sapien
tccagtgctgtggaagttaaggtgt

SEQ ID NO: 4274286 - DNA, 25 bp, Homo sapien
aagttaaggtgttgaccactgtgcc

SEQ ID NO: 4274287 - DNA, 25 bp, Homo sapien
gagccagatcaacctcattgataag

SEQ ID NO: 4274288 - DNA, 25 bp, Homo sapien
gctgagaagagccagatcaacctca

SEQ ID NO: 4274289 - DNA, 25 bp, Homo sapien
gaattgatactgttggtaaccagga

SEQ ID NO: 4274290 - DNA, 25 bp, Homo sapien
gatattggccactcaagtctactgt

SEQ ID NO: 4274291 - DNA, 25 bp, Homo sapien
tattacttcaggcttgtgggcaagg

SEQ ID NO: 4274292 - DNA, 25 bp, Homo sapien
tgaaggagaactgttaaaggcggcc

SEQ ID NO: 4274293 - DNA, 25 bp, Homo sapien
tattggttgcctgatgtagagctca

SEQ ID NO: 4274294 - DNA, 25 bp, Homo sapien
cattagaaaacaggacttaggccaa

SEQ ID NO: 4274295 - DNA, 25 bp, Homo sapien
tcagttggagggagctgacaaccct

SEQ ID NO: 4274296 - DNA, 25 bp, Homo sapien
cagttgtttgccaggtcaatagaca

SEQ ID NO: 4274297 - DNA, 25 bp, Homo sapien
ttcacgggttctggagattagctca

SEQ ID NO: 4274298 - DNA, 25 bp, Homo sapien
cgatagaacataattgcaggagtac

SEQ ID NO: 4274299 - DNA, 25 bp, Homo sapien
ggcagagattttaacctacacaggt

SEQ ID NO: 4274300 - DNA, 25 bp, Homo sapien
tctgctgcagcgttcaacttgtgtg

SEQ ID NO: 4274301 - DNA, 25 bp, Homo sapien
ccagcaaggccccatagggccagca

SEQ ID NO: 4274302 - DNA, 25 bp, Homo sapien
cagcaaggccccatagggccagcat

SEQ ID NO: 4274303 - DNA, 25 bp, Homo sapien
cctttctgcagcttgactgctggag

SEQ ID NO: 4274304 - DNA, 25 bp, Homo sapien
ccctttctgcagcttgactgctgga

SEQ ID NO: 4274305 - DNA, 25 bp, Homo sapien
cagaagcatgtaagctgctctggcc

SEQ ID NO: 4274306 - DNA, 25 bp, Homo sapien
agccctcagcgggctagctggtcag

SEQ ID NO: 4274307 - DNA, 25 bp, Homo sapien
aagcatgtaagctgctctggcctgg

SEQ ID NO: 4274308 - DNA, 25 bp, Homo sapien
gaagcatgtaagctgctctggcctg

SEQ ID NO: 4274309 - DNA, 25 bp, Homo sapien
gaggccctacgtattctggcagaga

SEQ ID NO: 4274310 - DNA, 25 bp, Homo sapien
tatcctgaggccctacgtattctgg

SEQ ID NO: 4274311 - DNA, 25 bp, Homo sapien
ggcccttgcaatcttacaggacaga

SEQ ID NO: 4274312 - DNA, 25 bp, Homo sapien
tctgggatagccttatcctgaggcc

SEQ ID NO: 4274313 - DNA, 25 bp, Homo sapien
agttcctgcccactcgtgagtagga

SEQ ID NO: 4274314 - DNA, 25 bp, Homo sapien
cccaggagatactgctgcagctgga

SEQ ID NO: 4274315 - DNA, 25 bp, Homo sapien
ctgcccactcgtgagtaggacaaca

SEQ ID NO: 4274316 - DNA, 25 bp, Homo sapien
gagtaggacaacatacccaggagat

SEQ ID NO: 4274317 - DNA, 25 bp, Homo sapien
gaatatcaggatgggggcaacatga

SEQ ID NO: 4274318 - DNA, 25 bp, Homo sapien
gatgtccacagaggcctctcctcta

SEQ ID NO: 4274319 - DNA, 25 bp, Homo sapien
gaggggatgtccacagaggcctctc

SEQ ID NO: 4274320 - DNA, 25 bp, Homo sapien
cagtagtgagcttggggtaggagga

SEQ ID NO: 4274321 - DNA, 25 bp, Homo sapien
cagtggtcaggtcacacggctagag

SEQ ID NO: 4274322 - DNA, 25 bp, Homo sapien
gggccagtcaccttagatgatttga

SEQ ID NO: 4274323 - DNA, 25 bp, Homo sapien
cttgccaggtctagtgccccgtggt

SEQ ID NO: 4274324 - DNA, 25 bp, Homo sapien
ttgatcgctgcggttgtagtcctgg

SEQ ID NO: 4274325 - DNA, 25 bp, Homo sapien
tgcagcatgaggccgccaggtaggt

SEQ ID NO: 4274326 - DNA, 25 bp, Homo sapien
gactggaccagttggggaccccaga

SEQ ID NO: 4274327 - DNA, 25 bp, Homo sapien
cagcgatgtttgactcccggacgaa

SEQ ID NO: 4274328 - DNA, 25 bp, Homo sapien
gatttcacggcagcttcctatcctg

SEQ ID NO: 4274329 - DNA, 25 bp, Homo sapien
gggttcagtccctcagcgtgggatc

SEQ ID NO: 4274330 - DNA, 25 bp, Homo sapien
cgaacttcccggcagaaaggaggct

SEQ ID NO: 4274331 - DNA, 25 bp, Homo sapien
tccttgcactccttgatctttgggc

SEQ ID NO: 4274332 - DNA, 25 bp, Homo sapien
tgggcttccgtgatgtcctcagggt

SEQ ID NO: 4274333 - DNA, 25 bp, Homo sapien
aaaaagttgatctctcccagtgggc

SEQ ID NO: 4274334 - DNA, 25 bp, Homo sapien
ttttaatctctagtcccagtgcctg

SEQ ID NO: 4274335 - DNA, 25 bp, Homo sapien
ccagatgtcagaatgaggcgactag

SEQ ID NO: 4274336 - DNA, 25 bp, Homo sapien
gggtcccaccgtccatctggacttc

SEQ ID NO: 4274337 - DNA, 25 bp, Homo sapien
caaggagatctgtgggggtcccacc

SEQ ID NO: 4274338 - DNA, 25 bp, Homo sapien
gcgactagggcaccatactcacttt

SEQ ID NO: 4274339 - DNA, 25 bp, Homo sapien
tgtttggctagaactcaggcctgga

SEQ ID NO: 4274340 - DNA, 25 bp, Homo sapien
gctcatgctgccatagtctccacgg

SEQ ID NO: 4274341 - DNA, 25 bp, Homo sapien
tgacaactgctcgtgtacaggcacc

SEQ ID NO: 4274342 - DNA, 25 bp, Homo sapien
tagtggcagaatggccatgcccagg

SEQ ID NO: 4274343 - DNA, 25 bp, Homo sapien
ccatctgcaacctgtgttagttcac

SEQ ID NO: 4274344 - DNA, 25 bp, Homo sapien
tgtgttagttcacttctccttaggc

SEQ ID NO: 4274345 - DNA, 25 bp, Homo sapien
ttggcctgctccatctgcaacctgt

SEQ ID NO: 4274346 - DNA, 25 bp, Homo sapien
agtatagtggttatttacaggtgca

SEQ ID NO: 4274347 - DNA, 25 bp, Homo sapien
tattctatcggtcaggccccatctg

SEQ ID NO: 4274348 - DNA, 25 bp, Homo sapien
tagctgagcagagcccatccctcta

SEQ ID NO: 4274349 - DNA, 25 bp, Homo sapien
ccccatctggcccaagaatagctga

SEQ ID NO: 4274350 - DNA, 25 bp, Homo sapien
aagtcttttattctatcggtcaggc

SEQ ID NO: 4274351 - DNA, 25 bp, Homo sapien
ctcctccagtgccaaggttcgctca

SEQ ID NO: 4274352 - DNA, 25 bp, Homo sapien
aaggttcgctcacgctcctttacca

SEQ ID NO: 4274353 - DNA, 25 bp, Homo sapien
agtgccaaggttcgctcacgctcct

SEQ ID NO: 4274354 - DNA, 25 bp, Homo sapien
agctggacgccacagtaggtgacaa

SEQ ID NO: 4274355 - DNA, 25 bp, Homo sapien
gaggcattttggaaggtcacggtcc

SEQ ID NO: 4274356 - DNA, 25 bp, Homo sapien
tcacggtccttgaggctgatgcctg

SEQ ID NO: 4274357 - DNA, 25 bp, Homo sapien
gagtcatagatgctcaggagcagca

SEQ ID NO: 4274358 - DNA, 25 bp, Homo sapien
agggagtcatagatgctcaggagca

SEQ ID NO: 4274359 - DNA, 25 bp, Homo sapien
ctgtgagtagcaggcgccgggcaac

SEQ ID NO: 4274360 - DNA, 25 bp, Homo sapien
tgaatttgaggctgttcaggctcac

SEQ ID NO: 4274361 - DNA, 25 bp, Homo sapien
aggcgccgggcaaccagctctgtga

SEQ ID NO: 4274362 - DNA, 25 bp, Homo sapien
ctcacaaggttgtacatgatgatgg

SEQ ID NO: 4274363 - DNA, 25 bp, Homo sapien
ctacgggacatctgcactgacagag

SEQ ID NO: 4274364 - DNA, 25 bp, Homo sapien
gggtcagcagccttacccacctggc

SEQ ID NO: 4274365 - DNA, 25 bp, Homo sapien
cggtccaggaaagcatgggcagcgg

SEQ ID NO: 4274366 - DNA, 25 bp, Homo sapien
catgggcagcgggacaagaggccaa

SEQ ID NO: 4274367 - DNA, 25 bp, Homo sapien
ggaaagaggacatggtgggtcagca

SEQ ID NO: 4274368 - DNA, 25 bp, Homo sapien
taaggaatgaccacaggtagacaat

SEQ ID NO: 4274369 - DNA, 25 bp, Homo sapien
tagacaatgtcacaaggcccaagcc

SEQ ID NO: 4274370 - DNA, 25 bp, Homo sapien
catccagagctcaaagttgaggcca

SEQ ID NO: 4274371 - DNA, 25 bp, Homo sapien
gccagctctgggatcacagcggaat

SEQ ID NO: 4274372 - DNA, 25 bp, Homo sapien
tctggctagaagatcccaagtggtc

SEQ ID NO: 4274373 - DNA, 25 bp, Homo sapien
tactagctctatgacgatgacccct

SEQ ID NO: 4274374 - DNA, 25 bp, Homo sapien
cagttgctcagggtataagccttgg

SEQ ID NO: 4274375 - DNA, 25 bp, Homo sapien
tcaaattgtggcaggctcagcctgg

SEQ ID NO: 4274376 - DNA, 25 bp, Homo sapien
ccagtcgttgatgccacggtcaaag

SEQ ID NO: 4274377 - DNA, 25 bp, Homo sapien
gcaaagccagtcgttgatgccacgg

SEQ ID NO: 4274378 - DNA, 25 bp, Homo sapien
gtcgttgatgccacggtcaaagtgc

SEQ ID NO: 4274379 - DNA, 25 bp, Homo sapien
aagccagtcgttgatgccacggtca

SEQ ID NO: 4274380 - DNA, 25 bp, Homo sapien
tggtcgaggcatgccacagtgttga

SEQ ID NO: 4274381 - DNA, 25 bp, Homo sapien
acaccaaagaggacggccgccttca

SEQ ID NO: 4274382 - DNA, 25 bp, Homo sapien
tttccgcaaagacgtagagtgcggt

SEQ ID NO: 4274383 - DNA, 25 bp, Homo sapien
caccaggtttgaataggctaggcca

SEQ ID NO: 4274384 - DNA, 25 bp, Homo sapien
aagtgaaagaagatgtcgacggcca

SEQ ID NO: 4274385 - DNA, 25 bp, Homo sapien
tgatggccaccacgcttaggcctgc

SEQ ID NO: 4274386 - DNA, 25 bp, Homo sapien
cctgggctcggatgtgccacagctc

SEQ ID NO: 4274387 - DNA, 25 bp, Homo sapien
tctgggaggcggttggcgaacttga

SEQ ID NO: 4274388 - DNA, 25 bp, Homo sapien
ccatggctttatccaggagtcctgc

SEQ ID NO: 4274389 - DNA, 25 bp, Homo sapien
gagccatggctttatccaggagtcc

SEQ ID NO: 4274390 - DNA, 25 bp, Homo sapien
ggcaggaggagccatggctttatcc

SEQ ID NO: 4274391 - DNA, 25 bp, Homo sapien
caggaggagccatggctttatccag

SEQ ID NO: 4274392 - DNA, 25 bp, Homo sapien
tggtgcaacgcagcactgtgaagct

SEQ ID NO: 4274393 - DNA, 25 bp, Homo sapien
ctgagcatggaagcgatcaaaggtc

SEQ ID NO: 4274394 - DNA, 25 bp, Homo sapien
ttgagcaggtcagctaaggagtagt

SEQ ID NO: 4274395 - DNA, 25 bp, Homo sapien
tctccagtgcaaagctggtgcaacg

SEQ ID NO: 4274396 - DNA, 25 bp, Homo sapien
aaaagcgaggccacatagaggccca

SEQ ID NO: 4274397 - DNA, 25 bp, Homo sapien
aggtaccaagggcccattgtgccca

SEQ ID NO: 4274398 - DNA, 25 bp, Homo sapien
aaggccccgtacacagcatacatcc

SEQ ID NO: 4274399 - DNA, 25 bp, Homo sapien
tgccaagagattagggggtccatct

SEQ ID NO: 4274400 - DNA, 25 bp, Homo sapien
atgacgttgcgaaaggaggtgaacc

SEQ ID NO: 4274401 - DNA, 25 bp, Homo sapien
ggcaaccatcgtgcagagtttagca

SEQ ID NO: 4274402 - DNA, 25 bp, Homo sapien
gtttagcaaacagcacatgtccgga

SEQ ID NO: 4274403 - DNA, 25 bp, Homo sapien
catgtccggagagggcaaagatgat

SEQ ID NO: 4274404 - DNA, 25 bp, Homo sapien
catcttccggccaatgtactcccag

SEQ ID NO: 4274405 - DNA, 25 bp, Homo sapien
gtcgcacagactcccggaaggcctt

SEQ ID NO: 4274406 - DNA, 25 bp, Homo sapien
agccaggtcgcacagactcccggaa

SEQ ID NO: 4274407 - DNA, 25 bp, Homo sapien
tgtactcccagccaggtcgcacaga

SEQ ID NO: 4274408 - DNA, 25 bp, Homo sapien
tcccccgtggacaaggctgccccac

SEQ ID NO: 4274409 - DNA, 25 bp, Homo sapien
ttcccccgtggacaaggctgcccca

SEQ ID NO: 4274410 - DNA, 25 bp, Homo sapien
ccccactcagcaccagagagtagag

SEQ ID NO: 4274411 - DNA, 25 bp, Homo sapien
agccgccggcaatgctgtcttgatg

SEQ ID NO: 4274412 - DNA, 25 bp, Homo sapien
cagcaccagagagtagaggcccagc

SEQ ID NO: 4274413 - DNA, 25 bp, Homo sapien
ccggcaatgctgtcttgatgcccat

SEQ ID NO: 4274414 - DNA, 25 bp, Homo sapien
tctgccaaaaccgctcctgccaagg

SEQ ID NO: 4274415 - DNA, 25 bp, Homo sapien
tgccaaaaccgctcctgccaaggcc

SEQ ID NO: 4274416 - DNA, 25 bp, Homo sapien
ccaccctctgccaaaaccgctcctg

SEQ ID NO: 4274417 - DNA, 25 bp, Homo sapien
accctctgccaaaaccgctcctgcc

SEQ ID NO: 4274418 - DNA, 25 bp, Homo sapien
tctatcactacagtcaggtttctgc

SEQ ID NO: 4274419 - DNA, 25 bp, Homo sapien
ctcgcattaagcctccagcctgtca

SEQ ID NO: 4274420 - DNA, 25 bp, Homo sapien
agccaagcctccatcctcgcattaa

SEQ ID NO: 4274421 - DNA, 25 bp, Homo sapien
agggtccccacctcgatcagtgagt

SEQ ID NO: 4274422 - DNA, 25 bp, Homo sapien
tgtgtccgtgaccacactgccccac

SEQ ID NO: 4274423 - DNA, 25 bp, Homo sapien
ctgtgtccgtgaccacactgcccca

SEQ ID NO: 4274424 - DNA, 25 bp, Homo sapien
caagggaccctggcacactgcccac

SEQ ID NO: 4274425 - DNA, 25 bp, Homo sapien
aggaggccgcaagggaccctggcac

SEQ ID NO: 4274426 - DNA, 25 bp, Homo sapien
cttgaggaggccgcaagggaccctg

SEQ ID NO: 4274427 - DNA, 25 bp, Homo sapien
cgcaagggaccctggcacactgccc

SEQ ID NO: 4274428 - DNA, 25 bp, Homo sapien
tccggcttccaactgtccgtccgtg

SEQ ID NO: 4274429 - DNA, 25 bp, Homo sapien
ttccaactgtccgtccgtgcgaccg

SEQ ID NO: 4274430 - DNA, 25 bp, Homo sapien
tccaactgtccgtccgtgcgaccgg

SEQ ID NO: 4274431 - DNA, 25 bp, Homo sapien
ggcttccaactgtccgtccgtgcga

SEQ ID NO: 4274432 - DNA, 25 bp, Homo sapien
acccccttgaggttatgagcggtga

SEQ ID NO: 4274433 - DNA, 25 bp, Homo sapien
cccacccccttgaggttatgagcgg

SEQ ID NO: 4274434 - DNA, 25 bp, Homo sapien
ggttatgagcggtgagtggtgacag

SEQ ID NO: 4274435 - DNA, 25 bp, Homo sapien
ccccttgaggttatgagcggtgagt

SEQ ID NO: 4274436 - DNA, 25 bp, Homo sapien
gagctaagaccagcacttggccctg

SEQ ID NO: 4274437 - DNA, 25 bp, Homo sapien
tgtaaaatgggcataccgctggccc

SEQ ID NO: 4274438 - DNA, 25 bp, Homo sapien
cagcccatagggaagatgttgccac

SEQ ID NO: 4274439 - DNA, 25 bp, Homo sapien
ccacgtgagggacaggaagctgact

SEQ ID NO: 4274440 - DNA, 25 bp, Homo sapien
caatgctgtcaaggttgcccgtgga

SEQ ID NO: 4274441 - DNA, 25 bp, Homo sapien
gaggcactggtactaacctggacag

SEQ ID NO: 4274442 - DNA, 25 bp, Homo sapien
gaatcatcagttcatcccggtggcc

SEQ ID NO: 4274443 - DNA, 25 bp, Homo sapien
tccaatgagggaatggagcagacct

SEQ ID NO: 4274444 - DNA, 25 bp, Homo sapien
aacccctgggtcattagaggactga

SEQ ID NO: 4274445 - DNA, 25 bp, Homo sapien
caaactggttgagagcatagtgccc

SEQ ID NO: 4274446 - DNA, 25 bp, Homo sapien
tattacaagtccaagggtctgcacc

SEQ ID NO: 4274447 - DNA, 25 bp, Homo sapien
tagggtaaccaagggctcttctgtg

SEQ ID NO: 4274448 - DNA, 25 bp, Homo sapien
aacacctgcccgagggactgcatct

SEQ ID NO: 4274449 - DNA, 25 bp, Homo sapien
acagccgccttgccatcccagagct

SEQ ID NO: 4274450 - DNA, 25 bp, Homo sapien
cacagccgccttgccatcccagagc

SEQ ID NO: 4274451 - DNA, 25 bp, Homo sapien
gctggcttcccggagcagatggagt

SEQ ID NO: 4274452 - DNA, 25 bp, Homo sapien
tcagacagagtcttatcctctcaag

SEQ ID NO: 4274453 - DNA, 25 bp, Homo sapien
ggccaggccgacactgggctgtcat

SEQ ID NO: 4274454 - DNA, 25 bp, Homo sapien
catccttaaggagcctcttctggta

SEQ ID NO: 4274455 - DNA, 25 bp, Homo sapien
ttgcctgtcttctgctgccgcaggg

SEQ ID NO: 4274456 - DNA, 25 bp, Homo sapien
tattgcttgcctgtcttctgctgcc

SEQ ID NO: 4274457 - DNA, 25 bp, Homo sapien
cctgtcttctgctgccgcagggcct

SEQ ID NO: 4274458 - DNA, 25 bp, Homo sapien
gggcctgcaggaagacacttttcac

SEQ ID NO: 4274459 - DNA, 25 bp, Homo sapien
gatctcatggtacatccggaagtcc

SEQ ID NO: 4274460 - DNA, 25 bp, Homo sapien
caggatctcatggtacatccggaag

SEQ ID NO: 4274461 - DNA, 25 bp, Homo sapien
gcccaggatctcatggtacatccgg

SEQ ID NO: 4274462 - DNA, 25 bp, Homo sapien
ctcatggtacatccggaagtcctcc

SEQ ID NO: 4274463 - DNA, 25 bp, Homo sapien
ttctcgctcccggttgggttgtgcc

SEQ ID NO: 4274464 - DNA, 25 bp, Homo sapien
ttccacgggcacatcggagagctgg

SEQ ID NO: 4274465 - DNA, 25 bp, Homo sapien
tgggttgtgcctgttgttagaggtg

SEQ ID NO: 4274466 - DNA, 25 bp, Homo sapien
catttgggattccacgggcacatcg

SEQ ID NO: 4274467 - DNA, 25 bp, Homo sapien
ggctccaggcgtatcttctccagat

SEQ ID NO: 4274468 - DNA, 25 bp, Homo sapien
ctgttttggtcctgggagctgctct

SEQ ID NO: 4274469 - DNA, 25 bp, Homo sapien
ccaggcgtatcttctccagatgttg

SEQ ID NO: 4274470 - DNA, 25 bp, Homo sapien
gctccaggcgtatcttctccagatg

SEQ ID NO: 4274471 - DNA, 25 bp, Homo sapien
ggtgcggtgtcgctcctcctgcagc

SEQ ID NO: 4274472 - DNA, 25 bp, Homo sapien
gagcttgctgttgctctcctccacc

SEQ ID NO: 4274473 - DNA, 25 bp, Homo sapien
ttcctctctgactccaggagcttgc

SEQ ID NO: 4274474 - DNA, 25 bp, Homo sapien
tctctgactccaggagcttgctgtt

SEQ ID NO: 4274475 - DNA, 25 bp, Homo sapien
ctggtgattagagaggaggggatgc

SEQ ID NO: 4274476 - DNA, 25 bp, Homo sapien
gattagagaggaggggatgctacat

SEQ ID NO: 4274477 - DNA, 25 bp, Homo sapien
gtgattagagaggaggggatgctac

SEQ ID NO: 4274478 - DNA, 25 bp, Homo sapien
tagagaggaggggatgctacatgcc

SEQ ID NO: 4274479 - DNA, 25 bp, Homo sapien
tttcaccttctaggagccaccttgc

SEQ ID NO: 4274480 - DNA, 25 bp, Homo sapien
gagtgttgacagaatccagttccag

SEQ ID NO: 4274481 - DNA, 25 bp, Homo sapien
tacccttaacacactttgaatctca

SEQ ID NO: 4274482 - DNA, 25 bp, Homo sapien
tctttaaagccagctagataccctt

SEQ ID NO: 4274483 - DNA, 25 bp, Homo sapien
cccagctgggtctaacgatgtgtct

SEQ ID NO: 4274484 - DNA, 25 bp, Homo sapien
tcatctgatgcatgggatccttttc

SEQ ID NO: 4274485 - DNA, 25 bp, Homo sapien
cctgtagttctaggactgtggtctc

SEQ ID NO: 4274486 - DNA, 25 bp, Homo sapien
gagttcaggtatgttacccagctgg

SEQ ID NO: 4274487 - DNA, 25 bp, Homo sapien
caaactcggtgagccggtcacgctc

SEQ ID NO: 4274488 - DNA, 25 bp, Homo sapien
gatctctgacacttgtgcctgccag

SEQ ID NO: 4274489 - DNA, 25 bp, Homo sapien
ctctgacacttgtgcctgccagcct

SEQ ID NO: 4274490 - DNA, 25 bp, Homo sapien
aactcggtgagccggtcacgctcca

SEQ ID NO: 4274491 - DNA, 25 bp, Homo sapien
cttttcggggatagcagcccagaga

SEQ ID NO: 4274492 - DNA, 25 bp, Homo sapien
ccacttttcggggatagcagcccag

SEQ ID NO: 4274493 - DNA, 25 bp, Homo sapien
tttcggggatagcagcccagagaag

SEQ ID NO: 4274494 - DNA, 25 bp, Homo sapien
tgtcccccacttttcggggatagca

SEQ ID NO: 4274495 - DNA, 25 bp, Homo sapien
acttggaggctttgcctggaacctg

SEQ ID NO: 4274496 - DNA, 25 bp, Homo sapien
ttgcctggaacctgagctgacctgc

SEQ ID NO: 4274497 - DNA, 25 bp, Homo sapien
gggccacttggaggctttgcctgga

SEQ ID NO: 4274498 - DNA, 25 bp, Homo sapien
actggggccacttggaggctttgcc

SEQ ID NO: 4274499 - DNA, 25 bp, Homo sapien
ggaaggcctcgtgagagcagattcc

SEQ ID NO: 4274500 - DNA, 25 bp, Homo sapien
gggaaggcctcgtgagagcagattc

SEQ ID NO: 4274501 - DNA, 25 bp, Homo sapien
gaaggcctcgtgagagcagattcca

SEQ ID NO: 4274502 - DNA, 25 bp, Homo sapien
agggaaggcctcgtgagagcagatt

SEQ ID NO: 4274503 - DNA, 25 bp, Homo sapien
gaactgggtataggcagggctgacc

SEQ ID NO: 4274504 - DNA, 25 bp, Homo sapien
gaagatccaagcctgccaacatgat

SEQ ID NO: 4274505 - DNA, 25 bp, Homo sapien
agggctgacctcgcggccactggac

SEQ ID NO: 4274506 - DNA, 25 bp, Homo sapien
ccaggaactgggtataggcagggct

SEQ ID NO: 4274507 - DNA, 25 bp, Homo sapien
ccaggtgtgacttgaggccagctgc

SEQ ID NO: 4274508 - DNA, 25 bp, Homo sapien
caggtgtgacttgaggccagctgcc

SEQ ID NO: 4274509 - DNA, 25 bp, Homo sapien
ggtgtgacttgaggccagctgcctt

SEQ ID NO: 4274510 - DNA, 25 bp, Homo sapien
caccaggtgtgacttgaggccagct

SEQ ID NO: 4274511 - DNA, 25 bp, Homo sapien
gactcaggctgcctaggatctcctg

SEQ ID NO: 4274512 - DNA, 25 bp, Homo sapien
tggtgctgggacactcgcgttttct

SEQ ID NO: 4274513 - DNA, 25 bp, Homo sapien
tgcacattgagttgtccgatctcca

SEQ ID NO: 4274514 - DNA, 25 bp, Homo sapien
cagctgggcgactaggctgttgctc

SEQ ID NO: 4274515 - DNA, 25 bp, Homo sapien
catgagggcgtcgatgagctcgtca

SEQ ID NO: 4274516 - DNA, 25 bp, Homo sapien
gggtcttcatctcacttgacagcag

SEQ ID NO: 4274517 - DNA, 25 bp, Homo sapien
gaggacatcccgttcactggcaagt

SEQ ID NO: 4274518 - DNA, 25 bp, Homo sapien
gcagcttgttccgagacctcatgcc

SEQ ID NO: 4274519 - DNA, 25 bp, Homo sapien
aggctgcggatcctcagcaggtttt

SEQ ID NO: 4274520 - DNA, 25 bp, Homo sapien
ccctttccaggctgcggatcctcag

SEQ ID NO: 4274521 - DNA, 25 bp, Homo sapien
ctggcccaattgcttctcaagctct

SEQ ID NO: 4274522 - DNA, 25 bp, Homo sapien
gacaactcatcactggctgttcccg

SEQ ID NO: 4274523 - DNA, 25 bp, Homo sapien
gctgttcccgcagactggctccggg

SEQ ID NO: 4274524 - DNA, 25 bp, Homo sapien
ctggatagacagacaactcatcact

SEQ ID NO: 4274525 - DNA, 25 bp, Homo sapien
cgcacgagtgcactgtgagacctaa

SEQ ID NO: 4274526 - DNA, 25 bp, Homo sapien
gggtactgtgtgcttaggtctctaa

SEQ ID NO: 4274527 - DNA, 25 bp, Homo sapien
aaaggcgttggcatttgttaagctc

SEQ ID NO: 4274528 - DNA, 25 bp, Homo sapien
caaattaaaatcaggctggttggcg

SEQ ID NO: 4274529 - DNA, 25 bp, Homo sapien
ccctccaggtccctggcgaagatag

SEQ ID NO: 4274530 - DNA, 25 bp, Homo sapien
caagaatttgttgagcccgacccct

SEQ ID NO: 4274531 - DNA, 25 bp, Homo sapien
gataggagctgctgaacgttgatgt

SEQ ID NO: 4274532 - DNA, 25 bp, Homo sapien
tgaacgttgatgtcttccccaacct

SEQ ID NO: 4274533 - DNA, 25 bp, Homo sapien
ctgaaataaggcagggccttcaatg

SEQ ID NO: 4274534 - DNA, 25 bp, Homo sapien
aataaggcagggccttcaatgtggc

SEQ ID NO: 4274535 - DNA, 25 bp, Homo sapien
ataaggcagggccttcaatgtggcc

SEQ ID NO: 4274536 - DNA, 25 bp, Homo sapien
gaaataaggcagggccttcaatgtg

SEQ ID NO: 4274537 - DNA, 25 bp, Homo sapien
tccacaatagaacactgttttggaa

SEQ ID NO: 4274538 - DNA, 25 bp, Homo sapien
cttgtttccacaatagaacactgtt

SEQ ID NO: 4274539 - DNA, 25 bp, Homo sapien
ggcacttgtttccacaatagaacac

SEQ ID NO: 4274540 - DNA, 25 bp, Homo sapien
ctggcacttgtttccacaatagaac

SEQ ID NO: 4274541 - DNA, 25 bp, Homo sapien
ctgtcctcctcagtctagagctggg

SEQ ID NO: 4274542 - DNA, 25 bp, Homo sapien
gactctccctgggtggacagtgctg

SEQ ID NO: 4274543 - DNA, 25 bp, Homo sapien
gcgactctgcccaccaaatggttat

SEQ ID NO: 4274544 - DNA, 25 bp, Homo sapien
gaaggactggaactggagcctgacc

SEQ ID NO: 4274545 - DNA, 25 bp, Homo sapien
gaagccccaagccctggctctgaaa

SEQ ID NO: 4274546 - DNA, 25 bp, Homo sapien
gccccaagccctggctctgaaagac

SEQ ID NO: 4274547 - DNA, 25 bp, Homo sapien
aagccccaagccctggctctgaaag

SEQ ID NO: 4274548 - DNA, 25 bp, Homo sapien
aagaagccccaagccctggctctga

SEQ ID NO: 4274549 - DNA, 25 bp, Homo sapien
tgtgccatccgcagctcctgcttca

SEQ ID NO: 4274550 - DNA, 25 bp, Homo sapien
ctggtttcggaggtcactcatcttc

SEQ ID NO: 4274551 - DNA, 25 bp, Homo sapien
ctcatcttcaagttggtggccacca

SEQ ID NO: 4274552 - DNA, 25 bp, Homo sapien
tggtttcggaggtcactcatcttca

SEQ ID NO: 4274553 - DNA, 25 bp, Homo sapien
tgccttcaggcatacagctggttgg

SEQ ID NO: 4274554 - DNA, 25 bp, Homo sapien
catcaggcaatgacgctgaggccct

SEQ ID NO: 4274555 - DNA, 25 bp, Homo sapien
cagggctggtactacagtggctttc

SEQ ID NO: 4274556 - DNA, 25 bp, Homo sapien
gaacgttggttgtcaggctgagcat

SEQ ID NO: 4274557 - DNA, 25 bp, Homo sapien
gcagatgatgccaacgctactcaca

SEQ ID NO: 4274558 - DNA, 25 bp, Homo sapien
cccgtcctcctagcttaggcagttg

SEQ ID NO: 4274559 - DNA, 25 bp, Homo sapien
taggcagttgagctaatcctacctc

SEQ ID NO: 4274560 - DNA, 25 bp, Homo sapien
gaaaataactaaagcgcagtacatg

SEQ ID NO: 4274561 - DNA, 25 bp, Homo sapien
tgggccctcggtggcttggctcctg

SEQ ID NO: 4274562 - DNA, 25 bp, Homo sapien
cctcggtggcttggctcctgcgtcg

SEQ ID NO: 4274563 - DNA, 25 bp, Homo sapien
tggcttggctcctgcgtcggtggcc

SEQ ID NO: 4274564 - DNA, 25 bp, Homo sapien
ccttggctgacagcctggtcagggc

SEQ ID NO: 4274565 - DNA, 25 bp, Homo sapien
atatactgcgtgacttgagaaagcc

SEQ ID NO: 4274566 - DNA, 25 bp, Homo sapien
gaagctagggaggttccctcttgcc

SEQ ID NO: 4274567 - DNA, 25 bp, Homo sapien
aacttcagctctcccggctacatat

SEQ ID NO: 4274568 - DNA, 25 bp, Homo sapien
taaaatgcagcaccaccatatactg

SEQ ID NO: 4274569 - DNA, 25 bp, Homo sapien
attctgccatcaacagccggttctt

SEQ ID NO: 4274570 - DNA, 25 bp, Homo sapien
ctcctggatgcgattggtcagctgc

SEQ ID NO: 4274571 - DNA, 25 bp, Homo sapien
tttgatagctccacaattttggtgg

SEQ ID NO: 4274572 - DNA, 25 bp, Homo sapien
ttggtggcgaccacgtctccggcta

SEQ ID NO: 4274573 - DNA, 25 bp, Homo sapien
tccttcagcagcttatacaatcgcc

SEQ ID NO: 4274574 - DNA, 25 bp, Homo sapien
agcttatacaatcgcccgttctcgt

SEQ ID NO: 4274575 - DNA, 25 bp, Homo sapien
ttgaggtgtttgatttcaaagtccc

SEQ ID NO: 4274576 - DNA, 25 bp, Homo sapien
gtttccctgagctcatttcgaaggt

SEQ ID NO: 4274577 - DNA, 25 bp, Homo sapien
ctgtaaccgtttgtgctgcatctcc

SEQ ID NO: 4274578 - DNA, 25 bp, Homo sapien
cctcttggtcgtcagctctgctttt

SEQ ID NO: 4274579 - DNA, 25 bp, Homo sapien
gcattgccttgaactggagccgcaa

SEQ ID NO: 4274580 - DNA, 25 bp, Homo sapien
tatttttcgagtttggctcccctgc

SEQ ID NO: 4274581 - DNA, 25 bp, Homo sapien
gataccagtgattgtaaatcccttc

SEQ ID NO: 4274582 - DNA, 25 bp, Homo sapien
aaaagataccagtgattgtaaatcc

SEQ ID NO: 4274583 - DNA, 25 bp, Homo sapien
catgctgtataattgcaaactgtat

SEQ ID NO: 4274584 - DNA, 25 bp, Homo sapien
aaaggctacatgctgtataattgca

SEQ ID NO: 4274585 - DNA, 25 bp, Homo sapien
tggttctcagggctggactccgggc

SEQ ID NO: 4274586 - DNA, 25 bp, Homo sapien
tgctagcatcttcgtagggatgggt

SEQ ID NO: 4274587 - DNA, 25 bp, Homo sapien
ggaggccgcccacggatgcctagtt

SEQ ID NO: 4274588 - DNA, 25 bp, Homo sapien
tttggcgctctgtgcactgctagca

SEQ ID NO: 4274589 - DNA, 25 bp, Homo sapien
cggcggctaggtcacctcctccgga

SEQ ID NO: 4274590 - DNA, 25 bp, Homo sapien
ctccggacgccgacacgcgctgccc

SEQ ID NO: 4274591 - DNA, 25 bp, Homo sapien
ccacttctcccttctaggaccgcgg

SEQ ID NO: 4274592 - DNA, 25 bp, Homo sapien
tcccttctaggaccgcggcggctag

SEQ ID NO: 4274593 - DNA, 25 bp, Homo sapien
tcagcactgcaggtataaacccgaa

SEQ ID NO: 4274594 - DNA, 25 bp, Homo sapien
taggattcaggtagatgtgagcctc

SEQ ID NO: 4274595 - DNA, 25 bp, Homo sapien
taagatacggcactagactgccatc

SEQ ID NO: 4274596 - DNA, 25 bp, Homo sapien
cgtataatatacaggtggcagcaaa

SEQ ID NO: 4274597 - DNA, 25 bp, Homo sapien
gtggttctaatgtacgtgacggata

SEQ ID NO: 4274598 - DNA, 25 bp, Homo sapien
gctgtgtagtatggtaactgcatat

SEQ ID NO: 4274599 - DNA, 25 bp, Homo sapien
tattgctgagtagttctagtatgaa

SEQ ID NO: 4274600 - DNA, 25 bp, Homo sapien
tccagagtgactgttccactttaca

SEQ ID NO: 4274601 - DNA, 25 bp, Homo sapien
cattctagacctcagctttgcaggc

SEQ ID NO: 4274602 - DNA, 25 bp, Homo sapien
cagaaacaaactgcctagagggtat

SEQ ID NO: 4274603 - DNA, 25 bp, Homo sapien
gggctagacttacaccagtcacgtg

SEQ ID NO: 4274604 - DNA, 25 bp, Homo sapien
cgtttatatctgtgggttgtgaccc

SEQ ID NO: 4274605 - DNA, 25 bp, Homo sapien
acttttgtcttgctacaaacaaatt

SEQ ID NO: 4274606 - DNA, 25 bp, Homo sapien
caataatatatcgaccagaactggt

SEQ ID NO: 4274607 - DNA, 25 bp, Homo sapien
tagttgggcaccagagtgtatcagc

SEQ ID NO: 4274608 - DNA, 25 bp, Homo sapien
ttatatggataatcagctgggcgtg

SEQ ID NO: 4274609 - DNA, 25 bp, Homo sapien
gcatcagaatcgcacgaagctagga

SEQ ID NO: 4274610 - DNA, 25 bp, Homo sapien
tttaataacaatacatataccatgt

SEQ ID NO: 4274611 - DNA, 25 bp, Homo sapien
tgttcagttcaatgtttacaattct

SEQ ID NO: 4274612 - DNA, 25 bp, Homo sapien
tattatgcagctctattgtttaagc

SEQ ID NO: 4274613 - DNA, 25 bp, Homo sapien
cacaagtgtgatagccttctgtata

SEQ ID NO: 4274614 - DNA, 25 bp, Homo sapien
ctccaacaagaccaagacagcatct

SEQ ID NO: 4274615 - DNA, 25 bp, Homo sapien
tcctccaacaagaccaagacagcat

SEQ ID NO: 4274616 - DNA, 25 bp, Homo sapien
ataggtaactttaataataagacat

SEQ ID NO: 4274617 - DNA, 25 bp, Homo sapien
taataataagacatctaactaaagc

SEQ ID NO: 4274618 - DNA, 25 bp, Homo sapien
gcccagaattcccgatacatggaat

SEQ ID NO: 4274619 - DNA, 25 bp, Homo sapien
attcccgatacatggaatagcccat

SEQ ID NO: 4274620 - DNA, 25 bp, Homo sapien
taggttttgcccagaattcccgata

SEQ ID NO: 4274621 - DNA, 25 bp, Homo sapien
tcccgatacatggaatagcccatac

SEQ ID NO: 4274622 - DNA, 25 bp, Homo sapien
tatcaaccccaattacatgtctagg

SEQ ID NO: 4274623 - DNA, 25 bp, Homo sapien
gaaagtagcaccactgctagcatgg

SEQ ID NO: 4274624 - DNA, 25 bp, Homo sapien
aatagcaattgtatgtctctcccag

SEQ ID NO: 4274625 - DNA, 25 bp, Homo sapien
tattctccaactgctaaaaggtcag

SEQ ID NO: 4274626 - DNA, 25 bp, Homo sapien
ttatataatccatatgcaacaattg

SEQ ID NO: 4274627 - DNA, 25 bp, Homo sapien
caacaattgctgcaaaacccgctat

SEQ ID NO: 4274628 - DNA, 25 bp, Homo sapien
gatcagatgaatggacattttagta

SEQ ID NO: 4274629 - DNA, 25 bp, Homo sapien
agtatttcccctgctcttcagttta

SEQ ID NO: 4274630 - DNA, 25 bp, Homo sapien
ttaagataacataagaggctgggtg

SEQ ID NO: 4274631 - DNA, 25 bp, Homo sapien
aaaattaagataacataagaggctg

SEQ ID NO: 4274632 - DNA, 25 bp, Homo sapien
aattaagataacataagaggctggg

SEQ ID NO: 4274633 - DNA, 25 bp, Homo sapien
taagataacataagaggctgggtgc

SEQ ID NO: 4274634 - DNA, 25 bp, Homo sapien
gcgacagagcgggactgtctccaaa

SEQ ID NO: 4274635 - DNA, 25 bp, Homo sapien
aggtgaatcacttgaaaacaggagt

SEQ ID NO: 4274636 - DNA, 25 bp, Homo sapien
tcgagactagcctggccaaaatggt

SEQ ID NO: 4274637 - DNA, 25 bp, Homo sapien
gcctggtgtggtggcgggagtagtc

SEQ ID NO: 4274638 - DNA, 25 bp, Homo sapien
ttcgaatgagttttgatccctgatc

SEQ ID NO: 4274639 - DNA, 25 bp, Homo sapien
agcttttcgaatgagttttgatccc

SEQ ID NO: 4274640 - DNA, 25 bp, Homo sapien
tctttagcttttcgaatgagttttg

SEQ ID NO: 4274641 - DNA, 25 bp, Homo sapien
aatgagttttgatccctgatcttcc

SEQ ID NO: 4274642 - DNA, 25 bp, Homo sapien
ttatcacagggatcaaaggctcctt

SEQ ID NO: 4274643 - DNA, 25 bp, Homo sapien
gaaatcatgtaaccgccaaacaggt

SEQ ID NO: 4274644 - DNA, 25 bp, Homo sapien
taagggcctgaagcatagtgtaagc

SEQ ID NO: 4274645 - DNA, 25 bp, Homo sapien
agtcagtggcagttaaggtcctcaa

SEQ ID NO: 4274646 - DNA, 25 bp, Homo sapien
gtttcagaaagtagcccctgcggta

SEQ ID NO: 4274647 - DNA, 25 bp, Homo sapien
tgtacttccggaagcagggatccct

SEQ ID NO: 4274648 - DNA, 25 bp, Homo sapien
caaaggcgaatatcactgctgcatc

SEQ ID NO: 4274649 - DNA, 25 bp, Homo sapien
tttaaaatggctgccaaggccccag

SEQ ID NO: 4274650 - DNA, 25 bp, Homo sapien
tcctccctcattcgagacacggact

SEQ ID NO: 4274651 - DNA, 25 bp, Homo sapien
gcagtcccccggcttgtttcgctta

SEQ ID NO: 4274652 - DNA, 25 bp, Homo sapien
ccaaagtcctttcggcctggccaag

SEQ ID NO: 4274653 - DNA, 25 bp, Homo sapien
atccgcccatgctcgaggccgggcc

SEQ ID NO: 4274654 - DNA, 25 bp, Homo sapien
ccacagccgtcccagccaatcagag

SEQ ID NO: 4274655 - DNA, 25 bp, Homo sapien
tctcacaccccaaccggcttccgat

SEQ ID NO: 4274656 - DNA, 25 bp, Homo sapien
agagcgagaaaacctctcacacccc

SEQ ID NO: 4274657 - DNA, 25 bp, Homo sapien
ttccgatccctgcaggcgcacccag

SEQ ID NO: 4274658 - DNA, 25 bp, Homo sapien
cactatagtaggaggcagccagtac

SEQ ID NO: 4274659 - DNA, 25 bp, Homo sapien
agaggcccctcgtgacagcgagctt

SEQ ID NO: 4274660 - DNA, 25 bp, Homo sapien
catgcatcagaatgacagtgaggcg

SEQ ID NO: 4274661 - DNA, 25 bp, Homo sapien
aggccaggcgacctttctctcaaga

SEQ ID NO: 4274662 - DNA, 25 bp, Homo sapien
cagggtagtccactagcaccttcag

SEQ ID NO: 4274663 - DNA, 25 bp, Homo sapien
ctgttcaccttggactccccatgtg

SEQ ID NO: 4274664 - DNA, 25 bp, Homo sapien
gtagtccactagcaccttcaggcct

SEQ ID NO: 4274665 - DNA, 25 bp, Homo sapien
tcagcctatgtgtccacactcaggg

SEQ ID NO: 4274666 - DNA, 25 bp, Homo sapien
agcagcagctccttgaagggtcggg

SEQ ID NO: 4274667 - DNA, 25 bp, Homo sapien
cagcagcagctccttgaagggtcgg

SEQ ID NO: 4274668 - DNA, 25 bp, Homo sapien
gcagcagctccttgaagggtcgggc

SEQ ID NO: 4274669 - DNA, 25 bp, Homo sapien
gcagcagcagctccttgaagggtcg

SEQ ID NO: 4274670 - DNA, 25 bp, Homo sapien
cccaatttgccttataaggctgctg

SEQ ID NO: 4274671 - DNA, 25 bp, Homo sapien
cagtgcatatgaaggtgtctggcca

SEQ ID NO: 4274672 - DNA, 25 bp, Homo sapien
tctggccagctgtaacatgcatatg

SEQ ID NO: 4274673 - DNA, 25 bp, Homo sapien
taaaggcctgattgctgttgccact

SEQ ID NO: 4274674 - DNA, 25 bp, Homo sapien
cagccatgtgctaggagtgtcctta

SEQ ID NO: 4274675 - DNA, 25 bp, Homo sapien
agcaccagccatgtgctaggagtgt

SEQ ID NO: 4274676 - DNA, 25 bp, Homo sapien
ccatgtgctaggagtgtccttactg

SEQ ID NO: 4274677 - DNA, 25 bp, Homo sapien
caccagccatgtgctaggagtgtcc

SEQ ID NO: 4274678 - DNA, 25 bp, Homo sapien
ggaaagaatctgcaaggtatcccat

SEQ ID NO: 4274679 - DNA, 25 bp, Homo sapien
aggatgatggggaaagaatctgcaa

SEQ ID NO: 4274680 - DNA, 25 bp, Homo sapien
gggaaagaatctgcaaggtatccca

SEQ ID NO: 4274681 - DNA, 25 bp, Homo sapien
atggggaaagaatctgcaaggtatc

SEQ ID NO: 4274682 - DNA, 25 bp, Homo sapien
gagcagcagcctgtcaaaacaccag

SEQ ID NO: 4274683 - DNA, 25 bp, Homo sapien
caggcaacagactcattgaatcagg

SEQ ID NO: 4274684 - DNA, 25 bp, Homo sapien
tccataaaatacagagagtgctgca

SEQ ID NO: 4274685 - DNA, 25 bp, Homo sapien
gttggactggaaacccttggctcaa

SEQ ID NO: 4274686 - DNA, 25 bp, Homo sapien
tgtactcaggacttctcaaggcagg

SEQ ID NO: 4274687 - DNA, 25 bp, Homo sapien
tgctatccaatagggcagccacctg

SEQ ID NO: 4274688 - DNA, 25 bp, Homo sapien
gagctgcacagttcggaggccattt

SEQ ID NO: 4274689 - DNA, 25 bp, Homo sapien
gatgcaatagaactcctctggccag

SEQ ID NO: 4274690 - DNA, 25 bp, Homo sapien
gcagggcaccgagtttgaaggcaaa

SEQ ID NO: 4274691 - DNA, 25 bp, Homo sapien
tcatggtccccttgcactgaacggt

SEQ ID NO: 4274692 - DNA, 25 bp, Homo sapien
gaaagagggccaggatgtctccatg

SEQ ID NO: 4274693 - DNA, 25 bp, Homo sapien
catattcttccggaaagccatggca

SEQ ID NO: 4274694 - DNA, 25 bp, Homo sapien
gcagcaaaatgttcccctggactta

SEQ ID NO: 4274695 - DNA, 25 bp, Homo sapien
ccctgtggccgcaagttatggcaaa

SEQ ID NO: 4274696 - DNA, 25 bp, Homo sapien
tatgctcctgcggattaagctctcg

SEQ ID NO: 4274697 - DNA, 25 bp, Homo sapien
cacttggctgactggtcacgtaggg

SEQ ID NO: 4274698 - DNA, 25 bp, Homo sapien
gatctctgaggaagatgttcgaaga

SEQ ID NO: 4274699 - DNA, 25 bp, Homo sapien
ttaacaatgcacctgagatctctga

SEQ ID NO: 4274700 - DNA, 25 bp, Homo sapien
ggaaagaactcaccattttagagcc

SEQ ID NO: 4274701 - DNA, 25 bp, Homo sapien
aaggctatagctgctgtagatggcg

SEQ ID NO: 4274702 - DNA, 25 bp, Homo sapien
aagcttgaggagtgtatttgtgaat

SEQ ID NO: 4274703 - DNA, 25 bp, Homo sapien
tatgggcaaaaagcttgaggagtgt

SEQ ID NO: 4274704 - DNA, 25 bp, Homo sapien
tgtatgggcaaaaagcttgaggagt

SEQ ID NO: 4274705 - DNA, 25 bp, Homo sapien
gtgtatttgtgaataattgcataac

SEQ ID NO: 4274706 - DNA, 25 bp, Homo sapien
ctcgctttcccagagggcgacctgg

SEQ ID NO: 4274707 - DNA, 25 bp, Homo sapien
agggtagccgtgtcaggcctgccca

SEQ ID NO: 4274708 - DNA, 25 bp, Homo sapien
caggtgcagagcgctcttccgcgac

SEQ ID NO: 4274709 - DNA, 25 bp, Homo sapien
gacctgggctatggcggccgtggcg

SEQ ID NO: 4274710 - DNA, 25 bp, Homo sapien
agtgaccttcgaggatgtggccgtc

SEQ ID NO: 4274711 - DNA, 25 bp, Homo sapien
gaacgaatggatcggcctgggccct

SEQ ID NO: 4274712 - DNA, 25 bp, Homo sapien
tacttctctgagaacgaatggatcg

SEQ ID NO: 4274713 - DNA, 25 bp, Homo sapien
ggatgtggccgtctacttctctgag

SEQ ID NO: 4274714 - DNA, 25 bp, Homo sapien
caaacacgaggaacatgtagcgtct

SEQ ID NO: 4274715 - DNA, 25 bp, Homo sapien
ttctcagctatgtggtttggcacca

SEQ ID NO: 4274716 - DNA, 25 bp, Homo sapien
tctacattctgataagctgtgaggc

SEQ ID NO: 4274717 - DNA, 25 bp, Homo sapien
gatagcttcatccagtcaatagttg

SEQ ID NO: 4274718 - DNA, 25 bp, Homo sapien
gctgtcagtagccttcaagtttata

SEQ ID NO: 4274719 - DNA, 25 bp, Homo sapien
tccactgaccacgaaagggtgctgc

SEQ ID NO: 4274720 - DNA, 25 bp, Homo sapien
gtgtggctttcacccatgttaacgg

SEQ ID NO: 4274721 - DNA, 25 bp, Homo sapien
tccatccgtatatccctaagttcca

SEQ ID NO: 4274722 - DNA, 25 bp, Homo sapien
caggatgacgtttgagaggtcccag

SEQ ID NO: 4274723 - DNA, 25 bp, Homo sapien
tgtccaaaggcgaagatgtatccat

SEQ ID NO: 4274724 - DNA, 25 bp, Homo sapien
cccaggtaggatgagatagatgcac

SEQ ID NO: 4274725 - DNA, 25 bp, Homo sapien
catttgtattcaccagcaggatgac

SEQ ID NO: 4274726 - DNA, 25 bp, Homo sapien
gctatggttatccacaggcttcaaa

SEQ ID NO: 4274727 - DNA, 25 bp, Homo sapien
taagggtgaggccatgcacttttca

SEQ ID NO: 4274728 - DNA, 25 bp, Homo sapien
gatgttgccctatcctcagctgtag

SEQ ID NO: 4274729 - DNA, 25 bp, Homo sapien
gggattcatgtcttttctagcggga

SEQ ID NO: 4274730 - DNA, 25 bp, Homo sapien
tatggaagtgagaggcgtcagcaac

SEQ ID NO: 4274731 - DNA, 25 bp, Homo sapien
tcaaggttggtacgatgatgcagcg

SEQ ID NO: 4274732 - DNA, 25 bp, Homo sapien
tcctgggacagtgttaagctctgct

SEQ ID NO: 4274733 - DNA, 25 bp, Homo sapien
agaactgggctctggaggaacgcca

SEQ ID NO: 4274734 - DNA, 25 bp, Homo sapien
atctcgccagcgtgcccttttcctc

SEQ ID NO: 4274735 - DNA, 25 bp, Homo sapien
ctatctcgccagcgtgcccttttcc

SEQ ID NO: 4274736 - DNA, 25 bp, Homo sapien
ctcgccagcgtgcccttttcctcac

SEQ ID NO: 4274737 - DNA, 25 bp, Homo sapien
tatctcgccagcgtgcccttttcct

SEQ ID NO: 4274738 - DNA, 25 bp, Homo sapien
gaaatccagagagtgtatgggttca

SEQ ID NO: 4274739 - DNA, 25 bp, Homo sapien
gtgtatgggttcaccagtcagtgtg

SEQ ID NO: 4274740 - DNA, 25 bp, Homo sapien
gaattaggagggaagcaccaagatg

SEQ ID NO: 4274741 - DNA, 25 bp, Homo sapien
tccacgagtcctagagagaaatcca

SEQ ID NO: 4274742 - DNA, 25 bp, Homo sapien
cgcgcgaggttttggtttgtgagga

SEQ ID NO: 4274743 - DNA, 25 bp, Homo sapien
aggatcggcgagtggcgcccaccat

SEQ ID NO: 4274744 - DNA, 25 bp, Homo sapien
ggccgccttcgtttttgtcgcgcga

SEQ ID NO: 4274745 - DNA, 25 bp, Homo sapien
cgccttcgtttttgtcgcgcgaggt

SEQ ID NO: 4274746 - DNA, 25 bp, Homo sapien
cgagggaggcgggtgtggctactgc

SEQ ID NO: 4274747 - DNA, 25 bp, Homo sapien
cacggtgagcgggtctgaggaggac

SEQ ID NO: 4274748 - DNA, 25 bp, Homo sapien
ggaggcgggtgtggctactgctggt

SEQ ID NO: 4274749 - DNA, 25 bp, Homo sapien
tgagcgggtctgaggaggacgggaa

SEQ ID NO: 4274750 - DNA, 25 bp, Homo sapien
tcggatactgacacacattcgcatg

SEQ ID NO: 4274751 - DNA, 25 bp, Homo sapien
gcatgttaacttcgaagcccacaaa

SEQ ID NO: 4274752 - DNA, 25 bp, Homo sapien
gccgatccccgagcttggctctgta

SEQ ID NO: 4274753 - DNA, 25 bp, Homo sapien
ctctgtagcgtcgagatgcggcgct

SEQ ID NO: 4274754 - DNA, 25 bp, Homo sapien
tccaaagcagagaggtatcagccac

SEQ ID NO: 4274755 - DNA, 25 bp, Homo sapien
gcctttgttggcagtaggtgactca

SEQ ID NO: 4274756 - DNA, 25 bp, Homo sapien
ccaaacaaggcgaagaagtgacagt

SEQ ID NO: 4274757 - DNA, 25 bp, Homo sapien
caaaggcactgtctgtgcatccaaa

SEQ ID NO: 4274758 - DNA, 25 bp, Homo sapien
cggagtatcccggtgtgcagcgatc

SEQ ID NO: 4274759 - DNA, 25 bp, Homo sapien
cagcgatctcccgagagttggcgca

SEQ ID NO: 4274760 - DNA, 25 bp, Homo sapien
aacgtgtgcaccttcagtccgggaa

SEQ ID NO: 4274761 - DNA, 25 bp, Homo sapien
agtagatccggcgtgtattccccac

SEQ ID NO: 4274762 - DNA, 25 bp, Homo sapien
agagaggggcctgatggtcatcctc

SEQ ID NO: 4274763 - DNA, 25 bp, Homo sapien
tctccatctgaatgaagggtcttga

SEQ ID NO: 4274764 - DNA, 25 bp, Homo sapien
ggtcttgaggtccagagaccacagg

SEQ ID NO: 4274765 - DNA, 25 bp, Homo sapien
tggagatctgaaggctgtcctttgc

SEQ ID NO: 4274766 - DNA, 25 bp, Homo sapien
tagaagcagcatgggaggagacagg

SEQ ID NO: 4274767 - DNA, 25 bp, Homo sapien
ctagaagcagcatgggaggagacag

SEQ ID NO: 4274768 - DNA, 25 bp, Homo sapien
agaagcagcatgggaggagacaggg

SEQ ID NO: 4274769 - DNA, 25 bp, Homo sapien
aagcagcatgggaggagacaggggg

SEQ ID NO: 4274770 - DNA, 25 bp, Homo sapien
cttctgggactcttctctaagtaag

SEQ ID NO: 4274771 - DNA, 25 bp, Homo sapien
aggatctagtatagatgaaatttac

SEQ ID NO: 4274772 - DNA, 25 bp, Homo sapien
gactcttctctaagtaaggatctag

SEQ ID NO: 4274773 - DNA, 25 bp, Homo sapien
ttctctaagtaaggatctagtatag

SEQ ID NO: 4274774 - DNA, 25 bp, Homo sapien
caaacagccgcaggtccttggaatc

SEQ ID NO: 4274775 - DNA, 25 bp, Homo sapien
gagtccctctgcactgaatgagtcg

SEQ ID NO: 4274776 - DNA, 25 bp, Homo sapien
ggatgagaatgtagctccccaaaca

SEQ ID NO: 4274777 - DNA, 25 bp, Homo sapien
gagtcgcagaagtcatcaggcttag

SEQ ID NO: 4274778 - DNA, 25 bp, Homo sapien
ctggggctgtctttgcttggatcat

SEQ ID NO: 4274779 - DNA, 25 bp, Homo sapien
cttttgagggtgtttgcttgcaatg

SEQ ID NO: 4274780 - DNA, 25 bp, Homo sapien
cagaaccagctggaggattcaaatc

SEQ ID NO: 4274781 - DNA, 25 bp, Homo sapien
ttccagaaccagctggaggattcaa

SEQ ID NO: 4274782 - DNA, 25 bp, Homo sapien
ggcttttgagggtgtttgcttgcaa

SEQ ID NO: 4274783 - DNA, 25 bp, Homo sapien
tgtgcaatctcttccttctaggtgt

SEQ ID NO: 4274784 - DNA, 25 bp, Homo sapien
gtctccaggtctgtgcaatctcttc

SEQ ID NO: 4274785 - DNA, 25 bp, Homo sapien
aatctcttccttctaggtgtcccat

SEQ ID NO: 4274786 - DNA, 25 bp, Homo sapien
gctttctgtctccaggtctgtgcaa

SEQ ID NO: 4274787 - DNA, 25 bp, Homo sapien
tgttctgagtcctggcagtgttgtt

SEQ ID NO: 4274788 - DNA, 25 bp, Homo sapien
tctgagtcctggcagtgttgttctg

SEQ ID NO: 4274789 - DNA, 25 bp, Homo sapien
cctggcagtgttgttctgtgttcca

SEQ ID NO: 4274790 - DNA, 25 bp, Homo sapien
gagtcctggcagtgttgttctgtgt

SEQ ID NO: 4274791 - DNA, 25 bp, Homo sapien
tcagatgttggtggagacctcaggt

SEQ ID NO: 4274792 - DNA, 25 bp, Homo sapien
tgtccagcattccatgcttcaccag

SEQ ID NO: 4274793 - DNA, 25 bp, Homo sapien
gagacctcaggtggtggcacccaga

SEQ ID NO: 4274794 - DNA, 25 bp, Homo sapien
acctcaggtggtggcacccagaact

SEQ ID NO: 4274795 - DNA, 25 bp, Homo sapien
gggccaagccttcttcgcactggtg

SEQ ID NO: 4274796 - DNA, 25 bp, Homo sapien
gccttcttcgcactggtgtccttat

SEQ ID NO: 4274797 - DNA, 25 bp, Homo sapien
cactggtgtccttatttcttggtcc

SEQ ID NO: 4274798 - DNA, 25 bp, Homo sapien
tcgcactggtgtccttatttcttgg

SEQ ID NO: 4274799 - DNA, 25 bp, Homo sapien
cactggaagtagctgtgtgaagcca

SEQ ID NO: 4274800 - DNA, 25 bp, Homo sapien
gtgaagccactggaagtagctgtgt

SEQ ID NO: 4274801 - DNA, 25 bp, Homo sapien
gggctgtgtgatgtcacaagtaggg

SEQ ID NO: 4274802 - DNA, 25 bp, Homo sapien
cactgaatgggacagtgtgaagcca

SEQ ID NO: 4274803 - DNA, 25 bp, Homo sapien
gaagaggtggtgtgatgccacagga

SEQ ID NO: 4274804 - DNA, 25 bp, Homo sapien
gagtgttaaaccacaggaaggcaca

SEQ ID NO: 4274805 - DNA, 25 bp, Homo sapien
aagaagtggctgttggaagtcacag

SEQ ID NO: 4274806 - DNA, 25 bp, Homo sapien
gggagtgttaaaccacaggaaggca

SEQ ID NO: 4274807 - DNA, 25 bp, Homo sapien
gtgaagccacaagaaggggcagtct

SEQ ID NO: 4274808 - DNA, 25 bp, Homo sapien
tgaagccacaagaaggggcagtctg

SEQ ID NO: 4274809 - DNA, 25 bp, Homo sapien
gaagccacaagaaggggcagtctga

SEQ ID NO: 4274810 - DNA, 25 bp, Homo sapien
aagccacaagaaggggcagtctgaa

SEQ ID NO: 4274811 - DNA, 25 bp, Homo sapien
gaaggggcggtgtgaagtgatagga

SEQ ID NO: 4274812 - DNA, 25 bp, Homo sapien
caggaaggggcggtgtgaagtgata

SEQ ID NO: 4274813 - DNA, 25 bp, Homo sapien
aggaaggagcagtgcgaattctcag

SEQ ID NO: 4274814 - DNA, 25 bp, Homo sapien
aggagcagtgcgaattctcaggaag

SEQ ID NO: 4274815 - DNA, 25 bp, Homo sapien
gaagtggctgtgtgacgttacagga

SEQ ID NO: 4274816 - DNA, 25 bp, Homo sapien
cgtctgaagccacagggaagggcaa

SEQ ID NO: 4274817 - DNA, 25 bp, Homo sapien
tgaggctgtgtgaagtcacaagaag

SEQ ID NO: 4274818 - DNA, 25 bp, Homo sapien
cacaggatgaggctgtgtgaagtca

SEQ ID NO: 4274819 - DNA, 25 bp, Homo sapien
aggagaagtctcagggagggatagt

SEQ ID NO: 4274820 - DNA, 25 bp, Homo sapien
tcatcacattagtgatcagaagtga

SEQ ID NO: 4274821 - DNA, 25 bp, Homo sapien
gatcagaagtgaggtgtaattcccc

SEQ ID NO: 4274822 - DNA, 25 bp, Homo sapien
cagaagtgaggtgtaattccccaac

SEQ ID NO: 4274823 - DNA, 25 bp, Homo sapien
cattagtgatcagaagtgaggtgta

SEQ ID NO: 4274824 - DNA, 25 bp, Homo sapien
ggccctgacacatggattgtgcaag

SEQ ID NO: 4274825 - DNA, 25 bp, Homo sapien
agttgaagggagttcggccctgaca

SEQ ID NO: 4274826 - DNA, 25 bp, Homo sapien
gggagttcggccctgacacatggat

SEQ ID NO: 4274827 - DNA, 25 bp, Homo sapien
ttcggccctgacacatggattgtgc

SEQ ID NO: 4274828 - DNA, 25 bp, Homo sapien
gaggcacaggcctgctcaataaata

SEQ ID NO: 4274829 - DNA, 25 bp, Homo sapien
tctccacagtgggattaatgggccc

SEQ ID NO: 4274830 - DNA, 25 bp, Homo sapien
ctcagtaggaaacatcaggatcacc

SEQ ID NO: 4274831 - DNA, 25 bp, Homo sapien
gatcacctagccagaggttccttgt

SEQ ID NO: 4274832 - DNA, 25 bp, Homo sapien
ttgaatgagggacgggatgtccacc

SEQ ID NO: 4274833 - DNA, 25 bp, Homo sapien
tacatactggaggtccatgccaggc

SEQ ID NO: 4274834 - DNA, 25 bp, Homo sapien
aacagagatgccgtgggacctcacg

SEQ ID NO: 4274835 - DNA, 25 bp, Homo sapien
tcacggctttgcaggatacgggctt

SEQ ID NO: 4274836 - DNA, 25 bp, Homo sapien
tagggagtgtagtggtcgggattga

SEQ ID NO: 4274837 - DNA, 25 bp, Homo sapien
tatagggagtgtagtggtcgggatt

SEQ ID NO: 4274838 - DNA, 25 bp, Homo sapien
cttatagggagtgtagtggtcggga

SEQ ID NO: 4274839 - DNA, 25 bp, Homo sapien
agggagtgtagtggtcgggattgac

SEQ ID NO: 4274840 - DNA, 25 bp, Homo sapien
tgtcatgaaccgtgcaaactgccgg

SEQ ID NO: 4274841 - DNA, 25 bp, Homo sapien
taaagaccagaatgtactcctcgcc

SEQ ID NO: 4274842 - DNA, 25 bp, Homo sapien
tccatgaagaagagccgtgcctcgt

SEQ ID NO: 4274843 - DNA, 25 bp, Homo sapien
cagcctcgttggagtagcagagcca

SEQ ID NO: 4274844 - DNA, 25 bp, Homo sapien
tggggccctaatgagatgacggcca

SEQ ID NO: 4274845 - DNA, 25 bp, Homo sapien
actgtggggccctaatgagatgacg

SEQ ID NO: 4274846 - DNA, 25 bp, Homo sapien
taatgccactgtggggccctaatga

SEQ ID NO: 4274847 - DNA, 25 bp, Homo sapien
ctaatgccactgtggggccctaatg

SEQ ID NO: 4274848 - DNA, 25 bp, Homo sapien
acccatccctatgggcatcctgaga

SEQ ID NO: 4274849 - DNA, 25 bp, Homo sapien
ccctatgggcatcctgagaactggt

SEQ ID NO: 4274850 - DNA, 25 bp, Homo sapien
aggcttcacccatccctatgggcat

SEQ ID NO: 4274851 - DNA, 25 bp, Homo sapien
aggcaggcttcacccatccctatgg

SEQ ID NO: 4274852 - DNA, 25 bp, Homo sapien
caactgtcaagtatgatttcctcaa

SEQ ID NO: 4274853 - DNA, 25 bp, Homo sapien
tatgttcgtccctcattcctgatgt

SEQ ID NO: 4274854 - DNA, 25 bp, Homo sapien
tgagacccacatcagacagtaattt

SEQ ID NO: 4274855 - DNA, 25 bp, Homo sapien
gtggttgctctaggcatcatactat

SEQ ID NO: 4274856 - DNA, 25 bp, Homo sapien
tcaacaacacctgtatgcccatagg

SEQ ID NO: 4274857 - DNA, 25 bp, Homo sapien
tatgcccataggagtatgccatgca

SEQ ID NO: 4274858 - DNA, 25 bp, Homo sapien
tttgggtttcaacaacacctgtatg

SEQ ID NO: 4274859 - DNA, 25 bp, Homo sapien
cctgtatgcccataggagtatgcca

SEQ ID NO: 4274860 - DNA, 25 bp, Homo sapien
taaagtcacagctatgttgagggcc

SEQ ID NO: 4274861 - DNA, 25 bp, Homo sapien
agagaagaggataaagtcacagcta

SEQ ID NO: 4274862 - DNA, 25 bp, Homo sapien
gagagaagaggataaagtcacagct

SEQ ID NO: 4274863 - DNA, 25 bp, Homo sapien
gctcttgtggaacacgggctgagaa

SEQ ID NO: 4274864 - DNA, 25 bp, Homo sapien
ttcattcaggtcttcaaggctcttg

SEQ ID NO: 4274865 - DNA, 25 bp, Homo sapien
cagaaaggagaatatagtggggccc

SEQ ID NO: 4274866 - DNA, 25 bp, Homo sapien
ggctgccttcttagctgggttttaa

SEQ ID NO: 4274867 - DNA, 25 bp, Homo sapien
ctgtaaagttcagtatccccttctc

SEQ ID NO: 4274868 - DNA, 25 bp, Homo sapien
ccttctccctcattcataagactct

SEQ ID NO: 4274869 - DNA, 25 bp, Homo sapien
ttctccctcattcataagactctct

SEQ ID NO: 4274870 - DNA, 25 bp, Homo sapien
tgtaaagttcagtatccccttctcc

SEQ ID NO: 4274871 - DNA, 25 bp, Homo sapien
accagagaatgccactggctgacca

SEQ ID NO: 4274872 - DNA, 25 bp, Homo sapien
caatgaccagagaatgccactggct

SEQ ID NO: 4274873 - DNA, 25 bp, Homo sapien
atgacaatgaccagagaatgccact

SEQ ID NO: 4274874 - DNA, 25 bp, Homo sapien
tgaccagagaatgccactggctgac

SEQ ID NO: 4274875 - DNA, 25 bp, Homo sapien
ttccagggccacacagaccagggta

SEQ ID NO: 4274876 - DNA, 25 bp, Homo sapien
tatattgggcaccaaatttagagac

SEQ ID NO: 4274877 - DNA, 25 bp, Homo sapien
cagggccacacagaccagggtactt

SEQ ID NO: 4274878 - DNA, 25 bp, Homo sapien
tctgcctcctctatattgggcacca

SEQ ID NO: 4274879 - DNA, 25 bp, Homo sapien
gccagccccagacacgggcacagaa

SEQ ID NO: 4274880 - DNA, 25 bp, Homo sapien
cagccccagacacgggcacagaaaa

SEQ ID NO: 4274881 - DNA, 25 bp, Homo sapien
ggtggtcattggtgctgggtgcagg

SEQ ID NO: 4274882 - DNA, 25 bp, Homo sapien
cacgtgagggtggtcattggtgctg

SEQ ID NO: 4274883 - DNA, 25 bp, Homo sapien
ggtttgataaggagtaaaagctcca

SEQ ID NO: 4274884 - DNA, 25 bp, Homo sapien
tgataaggagtaaaagctccaggaa

SEQ ID NO: 4274885 - DNA, 25 bp, Homo sapien
tttgataaggagtaaaagctccagg

SEQ ID NO: 4274886 - DNA, 25 bp, Homo sapien
gtttgataaggagtaaaagctccag

SEQ ID NO: 4274887 - DNA, 25 bp, Homo sapien
acactcacatgcctgctagggccgg

SEQ ID NO: 4274888 - DNA, 25 bp, Homo sapien
gagccaatggagaaagtaaagctga

SEQ ID NO: 4274889 - DNA, 25 bp, Homo sapien
actcacatgcctgctagggccggag

SEQ ID NO: 4274890 - DNA, 25 bp, Homo sapien
tagggccggagccaatggagaaagt

SEQ ID NO: 4274891 - DNA, 25 bp, Homo sapien
ggttacagaggtggagggaccagac

SEQ ID NO: 4274892 - DNA, 25 bp, Homo sapien
cctccacaagaagggttacagaggt

SEQ ID NO: 4274893 - DNA, 25 bp, Homo sapien
agctcaccggtcactcctccacaag

SEQ ID NO: 4274894 - DNA, 25 bp, Homo sapien
cactcctccacaagaagggttacag

SEQ ID NO: 4274895 - DNA, 25 bp, Homo sapien
caagattcatgagagccagagaggg

SEQ ID NO: 4274896 - DNA, 25 bp, Homo sapien
gctctgcagggactgagattcctca

SEQ ID NO: 4274897 - DNA, 25 bp, Homo sapien
gaggggacctatgctctttcctagc

SEQ ID NO: 4274898 - DNA, 25 bp, Homo sapien
aattaatattgaaaggatgagctgg

SEQ ID NO: 4274899 - DNA, 25 bp, Homo sapien
tgcaaccccgtgataaaggcactgt

SEQ ID NO: 4274900 - DNA, 25 bp, Homo sapien
cactgcaaccccgtgataaaggcac

SEQ ID NO: 4274901 - DNA, 25 bp, Homo sapien
caaccccgtgataaaggcactgtac

SEQ ID NO: 4274902 - DNA, 25 bp, Homo sapien
ccccgtgataaaggcactgtacttt

SEQ ID NO: 4274903 - DNA, 25 bp, Homo sapien
cagcacaggtttggccgcgccgccg

SEQ ID NO: 4274904 - DNA, 25 bp, Homo sapien
cacctccgccgacgcgtccaggagg

SEQ ID NO: 4274905 - DNA, 25 bp, Homo sapien
tggactccgcgggacgaagccacct

SEQ ID NO: 4274906 - DNA, 25 bp, Homo sapien
tccaggctcgcaggtgtccgccgtg

SEQ ID NO: 4274907 - DNA, 25 bp, Homo sapien
tgcccggcgggcgagcccggcgcgg

SEQ ID NO: 4274908 - DNA, 25 bp, Homo sapien
cccggcgggcgagcccggcgcggag

SEQ ID NO: 4274909 - DNA, 25 bp, Homo sapien
ctgcccggcgggcgagcccggcgcg

SEQ ID NO: 4274910 - DNA, 25 bp, Homo sapien
ccggcgggcgagcccggcgcggagc

SEQ ID NO: 4274911 - DNA, 25 bp, Homo sapien
gaaagtgcgttgaaatccacaatac

SEQ ID NO: 4274912 - DNA, 25 bp, Homo sapien
cagaaagtgcgttgaaatccacaat

SEQ ID NO: 4274913 - DNA, 25 bp, Homo sapien
agaaagtgcgttgaaatccacaata

SEQ ID NO: 4274914 - DNA, 25 bp, Homo sapien
tcagaaagtgcgttgaaatccacaa

SEQ ID NO: 4274915 - DNA, 25 bp, Homo sapien
tccccgaagagtaaggtcttcagta

SEQ ID NO: 4274916 - DNA, 25 bp, Homo sapien
cacatagaattagggtccccgaaga

SEQ ID NO: 4274917 - DNA, 25 bp, Homo sapien
catagaattagggtccccgaagagt

SEQ ID NO: 4274918 - DNA, 25 bp, Homo sapien
gaagagtaaggtcttcagtacttgc

SEQ ID NO: 4274919 - DNA, 25 bp, Homo sapien
gctctgttcctttaacgtgaagaca

SEQ ID NO: 4274920 - DNA, 25 bp, Homo sapien
tccttgtggcgcttggtattgcaca

SEQ ID NO: 4274921 - DNA, 25 bp, Homo sapien
tatccattgtgaacggcaaccacag

SEQ ID NO: 4274922 - DNA, 25 bp, Homo sapien
gcacaggactatccattgtgaacgg

SEQ ID NO: 4274923 - DNA, 25 bp, Homo sapien
ttgatctgtgttccatgcacagctt

SEQ ID NO: 4274924 - DNA, 25 bp, Homo sapien
tctgtgttccatgcacagcttaggc

SEQ ID NO: 4274925 - DNA, 25 bp, Homo sapien
gatctgtgttccatgcacagcttag

SEQ ID NO: 4274926 - DNA, 25 bp, Homo sapien
ctgtgttccatgcacagcttaggca

SEQ ID NO: 4274927 - DNA, 25 bp, Homo sapien
gagccaaccttcgaagttgcggaac

SEQ ID NO: 4274928 - DNA, 25 bp, Homo sapien
cagtcaccgagccaaccttcgaagt

SEQ ID NO: 4274929 - DNA, 25 bp, Homo sapien
agggtctgtgctcagtcaccgagcc

SEQ ID NO: 4274930 - DNA, 25 bp, Homo sapien
tgtgctcagtcaccgagccaacctt

SEQ ID NO: 4274931 - DNA, 25 bp, Homo sapien
ccccttccagtttggtggccaccag

SEQ ID NO: 4274932 - DNA, 25 bp, Homo sapien
ccttgacttcttcttgtttagcctc

SEQ ID NO: 4274933 - DNA, 25 bp, Homo sapien
tcttgtttagcctctgcaaggcact

SEQ ID NO: 4274934 - DNA, 25 bp, Homo sapien
tcccgatggccccacctacctccat

SEQ ID NO: 4274935 - DNA, 25 bp, Homo sapien
gggggcagtgccgacactccccaga

SEQ ID NO: 4274936 - DNA, 25 bp, Homo sapien
ggaagaacacagccaatgtcctggg

SEQ ID NO: 4274937 - DNA, 25 bp, Homo sapien
gggcagtgccgacactccccagagg

SEQ ID NO: 4274938 - DNA, 25 bp, Homo sapien
gaacacagccaatgtcctgggggca

SEQ ID NO: 4274939 - DNA, 25 bp, Homo sapien
gaaactgtggccgagcaaatgcagc

SEQ ID NO: 4274940 - DNA, 25 bp, Homo sapien
cctgagaaactgtggccgagcaaat

SEQ ID NO: 4274941 - DNA, 25 bp, Homo sapien
ggccgagcaaatgcagcaaaagaca

SEQ ID NO: 4274942 - DNA, 25 bp, Homo sapien
aaggggaccgtcctgagaaactgtg

SEQ ID NO: 4274943 - DNA, 25 bp, Homo sapien
aggagcttcatggtcatccccggag

SEQ ID NO: 4274944 - DNA, 25 bp, Homo sapien
ggagcttcatggtcatccccggaga

SEQ ID NO: 4274945 - DNA, 25 bp, Homo sapien
ggagcaaaggccttcaacccagaat

SEQ ID NO: 4274946 - DNA, 25 bp, Homo sapien
ggggagcaaaggccttcaacccaga

SEQ ID NO: 4274947 - DNA, 25 bp, Homo sapien
gcggggagcaaaggccttcaaccca

SEQ ID NO: 4274948 - DNA, 25 bp, Homo sapien
gggagcaaaggccttcaacccagaa

SEQ ID NO: 4274949 - DNA, 25 bp, Homo sapien
gcaacccaggcatgatgagtcctct

SEQ ID NO: 4274950 - DNA, 25 bp, Homo sapien
gacactgtgcaacccaggcatgatg

SEQ ID NO: 4274951 - DNA, 25 bp, Homo sapien
ctgtgcaacccaggcatgatgagtc

SEQ ID NO: 4274952 - DNA, 25 bp, Homo sapien
gggacactgtgcaacccaggcatga

SEQ ID NO: 4274953 - DNA, 25 bp, Homo sapien
catctcatagggaccggatccttgg

SEQ ID NO: 4274954 - DNA, 25 bp, Homo sapien
gttgtacatctcatagggaccggat

SEQ ID NO: 4274955 - DNA, 25 bp, Homo sapien
catagggaccggatccttggtccaa

SEQ ID NO: 4274956 - DNA, 25 bp, Homo sapien
cggatccttggtccaactctgccat

SEQ ID NO: 4274957 - DNA, 25 bp, Homo sapien
tctaggggagggcatagggcaccac

SEQ ID NO: 4274958 - DNA, 25 bp, Homo sapien
cagaagctgacgttctaggggaggg

SEQ ID NO: 4274959 - DNA, 25 bp, Homo sapien
gagggcatagggcaccacacaggcc

SEQ ID NO: 4274960 - DNA, 25 bp, Homo sapien
agctgacgttctaggggagggcata

SEQ ID NO: 4274961 - DNA, 25 bp, Homo sapien
tcaaaagcattccccacccactggc

SEQ ID NO: 4274962 - DNA, 25 bp, Homo sapien
tgcagaggcattgcccatcaccttc

SEQ ID NO: 4274963 - DNA, 25 bp, Homo sapien
aggcattgcccatcaccttcacggg

SEQ ID NO: 4274964 - DNA, 25 bp, Homo sapien
ccatcaccttcacggggtcaaaaga

SEQ ID NO: 4274965 - DNA, 25 bp, Homo sapien
atgagtcggtagtgactactccaga

SEQ ID NO: 4274966 - DNA, 25 bp, Homo sapien
tagtgactactccagattggatgcc

SEQ ID NO: 4274967 - DNA, 25 bp, Homo sapien
tcggtagtgactactccagattgga

SEQ ID NO: 4274968 - DNA, 25 bp, Homo sapien
actactccagattggatgcctggac

SEQ ID NO: 4274969 - DNA, 25 bp, Homo sapien
aaaggacggccatgaaggcaggcaa

SEQ ID NO: 4274970 - DNA, 25 bp, Homo sapien
tccgatagcagcaattgcagcttct

SEQ ID NO: 4274971 - DNA, 25 bp, Homo sapien
gctttattgatcagcaacagcaggg

SEQ ID NO: 4274972 - DNA, 25 bp, Homo sapien
agcttccgtggtacagtgcctttag

SEQ ID NO: 4274973 - DNA, 25 bp, Homo sapien
ggaaaaagagtcagcatgattggaa

SEQ ID NO: 4274974 - DNA, 25 bp, Homo sapien
ttgaaactctatagaattgtcctgg

SEQ ID NO: 4274975 - DNA, 25 bp, Homo sapien
gcttctcacccaatagtaagattgg

SEQ ID NO: 4274976 - DNA, 25 bp, Homo sapien
gatatataaagtcctgattgttcct

SEQ ID NO: 4274977 - DNA, 25 bp, Homo sapien
aaacactagtaggtagtataggact

SEQ ID NO: 4274978 - DNA, 25 bp, Homo sapien
tctacgattgacatacatccccttt

SEQ ID NO: 4274979 - DNA, 25 bp, Homo sapien
gggtgtaaggaactcctttatctca

SEQ ID NO: 4274980 - DNA, 25 bp, Homo sapien
gaattagtccatagaacataatact

SEQ ID NO: 4274981 - DNA, 25 bp, Homo sapien
gcttgcatccatagctggggtggat

SEQ ID NO: 4274982 - DNA, 25 bp, Homo sapien
tccatagctggggtggatagttcca

SEQ ID NO: 4274983 - DNA, 25 bp, Homo sapien
tagctggggtggatagttccatgaa

SEQ ID NO: 4274984 - DNA, 25 bp, Homo sapien
tgcatccatagctggggtggatagt

SEQ ID NO: 4274985 - DNA, 25 bp, Homo sapien
tcatttctggcttataaggccggtg

SEQ ID NO: 4274986 - DNA, 25 bp, Homo sapien
tctggcttataaggccggtgtattg

SEQ ID NO: 4274987 - DNA, 25 bp, Homo sapien
tcttcatttctggcttataaggccg

SEQ ID NO: 4274988 - DNA, 25 bp, Homo sapien
tttctggcttataaggccggtgtat

SEQ ID NO: 4274989 - DNA, 25 bp, Homo sapien
gatgaagtaggtcttctgaagcaac

SEQ ID NO: 4274990 - DNA, 25 bp, Homo sapien
tcagatgaagtaggtcttctgaagc

SEQ ID NO: 4274991 - DNA, 25 bp, Homo sapien
tgtttttcagatgaagtaggtcttc

SEQ ID NO: 4274992 - DNA, 25 bp, Homo sapien
agtaggtcttctgaagcaactgccc

SEQ ID NO: 4274993 - DNA, 25 bp, Homo sapien
accttgggtcgaggccattttgccg

SEQ ID NO: 4274994 - DNA, 25 bp, Homo sapien
cgtggttaaacttgccaggcatgtc

SEQ ID NO: 4274995 - DNA, 25 bp, Homo sapien
tatgatctggataaaaccttgggtc

SEQ ID NO: 4274996 - DNA, 25 bp, Homo sapien
tcttctgttggaccagcatggcagg

SEQ ID NO: 4274997 - DNA, 25 bp, Homo sapien
taagaccatagaatatcaggaactc

SEQ ID NO: 4274998 - DNA, 25 bp, Homo sapien
tatatgcacctcagagtagctctca

SEQ ID NO: 4274999 - DNA, 25 bp, Homo sapien
taatggagccattctaatcagacag

SEQ ID NO: 4275000 - DNA, 25 bp, Homo sapien
gatgtacacatctgataacctagca

SEQ ID NO: 4275001 - DNA, 25 bp, Homo sapien
tgatgaacttggttcctctctctca

SEQ ID NO: 4275002 - DNA, 25 bp, Homo sapien
gtgcttcattaagcaggttttcttg

SEQ ID NO: 4275003 - DNA, 25 bp, Homo sapien
tttaacagttccgaaagtgcttcat

SEQ ID NO: 4275004 - DNA, 25 bp, Homo sapien
gagatttccagataccttgtctgtg

SEQ ID NO: 4275005 - DNA, 25 bp, Homo sapien
gtgcccagcacaaactgcgttgcag

SEQ ID NO: 4275006 - DNA, 25 bp, Homo sapien
tgtgcccagcacaaactgcgttgca

SEQ ID NO: 4275007 - DNA, 25 bp, Homo sapien
tgcccagcacaaactgcgttgcagc

SEQ ID NO: 4275008 - DNA, 25 bp, Homo sapien
actacagcctgcgcgacagagtaag

SEQ ID NO: 4275009 - DNA, 25 bp, Homo sapien
gcactacagcctgcgcgacagagta

SEQ ID NO: 4275010 - DNA, 25 bp, Homo sapien
cactacagcctgcgcgacagagtaa

SEQ ID NO: 4275011 - DNA, 25 bp, Homo sapien
gactcagctaagaaagatgacctcc

SEQ ID NO: 4275012 - DNA, 25 bp, Homo sapien
ccaaaattgatgtaccccaggacct

SEQ ID NO: 4275013 - DNA, 25 bp, Homo sapien
tgttacataggcagtcatggccaac

SEQ ID NO: 4275014 - DNA, 25 bp, Homo sapien
cacaagtggttttgcgccggaagcc

SEQ ID NO: 4275015 - DNA, 25 bp, Homo sapien
tctgtgatgtggaaaccctaggctc

SEQ ID NO: 4275016 - DNA, 25 bp, Homo sapien
tgttctgcacttaacctagagagag

SEQ ID NO: 4275017 - DNA, 25 bp, Homo sapien
aaagcaataacgttgtgatgcccac

SEQ ID NO: 4275018 - DNA, 25 bp, Homo sapien
catttgttcgcctgatgatgtgaca

SEQ ID NO: 4275019 - DNA, 25 bp, Homo sapien
tgaggtgacggactgagacgcatct

SEQ ID NO: 4275020 - DNA, 25 bp, Homo sapien
tcttcagccccgagtcatgtgtctg

SEQ ID NO: 4275021 - DNA, 25 bp, Homo sapien
taacctattcctgtacaaagactgt

SEQ ID NO: 4275022 - DNA, 25 bp, Homo sapien
gttttttcatgcagtgccctgggag

SEQ ID NO: 4275023 - DNA, 25 bp, Homo sapien
gcagggatcttataaagggccagaa

SEQ ID NO: 4275024 - DNA, 25 bp, Homo sapien
gggtgaagccatagaacatatttgc

SEQ ID NO: 4275025 - DNA, 25 bp, Homo sapien
cataggagagaagtttataaagggc

SEQ ID NO: 4275026 - DNA, 25 bp, Homo sapien
tcacatagatagtgagcgtaacatc

SEQ ID NO: 4275027 - DNA, 25 bp, Homo sapien
tttggtcagttgcttccaatgctgg

SEQ ID NO: 4275028 - DNA, 25 bp, Homo sapien
tattggaccaaactacttacttgct

SEQ ID NO: 4275029 - DNA, 25 bp, Homo sapien
gaatagctgtgagaccgaattaaag

SEQ ID NO: 4275030 - DNA, 25 bp, Homo sapien
tatgtcgtcacataaaagggaggga

SEQ ID NO: 4275031 - DNA, 25 bp, Homo sapien
ctcctttcctcactctgctggtcac

SEQ ID NO: 4275032 - DNA, 25 bp, Homo sapien
ctttcctcactctgctggtcaccat

SEQ ID NO: 4275033 - DNA, 25 bp, Homo sapien
ttctctatttcatctcctttcctca

SEQ ID NO: 4275034 - DNA, 25 bp, Homo sapien
tcctcactctgctggtcaccatgct

SEQ ID NO: 4275035 - DNA, 25 bp, Homo sapien
agcctcatgcaaccacttcctgtga

SEQ ID NO: 4275036 - DNA, 25 bp, Homo sapien
caacctctaaatttggaatgtccca

SEQ ID NO: 4275037 - DNA, 25 bp, Homo sapien
tatttagcccacataccctgggaac

SEQ ID NO: 4275038 - DNA, 25 bp, Homo sapien
caatgttcaattctggacccctgct

SEQ ID NO: 4275039 - DNA, 25 bp, Homo sapien
ccgctattggcttattggctgtaac

SEQ ID NO: 4275040 - DNA, 25 bp, Homo sapien
tgatagtgatacagtaactccagct

SEQ ID NO: 4275041 - DNA, 25 bp, Homo sapien
cagatatcatatagttcgagcttgc

SEQ ID NO: 4275042 - DNA, 25 bp, Homo sapien
aactgagcaccttttgttactccat

SEQ ID NO: 4275043 - DNA, 25 bp, Homo sapien
tgagcagggctccaatcatctggag

SEQ ID NO: 4275044 - DNA, 25 bp, Homo sapien
cacaggaggtagcagtggactttgc

SEQ ID NO: 4275045 - DNA, 25 bp, Homo sapien
gtgatgtgtctgcacagcaccgcta

SEQ ID NO: 4275046 - DNA, 25 bp, Homo sapien
cagggaattcgaagaagggcgaagc

SEQ ID NO: 4275047 - DNA, 25 bp, Homo sapien
gatgaggaaccattcagattcaggg

SEQ ID NO: 4275048 - DNA, 25 bp, Homo sapien
tccttctgttgtggtgcaaatgcca

SEQ ID NO: 4275049 - DNA, 25 bp, Homo sapien
gacgtattttaggtggaggcctgcc

SEQ ID NO: 4275050 - DNA, 25 bp, Homo sapien
tagatgaaactaggtgaagccactt

SEQ ID NO: 4275051 - DNA, 25 bp, Homo sapien
ccagaaaacagtcgtttgtgccaca

SEQ ID NO: 4275052 - DNA, 25 bp, Homo sapien
attgccctccctgtctttattgacc

SEQ ID NO: 4275053 - DNA, 25 bp, Homo sapien
caccccagtatggtggcagaagggc

SEQ ID NO: 4275054 - DNA, 25 bp, Homo sapien
cacttgctaggacaaactctgggtg

SEQ ID NO: 4275055 - DNA, 25 bp, Homo sapien
aggttctcttgggtagggtcaccag

SEQ ID NO: 4275056 - DNA, 25 bp, Homo sapien
tggtcaaagtggggaggttctcttg

SEQ ID NO: 4275057 - DNA, 25 bp, Homo sapien
tctcttgggtagggtcaccaggggc

SEQ ID NO: 4275058 - DNA, 25 bp, Homo sapien
gaggttctcttgggtagggtcacca

SEQ ID NO: 4275059 - DNA, 25 bp, Homo sapien
caattgcattcatgcgactgactcc

SEQ ID NO: 4275060 - DNA, 25 bp, Homo sapien
ctggctctgcggcactgcaggtggc

SEQ ID NO: 4275061 - DNA, 25 bp, Homo sapien
ttggtggcttcacgttccgggaatc

SEQ ID NO: 4275062 - DNA, 25 bp, Homo sapien
gaatccaggacccactggttcacaa

SEQ ID NO: 4275063 - DNA, 25 bp, Homo sapien
atctgctgctgtccgagtggaggtg

SEQ ID NO: 4275064 - DNA, 25 bp, Homo sapien
ctgctgctgtccgagtggaggtgcc

SEQ ID NO: 4275065 - DNA, 25 bp, Homo sapien
tggaggtgcccacgggtctgtagtg

SEQ ID NO: 4275066 - DNA, 25 bp, Homo sapien
aggtgcccacgggtctgtagtgtct

SEQ ID NO: 4275067 - DNA, 25 bp, Homo sapien
tggcctacatggcattcttgtgcct

SEQ ID NO: 4275068 - DNA, 25 bp, Homo sapien
gcagcactggcctacatggcattct

SEQ ID NO: 4275069 - DNA, 25 bp, Homo sapien
tgaatgcagggcagtccatggacac

SEQ ID NO: 4275070 - DNA, 25 bp, Homo sapien
aagggctgtatacgtgggcagcact

SEQ ID NO: 4275071 - DNA, 25 bp, Homo sapien
cagaaaagggaagcccattgcggta

SEQ ID NO: 4275072 - DNA, 25 bp, Homo sapien
ttcagaaaagggaagcccattgcgg

SEQ ID NO: 4275073 - DNA, 25 bp, Homo sapien
caagtgcttcagaaaagggaagccc

SEQ ID NO: 4275074 - DNA, 25 bp, Homo sapien
gcttcagaaaagggaagcccattgc

SEQ ID NO: 4275075 - DNA, 25 bp, Homo sapien
ttggctaagcattgggtctgggttc

SEQ ID NO: 4275076 - DNA, 25 bp, Homo sapien
aactgagaagggtgcttgccacatg

SEQ ID NO: 4275077 - DNA, 25 bp, Homo sapien
gagccaagccactgcgaaactgaga

SEQ ID NO: 4275078 - DNA, 25 bp, Homo sapien
catgggagccacttcgtttggctaa

SEQ ID NO: 4275079 - DNA, 25 bp, Homo sapien
cgtggcaggtgtggcacagacacag

SEQ ID NO: 4275080 - DNA, 25 bp, Homo sapien
acacaggcctctgccaacagggcag

SEQ ID NO: 4275081 - DNA, 25 bp, Homo sapien
gcctctgccaacagggcagctgggc

SEQ ID NO: 4275082 - DNA, 25 bp, Homo sapien
aggtgtggcacagacacaggcctct

SEQ ID NO: 4275083 - DNA, 25 bp, Homo sapien
ggttctcggtcacgagcttcatttg

SEQ ID NO: 4275084 - DNA, 25 bp, Homo sapien
ctccttcaggttctcggtcacgagc

SEQ ID NO: 4275085 - DNA, 25 bp, Homo sapien
tccttcaggttctcggtcacgagct

SEQ ID NO: 4275086 - DNA, 25 bp, Homo sapien
ttcaggttctcggtcacgagcttca

SEQ ID NO: 4275087 - DNA, 25 bp, Homo sapien
caggtgagccacagaagcctaagta

SEQ ID NO: 4275088 - DNA, 25 bp, Homo sapien
gcaatgtcgcactgtgtgagcccag

SEQ ID NO: 4275089 - DNA, 25 bp, Homo sapien
agcctaagtagtggccgaggcctct

SEQ ID NO: 4275090 - DNA, 25 bp, Homo sapien
ttgaccccagggaagtggtgactct

SEQ ID NO: 4275091 - DNA, 25 bp, Homo sapien
tgggggtaagagggttctttctgca

SEQ ID NO: 4275092 - DNA, 25 bp, Homo sapien
caggggccacagcatttcagtaggc

SEQ ID NO: 4275093 - DNA, 25 bp, Homo sapien
ctgcaggggccacagcatttcagta

SEQ ID NO: 4275094 - DNA, 25 bp, Homo sapien
gtaagagggttctttctgcaggggc

SEQ ID NO: 4275095 - DNA, 25 bp, Homo sapien
gagtgaggtgcctatagaagccaga

SEQ ID NO: 4275096 - DNA, 25 bp, Homo sapien
tgacacaggccattaactgcatgag

SEQ ID NO: 4275097 - DNA, 25 bp, Homo sapien
caaatctgggagttggaatcctcac

SEQ ID NO: 4275098 - DNA, 25 bp, Homo sapien
gagctggatgctaacacaaaatgac

SEQ ID NO: 4275099 - DNA, 25 bp, Homo sapien
tatacataagcctaggaactgagct

SEQ ID NO: 4275100 - DNA, 25 bp, Homo sapien
tgaacactcacagggtatcataact

SEQ ID NO: 4275101 - DNA, 25 bp, Homo sapien
catcttggaaatccgtgctaatgag

SEQ ID NO: 4275102 - DNA, 25 bp, Homo sapien
ttttccagagcaagacaatggcacc

SEQ ID NO: 4275103 - DNA, 25 bp, Homo sapien
cactgtagctcacatagctcaggag

SEQ ID NO: 4275104 - DNA, 25 bp, Homo sapien
ttcccaattgctggatgatgtccca

SEQ ID NO: 4275105 - DNA, 25 bp, Homo sapien
gcgctggccagaacattcggcataa

SEQ ID NO: 4275106 - DNA, 25 bp, Homo sapien
tcttcgcttcacgtttgataaggtt

SEQ ID NO: 4275107 - DNA, 25 bp, Homo sapien
tcctctttcatgatggactttagtc

SEQ ID NO: 4275108 - DNA, 25 bp, Homo sapien
ttaatcctctttcatgatggacttt

SEQ ID NO: 4275109 - DNA, 25 bp, Homo sapien
taatcctctttcatgatggacttta

SEQ ID NO: 4275110 - DNA, 25 bp, Homo sapien
aatcctctttcatgatggactttag

SEQ ID NO: 4275111 - DNA, 25 bp, Homo sapien
acaagagaaagatcatctgggcaca

SEQ ID NO: 4275112 - DNA, 25 bp, Homo sapien
gaaaatggtttggacaggaggaaca

SEQ ID NO: 4275113 - DNA, 25 bp, Homo sapien
agaaagatcatctgggcacatgagg

SEQ ID NO: 4275114 - DNA, 25 bp, Homo sapien
tgagggaaaatggtttggacaggag

SEQ ID NO: 4275115 - DNA, 25 bp, Homo sapien
caaattgactgcacggctgaatccg

SEQ ID NO: 4275116 - DNA, 25 bp, Homo sapien
gaaagtagcctgcatgtctcacagg

SEQ ID NO: 4275117 - DNA, 25 bp, Homo sapien
cacagtcagctgcactagaagggct

SEQ ID NO: 4275118 - DNA, 25 bp, Homo sapien
tcaacagcggcagaccgttttcttc

SEQ ID NO: 4275119 - DNA, 25 bp, Homo sapien
taacttgagagcacaaatggagcgg

SEQ ID NO: 4275120 - DNA, 25 bp, Homo sapien
gagtttaggtacaaatgactaccac

SEQ ID NO: 4275121 - DNA, 25 bp, Homo sapien
taagctgctcaactaacagaacgga

SEQ ID NO: 4275122 - DNA, 25 bp, Homo sapien
ctgggccaaagggacctcagagaat

SEQ ID NO: 4275123 - DNA, 25 bp, Homo sapien
gacgtattttgaaatggttccacaa

SEQ ID NO: 4275124 - DNA, 25 bp, Homo sapien
tatatttctttgacgtattttgaaa

SEQ ID NO: 4275125 - DNA, 25 bp, Homo sapien
tttgacgtattttgaaatggttcca

SEQ ID NO: 4275126 - DNA, 25 bp, Homo sapien
tctttgacgtattttgaaatggttc

SEQ ID NO: 4275127 - DNA, 25 bp, Homo sapien
taaaaaactgaggtgcgaagaggcc

SEQ ID NO: 4275128 - DNA, 25 bp, Homo sapien
acttgatgtgctggtttaaaaagga

SEQ ID NO: 4275129 - DNA, 25 bp, Homo sapien
acaggtggcacaaggtggcctcaaa

SEQ ID NO: 4275130 - DNA, 25 bp, Homo sapien
ccctgaattagaatcacttgatgtg

SEQ ID NO: 4275131 - DNA, 25 bp, Homo sapien
aatgcacaaccctatttaaggactg

SEQ ID NO: 4275132 - DNA, 25 bp, Homo sapien
aatgtaagtccctgggcgccacctt

SEQ ID NO: 4275133 - DNA, 25 bp, Homo sapien
gcgccaccttcgatttagggaagaa

SEQ ID NO: 4275134 - DNA, 25 bp, Homo sapien
agaagaatcttcagggcatagggtc

SEQ ID NO: 4275135 - DNA, 25 bp, Homo sapien
tcccattaggaaggctcagcagtaa

SEQ ID NO: 4275136 - DNA, 25 bp, Homo sapien
taaagtgtacctgaagatatgggaa

SEQ ID NO: 4275137 - DNA, 25 bp, Homo sapien
gacaccctcaatggcaaatataaca

SEQ ID NO: 4275138 - DNA, 25 bp, Homo sapien
gagaggtcatttagccatatccata

SEQ ID NO: 4275139 - DNA, 25 bp, Homo sapien
gatacacccagacttttaatagact

SEQ ID NO: 4275140 - DNA, 25 bp, Homo sapien
tgccatcaaactgtgtaacaaataa

SEQ ID NO: 4275141 - DNA, 25 bp, Homo sapien
tatttgggcccatttatggactcaa

SEQ ID NO: 4275142 - DNA, 25 bp, Homo sapien
gactcaatgctctctattccactga

SEQ ID NO: 4275143 - DNA, 25 bp, Homo sapien
gagatactccaggtgtctagggatc

SEQ ID NO: 4275144 - DNA, 25 bp, Homo sapien
tgagcacagctatggctagtgggcc

SEQ ID NO: 4275145 - DNA, 25 bp, Homo sapien
ttctatgcatagtggtttggaggcc

SEQ ID NO: 4275146 - DNA, 25 bp, Homo sapien
gctttgatcaaagggtcatcttagg

SEQ ID NO: 4275147 - DNA, 25 bp, Homo sapien
gctgcttctacacacctgatctcat

SEQ ID NO: 4275148 - DNA, 25 bp, Homo sapien
cgctctctgaaagctattattcagg

SEQ ID NO: 4275149 - DNA, 25 bp, Homo sapien
gagctgccccaggttgattcttaga

SEQ ID NO: 4275150 - DNA, 25 bp, Homo sapien
actggagtcctctgtattcatttaa

SEQ ID NO: 4275151 - DNA, 25 bp, Homo sapien
tctggatatgccgtggcttatcagg

SEQ ID NO: 4275152 - DNA, 25 bp, Homo sapien
tgccgtggcttatcaggtatggcaa

SEQ ID NO: 4275153 - DNA, 25 bp, Homo sapien
gcaagtataaactttaaagccagga

SEQ ID NO: 4275154 - DNA, 25 bp, Homo sapien
caagtataaactttaaagccaggag

SEQ ID NO: 4275155 - DNA, 25 bp, Homo sapien
ggactctcatgccagctgcaaggag

SEQ ID NO: 4275156 - DNA, 25 bp, Homo sapien
ttggtcactgcagggttgtcaaacc

SEQ ID NO: 4275157 - DNA, 25 bp, Homo sapien
ggttgtcaaaccctaggactctcat

SEQ ID NO: 4275158 - DNA, 25 bp, Homo sapien
ctttggtcactgcagggttgtcaaa

SEQ ID NO: 4275159 - DNA, 25 bp, Homo sapien
gctataaggcagatgtggtaccgca

SEQ ID NO: 4275160 - DNA, 25 bp, Homo sapien
tctacaacagtgcaaggagaacaca

SEQ ID NO: 4275161 - DNA, 25 bp, Homo sapien
ggacactccaggtggcctaaatata

SEQ ID NO: 4275162 - DNA, 25 bp, Homo sapien
tcagagccacatttcatgcacaaag

SEQ ID NO: 4275163 - DNA, 25 bp, Homo sapien
tagggttcactatacaggttttcac

SEQ ID NO: 4275164 - DNA, 25 bp, Homo sapien
gaagtgctaacctccaacacgatgg

SEQ ID NO: 4275165 - DNA, 25 bp, Homo sapien
tttattatcaaccaaggcccatagt

SEQ ID NO: 4275166 - DNA, 25 bp, Homo sapien
agaaagtagagagttgctgtatacc

SEQ ID NO: 4275167 - DNA, 25 bp, Homo sapien
ccacataaacaatagaatcagtctg

SEQ ID NO: 4275168 - DNA, 25 bp, Homo sapien
cgaagttggttagtgccagtcctct

SEQ ID NO: 4275169 - DNA, 25 bp, Homo sapien
ttgaattgcctttgccaatagtaga

SEQ ID NO: 4275170 - DNA, 25 bp, Homo sapien
gatgtccagttgttacagcaccctt

SEQ ID NO: 4275171 - DNA, 25 bp, Homo sapien
gagcagccagaccaaaacagactac

SEQ ID NO: 4275172 - DNA, 25 bp, Homo sapien
gactgtgtgaccaaaaaggccttgg

SEQ ID NO: 4275173 - DNA, 25 bp, Homo sapien
tatgtgaactgtgaacaactctgcc

SEQ ID NO: 4275174 - DNA, 25 bp, Homo sapien
ttccaatagtcaaagatggccaggc

SEQ ID NO: 4275175 - DNA, 25 bp, Homo sapien
tgtgttctccgccaacaggcatgac

SEQ ID NO: 4275176 - DNA, 25 bp, Homo sapien
aacaggcatgaccaattgtctaagc

SEQ ID NO: 4275177 - DNA, 25 bp, Homo sapien
tctccgccaacaggcatgaccaatt

SEQ ID NO: 4275178 - DNA, 25 bp, Homo sapien
gcggggctgtgttctccgccaacag

SEQ ID NO: 4275179 - DNA, 25 bp, Homo sapien
ggcccacccaggcaagggccctgca

SEQ ID NO: 4275180 - DNA, 25 bp, Homo sapien
gcccacccaggcaagggccctgcac

SEQ ID NO: 4275181 - DNA, 25 bp, Homo sapien
gggcccacccaggcaagggccctgc

SEQ ID NO: 4275182 - DNA, 25 bp, Homo sapien
ctgagtttatttggggcccacccag

SEQ ID NO: 4275183 - DNA, 25 bp, Homo sapien
ctcaggacccggtggggcagcagga

SEQ ID NO: 4275184 - DNA, 25 bp, Homo sapien
gctcaggacccggtggggcagcagg

SEQ ID NO: 4275185 - DNA, 25 bp, Homo sapien
ggcgtggcttgtgctgacggctcag

SEQ ID NO: 4275186 - DNA, 25 bp, Homo sapien
gtgaggcgtggcttgtgctgacggc

SEQ ID NO: 4275187 - DNA, 25 bp, Homo sapien
ggagtgggccctggcgcggtagcac

SEQ ID NO: 4275188 - DNA, 25 bp, Homo sapien
tcaggtaccggtattgccggtacat

SEQ ID NO: 4275189 - DNA, 25 bp, Homo sapien
ctgcggtggtcaggtaccggtattg

SEQ ID NO: 4275190 - DNA, 25 bp, Homo sapien
cggtggtcaggtaccggtattgccg

SEQ ID NO: 4275191 - DNA, 25 bp, Homo sapien
tggtcaggtaccggtattgccggta

SEQ ID NO: 4275192 - DNA, 25 bp, Homo sapien
tgtccgctgtgctccccatccaggg

SEQ ID NO: 4275193 - DNA, 25 bp, Homo sapien
tgtttgccgccctttgccaccgtcg

SEQ ID NO: 4275194 - DNA, 25 bp, Homo sapien
tccatacctccggatccgacagggt

SEQ ID NO: 4275195 - DNA, 25 bp, Homo sapien
gccgctcctgatcgggctaaagact

SEQ ID NO: 4275196 - DNA, 25 bp, Homo sapien
ttcacccgcagtgggggcttctcaa

SEQ ID NO: 4275197 - DNA, 25 bp, Homo sapien
caatctcccctgaagccttctttgt

SEQ ID NO: 4275198 - DNA, 25 bp, Homo sapien
ttcttcacccgcagtgggggcttct

SEQ ID NO: 4275199 - DNA, 25 bp, Homo sapien
gttcttcacccgcagtgggggcttc

SEQ ID NO: 4275200 - DNA, 25 bp, Homo sapien
ctcgtagtgtgcccaagaccttcat

SEQ ID NO: 4275201 - DNA, 25 bp, Homo sapien
ctctcgtagtgtgcccaagaccttc

SEQ ID NO: 4275202 - DNA, 25 bp, Homo sapien
tactctcgtagtgtgcccaagacct

SEQ ID NO: 4275203 - DNA, 25 bp, Homo sapien
ttgtactctcgtagtgtgcccaaga

SEQ ID NO: 4275204 - DNA, 25 bp, Homo sapien
tgatgcagcagtccttaaaacagtg

SEQ ID NO: 4275205 - DNA, 25 bp, Homo sapien
tgtccacatgttgacgatggcagct

SEQ ID NO: 4275206 - DNA, 25 bp, Homo sapien
aaaatcctcttatgtggcctcagca

SEQ ID NO: 4275207 - DNA, 25 bp, Homo sapien
tgaaaggtttatagccccacccaga

SEQ ID NO: 4275208 - DNA, 25 bp, Homo sapien
cacaagcagctaggatgaaagtctc

SEQ ID NO: 4275209 - DNA, 25 bp, Homo sapien
ccttgccaacaaggagaagagctga

SEQ ID NO: 4275210 - DNA, 25 bp, Homo sapien
tatgccttcgcttaaacttctcacg

SEQ ID NO: 4275211 - DNA, 25 bp, Homo sapien
catagtcaaaaggacagaggactca

SEQ ID NO: 4275212 - DNA, 25 bp, Homo sapien
gcacagatggtgccaattagttctg

SEQ ID NO: 4275213 - DNA, 25 bp, Homo sapien
cacagatggtgccaattagttctgt

SEQ ID NO: 4275214 - DNA, 25 bp, Homo sapien
gctccatccaccagagcagaaccat

SEQ ID NO: 4275215 - DNA, 25 bp, Homo sapien
cacctcctgctccatccaccagagc

SEQ ID NO: 4275216 - DNA, 25 bp, Homo sapien
tgctccatccaccagagcagaacca

SEQ ID NO: 4275217 - DNA, 25 bp, Homo sapien
ttccacctcctgctccatccaccag

SEQ ID NO: 4275218 - DNA, 25 bp, Homo sapien
gagggggtgccacatgaaaacttat

SEQ ID NO: 4275219 - DNA, 25 bp, Homo sapien
ggtcaccaggccctaaacattagaa

SEQ ID NO: 4275220 - DNA, 25 bp, Homo sapien
aatttctgggatgagtagttaactc

SEQ ID NO: 4275221 - DNA, 25 bp, Homo sapien
attaaacatgcatggtacaggcagg

SEQ ID NO: 4275222 - DNA, 25 bp, Homo sapien
cttataggggccatgaataaacata

SEQ ID NO: 4275223 - DNA, 25 bp, Homo sapien
atttctgctcttataggggccatga

SEQ ID NO: 4275224 - DNA, 25 bp, Homo sapien
ctatggcattttttgagttagtaaa

SEQ ID NO: 4275225 - DNA, 25 bp, Homo sapien
tccatcaagacgttaaaaatttatg

SEQ ID NO: 4275226 - DNA, 25 bp, Homo sapien
aaaaaacacacctcagtatatgggc

SEQ ID NO: 4275227 - DNA, 25 bp, Homo sapien
caagaccacgcattagagaaaagac

SEQ ID NO: 4275228 - DNA, 25 bp, Homo sapien
gaacaaagttagtagtctcacacct

SEQ ID NO: 4275229 - DNA, 25 bp, Homo sapien
tatgggctcaatagtagtgtggaca

SEQ ID NO: 4275230 - DNA, 25 bp, Homo sapien
acatatagcatctatcatgaacaca

SEQ ID NO: 4275231 - DNA, 25 bp, Homo sapien
cacatatagcatctatcatgaacac

SEQ ID NO: 4275232 - DNA, 25 bp, Homo sapien
tggtcagccctgagtcctaaggcct

SEQ ID NO: 4275233 - DNA, 25 bp, Homo sapien
ttagccaacactggaaatgtgcaag

SEQ ID NO: 4275234 - DNA, 25 bp, Homo sapien
taaggccttaagtatatgaaacacc

SEQ ID NO: 4275235 - DNA, 25 bp, Homo sapien
caataagagccaaaaagagcaaagc

SEQ ID NO: 4275236 - DNA, 25 bp, Homo sapien
tttccaagatgttacagggatccat

SEQ ID NO: 4275237 - DNA, 25 bp, Homo sapien
aatttccaagatgttacagggatcc

SEQ ID NO: 4275238 - DNA, 25 bp, Homo sapien
ccaagatgttacagggatccatatt

SEQ ID NO: 4275239 - DNA, 25 bp, Homo sapien
taatttccaagatgttacagggatc

SEQ ID NO: 4275240 - DNA, 25 bp, Homo sapien
catgtgaaattatctatcgtcctac

SEQ ID NO: 4275241 - DNA, 25 bp, Homo sapien
acagacagcctgcttgggctttgca

SEQ ID NO: 4275242 - DNA, 25 bp, Homo sapien
cacacctgtagcaaatgagacttaa

SEQ ID NO: 4275243 - DNA, 25 bp, Homo sapien
cattttgaagtttgagagtgtttca

SEQ ID NO: 4275244 - DNA, 25 bp, Homo sapien
tggaaagactgcattcacttgtggt

SEQ ID NO: 4275245 - DNA, 25 bp, Homo sapien
gctactacaatcaaaatgaggtctg

SEQ ID NO: 4275246 - DNA, 25 bp, Homo sapien
gcacagttagtgaccacagatataa

SEQ ID NO: 4275247 - DNA, 25 bp, Homo sapien
gacattccaatcagcgcacagttag

SEQ ID NO: 4275248 - DNA, 25 bp, Homo sapien
caaagttaatggttatccaaggcca

SEQ ID NO: 4275249 - DNA, 25 bp, Homo sapien
ccagataggagcagaagtctaggct

SEQ ID NO: 4275250 - DNA, 25 bp, Homo sapien
tgagaccaccccaggactagaaaac

SEQ ID NO: 4275251 - DNA, 25 bp, Homo sapien
cactgacactgtagcagagagggtc

SEQ ID NO: 4275252 - DNA, 25 bp, Homo sapien
aaggctcacataaccaaactgcagg

SEQ ID NO: 4275253 - DNA, 25 bp, Homo sapien
gagaatggacgtttgaagaccctgc

SEQ ID NO: 4275254 - DNA, 25 bp, Homo sapien
agctgctaatgggtaaacacaggag

SEQ ID NO: 4275255 - DNA, 25 bp, Homo sapien
caccaatattggctgaaggttctga

SEQ ID NO: 4275256 - DNA, 25 bp, Homo sapien
tctgggctacaaacacctggttctg

SEQ ID NO: 4275257 - DNA, 25 bp, Homo sapien
tgggctacaaacacctggttctgga

SEQ ID NO: 4275258 - DNA, 25 bp, Homo sapien
ctgggctacaaacacctggttctgg

SEQ ID NO: 4275259 - DNA, 25 bp, Homo sapien
gctctgggctacaaacacctggttc

SEQ ID NO: 4275260 - DNA, 25 bp, Homo sapien
tgtctgcctttaaagcctgcacctt

SEQ ID NO: 4275261 - DNA, 25 bp, Homo sapien
tagcatcaatgtctgcctttaaagc

SEQ ID NO: 4275262 - DNA, 25 bp, Homo sapien
gacttgttcatataatgtagcatca

SEQ ID NO: 4275263 - DNA, 25 bp, Homo sapien
ttctttttccaggatgacttgttca

SEQ ID NO: 4275264 - DNA, 25 bp, Homo sapien
ctgggaggtaattaggagagtggcc

SEQ ID NO: 4275265 - DNA, 25 bp, Homo sapien
gggaggtaattaggagagtggccaa

SEQ ID NO: 4275266 - DNA, 25 bp, Homo sapien
gaggtaattaggagagtggccaagc

SEQ ID NO: 4275267 - DNA, 25 bp, Homo sapien
aggtaattaggagagtggccaagct

SEQ ID NO: 4275268 - DNA, 25 bp, Homo sapien
gcaatatagaagagtgaggcaaagc

SEQ ID NO: 4275269 - DNA, 25 bp, Homo sapien
aggcaatatagaagagtgaggcaaa

SEQ ID NO: 4275270 - DNA, 25 bp, Homo sapien
ttcatatctttcaagacaaaggcaa

SEQ ID NO: 4275271 - DNA, 25 bp, Homo sapien
caatatagaagagtgaggcaaagca

SEQ ID NO: 4275272 - DNA, 25 bp, Homo sapien
ttacctctgagggaaaaagctcctc

SEQ ID NO: 4275273 - DNA, 25 bp, Homo sapien
tacctctgagggaaaaagctcctcc

SEQ ID NO: 4275274 - DNA, 25 bp, Homo sapien
acttccagaaatctaaacaccctca

SEQ ID NO: 4275275 - DNA, 25 bp, Homo sapien
cttccagaaatctaaacaccctcat

SEQ ID NO: 4275276 - DNA, 25 bp, Homo sapien
agaattagatggttctgataggcag

SEQ ID NO: 4275277 - DNA, 25 bp, Homo sapien
ttcagaattagatggttctgatagg

SEQ ID NO: 4275278 - DNA, 25 bp, Homo sapien
cagaattagatggttctgataggca

SEQ ID NO: 4275279 - DNA, 25 bp, Homo sapien
tcagaattagatggttctgataggc

SEQ ID NO: 4275280 - DNA, 25 bp, Homo sapien
cctgtaggtcatgttggcacagcca

SEQ ID NO: 4275281 - DNA, 25 bp, Homo sapien
tgggcacatacaacaggacactggt

SEQ ID NO: 4275282 - DNA, 25 bp, Homo sapien
ggcccaaacctccatgtcgaagtaa

SEQ ID NO: 4275283 - DNA, 25 bp, Homo sapien
caccgtggaccagatgaggttgaac

SEQ ID NO: 4275284 - DNA, 25 bp, Homo sapien
cattgcactccggcatgggccacag

SEQ ID NO: 4275285 - DNA, 25 bp, Homo sapien
caccattgcactccggcatgggcca

SEQ ID NO: 4275286 - DNA, 25 bp, Homo sapien
attgcactccggcatgggccacaga

SEQ ID NO: 4275287 - DNA, 25 bp, Homo sapien
tcacaccattgcactccggcatggg

SEQ ID NO: 4275288 - DNA, 25 bp, Homo sapien
aaccgagtgtaccaggtgtcctcaa

SEQ ID NO: 4275289 - DNA, 25 bp, Homo sapien
ttcttcagggcttcactgtcatgca

SEQ ID NO: 4275290 - DNA, 25 bp, Homo sapien
tcagggcttcactgtcatgcagtgg

SEQ ID NO: 4275291 - DNA, 25 bp, Homo sapien
tatgggctgatacttcaaagcaaac

SEQ ID NO: 4275292 - DNA, 25 bp, Homo sapien
tgaatcacgatgccagacgtgagca

SEQ ID NO: 4275293 - DNA, 25 bp, Homo sapien
ctgaatcacgatgccagacgtgagc

SEQ ID NO: 4275294 - DNA, 25 bp, Homo sapien
cacctgaatcacgatgccagacgtg

SEQ ID NO: 4275295 - DNA, 25 bp, Homo sapien
cctgaatcacgatgccagacgtgag

SEQ ID NO: 4275296 - DNA, 25 bp, Homo sapien
gatcatagctctgacagcagcaagg

SEQ ID NO: 4275297 - DNA, 25 bp, Homo sapien
gacctgacggatcatagctctgaca

SEQ ID NO: 4275298 - DNA, 25 bp, Homo sapien
ttccaagaacaagtctgggacctga

SEQ ID NO: 4275299 - DNA, 25 bp, Homo sapien
cacaccaagtgggaacttccaagaa

SEQ ID NO: 4275300 - DNA, 25 bp, Homo sapien
ttgcctgagggtaaccagggatcat

SEQ ID NO: 4275301 - DNA, 25 bp, Homo sapien
tggatacaactttgcctgagggtaa

SEQ ID NO: 4275302 - DNA, 25 bp, Homo sapien
ttcctggatacaactttgcctgagg

SEQ ID NO: 4275303 - DNA, 25 bp, Homo sapien
tcctggatacaactttgcctgaggg

SEQ ID NO: 4275304 - DNA, 25 bp, Homo sapien
caaaacctttgaagttctgtctggt

SEQ ID NO: 4275305 - DNA, 25 bp, Homo sapien
tggttctgtatgtgaaggctctcat

SEQ ID NO: 4275306 - DNA, 25 bp, Homo sapien
tcaaaacctttgaagttctgtctgg

SEQ ID NO: 4275307 - DNA, 25 bp, Homo sapien
tctgtctggttctgtatgtgaaggc

SEQ ID NO: 4275308 - DNA, 25 bp, Homo sapien
ggtgttatcattgcactcttttacc

SEQ ID NO: 4275309 - DNA, 25 bp, Homo sapien
tcattgcactcttttaccaatccca

SEQ ID NO: 4275310 - DNA, 25 bp, Homo sapien
tgttatcattgcactcttttaccaa

SEQ ID NO: 4275311 - DNA, 25 bp, Homo sapien
ttgcactcttttaccaatcccactg

SEQ ID NO: 4275312 - DNA, 25 bp, Homo sapien
caatggtctaaacaacaactgggca

SEQ ID NO: 4275313 - DNA, 25 bp, Homo sapien
aatggtctaaacaacaactgggcac

SEQ ID NO: 4275314 - DNA, 25 bp, Homo sapien
acaatggtctaaacaacaactgggc

SEQ ID NO: 4275315 - DNA, 25 bp, Homo sapien
gacatcctgagcaagttctatgacc

SEQ ID NO: 4275316 - DNA, 25 bp, Homo sapien
cagaagtatccaaagctgataaggt

SEQ ID NO: 4275317 - DNA, 25 bp, Homo sapien
ccaaaggtgtgaaagaactctcaga

SEQ ID NO: 4275318 - DNA, 25 bp, Homo sapien
ccaaagctgataaggtcactttcat

SEQ ID NO: 4275319 - DNA, 25 bp, Homo sapien
ccaggccggattagatgctgcacta

SEQ ID NO: 4275320 - DNA, 25 bp, Homo sapien
tgagagcaattgtgggagcctccct

SEQ ID NO: 4275321 - DNA, 25 bp, Homo sapien
tgagtctagccatggaagcaccagt

SEQ ID NO: 4275322 - DNA, 25 bp, Homo sapien
gacactacttacctacaggcaggca

SEQ ID NO: 4275323 - DNA, 25 bp, Homo sapien
gaggccgggcgaaagagtgctcggt

SEQ ID NO: 4275324 - DNA, 25 bp, Homo sapien
gagagccggcgagaaccggaggccg

SEQ ID NO: 4275325 - DNA, 25 bp, Homo sapien
tccacgtcttcggaggcgggtccga

SEQ ID NO: 4275326 - DNA, 25 bp, Homo sapien
cgagcgctgggcgtggcggacgcgg

SEQ ID NO: 4275327 - DNA, 25 bp, Homo sapien
tcactgggcgatcgtagtggacgag

SEQ ID NO: 4275328 - DNA, 25 bp, Homo sapien
ggcgatcgtagtggacgagaaccta

SEQ ID NO: 4275329 - DNA, 25 bp, Homo sapien
tggacgagaacctagactggaaccg

SEQ ID NO: 4275330 - DNA, 25 bp, Homo sapien
tcgtagtggacgagaacctagactg

SEQ ID NO: 4275331 - DNA, 25 bp, Homo sapien
acccatcgaaatccggacggcagcg

SEQ ID NO: 4275332 - DNA, 25 bp, Homo sapien
ggcctggttgggctgtcactccgag

SEQ ID NO: 4275333 - DNA, 25 bp, Homo sapien
aggcgcggccgagaaggcagaggcc

SEQ ID NO: 4275334 - DNA, 25 bp, Homo sapien
cgggagaggcgcggccgagaaggca

SEQ ID NO: 4275335 - DNA, 25 bp, Homo sapien
tgtcagtgcggtcttctctccatgt

SEQ ID NO: 4275336 - DNA, 25 bp, Homo sapien
tcagtgcggtcttctctccatgttt

SEQ ID NO: 4275337 - DNA, 25 bp, Homo sapien
gtcagtgcggtcttctctccatgtt

SEQ ID NO: 4275338 - DNA, 25 bp, Homo sapien
caaaggtcatttcagggccgagaga

SEQ ID NO: 4275339 - DNA, 25 bp, Homo sapien
gccctcaggtaaggagatgcacaca

SEQ ID NO: 4275340 - DNA, 25 bp, Homo sapien
gactgctggccaagggaggttaatt

SEQ ID NO: 4275341 - DNA, 25 bp, Homo sapien
gacatcaggttagctggagagtcca

SEQ ID NO: 4275342 - DNA, 25 bp, Homo sapien
ctgctgtacagcgagacaagtcgtt

SEQ ID NO: 4275343 - DNA, 25 bp, Homo sapien
caagtcgttgccacaggagtttgca

SEQ ID NO: 4275344 - DNA, 25 bp, Homo sapien
cgagacaagtcgttgccacaggagt

SEQ ID NO: 4275345 - DNA, 25 bp, Homo sapien
tacagcgagacaagtcgttgccaca

SEQ ID NO: 4275346 - DNA, 25 bp, Homo sapien
tattgctcccagatatagcagccta

SEQ ID NO: 4275347 - DNA, 25 bp, Homo sapien
tgtggtcaagatgtcacctgcagtc

SEQ ID NO: 4275348 - DNA, 25 bp, Homo sapien
taatactcaaggtaggtaccactcc

SEQ ID NO: 4275349 - DNA, 25 bp, Homo sapien
gactcaggctggagggtctgcctct

SEQ ID NO: 4275350 - DNA, 25 bp, Homo sapien
gagagagtatttaaaatcagtaaga

SEQ ID NO: 4275351 - DNA, 25 bp, Homo sapien
agcatgttatcaaggcaaaatataa

SEQ ID NO: 4275352 - DNA, 25 bp, Homo sapien
aataccatagtgttaataacatcat

SEQ ID NO: 4275353 - DNA, 25 bp, Homo sapien
cactggatagtacaccttaagtggg

SEQ ID NO: 4275354 - DNA, 25 bp, Homo sapien
cacatgattccaagaaaagcaaggg

SEQ ID NO: 4275355 - DNA, 25 bp, Homo sapien
acaggtaatagccaaagtgtgtccg

SEQ ID NO: 4275356 - DNA, 25 bp, Homo sapien
aagcaagggcctttcactctttaca

SEQ ID NO: 4275357 - DNA, 25 bp, Homo sapien
aggtaatagccaaagtgtgtccgga

SEQ ID NO: 4275358 - DNA, 25 bp, Homo sapien
ttctaacaatgattagatgcaactc

SEQ ID NO: 4275359 - DNA, 25 bp, Homo sapien
caatgattagatgcaactcacatga

SEQ ID NO: 4275360 - DNA, 25 bp, Homo sapien
taacaatgattagatgcaactcaca

SEQ ID NO: 4275361 - DNA, 25 bp, Homo sapien
gattagatgcaactcacatgaagaa

SEQ ID NO: 4275362 - DNA, 25 bp, Homo sapien
taatttgtgtagttacactattgtt

SEQ ID NO: 4275363 - DNA, 25 bp, Homo sapien
gggcactcgccacctgagcagtata

SEQ ID NO: 4275364 - DNA, 25 bp, Homo sapien
gattttagggcactcgccacctgag

SEQ ID NO: 4275365 - DNA, 25 bp, Homo sapien
tcatgatacgctcatgtcagcctcc

SEQ ID NO: 4275366 - DNA, 25 bp, Homo sapien
cataggcttaaaggatgggttccct

SEQ ID NO: 4275367 - DNA, 25 bp, Homo sapien
ccgccgctgataaggactctgttga

SEQ ID NO: 4275368 - DNA, 25 bp, Homo sapien
tgaactggaagctctaggagactca

SEQ ID NO: 4275369 - DNA, 25 bp, Homo sapien
tgatcctccaatggtgcatgcccgg

SEQ ID NO: 4275370 - DNA, 25 bp, Homo sapien
cagagtggctggtcttttatgtccc

SEQ ID NO: 4275371 - DNA, 25 bp, Homo sapien
gaccttggtgagacggctttccata

SEQ ID NO: 4275372 - DNA, 25 bp, Homo sapien
ccatcattagatgtgagcctctcct

SEQ ID NO: 4275373 - DNA, 25 bp, Homo sapien
taggtttgacagactcagccacagg

SEQ ID NO: 4275374 - DNA, 25 bp, Homo sapien
ggcaaagagttctcagacttgatag

SEQ ID NO: 4275375 - DNA, 25 bp, Homo sapien
caagacctcaagctaggcaaagagt

SEQ ID NO: 4275376 - DNA, 25 bp, Homo sapien
tgcaaactacatacctgacaaagga

SEQ ID NO: 4275377 - DNA, 25 bp, Homo sapien
tacagatgtcaggaagtatttgcaa

SEQ ID NO: 4275378 - DNA, 25 bp, Homo sapien
gcaaaaccatctaatacaaggtcta

SEQ ID NO: 4275379 - DNA, 25 bp, Homo sapien
tgggcattcgaacggtttctactga

SEQ ID NO: 4275380 - DNA, 25 bp, Homo sapien
gcctaccttaaatgtcctgagcact

SEQ ID NO: 4275381 - DNA, 25 bp, Homo sapien
cattagcctactgttatgcaaaacc

SEQ ID NO: 4275382 - DNA, 25 bp, Homo sapien
tccattcaactatgcggagctctca

SEQ ID NO: 4275383 - DNA, 25 bp, Homo sapien
gacctggcgtttgtgtcccactgaa

SEQ ID NO: 4275384 - DNA, 25 bp, Homo sapien
tccaccaaatgggtagggacattcc

SEQ ID NO: 4275385 - DNA, 25 bp, Homo sapien
gggacattccccactgattcatggc

SEQ ID NO: 4275386 - DNA, 25 bp, Homo sapien
tcagtctttaggctacaaccctggg

SEQ ID NO: 4275387 - DNA, 25 bp, Homo sapien
taggaacacaggcataactaggagc

SEQ ID NO: 4275388 - DNA, 25 bp, Homo sapien
gattgatgttcaggcccttcccttg

SEQ ID NO: 4275389 - DNA, 25 bp, Homo sapien
tactggcgatctccaaatgtaagca

SEQ ID NO: 4275390 - DNA, 25 bp, Homo sapien
ccaaagcgctacaggagttgctgca

SEQ ID NO: 4275391 - DNA, 25 bp, Homo sapien
ccttgtataagagcatgtgacaggc

SEQ ID NO: 4275392 - DNA, 25 bp, Homo sapien
tgtctggcaacactattgtggaggc

SEQ ID NO: 4275393 - DNA, 25 bp, Homo sapien
tgttccaggcggtagggtcttcaac

SEQ ID NO: 4275394 - DNA, 25 bp, Homo sapien
tgtccaagaccatgcttctgtccgt

SEQ ID NO: 4275395 - DNA, 25 bp, Homo sapien
gaggtcactttgaatatacggccct

SEQ ID NO: 4275396 - DNA, 25 bp, Homo sapien
tgtccgtaagttccctaataaatca

SEQ ID NO: 4275397 - DNA, 25 bp, Homo sapien
ttggaggtcactttgaatatacggc

SEQ ID NO: 4275398 - DNA, 25 bp, Homo sapien
gggtgatgcatgaatacagtcatta

SEQ ID NO: 4275399 - DNA, 25 bp, Homo sapien
acctgacagccaacaccgacggggt

SEQ ID NO: 4275400 - DNA, 25 bp, Homo sapien
tgagtctcgccagtccctctgggct

SEQ ID NO: 4275401 - DNA, 25 bp, Homo sapien
aaaacacctaactcattcgggtgag

SEQ ID NO: 4275402 - DNA, 25 bp, Homo sapien
gcctcagccactggacgatccttcc

SEQ ID NO: 4275403 - DNA, 25 bp, Homo sapien
cagcctcagccactggacgatcctt

SEQ ID NO: 4275404 - DNA, 25 bp, Homo sapien
cagccactggacgatccttcccgta

SEQ ID NO: 4275405 - DNA, 25 bp, Homo sapien
ctcagccactggacgatccttcccg

SEQ ID NO: 4275406 - DNA, 25 bp, Homo sapien
cagagccttgggagcagcattgact

SEQ ID NO: 4275407 - DNA, 25 bp, Homo sapien
tgcaggaccctttggtgagtgctta

SEQ ID NO: 4275408 - DNA, 25 bp, Homo sapien
tagctggcctaaggattgcaggacc

SEQ ID NO: 4275409 - DNA, 25 bp, Homo sapien
gaccagaccttgctgatcaagacag

SEQ ID NO: 4275410 - DNA, 25 bp, Homo sapien
cagctatcagaatgtgtgctttttc

SEQ ID NO: 4275411 - DNA, 25 bp, Homo sapien
tgtgtgcatataacactcattacac

SEQ ID NO: 4275412 - DNA, 25 bp, Homo sapien
acagctatcagaatgtgtgcttttt

SEQ ID NO: 4275413 - DNA, 25 bp, Homo sapien
tatgtgtgcatataacactcattac

SEQ ID NO: 4275414 - DNA, 25 bp, Homo sapien
tcttcaatgttcgaagacgatactg

SEQ ID NO: 4275415 - DNA, 25 bp, Homo sapien
tgtaatgtgcagactccaaggtgag

SEQ ID NO: 4275416 - DNA, 25 bp, Homo sapien
tactgtgacagaatacatctaccac

SEQ ID NO: 4275417 - DNA, 25 bp, Homo sapien
taagtctagtgcagcgtttaaggcc

SEQ ID NO: 4275418 - DNA, 25 bp, Homo sapien
gaatgacaggtttcacttatacagg

SEQ ID NO: 4275419 - DNA, 25 bp, Homo sapien
tttctggccgcagatgtgccaagtg

SEQ ID NO: 4275420 - DNA, 25 bp, Homo sapien
caagtgattgaagaaagatataccc

SEQ ID NO: 4275421 - DNA, 25 bp, Homo sapien
ttatacaggaaggtttttgcacagg

SEQ ID NO: 4275422 - DNA, 25 bp, Homo sapien
tacttaaagggccatacgcgatttc

SEQ ID NO: 4275423 - DNA, 25 bp, Homo sapien
gccagaagatgcctagaaaagaaca

SEQ ID NO: 4275424 - DNA, 25 bp, Homo sapien
gaatcgatttctcacaggatacaca

SEQ ID NO: 4275425 - DNA, 25 bp, Homo sapien
caatgtggaaggagggataacccta

SEQ ID NO: 4275426 - DNA, 25 bp, Homo sapien
tatggtgtgctgtctgttgtataac

SEQ ID NO: 4275427 - DNA, 25 bp, Homo sapien
ttggtgatataaccccacagaagac

SEQ ID NO: 4275428 - DNA, 25 bp, Homo sapien
tagggagctagacaaggatggcaac

SEQ ID NO: 4275429 - DNA, 25 bp, Homo sapien
ggatggcaactatttctgtatctta

SEQ ID NO: 4275430 - DNA, 25 bp, Homo sapien
catcctcaagtgcagtctgtttcgg

SEQ ID NO: 4275431 - DNA, 25 bp, Homo sapien
caccacatcctcaagtgcagtctgt

SEQ ID NO: 4275432 - DNA, 25 bp, Homo sapien
caagtgcagtctgtttcggcaaaca

SEQ ID NO: 4275433 - DNA, 25 bp, Homo sapien
cctcaagtgcagtctgtttcggcaa

SEQ ID NO: 4275434 - DNA, 25 bp, Homo sapien
cccattgttcctgaggactcggtcc

SEQ ID NO: 4275435 - DNA, 25 bp, Homo sapien
ccattgttcctgaggactcggtcct

SEQ ID NO: 4275436 - DNA, 25 bp, Homo sapien
tgggcagagaggctcatcacccgag

SEQ ID NO: 4275437 - DNA, 25 bp, Homo sapien
ctcctgttagttttacatgaggggc

SEQ ID NO: 4275438 - DNA, 25 bp, Homo sapien
gagaggctcatcacccgagtaaagg

SEQ ID NO: 4275439 - DNA, 25 bp, Homo sapien
catcacccgagtaaaggtgacacag

SEQ ID NO: 4275440 - DNA, 25 bp, Homo sapien
aaatggaaagaatgacacagttgat

SEQ ID NO: 4275441 - DNA, 25 bp, Homo sapien
gattcctgtgctcaagaatttgaac

SEQ ID NO: 4275442 - DNA, 25 bp, Homo sapien
ggaaagaatgacacagttgatggaa

SEQ ID NO: 4275443 - DNA, 25 bp, Homo sapien
gaatttgaactgagaaatggaaaga

SEQ ID NO: 4275444 - DNA, 25 bp, Homo sapien
ctgcgggcgtgcagtcagctgctgg

SEQ ID NO: 4275445 - DNA, 25 bp, Homo sapien
agctgcgggcgtgcagtcagctgct

SEQ ID NO: 4275446 - DNA, 25 bp, Homo sapien
gctgcgggcgtgcagtcagctgctg

SEQ ID NO: 4275447 - DNA, 25 bp, Homo sapien
gagagtctggccacttggaccaaat

SEQ ID NO: 4275448 - DNA, 25 bp, Homo sapien
aaatgtggatactgccaggcgagcc

SEQ ID NO: 4275449 - DNA, 25 bp, Homo sapien
tgtatccaaccccttaggagccagg

SEQ ID NO: 4275450 - DNA, 25 bp, Homo sapien
acagattggcgtcttcctcagctca

SEQ ID NO: 4275451 - DNA, 25 bp, Homo sapien
cacctgcgcagcagcttgtggtagg

SEQ ID NO: 4275452 - DNA, 25 bp, Homo sapien
ttccaagagggaaaccgacattatc

SEQ ID NO: 4275453 - DNA, 25 bp, Homo sapien
gagggagccattgtttacaggagcc

SEQ ID NO: 4275454 - DNA, 25 bp, Homo sapien
ctggcagaggataccacgtggctgc

SEQ ID NO: 4275455 - DNA, 25 bp, Homo sapien
aagaggctcccagtgcaaataagtc

SEQ ID NO: 4275456 - DNA, 25 bp, Homo sapien
agaggctcccagtgcaaataagtct

SEQ ID NO: 4275457 - DNA, 25 bp, Homo sapien
tagaagaggctcccagtgcaaataa

SEQ ID NO: 4275458 - DNA, 25 bp, Homo sapien
gaagaggctcccagtgcaaataagt

SEQ ID NO: 4275459 - DNA, 25 bp, Homo sapien
ggatctgtctggttgaagtttgctt

SEQ ID NO: 4275460 - DNA, 25 bp, Homo sapien
tccaccagtgaagtaaatctgtaga

SEQ ID NO: 4275461 - DNA, 25 bp, Homo sapien
tgcttgcattgctcttggtgcagac

SEQ ID NO: 4275462 - DNA, 25 bp, Homo sapien
tctgtctggttgaagtttgcttgca

SEQ ID NO: 4275463 - DNA, 25 bp, Homo sapien
tgagttggcatgagcaaagaggaac

SEQ ID NO: 4275464 - DNA, 25 bp, Homo sapien
ctgaggggtgctttcttctgagttg

SEQ ID NO: 4275465 - DNA, 25 bp, Homo sapien
agcaaagaggaacttagaacctggc

SEQ ID NO: 4275466 - DNA, 25 bp, Homo sapien
cttctgagttggcatgagcaaagag

SEQ ID NO: 4275467 - DNA, 25 bp, Homo sapien
tccttcaaagggttccatgctgaga

SEQ ID NO: 4275468 - DNA, 25 bp, Homo sapien
gccagtgtggctccttcaaagggtt

SEQ ID NO: 4275469 - DNA, 25 bp, Homo sapien
ctgccagtgtggctccttcaaaggg

SEQ ID NO: 4275470 - DNA, 25 bp, Homo sapien
gtgtggctccttcaaagggttccat

SEQ ID NO: 4275471 - DNA, 25 bp, Homo sapien
gaagatgtggataccactcagatat

SEQ ID NO: 4275472 - DNA, 25 bp, Homo sapien
tgaagatgtggataccactcagata

SEQ ID NO: 4275473 - DNA, 25 bp, Homo sapien
ttgaagatgtggataccactcagat

SEQ ID NO: 4275474 - DNA, 25 bp, Homo sapien
tttgaagatgtggataccactcaga

SEQ ID NO: 4275475 - DNA, 25 bp, Homo sapien
atgtcgcaggtgactggtgtgaagc

SEQ ID NO: 4275476 - DNA, 25 bp, Homo sapien
cttcaacaattgaaaccaaggatgc

SEQ ID NO: 4275477 - DNA, 25 bp, Homo sapien
aaccaaggatgcagatgtcgcaggt

SEQ ID NO: 4275478 - DNA, 25 bp, Homo sapien
caaggatgcagatgtcgcaggtgac

SEQ ID NO: 4275479 - DNA, 25 bp, Homo sapien
cttgtaacccctgactagggcaaat

SEQ ID NO: 4275480 - DNA, 25 bp, Homo sapien
atgccggccagcttgaccttccagg

SEQ ID NO: 4275481 - DNA, 25 bp, Homo sapien
aaaggcatgtccataaatgcttcaa

SEQ ID NO: 4275482 - DNA, 25 bp, Homo sapien
cagggactgtggtgcttcaccctca

SEQ ID NO: 4275483 - DNA, 25 bp, Homo sapien
tcaaagggtttctatcaggcagagt

SEQ ID NO: 4275484 - DNA, 25 bp, Homo sapien
tcaacacttgaatccccacagctct

SEQ ID NO: 4275485 - DNA, 25 bp, Homo sapien
aaagggtttctatcaggcagagtgc

SEQ ID NO: 4275486 - DNA, 25 bp, Homo sapien
gggtttctatcaggcagagtgcctt

SEQ ID NO: 4275487 - DNA, 25 bp, Homo sapien
ctaagagcaacaagatgtccatcgg

SEQ ID NO: 4275488 - DNA, 25 bp, Homo sapien
gagcaacaagatgtccatcgggaac

SEQ ID NO: 4275489 - DNA, 25 bp, Homo sapien
gcaacaagatgtccatcgggaacca

SEQ ID NO: 4275490 - DNA, 25 bp, Homo sapien
caagatgtccatcgggaaccactgc

SEQ ID NO: 4275491 - DNA, 25 bp, Homo sapien
ccctgggactgagtttgattgcagc

SEQ ID NO: 4275492 - DNA, 25 bp, Homo sapien
tccagtatcctggtagggttcgttc

SEQ ID NO: 4275493 - DNA, 25 bp, Homo sapien
ccgccttccttggaggaggcttgca

SEQ ID NO: 4275494 - DNA, 25 bp, Homo sapien
tgattgcagcgcctttcccagctgt

SEQ ID NO: 4275495 - DNA, 25 bp, Homo sapien
tggcccacagaggtgacatgctcca

SEQ ID NO: 4275496 - DNA, 25 bp, Homo sapien
aaaagcatcaaggaactctcggtca

SEQ ID NO: 4275497 - DNA, 25 bp, Homo sapien
tcacaaaggtgatatggccctcagg

SEQ ID NO: 4275498 - DNA, 25 bp, Homo sapien
gaggaggtgacactccccaatgggt

SEQ ID NO: 4275499 - DNA, 25 bp, Homo sapien
agaggcaacccggcccacacaacaa

SEQ ID NO: 4275500 - DNA, 25 bp, Homo sapien
acagaggcaacccggcccacacaac

SEQ ID NO: 4275501 - DNA, 25 bp, Homo sapien
cacagaggcaacccggcccacacaa

SEQ ID NO: 4275502 - DNA, 25 bp, Homo sapien
cagaggcaacccggcccacacaaca

SEQ ID NO: 4275503 - DNA, 25 bp, Homo sapien
caagtatattgaggctttggaaggt

SEQ ID NO: 4275504 - DNA, 25 bp, Homo sapien
acacaagtatattgaggctttggaa

SEQ ID NO: 4275505 - DNA, 25 bp, Homo sapien
cacaagtatattgaggctttggaag

SEQ ID NO: 4275506 - DNA, 25 bp, Homo sapien
cacacaagtatattgaggctttgga

SEQ ID NO: 4275507 - DNA, 25 bp, Homo sapien
gagcacaaggaaggactaaagccag

SEQ ID NO: 4275508 - DNA, 25 bp, Homo sapien
ccaaagtgccctcacacaggagcag

SEQ ID NO: 4275509 - DNA, 25 bp, Homo sapien
ggcagctgtaggaggcatctgtcat

SEQ ID NO: 4275510 - DNA, 25 bp, Homo sapien
cttgcatggcatctggccccaaagt

SEQ ID NO: 4275511 - DNA, 25 bp, Homo sapien
tgagccttcagatgaaaacctaact

SEQ ID NO: 4275512 - DNA, 25 bp, Homo sapien
cctgatctacagatcatgtgagata

SEQ ID NO: 4275513 - DNA, 25 bp, Homo sapien
gaggacccatctaagctgtgaccag

SEQ ID NO: 4275514 - DNA, 25 bp, Homo sapien
ggatgacaccttgactgaagccttg

SEQ ID NO: 4275515 - DNA, 25 bp, Homo sapien
tctgccatgagtgaaggatactggc

SEQ ID NO: 4275516 - DNA, 25 bp, Homo sapien
gtgaaggatactggcttcatgcttc

SEQ ID NO: 4275517 - DNA, 25 bp, Homo sapien
tgagtgaaggatactggcttcatgc

SEQ ID NO: 4275518 - DNA, 25 bp, Homo sapien
ccatgagtgaaggatactggcttca

SEQ ID NO: 4275519 - DNA, 25 bp, Homo sapien
cttggcatagctgacttttctcctg

SEQ ID NO: 4275520 - DNA, 25 bp, Homo sapien
aaccagccttttcttggcatagctg

SEQ ID NO: 4275521 - DNA, 25 bp, Homo sapien
atgtgatctcggatacccaaccagc

SEQ ID NO: 4275522 - DNA, 25 bp, Homo sapien
tcctgctatgtggatagaagggtcc

SEQ ID NO: 4275523 - DNA, 25 bp, Homo sapien
ctcccagtgctcccctgaccctgtc

SEQ ID NO: 4275524 - DNA, 25 bp, Homo sapien
ccctgaccctgtccagggtgaagat

SEQ ID NO: 4275525 - DNA, 25 bp, Homo sapien
gctcccctgaccctgtccagggtga

SEQ ID NO: 4275526 - DNA, 25 bp, Homo sapien
cagtgctcccctgaccctgtccagg

SEQ ID NO: 4275527 - DNA, 25 bp, Homo sapien
tccgcatggcccctggttgtccgga

SEQ ID NO: 4275528 - DNA, 25 bp, Homo sapien
attcgcagagcagtgtcccgttcca

SEQ ID NO: 4275529 - DNA, 25 bp, Homo sapien
tctctctttccgaatagatgtttcc

SEQ ID NO: 4275530 - DNA, 25 bp, Homo sapien
tccggagtcttgattcgcagagcag

SEQ ID NO: 4275531 - DNA, 25 bp, Homo sapien
ctctctgtacacatatgatgatgga

SEQ ID NO: 4275532 - DNA, 25 bp, Homo sapien
cccattaactatcaagtcattggtt

SEQ ID NO: 4275533 - DNA, 25 bp, Homo sapien
cacatatgatgatggataacagtct

SEQ ID NO: 4275534 - DNA, 25 bp, Homo sapien
tcagaaggtccccaagagggcgact

SEQ ID NO: 4275535 - DNA, 25 bp, Homo sapien
aaagtatttggcatgtctcccctgt

SEQ ID NO: 4275536 - DNA, 25 bp, Homo sapien
gtatttggcatgtctcccctgttgt

SEQ ID NO: 4275537 - DNA, 25 bp, Homo sapien
tgaaaagtatttggcatgtctcccc

SEQ ID NO: 4275538 - DNA, 25 bp, Homo sapien
ttgaaaagtatttggcatgtctccc

SEQ ID NO: 4275539 - DNA, 25 bp, Homo sapien
ctgtgagaatgacaacgccttggaa

SEQ ID NO: 4275540 - DNA, 25 bp, Homo sapien
gaatgacaacgccttggaaccagag

SEQ ID NO: 4275541 - DNA, 25 bp, Homo sapien
aatgacaacgccttggaaccagagg

SEQ ID NO: 4275542 - DNA, 25 bp, Homo sapien
tgagaatgacaacgccttggaacca

SEQ ID NO: 4275543 - DNA, 25 bp, Homo sapien
aaatgcaacaaacctcctgaatctc

SEQ ID NO: 4275544 - DNA, 25 bp, Homo sapien
ccattgcaccacaaggagcagggtt

SEQ ID NO: 4275545 - DNA, 25 bp, Homo sapien
gatgccttggaagagcagcctgact

SEQ ID NO: 4275546 - DNA, 25 bp, Homo sapien
catcagtaggcttggatgccttgga

SEQ ID NO: 4275547 - DNA, 25 bp, Homo sapien
ttcaatgctggcatgactctgtccc

SEQ ID NO: 4275548 - DNA, 25 bp, Homo sapien
cttcaatgctggcatgactctgtcc

SEQ ID NO: 4275549 - DNA, 25 bp, Homo sapien
tcaatgctggcatgactctgtccca

SEQ ID NO: 4275550 - DNA, 25 bp, Homo sapien
caatgctggcatgactctgtcccac

SEQ ID NO: 4275551 - DNA, 25 bp, Homo sapien
ctgtccatactcttgccagtgcatt

SEQ ID NO: 4275552 - DNA, 25 bp, Homo sapien
tctgtccatactcttgccagtgcat

SEQ ID NO: 4275553 - DNA, 25 bp, Homo sapien
gtctgtccatactcttgccagtgca

SEQ ID NO: 4275554 - DNA, 25 bp, Homo sapien
gggatatttgaggagatatgaccca

SEQ ID NO: 4275555 - DNA, 25 bp, Homo sapien
tttgaggagatatgacccagtggct

SEQ ID NO: 4275556 - DNA, 25 bp, Homo sapien
tatttgaggagatatgacccagtgg

SEQ ID NO: 4275557 - DNA, 25 bp, Homo sapien
gaggagatatgacccagtggctctg

SEQ ID NO: 4275558 - DNA, 25 bp, Homo sapien
tcgagacgctgatggggaggattgt

SEQ ID NO: 4275559 - DNA, 25 bp, Homo sapien
gacgctgatggggaggattgtttac

SEQ ID NO: 4275560 - DNA, 25 bp, Homo sapien
gagatcgagacgctgatggggagga

SEQ ID NO: 4275561 - DNA, 25 bp, Homo sapien
ctagagatcgagacgctgatgggga

SEQ ID NO: 4275562 - DNA, 25 bp, Homo sapien
tgctccacatacacccatgtttggg

SEQ ID NO: 4275563 - DNA, 25 bp, Homo sapien
gcttgtcgccttggcatgccgggct

SEQ ID NO: 4275564 - DNA, 25 bp, Homo sapien
tacacccatgtttgggcatcctcct

SEQ ID NO: 4275565 - DNA, 25 bp, Homo sapien
gggctgctccacatacacccatgtt

SEQ ID NO: 4275566 - DNA, 25 bp, Homo sapien
tctaagtctggccatgtgcagccca

SEQ ID NO: 4275567 - DNA, 25 bp, Homo sapien
tcttgatgctcatgacagtattgac

SEQ ID NO: 4275568 - DNA, 25 bp, Homo sapien
gtattgacaaatattcccttctagt

SEQ ID NO: 4275569 - DNA, 25 bp, Homo sapien
tcgcaggtgcggtcaggatggagac

SEQ ID NO: 4275570 - DNA, 25 bp, Homo sapien
gacaagacagtaaatttcccagaga

SEQ ID NO: 4275571 - DNA, 25 bp, Homo sapien
tccttacaaggggtgtcccaggagc

SEQ ID NO: 4275572 - DNA, 25 bp, Homo sapien
ctatccttacaaggggtgtcccagg

SEQ ID NO: 4275573 - DNA, 25 bp, Homo sapien
tcctatccttacaaggggtgtccca

SEQ ID NO: 4275574 - DNA, 25 bp, Homo sapien
gtgtcccaggagcacccatctgaaa

SEQ ID NO: 4275575 - DNA, 25 bp, Homo sapien
atgaagcatagaggtctgcatccaa

SEQ ID NO: 4275576 - DNA, 25 bp, Homo sapien
aagcatagaggtctgcatccaactc

SEQ ID NO: 4275577 - DNA, 25 bp, Homo sapien
gaagcatagaggtctgcatccaact

SEQ ID NO: 4275578 - DNA, 25 bp, Homo sapien
tgaagcatagaggtctgcatccaac

SEQ ID NO: 4275579 - DNA, 25 bp, Homo sapien
cagggagacacagatgagctctcca

SEQ ID NO: 4275580 - DNA, 25 bp, Homo sapien
ggagacacagatgagctctccacct

SEQ ID NO: 4275581 - DNA, 25 bp, Homo sapien
tccacctggagctgcatctgccagg

SEQ ID NO: 4275582 - DNA, 25 bp, Homo sapien
ctccacctggagctgcatctgccag

SEQ ID NO: 4275583 - DNA, 25 bp, Homo sapien
ttgaatcaggcccactgagcttctt

SEQ ID NO: 4275584 - DNA, 25 bp, Homo sapien
aaagcctccctgtcgctgctttgaa

SEQ ID NO: 4275585 - DNA, 25 bp, Homo sapien
tgtccaggggctctcgcaacctctg

SEQ ID NO: 4275586 - DNA, 25 bp, Homo sapien
tctcgcaacctctggacccaactgg

SEQ ID NO: 4275587 - DNA, 25 bp, Homo sapien
tgacttagtttcatgaccgcatgcc

SEQ ID NO: 4275588 - DNA, 25 bp, Homo sapien
gctcaaaataccattcccaaggaca

SEQ ID NO: 4275589 - DNA, 25 bp, Homo sapien
caaggacagaaagctgttggttctc

SEQ ID NO: 4275590 - DNA, 25 bp, Homo sapien
catgccttgatagtttctcctctga

SEQ ID NO: 4275591 - DNA, 25 bp, Homo sapien
gagccagccgttacagatttgatga

SEQ ID NO: 4275592 - DNA, 25 bp, Homo sapien
gacatctgtctctgtggtaagctag

SEQ ID NO: 4275593 - DNA, 25 bp, Homo sapien
ctttaagccctgtggctgaactcaa

SEQ ID NO: 4275594 - DNA, 25 bp, Homo sapien
caggaggtttctttaagccctgtgg

SEQ ID NO: 4275595 - DNA, 25 bp, Homo sapien
cttattaaagtgatgttccttccca

SEQ ID NO: 4275596 - DNA, 25 bp, Homo sapien
ccatttgtgtgttggatccagcatc

SEQ ID NO: 4275597 - DNA, 25 bp, Homo sapien
cccatttgtgtgttggatccagcat

SEQ ID NO: 4275598 - DNA, 25 bp, Homo sapien
tcccatttgtgtgttggatccagca

SEQ ID NO: 4275599 - DNA, 25 bp, Homo sapien
tagagggagaggagcagaagatggc

SEQ ID NO: 4275600 - DNA, 25 bp, Homo sapien
gggagaggagcagaagatggcagca

SEQ ID NO: 4275601 - DNA, 25 bp, Homo sapien
ctagagggagaggagcagaagatgg

SEQ ID NO: 4275602 - DNA, 25 bp, Homo sapien
gagggagaggagcagaagatggcag

SEQ ID NO: 4275603 - DNA, 25 bp, Homo sapien
caggccagaagtcattgtagactct

SEQ ID NO: 4275604 - DNA, 25 bp, Homo sapien
aggccagaagtcattgtagactctg

SEQ ID NO: 4275605 - DNA, 25 bp, Homo sapien
ggccagaagtcattgtagactctgg

SEQ ID NO: 4275606 - DNA, 25 bp, Homo sapien
cctacgggtttcgatggccagctgg

SEQ ID NO: 4275607 - DNA, 25 bp, Homo sapien
gagaagaggaccgtactgtagacct

SEQ ID NO: 4275608 - DNA, 25 bp, Homo sapien
tactgtagacctacgggtttcgatg

SEQ ID NO: 4275609 - DNA, 25 bp, Homo sapien
gcaggactgagtgcgagaagaggac

SEQ ID NO: 4275610 - DNA, 25 bp, Homo sapien
caagcgggtcctggaccaagcagct

SEQ ID NO: 4275611 - DNA, 25 bp, Homo sapien
accaggagctgtaacatccaagcgg

SEQ ID NO: 4275612 - DNA, 25 bp, Homo sapien
gcacacttggccagtcctcttctgg

SEQ ID NO: 4275613 - DNA, 25 bp, Homo sapien
tcctaatgggaggaagcttgaacca

SEQ ID NO: 4275614 - DNA, 25 bp, Homo sapien
gggaacacttgctaataaggcatat

SEQ ID NO: 4275615 - DNA, 25 bp, Homo sapien
ttttccacgcgcctcctggattttc

SEQ ID NO: 4275616 - DNA, 25 bp, Homo sapien
ttccagggaacacttgctaataagg

SEQ ID NO: 4275617 - DNA, 25 bp, Homo sapien
cagggaacacttgctaataaggcat

SEQ ID NO: 4275618 - DNA, 25 bp, Homo sapien
aatgggctggaccaagtagatggaa

SEQ ID NO: 4275619 - DNA, 25 bp, Homo sapien
cactgtgccatcattaatgggctgg

SEQ ID NO: 4275620 - DNA, 25 bp, Homo sapien
aattaagccaaataccacaaagtca

SEQ ID NO: 4275621 - DNA, 25 bp, Homo sapien
cagaaattaagccaaataccacaaa

SEQ ID NO: 4275622 - DNA, 25 bp, Homo sapien
taagctggcctgatctgccagtcag

SEQ ID NO: 4275623 - DNA, 25 bp, Homo sapien
tgctctggatcccccaggagacaac

SEQ ID NO: 4275624 - DNA, 25 bp, Homo sapien
caggagacaactaagctggcctgat

SEQ ID NO: 4275625 - DNA, 25 bp, Homo sapien
ggatctgggctaaacttgggaagcc

SEQ ID NO: 4275626 - DNA, 25 bp, Homo sapien
atccctctctaagtgccatccttgg

SEQ ID NO: 4275627 - DNA, 25 bp, Homo sapien
tgaagcttcttgaagccgtggctgc

SEQ ID NO: 4275628 - DNA, 25 bp, Homo sapien
catccctctctaagtgccatccttg

SEQ ID NO: 4275629 - DNA, 25 bp, Homo sapien
cctgaagcttcttgaagccgtggct

SEQ ID NO: 4275630 - DNA, 25 bp, Homo sapien
acacacagcaagtccccacaagcaa

SEQ ID NO: 4275631 - DNA, 25 bp, Homo sapien
ctgccaccagggagtgaccaacaca

SEQ ID NO: 4275632 - DNA, 25 bp, Homo sapien
gggagtgaccaacacacagcaagtc

SEQ ID NO: 4275633 - DNA, 25 bp, Homo sapien
acacagcaagtccccacaagcaacc

SEQ ID NO: 4275634 - DNA, 25 bp, Homo sapien
cataaacaagggcatattatacaac

SEQ ID NO: 4275635 - DNA, 25 bp, Homo sapien
agcacattcactggtccaacttttc

SEQ ID NO: 4275636 - DNA, 25 bp, Homo sapien
caagggcatattatacaacagcaca

SEQ ID NO: 4275637 - DNA, 25 bp, Homo sapien
tattatacaacagcacattcactgg

SEQ ID NO: 4275638 - DNA, 25 bp, Homo sapien
tcctcatctggctgacgagatgaac

SEQ ID NO: 4275639 - DNA, 25 bp, Homo sapien
gaactcttcccatcggcctgatgag

SEQ ID NO: 4275640 - DNA, 25 bp, Homo sapien
tgacgagatgaactcttcccatcgg

SEQ ID NO: 4275641 - DNA, 25 bp, Homo sapien
tcccatcggcctgatgagaagactc

SEQ ID NO: 4275642 - DNA, 25 bp, Homo sapien
gagccaaatccatttgcaaaggagg

SEQ ID NO: 4275643 - DNA, 25 bp, Homo sapien
tgctgtggagcccagctcacagagc

SEQ ID NO: 4275644 - DNA, 25 bp, Homo sapien
tttgtcttctcaaggctgtgcagca

SEQ ID NO: 4275645 - DNA, 25 bp, Homo sapien
cagagctgctgtttgtcttctcaag

SEQ ID NO: 4275646 - DNA, 25 bp, Homo sapien
gtccacagagcccatgagcttttta

SEQ ID NO: 4275647 - DNA, 25 bp, Homo sapien
cacagagcccatgagctttttaagg

SEQ ID NO: 4275648 - DNA, 25 bp, Homo sapien
tccacagagcccatgagctttttaa

SEQ ID NO: 4275649 - DNA, 25 bp, Homo sapien
ccacagagcccatgagctttttaag

SEQ ID NO: 4275650 - DNA, 25 bp, Homo sapien
acacaggcaaagtgggtttcagcag

SEQ ID NO: 4275651 - DNA, 25 bp, Homo sapien
tgagctctggagatagggcaggtga

SEQ ID NO: 4275652 - DNA, 25 bp, Homo sapien
caagtgggaaagtaggaccaagaag

SEQ ID NO: 4275653 - DNA, 25 bp, Homo sapien
gtcattagtcacaggtagccccagg

SEQ ID NO: 4275654 - DNA, 25 bp, Homo sapien
ccttaaagagccacgggattcctgc

SEQ ID NO: 4275655 - DNA, 25 bp, Homo sapien
ggtgcaataagagacatgctgccct

SEQ ID NO: 4275656 - DNA, 25 bp, Homo sapien
tcatctaagatctgcctggaatgcc

SEQ ID NO: 4275657 - DNA, 25 bp, Homo sapien
cccttgtagggtcgattcagaatca

SEQ ID NO: 4275658 - DNA, 25 bp, Homo sapien
gctaacaggatgctgttgtgtgtca

SEQ ID NO: 4275659 - DNA, 25 bp, Homo sapien
gttgtgtgtcatggaatctgattga

SEQ ID NO: 4275660 - DNA, 25 bp, Homo sapien
caggatgctgttgtgtgtcatggaa

SEQ ID NO: 4275661 - DNA, 25 bp, Homo sapien
gcactgctaacaggatgctgttgtg

SEQ ID NO: 4275662 - DNA, 25 bp, Homo sapien
cctttccctctggtctagacacagg

SEQ ID NO: 4275663 - DNA, 25 bp, Homo sapien
ggtctagacacaggaacctcatttt

SEQ ID NO: 4275664 - DNA, 25 bp, Homo sapien
tccctctggtctagacacaggaacc

SEQ ID NO: 4275665 - DNA, 25 bp, Homo sapien
gtggccagcatggctcttcatggtc

SEQ ID NO: 4275666 - DNA, 25 bp, Homo sapien
gagcctgggaactcagagagcctga

SEQ ID NO: 4275667 - DNA, 25 bp, Homo sapien
ggagcagggatcatggccagaacct

SEQ ID NO: 4275668 - DNA, 25 bp, Homo sapien
tgcagtggctaatacaaagagaggc

SEQ ID NO: 4275669 - DNA, 25 bp, Homo sapien
tttcatccagcccaagaggcaggca

SEQ ID NO: 4275670 - DNA, 25 bp, Homo sapien
tgtggtactttaagtcgggagttgc

SEQ ID NO: 4275671 - DNA, 25 bp, Homo sapien
taagtcgggagttgcaaacttcagt

SEQ ID NO: 4275672 - DNA, 25 bp, Homo sapien
aggagcttgtgtgtggtactttaag

SEQ ID NO: 4275673 - DNA, 25 bp, Homo sapien
gcttgtgtgtggtactttaagtcgg

SEQ ID NO: 4275674 - DNA, 25 bp, Homo sapien
aggcatgggactattttgacatctc

SEQ ID NO: 4275675 - DNA, 25 bp, Homo sapien
tagaactttaccagagcacactggt

SEQ ID NO: 4275676 - DNA, 25 bp, Homo sapien
catctccaccactggtagaacttta

SEQ ID NO: 4275677 - DNA, 25 bp, Homo sapien
catgggactattttgacatctccac

SEQ ID NO: 4275678 - DNA, 25 bp, Homo sapien
caaagtttctcatgcactgtgagtt

SEQ ID NO: 4275679 - DNA, 25 bp, Homo sapien
gacgaagttccgtgaatcacaatgg

SEQ ID NO: 4275680 - DNA, 25 bp, Homo sapien
ccaccaccaaagatgctattatggg

SEQ ID NO: 4275681 - DNA, 25 bp, Homo sapien
ctgagtgtagaagtgaaagacgaag

SEQ ID NO: 4275682 - DNA, 25 bp, Homo sapien
cgggggcacactgagcaatacttta

SEQ ID NO: 4275683 - DNA, 25 bp, Homo sapien
ggagggcttctacactgggtggttc

SEQ ID NO: 4275684 - DNA, 25 bp, Homo sapien
tgagcaatactttaaccctgcatta

SEQ ID NO: 4275685 - DNA, 25 bp, Homo sapien
gagggcttctacactgggtggttcc

SEQ ID NO: 4275686 - DNA, 25 bp, Homo sapien
ctataatctcttggttgccacaaaa

SEQ ID NO: 4275687 - DNA, 25 bp, Homo sapien
taatctcttggttgccacaaaaggt

SEQ ID NO: 4275688 - DNA, 25 bp, Homo sapien
tataatctcttggttgccacaaaag

SEQ ID NO: 4275689 - DNA, 25 bp, Homo sapien
atctcttggttgccacaaaaggtac

SEQ ID NO: 4275690 - DNA, 25 bp, Homo sapien
cctgaagatgtagcaagaaaaagga

SEQ ID NO: 4275691 - DNA, 25 bp, Homo sapien
cttaaggtacttgattgggggagag

SEQ ID NO: 4275692 - DNA, 25 bp, Homo sapien
aggtacttgattgggggagagctgc

SEQ ID NO: 4275693 - DNA, 25 bp, Homo sapien
tcttctcattgccacaactgtcacc

SEQ ID NO: 4275694 - DNA, 25 bp, Homo sapien
tagccccgaatgtccctgatgcatg

SEQ ID NO: 4275695 - DNA, 25 bp, Homo sapien
gcagctttccctcttcgcatgtagc

SEQ ID NO: 4275696 - DNA, 25 bp, Homo sapien
gcatgtagccccgaatgtccctgat

SEQ ID NO: 4275697 - DNA, 25 bp, Homo sapien
cctcttcgcatgtagccccgaatgt

SEQ ID NO: 4275698 - DNA, 25 bp, Homo sapien
tccgggtggcttttctccacagatc

SEQ ID NO: 4275699 - DNA, 25 bp, Homo sapien
gaagggcagccttaaaatagtctct

SEQ ID NO: 4275700 - DNA, 25 bp, Homo sapien
ataccaaatgtcaggatgtggcagg

SEQ ID NO: 4275701 - DNA, 25 bp, Homo sapien
cacagatctatctccttgacacaca

SEQ ID NO: 4275702 - DNA, 25 bp, Homo sapien
ttctgcctcaaaacacgagcctata

SEQ ID NO: 4275703 - DNA, 25 bp, Homo sapien
gatcttttgtgcagagttgaggaga

SEQ ID NO: 4275704 - DNA, 25 bp, Homo sapien
gcctatatgactagcaaccctttgc

SEQ ID NO: 4275705 - DNA, 25 bp, Homo sapien
gactgtgggactatggatcaagatg

SEQ ID NO: 4275706 - DNA, 25 bp, Homo sapien
aaccacctaagtggagagcagacgc

SEQ ID NO: 4275707 - DNA, 25 bp, Homo sapien
cataaccacctaagtggagagcaga

SEQ ID NO: 4275708 - DNA, 25 bp, Homo sapien
ggttttaatcagtaatcatataagt

SEQ ID NO: 4275709 - DNA, 25 bp, Homo sapien
ccacataaccacctaagtggagagc

SEQ ID NO: 4275710 - DNA, 25 bp, Homo sapien
gagttggcgcagacgcgtgtgcggg

SEQ ID NO: 4275711 - DNA, 25 bp, Homo sapien
tagcggcggacgtgacaccgcattt

SEQ ID NO: 4275712 - DNA, 25 bp, Homo sapien
cgcattttctccgaattcctgccat

SEQ ID NO: 4275713 - DNA, 25 bp, Homo sapien
gtgtgcgggcatagcggcggacgtg

SEQ ID NO: 4275714 - DNA, 25 bp, Homo sapien
gggtaataggctgcgcaatccactt

SEQ ID NO: 4275715 - DNA, 25 bp, Homo sapien
taatagccgggcttctcctgaccat

SEQ ID NO: 4275716 - DNA, 25 bp, Homo sapien
gaagagcaatgctccttatggatga

SEQ ID NO: 4275717 - DNA, 25 bp, Homo sapien
tccctgccggcaccacttagttgtt

SEQ ID NO: 4275718 - DNA, 25 bp, Homo sapien
ttggattcgcaccacgataacggcc

SEQ ID NO: 4275719 - DNA, 25 bp, Homo sapien
cacgtaatgacctgggagacctcag

SEQ ID NO: 4275720 - DNA, 25 bp, Homo sapien
gtgtctgcagtgcaccgccgtgagt

SEQ ID NO: 4275721 - DNA, 25 bp, Homo sapien
cgccgtgagtttctctcgggtacaa

SEQ ID NO: 4275722 - DNA, 25 bp, Homo sapien
gcgtctgctcggttacaaatggccc

SEQ ID NO: 4275723 - DNA, 25 bp, Homo sapien
cggtggtagcgtctgctcggttaca

SEQ ID NO: 4275724 - DNA, 25 bp, Homo sapien
gtctgctcggttacaaatggcccct

SEQ ID NO: 4275725 - DNA, 25 bp, Homo sapien
gtagcgtctgctcggttacaaatgg

SEQ ID NO: 4275726 - DNA, 25 bp, Homo sapien
tgcttggtccttcaaacagaaccca

SEQ ID NO: 4275727 - DNA, 25 bp, Homo sapien
catgttttttgggtgctcctgacca

SEQ ID NO: 4275728 - DNA, 25 bp, Homo sapien
ggcctttgtacaagctctctgggca

SEQ ID NO: 4275729 - DNA, 25 bp, Homo sapien
tcctggctcatgtgcgggtactcac

SEQ ID NO: 4275730 - DNA, 25 bp, Homo sapien
tgataactttgagacacggctggta

SEQ ID NO: 4275731 - DNA, 25 bp, Homo sapien
aggatgagcagtagctcgtccgaac

SEQ ID NO: 4275732 - DNA, 25 bp, Homo sapien
tagctcgtccgaacttgtccctcgg

SEQ ID NO: 4275733 - DNA, 25 bp, Homo sapien
aggaagagcatggccggtctccctt

SEQ ID NO: 4275734 - DNA, 25 bp, Homo sapien
ctcggccaagagaccctttggcagc

SEQ ID NO: 4275735 - DNA, 25 bp, Homo sapien
ggcacctcccggaagaacatctctt

SEQ ID NO: 4275736 - DNA, 25 bp, Homo sapien
gcctgacaggaggtgggtgactctg

SEQ ID NO: 4275737 - DNA, 25 bp, Homo sapien
tggactgaacaaaccgccttcccag

SEQ ID NO: 4275738 - DNA, 25 bp, Homo sapien
gcacctcctcacaaacatggccggc

SEQ ID NO: 4275739 - DNA, 25 bp, Homo sapien
cagagcctctgtggttgagtccgtg

SEQ ID NO: 4275740 - DNA, 25 bp, Homo sapien
cattcgatttgaagcacactgagag

SEQ ID NO: 4275741 - DNA, 25 bp, Homo sapien
agaggattcattgtccccaggccgc

SEQ ID NO: 4275742 - DNA, 25 bp, Homo sapien
gggttcggtccaagtgtgctgagtg

SEQ ID NO: 4275743 - DNA, 25 bp, Homo sapien
cgaatgctccatcaacccgggagga

SEQ ID NO: 4275744 - DNA, 25 bp, Homo sapien
gttttggagagagcgcaacctgcag

SEQ ID NO: 4275745 - DNA, 25 bp, Homo sapien
agcaggagccttcgttcatgtggtc

SEQ ID NO: 4275746 - DNA, 25 bp, Homo sapien
taaccctggctgttggcacgaatgc

SEQ ID NO: 4275747 - DNA, 25 bp, Homo sapien
tttgtgccacgctgagttccacgca

SEQ ID NO: 4275748 - DNA, 25 bp, Homo sapien
cagggtctgagctgtcttccgtctg

SEQ ID NO: 4275749 - DNA, 25 bp, Homo sapien
gctggactggtcctatcagagcaat

SEQ ID NO: 4275750 - DNA, 25 bp, Homo sapien
tcagagcaatcccattctttgtgtg

SEQ ID NO: 4275751 - DNA, 25 bp, Homo sapien
tcataaagtgaatggaccgactcct

SEQ ID NO: 4275752 - DNA, 25 bp, Homo sapien
catccaatgacatctggaccaggag

SEQ ID NO: 4275753 - DNA, 25 bp, Homo sapien
tgaggatcacacacagtcgataacg

SEQ ID NO: 4275754 - DNA, 25 bp, Homo sapien
gagggatgccctccagttgacagtc

SEQ ID NO: 4275755 - DNA, 25 bp, Homo sapien
gctggctgccatgttcgtttgtgag

SEQ ID NO: 4275756 - DNA, 25 bp, Homo sapien
tcgtcccatcgtgggcctgataaat

SEQ ID NO: 4275757 - DNA, 25 bp, Homo sapien
aggaatctgaaggtgattcgtccca

SEQ ID NO: 4275758 - DNA, 25 bp, Homo sapien
cacattcacgacagatcctcgctgg

SEQ ID NO: 4275759 - DNA, 25 bp, Homo sapien
tgtcctttcggatttggtgatctgg

SEQ ID NO: 4275760 - DNA, 25 bp, Homo sapien
atctggtccggcacagaggctctcc

SEQ ID NO: 4275761 - DNA, 25 bp, Homo sapien
cggccgcttttctgcaactgtcctt

SEQ ID NO: 4275762 - DNA, 25 bp, Homo sapien
cattgccggccgcttttctgcaact

SEQ ID NO: 4275763 - DNA, 25 bp, Homo sapien
cacagttctcaaagatggggtgaag

SEQ ID NO: 4275764 - DNA, 25 bp, Homo sapien
gatctctaccttgcattcttctaac

SEQ ID NO: 4275765 - DNA, 25 bp, Homo sapien
acaggccttgcctgttcagcctttg

SEQ ID NO: 4275766 - DNA, 25 bp, Homo sapien
tgtcatcgcattccaggtctcagct

SEQ ID NO: 4275767 - DNA, 25 bp, Homo sapien
tactgtctgtgggaaatcagctcac

SEQ ID NO: 4275768 - DNA, 25 bp, Homo sapien
ttactgtctgtgggaaatcagctca

SEQ ID NO: 4275769 - DNA, 25 bp, Homo sapien
ggtgtatgaagtaggctccccaagc

SEQ ID NO: 4275770 - DNA, 25 bp, Homo sapien
gaccttttcatcagtgcgcctttcc

SEQ ID NO: 4275771 - DNA, 25 bp, Homo sapien
acttttcttgagatcgctgcccttc

SEQ ID NO: 4275772 - DNA, 25 bp, Homo sapien
cctgtccctggaattgcgaggtgtc

SEQ ID NO: 4275773 - DNA, 25 bp, Homo sapien
tggggtcggatctcagcctgacctg

SEQ ID NO: 4275774 - DNA, 25 bp, Homo sapien
aacggtgaggccagcacaatggaca

SEQ ID NO: 4275775 - DNA, 25 bp, Homo sapien
tgatgtctgagcaacggtgaggcca

SEQ ID NO: 4275776 - DNA, 25 bp, Homo sapien
caatggacagacacgatgtggctgt

SEQ ID NO: 4275777 - DNA, 25 bp, Homo sapien
catcttcattgacatctggacgggc

SEQ ID NO: 4275778 - DNA, 25 bp, Homo sapien
ggttatgaaagtcagctggctggca

SEQ ID NO: 4275779 - DNA, 25 bp, Homo sapien
gatttcgctgggttaggaagctaac

SEQ ID NO: 4275780 - DNA, 25 bp, Homo sapien
ttgcgaattttggaagaagcctgcc

SEQ ID NO: 4275781 - DNA, 25 bp, Homo sapien
ttgcctcccacagccgctagacaca

SEQ ID NO: 4275782 - DNA, 25 bp, Homo sapien
gcttttggtatagggacttcatgga

SEQ ID NO: 4275783 - DNA, 25 bp, Homo sapien
gccctgcttttggtatagggacttc

SEQ ID NO: 4275784 - DNA, 25 bp, Homo sapien
tttggtatagggacttcatggagtt

SEQ ID NO: 4275785 - DNA, 25 bp, Homo sapien
accttcctcagagttcctacctgtt

SEQ ID NO: 4275786 - DNA, 25 bp, Homo sapien
tgcagcatggagaaaaccttcctca

SEQ ID NO: 4275787 - DNA, 25 bp, Homo sapien
ctcagagttcctacctgttactttc

SEQ ID NO: 4275788 - DNA, 25 bp, Homo sapien
gcatggagaaaaccttcctcagagt

SEQ ID NO: 4275789 - DNA, 25 bp, Homo sapien
ctgccaggtgcagatggttgagtcc

SEQ ID NO: 4275790 - DNA, 25 bp, Homo sapien
agtccactgtacacatctggttggg

SEQ ID NO: 4275791 - DNA, 25 bp, Homo sapien
gctggctggtggagcccttatgcat

SEQ ID NO: 4275792 - DNA, 25 bp, Homo sapien
tgggggtttccaaggtgctggctgg

SEQ ID NO: 4275793 - DNA, 25 bp, Homo sapien
ggccagtgtattccccaagtctggg

SEQ ID NO: 4275794 - DNA, 25 bp, Homo sapien
gtggccagtgtattccccaagtctg

SEQ ID NO: 4275795 - DNA, 25 bp, Homo sapien
tggccagtgtattccccaagtctgg

SEQ ID NO: 4275796 - DNA, 25 bp, Homo sapien
cgtacgcgtgcatgcagtatccaga

SEQ ID NO: 4275797 - DNA, 25 bp, Homo sapien
tgcctcaacgaggaaatacacctgt

SEQ ID NO: 4275798 - DNA, 25 bp, Homo sapien
taaccgtatggccagttgcctcaac

SEQ ID NO: 4275799 - DNA, 25 bp, Homo sapien
tcatttgacagaatagcgtacgcgt

SEQ ID NO: 4275800 - DNA, 25 bp, Homo sapien
cagcaatagtggtctacagcatagc

SEQ ID NO: 4275801 - DNA, 25 bp, Homo sapien
gagccagcaatagtggtctacagca

SEQ ID NO: 4275802 - DNA, 25 bp, Homo sapien
aatagtggtctacagcatagcccca

SEQ ID NO: 4275803 - DNA, 25 bp, Homo sapien
gcaatagtggtctacagcatagccc

SEQ ID NO: 4275804 - DNA, 25 bp, Homo sapien
tagattgaagctgttgaggagccca

SEQ ID NO: 4275805 - DNA, 25 bp, Homo sapien
gtttcccatggtcatgtctccagct

SEQ ID NO: 4275806 - DNA, 25 bp, Homo sapien
ggagcccaggaaaacgatccagtgt

SEQ ID NO: 4275807 - DNA, 25 bp, Homo sapien
gctgagagttttaagggcaaatcca

SEQ ID NO: 4275808 - DNA, 25 bp, Homo sapien
ggctgcaaatagaaccacagagtgt

SEQ ID NO: 4275809 - DNA, 25 bp, Homo sapien
ttctgaaattgagttgttttgagac

SEQ ID NO: 4275810 - DNA, 25 bp, Homo sapien
tatataggcctttgacaaaggctgc

SEQ ID NO: 4275811 - DNA, 25 bp, Homo sapien
tccctcaaatggcacaaaaggtaat

SEQ ID NO: 4275812 - DNA, 25 bp, Homo sapien
ccagttctaaggcatggctgtcctt

SEQ ID NO: 4275813 - DNA, 25 bp, Homo sapien
aactcagcccaacctgtctgttgtc

SEQ ID NO: 4275814 - DNA, 25 bp, Homo sapien
gagaggtaggaaatcgagttgcttt

SEQ ID NO: 4275815 - DNA, 25 bp, Homo sapien
tctgttgtcccatcctaagttctgt

SEQ ID NO: 4275816 - DNA, 25 bp, Homo sapien
ctctccggcccacggcacgccctgc

SEQ ID NO: 4275817 - DNA, 25 bp, Homo sapien
tctccggcccacggcacgccctgct

SEQ ID NO: 4275818 - DNA, 25 bp, Homo sapien
tgcctgagggttttgcttgccagct

SEQ ID NO: 4275819 - DNA, 25 bp, Homo sapien
gcctgagggttttgcttgccagctg

SEQ ID NO: 4275820 - DNA, 25 bp, Homo sapien
ctgagggttttgcttgccagctggg

SEQ ID NO: 4275821 - DNA, 25 bp, Homo sapien
ggtgcctgagggttttgcttgccag

SEQ ID NO: 4275822 - DNA, 25 bp, Homo sapien
gctgtgttccccatgctattttgta

SEQ ID NO: 4275823 - DNA, 25 bp, Homo sapien
gtgttccccatgctattttgtattc

SEQ ID NO: 4275824 - DNA, 25 bp, Homo sapien
ggctcctctgaagaaccactaactg

SEQ ID NO: 4275825 - DNA, 25 bp, Homo sapien
ggtcaggctcctctgaagaaccact

SEQ ID NO: 4275826 - DNA, 25 bp, Homo sapien
gtcacgagcagtaatagtaaccctt

SEQ ID NO: 4275827 - DNA, 25 bp, Homo sapien
gaaacacgctagtagaaatgccagc

SEQ ID NO: 4275828 - DNA, 25 bp, Homo sapien
cgctgttttagcaaaggaggaccct

SEQ ID NO: 4275829 - DNA, 25 bp, Homo sapien
gtaaccctttgcctacagtttcata

SEQ ID NO: 4275830 - DNA, 25 bp, Homo sapien
gggccaagtcatcatagccaggtcc

SEQ ID NO: 4275831 - DNA, 25 bp, Homo sapien
catagccaggtccacggcaagggag

SEQ ID NO: 4275832 - DNA, 25 bp, Homo sapien
caagggagagccctcccgacaggca

SEQ ID NO: 4275833 - DNA, 25 bp, Homo sapien
caagtcatcatagccaggtccacgg

SEQ ID NO: 4275834 - DNA, 25 bp, Homo sapien
acaggacagctgtggtatgggaata

SEQ ID NO: 4275835 - DNA, 25 bp, Homo sapien
cagctgtggtatgggaatagggtac

SEQ ID NO: 4275836 - DNA, 25 bp, Homo sapien
aggacagctgtggtatgggaatagg

SEQ ID NO: 4275837 - DNA, 25 bp, Homo sapien
gacagctgtggtatgggaatagggt

SEQ ID NO: 4275838 - DNA, 25 bp, Homo sapien
ggagcactaagggagaggcatcacc

SEQ ID NO: 4275839 - DNA, 25 bp, Homo sapien
caggagcactaagggagaggcatca

SEQ ID NO: 4275840 - DNA, 25 bp, Homo sapien
ttaggcagtgctgttcaagccaaca

SEQ ID NO: 4275841 - DNA, 25 bp, Homo sapien
ccagccttccaggttaggcagtgct

SEQ ID NO: 4275842 - DNA, 25 bp, Homo sapien
gtcagtcaataagttccttgcagtc

SEQ ID NO: 4275843 - DNA, 25 bp, Homo sapien
cagtcaataagttccttgcagtcag

SEQ ID NO: 4275844 - DNA, 25 bp, Homo sapien
ttatgatgcaggtcagtcaataagt

SEQ ID NO: 4275845 - DNA, 25 bp, Homo sapien
cttatgatgcaggtcagtcaataag

SEQ ID NO: 4275846 - DNA, 25 bp, Homo sapien
cagtttcaggtgatgagggatgctc

SEQ ID NO: 4275847 - DNA, 25 bp, Homo sapien
ttcattgataatcagtttcaggtga

SEQ ID NO: 4275848 - DNA, 25 bp, Homo sapien
tgataatcagtttcaggtgatgagg

SEQ ID NO: 4275849 - DNA, 25 bp, Homo sapien
taatcagtttcaggtgatgagggat

SEQ ID NO: 4275850 - DNA, 25 bp, Homo sapien
ttccaagagattgggtttataccag

SEQ ID NO: 4275851 - DNA, 25 bp, Homo sapien
cagcggtggtgagtatgtttttctc

SEQ ID NO: 4275852 - DNA, 25 bp, Homo sapien
tgcattcctgcccatgactggattc

SEQ ID NO: 4275853 - DNA, 25 bp, Homo sapien
tctctgtggacgttggcaaatagtt

SEQ ID NO: 4275854 - DNA, 25 bp, Homo sapien
gattgacctgctcttacgtcctgag

SEQ ID NO: 4275855 - DNA, 25 bp, Homo sapien
tgttcatttgattgacctgctctta

SEQ ID NO: 4275856 - DNA, 25 bp, Homo sapien
tgctcttacgtcctgagagcccagg

SEQ ID NO: 4275857 - DNA, 25 bp, Homo sapien
tcatttgattgacctgctcttacgt

SEQ ID NO: 4275858 - DNA, 25 bp, Homo sapien
caggctctgatgtggcaagcagttg

SEQ ID NO: 4275859 - DNA, 25 bp, Homo sapien
aggctctgatgtggcaagcagttgg

SEQ ID NO: 4275860 - DNA, 25 bp, Homo sapien
tgccctgagcagagcgccaaattgg

SEQ ID NO: 4275861 - DNA, 25 bp, Homo sapien
tgccgatgaggttcgtgctagttgc

SEQ ID NO: 4275862 - DNA, 25 bp, Homo sapien
ggttcgtgctagttgccacttcttc

SEQ ID NO: 4275863 - DNA, 25 bp, Homo sapien
gcgccaaattggctgccgatgaggt

SEQ ID NO: 4275864 - DNA, 25 bp, Homo sapien
tgctttagggtttaggttcttcaga

SEQ ID NO: 4275865 - DNA, 25 bp, Homo sapien
ggtttaggttcttcagatcacccac

SEQ ID NO: 4275866 - DNA, 25 bp, Homo sapien
tagggttcgaaactgagcaatctct

SEQ ID NO: 4275867 - DNA, 25 bp, Homo sapien
tcagatcacccactagggttcgaaa

SEQ ID NO: 4275868 - DNA, 25 bp, Homo sapien
tctgtgcctttgaaaccgtcgttac

SEQ ID NO: 4275869 - DNA, 25 bp, Homo sapien
tgtttggcctggaccaatacctcac

SEQ ID NO: 4275870 - DNA, 25 bp, Homo sapien
tcggtgtttggcctggaccaatacc

SEQ ID NO: 4275871 - DNA, 25 bp, Homo sapien
ggcctggccaactcggtgtttggcc

SEQ ID NO: 4275872 - DNA, 25 bp, Homo sapien
caactcggtgtttggcctggaccaa

SEQ ID NO: 4275873 - DNA, 25 bp, Homo sapien
gatgtgcccttgcactggcacaaag

SEQ ID NO: 4275874 - DNA, 25 bp, Homo sapien
caggagtgggattccctttggatct

SEQ ID NO: 4275875 - DNA, 25 bp, Homo sapien
gcctaaacatgggtaagacagtgat

SEQ ID NO: 4275876 - DNA, 25 bp, Homo sapien
caacagagtccttagaaggagggta

SEQ ID NO: 4275877 - DNA, 25 bp, Homo sapien
ggctctgaattccatcgctagtttt

SEQ ID NO: 4275878 - DNA, 25 bp, Homo sapien
ctggctctgaattccatcgctagtt

SEQ ID NO: 4275879 - DNA, 25 bp, Homo sapien
ccttgaggacccactctgcatagga

SEQ ID NO: 4275880 - DNA, 25 bp, Homo sapien
tctgaattccatcgctagtttttgt

SEQ ID NO: 4275881 - DNA, 25 bp, Homo sapien
ggtctcccaggagggtcaggatata

SEQ ID NO: 4275882 - DNA, 25 bp, Homo sapien
ggagggtcaggatatagaaacactt

SEQ ID NO: 4275883 - DNA, 25 bp, Homo sapien
tcaggatatagaaacacttcagcat

SEQ ID NO: 4275884 - DNA, 25 bp, Homo sapien
cccaggagggtcaggatatagaaac

SEQ ID NO: 4275885 - DNA, 25 bp, Homo sapien
gcaggtagaaattggtgtcagggtg

SEQ ID NO: 4275886 - DNA, 25 bp, Homo sapien
ttggaccagcgggtctaaggacttg

SEQ ID NO: 4275887 - DNA, 25 bp, Homo sapien
atggcaggtagaaattggtgtcagg

SEQ ID NO: 4275888 - DNA, 25 bp, Homo sapien
actgggttggaccagcgggtctaag

SEQ ID NO: 4275889 - DNA, 25 bp, Homo sapien
gaatctgtgtttaggcgctcagctg

SEQ ID NO: 4275890 - DNA, 25 bp, Homo sapien
cagcagtcgcttgtctcaggagggt

SEQ ID NO: 4275891 - DNA, 25 bp, Homo sapien
actgttcccgggagtctcggcagca

SEQ ID NO: 4275892 - DNA, 25 bp, Homo sapien
gaaaagtcccattcctgcctcaggt

SEQ ID NO: 4275893 - DNA, 25 bp, Homo sapien
tgtctgtcggcgtctgagggcctga

SEQ ID NO: 4275894 - DNA, 25 bp, Homo sapien
gattttgaagagtgtctgtcggcgt

SEQ ID NO: 4275895 - DNA, 25 bp, Homo sapien
attttgaagagtgtctgtcggcgtc

SEQ ID NO: 4275896 - DNA, 25 bp, Homo sapien
gggagctcctgtctcttctgagcac

SEQ ID NO: 4275897 - DNA, 25 bp, Homo sapien
gcagagccccaccagagagtgtcat

SEQ ID NO: 4275898 - DNA, 25 bp, Homo sapien
gccccaccagagagtgtcatgccag

SEQ ID NO: 4275899 - DNA, 25 bp, Homo sapien
gagccccaccagagagtgtcatgcc

SEQ ID NO: 4275900 - DNA, 25 bp, Homo sapien
gttttcctcagtccatagaggaaag

SEQ ID NO: 4275901 - DNA, 25 bp, Homo sapien
tttcctcagtccatagaggaaagag

SEQ ID NO: 4275902 - DNA, 25 bp, Homo sapien
ttttcctcagtccatagaggaaaga

SEQ ID NO: 4275903 - DNA, 25 bp, Homo sapien
ttcctcagtccatagaggaaagagt

SEQ ID NO: 4275904 - DNA, 25 bp, Homo sapien
tctgtaagatctcttgtttgggtca

SEQ ID NO: 4275905 - DNA, 25 bp, Homo sapien
gatgctgatcataggtaattctgta

SEQ ID NO: 4275906 - DNA, 25 bp, Homo sapien
ttcttgtggatagccgcaatgggtt

SEQ ID NO: 4275907 - DNA, 25 bp, Homo sapien
tgctgtcctccacgtgtctttgcct

SEQ ID NO: 4275908 - DNA, 25 bp, Homo sapien
gtttttgccaatctcaaaaatgcag

SEQ ID NO: 4275909 - DNA, 25 bp, Homo sapien
tttttgccaatctcaaaaatgcagg

SEQ ID NO: 4275910 - DNA, 25 bp, Homo sapien
ctctcagagaggatgccctctctaa

SEQ ID NO: 4275911 - DNA, 25 bp, Homo sapien
tctaactatgggttttgctctggta

SEQ ID NO: 4275912 - DNA, 25 bp, Homo sapien
gaggatgccctctctaactatgggt

SEQ ID NO: 4275913 - DNA, 25 bp, Homo sapien
tgctctggtactcctctgcacaagc

SEQ ID NO: 4275914 - DNA, 25 bp, Homo sapien
cgggccagggaagcactggttggag

SEQ ID NO: 4275915 - DNA, 25 bp, Homo sapien
gctttgagagggacacagggcactg

SEQ ID NO: 4275916 - DNA, 25 bp, Homo sapien
cttagtcctgccatagcacaaagct

SEQ ID NO: 4275917 - DNA, 25 bp, Homo sapien
tctgaaaagggcttccttagtcctg

SEQ ID NO: 4275918 - DNA, 25 bp, Homo sapien
gctcttgtagatttcatcctcgcag

SEQ ID NO: 4275919 - DNA, 25 bp, Homo sapien
ttcctggataaccaagaatgtccat

SEQ ID NO: 4275920 - DNA, 25 bp, Homo sapien
cttcctggataaccaagaatgtcca

SEQ ID NO: 4275921 - DNA, 25 bp, Homo sapien
gtctccctcaggggcgaacagaggt

SEQ ID NO: 4275922 - DNA, 25 bp, Homo sapien
cagaggtggatccttgagctgctcc

SEQ ID NO: 4275923 - DNA, 25 bp, Homo sapien
ccttgagctgctccaataatgacat

SEQ ID NO: 4275924 - DNA, 25 bp, Homo sapien
gcgaacagaggtggatccttgagct

SEQ ID NO: 4275925 - DNA, 25 bp, Homo sapien
ctcaggcttgccaggatggtttgtc

SEQ ID NO: 4275926 - DNA, 25 bp, Homo sapien
gcttgccaggatggtttgtccccag

SEQ ID NO: 4275927 - DNA, 25 bp, Homo sapien
ttgccaggatggtttgtccccaggg

SEQ ID NO: 4275928 - DNA, 25 bp, Homo sapien
caggcttgccaggatggtttgtccc

SEQ ID NO: 4275929 - DNA, 25 bp, Homo sapien
caccaagccttaaagaggacagcac

SEQ ID NO: 4275930 - DNA, 25 bp, Homo sapien
ttcatgtgaatgattccaccaagcc

SEQ ID NO: 4275931 - DNA, 25 bp, Homo sapien
ggacagcaccaaagacaagtgacag

SEQ ID NO: 4275932 - DNA, 25 bp, Homo sapien
caggaagggatgtgcctcatctaac

SEQ ID NO: 4275933 - DNA, 25 bp, Homo sapien
tcttggtcagcaactttttacaagg

SEQ ID NO: 4275934 - DNA, 25 bp, Homo sapien
ggtaccagcgtgaccttcccatgta

SEQ ID NO: 4275935 - DNA, 25 bp, Homo sapien
gttaatcccactttctggaacttgc

SEQ ID NO: 4275936 - DNA, 25 bp, Homo sapien
tacaaggagttaatcccactttctg

SEQ ID NO: 4275937 - DNA, 25 bp, Homo sapien
ggaagctactccaagcgtggccttg

SEQ ID NO: 4275938 - DNA, 25 bp, Homo sapien
ttgaagggttccattttgaccctga

SEQ ID NO: 4275939 - DNA, 25 bp, Homo sapien
ctgtgcatccttgaagggttccatt

SEQ ID NO: 4275940 - DNA, 25 bp, Homo sapien
gatcatcctcagtagacatggaagc

SEQ ID NO: 4275941 - DNA, 25 bp, Homo sapien
catttgtcctgggccacaagtgtgg

SEQ ID NO: 4275942 - DNA, 25 bp, Homo sapien
gagtgaggaccctcatgagcaccag

SEQ ID NO: 4275943 - DNA, 25 bp, Homo sapien
cccagagggacaattgagaaggtgc

SEQ ID NO: 4275944 - DNA, 25 bp, Homo sapien
gtggccagacctagaagagggcaga

SEQ ID NO: 4275945 - DNA, 25 bp, Homo sapien
cttggggagaactgaacgaggatgc

SEQ ID NO: 4275946 - DNA, 25 bp, Homo sapien
ggcttggggagaactgaacgaggat

SEQ ID NO: 4275947 - DNA, 25 bp, Homo sapien
tatggcttggggagaactgaacgag

SEQ ID NO: 4275948 - DNA, 25 bp, Homo sapien
tggggagaactgaacgaggatgcat

SEQ ID NO: 4275949 - DNA, 25 bp, Homo sapien
cagtttgggttagatggtcatcaac

SEQ ID NO: 4275950 - DNA, 25 bp, Homo sapien
tatctagcactgttggaatcttgca

SEQ ID NO: 4275951 - DNA, 25 bp, Homo sapien
cagcagcccttacatgggagttgtt

SEQ ID NO: 4275952 - DNA, 25 bp, Homo sapien
ttttgtgaatctctgtaaaggccaa

SEQ ID NO: 4275953 - DNA, 25 bp, Homo sapien
gctgtattcacagcagcatgcacaa

SEQ ID NO: 4275954 - DNA, 25 bp, Homo sapien
tattcacagcagcatgcacaaccat

SEQ ID NO: 4275955 - DNA, 25 bp, Homo sapien
tgctgtattcacagcagcatgcaca

SEQ ID NO: 4275956 - DNA, 25 bp, Homo sapien
tgtattcacagcagcatgcacaacc

SEQ ID NO: 4275957 - DNA, 25 bp, Homo sapien
tccaccaagggcgttggccactttc

SEQ ID NO: 4275958 - DNA, 25 bp, Homo sapien
ttcttggcccgagcagccctagcca

SEQ ID NO: 4275959 - DNA, 25 bp, Homo sapien
cgtgcaccattgctaacccaatagg

SEQ ID NO: 4275960 - DNA, 25 bp, Homo sapien
gttcttgacccagtccgtgcaccat

SEQ ID NO: 4275961 - DNA, 25 bp, Homo sapien
acacttgtaaaggatggttccctgc

SEQ ID NO: 4275962 - DNA, 25 bp, Homo sapien
tgcggtcaaaatgactgtccaagga

SEQ ID NO: 4275963 - DNA, 25 bp, Homo sapien
tgccacaaagcttgagccccaccat

SEQ ID NO: 4275964 - DNA, 25 bp, Homo sapien
ggtcaaaatgactgtccaaggagct

SEQ ID NO: 4275965 - DNA, 25 bp, Homo sapien
aaggagctgccacaaagcttgagcc

SEQ ID NO: 4275966 - DNA, 25 bp, Homo sapien
gaaacgggctgtacttctaggcatg

SEQ ID NO: 4275967 - DNA, 25 bp, Homo sapien
cattttggaagtttcgagccctggg

SEQ ID NO: 4275968 - DNA, 25 bp, Homo sapien
gggatactattctgtggcgctgcca

SEQ ID NO: 4275969 - DNA, 25 bp, Homo sapien
taagaggccgttcacaaagctgctg

SEQ ID NO: 4275970 - DNA, 25 bp, Homo sapien
ccaaaagaaatacttaaatgagact

SEQ ID NO: 4275971 - DNA, 25 bp, Homo sapien
caaaagaaatacttaaatgagactt

SEQ ID NO: 4275972 - DNA, 25 bp, Homo sapien
gcgccagctccgggagttccgcaga

SEQ ID NO: 4275973 - DNA, 25 bp, Homo sapien
cagctccgggagttccgcagagcct

SEQ ID NO: 4275974 - DNA, 25 bp, Homo sapien
actgagacttgttccctggcgccag

SEQ ID NO: 4275975 - DNA, 25 bp, Homo sapien
ttaaaattcgaggctctccactgag

SEQ ID NO: 4275976 - DNA, 25 bp, Homo sapien
agtccctccggcctagtcggagtgc

SEQ ID NO: 4275977 - DNA, 25 bp, Homo sapien
aagatccagcgcgtgctcggttgcc

SEQ ID NO: 4275978 - DNA, 25 bp, Homo sapien
ttctccgttccttgcaggcccttgg

SEQ ID NO: 4275979 - DNA, 25 bp, Homo sapien
tgccggaccatcattttccgagtcc

SEQ ID NO: 4275980 - DNA, 25 bp, Homo sapien
cagctagaggcagggcaccgcggaa

SEQ ID NO: 4275981 - DNA, 25 bp, Homo sapien
tccagccaaccagggcgtcacctgc

SEQ ID NO: 4275982 - DNA, 25 bp, Homo sapien
cagggcaccgcggaaggttgaatcc

SEQ ID NO: 4275983 - DNA, 25 bp, Homo sapien
aggttgaatccacgccctggctgtg

SEQ ID NO: 4275984 - DNA, 25 bp, Homo sapien
ctgccgccgccggagcggggagggt

SEQ ID NO: 4275985 - DNA, 25 bp, Homo sapien
gtgttgggggcaggtggagccggga

SEQ ID NO: 4275986 - DNA, 25 bp, Homo sapien
ggcaggtggagccgggagggcccag

SEQ ID NO: 4275987 - DNA, 25 bp, Homo sapien
cgccgccggagcggggagggtgttg

SEQ ID NO: 4275988 - DNA, 25 bp, Homo sapien
gggctccggtggtgcattcatgctc

SEQ ID NO: 4275989 - DNA, 25 bp, Homo sapien
cgtcggacccttgccagaactgtaa

SEQ ID NO: 4275990 - DNA, 25 bp, Homo sapien
gcgggcggagcgactgtcctccctt

SEQ ID NO: 4275991 - DNA, 25 bp, Homo sapien
tggaactagtcggacaaagccctcg

SEQ ID NO: 4275992 - DNA, 25 bp, Homo sapien
aaggttgaagactaacccaagatct

SEQ ID NO: 4275993 - DNA, 25 bp, Homo sapien
taacccaagatctgggcgttgtgaa

SEQ ID NO: 4275994 - DNA, 25 bp, Homo sapien
gggcgttgtgaagcggcaggcagcc

SEQ ID NO: 4275995 - DNA, 25 bp, Homo sapien
tgaagactaacccaagatctgggcg

SEQ ID NO: 4275996 - DNA, 25 bp, Homo sapien
cagttaatgaaaacttaagattcag

SEQ ID NO: 4275997 - DNA, 25 bp, Homo sapien
cattgtgttagctcaaagtattctc

SEQ ID NO: 4275998 - DNA, 25 bp, Homo sapien
actaaattgtactcctgtctagcag

SEQ ID NO: 4275999 - DNA, 25 bp, Homo sapien
cctgtctagcagattagcattgtgt

SEQ ID NO: 4276000 - DNA, 25 bp, Homo sapien
tgaacaatgtaaggtctgtgtccag

SEQ ID NO: 4276001 - DNA, 25 bp, Homo sapien
gaacaagctgtctttgctccactgg

SEQ ID NO: 4276002 - DNA, 25 bp, Homo sapien
cagttaagctggatagtgcctttgt

SEQ ID NO: 4276003 - DNA, 25 bp, Homo sapien
caggttaattttttcgcatgtggat

SEQ ID NO: 4276004 - DNA, 25 bp, Homo sapien
caagtagaatgtgtatctctgacaa

SEQ ID NO: 4276005 - DNA, 25 bp, Homo sapien
caggcaatcctcactatatagcagc

SEQ ID NO: 4276006 - DNA, 25 bp, Homo sapien
tctggatctcataagttggtgtggc

SEQ ID NO: 4276007 - DNA, 25 bp, Homo sapien
tagaataattcccttgccagtagtt

SEQ ID NO: 4276008 - DNA, 25 bp, Homo sapien
tagaaactatctttggtggacacct

SEQ ID NO: 4276009 - DNA, 25 bp, Homo sapien
cactgagactagattatatggcccc

SEQ ID NO: 4276010 - DNA, 25 bp, Homo sapien
taagagaccagatttatcgacagaa

SEQ ID NO: 4276011 - DNA, 25 bp, Homo sapien
tactacctagtggagtgagcaagta

SEQ ID NO: 4276012 - DNA, 25 bp, Homo sapien
tttgtagacacccaacatctcagtg

SEQ ID NO: 4276013 - DNA, 25 bp, Homo sapien
tcagtgctacatgcgctcagttact

SEQ ID NO: 4276014 - DNA, 25 bp, Homo sapien
tatgtgaagtgcctatgtccccatc

SEQ ID NO: 4276015 - DNA, 25 bp, Homo sapien
gaagctctggctctttctagtaggg

SEQ ID NO: 4276016 - DNA, 25 bp, Homo sapien
cagtgaaaatccagtatagcttacc

SEQ ID NO: 4276017 - DNA, 25 bp, Homo sapien
taaggtctgaccagtcggagggact

SEQ ID NO: 4276018 - DNA, 25 bp, Homo sapien
gagctcagggtagtaatatccaaga

SEQ ID NO: 4276019 - DNA, 25 bp, Homo sapien
accagggtagtgaagaggccctcct

SEQ ID NO: 4276020 - DNA, 25 bp, Homo sapien
taaccgtgcctaacaactgtactta

SEQ ID NO: 4276021 - DNA, 25 bp, Homo sapien
tgtgtatcatcccttttaaccgtgc

SEQ ID NO: 4276022 - DNA, 25 bp, Homo sapien
cagctttggattatacgatttctaa

SEQ ID NO: 4276023 - DNA, 25 bp, Homo sapien
tctagagccaaataatgggagtgaa

SEQ ID NO: 4276024 - DNA, 25 bp, Homo sapien
ttcctaggcactccccagctagagg

SEQ ID NO: 4276025 - DNA, 25 bp, Homo sapien
gataacaatgattcagcaatgcccc

SEQ ID NO: 4276026 - DNA, 25 bp, Homo sapien
cagctagaggcctatgtgccctcag

SEQ ID NO: 4276027 - DNA, 25 bp, Homo sapien
tccagagggaagagttgctacagtc

SEQ ID NO: 4276028 - DNA, 25 bp, Homo sapien
tccgagtatgggcagagtcactcct

SEQ ID NO: 4276029 - DNA, 25 bp, Homo sapien
aaacatgtctagaggttcctgtccc

SEQ ID NO: 4276030 - DNA, 25 bp, Homo sapien
tttactgggtttgaaagcactgggc

SEQ ID NO: 4276031 - DNA, 25 bp, Homo sapien
taaggacattgttcagcttgcaggt

SEQ ID NO: 4276032 - DNA, 25 bp, Homo sapien
aggagttccagaccagcttgggcaa

SEQ ID NO: 4276033 - DNA, 25 bp, Homo sapien
ctataatctcaacactgggaggtgg

SEQ ID NO: 4276034 - DNA, 25 bp, Homo sapien
aatctcaacactgggaggtgggagg

SEQ ID NO: 4276035 - DNA, 25 bp, Homo sapien
attgcttgagcccaggagttccaga

SEQ ID NO: 4276036 - DNA, 25 bp, Homo sapien
ggttgtcggctacttctgacctaaa

SEQ ID NO: 4276037 - DNA, 25 bp, Homo sapien
aaatactgtgtaaaggttgtcggct

SEQ ID NO: 4276038 - DNA, 25 bp, Homo sapien
tttaaagatgtctataacagtggta

SEQ ID NO: 4276039 - DNA, 25 bp, Homo sapien
cagggtcgctctgtcttctgggcac

SEQ ID NO: 4276040 - DNA, 25 bp, Homo sapien
taagtcggtggagttacaacccatg

SEQ ID NO: 4276041 - DNA, 25 bp, Homo sapien
tggcgaagcagcatcgtgcctgttc

SEQ ID NO: 4276042 - DNA, 25 bp, Homo sapien
ggattcatccctgcagtaggttcat

SEQ ID NO: 4276043 - DNA, 25 bp, Homo sapien
gaaactgaagtaccacaggaaggag

SEQ ID NO: 4276044 - DNA, 25 bp, Homo sapien
agaacccacgtcaggccattactgg

SEQ ID NO: 4276045 - DNA, 25 bp, Homo sapien
tggcctaagcctcactgttcttttc

SEQ ID NO: 4276046 - DNA, 25 bp, Homo sapien
gaagtctcagagagccattctaaga

SEQ ID NO: 4276047 - DNA, 25 bp, Homo sapien
ttctgcccttagaggagccggacct

SEQ ID NO: 4276048 - DNA, 25 bp, Homo sapien
taccgcaaaaggttcccaatccaga

SEQ ID NO: 4276049 - DNA, 25 bp, Homo sapien
tacagtgagtccatatctcaacaac

SEQ ID NO: 4276050 - DNA, 25 bp, Homo sapien
tatattccttccacgatgatcctgc

SEQ ID NO: 4276051 - DNA, 25 bp, Homo sapien
ttcagggcgagtccgtaaagagaaa

SEQ ID NO: 4276052 - DNA, 25 bp, Homo sapien
tcccaattcaatcctagagggtagg

SEQ ID NO: 4276053 - DNA, 25 bp, Homo sapien
ccatagagtaggatggagtaacctc

SEQ ID NO: 4276054 - DNA, 25 bp, Homo sapien
gggtcaacgtttctgcactatagtc

SEQ ID NO: 4276055 - DNA, 25 bp, Homo sapien
cacttacgcaaaggtagccgttggg

SEQ ID NO: 4276056 - DNA, 25 bp, Homo sapien
cgcttgagcctgggaaagtggaggt

SEQ ID NO: 4276057 - DNA, 25 bp, Homo sapien
atcgcttgagcctgggaaagtggag

SEQ ID NO: 4276058 - DNA, 25 bp, Homo sapien
tcgcttgagcctgggaaagtggagg

SEQ ID NO: 4276059 - DNA, 25 bp, Homo sapien
gcttgagcctgggaaagtggaggtt

SEQ ID NO: 4276060 - DNA, 25 bp, Homo sapien
tcccgggaaaggtgtgagcaattac

SEQ ID NO: 4276061 - DNA, 25 bp, Homo sapien
gcttgtccagatccaggcaaactga

SEQ ID NO: 4276062 - DNA, 25 bp, Homo sapien
tgaaaggacgaacaagtggctctgg

SEQ ID NO: 4276063 - DNA, 25 bp, Homo sapien
tcaagaaaagaattcgggcgagtcc

SEQ ID NO: 4276064 - DNA, 25 bp, Homo sapien
ccatcttggttttgaccggcttctt

SEQ ID NO: 4276065 - DNA, 25 bp, Homo sapien
acagtataattacagcagtgaggac

SEQ ID NO: 4276066 - DNA, 25 bp, Homo sapien
caggcctgccatggcgtttgtaaac

SEQ ID NO: 4276067 - DNA, 25 bp, Homo sapien
catcccatgacttggaatgcctaac

SEQ ID NO: 4276068 - DNA, 25 bp, Homo sapien
cacgggtttagaggcacaagggtca

SEQ ID NO: 4276069 - DNA, 25 bp, Homo sapien
tgaacgggcccctatagtcaggaca

SEQ ID NO: 4276070 - DNA, 25 bp, Homo sapien
caagttgaagtaacgtgcccacagg

SEQ ID NO: 4276071 - DNA, 25 bp, Homo sapien
tctgttaaacagatggaccgctgct

SEQ ID NO: 4276072 - DNA, 25 bp, Homo sapien
taaagtcaacagaataggcatggcc

SEQ ID NO: 4276073 - DNA, 25 bp, Homo sapien
cgcaggctatggtgcagaggccact

SEQ ID NO: 4276074 - DNA, 25 bp, Homo sapien
gaagacaaatctaggatcccactgg

SEQ ID NO: 4276075 - DNA, 25 bp, Homo sapien
tactggtagagatccacacgccaag

SEQ ID NO: 4276076 - DNA, 25 bp, Homo sapien
ggtttttcatatgccgagccaggtt

SEQ ID NO: 4276077 - DNA, 25 bp, Homo sapien
tgaagggcctctctcgagtatgaaa

SEQ ID NO: 4276078 - DNA, 25 bp, Homo sapien
tgatcaaaccctgagctgtaggtga

SEQ ID NO: 4276079 - DNA, 25 bp, Homo sapien
tgtgtcctgactaaaagatggcccg

SEQ ID NO: 4276080 - DNA, 25 bp, Homo sapien
gtgaattttctcatgccgcgcacag

SEQ ID NO: 4276081 - DNA, 25 bp, Homo sapien
cagttggaactccaccggaaggctt

SEQ ID NO: 4276082 - DNA, 25 bp, Homo sapien
agctttctcacataaatcgcattta

SEQ ID NO: 4276083 - DNA, 25 bp, Homo sapien
aggctgacaggcgtcggaaagcttt

SEQ ID NO: 4276084 - DNA, 25 bp, Homo sapien
ctacatttaaatgctttctcttgag

SEQ ID NO: 4276085 - DNA, 25 bp, Homo sapien
atgctttctcttgagtgtgaagtct

SEQ ID NO: 4276086 - DNA, 25 bp, Homo sapien
aaatgctttctcttgagtgtgaagt

SEQ ID NO: 4276087 - DNA, 25 bp, Homo sapien
acatttaaatgctttctcttgagtg

SEQ ID NO: 4276088 - DNA, 25 bp, Homo sapien
gacactcccactgtgtgaagactct

SEQ ID NO: 4276089 - DNA, 25 bp, Homo sapien
ccacgttggtgatgagagctaaggc

SEQ ID NO: 4276090 - DNA, 25 bp, Homo sapien
gatacgcaagatgggagctatgact

SEQ ID NO: 4276091 - DNA, 25 bp, Homo sapien
tcctgtcctgtgactgaaattggtc

SEQ ID NO: 4276092 - DNA, 25 bp, Homo sapien
ggttcctgatttaagatgaatttgt

SEQ ID NO: 4276093 - DNA, 25 bp, Homo sapien
tcagaaacacttgtcgcaggacatc

SEQ ID NO: 4276094 - DNA, 25 bp, Homo sapien
tttctgcttcttccaaaggttcctg

SEQ ID NO: 4276095 - DNA, 25 bp, Homo sapien
gatgacacagctaaggtttctgctt

SEQ ID NO: 4276096 - DNA, 25 bp, Homo sapien
caacactgttaaagatcttccttcc

SEQ ID NO: 4276097 - DNA, 25 bp, Homo sapien
aacactgttaaagatcttccttcca

SEQ ID NO: 4276098 - DNA, 25 bp, Homo sapien
ggattccccttaggctgagctgcct

SEQ ID NO: 4276099 - DNA, 25 bp, Homo sapien
actggattccccttaggctgagctg

SEQ ID NO: 4276100 - DNA, 25 bp, Homo sapien
agcaactggattccccttaggctga

SEQ ID NO: 4276101 - DNA, 25 bp, Homo sapien
aactggattccccttaggctgagct

SEQ ID NO: 4276102 - DNA, 25 bp, Homo sapien
cacagaacaacccaagaaggcagaa

SEQ ID NO: 4276103 - DNA, 25 bp, Homo sapien
tgctagattaagtgatctggtcagc

SEQ ID NO: 4276104 - DNA, 25 bp, Homo sapien
gatggatagaagcatgaggatatcg

SEQ ID NO: 4276105 - DNA, 25 bp, Homo sapien
tcaggtacctttctatgcagcacag

SEQ ID NO: 4276106 - DNA, 25 bp, Homo sapien
agccacccccactcgtcctgggaga

SEQ ID NO: 4276107 - DNA, 25 bp, Homo sapien
cagccacccccactcgtcctgggag

SEQ ID NO: 4276108 - DNA, 25 bp, Homo sapien
tcctgggagaaggtcacctccacat

SEQ ID NO: 4276109 - DNA, 25 bp, Homo sapien
cctgggagaaggtcacctccacatc

SEQ ID NO: 4276110 - DNA, 25 bp, Homo sapien
ctggttggtgttacctggtctcccg

SEQ ID NO: 4276111 - DNA, 25 bp, Homo sapien
gcacccctctctcgggaaaagggca

SEQ ID NO: 4276112 - DNA, 25 bp, Homo sapien
cctctctcgggaaaagggcaggcat

SEQ ID NO: 4276113 - DNA, 25 bp, Homo sapien
cagggacctggttggtgttacctgg

SEQ ID NO: 4276114 - DNA, 25 bp, Homo sapien
gcccagtgagaagcccactcttccc

SEQ ID NO: 4276115 - DNA, 25 bp, Homo sapien
acagcccagtgagaagcccactctt

SEQ ID NO: 4276116 - DNA, 25 bp, Homo sapien
ggacagcccagtgagaagcccactc

SEQ ID NO: 4276117 - DNA, 25 bp, Homo sapien
cactcttccccccagtagaggactc

SEQ ID NO: 4276118 - DNA, 25 bp, Homo sapien
gaggtgaagcaagggaccatatctg

SEQ ID NO: 4276119 - DNA, 25 bp, Homo sapien
gagaggtgaagcaagggaccatatc

SEQ ID NO: 4276120 - DNA, 25 bp, Homo sapien
ctgagaggtgaagcaagggaccata

SEQ ID NO: 4276121 - DNA, 25 bp, Homo sapien
cctgagaggtgaagcaagggaccat

SEQ ID NO: 4276122 - DNA, 25 bp, Homo sapien
aaaggtacaactatgtggccacaga

SEQ ID NO: 4276123 - DNA, 25 bp, Homo sapien
gaagcatcagctcccctgtgtgcag

SEQ ID NO: 4276124 - DNA, 25 bp, Homo sapien
tcttctcaacgaacagaggctctga

SEQ ID NO: 4276125 - DNA, 25 bp, Homo sapien
cgaacgcacttgaactgaccagctg

SEQ ID NO: 4276126 - DNA, 25 bp, Homo sapien
gcaggcagagttccctgggcaccac

SEQ ID NO: 4276127 - DNA, 25 bp, Homo sapien
aggcagagttccctgggcaccacac

SEQ ID NO: 4276128 - DNA, 25 bp, Homo sapien
ggcagagttccctgggcaccacaca

SEQ ID NO: 4276129 - DNA, 25 bp, Homo sapien
tagcaggcagagttccctgggcacc

SEQ ID NO: 4276130 - DNA, 25 bp, Homo sapien
aggatgtcccatcaaggtccctctg

SEQ ID NO: 4276131 - DNA, 25 bp, Homo sapien
gatgtcccatcaaggtccctctgca

SEQ ID NO: 4276132 - DNA, 25 bp, Homo sapien
cctcgccactctcagggttatgaag

SEQ ID NO: 4276133 - DNA, 25 bp, Homo sapien
gccactctcagggttatgaagctgc

SEQ ID NO: 4276134 - DNA, 25 bp, Homo sapien
tgccttggagagaacgtcaggcctc

SEQ ID NO: 4276135 - DNA, 25 bp, Homo sapien
ttggagagaacgtcaggcctcagcc

SEQ ID NO: 4276136 - DNA, 25 bp, Homo sapien
ccggctcagagtttctaggggccct

SEQ ID NO: 4276137 - DNA, 25 bp, Homo sapien
tctgtgccttggagagaacgtcagg

SEQ ID NO: 4276138 - DNA, 25 bp, Homo sapien
aagagctggcggaacagctcctggc

SEQ ID NO: 4276139 - DNA, 25 bp, Homo sapien
ctccctcgaagactgggcctgagct

SEQ ID NO: 4276140 - DNA, 25 bp, Homo sapien
tgagctggataggcagcatgccacc

SEQ ID NO: 4276141 - DNA, 25 bp, Homo sapien
cagcctgcactggagtatagctttc

SEQ ID NO: 4276142 - DNA, 25 bp, Homo sapien
caacaatgccaacatttgctgggac

SEQ ID NO: 4276143 - DNA, 25 bp, Homo sapien
ccttagacgtgggtcctcagaagta

SEQ ID NO: 4276144 - DNA, 25 bp, Homo sapien
cactcctgttcagggactaaccaga

SEQ ID NO: 4276145 - DNA, 25 bp, Homo sapien
taaccagaagagtgcgaaccaagtc

SEQ ID NO: 4276146 - DNA, 25 bp, Homo sapien
agccttgcgaaagagcgagactcca

SEQ ID NO: 4276147 - DNA, 25 bp, Homo sapien
gccttgcgaaagagcgagactccac

SEQ ID NO: 4276148 - DNA, 25 bp, Homo sapien
gaattgcttgaacccggcaggcgga

SEQ ID NO: 4276149 - DNA, 25 bp, Homo sapien
catggtggcatgcgcctgtagtccc

SEQ ID NO: 4276150 - DNA, 25 bp, Homo sapien
cgtctcttactaaaaattagctgag

SEQ ID NO: 4276151 - DNA, 25 bp, Homo sapien
agctactcggtaggctgaggcagca

SEQ ID NO: 4276152 - DNA, 25 bp, Homo sapien
tttactgtacaccaggtgataaggc

SEQ ID NO: 4276153 - DNA, 25 bp, Homo sapien
gagacagtgtatgacttgaggtcac

SEQ ID NO: 4276154 - DNA, 25 bp, Homo sapien
ccaccaagctcaagaggtacaatgt

SEQ ID NO: 4276155 - DNA, 25 bp, Homo sapien
gttacaaggcaactaggtgtcaccc

SEQ ID NO: 4276156 - DNA, 25 bp, Homo sapien
tccacagtctacacaggtggtgtgt

SEQ ID NO: 4276157 - DNA, 25 bp, Homo sapien
tgtgtatacacgcttcatattgcag

SEQ ID NO: 4276158 - DNA, 25 bp, Homo sapien
ggagggttcacaagatccagccact

SEQ ID NO: 4276159 - DNA, 25 bp, Homo sapien
atattgcagtagaaagaccttaacc

SEQ ID NO: 4276160 - DNA, 25 bp, Homo sapien
catgcatgacggctgctgattcatg

SEQ ID NO: 4276161 - DNA, 25 bp, Homo sapien
gaagaaagataggaacatgcatgac

SEQ ID NO: 4276162 - DNA, 25 bp, Homo sapien
gaaagataggaacatgcatgacggc

SEQ ID NO: 4276163 - DNA, 25 bp, Homo sapien
taggaacatgcatgacggctgctga

SEQ ID NO: 4276164 - DNA, 25 bp, Homo sapien
gagaaacccgggctccagattctct

SEQ ID NO: 4276165 - DNA, 25 bp, Homo sapien
taattgtctctgataaatacgcttt

SEQ ID NO: 4276166 - DNA, 25 bp, Homo sapien
gatgaaacgagaaagcccggagaaa

SEQ ID NO: 4276167 - DNA, 25 bp, Homo sapien
tatatgcagaattggatgaaacgag

SEQ ID NO: 4276168 - DNA, 25 bp, Homo sapien
gccgccgagcgacaatcggtccacc

SEQ ID NO: 4276169 - DNA, 25 bp, Homo sapien
tcccgccgccgagcgacaatcggtc

SEQ ID NO: 4276170 - DNA, 25 bp, Homo sapien
actcccgccgccgagcgacaatcgg

SEQ ID NO: 4276171 - DNA, 25 bp, Homo sapien
gagcgacaatcggtccacccgccgc

SEQ ID NO: 4276172 - DNA, 25 bp, Homo sapien
ggatgcccagccgcgcctgttttct

SEQ ID NO: 4276173 - DNA, 25 bp, Homo sapien
tcttgcatccctcctgtcgtgtctg

SEQ ID NO: 4276174 - DNA, 25 bp, Homo sapien
gacatttcccttccacgctcggatg

SEQ ID NO: 4276175 - DNA, 25 bp, Homo sapien
ctccctcagttggacatttcccttc

SEQ ID NO: 4276176 - DNA, 25 bp, Homo sapien
tgcacagccaaagccataaggccat

SEQ ID NO: 4276177 - DNA, 25 bp, Homo sapien
tggagggcatgctacaagctgctgt

SEQ ID NO: 4276178 - DNA, 25 bp, Homo sapien
aaatgtcatctattgccagtgccag

SEQ ID NO: 4276179 - DNA, 25 bp, Homo sapien
cagagaaccttgagggtgcacagcc

SEQ ID NO: 4276180 - DNA, 25 bp, Homo sapien
tgataggtggttagcatggatagca

SEQ ID NO: 4276181 - DNA, 25 bp, Homo sapien
caacgtgataggtggttagcatgga

SEQ ID NO: 4276182 - DNA, 25 bp, Homo sapien
tcaacgtgataggtggttagcatgg

SEQ ID NO: 4276183 - DNA, 25 bp, Homo sapien
acgtgataggtggttagcatggata

SEQ ID NO: 4276184 - DNA, 25 bp, Homo sapien
gatcaaacagatcaaccaaattggc

SEQ ID NO: 4276185 - DNA, 25 bp, Homo sapien
caaacagatcaaccaaattggcttc

SEQ ID NO: 4276186 - DNA, 25 bp, Homo sapien
gtgtgatcaaacagatcaaccaaat

SEQ ID NO: 4276187 - DNA, 25 bp, Homo sapien
tagtgtgatcaaacagatcaaccaa

SEQ ID NO: 4276188 - DNA, 25 bp, Homo sapien
gcactcgagcctataaccatgaggt

SEQ ID NO: 4276189 - DNA, 25 bp, Homo sapien
cacttgcaaagttcgggaagcagcc

SEQ ID NO: 4276190 - DNA, 25 bp, Homo sapien
taatacctgatttctccgagtgcca

SEQ ID NO: 4276191 - DNA, 25 bp, Homo sapien
tcttcacttttctggtaggaggcat

SEQ ID NO: 4276192 - DNA, 25 bp, Homo sapien
agcactgtactctttcagatcgggg

SEQ ID NO: 4276193 - DNA, 25 bp, Homo sapien
cagatcggggcagtttgcttagtaa

SEQ ID NO: 4276194 - DNA, 25 bp, Homo sapien
tgtactctttcagatcggggcagtt

SEQ ID NO: 4276195 - DNA, 25 bp, Homo sapien
actctttcagatcggggcagtttgc

SEQ ID NO: 4276196 - DNA, 25 bp, Homo sapien
tgtgccccaggcaaacctgctcctc

SEQ ID NO: 4276197 - DNA, 25 bp, Homo sapien
ctgtgccccaggcaaacctgctcct

SEQ ID NO: 4276198 - DNA, 25 bp, Homo sapien
ttccaaggcaacaagatccttctgg

SEQ ID NO: 4276199 - DNA, 25 bp, Homo sapien
ggattccaaggcaacaagatccttc

SEQ ID NO: 4276200 - DNA, 25 bp, Homo sapien
aggcaacaagatccttctggagata

SEQ ID NO: 4276201 - DNA, 25 bp, Homo sapien
caaggcaacaagatccttctggaga

SEQ ID NO: 4276202 - DNA, 25 bp, Homo sapien
tggcttccatctcttttagggcaag

SEQ ID NO: 4276203 - DNA, 25 bp, Homo sapien
gcaagtcctcgtgatgtggcccgtt

SEQ ID NO: 4276204 - DNA, 25 bp, Homo sapien
catgtcccattctgtggtagatccc

SEQ ID NO: 4276205 - DNA, 25 bp, Homo sapien
catactagatcagcttgtgagttca

SEQ ID NO: 4276206 - DNA, 25 bp, Homo sapien
gatggtctccaacaaaagccacggg

SEQ ID NO: 4276207 - DNA, 25 bp, Homo sapien
taatgcatagtaggcctctcgagtc

SEQ ID NO: 4276208 - DNA, 25 bp, Homo sapien
tatatgtccaaaacctaagggcctg

SEQ ID NO: 4276209 - DNA, 25 bp, Homo sapien
tcttgggatcttatcagggctgaca

SEQ ID NO: 4276210 - DNA, 25 bp, Homo sapien
gactggcaatgtccaactcagggcg

SEQ ID NO: 4276211 - DNA, 25 bp, Homo sapien
taaagtttatactagcagtgaccaa

SEQ ID NO: 4276212 - DNA, 25 bp, Homo sapien
gaaatggtgcacattcccacactct

SEQ ID NO: 4276213 - DNA, 25 bp, Homo sapien
gaggctttttcaggattcacttgta

SEQ ID NO: 4276214 - DNA, 25 bp, Homo sapien
ccttaagaagatgaccgagccagac

SEQ ID NO: 4276215 - DNA, 25 bp, Homo sapien
tgccttaagaagatgaccgagccag

SEQ ID NO: 4276216 - DNA, 25 bp, Homo sapien
ccatgccttaagaagatgaccgagc

SEQ ID NO: 4276217 - DNA, 25 bp, Homo sapien
catgccttaagaagatgaccgagcc

SEQ ID NO: 4276218 - DNA, 25 bp, Homo sapien
taagactagaattataactgaagac

SEQ ID NO: 4276219 - DNA, 25 bp, Homo sapien
ctgatgtaccataagactagaatta

SEQ ID NO: 4276220 - DNA, 25 bp, Homo sapien
taccataagactagaattataactg

SEQ ID NO: 4276221 - DNA, 25 bp, Homo sapien
gactagaattataactgaagacctt

SEQ ID NO: 4276222 - DNA, 25 bp, Homo sapien
caacaagttgagagatctgattgaa

SEQ ID NO: 4276223 - DNA, 25 bp, Homo sapien
ttcaacaagttgagagatctgattg

SEQ ID NO: 4276224 - DNA, 25 bp, Homo sapien
catgttcaacaagttgagagatctg

SEQ ID NO: 4276225 - DNA, 25 bp, Homo sapien
gctcatgttcaacaagttgagagat

SEQ ID NO: 4276226 - DNA, 25 bp, Homo sapien
caatgaggtgcgaactccaataaaa

SEQ ID NO: 4276227 - DNA, 25 bp, Homo sapien
ttctctggtggtcgaagagtttgga

SEQ ID NO: 4276228 - DNA, 25 bp, Homo sapien
atttgagggttgtccttctaactct

SEQ ID NO: 4276229 - DNA, 25 bp, Homo sapien
gattctccgatgaccaatgaggtgc

SEQ ID NO: 4276230 - DNA, 25 bp, Homo sapien
gagtatagtcctcagacaggtcctc

SEQ ID NO: 4276231 - DNA, 25 bp, Homo sapien
ttccagcatcatgttccagtgcagg

SEQ ID NO: 4276232 - DNA, 25 bp, Homo sapien
gccatgctacggtcattttccagca

SEQ ID NO: 4276233 - DNA, 25 bp, Homo sapien
ccaaagaagccatgctacggtcatt

SEQ ID NO: 4276234 - DNA, 25 bp, Homo sapien
ttggtctcctgagttccccacttga

SEQ ID NO: 4276235 - DNA, 25 bp, Homo sapien
ggtctcctgagttccccacttgagg

SEQ ID NO: 4276236 - DNA, 25 bp, Homo sapien
catccgaagtacagttgcccctgct

SEQ ID NO: 4276237 - DNA, 25 bp, Homo sapien
gggcctgaccatccgaagtacagtt

SEQ ID NO: 4276238 - DNA, 25 bp, Homo sapien
tccctggagggtacagtacaaggtc

SEQ ID NO: 4276239 - DNA, 25 bp, Homo sapien
caaggtcccggatcaagctgagaac

SEQ ID NO: 4276240 - DNA, 25 bp, Homo sapien
aactgggtgttcctccaagccctca

SEQ ID NO: 4276241 - DNA, 25 bp, Homo sapien
gggtacagtacaaggtcccggatca

SEQ ID NO: 4276242 - DNA, 25 bp, Homo sapien
gaaatctccaacagacgtgacacta

SEQ ID NO: 4276243 - DNA, 25 bp, Homo sapien
tgtgcacactcttaacaatccagga

SEQ ID NO: 4276244 - DNA, 25 bp, Homo sapien
tagagacatccttaaactgacatgc

SEQ ID NO: 4276245 - DNA, 25 bp, Homo sapien
cgtcataagacattcaggagattga

SEQ ID NO: 4276246 - DNA, 25 bp, Homo sapien
tataagtttgatgcatgacagagat

SEQ ID NO: 4276247 - DNA, 25 bp, Homo sapien
gaaaactctgcctaaagacataaca

SEQ ID NO: 4276248 - DNA, 25 bp, Homo sapien
cctgacacaggcttatacacatatg

SEQ ID NO: 4276249 - DNA, 25 bp, Homo sapien
tgggaaaacactccttcaagatgtc

SEQ ID NO: 4276250 - DNA, 25 bp, Homo sapien
cgccgccgagagacaatcatccaaa

SEQ ID NO: 4276251 - DNA, 25 bp, Homo sapien
agagacaatcatccaaacgccgcca

SEQ ID NO: 4276252 - DNA, 25 bp, Homo sapien
gccgagagacaatcatccaaacgcc

SEQ ID NO: 4276253 - DNA, 25 bp, Homo sapien
gactccgccgccgagagacaatcat

SEQ ID NO: 4276254 - DNA, 25 bp, Homo sapien
tctgtgttagaggaaccgctggtgc

SEQ ID NO: 4276255 - DNA, 25 bp, Homo sapien
aactcaaagaggtatgcttggccgg

SEQ ID NO: 4276256 - DNA, 25 bp, Homo sapien
ggatctttgcctcattgcactgata

SEQ ID NO: 4276257 - DNA, 25 bp, Homo sapien
cgaaggaggagaggtgcaactcaaa

SEQ ID NO: 4276258 - DNA, 25 bp, Homo sapien
cggagagtaaccagctgaccaacaa

SEQ ID NO: 4276259 - DNA, 25 bp, Homo sapien
catatttgaagcagtagaatgagtc

SEQ ID NO: 4276260 - DNA, 25 bp, Homo sapien
aagaagagacaaacgccggagagta

SEQ ID NO: 4276261 - DNA, 25 bp, Homo sapien
gaatgagtcaagaagagacaaacgc

SEQ ID NO: 4276262 - DNA, 25 bp, Homo sapien
ctaggcatgtacaaggggagcaccc

SEQ ID NO: 4276263 - DNA, 25 bp, Homo sapien
tcttggaaccacatggcattcacaa

SEQ ID NO: 4276264 - DNA, 25 bp, Homo sapien
gctgtatcttggaaccacatggcat

SEQ ID NO: 4276265 - DNA, 25 bp, Homo sapien
ggtcagctgtatcttggaaccacat

SEQ ID NO: 4276266 - DNA, 25 bp, Homo sapien
actacgcagaggagatataagtgcc

SEQ ID NO: 4276267 - DNA, 25 bp, Homo sapien
gaataaacacccgataaagcaagag

SEQ ID NO: 4276268 - DNA, 25 bp, Homo sapien
tgtcagccatgtcgtcagtacccaa

SEQ ID NO: 4276269 - DNA, 25 bp, Homo sapien
gatggatcataagtaattcacgctg

SEQ ID NO: 4276270 - DNA, 25 bp, Homo sapien
gctgagctccaggttaaaacttgcc

SEQ ID NO: 4276271 - DNA, 25 bp, Homo sapien
gcctaagatatgaaatctggctgaa

SEQ ID NO: 4276272 - DNA, 25 bp, Homo sapien
tgatgggcagcaacggctgagctcc

SEQ ID NO: 4276273 - DNA, 25 bp, Homo sapien
gcactccctgatgtagactctttga

SEQ ID NO: 4276274 - DNA, 25 bp, Homo sapien
caaatcaaattctctggatgagcta

SEQ ID NO: 4276275 - DNA, 25 bp, Homo sapien
tgagctaatgcccacccaagtggca

SEQ ID NO: 4276276 - DNA, 25 bp, Homo sapien
cccaagtggcaagttgaggaaagga

SEQ ID NO: 4276277 - DNA, 25 bp, Homo sapien
tataaaagaagcatggtatctgcca

SEQ ID NO: 4276278 - DNA, 25 bp, Homo sapien
tctgtcctgagcgttggtaaggcca

SEQ ID NO: 4276279 - DNA, 25 bp, Homo sapien
gggctggacagtgggctattggaga

SEQ ID NO: 4276280 - DNA, 25 bp, Homo sapien
cagtctcaggccaatgtactcggta

SEQ ID NO: 4276281 - DNA, 25 bp, Homo sapien
tcggtacttccatcaggagggtatg

SEQ ID NO: 4276282 - DNA, 25 bp, Homo sapien
gaaagagagtttctgcggtgccagc

SEQ ID NO: 4276283 - DNA, 25 bp, Homo sapien
tctgcggtgccagctgagttggtct

SEQ ID NO: 4276284 - DNA, 25 bp, Homo sapien
cttttgggcagctatactgatcact

SEQ ID NO: 4276285 - DNA, 25 bp, Homo sapien
tactgatcactgtgggaaagagagt

SEQ ID NO: 4276286 - DNA, 25 bp, Homo sapien
accatgtgggagatcagaagccttc

SEQ ID NO: 4276287 - DNA, 25 bp, Homo sapien
cataaggatggttgtattagtcaag

SEQ ID NO: 4276288 - DNA, 25 bp, Homo sapien
cccaggaagagaatacaacaccaaa

SEQ ID NO: 4276289 - DNA, 25 bp, Homo sapien
tatagatatagatgccctgagagaa

SEQ ID NO: 4276290 - DNA, 25 bp, Homo sapien
ctaacgggcagtagagtgtccggct

SEQ ID NO: 4276291 - DNA, 25 bp, Homo sapien
gctgaagcctggtttaacacgaaag

SEQ ID NO: 4276292 - DNA, 25 bp, Homo sapien
tatctgcgggtacagcgatgaacag

SEQ ID NO: 4276293 - DNA, 25 bp, Homo sapien
tcatacccctgaccattcgtgcgtg

SEQ ID NO: 4276294 - DNA, 25 bp, Homo sapien
aaatcttccggctacacttcaggca

SEQ ID NO: 4276295 - DNA, 25 bp, Homo sapien
cattttaatcggaccaactgcagct

SEQ ID NO: 4276296 - DNA, 25 bp, Homo sapien
ttaccacgagatgtctgggccgcag

SEQ ID NO: 4276297 - DNA, 25 bp, Homo sapien
gcagttgagtctagaatggcggcct

SEQ ID NO: 4276298 - DNA, 25 bp, Homo sapien
tcactggtgctacaatatgtaactg

SEQ ID NO: 4276299 - DNA, 25 bp, Homo sapien
tgtttgctaatctttgtccctcaca

SEQ ID NO: 4276300 - DNA, 25 bp, Homo sapien
gacctcagtgctttgaattcactgg

SEQ ID NO: 4276301 - DNA, 25 bp, Homo sapien
taactgtggttaattgccttgtaaa

SEQ ID NO: 4276302 - DNA, 25 bp, Homo sapien
tggcctaattttagaataccacgga

SEQ ID NO: 4276303 - DNA, 25 bp, Homo sapien
gacaacaggaagtcaacacagcaga

SEQ ID NO: 4276304 - DNA, 25 bp, Homo sapien
cagagagtggtgtggacaacccaga

SEQ ID NO: 4276305 - DNA, 25 bp, Homo sapien
gctttgatgaagacaacaggaagtc

SEQ ID NO: 4276306 - DNA, 25 bp, Homo sapien
gttcttgcaccgtcaggccttcctt

SEQ ID NO: 4276307 - DNA, 25 bp, Homo sapien
ggtgacacaggatctgtctttcttc

SEQ ID NO: 4276308 - DNA, 25 bp, Homo sapien
tggattcaaagagcttcaaccgttc

SEQ ID NO: 4276309 - DNA, 25 bp, Homo sapien
ttcttcaagaagtcagggttgcttt

SEQ ID NO: 4276310 - DNA, 25 bp, Homo sapien
gagggagctaatctcctgtttcagg

SEQ ID NO: 4276311 - DNA, 25 bp, Homo sapien
agggagctaatctcctgtttcaggt

SEQ ID NO: 4276312 - DNA, 25 bp, Homo sapien
gggagctaatctcctgtttcaggta

SEQ ID NO: 4276313 - DNA, 25 bp, Homo sapien
ggcatccttgccctgtgcaaggggt

SEQ ID NO: 4276314 - DNA, 25 bp, Homo sapien
tgccctgtgcaaggggtgacccagt

SEQ ID NO: 4276315 - DNA, 25 bp, Homo sapien
cttgccctgtgcaaggggtgaccca

SEQ ID NO: 4276316 - DNA, 25 bp, Homo sapien
tccttgccctgtgcaaggggtgacc

SEQ ID NO: 4276317 - DNA, 25 bp, Homo sapien
cagatgggcattctccaggcacttc

SEQ ID NO: 4276318 - DNA, 25 bp, Homo sapien
aacatccgagttgacgctgctgatc

SEQ ID NO: 4276319 - DNA, 25 bp, Homo sapien
agcagcgtccgcaaccgtgtgatct

SEQ ID NO: 4276320 - DNA, 25 bp, Homo sapien
tcccggtgggcgttcttcatggctt

SEQ ID NO: 4276321 - DNA, 25 bp, Homo sapien
gtggcctgcagcatgtagccctcac

SEQ ID NO: 4276322 - DNA, 25 bp, Homo sapien
tgcaaaccctcacttgcacgtggcc

SEQ ID NO: 4276323 - DNA, 25 bp, Homo sapien
tcacttgcacgtggcctgcagcatg

SEQ ID NO: 4276324 - DNA, 25 bp, Homo sapien
cacgtggcctgcagcatgtagccct

SEQ ID NO: 4276325 - DNA, 25 bp, Homo sapien
gggcgctctgctcccggcccagggc

SEQ ID NO: 4276326 - DNA, 25 bp, Homo sapien
cgctctgctcccggcccagggccac

SEQ ID NO: 4276327 - DNA, 25 bp, Homo sapien
gcgctctgctcccggcccagggcca

SEQ ID NO: 4276328 - DNA, 25 bp, Homo sapien
ggcgctctgctcccggcccagggcc

SEQ ID NO: 4276329 - DNA, 25 bp, Homo sapien
gcagagaggtcagctcgtgtgtgga

SEQ ID NO: 4276330 - DNA, 25 bp, Homo sapien
catcttcagaagacaggtggacggg

SEQ ID NO: 4276331 - DNA, 25 bp, Homo sapien
gtcacccccatcttcagaagacagg

SEQ ID NO: 4276332 - DNA, 25 bp, Homo sapien
gtggtctccacctgatgccaccgct

SEQ ID NO: 4276333 - DNA, 25 bp, Homo sapien
ggctccgcctcagggcgcaggggct

SEQ ID NO: 4276334 - DNA, 25 bp, Homo sapien
cgcctccgtgcacgctcccgctcca

SEQ ID NO: 4276335 - DNA, 25 bp, Homo sapien
tcccgcctccgtgcacgctcccgct

SEQ ID NO: 4276336 - DNA, 25 bp, Homo sapien
cctgctggatgggacggaactcagc

SEQ ID NO: 4276337 - DNA, 25 bp, Homo sapien
tctcaggctttgatcggcgaggaca

SEQ ID NO: 4276338 - DNA, 25 bp, Homo sapien
gaactggatactctgtgacatcgta

SEQ ID NO: 4276339 - DNA, 25 bp, Homo sapien
ggtctggatccagttccgccgaatc

SEQ ID NO: 4276340 - DNA, 25 bp, Homo sapien
tcttgcttctcagtaggcctcgggc

SEQ ID NO: 4276341 - DNA, 25 bp, Homo sapien
aaattcagcaggtcgggcgtcacgg

SEQ ID NO: 4276342 - DNA, 25 bp, Homo sapien
cttgaaattcagcaggtcgggcgtc

SEQ ID NO: 4276343 - DNA, 25 bp, Homo sapien
ggtcgggcgtcacggagggctctgt

SEQ ID NO: 4276344 - DNA, 25 bp, Homo sapien
gggcgtcacggagggctctgtggac

SEQ ID NO: 4276345 - DNA, 25 bp, Homo sapien
tcggtgtggagacgggggaagccga

SEQ ID NO: 4276346 - DNA, 25 bp, Homo sapien
cggtgtggagacgggggaagccgag

SEQ ID NO: 4276347 - DNA, 25 bp, Homo sapien
tgtggagacgggggaagccgaggcg

SEQ ID NO: 4276348 - DNA, 25 bp, Homo sapien
gtgtggagacgggggaagccgaggc

SEQ ID NO: 4276349 - DNA, 25 bp, Homo sapien
tgcttgctagggaacgcccttttct

SEQ ID NO: 4276350 - DNA, 25 bp, Homo sapien
tcctgcttgctagggaacgcccttt

SEQ ID NO: 4276351 - DNA, 25 bp, Homo sapien
gtcctgcttgctagggaacgccctt

SEQ ID NO: 4276352 - DNA, 25 bp, Homo sapien
aagtcctgcttgctagggaacgccc

SEQ ID NO: 4276353 - DNA, 25 bp, Homo sapien
aatgtccaaggcctcaaacttttca

SEQ ID NO: 4276354 - DNA, 25 bp, Homo sapien
caaggcctcaaacttttcaatcacc

SEQ ID NO: 4276355 - DNA, 25 bp, Homo sapien
ggactttgcggccacagtccatgcg

SEQ ID NO: 4276356 - DNA, 25 bp, Homo sapien
tgcggtcgctactcatggcgctctc

SEQ ID NO: 4276357 - DNA, 25 bp, Homo sapien
ctgccagagtgtggacttggtggtg

SEQ ID NO: 4276358 - DNA, 25 bp, Homo sapien
tttcggagaccggtgcactgagttg

SEQ ID NO: 4276359 - DNA, 25 bp, Homo sapien
ttcggagaccggtgcactgagttgt

SEQ ID NO: 4276360 - DNA, 25 bp, Homo sapien
actgtcgctgccatttcggagaccg

SEQ ID NO: 4276361 - DNA, 25 bp, Homo sapien
ccatttcggagaccggtgcactgag

SEQ ID NO: 4276362 - DNA, 25 bp, Homo sapien
tcctggtacatgagggaacccacga

SEQ ID NO: 4276363 - DNA, 25 bp, Homo sapien
gagtactacagagcgtgcattcctg

SEQ ID NO: 4276364 - DNA, 25 bp, Homo sapien
gaatacgcacatggtggcactataa

SEQ ID NO: 4276365 - DNA, 25 bp, Homo sapien
tcagataaatcacacgggttagaga

SEQ ID NO: 4276366 - DNA, 25 bp, Homo sapien
cttggctcacttcaatctccagctc

SEQ ID NO: 4276367 - DNA, 25 bp, Homo sapien
ttggctcacttcaatctccagctcc

SEQ ID NO: 4276368 - DNA, 25 bp, Homo sapien
ggctcacttcaatctccagctcccg

SEQ ID NO: 4276369 - DNA, 25 bp, Homo sapien
ctcacttcaatctccagctcccgag

SEQ ID NO: 4276370 - DNA, 25 bp, Homo sapien
ttaagtttcttgatgtagtggcagt

SEQ ID NO: 4276371 - DNA, 25 bp, Homo sapien
tttcttgatgtagtggcagtagtct

SEQ ID NO: 4276372 - DNA, 25 bp, Homo sapien
gtttcttgatgtagtggcagtagtc

SEQ ID NO: 4276373 - DNA, 25 bp, Homo sapien
aagtttcttgatgtagtggcagtag

SEQ ID NO: 4276374 - DNA, 25 bp, Homo sapien
ctcgtagctgctcgcttggaccagg

SEQ ID NO: 4276375 - DNA, 25 bp, Homo sapien
agcgtgtgggagacgcaagccagga

SEQ ID NO: 4276376 - DNA, 25 bp, Homo sapien
tccagtctctgactcctcgtagctg

SEQ ID NO: 4276377 - DNA, 25 bp, Homo sapien
tcgggccgggttctgggagcgtgtg

SEQ ID NO: 4276378 - DNA, 25 bp, Homo sapien
gccgtggtgacagcactgtgtcgtc

SEQ ID NO: 4276379 - DNA, 25 bp, Homo sapien
tggtgacagcactgtgtcgtccccg

SEQ ID NO: 4276380 - DNA, 25 bp, Homo sapien
ctggccgtggtgacagcactgtgtc

SEQ ID NO: 4276381 - DNA, 25 bp, Homo sapien
gtgacagcactgtgtcgtccccgct

SEQ ID NO: 4276382 - DNA, 25 bp, Homo sapien
gagatttgtgggttagagatctgca

SEQ ID NO: 4276383 - DNA, 25 bp, Homo sapien
gatctgcagggccttatcagtcctc

SEQ ID NO: 4276384 - DNA, 25 bp, Homo sapien
catacattcactggctgtctgagat

SEQ ID NO: 4276385 - DNA, 25 bp, Homo sapien
ttctgtacagttgcctagatacccc

SEQ ID NO: 4276386 - DNA, 25 bp, Homo sapien
ggcatttcctatccaatcagacaga

SEQ ID NO: 4276387 - DNA, 25 bp, Homo sapien
catttcctatccaatcagacagaag

SEQ ID NO: 4276388 - DNA, 25 bp, Homo sapien
gggcatttcctatccaatcagacag

SEQ ID NO: 4276389 - DNA, 25 bp, Homo sapien
caggatttctgagggcatttcctat

SEQ ID NO: 4276390 - DNA, 25 bp, Homo sapien
tcaatgtgagatttggaaggaacat

SEQ ID NO: 4276391 - DNA, 25 bp, Homo sapien
caagagcaaggcagagggataccac

SEQ ID NO: 4276392 - DNA, 25 bp, Homo sapien
caagaggatgacgataagccattca

SEQ ID NO: 4276393 - DNA, 25 bp, Homo sapien
ggacagaaccaagaggatgacgata

SEQ ID NO: 4276394 - DNA, 25 bp, Homo sapien
gctcagcctaaattctgccttttta

SEQ ID NO: 4276395 - DNA, 25 bp, Homo sapien
ccagggctcagcctaaattctgcct

SEQ ID NO: 4276396 - DNA, 25 bp, Homo sapien
tctcctgcttgcatacattgtaaat

SEQ ID NO: 4276397 - DNA, 25 bp, Homo sapien
tcatctcctgcttgcatacattgta

SEQ ID NO: 4276398 - DNA, 25 bp, Homo sapien
gcgtgatctcagctctcagctcacc

SEQ ID NO: 4276399 - DNA, 25 bp, Homo sapien
tgatctcagctctcagctcaccgca

SEQ ID NO: 4276400 - DNA, 25 bp, Homo sapien
gacctcacaagatccacctgcctcg

SEQ ID NO: 4276401 - DNA, 25 bp, Homo sapien
acctccagctcccaggttcaagcaa

SEQ ID NO: 4276402 - DNA, 25 bp, Homo sapien
tagatatgcctactgacattgaggg

SEQ ID NO: 4276403 - DNA, 25 bp, Homo sapien
gaaactaaagtgcagcctcagtctg

SEQ ID NO: 4276404 - DNA, 25 bp, Homo sapien
ttaaggcaaagtcccgccataggcc

SEQ ID NO: 4276405 - DNA, 25 bp, Homo sapien
tatttcttgagagggctatgtgcca

SEQ ID NO: 4276406 - DNA, 25 bp, Homo sapien
ggcttttggcctgcccctctagtga

SEQ ID NO: 4276407 - DNA, 25 bp, Homo sapien
gacaagctgggtattcataaagccc

SEQ ID NO: 4276408 - DNA, 25 bp, Homo sapien
ttggcacaggtctccacaagaagcc

SEQ ID NO: 4276409 - DNA, 25 bp, Homo sapien
gaggaatccggacagtgtggcacaa

SEQ ID NO: 4276410 - DNA, 25 bp, Homo sapien
aaaggtctgctctcaaggttggtca

SEQ ID NO: 4276411 - DNA, 25 bp, Homo sapien
tacacctggtaccttcgggaattca

SEQ ID NO: 4276412 - DNA, 25 bp, Homo sapien
tgttaccacggaagcacaaaggatc

SEQ ID NO: 4276413 - DNA, 25 bp, Homo sapien
gagagattttccaccattccctgat

SEQ ID NO: 4276414 - DNA, 25 bp, Homo sapien
ctgatggccattgaggtatgcactc

SEQ ID NO: 4276415 - DNA, 25 bp, Homo sapien
actccagtataggttttctgatggc

SEQ ID NO: 4276416 - DNA, 25 bp, Homo sapien
tgttccatcctaatgtatagccaga

SEQ ID NO: 4276417 - DNA, 25 bp, Homo sapien
ccattgaggtatgcactctgaaagc

SEQ ID NO: 4276418 - DNA, 25 bp, Homo sapien
gccactggcaactggtggttcttac

SEQ ID NO: 4276419 - DNA, 25 bp, Homo sapien
gggcacaaactgagtgacaaaactg

SEQ ID NO: 4276420 - DNA, 25 bp, Homo sapien
cagtggtgagggtgcttcaagttct

SEQ ID NO: 4276421 - DNA, 25 bp, Homo sapien
agaatctcagggcacaaactgagtg

SEQ ID NO: 4276422 - DNA, 25 bp, Homo sapien
cagctgacaactctttggttacatg

SEQ ID NO: 4276423 - DNA, 25 bp, Homo sapien
tcattcagacgtgaaggtcactccc

SEQ ID NO: 4276424 - DNA, 25 bp, Homo sapien
ggtcactccctatcaacctcaattg

SEQ ID NO: 4276425 - DNA, 25 bp, Homo sapien
gaattgcataagttcaagaagagac

SEQ ID NO: 4276426 - DNA, 25 bp, Homo sapien
gagaccagaaaagtcacctaccagg

SEQ ID NO: 4276427 - DNA, 25 bp, Homo sapien
ttaggaggcaacaggcatcctgaga

SEQ ID NO: 4276428 - DNA, 25 bp, Homo sapien
gaggcaacaggcatcctgagaccct

SEQ ID NO: 4276429 - DNA, 25 bp, Homo sapien
taggaggcaacaggcatcctgagac

SEQ ID NO: 4276430 - DNA, 25 bp, Homo sapien
ggaggcaacaggcatcctgagaccc

SEQ ID NO: 4276431 - DNA, 25 bp, Homo sapien
cagcggccagttcttgttcgatgta

SEQ ID NO: 4276432 - DNA, 25 bp, Homo sapien
ggaacactagtacccaagggctcag

SEQ ID NO: 4276433 - DNA, 25 bp, Homo sapien
aagggctcaggagttccgcctctct

SEQ ID NO: 4276434 - DNA, 25 bp, Homo sapien
cttccggtctgaaacagcggccagt

SEQ ID NO: 4276435 - DNA, 25 bp, Homo sapien
agatgtggcttcctagagatccggg

SEQ ID NO: 4276436 - DNA, 25 bp, Homo sapien
ctgggaaaagaaacgaaccatagag

SEQ ID NO: 4276437 - DNA, 25 bp, Homo sapien
gggtgcaaccggaagtcgcagtatt

SEQ ID NO: 4276438 - DNA, 25 bp, Homo sapien
agtcgcagtattctcggctcggcca

SEQ ID NO: 4276439 - DNA, 25 bp, Homo sapien
ggcatggtccgtcgccagcttcgtg

SEQ ID NO: 4276440 - DNA, 25 bp, Homo sapien
gggaagtactgaggacagcagctcc

SEQ ID NO: 4276441 - DNA, 25 bp, Homo sapien
gttcgacgtcgtggcctcggctggg

SEQ ID NO: 4276442 - DNA, 25 bp, Homo sapien
tgtgtgtttgtggaccggtgctcct

SEQ ID NO: 4276443 - DNA, 25 bp, Homo sapien
ctgctctactcctacactcttgcct

SEQ ID NO: 4276444 - DNA, 25 bp, Homo sapien
cacagagttatgtgtccttccttgc

SEQ ID NO: 4276445 - DNA, 25 bp, Homo sapien
tagctggccgcaaaaccaagtgtct

SEQ ID NO: 4276446 - DNA, 25 bp, Homo sapien
aaactgaggcagatgtctagctggc

SEQ ID NO: 4276447 - DNA, 25 bp, Homo sapien
ttaagtctgaagctaaaatccatgc

SEQ ID NO: 4276448 - DNA, 25 bp, Homo sapien
caccgttgtgtacagtctcctctgg

SEQ ID NO: 4276449 - DNA, 25 bp, Homo sapien
gatcctcagcatggtatttactcag

SEQ ID NO: 4276450 - DNA, 25 bp, Homo sapien
gcatcctcctactgacctagtggca

SEQ ID NO: 4276451 - DNA, 25 bp, Homo sapien
gatcaggacactctccagaaggtgg

SEQ ID NO: 4276452 - DNA, 25 bp, Homo sapien
tctaggagtctcttacagtgccaat

SEQ ID NO: 4276453 - DNA, 25 bp, Homo sapien
taccatggaatacttgttactctgc

SEQ ID NO: 4276454 - DNA, 25 bp, Homo sapien
taatggtcgaaacctgtaggcaacc

SEQ ID NO: 4276455 - DNA, 25 bp, Homo sapien
gtttcttgtaaaaccacacatgtat

SEQ ID NO: 4276456 - DNA, 25 bp, Homo sapien
gacttattgatatccataacaactc

SEQ ID NO: 4276457 - DNA, 25 bp, Homo sapien
tgcagtctcagctcagtacagcctc

SEQ ID NO: 4276458 - DNA, 25 bp, Homo sapien
cagtctcagctcagtacagcctcca

SEQ ID NO: 4276459 - DNA, 25 bp, Homo sapien
ccaagttcaagtgattatcctgtct

SEQ ID NO: 4276460 - DNA, 25 bp, Homo sapien
cctcccaagttcaagtgattatcct

SEQ ID NO: 4276461 - DNA, 25 bp, Homo sapien
tagtgcaaggccaagtaacaagtga

SEQ ID NO: 4276462 - DNA, 25 bp, Homo sapien
acaagtgacagcttatatccaagtc

SEQ ID NO: 4276463 - DNA, 25 bp, Homo sapien
aagtaacaagtgacagcttatatcc

SEQ ID NO: 4276464 - DNA, 25 bp, Homo sapien
tggtcatttagtgcaaggccaagta

SEQ ID NO: 4276465 - DNA, 25 bp, Homo sapien
agagcagccgggcaagaagcttgca

SEQ ID NO: 4276466 - DNA, 25 bp, Homo sapien
cagtcaaaagcagggtgtccgggga

SEQ ID NO: 4276467 - DNA, 25 bp, Homo sapien
gggccttctgccctcgccggactca

SEQ ID NO: 4276468 - DNA, 25 bp, Homo sapien
gggcaagaagcttgcaccagggcct

SEQ ID NO: 4276469 - DNA, 25 bp, Homo sapien
gggtgcctgcccctgactgccttac

SEQ ID NO: 4276470 - DNA, 25 bp, Homo sapien
tgcttagcggatgataagcagaggc

SEQ ID NO: 4276471 - DNA, 25 bp, Homo sapien
ttttactttcatagtgcagcgtggg

SEQ ID NO: 4276472 - DNA, 25 bp, Homo sapien
ttacacatgggcctcggccgtgctt

SEQ ID NO: 4276473 - DNA, 25 bp, Homo sapien
tgaaagaataggtgcccacggtcat

SEQ ID NO: 4276474 - DNA, 25 bp, Homo sapien
gcaggatggatggtctctggtccca

SEQ ID NO: 4276475 - DNA, 25 bp, Homo sapien
taggcctttgaaagaataggtgccc

SEQ ID NO: 4276476 - DNA, 25 bp, Homo sapien
cctggtgggcaaagctaggcctttg

SEQ ID NO: 4276477 - DNA, 25 bp, Homo sapien
gacctcctagaacagcgtccttctt

SEQ ID NO: 4276478 - DNA, 25 bp, Homo sapien
tcctagaacagcgtccttctttcct

SEQ ID NO: 4276479 - DNA, 25 bp, Homo sapien
ctcctggacctcctagaacagcgtc

SEQ ID NO: 4276480 - DNA, 25 bp, Homo sapien
ctggacctcctagaacagcgtcctt

SEQ ID NO: 4276481 - DNA, 25 bp, Homo sapien
cactcttgccacactacaaaaaggg

SEQ ID NO: 4276482 - DNA, 25 bp, Homo sapien
ccatgctctgaaaccatagtataca

SEQ ID NO: 4276483 - DNA, 25 bp, Homo sapien
tgtaagtactgtgcttcctatccca

SEQ ID NO: 4276484 - DNA, 25 bp, Homo sapien
agatatttcaggaagctcactggtg

SEQ ID NO: 4276485 - DNA, 25 bp, Homo sapien
gagttttgcaaatcatctgagatga

SEQ ID NO: 4276486 - DNA, 25 bp, Homo sapien
gagcatgtcctgaagggcccctcat

SEQ ID NO: 4276487 - DNA, 25 bp, Homo sapien
gcagagcatgtcctgaagggcccct

SEQ ID NO: 4276488 - DNA, 25 bp, Homo sapien
tctgagatgacccaaccagtcagag

SEQ ID NO: 4276489 - DNA, 25 bp, Homo sapien
gatgttgcaactgtaattcacctca

SEQ ID NO: 4276490 - DNA, 25 bp, Homo sapien
tatctcatgctggaattgacctaga

SEQ ID NO: 4276491 - DNA, 25 bp, Homo sapien
ctaaaattgaccctctagtgttggg

SEQ ID NO: 4276492 - DNA, 25 bp, Homo sapien
tgtgacggacgccatgcagtttgag

SEQ ID NO: 4276493 - DNA, 25 bp, Homo sapien
tcatcatagatttgccagtaaacaa

SEQ ID NO: 4276494 - DNA, 25 bp, Homo sapien
gatttgccagtaaacaaataatgca

SEQ ID NO: 4276495 - DNA, 25 bp, Homo sapien
atgccctcttctgaaatacccatga

SEQ ID NO: 4276496 - DNA, 25 bp, Homo sapien
caatgccctcttctgaaatacccat

SEQ ID NO: 4276497 - DNA, 25 bp, Homo sapien
gaacaaacctcgagtgtctccttcc

SEQ ID NO: 4276498 - DNA, 25 bp, Homo sapien
gctaaactccctactgcaaattttc

SEQ ID NO: 4276499 - DNA, 25 bp, Homo sapien
gatttttgcaacctggtcatccatg

SEQ ID NO: 4276500 - DNA, 25 bp, Homo sapien
tgaagtcatgaacaaacctcgagtg

SEQ ID NO: 4276501 - DNA, 25 bp, Homo sapien
ttcaacaatatagtcaggtccagcc

SEQ ID NO: 4276502 - DNA, 25 bp, Homo sapien
cagctatggtaaaacgggacatgcc

SEQ ID NO: 4276503 - DNA, 25 bp, Homo sapien
tcagcacttgtagacttagcactca

SEQ ID NO: 4276504 - DNA, 25 bp, Homo sapien
tccaggtcaattactcagcatggcc

SEQ ID NO: 4276505 - DNA, 25 bp, Homo sapien
ggccctaacccaagtagccagctga

SEQ ID NO: 4276506 - DNA, 25 bp, Homo sapien
taaggcttgcactctgaccaaaggc

SEQ ID NO: 4276507 - DNA, 25 bp, Homo sapien
acagtgaggcctgaactccggctga

SEQ ID NO: 4276508 - DNA, 25 bp, Homo sapien
ttctttggtgcacgataaggcttgc

SEQ ID NO: 4276509 - DNA, 25 bp, Homo sapien
gcaacacctgtggaaactctcttcc

SEQ ID NO: 4276510 - DNA, 25 bp, Homo sapien
ccccgctagggcttctctaaacctg

SEQ ID NO: 4276511 - DNA, 25 bp, Homo sapien
cccgctagggcttctctaaacctgg

SEQ ID NO: 4276512 - DNA, 25 bp, Homo sapien
aacacctgtggaaactctcttcctt

SEQ ID NO: 4276513 - DNA, 25 bp, Homo sapien
cgtaagttgtgacttgtattttgac

SEQ ID NO: 4276514 - DNA, 25 bp, Homo sapien
ctttcgtaagttgtgacttgtattt

SEQ ID NO: 4276515 - DNA, 25 bp, Homo sapien
tccctgtgaattctcgaatgtgaaa

SEQ ID NO: 4276516 - DNA, 25 bp, Homo sapien
ttctcgaatgtgaaatactttttga

SEQ ID NO: 4276517 - DNA, 25 bp, Homo sapien
ttatcaaattctttacctttctggc

SEQ ID NO: 4276518 - DNA, 25 bp, Homo sapien
cttagattaaagaagttatcaaatt

SEQ ID NO: 4276519 - DNA, 25 bp, Homo sapien
atcaaattctttacctttctggctt

SEQ ID NO: 4276520 - DNA, 25 bp, Homo sapien
tagattaaagaagttatcaaattct

SEQ ID NO: 4276521 - DNA, 25 bp, Homo sapien
gctggccttatatttctagtcctcg

SEQ ID NO: 4276522 - DNA, 25 bp, Homo sapien
tatatttctagtcctcgtcctcagt

SEQ ID NO: 4276523 - DNA, 25 bp, Homo sapien
atttctgctggccttatatttctag

SEQ ID NO: 4276524 - DNA, 25 bp, Homo sapien
ttctagtcctcgtcctcagtatctc

SEQ ID NO: 4276525 - DNA, 25 bp, Homo sapien
aagaaacactgccaccgcgacgcgc

SEQ ID NO: 4276526 - DNA, 25 bp, Homo sapien
gaaacactgccaccgcgacgcgcct

SEQ ID NO: 4276527 - DNA, 25 bp, Homo sapien
cactgccaccgcgacgcgcctgccc

SEQ ID NO: 4276528 - DNA, 25 bp, Homo sapien
cccgcacacccaagaaacactgcca

SEQ ID NO: 4276529 - DNA, 25 bp, Homo sapien
tgggtctcctacatctgacctatcc

SEQ ID NO: 4276530 - DNA, 25 bp, Homo sapien
gggtctcctacatctgacctatcca

SEQ ID NO: 4276531 - DNA, 25 bp, Homo sapien
ctgggtctcctacatctgacctatc

SEQ ID NO: 4276532 - DNA, 25 bp, Homo sapien
ggtctcctacatctgacctatccat

SEQ ID NO: 4276533 - DNA, 25 bp, Homo sapien
aagtcctgcctagtcttcaaaagcc

SEQ ID NO: 4276534 - DNA, 25 bp, Homo sapien
tgcatttgcccttatattttctatg

SEQ ID NO: 4276535 - DNA, 25 bp, Homo sapien
tgttttcaccagagtaaattgaacc

SEQ ID NO: 4276536 - DNA, 25 bp, Homo sapien
ggcaaaagtcctgcctagtcttcaa

SEQ ID NO: 4276537 - DNA, 25 bp, Homo sapien
gtgcatctgcagattactgtgcgac

SEQ ID NO: 4276538 - DNA, 25 bp, Homo sapien
ttactgtgcgacagatataccgcag

SEQ ID NO: 4276539 - DNA, 25 bp, Homo sapien
tctgcagattactgtgcgacagata

SEQ ID NO: 4276540 - DNA, 25 bp, Homo sapien
tactgtgcgacagatataccgcagg

SEQ ID NO: 4276541 - DNA, 25 bp, Homo sapien
aatatacacgggtcatggcatcgaa

SEQ ID NO: 4276542 - DNA, 25 bp, Homo sapien
gaatgaaatatacacgggtcatggc

SEQ ID NO: 4276543 - DNA, 25 bp, Homo sapien
cgtggaggaatgaaatatacacggg

SEQ ID NO: 4276544 - DNA, 25 bp, Homo sapien
tatacacgggtcatggcatcgaaac

SEQ ID NO: 4276545 - DNA, 25 bp, Homo sapien
agagtttccggtagtcctcttgtgc

SEQ ID NO: 4276546 - DNA, 25 bp, Homo sapien
gagtttccggtagtcctcttgtgca

SEQ ID NO: 4276547 - DNA, 25 bp, Homo sapien
tttcccttcaagaagggcttctgct

SEQ ID NO: 4276548 - DNA, 25 bp, Homo sapien
ttctgcttcataacggtccaccact

SEQ ID NO: 4276549 - DNA, 25 bp, Homo sapien
gtgccttcaggtttcccttcaagaa

SEQ ID NO: 4276550 - DNA, 25 bp, Homo sapien
ccaccactccccagtaacagggatt

SEQ ID NO: 4276551 - DNA, 25 bp, Homo sapien
ctccgtgattgcaaacacagggtgg

SEQ ID NO: 4276552 - DNA, 25 bp, Homo sapien
ccgtgattgcaaacacagggtggtt

SEQ ID NO: 4276553 - DNA, 25 bp, Homo sapien
acagggtggttgtatcctcttccga

SEQ ID NO: 4276554 - DNA, 25 bp, Homo sapien
gtggttgtatcctcttccgagtcac

SEQ ID NO: 4276555 - DNA, 25 bp, Homo sapien
acttgtggaattgcagaactgtccc

SEQ ID NO: 4276556 - DNA, 25 bp, Homo sapien
ctttggtcccagtttatataatgga

SEQ ID NO: 4276557 - DNA, 25 bp, Homo sapien
tcattccgggagctaactttggtcc

SEQ ID NO: 4276558 - DNA, 25 bp, Homo sapien
tatttcagtcattccgggagctaac

SEQ ID NO: 4276559 - DNA, 25 bp, Homo sapien
caatactaagccgtcttgtctttct

SEQ ID NO: 4276560 - DNA, 25 bp, Homo sapien
tacttgtgcactgggcgggggatca

SEQ ID NO: 4276561 - DNA, 25 bp, Homo sapien
tctttctaagcctaacttcttcgtc

SEQ ID NO: 4276562 - DNA, 25 bp, Homo sapien
ctaagccgtcttgtctttctaagcc

SEQ ID NO: 4276563 - DNA, 25 bp, Homo sapien
tagaaaccaaagatggatcaagtgt

SEQ ID NO: 4276564 - DNA, 25 bp, Homo sapien
gaaaccaaagatggatcaagtgtat

SEQ ID NO: 4276565 - DNA, 25 bp, Homo sapien
ctgtagaaaccaaagatggatcaag

SEQ ID NO: 4276566 - DNA, 25 bp, Homo sapien
gatggatcaagtgtatcaaaaaatg

SEQ ID NO: 4276567 - DNA, 25 bp, Homo sapien
gtatcctgcaacgtctttctcagag

SEQ ID NO: 4276568 - DNA, 25 bp, Homo sapien
cctgcaacgtctttctcagagagcg

SEQ ID NO: 4276569 - DNA, 25 bp, Homo sapien
gcaacgtctttctcagagagcgact

SEQ ID NO: 4276570 - DNA, 25 bp, Homo sapien
acagtatcctgcaacgtctttctca

SEQ ID NO: 4276571 - DNA, 25 bp, Homo sapien
tgtccatgtcgtgtacagaacttac

SEQ ID NO: 4276572 - DNA, 25 bp, Homo sapien
ctgtccatgtcgtgtacagaactta

SEQ ID NO: 4276573 - DNA, 25 bp, Homo sapien
tctctctcctttgaagtccacttcg

SEQ ID NO: 4276574 - DNA, 25 bp, Homo sapien
accatagcgcctctctctcctttga

SEQ ID NO: 4276575 - DNA, 25 bp, Homo sapien
cctctctctcctttgaagtccactt

SEQ ID NO: 4276576 - DNA, 25 bp, Homo sapien
tctctcctttgaagtccacttcgag

SEQ ID NO: 4276577 - DNA, 25 bp, Homo sapien
aacaaacatttgatcagtatccaat

SEQ ID NO: 4276578 - DNA, 25 bp, Homo sapien
ctaacaaacatttgatcagtatcca

SEQ ID NO: 4276579 - DNA, 25 bp, Homo sapien
acaaacatttgatcagtatccaatg

SEQ ID NO: 4276580 - DNA, 25 bp, Homo sapien
taacaaacatttgatcagtatccaa

SEQ ID NO: 4276581 - DNA, 25 bp, Homo sapien
ctaggtcttagtagaacaggaatgt

SEQ ID NO: 4276582 - DNA, 25 bp, Homo sapien
aggtcttagtagaacaggaatgttt

SEQ ID NO: 4276583 - DNA, 25 bp, Homo sapien
tagaacaggaatgttttttcctcgc

SEQ ID NO: 4276584 - DNA, 25 bp, Homo sapien
gaacaggaatgttttttcctcgcac

SEQ ID NO: 4276585 - DNA, 25 bp, Homo sapien
cccatggagcatgtcgagagtagga

SEQ ID NO: 4276586 - DNA, 25 bp, Homo sapien
gagcatgtcgagagtaggaatctct

SEQ ID NO: 4276587 - DNA, 25 bp, Homo sapien
cgagagtaggaatctcttcgtgcaa

SEQ ID NO: 4276588 - DNA, 25 bp, Homo sapien
catgtcgagagtaggaatctcttcg

SEQ ID NO: 4276589 - DNA, 25 bp, Homo sapien
agacagacatttgtcggagttcatg

SEQ ID NO: 4276590 - DNA, 25 bp, Homo sapien
catttgtcggagttcatgttaacat

SEQ ID NO: 4276591 - DNA, 25 bp, Homo sapien
catcttctcttaagggacggttttg

SEQ ID NO: 4276592 - DNA, 25 bp, Homo sapien
gcaacatcttctcttaagggacggt

SEQ ID NO: 4276593 - DNA, 25 bp, Homo sapien
tcaactattgcccaacagaaccttt

SEQ ID NO: 4276594 - DNA, 25 bp, Homo sapien
cttgagaattatgagtggagattag

SEQ ID NO: 4276595 - DNA, 25 bp, Homo sapien
gcaatatttgtacaccatcttgaga

SEQ ID NO: 4276596 - DNA, 25 bp, Homo sapien
ggagattagaatagggagagttttc

SEQ ID NO: 4276597 - DNA, 25 bp, Homo sapien
gacttatgtgctcccgattttctct

SEQ ID NO: 4276598 - DNA, 25 bp, Homo sapien
tacacttggacttatgtgctcccga

SEQ ID NO: 4276599 - DNA, 25 bp, Homo sapien
cacttggacttatgtgctcccgatt

SEQ ID NO: 4276600 - DNA, 25 bp, Homo sapien
attcttacacttggacttatgtgct

SEQ ID NO: 4276601 - DNA, 25 bp, Homo sapien
gacttaagtccccagttgtcagcag

SEQ ID NO: 4276602 - DNA, 25 bp, Homo sapien
gacatttctctgtgctagtctgcag

SEQ ID NO: 4276603 - DNA, 25 bp, Homo sapien
tgtctgccaggagcaacagttctga

SEQ ID NO: 4276604 - DNA, 25 bp, Homo sapien
tatgcgtgtccacgaagtgtctgcc

SEQ ID NO: 4276605 - DNA, 25 bp, Homo sapien
ttctggtgccggcttaaccggcgca

SEQ ID NO: 4276606 - DNA, 25 bp, Homo sapien
tttccctgtgctggaagacgcacgc

SEQ ID NO: 4276607 - DNA, 25 bp, Homo sapien
cgaaacccgtagctgcgtgcgggaa

SEQ ID NO: 4276608 - DNA, 25 bp, Homo sapien
taagagctccttgtggtcgaccctt

SEQ ID NO: 4276609 - DNA, 25 bp, Homo sapien
gtcactggagatactcctctaggat

SEQ ID NO: 4276610 - DNA, 25 bp, Homo sapien
gagatactcctctaggataataacg

SEQ ID NO: 4276611 - DNA, 25 bp, Homo sapien
ctcctctaggataataacgatattc

SEQ ID NO: 4276612 - DNA, 25 bp, Homo sapien
tctaggataataacgatattctttc

SEQ ID NO: 4276613 - DNA, 25 bp, Homo sapien
ccaactggagtttgtttttgtatat

SEQ ID NO: 4276614 - DNA, 25 bp, Homo sapien
tacatcagataaagataggtttagg

SEQ ID NO: 4276615 - DNA, 25 bp, Homo sapien
taggtttaggtaagatagtccacat

SEQ ID NO: 4276616 - DNA, 25 bp, Homo sapien
tggttttacatctggttgcttaaac

SEQ ID NO: 4276617 - DNA, 25 bp, Homo sapien
acctagagctgccattagcctaaga

SEQ ID NO: 4276618 - DNA, 25 bp, Homo sapien
gtcaaacctggacagatgccttctg

SEQ ID NO: 4276619 - DNA, 25 bp, Homo sapien
gaggattcctaacgtcaaacctgga

SEQ ID NO: 4276620 - DNA, 25 bp, Homo sapien
ccattagcctaagaatgactgtggg

SEQ ID NO: 4276621 - DNA, 25 bp, Homo sapien
cccataaagatttacgaggatcacg

SEQ ID NO: 4276622 - DNA, 25 bp, Homo sapien
ggcagtggtcgctttgcaaaatcga

SEQ ID NO: 4276623 - DNA, 25 bp, Homo sapien
agtttcaggagaagacaccaccggc

SEQ ID NO: 4276624 - DNA, 25 bp, Homo sapien
tgacctggaagaatactcgtaatgc

SEQ ID NO: 4276625 - DNA, 25 bp, Homo sapien
ttctctatttcctaaactttctata

SEQ ID NO: 4276626 - DNA, 25 bp, Homo sapien
tctctatttcctaaactttctataa

SEQ ID NO: 4276627 - DNA, 25 bp, Homo sapien
aaaatgtgattttaatgaacactcc

SEQ ID NO: 4276628 - DNA, 25 bp, Homo sapien
ttgagcttgctgttaaacctgaata

SEQ ID NO: 4276629 - DNA, 25 bp, Homo sapien
tcttttttgagcttgctgttaaacc

SEQ ID NO: 4276630 - DNA, 25 bp, Homo sapien
tctttttgaccgagtcctgatttac

SEQ ID NO: 4276631 - DNA, 25 bp, Homo sapien
tgtcaaaagaaaggaggctactatt

SEQ ID NO: 4276632 - DNA, 25 bp, Homo sapien
accacttgaggctgttcatcttctt

SEQ ID NO: 4276633 - DNA, 25 bp, Homo sapien
caccacttgaggctgttcatcttct

SEQ ID NO: 4276634 - DNA, 25 bp, Homo sapien
ccacttgaggctgttcatcttcttt

SEQ ID NO: 4276635 - DNA, 25 bp, Homo sapien
caacactgtacttattcctgtgact

SEQ ID NO: 4276636 - DNA, 25 bp, Homo sapien
gaaatgtgagacaccgtaagagccc

SEQ ID NO: 4276637 - DNA, 25 bp, Homo sapien
tcagtttggtggatattctatcagc

SEQ ID NO: 4276638 - DNA, 25 bp, Homo sapien
gaaagcagcaagtaaaacgtactct

SEQ ID NO: 4276639 - DNA, 25 bp, Homo sapien
tcttgtttcttacactgtgcatagc

SEQ ID NO: 4276640 - DNA, 25 bp, Homo sapien
ttgtttcttacactgtgcatagctc

SEQ ID NO: 4276641 - DNA, 25 bp, Homo sapien
ctcttgtttcttacactgtgcatag

SEQ ID NO: 4276642 - DNA, 25 bp, Homo sapien
gtttcttacactgtgcatagctcat

SEQ ID NO: 4276643 - DNA, 25 bp, Homo sapien
gaaacatggcgtacttctctaaggg

SEQ ID NO: 4276644 - DNA, 25 bp, Homo sapien
tgctgacctaaccatgctcgagagt

SEQ ID NO: 4276645 - DNA, 25 bp, Homo sapien
gaagtctaacctgataacagcacag

SEQ ID NO: 4276646 - DNA, 25 bp, Homo sapien
tcaagcaaggtaaagctgggtctca

SEQ ID NO: 4276647 - DNA, 25 bp, Homo sapien
ccaagtgtattgtccatgagcaata

SEQ ID NO: 4276648 - DNA, 25 bp, Homo sapien
tgaccaagtgtattgtccatgagca

SEQ ID NO: 4276649 - DNA, 25 bp, Homo sapien
gggtgaccaagtgtattgtccatga

SEQ ID NO: 4276650 - DNA, 25 bp, Homo sapien
tgtattgtccatgagcaataatata

SEQ ID NO: 4276651 - DNA, 25 bp, Homo sapien
ccttatctggaatacgggacgacgc

SEQ ID NO: 4276652 - DNA, 25 bp, Homo sapien
tgcgcttccgaagaaacacgactgg

SEQ ID NO: 4276653 - DNA, 25 bp, Homo sapien
tcatttgatcgagtggcctgtgtcc

SEQ ID NO: 4276654 - DNA, 25 bp, Homo sapien
tccaccggaattgggttcgagcgcg

SEQ ID NO: 4276655 - DNA, 25 bp, Homo sapien
tgaagcgggccagaaacgccggctc

SEQ ID NO: 4276656 - DNA, 25 bp, Homo sapien
ttgaagcgggccagaaacgccggct

SEQ ID NO: 4276657 - DNA, 25 bp, Homo sapien
gctcggctggccgcacgtacgatac

SEQ ID NO: 4276658 - DNA, 25 bp, Homo sapien
cttgaagcgggccagaaacgccggc

SEQ ID NO: 4276659 - DNA, 25 bp, Homo sapien
gacaggttccgcgacggattcgcga

SEQ ID NO: 4276660 - DNA, 25 bp, Homo sapien
cagaggcgcttagctgtgacgtcac

SEQ ID NO: 4276661 - DNA, 25 bp, Homo sapien
aaagacagaagacaggttccgcgac

SEQ ID NO: 4276662 - DNA, 25 bp, Homo sapien
gattcgcgacgatacagaggcgctt

SEQ ID NO: 4276663 - DNA, 25 bp, Homo sapien
ctccatgcgggcgtcaacgtccgat

SEQ ID NO: 4276664 - DNA, 25 bp, Homo sapien
ccccgatgcgtaggccgggcaacat

SEQ ID NO: 4276665 - DNA, 25 bp, Homo sapien
gccgggcaacatggcggcctccatg

SEQ ID NO: 4276666 - DNA, 25 bp, Homo sapien
cgtccgatccaagcgccaaattcaa

SEQ ID NO: 4276667 - DNA, 25 bp, Homo sapien
cagctgtgattctagtgcaccacag

SEQ ID NO: 4276668 - DNA, 25 bp, Homo sapien
gaactgcctggcttcaacgttttta

SEQ ID NO: 4276669 - DNA, 25 bp, Homo sapien
gatgacattgcacaaaaacctatag

SEQ ID NO: 4276670 - DNA, 25 bp, Homo sapien
taagtgggataacaggagagatgac

SEQ ID NO: 4276671 - DNA, 25 bp, Homo sapien
ggttaatttgaaatccgtgatctag

SEQ ID NO: 4276672 - DNA, 25 bp, Homo sapien
tgaaatccgtgatctagtgatgacg

SEQ ID NO: 4276673 - DNA, 25 bp, Homo sapien
tacaccatgtgtaatctattgtgca

SEQ ID NO: 4276674 - DNA, 25 bp, Homo sapien
tctttgaagaacgactaatatgtgg

SEQ ID NO: 4276675 - DNA, 25 bp, Homo sapien
tagacaatactcaggtgtatgggta

SEQ ID NO: 4276676 - DNA, 25 bp, Homo sapien
gatgtttttcactgggtgtcgtggc

SEQ ID NO: 4276677 - DNA, 25 bp, Homo sapien
catcctgttgattgccaaatgtcat

SEQ ID NO: 4276678 - DNA, 25 bp, Homo sapien
gatatgttttagacaatactcaggt

SEQ ID NO: 4276679 - DNA, 25 bp, Homo sapien
tcatcgcagatcctcattttttcgg

SEQ ID NO: 4276680 - DNA, 25 bp, Homo sapien
attttttcggttttctgtgatgcgc

SEQ ID NO: 4276681 - DNA, 25 bp, Homo sapien
tctggcgtctttctgggtctggagg

SEQ ID NO: 4276682 - DNA, 25 bp, Homo sapien
tgtgatgcgcttgtccccatatggg

SEQ ID NO: 4276683 - DNA, 25 bp, Homo sapien
cggctaagccgcgagaagtttacct

SEQ ID NO: 4276684 - DNA, 25 bp, Homo sapien
acagcgtccacagtacccggcttgg

SEQ ID NO: 4276685 - DNA, 25 bp, Homo sapien
tcgacgtggatggactcggtgggcc

SEQ ID NO: 4276686 - DNA, 25 bp, Homo sapien
gcgcggggcccgttaggcatcttta

SEQ ID NO: 4276687 - DNA, 25 bp, Homo sapien
gtcacaggagcgtcgcgtcacgtga

SEQ ID NO: 4276688 - DNA, 25 bp, Homo sapien
tacaggttaggccggaggccgccac

SEQ ID NO: 4276689 - DNA, 25 bp, Homo sapien
gggcctgccggagcgtggcgtcaca

SEQ ID NO: 4276690 - DNA, 25 bp, Homo sapien
cgaggcgccggagagcgattcccaa

SEQ ID NO: 4276691 - DNA, 25 bp, Homo sapien
ccgtgtccgcgaccgcgtaccctga

SEQ ID NO: 4276692 - DNA, 25 bp, Homo sapien
tcaactgtctgtgcgccggcgcgtt

SEQ ID NO: 4276693 - DNA, 25 bp, Homo sapien
acctccaggcgggtgcgatgcggcg

SEQ ID NO: 4276694 - DNA, 25 bp, Homo sapien
gcttttggggcgtattcaactgtct

SEQ ID NO: 4276695 - DNA, 25 bp, Homo sapien
tttctaactcaccaccaagcaaggg

SEQ ID NO: 4276696 - DNA, 25 bp, Homo sapien
tgtaggaggcttctaaagatcttct

SEQ ID NO: 4276697 - DNA, 25 bp, Homo sapien
ccctggtgtaagttataagcaagca

SEQ ID NO: 4276698 - DNA, 25 bp, Homo sapien
gacactatgtgttcagctgctgaga

SEQ ID NO: 4276699 - DNA, 25 bp, Homo sapien
gcgagcaccaattctctgatgtgga

SEQ ID NO: 4276700 - DNA, 25 bp, Homo sapien
aatatcctcagctcggtgagtagcc

SEQ ID NO: 4276701 - DNA, 25 bp, Homo sapien
ggcattattgtgatggcgagcacca

SEQ ID NO: 4276702 - DNA, 25 bp, Homo sapien
tgcccactgagggttaagtgaagcc

SEQ ID NO: 4276703 - DNA, 25 bp, Homo sapien
agaggttgggctgtggcttgacccc

SEQ ID NO: 4276704 - DNA, 25 bp, Homo sapien
gtggcttgacccctggatgagtgct

SEQ ID NO: 4276705 - DNA, 25 bp, Homo sapien
gcagaggttgggctgtggcttgacc

SEQ ID NO: 4276706 - DNA, 25 bp, Homo sapien
tgtggcttgacccctggatgagtgc

SEQ ID NO: 4276707 - DNA, 25 bp, Homo sapien
tatcctagggcgatccagttgtgca

SEQ ID NO: 4276708 - DNA, 25 bp, Homo sapien
tgcagcagtgttctaccggaagtgt

SEQ ID NO: 4276709 - DNA, 25 bp, Homo sapien
gacggaccagctggaaagatcatga

SEQ ID NO: 4276710 - DNA, 25 bp, Homo sapien
agcaccacttggctagacggaccag

SEQ ID NO: 4276711 - DNA, 25 bp, Homo sapien
tggccccaagtcttcttcatacatt

SEQ ID NO: 4276712 - DNA, 25 bp, Homo sapien
tctctggccccaagtcttcttcata

SEQ ID NO: 4276713 - DNA, 25 bp, Homo sapien
ctctcctgagtctgatctctggccc

SEQ ID NO: 4276714 - DNA, 25 bp, Homo sapien
ctggccccaagtcttcttcatacat

SEQ ID NO: 4276715 - DNA, 25 bp, Homo sapien
gcaggtcagccattctcaaatccac

SEQ ID NO: 4276716 - DNA, 25 bp, Homo sapien
tgagtccccccagacatctgcaggt

SEQ ID NO: 4276717 - DNA, 25 bp, Homo sapien
atctgcaggtcagccattctcaaat

SEQ ID NO: 4276718 - DNA, 25 bp, Homo sapien
ctgcaggtcagccattctcaaatcc

SEQ ID NO: 4276719 - DNA, 25 bp, Homo sapien
tcagttagaggtgagagccttatca

SEQ ID NO: 4276720 - DNA, 25 bp, Homo sapien
gctctggcaggcaatttacaattct

SEQ ID NO: 4276721 - DNA, 25 bp, Homo sapien
tgtctagtaggttcaatgtcagggc

SEQ ID NO: 4276722 - DNA, 25 bp, Homo sapien
ccagtggtgtctgtcaactgctaca

SEQ ID NO: 4276723 - DNA, 25 bp, Homo sapien
gcagattcaagagccagcaggtcaa

SEQ ID NO: 4276724 - DNA, 25 bp, Homo sapien
gagtcatggcctcaaaaatcagggc

SEQ ID NO: 4276725 - DNA, 25 bp, Homo sapien
tagccttgtctgatgctgtggagcc

SEQ ID NO: 4276726 - DNA, 25 bp, Homo sapien
gatttcgaagccacagagtctctcc

SEQ ID NO: 4276727 - DNA, 25 bp, Homo sapien
tgttatgctgtgaatggtcaccaca

SEQ ID NO: 4276728 - DNA, 25 bp, Homo sapien
tctgaggctaagcagaatgttatgc

SEQ ID NO: 4276729 - DNA, 25 bp, Homo sapien
tctctccctgtaagatctcatctgg

SEQ ID NO: 4276730 - DNA, 25 bp, Homo sapien
ggctcagggttggacaggttaatta

SEQ ID NO: 4276731 - DNA, 25 bp, Homo sapien
gaacactgggccctttgagcaatta

SEQ ID NO: 4276732 - DNA, 25 bp, Homo sapien
caagggccatgtggttttgcagaca

SEQ ID NO: 4276733 - DNA, 25 bp, Homo sapien
taatggcctttacagctgactcggg

SEQ ID NO: 4276734 - DNA, 25 bp, Homo sapien
gatcgttgcccttcacagagtgtcc

SEQ ID NO: 4276735 - DNA, 25 bp, Homo sapien
aatgggccaaagagaggaacaaagg

SEQ ID NO: 4276736 - DNA, 25 bp, Homo sapien
gaaatgggccaaagagaggaacaaa

SEQ ID NO: 4276737 - DNA, 25 bp, Homo sapien
gggccaaagagaggaacaaaggcac

SEQ ID NO: 4276738 - DNA, 25 bp, Homo sapien
tgggccaaagagaggaacaaaggca

SEQ ID NO: 4276739 - DNA, 25 bp, Homo sapien
ctgcttcagcaaccactggaatggg

SEQ ID NO: 4276740 - DNA, 25 bp, Homo sapien
ctgttgggctttgtgcagaagatgc

SEQ ID NO: 4276741 - DNA, 25 bp, Homo sapien
tgctcagaccttcagcagtggtcac

SEQ ID NO: 4276742 - DNA, 25 bp, Homo sapien
gggtttaggagcaccagaacgctgc

SEQ ID NO: 4276743 - DNA, 25 bp, Homo sapien
ggggtgaatagagggcagactcatc

SEQ ID NO: 4276744 - DNA, 25 bp, Homo sapien
caaatggggtgaatagagggcagac

SEQ ID NO: 4276745 - DNA, 25 bp, Homo sapien
aatggggtgaatagagggcagactc

SEQ ID NO: 4276746 - DNA, 25 bp, Homo sapien
cttcaaatggggtgaatagagggca

SEQ ID NO: 4276747 - DNA, 25 bp, Homo sapien
tctcgctcagtgaagactccagtgt

SEQ ID NO: 4276748 - DNA, 25 bp, Homo sapien
tttcagagacaagatgggcaccaat

SEQ ID NO: 4276749 - DNA, 25 bp, Homo sapien
tcatgcgagtggttagggagtcccc

SEQ ID NO: 4276750 - DNA, 25 bp, Homo sapien
ccaagcgagtggctaagggaagcac

SEQ ID NO: 4276751 - DNA, 25 bp, Homo sapien
tttcggtgtctgacagcgatgtcac

SEQ ID NO: 4276752 - DNA, 25 bp, Homo sapien
atcctccattgtttcggtgtctgac

SEQ ID NO: 4276753 - DNA, 25 bp, Homo sapien
tccacagagtcctcgtcctttgtct

SEQ ID NO: 4276754 - DNA, 25 bp, Homo sapien
ccattgtttcggtgtctgacagcga

SEQ ID NO: 4276755 - DNA, 25 bp, Homo sapien
cactggggatctctggctgacacgg

SEQ ID NO: 4276756 - DNA, 25 bp, Homo sapien
actggggatctctggctgacacggt

SEQ ID NO: 4276757 - DNA, 25 bp, Homo sapien
tcactggggatctctggctgacacg

SEQ ID NO: 4276758 - DNA, 25 bp, Homo sapien
gctggttctttcgtttgaggcgctc

SEQ ID NO: 4276759 - DNA, 25 bp, Homo sapien
ggttctttcgtttgaggcgctcgat

SEQ ID NO: 4276760 - DNA, 25 bp, Homo sapien
tgggctggttctttcgtttgaggcg

SEQ ID NO: 4276761 - DNA, 25 bp, Homo sapien
tgaaccagttcagggagaagtcccc

SEQ ID NO: 4276762 - DNA, 25 bp, Homo sapien
ccaacatgcattaggcagccggagg

SEQ ID NO: 4276763 - DNA, 25 bp, Homo sapien
tgaagaagcgggtgctcgtacagca

SEQ ID NO: 4276764 - DNA, 25 bp, Homo sapien
caaacagcatgcgaggtgaagaagc

SEQ ID NO: 4276765 - DNA, 25 bp, Homo sapien
tttggccactcccaccagggtagat

SEQ ID NO: 4276766 - DNA, 25 bp, Homo sapien
tgcctctgggtgtcggctgcaactc

SEQ ID NO: 4276767 - DNA, 25 bp, Homo sapien
tatgcctcctgatacggtgcaacga

SEQ ID NO: 4276768 - DNA, 25 bp, Homo sapien
caacgaggacacattgcttcagcag

SEQ ID NO: 4276769 - DNA, 25 bp, Homo sapien
ggaagaaacattgcacgtaccacct

SEQ ID NO: 4276770 - DNA, 25 bp, Homo sapien
tagaacatttgtctgagtggttact

SEQ ID NO: 4276771 - DNA, 25 bp, Homo sapien
ttagaacatttgtctgagtggttac

SEQ ID NO: 4276772 - DNA, 25 bp, Homo sapien
agaacatttgtctgagtggttactt

SEQ ID NO: 4276773 - DNA, 25 bp, Homo sapien
gaacatttgtctgagtggttacttt

SEQ ID NO: 4276774 - DNA, 25 bp, Homo sapien
caagtctaaagggaccttcatgtgg

SEQ ID NO: 4276775 - DNA, 25 bp, Homo sapien
tccaagttttaccaatgagccaatg

SEQ ID NO: 4276776 - DNA, 25 bp, Homo sapien
tgtagacttctcacacaatccaagt

SEQ ID NO: 4276777 - DNA, 25 bp, Homo sapien
cttcatgtgggtcatgagcatgtga

SEQ ID NO: 4276778 - DNA, 25 bp, Homo sapien
taacttcatagcacgagagctggga

SEQ ID NO: 4276779 - DNA, 25 bp, Homo sapien
agagctgggacatcaccatatggca

SEQ ID NO: 4276780 - DNA, 25 bp, Homo sapien
ggaaacacccaaaaatgacagactg

SEQ ID NO: 4276781 - DNA, 25 bp, Homo sapien
tggcagacccggctacagaggaaac

SEQ ID NO: 4276782 - DNA, 25 bp, Homo sapien
gaggtcttcagcagtaaagtcgaca

SEQ ID NO: 4276783 - DNA, 25 bp, Homo sapien
tcataaagtattccagacagagcct

SEQ ID NO: 4276784 - DNA, 25 bp, Homo sapien
aatgaagccaagagcccacaggatg

SEQ ID NO: 4276785 - DNA, 25 bp, Homo sapien
catgtggcatgctcccagataggca

SEQ ID NO: 4276786 - DNA, 25 bp, Homo sapien
ggcttttagcgaacgtccctctgca

SEQ ID NO: 4276787 - DNA, 25 bp, Homo sapien
tgtgcggcccctagaaggcttttag

SEQ ID NO: 4276788 - DNA, 25 bp, Homo sapien
taggtgcggtaataagtagccaagc

SEQ ID NO: 4276789 - DNA, 25 bp, Homo sapien
tatgtccgtgttagagcatgtgcgg

SEQ ID NO: 4276790 - DNA, 25 bp, Homo sapien
gctcccatctggaggtcccttggtt

SEQ ID NO: 4276791 - DNA, 25 bp, Homo sapien
tcccttccgggctgcttcttcaccc

SEQ ID NO: 4276792 - DNA, 25 bp, Homo sapien
ggccgccgctcccatctggaggtcc

SEQ ID NO: 4276793 - DNA, 25 bp, Homo sapien
ctggaggtcccttggttctactctt

SEQ ID NO: 4276794 - DNA, 25 bp, Homo sapien
ttcccatgagtgcaccaaacagtac

SEQ ID NO: 4276795 - DNA, 25 bp, Homo sapien
catccggaaatactgaggagagctc

SEQ ID NO: 4276796 - DNA, 25 bp, Homo sapien
tcctgtgaccaagccaaaagttggg

SEQ ID NO: 4276797 - DNA, 25 bp, Homo sapien
tctgaaagactgtggctacgactgg

SEQ ID NO: 4276798 - DNA, 25 bp, Homo sapien
taagggtaacacctcaagagagagc

SEQ ID NO: 4276799 - DNA, 25 bp, Homo sapien
gcaagctggttcaagagagggacca

SEQ ID NO: 4276800 - DNA, 25 bp, Homo sapien
tagattgtggatagtcggcctccca

SEQ ID NO: 4276801 - DNA, 25 bp, Homo sapien
gcccgtatcgcatgaatagcaccgt

SEQ ID NO: 4276802 - DNA, 25 bp, Homo sapien
cattcatgagaacggatgggacggt

SEQ ID NO: 4276803 - DNA, 25 bp, Homo sapien
tcagttagtagaatgggcacagcgc

SEQ ID NO: 4276804 - DNA, 25 bp, Homo sapien
tgtgtgagaattccccgatggtcaa

SEQ ID NO: 4276805 - DNA, 25 bp, Homo sapien
tgaggtaaccccagcatcatggtca

SEQ ID NO: 4276806 - DNA, 25 bp, Homo sapien
ttcccttggtctggcgtggcaaagg

SEQ ID NO: 4276807 - DNA, 25 bp, Homo sapien
tacgggtctgccttcccttggtctg

SEQ ID NO: 4276808 - DNA, 25 bp, Homo sapien
tgccttcccttggtctggcgtggca

SEQ ID NO: 4276809 - DNA, 25 bp, Homo sapien
ccttcccttggtctggcgtggcaaa

SEQ ID NO: 4276810 - DNA, 25 bp, Homo sapien
gccaaaaacggctttcatgttcatc

SEQ ID NO: 4276811 - DNA, 25 bp, Homo sapien
gtggccaaaaacggctttcatgttc

SEQ ID NO: 4276812 - DNA, 25 bp, Homo sapien
ggccaaaaacggctttcatgttcat

SEQ ID NO: 4276813 - DNA, 25 bp, Homo sapien
tggccaaaaacggctttcatgttca

SEQ ID NO: 4276814 - DNA, 25 bp, Homo sapien
ctgaggtggcctcaggacaccagga

SEQ ID NO: 4276815 - DNA, 25 bp, Homo sapien
ggcctcaggacaccaggaatcgtac

SEQ ID NO: 4276816 - DNA, 25 bp, Homo sapien
ggtggcctcaggacaccaggaatcg

SEQ ID NO: 4276817 - DNA, 25 bp, Homo sapien
cctgaggtggcctcaggacaccagg

SEQ ID NO: 4276818 - DNA, 25 bp, Homo sapien
gatggctctcaacctcatggctctg

SEQ ID NO: 4276819 - DNA, 25 bp, Homo sapien
ccagggattgaccaccttgaggttt

SEQ ID NO: 4276820 - DNA, 25 bp, Homo sapien
gaaatgcccatattgcagccaggga

SEQ ID NO: 4276821 - DNA, 25 bp, Homo sapien
tatgtaaatccccagagaaatgccc

SEQ ID NO: 4276822 - DNA, 25 bp, Homo sapien
gtgcacctgggtcccaaacatcact

SEQ ID NO: 4276823 - DNA, 25 bp, Homo sapien
aagcacagcaggataaggagaatca

SEQ ID NO: 4276824 - DNA, 25 bp, Homo sapien
gagtgcacctgggtcccaaacatca

SEQ ID NO: 4276825 - DNA, 25 bp, Homo sapien
agtgcacctgggtcccaaacatcac

SEQ ID NO: 4276826 - DNA, 25 bp, Homo sapien
ctgtggtgggtggagagaaggagct

SEQ ID NO: 4276827 - DNA, 25 bp, Homo sapien
tgtggtgggtggagagaaggagctg

SEQ ID NO: 4276828 - DNA, 25 bp, Homo sapien
tggtgggtggagagaaggagctgca

SEQ ID NO: 4276829 - DNA, 25 bp, Homo sapien
gtgggtggagagaaggagctgcact

SEQ ID NO: 4276830 - DNA, 25 bp, Homo sapien
cacgctcagtccagagggtctgtct

SEQ ID NO: 4276831 - DNA, 25 bp, Homo sapien
gatttaagtgcctcatggaaagaca

SEQ ID NO: 4276832 - DNA, 25 bp, Homo sapien
atggctcccacgcattggaaccggc

SEQ ID NO: 4276833 - DNA, 25 bp, Homo sapien
ctccatgtcctagccagaaagtaaa

SEQ ID NO: 4276834 - DNA, 25 bp, Homo sapien
atttcttccctgttcagtccatagg

SEQ ID NO: 4276835 - DNA, 25 bp, Homo sapien
ctgtcgaactgaagttaaggggctg

SEQ ID NO: 4276836 - DNA, 25 bp, Homo sapien
gaactgaagttaaggggctgcattt

SEQ ID NO: 4276837 - DNA, 25 bp, Homo sapien
catttcttccctgttcagtccatag

SEQ ID NO: 4276838 - DNA, 25 bp, Homo sapien
ggagatttaataaaatgaggttggc

SEQ ID NO: 4276839 - DNA, 25 bp, Homo sapien
caggagatttaataaaatgaggttg

SEQ ID NO: 4276840 - DNA, 25 bp, Homo sapien
gagatttaataaaatgaggttggcc

SEQ ID NO: 4276841 - DNA, 25 bp, Homo sapien
tcaggagatttaataaaatgaggtt

SEQ ID NO: 4276842 - DNA, 25 bp, Homo sapien
caccctggagcagggaggaaagcct

SEQ ID NO: 4276843 - DNA, 25 bp, Homo sapien
ggagcagggaggaaagcctcagcac

SEQ ID NO: 4276844 - DNA, 25 bp, Homo sapien
ccccactcaggtcacacacccaccc

SEQ ID NO: 4276845 - DNA, 25 bp, Homo sapien
cagggaggaaagcctcagcacatac

SEQ ID NO: 4276846 - DNA, 25 bp, Homo sapien
tcccaccatgatgagggcgtgcaag

SEQ ID NO: 4276847 - DNA, 25 bp, Homo sapien
ccaccatgatgagggcgtgcaagga

SEQ ID NO: 4276848 - DNA, 25 bp, Homo sapien
gaatcccaccatgatgagggcgtgc

SEQ ID NO: 4276849 - DNA, 25 bp, Homo sapien
aatcccaccatgatgagggcgtgca

SEQ ID NO: 4276850 - DNA, 25 bp, Homo sapien
tcaggaacacttagtcaggacaagg

SEQ ID NO: 4276851 - DNA, 25 bp, Homo sapien
ggccagctagcgattccctacagat

SEQ ID NO: 4276852 - DNA, 25 bp, Homo sapien
tccgggagtacgtggaaccagaaca

SEQ ID NO: 4276853 - DNA, 25 bp, Homo sapien
agccctgggtcaagtgagcagccac

SEQ ID NO: 4276854 - DNA, 25 bp, Homo sapien
gagctacttaggtccaacacttgga

SEQ ID NO: 4276855 - DNA, 25 bp, Homo sapien
tcaggatttgaggtcatcacccaaa

SEQ ID NO: 4276856 - DNA, 25 bp, Homo sapien
caagtgaagggcttaggtacaggca

SEQ ID NO: 4276857 - DNA, 25 bp, Homo sapien
cagagagatctttggcaggaaggca

SEQ ID NO: 4276858 - DNA, 25 bp, Homo sapien
tctggttgttctcgcctacacagtt

SEQ ID NO: 4276859 - DNA, 25 bp, Homo sapien
ggttgttctcgcctacacagttgtt

SEQ ID NO: 4276860 - DNA, 25 bp, Homo sapien
caggacgaagtacttctggttgttc

SEQ ID NO: 4276861 - DNA, 25 bp, Homo sapien
tgtaaacaggacgaagtacttctgg

SEQ ID NO: 4276862 - DNA, 25 bp, Homo sapien
cttccgaatgcaccgcttacaaaca

SEQ ID NO: 4276863 - DNA, 25 bp, Homo sapien
cggaactgacatggttacatggcta

SEQ ID NO: 4276864 - DNA, 25 bp, Homo sapien
ggcagtcattccaaacgggtacaga

SEQ ID NO: 4276865 - DNA, 25 bp, Homo sapien
aacacatacataggacggaactgac

SEQ ID NO: 4276866 - DNA, 25 bp, Homo sapien
taagatagaacctgctctcctgaag

SEQ ID NO: 4276867 - DNA, 25 bp, Homo sapien
aagctcttggctttcagctcggagg

SEQ ID NO: 4276868 - DNA, 25 bp, Homo sapien
aaaaaaaagctcttggctttcagct

SEQ ID NO: 4276869 - DNA, 25 bp, Homo sapien
gctcttggctttcagctcggaggca

SEQ ID NO: 4276870 - DNA, 25 bp, Homo sapien
aaaagctcttggctttcagctcgga

SEQ ID NO: 4276871 - DNA, 25 bp, Homo sapien
tgtcccaaatctgggttcatccaac

SEQ ID NO: 4276872 - DNA, 25 bp, Homo sapien
tgaagttcgacctcaatgagatcaa

SEQ ID NO: 4276873 - DNA, 25 bp, Homo sapien
atgctgctgaagttcgacctcaatg

SEQ ID NO: 4276874 - DNA, 25 bp, Homo sapien
ggtgcaaccttcttcggttgtccca

SEQ ID NO: 4276875 - DNA, 25 bp, Homo sapien
gaacaccaggagtgaagtcagtgcc

SEQ ID NO: 4276876 - DNA, 25 bp, Homo sapien
ggcttacagtgaaagtgactattca

SEQ ID NO: 4276877 - DNA, 25 bp, Homo sapien
aaaagataggcccagattgacatgg

SEQ ID NO: 4276878 - DNA, 25 bp, Homo sapien
agtcagtgccatcctgtgtgggccc

SEQ ID NO: 4276879 - DNA, 25 bp, Homo sapien
cttctgcctctgccctgatcatcaa

SEQ ID NO: 4276880 - DNA, 25 bp, Homo sapien
tctgcctctgccctgatcatcaaag

SEQ ID NO: 4276881 - DNA, 25 bp, Homo sapien
tgccctgatcatcaaagccctcaag

SEQ ID NO: 4276882 - DNA, 25 bp, Homo sapien
cctgatcatcaaagccctcaaggaa

SEQ ID NO: 4276883 - DNA, 25 bp, Homo sapien
agccggaaataccacctttgatgag

SEQ ID NO: 4276884 - DNA, 25 bp, Homo sapien
atgttaaacacagcggaaataccac

SEQ ID NO: 4276885 - DNA, 25 bp, Homo sapien
gtgcggtggagtgcccagctactta

SEQ ID NO: 4276886 - DNA, 25 bp, Homo sapien
gatacagcaccgacctttaaccaga

SEQ ID NO: 4276887 - DNA, 25 bp, Homo sapien
ctccactagcttctataactaattt

SEQ ID NO: 4276888 - DNA, 25 bp, Homo sapien
acaccacagtgctggctaagctctt

SEQ ID NO: 4276889 - DNA, 25 bp, Homo sapien
agtgctggctaagctcttgctgacc

SEQ ID NO: 4276890 - DNA, 25 bp, Homo sapien
gttcttgaaaaagtgcagagtgggc

SEQ ID NO: 4276891 - DNA, 25 bp, Homo sapien
gggccttgctggatcacactcacac

SEQ ID NO: 4276892 - DNA, 25 bp, Homo sapien
gacagggaaagcataggagcagctc

SEQ ID NO: 4276893 - DNA, 25 bp, Homo sapien
gaaggacagggaaagcataggagca

SEQ ID NO: 4276894 - DNA, 25 bp, Homo sapien
ggacagggaaagcataggagcagct

SEQ ID NO: 4276895 - DNA, 25 bp, Homo sapien
aggacagggaaagcataggagcagc

SEQ ID NO: 4276896 - DNA, 25 bp, Homo sapien
tggtggcaatgcagacctgagtccg

SEQ ID NO: 4276897 - DNA, 25 bp, Homo sapien
cttggtcaaactggctaactcggag

SEQ ID NO: 4276898 - DNA, 25 bp, Homo sapien
gagtccgctgagctaccttggtcaa

SEQ ID NO: 4276899 - DNA, 25 bp, Homo sapien
cctggctcagacgatgtgtggattc

SEQ ID NO: 4276900 - DNA, 25 bp, Homo sapien
agagcaagagaagtaccagcaagtc

SEQ ID NO: 4276901 - DNA, 25 bp, Homo sapien
gacaaggcgtgaatgccaggaagct

SEQ ID NO: 4276902 - DNA, 25 bp, Homo sapien
gacagtgcagagtgagtactccctg

SEQ ID NO: 4276903 - DNA, 25 bp, Homo sapien
ggtaatgcctgttcccaatacacaa

SEQ ID NO: 4276904 - DNA, 25 bp, Homo sapien
cgattctgcttcggcctcccgaata

SEQ ID NO: 4276905 - DNA, 25 bp, Homo sapien
gtgagccactgcgcccggcctaatt

SEQ ID NO: 4276906 - DNA, 25 bp, Homo sapien
caagcgattctgcttcggcctcccg

SEQ ID NO: 4276907 - DNA, 25 bp, Homo sapien
atctttagtaaagacagagtttctc

SEQ ID NO: 4276908 - DNA, 25 bp, Homo sapien
cgatgaattctttagtggcatttcc

SEQ ID NO: 4276909 - DNA, 25 bp, Homo sapien
tggcatttcctttgggcactgcccc

SEQ ID NO: 4276910 - DNA, 25 bp, Homo sapien
ggcttcaactgtaaactctcgatga

SEQ ID NO: 4276911 - DNA, 25 bp, Homo sapien
tttggggcacttgtacaccacctgc

SEQ ID NO: 4276912 - DNA, 25 bp, Homo sapien
agtttccccagatcaaaatttgcag

SEQ ID NO: 4276913 - DNA, 25 bp, Homo sapien
gattaattttctacactaaacagtg

SEQ ID NO: 4276914 - DNA, 25 bp, Homo sapien
ggctcactgactattttttggtcta

SEQ ID NO: 4276915 - DNA, 25 bp, Homo sapien
tcactggtgagcaacatgtctaaca

SEQ ID NO: 4276916 - DNA, 25 bp, Homo sapien
atccataagcaactgggagctgctg

SEQ ID NO: 4276917 - DNA, 25 bp, Homo sapien
gctgccctcaggtatttgacttgct

SEQ ID NO: 4276918 - DNA, 25 bp, Homo sapien
tcttagtgaatccataagcaactgg

SEQ ID NO: 4276919 - DNA, 25 bp, Homo sapien
tctatatttggttcttagtgaatcc

SEQ ID NO: 4276920 - DNA, 25 bp, Homo sapien
gccaaaatgccataagattctgctc

SEQ ID NO: 4276921 - DNA, 25 bp, Homo sapien
aaaatgccataagattctgctctgg

SEQ ID NO: 4276922 - DNA, 25 bp, Homo sapien
ttagcgttctttagagccaatggca

SEQ ID NO: 4276923 - DNA, 25 bp, Homo sapien
tatgcttgtgaatacttagcgttct

SEQ ID NO: 4276924 - DNA, 25 bp, Homo sapien
cttgatcagcaccagatgccctggc

SEQ ID NO: 4276925 - DNA, 25 bp, Homo sapien
ttcagagcaatgacgtgcttcccca

SEQ ID NO: 4276926 - DNA, 25 bp, Homo sapien
attcagagcaatgacgtgcttcccc

SEQ ID NO: 4276927 - DNA, 25 bp, Homo sapien
caacgggccaccagtgaggcactgt

SEQ ID NO: 4276928 - DNA, 25 bp, Homo sapien
gggtctggaaggtttcatgaaggtg

SEQ ID NO: 4276929 - DNA, 25 bp, Homo sapien
tctggaaggtttcatgaaggtgagg

SEQ ID NO: 4276930 - DNA, 25 bp, Homo sapien
cttgagacatccaacgggccaccag

SEQ ID NO: 4276931 - DNA, 25 bp, Homo sapien
tcagagctctttgttattagttcat

SEQ ID NO: 4276932 - DNA, 25 bp, Homo sapien
tagttcatggtaaggaactttgttc

SEQ ID NO: 4276933 - DNA, 25 bp, Homo sapien
gagctctttgttattagttcatggt

SEQ ID NO: 4276934 - DNA, 25 bp, Homo sapien
attagttcatggtaaggaactttgt

SEQ ID NO: 4276935 - DNA, 25 bp, Homo sapien
gtgccttaggagctcccgcttctgc

SEQ ID NO: 4276936 - DNA, 25 bp, Homo sapien
tactgggttttgcatgagatatcat

SEQ ID NO: 4276937 - DNA, 25 bp, Homo sapien
tgggttttgcatgagatatcatgtg

SEQ ID NO: 4276938 - DNA, 25 bp, Homo sapien
agtgccttaggagctcccgcttctg

SEQ ID NO: 4276939 - DNA, 25 bp, Homo sapien
gtatctggggcttagtagacagtaa

SEQ ID NO: 4276940 - DNA, 25 bp, Homo sapien
tggggcttagtagacagtaaactat

SEQ ID NO: 4276941 - DNA, 25 bp, Homo sapien
tctggggcttagtagacagtaaact

SEQ ID NO: 4276942 - DNA, 25 bp, Homo sapien
gggcttagtagacagtaaactatga

SEQ ID NO: 4276943 - DNA, 25 bp, Homo sapien
caggaaaagatgcacctcgcccaag

SEQ ID NO: 4276944 - DNA, 25 bp, Homo sapien
cacttgctgcggcctgaaacaggct

SEQ ID NO: 4276945 - DNA, 25 bp, Homo sapien
ctcgcccaagcaaagtgaaggccat

SEQ ID NO: 4276946 - DNA, 25 bp, Homo sapien
tgcacctcgcccaagcaaagtgaag

SEQ ID NO: 4276947 - DNA, 25 bp, Homo sapien
tgggctggtcaaaacaagcccagac

SEQ ID NO: 4276948 - DNA, 25 bp, Homo sapien
tggtcaaaacaagcccagacatact

SEQ ID NO: 4276949 - DNA, 25 bp, Homo sapien
agtgtgggctggtcaaaacaagccc

SEQ ID NO: 4276950 - DNA, 25 bp, Homo sapien
tgtgggctggtcaaaacaagcccag

SEQ ID NO: 4276951 - DNA, 25 bp, Homo sapien
cagccgtcacggataaaccacatgg

SEQ ID NO: 4276952 - DNA, 25 bp, Homo sapien
cacgtagtctcgagatggaatcagc

SEQ ID NO: 4276953 - DNA, 25 bp, Homo sapien
gaacacaattccgttgatgatgcta

SEQ ID NO: 4276954 - DNA, 25 bp, Homo sapien
ggaggtattctggtttccgctcaat

SEQ ID NO: 4276955 - DNA, 25 bp, Homo sapien
ttactcaagtaaccggaatgttcta

SEQ ID NO: 4276956 - DNA, 25 bp, Homo sapien
cctcactggtgagcgagaacctgtg

SEQ ID NO: 4276957 - DNA, 25 bp, Homo sapien
tatcttcaaacaacgtgggaccaaa

SEQ ID NO: 4276958 - DNA, 25 bp, Homo sapien
cagaggagctctgttttcccatgac

SEQ ID NO: 4276959 - DNA, 25 bp, Homo sapien
ggccacaggcctgaacataagcatt

SEQ ID NO: 4276960 - DNA, 25 bp, Homo sapien
ccagccaacatttagaataccgatc

SEQ ID NO: 4276961 - DNA, 25 bp, Homo sapien
tgaacataagcattttgggctctaa

SEQ ID NO: 4276962 - DNA, 25 bp, Homo sapien
ttatcgagtgggctgcatgcagtgg

SEQ ID NO: 4276963 - DNA, 25 bp, Homo sapien
aatgagttcctttggtgaccccagc

SEQ ID NO: 4276964 - DNA, 25 bp, Homo sapien
agttcctttggtgaccccagcttca

SEQ ID NO: 4276965 - DNA, 25 bp, Homo sapien
tgagttcctttggtgaccccagctt

SEQ ID NO: 4276966 - DNA, 25 bp, Homo sapien
atgagttcctttggtgaccccagct

SEQ ID NO: 4276967 - DNA, 25 bp, Homo sapien
atccaatgcccatactcccactcgg

SEQ ID NO: 4276968 - DNA, 25 bp, Homo sapien
ccactcggccatcgcaaggggttgg

SEQ ID NO: 4276969 - DNA, 25 bp, Homo sapien
ttggctttttttcgggcaactgctc

SEQ ID NO: 4276970 - DNA, 25 bp, Homo sapien
gatatcctctccgggtatccaatgc

SEQ ID NO: 4276971 - DNA, 25 bp, Homo sapien
cttccatcaagccggggtttccagt

SEQ ID NO: 4276972 - DNA, 25 bp, Homo sapien
tccatcaagccggggtttccagttc

SEQ ID NO: 4276973 - DNA, 25 bp, Homo sapien
agtgagcgagccagcgagagatatt

SEQ ID NO: 4276974 - DNA, 25 bp, Homo sapien
ccgtctgtgggacaacgctctggta

SEQ ID NO: 4276975 - DNA, 25 bp, Homo sapien
tggtaagcacccgaggcaagaggtc

SEQ ID NO: 4276976 - DNA, 25 bp, Homo sapien
taatgggacagcgttcggtcacaga

SEQ ID NO: 4276977 - DNA, 25 bp, Homo sapien
cagcttcttcacccctaccccagtt

SEQ ID NO: 4276978 - DNA, 25 bp, Homo sapien
ccagcttcttcacccctaccccagt

SEQ ID NO: 4276979 - DNA, 25 bp, Homo sapien
cccagcttcttcacccctaccccag

SEQ ID NO: 4276980 - DNA, 25 bp, Homo sapien
gaaggtgtacatcgtgcatggcgtc

SEQ ID NO: 4276981 - DNA, 25 bp, Homo sapien
gcatggcgtccaggtagctacagca

SEQ ID NO: 4276982 - DNA, 25 bp, Homo sapien
caattcagagctggcaacgtggacg

SEQ ID NO: 4276983 - DNA, 25 bp, Homo sapien
tataagattccgaacccgggcagga

SEQ ID NO: 4276984 - DNA, 25 bp, Homo sapien
gccttggtatcacagtgtagtttta

SEQ ID NO: 4276985 - DNA, 25 bp, Homo sapien
caagaaatagttgtctactccaagg

SEQ ID NO: 4276986 - DNA, 25 bp, Homo sapien
tctatggtctatttggtatggcttc

SEQ ID NO: 4276987 - DNA, 25 bp, Homo sapien
tttccattgggatatctgattgacc

SEQ ID NO: 4276988 - DNA, 25 bp, Homo sapien
cagagtttgttaagctccttccaca

SEQ ID NO: 4276989 - DNA, 25 bp, Homo sapien
ccacacaccatatagaagtagcttt

SEQ ID NO: 4276990 - DNA, 25 bp, Homo sapien
ggagccatgagtgtgtttgtagtaa

SEQ ID NO: 4276991 - DNA, 25 bp, Homo sapien
tactagaaaccactaccacgagtag

SEQ ID NO: 4276992 - DNA, 25 bp, Homo sapien
taaggcgttaggaatttatcaccaa

SEQ ID NO: 4276993 - DNA, 25 bp, Homo sapien
tatctacaggcaccatgacagtgtt

SEQ ID NO: 4276994 - DNA, 25 bp, Homo sapien
gaaggagagcgtttcaaccgtggca

SEQ ID NO: 4276995 - DNA, 25 bp, Homo sapien
aaggagctgattcacgaaggagagc

SEQ ID NO: 4276996 - DNA, 25 bp, Homo sapien
aaaggtgaacgatttatacgatctc

SEQ ID NO: 4276997 - DNA, 25 bp, Homo sapien
ggtgaacgatttatacgatctcagg

SEQ ID NO: 4276998 - DNA, 25 bp, Homo sapien
tgaacgatttatacgatctcaggag

SEQ ID NO: 4276999 - DNA, 25 bp, Homo sapien
gaacgatttatacgatctcaggaga

SEQ ID NO: 4277000 - DNA, 25 bp, Homo sapien
aacgaaactcccctacataagagat

SEQ ID NO: 4277001 - DNA, 25 bp, Homo sapien
acaatggtaccgatgaaaaagcttt

SEQ ID NO: 4277002 - DNA, 25 bp, Homo sapien
attgtggaacaatggtaccgatgaa

SEQ ID NO: 4277003 - DNA, 25 bp, Homo sapien
ctcccctacataagagataacaaaa

SEQ ID NO: 4277004 - DNA, 25 bp, Homo sapien
ggacaaagctatctgcatctctgag

SEQ ID NO: 4277005 - DNA, 25 bp, Homo sapien
ttgaggacaaagctatctgcatctc

SEQ ID NO: 4277006 - DNA, 25 bp, Homo sapien
catgtcctgcagttgaggacaaagc

SEQ ID NO: 4277007 - DNA, 25 bp, Homo sapien
gaggacaaagctatctgcatctctg

SEQ ID NO: 4277008 - DNA, 25 bp, Homo sapien
tgtattaaggaacaggcactccata

SEQ ID NO: 4277009 - DNA, 25 bp, Homo sapien
cacctggaactttctctaataatgt

SEQ ID NO: 4277010 - DNA, 25 bp, Homo sapien
ggaaaggattgcattcctaagagaa

SEQ ID NO: 4277011 - DNA, 25 bp, Homo sapien
taatgtagaagacacctgcacacca

SEQ ID NO: 4277012 - DNA, 25 bp, Homo sapien
caggtcctggccagttctatgactc

SEQ ID NO: 4277013 - DNA, 25 bp, Homo sapien
tggccagttctatgactctggctcc

SEQ ID NO: 4277014 - DNA, 25 bp, Homo sapien
tcctggccagttctatgactctggc

SEQ ID NO: 4277015 - DNA, 25 bp, Homo sapien
gccagttctatgactctggctccca

SEQ ID NO: 4277016 - DNA, 25 bp, Homo sapien
tatctgtcccgaaaatgaggtccac

SEQ ID NO: 4277017 - DNA, 25 bp, Homo sapien
ggcaccgggaactgtagcagagaaa

SEQ ID NO: 4277018 - DNA, 25 bp, Homo sapien
taacggataaggagcaacattggaa

SEQ ID NO: 4277019 - DNA, 25 bp, Homo sapien
tagcagagaaatagtggtaacggat

SEQ ID NO: 4277020 - DNA, 25 bp, Homo sapien
ttatttccggacaaaaacatctgct

SEQ ID NO: 4277021 - DNA, 25 bp, Homo sapien
cacagtcaacaactgggaaaccggg

SEQ ID NO: 4277022 - DNA, 25 bp, Homo sapien
aacatctgcttcacacagtgcacgg

SEQ ID NO: 4277023 - DNA, 25 bp, Homo sapien
cagtgcacggcatcaaatgaagagg

SEQ ID NO: 4277024 - DNA, 25 bp, Homo sapien
tgatccccaggactataagctaatg

SEQ ID NO: 4277025 - DNA, 25 bp, Homo sapien
gaaatggcaaggaaccggcttctcc

SEQ ID NO: 4277026 - DNA, 25 bp, Homo sapien
ggagaaccgcacatggaaacttgag

SEQ ID NO: 4277027 - DNA, 25 bp, Homo sapien
tctcggctcacaaggccaagggtca

SEQ ID NO: 4277028 - DNA, 25 bp, Homo sapien
gaaggtgtacggttcactctcagac

SEQ ID NO: 4277029 - DNA, 25 bp, Homo sapien
aaacttttttggctgcctcggcatc

SEQ ID NO: 4277030 - DNA, 25 bp, Homo sapien
tagcagatgcccatataccatggtg

SEQ ID NO: 4277031 - DNA, 25 bp, Homo sapien
tgtcattgtagatacccacagcggg

SEQ ID NO: 4277032 - DNA, 25 bp, Homo sapien
gattctcaggcttaaactggcgctg

SEQ ID NO: 4277033 - DNA, 25 bp, Homo sapien
cgctgtttcaagatgaggcaagtgc

SEQ ID NO: 4277034 - DNA, 25 bp, Homo sapien
tagcaaggctggactgacgattctc

SEQ ID NO: 4277035 - DNA, 25 bp, Homo sapien
aagtgctggatctcgttccttgtcc

SEQ ID NO: 4277036 - DNA, 25 bp, Homo sapien
cacagcaaatgatgagcccgagggc

SEQ ID NO: 4277037 - DNA, 25 bp, Homo sapien
gggcagacagcagtaagactccacc

SEQ ID NO: 4277038 - DNA, 25 bp, Homo sapien
ggcagacagcagtaagactccacct

SEQ ID NO: 4277039 - DNA, 25 bp, Homo sapien
acagcaaatgatgagcccgagggca

SEQ ID NO: 4277040 - DNA, 25 bp, Homo sapien
gctgcgatgaggatgacagtcaagt

SEQ ID NO: 4277041 - DNA, 25 bp, Homo sapien
cgctgcgatgaggatgacagtcaag

SEQ ID NO: 4277042 - DNA, 25 bp, Homo sapien
tggtctctgggcacgctgatgttcc

SEQ ID NO: 4277043 - DNA, 25 bp, Homo sapien
cgccgctccgctccttaaagaaagt

SEQ ID NO: 4277044 - DNA, 25 bp, Homo sapien
cagttagagatgttgacccagaagc

SEQ ID NO: 4277045 - DNA, 25 bp, Homo sapien
tggatgatcatgaatgcgcgccctg

SEQ ID NO: 4277046 - DNA, 25 bp, Homo sapien
agaagtcatgcagctccacaggcag

SEQ ID NO: 4277047 - DNA, 25 bp, Homo sapien
cactggccacgaggtagctgaagct

SEQ ID NO: 4277048 - DNA, 25 bp, Homo sapien
gatctgcttgatagagcctcccggg

SEQ ID NO: 4277049 - DNA, 25 bp, Homo sapien
gtataaaggacaccgtcagaccctg

SEQ ID NO: 4277050 - DNA, 25 bp, Homo sapien
tgaggttgggtgtctgcatgctgcc

SEQ ID NO: 4277051 - DNA, 25 bp, Homo sapien
catgctagccatgcacaaaggagac

SEQ ID NO: 4277052 - DNA, 25 bp, Homo sapien
ctgtgtttcccttcggtctctcttc

SEQ ID NO: 4277053 - DNA, 25 bp, Homo sapien
tgttccttttctagcggtccctctg

SEQ ID NO: 4277054 - DNA, 25 bp, Homo sapien
ccggccagatgggcctttttgatat

SEQ ID NO: 4277055 - DNA, 25 bp, Homo sapien
cagggacaaatgcactgattcaggg

SEQ ID NO: 4277056 - DNA, 25 bp, Homo sapien
gggagagaagagctatccatggcca

SEQ ID NO: 4277057 - DNA, 25 bp, Homo sapien
cagggaaccccactaaggcaaggcg

SEQ ID NO: 4277058 - DNA, 25 bp, Homo sapien
gaagagctatccatggccagggaca

SEQ ID NO: 4277059 - DNA, 25 bp, Homo sapien
gacatggctcgctcattactcaagt

SEQ ID NO: 4277060 - DNA, 25 bp, Homo sapien
ccagatgtcagggtgaggttgctac

SEQ ID NO: 4277061 - DNA, 25 bp, Homo sapien
aacttgcggctctgtttgacgggcc

SEQ ID NO: 4277062 - DNA, 25 bp, Homo sapien
gattctagacacacgaaacagccag

SEQ ID NO: 4277063 - DNA, 25 bp, Homo sapien
aggcagactacccaggaaacaacga

SEQ ID NO: 4277064 - DNA, 25 bp, Homo sapien
aacaagcctgtctaactgcctagca

SEQ ID NO: 4277065 - DNA, 25 bp, Homo sapien
taccgggtgttcaccaacaagcctg

SEQ ID NO: 4277066 - DNA, 25 bp, Homo sapien
tccagagtctaagtgtttcagaagc

SEQ ID NO: 4277067 - DNA, 25 bp, Homo sapien
gagaggttgaagttccccgccatgt

SEQ ID NO: 4277068 - DNA, 25 bp, Homo sapien
gatgtagtattcaacccgctcctcc

SEQ ID NO: 4277069 - DNA, 25 bp, Homo sapien
gaccaaaacttggaactgcagccgg

SEQ ID NO: 4277070 - DNA, 25 bp, Homo sapien
cgcaggtgtgcaggaacgacaaact

SEQ ID NO: 4277071 - DNA, 25 bp, Homo sapien
tcttgcatcttgatccgggacacag

SEQ ID NO: 4277072 - DNA, 25 bp, Homo sapien
caacaacgatgtcgagggctgaagc

SEQ ID NO: 4277073 - DNA, 25 bp, Homo sapien
tgctgaagccggagacatttctggg

SEQ ID NO: 4277074 - DNA, 25 bp, Homo sapien
agaaggttccgatcctgaccacggt

SEQ ID NO: 4277075 - DNA, 25 bp, Homo sapien
gacttgatggacaacatggttatat

SEQ ID NO: 4277076 - DNA, 25 bp, Homo sapien
ttagaaatgacgatgtaacagggtt

SEQ ID NO: 4277077 - DNA, 25 bp, Homo sapien
gggtccccagctttatgagaactgt

SEQ ID NO: 4277078 - DNA, 25 bp, Homo sapien
gaactgtaatgttgctttctcgtgg

SEQ ID NO: 4277079 - DNA, 25 bp, Homo sapien
ccttacgagggttaaatgactcact

SEQ ID NO: 4277080 - DNA, 25 bp, Homo sapien
tgagatgatcaacccagcacgttct

SEQ ID NO: 4277081 - DNA, 25 bp, Homo sapien
tctaagcgttgaatataccagtcct

SEQ ID NO: 4277082 - DNA, 25 bp, Homo sapien
gagaatttgggcttgagtaatcccc

SEQ ID NO: 4277083 - DNA, 25 bp, Homo sapien
gtcacattgcagaccaacattccat

SEQ ID NO: 4277084 - DNA, 25 bp, Homo sapien
ttaggaagaggtcacattgcagacc

SEQ ID NO: 4277085 - DNA, 25 bp, Homo sapien
tccctgcttttcagactgagcatca

SEQ ID NO: 4277086 - DNA, 25 bp, Homo sapien
ttttcagactgagcatcagataagt

SEQ ID NO: 4277087 - DNA, 25 bp, Homo sapien
tctctctctgtttcttttttttgtc

SEQ ID NO: 4277088 - DNA, 25 bp, Homo sapien
tctctctgtttcttttttttgtcta

SEQ ID NO: 4277089 - DNA, 25 bp, Homo sapien
gaagtggggagtcacctccaacaga

SEQ ID NO: 4277090 - DNA, 25 bp, Homo sapien
acagaattcattctaacagtgcctg

SEQ ID NO: 4277091 - DNA, 25 bp, Homo sapien
aatgcagttgttggctgattccagg

SEQ ID NO: 4277092 - DNA, 25 bp, Homo sapien
gccattcttattaagtgaatgcagt

SEQ ID NO: 4277093 - DNA, 25 bp, Homo sapien
gggtgccagatagtcacatcgccaa

SEQ ID NO: 4277094 - DNA, 25 bp, Homo sapien
caaaatccacgtgtcattgacttgg

SEQ ID NO: 4277095 - DNA, 25 bp, Homo sapien
tcgccaaacttggagtcttcctagt

SEQ ID NO: 4277096 - DNA, 25 bp, Homo sapien
tagagagacaactggtttagacact

SEQ ID NO: 4277097 - DNA, 25 bp, Homo sapien
gggcaaggtacagccgtcaggccaa

SEQ ID NO: 4277098 - DNA, 25 bp, Homo sapien
tcaggccaagctgaggaaatgcttt

SEQ ID NO: 4277099 - DNA, 25 bp, Homo sapien
aatgctttcaggctactgttgcagg

SEQ ID NO: 4277100 - DNA, 25 bp, Homo sapien
gtacagccgtcaggccaagctgagg

SEQ ID NO: 4277101 - DNA, 25 bp, Homo sapien
ctggagaaagggatgggtggcaggg

SEQ ID NO: 4277102 - DNA, 25 bp, Homo sapien
gatgggtggcagggcaggtgaccat

SEQ ID NO: 4277103 - DNA, 25 bp, Homo sapien
ggagaaagggatgggtggcagggca

SEQ ID NO: 4277104 - DNA, 25 bp, Homo sapien
gggatgggtggcagggcaggtgacc

SEQ ID NO: 4277105 - DNA, 25 bp, Homo sapien
cagtgggcctgagacacaggactgc

SEQ ID NO: 4277106 - DNA, 25 bp, Homo sapien
agtgggcctgagacacaggactgca

SEQ ID NO: 4277107 - DNA, 25 bp, Homo sapien
tgcagtgggcctgagacacaggact

SEQ ID NO: 4277108 - DNA, 25 bp, Homo sapien
ctgcagtgggcctgagacacaggac

SEQ ID NO: 4277109 - DNA, 25 bp, Homo sapien
gtaggacaagggcatgcacagtgca

SEQ ID NO: 4277110 - DNA, 25 bp, Homo sapien
caggtgggaagtgcagagacaactt

SEQ ID NO: 4277111 - DNA, 25 bp, Homo sapien
tgatgaaggccgactctggccacat

SEQ ID NO: 4277112 - DNA, 25 bp, Homo sapien
aaatgttgatgaaggccgactctgg

SEQ ID NO: 4277113 - DNA, 25 bp, Homo sapien
ggtcctgggcataaggtctcatcca

SEQ ID NO: 4277114 - DNA, 25 bp, Homo sapien
aaccccttctgagtcgatctttgtg

SEQ ID NO: 4277115 - DNA, 25 bp, Homo sapien
ggatagctgggacctcaaacgcatg

SEQ ID NO: 4277116 - DNA, 25 bp, Homo sapien
tctttgtgcctgtaaggtcctgggc

SEQ ID NO: 4277117 - DNA, 25 bp, Homo sapien
cttggtctctgtaggccacgcactg

SEQ ID NO: 4277118 - DNA, 25 bp, Homo sapien
gtctctgtaggccacgcactgaata

SEQ ID NO: 4277119 - DNA, 25 bp, Homo sapien
ctgtaggccacgcactgaataaggg

SEQ ID NO: 4277120 - DNA, 25 bp, Homo sapien
gtaggccacgcactgaataagggac

SEQ ID NO: 4277121 - DNA, 25 bp, Homo sapien
gactgcatttttttggcgattaaga

SEQ ID NO: 4277122 - DNA, 25 bp, Homo sapien
aggactgcatttttttggcgattaa

SEQ ID NO: 4277123 - DNA, 25 bp, Homo sapien
caggactgcatttttttggcgatta

SEQ ID NO: 4277124 - DNA, 25 bp, Homo sapien
ggactgcatttttttggcgattaag

SEQ ID NO: 4277125 - DNA, 25 bp, Homo sapien
tcaatcaggaagagcatctgctcct

SEQ ID NO: 4277126 - DNA, 25 bp, Homo sapien
gctcctcctccatctccgatgtcct

SEQ ID NO: 4277127 - DNA, 25 bp, Homo sapien
caatcaggaagagcatctgctcctc

SEQ ID NO: 4277128 - DNA, 25 bp, Homo sapien
cctcctccatctccgatgtcctcac

SEQ ID NO: 4277129 - DNA, 25 bp, Homo sapien
atgaccaccagctgactcactccct

SEQ ID NO: 4277130 - DNA, 25 bp, Homo sapien
cctttacttccgatactttggcagc

SEQ ID NO: 4277131 - DNA, 25 bp, Homo sapien
ttccgatactttggcagcaatccat

SEQ ID NO: 4277132 - DNA, 25 bp, Homo sapien
tacttccgatactttggcagcaatc

SEQ ID NO: 4277133 - DNA, 25 bp, Homo sapien
ttgcaagcgaccacaagccaggtca

SEQ ID NO: 4277134 - DNA, 25 bp, Homo sapien
gagtgtgggtgtattgccatcccag

SEQ ID NO: 4277135 - DNA, 25 bp, Homo sapien
caacgtggcacactccaggagatct

SEQ ID NO: 4277136 - DNA, 25 bp, Homo sapien
taaacagatcagcaacacaacgtgg

SEQ ID NO: 4277137 - DNA, 25 bp, Homo sapien
caggaggtattatgtcaatgaggat

SEQ ID NO: 4277138 - DNA, 25 bp, Homo sapien
ttccaggaggtattatgtcaatgag

SEQ ID NO: 4277139 - DNA, 25 bp, Homo sapien
tatgtcaatgaggatgtccattaca

SEQ ID NO: 4277140 - DNA, 25 bp, Homo sapien
ggtattatgtcaatgaggatgtcca

SEQ ID NO: 4277141 - DNA, 25 bp, Homo sapien
ggtgttatgtcaatgaggaaggcca

SEQ ID NO: 4277142 - DNA, 25 bp, Homo sapien
ggaaggccattatagaagatactat

SEQ ID NO: 4277143 - DNA, 25 bp, Homo sapien
caagggtgactgcagtaaaaggtat

SEQ ID NO: 4277144 - DNA, 25 bp, Homo sapien
tatcaacaaggatagtcatggtaga

SEQ ID NO: 4277145 - DNA, 25 bp, Homo sapien
cagtctgaagacacgggcaatgtag

SEQ ID NO: 4277146 - DNA, 25 bp, Homo sapien
gaactcagaggcaatagtgaccggg

SEQ ID NO: 4277147 - DNA, 25 bp, Homo sapien
aactccagcgagacttgtcagcagg

SEQ ID NO: 4277148 - DNA, 25 bp, Homo sapien
aagccctttgggatgtgcagtctga

SEQ ID NO: 4277149 - DNA, 25 bp, Homo sapien
gagttgactgtctacctgtgtccaa

SEQ ID NO: 4277150 - DNA, 25 bp, Homo sapien
agagatgccgtgagtccttcaaact

SEQ ID NO: 4277151 - DNA, 25 bp, Homo sapien
tctacctgtgtccaagagatgccgt

SEQ ID NO: 4277152 - DNA, 25 bp, Homo sapien
ggtggccactctgtaggagttgact

SEQ ID NO: 4277153 - DNA, 25 bp, Homo sapien
agactacaggcaactactccaacca

SEQ ID NO: 4277154 - DNA, 25 bp, Homo sapien
actccaaccacaaaagctctcagtt

SEQ ID NO: 4277155 - DNA, 25 bp, Homo sapien
cctttgccacttagatcctcaagac

SEQ ID NO: 4277156 - DNA, 25 bp, Homo sapien
agttcagcctgatgtaccctcaaag

SEQ ID NO: 4277157 - DNA, 25 bp, Homo sapien
agtccactgccaaaaagtgcgaggg

SEQ ID NO: 4277158 - DNA, 25 bp, Homo sapien
cagtctctgcggtggcgcagatgcc

SEQ ID NO: 4277159 - DNA, 25 bp, Homo sapien
gaggggcgcgggaatgtccagtctc

SEQ ID NO: 4277160 - DNA, 25 bp, Homo sapien
tcaaagtccactgccaaaaagtgcg

SEQ ID NO: 4277161 - DNA, 25 bp, Homo sapien
gtgcgatagagaccccgcagttcag

SEQ ID NO: 4277162 - DNA, 25 bp, Homo sapien
ctagcagtgcgatagagaccccgca

SEQ ID NO: 4277163 - DNA, 25 bp, Homo sapien
gaacccctagcagtgcgatagagac

SEQ ID NO: 4277164 - DNA, 25 bp, Homo sapien
atagagaccccgcagttcaggccgg

SEQ ID NO: 4277165 - DNA, 25 bp, Homo sapien
ccctggctcactcacctgcgcgcgg

SEQ ID NO: 4277166 - DNA, 25 bp, Homo sapien
gccccaggcgcccaagcccggcgca

SEQ ID NO: 4277167 - DNA, 25 bp, Homo sapien
gcccggcgcagctgcgctccgccct

SEQ ID NO: 4277168 - DNA, 25 bp, Homo sapien
gctcactcacctgcgcgcgggcgga

SEQ ID NO: 4277169 - DNA, 25 bp, Homo sapien
gaggaaaagagctttagtcgtgctc

SEQ ID NO: 4277170 - DNA, 25 bp, Homo sapien
gatatgatccatccccatgtcaggc

SEQ ID NO: 4277171 - DNA, 25 bp, Homo sapien
ggaggaaaagagctttagtcgtgct

SEQ ID NO: 4277172 - DNA, 25 bp, Homo sapien
cctcggatatgatccatccccatgt

SEQ ID NO: 4277173 - DNA, 25 bp, Homo sapien
gaattgagtcacatcattgttgagc

SEQ ID NO: 4277174 - DNA, 25 bp, Homo sapien
tgacatctccctgatggacgcaggc

SEQ ID NO: 4277175 - DNA, 25 bp, Homo sapien
ctcatctggttgacatctccctgat

SEQ ID NO: 4277176 - DNA, 25 bp, Homo sapien
gagagggaattgagtcacatcattg

SEQ ID NO: 4277177 - DNA, 25 bp, Homo sapien
ccacagagaacatcattgcagcacc

SEQ ID NO: 4277178 - DNA, 25 bp, Homo sapien
caacagccacagagaacatcattgc

SEQ ID NO: 4277179 - DNA, 25 bp, Homo sapien
agccacagagaacatcattgcagca

SEQ ID NO: 4277180 - DNA, 25 bp, Homo sapien
cacaacagccacagagaacatcatt

SEQ ID NO: 4277181 - DNA, 25 bp, Homo sapien
tgcagatagctaccgtgtcgttcat

SEQ ID NO: 4277182 - DNA, 25 bp, Homo sapien
gtgcagatagctaccgtgtcgttca

SEQ ID NO: 4277183 - DNA, 25 bp, Homo sapien
atccttggagaagccgtaaagattc

SEQ ID NO: 4277184 - DNA, 25 bp, Homo sapien
gagaagccgtaaagattcctttgaa

SEQ ID NO: 4277185 - DNA, 25 bp, Homo sapien
tgtacatggcagcatcatggccatc

SEQ ID NO: 4277186 - DNA, 25 bp, Homo sapien
tggcagcatcatggccatccttgga

SEQ ID NO: 4277187 - DNA, 25 bp, Homo sapien
cagttggggccaactctggagcaag

SEQ ID NO: 4277188 - DNA, 25 bp, Homo sapien
aggaagcacatgatgtttgtccatc

SEQ ID NO: 4277189 - DNA, 25 bp, Homo sapien
tatctcccaccagagctggtcctct

SEQ ID NO: 4277190 - DNA, 25 bp, Homo sapien
aagcacatgatgtttgtccatcttc

SEQ ID NO: 4277191 - DNA, 25 bp, Homo sapien
tatccaggacatctgctttatatgc

SEQ ID NO: 4277192 - DNA, 25 bp, Homo sapien
catgtgttctgtccagtttaatggc

SEQ ID NO: 4277193 - DNA, 25 bp, Homo sapien
aacaactgaccctgttaattcttct

SEQ ID NO: 4277194 - DNA, 25 bp, Homo sapien
gattaatcctgacataagtaagaga

SEQ ID NO: 4277195 - DNA, 25 bp, Homo sapien
gggacatgcccagtaggacatagga

SEQ ID NO: 4277196 - DNA, 25 bp, Homo sapien
caggggtcagtactgccaatcttta

SEQ ID NO: 4277197 - DNA, 25 bp, Homo sapien
aacagaggatgcagggattgaccag

SEQ ID NO: 4277198 - DNA, 25 bp, Homo sapien
ctccacagtgtggtcaaaacggctt

SEQ ID NO: 4277199 - DNA, 25 bp, Homo sapien
tcttgtcttgcaggtcacgctgtgc

SEQ ID NO: 4277200 - DNA, 25 bp, Homo sapien
ggtgctctgtggtggacattgctgt

SEQ ID NO: 4277201 - DNA, 25 bp, Homo sapien
tgcctttcctgtagtgggtgctctg

SEQ ID NO: 4277202 - DNA, 25 bp, Homo sapien
caatacgatttggtgcccattcctg

SEQ ID NO: 4277203 - DNA, 25 bp, Homo sapien
tgtgtgaagcaaagacgactctggg

SEQ ID NO: 4277204 - DNA, 25 bp, Homo sapien
catcctcaaggactgtgtttgccag

SEQ ID NO: 4277205 - DNA, 25 bp, Homo sapien
tttaagcagggaacaaatatggtca

SEQ ID NO: 4277206 - DNA, 25 bp, Homo sapien
aaagggcatcagcttatcctgaaga

SEQ ID NO: 4277207 - DNA, 25 bp, Homo sapien
tattttctagtgtagtcctccctca

SEQ ID NO: 4277208 - DNA, 25 bp, Homo sapien
ctattttctagtgtagtcctccctc

SEQ ID NO: 4277209 - DNA, 25 bp, Homo sapien
caggcaataagaacgccaggaaaat

SEQ ID NO: 4277210 - DNA, 25 bp, Homo sapien
aggcaataagaacgccaggaaaata

SEQ ID NO: 4277211 - DNA, 25 bp, Homo sapien
tcaggcaataagaacgccaggaaaa

SEQ ID NO: 4277212 - DNA, 25 bp, Homo sapien
tgccatgaatctagggcacgtgggt

SEQ ID NO: 4277213 - DNA, 25 bp, Homo sapien
cccatctcgggaagaggaactaacg

SEQ ID NO: 4277214 - DNA, 25 bp, Homo sapien
aaacatctgcttttcggaactggaa

SEQ ID NO: 4277215 - DNA, 25 bp, Homo sapien
ataactacagcacgaagcacaccgg

SEQ ID NO: 4277216 - DNA, 25 bp, Homo sapien
tcacttggtcgccacccccgaagtg

SEQ ID NO: 4277217 - DNA, 25 bp, Homo sapien
cacccccgaagtgacggccgcggcg

SEQ ID NO: 4277218 - DNA, 25 bp, Homo sapien
tcgccacccccgaagtgacggccgc

SEQ ID NO: 4277219 - DNA, 25 bp, Homo sapien
tggtcgccacccccgaagtgacggc

SEQ ID NO: 4277220 - DNA, 25 bp, Homo sapien
ggcggctgcggtggtccctgcgggc

SEQ ID NO: 4277221 - DNA, 25 bp, Homo sapien
cggctgcggtggtccctgcgggcac

SEQ ID NO: 4277222 - DNA, 25 bp, Homo sapien
gcggcggctgcggtggtccctgcgg

SEQ ID NO: 4277223 - DNA, 25 bp, Homo sapien
ggcggcggctgcggtggtccctgcg

SEQ ID NO: 4277224 - DNA, 25 bp, Homo sapien
gtgctggcggtggtccggcgctgtt

SEQ ID NO: 4277225 - DNA, 25 bp, Homo sapien
caggaagccggcgatgatgggcacc

SEQ ID NO: 4277226 - DNA, 25 bp, Homo sapien
cggcgctgttccatgccgttgggca

SEQ ID NO: 4277227 - DNA, 25 bp, Homo sapien
agccggcgatgatgggcaccggcca

SEQ ID NO: 4277228 - DNA, 25 bp, Homo sapien
atgaagcaggccaccagcgtggact

SEQ ID NO: 4277229 - DNA, 25 bp, Homo sapien
gactcaatgggcttacggttcagcc

SEQ ID NO: 4277230 - DNA, 25 bp, Homo sapien
aatgggcttacggttcagccgccag

SEQ ID NO: 4277231 - DNA, 25 bp, Homo sapien
gccaccagcgtggactcaatgggct

SEQ ID NO: 4277232 - DNA, 25 bp, Homo sapien
ccgcggggtaggctggcagcgcggt

SEQ ID NO: 4277233 - DNA, 25 bp, Homo sapien
cgcggggtaggctggcagcgcggtg

SEQ ID NO: 4277234 - DNA, 25 bp, Homo sapien
ggcggctcggccgcggggtaggctg

SEQ ID NO: 4277235 - DNA, 25 bp, Homo sapien
gcggggtaggctggcagcgcggtgg

SEQ ID NO: 4277236 - DNA, 25 bp, Homo sapien
ccagccccaggtgctcgatgagcag

SEQ ID NO: 4277237 - DNA, 25 bp, Homo sapien
agcgcacgagcagcgagctcagcat

SEQ ID NO: 4277238 - DNA, 25 bp, Homo sapien
gaaagcgcggccgtgcgcgttggtg

SEQ ID NO: 4277239 - DNA, 25 bp, Homo sapien
agcagtaggtcgcactggaagcccc

SEQ ID NO: 4277240 - DNA, 25 bp, Homo sapien
cggaggacgcgttgactgaagcatt

SEQ ID NO: 4277241 - DNA, 25 bp, Homo sapien
gcgagctcacggtgggaccgcggga

SEQ ID NO: 4277242 - DNA, 25 bp, Homo sapien
aggccggcggcggttgcatggcgag

SEQ ID NO: 4277243 - DNA, 25 bp, Homo sapien
gggcgatgggctcgccgcggaggac

SEQ ID NO: 4277244 - DNA, 25 bp, Homo sapien
cagcaagcttccgttctgatgcaat

SEQ ID NO: 4277245 - DNA, 25 bp, Homo sapien
tctgatgcaattaaggcttgctcct

SEQ ID NO: 4277246 - DNA, 25 bp, Homo sapien
caagagtgccggtgtattcagcaag

SEQ ID NO: 4277247 - DNA, 25 bp, Homo sapien
ttacagggtggaggattgattgcat

SEQ ID NO: 4277248 - DNA, 25 bp, Homo sapien
agggtggggctaatgtctctttctc

SEQ ID NO: 4277249 - DNA, 25 bp, Homo sapien
tggtgtgactgaacctgtctccaca

SEQ ID NO: 4277250 - DNA, 25 bp, Homo sapien
tgttcctgccatcacttggatccag

SEQ ID NO: 4277251 - DNA, 25 bp, Homo sapien
tggacttagagcctgccacttgctc

SEQ ID NO: 4277252 - DNA, 25 bp, Homo sapien
accaagagccggcttcatggtcaag

SEQ ID NO: 4277253 - DNA, 25 bp, Homo sapien
ttccagtgttctacacatctaaaaa

SEQ ID NO: 4277254 - DNA, 25 bp, Homo sapien
agttgcaatgaaacaacaccaagag

SEQ ID NO: 4277255 - DNA, 25 bp, Homo sapien
gtcaagagagaatgctgcgcctcct

SEQ ID NO: 4277256 - DNA, 25 bp, Homo sapien
taaccgcagtctatattccatgagc

SEQ ID NO: 4277257 - DNA, 25 bp, Homo sapien
ttggtcatgttgaatgtggacagct

SEQ ID NO: 4277258 - DNA, 25 bp, Homo sapien
agcagggatgattactcttctaatt

SEQ ID NO: 4277259 - DNA, 25 bp, Homo sapien
catgctgttcctgttaacttggtca

SEQ ID NO: 4277260 - DNA, 25 bp, Homo sapien
catagaggcacatgctcaagattgc

SEQ ID NO: 4277261 - DNA, 25 bp, Homo sapien
tgtccttcgttcaggtcagtctgcc

SEQ ID NO: 4277262 - DNA, 25 bp, Homo sapien
aatcagaggtctgcccaacagcatg

SEQ ID NO: 4277263 - DNA, 25 bp, Homo sapien
ttgttgtacaattgccatggctcta

SEQ ID NO: 4277264 - DNA, 25 bp, Homo sapien
gtataaacccgtccatactctgggc

SEQ ID NO: 4277265 - DNA, 25 bp, Homo sapien
tgggccaaacatgctggcctcagat

SEQ ID NO: 4277266 - DNA, 25 bp, Homo sapien
gcttggaggagtataaacccgtcca

SEQ ID NO: 4277267 - DNA, 25 bp, Homo sapien
gatccctgcacacgaaagctcagga

SEQ ID NO: 4277268 - DNA, 25 bp, Homo sapien
cattggagagagatagttggagctt

SEQ ID NO: 4277269 - DNA, 25 bp, Homo sapien
tacagttgaaggataagccaacagc

SEQ ID NO: 4277270 - DNA, 25 bp, Homo sapien
aacagcccacttgcatatatgacgg

SEQ ID NO: 4277271 - DNA, 25 bp, Homo sapien
ttgtctctagacatacagttgaagg

SEQ ID NO: 4277272 - DNA, 25 bp, Homo sapien
ggcaagtccagtctcaatatgagga

SEQ ID NO: 4277273 - DNA, 25 bp, Homo sapien
cagtctcaatatgaggacagtctct

SEQ ID NO: 4277274 - DNA, 25 bp, Homo sapien
tgaggcaagcgttgacctcattccc

SEQ ID NO: 4277275 - DNA, 25 bp, Homo sapien
aggcaagcgttgacctcattcccca

SEQ ID NO: 4277276 - DNA, 25 bp, Homo sapien
tccaggtgctgtgtgttccagtccc

SEQ ID NO: 4277277 - DNA, 25 bp, Homo sapien
tagggccataactgcagatctgaga

SEQ ID NO: 4277278 - DNA, 25 bp, Homo sapien
cacttggagccattttgttcaggca

SEQ ID NO: 4277279 - DNA, 25 bp, Homo sapien
tccaagaagagctccaggtgggagc

SEQ ID NO: 4277280 - DNA, 25 bp, Homo sapien
accacttttgattaacagttgtagg

SEQ ID NO: 4277281 - DNA, 25 bp, Homo sapien
cagttgtaggtctttcattgtgaca

SEQ ID NO: 4277282 - DNA, 25 bp, Homo sapien
gaacactgtccgtatactcatttca

SEQ ID NO: 4277283 - DNA, 25 bp, Homo sapien
agccctttctcaagaacactgtccg

SEQ ID NO: 4277284 - DNA, 25 bp, Homo sapien
gccaccattgttgatgtgactccag

SEQ ID NO: 4277285 - DNA, 25 bp, Homo sapien
cagttattaggaagagcaagctcac

SEQ ID NO: 4277286 - DNA, 25 bp, Homo sapien
gaagtcagcaattaagtgttcccac

SEQ ID NO: 4277287 - DNA, 25 bp, Homo sapien
ttctgaagtagcctcacatgtggtc

SEQ ID NO: 4277288 - DNA, 25 bp, Homo sapien
tatttgccttaggatcacgatggct

SEQ ID NO: 4277289 - DNA, 25 bp, Homo sapien
actggtatagggagtcccgggccat

SEQ ID NO: 4277290 - DNA, 25 bp, Homo sapien
ggaagatccctagatctggcccaga

SEQ ID NO: 4277291 - DNA, 25 bp, Homo sapien
tgaaacctctccaggatcgcctggg

SEQ ID NO: 4277292 - DNA, 25 bp, Homo sapien
tcccggccgattcagcttcacccgg

SEQ ID NO: 4277293 - DNA, 25 bp, Homo sapien
gccttgctgtgagtttccgtgtttg

SEQ ID NO: 4277294 - DNA, 25 bp, Homo sapien
agtcggctgctgccttgctgtgagt

SEQ ID NO: 4277295 - DNA, 25 bp, Homo sapien
tgctgtgagtttccgtgtttggttg

SEQ ID NO: 4277296 - DNA, 25 bp, Homo sapien
ttcggctggactcttaaatcctggg

SEQ ID NO: 4277297 - DNA, 25 bp, Homo sapien
gggacggcgaagtgccaccagctac

SEQ ID NO: 4277298 - DNA, 25 bp, Homo sapien
ggagttggaagcaaacttggtccag

SEQ ID NO: 4277299 - DNA, 25 bp, Homo sapien
ggtccagctggcgttgaggtctcaa

SEQ ID NO: 4277300 - DNA, 25 bp, Homo sapien
tctgatggtagcctgggatctgtgc

SEQ ID NO: 4277301 - DNA, 25 bp, Homo sapien
cgccagctggtctggacggttcaca

SEQ ID NO: 4277302 - DNA, 25 bp, Homo sapien
tgatgtccaccctgcctgagttatc

SEQ ID NO: 4277303 - DNA, 25 bp, Homo sapien
gctcccctagggtaaggctgccctg

SEQ ID NO: 4277304 - DNA, 25 bp, Homo sapien
tcactgatgggcctttggaatgtac

SEQ ID NO: 4277305 - DNA, 25 bp, Homo sapien
cactgatgggcctttggaatgtacc

SEQ ID NO: 4277306 - DNA, 25 bp, Homo sapien
ggctgagctgccagctatgtaggag

SEQ ID NO: 4277307 - DNA, 25 bp, Homo sapien
ctgagctgccagctatgtaggagag

SEQ ID NO: 4277308 - DNA, 25 bp, Homo sapien
ccagctatgtaggagagggtttgct

SEQ ID NO: 4277309 - DNA, 25 bp, Homo sapien
ctgccagctatgtaggagagggttt

SEQ ID NO: 4277310 - DNA, 25 bp, Homo sapien
tcgaagggcctttgcagcatcccca

SEQ ID NO: 4277311 - DNA, 25 bp, Homo sapien
tcatcgaagggcctttgcagcatcc

SEQ ID NO: 4277312 - DNA, 25 bp, Homo sapien
aagggcctttgcagcatccccacag

SEQ ID NO: 4277313 - DNA, 25 bp, Homo sapien
agggcctttgcagcatccccacagt

SEQ ID NO: 4277314 - DNA, 25 bp, Homo sapien
agttggtgccgtctgcccagggcca

SEQ ID NO: 4277315 - DNA, 25 bp, Homo sapien
ggagttggtgccgtctgcccagggc

SEQ ID NO: 4277316 - DNA, 25 bp, Homo sapien
gttggtgccgtctgcccagggccac

SEQ ID NO: 4277317 - DNA, 25 bp, Homo sapien
caaggagttggtgccgtctgcccag

SEQ ID NO: 4277318 - DNA, 25 bp, Homo sapien
gagctgtagccctggcgcgtcccga

SEQ ID NO: 4277319 - DNA, 25 bp, Homo sapien
gagcctgttgaggtccttgccttgg

SEQ ID NO: 4277320 - DNA, 25 bp, Homo sapien
caagcaggctgatctgctgggagct

SEQ ID NO: 4277321 - DNA, 25 bp, Homo sapien
ttgccttggtggctcccaacggatg

SEQ ID NO: 4277322 - DNA, 25 bp, Homo sapien
tgagcccactggtgatacagaatgt

SEQ ID NO: 4277323 - DNA, 25 bp, Homo sapien
tcaggcactgtgattcttggatctc

SEQ ID NO: 4277324 - DNA, 25 bp, Homo sapien
ccaatttgcttggaagagtgcatct

SEQ ID NO: 4277325 - DNA, 25 bp, Homo sapien
cagtacaaagtagtggctgagccca

SEQ ID NO: 4277326 - DNA, 25 bp, Homo sapien
gagcagggagacatgctggcaggca

SEQ ID NO: 4277327 - DNA, 25 bp, Homo sapien
gcctgcgcaggtttggcagggagca

SEQ ID NO: 4277328 - DNA, 25 bp, Homo sapien
cagggagcagggagacatgctggca

SEQ ID NO: 4277329 - DNA, 25 bp, Homo sapien
caaaggcctgcgcaggtttggcagg

SEQ ID NO: 4277330 - DNA, 25 bp, Homo sapien
gtggccgtgccacttagcattccca

SEQ ID NO: 4277331 - DNA, 25 bp, Homo sapien
cacagcagtgtgaaagttcctctga

SEQ ID NO: 4277332 - DNA, 25 bp, Homo sapien
ctaagccacctgttctctgagctgg

SEQ ID NO: 4277333 - DNA, 25 bp, Homo sapien
gctggcaacgcttggctgataccct

SEQ ID NO: 4277334 - DNA, 25 bp, Homo sapien
aaggatgtcagcagcccgaaggact

SEQ ID NO: 4277335 - DNA, 25 bp, Homo sapien
ttgtatctgtgctaggtggtcactg

SEQ ID NO: 4277336 - DNA, 25 bp, Homo sapien
tctgtgctaggtggtcactggtcac

SEQ ID NO: 4277337 - DNA, 25 bp, Homo sapien
aggatgtcagcagcccgaaggactc

SEQ ID NO: 4277338 - DNA, 25 bp, Homo sapien
tgatcagggctgactaccattggtt

SEQ ID NO: 4277339 - DNA, 25 bp, Homo sapien
tcagggctgactaccattggtttgg

SEQ ID NO: 4277340 - DNA, 25 bp, Homo sapien
agcttctcagatacttccagggtgt

SEQ ID NO: 4277341 - DNA, 25 bp, Homo sapien
cagggctgactaccattggtttggg

SEQ ID NO: 4277342 - DNA, 25 bp, Homo sapien
cgaattgtccgaatatttctcatca

SEQ ID NO: 4277343 - DNA, 25 bp, Homo sapien
tattcagcagttctgtatgagctga

SEQ ID NO: 4277344 - DNA, 25 bp, Homo sapien
ttctgtatgagctgaatgagtcagc

SEQ ID NO: 4277345 - DNA, 25 bp, Homo sapien
gagtttctgagctgtcgaattgtcc

SEQ ID NO: 4277346 - DNA, 25 bp, Homo sapien
tttcaaggaccagatgcatagcagg

SEQ ID NO: 4277347 - DNA, 25 bp, Homo sapien
cagatgcatagcagggcacgggtca

SEQ ID NO: 4277348 - DNA, 25 bp, Homo sapien
aggaccagatgcatagcagggcacg

SEQ ID NO: 4277349 - DNA, 25 bp, Homo sapien
tcttcccaggagtactgaggctggc

SEQ ID NO: 4277350 - DNA, 25 bp, Homo sapien
tctccacatccgcagcagccctgca

SEQ ID NO: 4277351 - DNA, 25 bp, Homo sapien
cagggtgacagctgcctctccacat

SEQ ID NO: 4277352 - DNA, 25 bp, Homo sapien
gcagcagccctgcaatggtcaccat

SEQ ID NO: 4277353 - DNA, 25 bp, Homo sapien
tggccagaggatgcaggcccttccc

SEQ ID NO: 4277354 - DNA, 25 bp, Homo sapien
tggtggcatttggatgccagcaggg

SEQ ID NO: 4277355 - DNA, 25 bp, Homo sapien
gtggcatttggatgccagcagggtc

SEQ ID NO: 4277356 - DNA, 25 bp, Homo sapien
tttggatgccagcagggtcccatat

SEQ ID NO: 4277357 - DNA, 25 bp, Homo sapien
ggatgccagcagggtcccatatgcc

SEQ ID NO: 4277358 - DNA, 25 bp, Homo sapien
gtgaatatcactctcccttcagtgt

SEQ ID NO: 4277359 - DNA, 25 bp, Homo sapien
cttgtcacccttagcctccatcacc

SEQ ID NO: 4277360 - DNA, 25 bp, Homo sapien
ttgtcacccttagcctccatcacca

SEQ ID NO: 4277361 - DNA, 25 bp, Homo sapien
ccacccaggtgaatatcactctccc

SEQ ID NO: 4277362 - DNA, 25 bp, Homo sapien
taatacccaaacttctagtctagcg

SEQ ID NO: 4277363 - DNA, 25 bp, Homo sapien
tcaagtgatgccagggaactgctct

SEQ ID NO: 4277364 - DNA, 25 bp, Homo sapien
gatggtttcagaatcccctgaaagg

SEQ ID NO: 4277365 - DNA, 25 bp, Homo sapien
caccacatggtgtagagttgcagaa

SEQ ID NO: 4277366 - DNA, 25 bp, Homo sapien
gacatggtgagtaggtcagccaaag

SEQ ID NO: 4277367 - DNA, 25 bp, Homo sapien
ggaagtggctgattcatcttaccag

SEQ ID NO: 4277368 - DNA, 25 bp, Homo sapien
tgatttgtggttacagctgggcgca

SEQ ID NO: 4277369 - DNA, 25 bp, Homo sapien
cagcagtcggctgacaggtgttttc

SEQ ID NO: 4277370 - DNA, 25 bp, Homo sapien
cacttctagccagagccacttgcag

SEQ ID NO: 4277371 - DNA, 25 bp, Homo sapien
gccacttgcagacatcacggcaggg

SEQ ID NO: 4277372 - DNA, 25 bp, Homo sapien
agagccacttgcagacatcacggca

SEQ ID NO: 4277373 - DNA, 25 bp, Homo sapien
agcaccacttctagccagagccact

SEQ ID NO: 4277374 - DNA, 25 bp, Homo sapien
cacacaaaaaatacctcacagagct

SEQ ID NO: 4277375 - DNA, 25 bp, Homo sapien
tcactttcagtcttccacacacaaa

SEQ ID NO: 4277376 - DNA, 25 bp, Homo sapien
aaaaaatacctcacagagcttcacc

SEQ ID NO: 4277377 - DNA, 25 bp, Homo sapien
cacaaaaaatacctcacagagcttc

SEQ ID NO: 4277378 - DNA, 25 bp, Homo sapien
ctcagataccttcttcagtgtgttg

SEQ ID NO: 4277379 - DNA, 25 bp, Homo sapien
gtgtgttggaaatcactggcttcac

SEQ ID NO: 4277380 - DNA, 25 bp, Homo sapien
ggctttcacactggactcagatacc

SEQ ID NO: 4277381 - DNA, 25 bp, Homo sapien
cagattcaggaggaatttggctttc

SEQ ID NO: 4277382 - DNA, 25 bp, Homo sapien
gaactcaggcttttcattgggcccg

SEQ ID NO: 4277383 - DNA, 25 bp, Homo sapien
cacttctaggccatgttttgactca

SEQ ID NO: 4277384 - DNA, 25 bp, Homo sapien
gtaaccattgcctgtaagcagcaca

SEQ ID NO: 4277385 - DNA, 25 bp, Homo sapien
gagcccctagcacgtgtgaactcag

SEQ ID NO: 4277386 - DNA, 25 bp, Homo sapien
gaatgttggccttactgacacacct

SEQ ID NO: 4277387 - DNA, 25 bp, Homo sapien
ttatgggcgcctagaaagaaaacac

SEQ ID NO: 4277388 - DNA, 25 bp, Homo sapien
gaagagatgttcacctacccggtat

SEQ ID NO: 4277389 - DNA, 25 bp, Homo sapien
gaaggcgccagataggaatctccaa

SEQ ID NO: 4277390 - DNA, 25 bp, Homo sapien
gttagtgctcgagtgaaaacctctt

SEQ ID NO: 4277391 - DNA, 25 bp, Homo sapien
aatgattgaggaggtctggtcaccc

SEQ ID NO: 4277392 - DNA, 25 bp, Homo sapien
cgccgtcatcgccttgtttccatgg

SEQ ID NO: 4277393 - DNA, 25 bp, Homo sapien
cagccatcggctgcgtatgacagca

SEQ ID NO: 4277394 - DNA, 25 bp, Homo sapien
ttttgtaccctcctttatgccaaga

SEQ ID NO: 4277395 - DNA, 25 bp, Homo sapien
ctgagccaaaacttgacagatgtgg

SEQ ID NO: 4277396 - DNA, 25 bp, Homo sapien
cctttatgccaagaatcagtcctaa

SEQ ID NO: 4277397 - DNA, 25 bp, Homo sapien
ccacaggcgtgtatgactggctacg

SEQ ID NO: 4277398 - DNA, 25 bp, Homo sapien
gcagattctgacgctttgtggaccc

SEQ ID NO: 4277399 - DNA, 25 bp, Homo sapien
gggccgggttgacttcggagctgga

SEQ ID NO: 4277400 - DNA, 25 bp, Homo sapien
ggagctggagctcgcaaaggccggg

SEQ ID NO: 4277401 - DNA, 25 bp, Homo sapien
gggctgctgcagattctgacgcttt

SEQ ID NO: 4277402 - DNA, 25 bp, Homo sapien
cgagcgcagccgcaccgcaggtttt

SEQ ID NO: 4277403 - DNA, 25 bp, Homo sapien
gcagccgcaccgcaggttttcttcg

SEQ ID NO: 4277404 - DNA, 25 bp, Homo sapien
caccgcaggttttcttcgctgctgg

SEQ ID NO: 4277405 - DNA, 25 bp, Homo sapien
ttcttcgctgctggttagatccaaa

SEQ ID NO: 4277406 - DNA, 25 bp, Homo sapien
ggaacagggcgctttgcagtttgca

SEQ ID NO: 4277407 - DNA, 25 bp, Homo sapien
tcctagtaaactgggacagcgccgc

SEQ ID NO: 4277408 - DNA, 25 bp, Homo sapien
taaatacgcttttgcatcatccggt

SEQ ID NO: 4277409 - DNA, 25 bp, Homo sapien
tcaggtgcatcattgggaacagggc

SEQ ID NO: 4277410 - DNA, 25 bp, Homo sapien
ctagaatcttctgatccgtagtcag

SEQ ID NO: 4277411 - DNA, 25 bp, Homo sapien
ccgtagtcagacgcgttatccattg

SEQ ID NO: 4277412 - DNA, 25 bp, Homo sapien
gtagtcagacgcgttatccattgcg

SEQ ID NO: 4277413 - DNA, 25 bp, Homo sapien
acgcgttatccattgcgccactggc

SEQ ID NO: 4277414 - DNA, 25 bp, Homo sapien
agctgatcacccttatacagtttga

SEQ ID NO: 4277415 - DNA, 25 bp, Homo sapien
gctaaagccttctccgtgatagctg

SEQ ID NO: 4277416 - DNA, 25 bp, Homo sapien
gccttctccgtgatagctgatcacc

SEQ ID NO: 4277417 - DNA, 25 bp, Homo sapien
tagctgatcacccttatacagtttg

SEQ ID NO: 4277418 - DNA, 25 bp, Homo sapien
aacgatccattttgcccttgcgccg

SEQ ID NO: 4277419 - DNA, 25 bp, Homo sapien
caacgatccattttgcccttgcgcc

SEQ ID NO: 4277420 - DNA, 25 bp, Homo sapien
cattttgcccttgcgccgcgctccc

SEQ ID NO: 4277421 - DNA, 25 bp, Homo sapien
atccattttgcccttgcgccgcgct

SEQ ID NO: 4277422 - DNA, 25 bp, Homo sapien
gcggcttcgtcacggcgctcttcgt

SEQ ID NO: 4277423 - DNA, 25 bp, Homo sapien
aatccgcagcggcttcgtcacggcg

SEQ ID NO: 4277424 - DNA, 25 bp, Homo sapien
ttgcgcactaatttgtcctccaccg

SEQ ID NO: 4277425 - DNA, 25 bp, Homo sapien
gcgtcggcggcatctctcgcgtgct

SEQ ID NO: 4277426 - DNA, 25 bp, Homo sapien
catgagcactgtatccaaccacttt

SEQ ID NO: 4277427 - DNA, 25 bp, Homo sapien
gagttaaccaagagaagtgaacatc

SEQ ID NO: 4277428 - DNA, 25 bp, Homo sapien
tgaacgtatccgtcaccctgaaacg

SEQ ID NO: 4277429 - DNA, 25 bp, Homo sapien
tgttccacttctagggagttaacca

SEQ ID NO: 4277430 - DNA, 25 bp, Homo sapien
cctgaaacgtttcctcgtgcctgta

SEQ ID NO: 4277431 - DNA, 25 bp, Homo sapien
cttggagttctacttcagtctgcat

SEQ ID NO: 4277432 - DNA, 25 bp, Homo sapien
cagtggcttggagttctacttcagt

SEQ ID NO: 4277433 - DNA, 25 bp, Homo sapien
tggcttggagttctacttcagtctg

SEQ ID NO: 4277434 - DNA, 25 bp, Homo sapien
tcagtggcttggagttctacttcag

SEQ ID NO: 4277435 - DNA, 25 bp, Homo sapien
gagcagatgacgtacttaccattga

SEQ ID NO: 4277436 - DNA, 25 bp, Homo sapien
gatgacgtacttaccattgaccgtg

SEQ ID NO: 4277437 - DNA, 25 bp, Homo sapien
tgatggagcagatgacgtacttacc

SEQ ID NO: 4277438 - DNA, 25 bp, Homo sapien
acttaccattgaccgtgtgtccaca

SEQ ID NO: 4277439 - DNA, 25 bp, Homo sapien
tactgggcacaatccatctggtggc

SEQ ID NO: 4277440 - DNA, 25 bp, Homo sapien
tatttggtatactgggcacaatcca

SEQ ID NO: 4277441 - DNA, 25 bp, Homo sapien
gaccaatatttggtatactgggcac

SEQ ID NO: 4277442 - DNA, 25 bp, Homo sapien
cagctgtcacaagaccaatatttgg

SEQ ID NO: 4277443 - DNA, 25 bp, Homo sapien
agtcatgtagtctggaaagcaacag

SEQ ID NO: 4277444 - DNA, 25 bp, Homo sapien
gaagacaatgttgcacttaactgat

SEQ ID NO: 4277445 - DNA, 25 bp, Homo sapien
gtaattatcttatagtcattaccaa

SEQ ID NO: 4277446 - DNA, 25 bp, Homo sapien
aatgttgcacttaactgatattcag

SEQ ID NO: 4277447 - DNA, 25 bp, Homo sapien
cagatttcagtaaccatagtttagt

SEQ ID NO: 4277448 - DNA, 25 bp, Homo sapien
ccagtacccaaacagcatggcttaa

SEQ ID NO: 4277449 - DNA, 25 bp, Homo sapien
ttttgcactattcctgtatgcacag

SEQ ID NO: 4277450 - DNA, 25 bp, Homo sapien
catagaagaagtagctgaccatggg

SEQ ID NO: 4277451 - DNA, 25 bp, Homo sapien
caacaacatatgatttgacccatac

SEQ ID NO: 4277452 - DNA, 25 bp, Homo sapien
tagcgatgctaaaccatgtcttgaa

SEQ ID NO: 4277453 - DNA, 25 bp, Homo sapien
tgtcttgaatgtggatggattttac

SEQ ID NO: 4277454 - DNA, 25 bp, Homo sapien
gataataaaaccttcctagcgatgc

SEQ ID NO: 4277455 - DNA, 25 bp, Homo sapien
cacttacagagaaatctgtgtgcag

SEQ ID NO: 4277456 - DNA, 25 bp, Homo sapien
ttttagcaacttgcctcttatcaag

SEQ ID NO: 4277457 - DNA, 25 bp, Homo sapien
taagtatgactggtacaaattcagg

SEQ ID NO: 4277458 - DNA, 25 bp, Homo sapien
caggaacacacacttgaatctcagg

SEQ ID NO: 4277459 - DNA, 25 bp, Homo sapien
cagatcagcggtttgtatggaatgg

SEQ ID NO: 4277460 - DNA, 25 bp, Homo sapien
gatcagcggtttgtatggaatggtc

SEQ ID NO: 4277461 - DNA, 25 bp, Homo sapien
atcagcggtttgtatggaatggtca

SEQ ID NO: 4277462 - DNA, 25 bp, Homo sapien
gcagatcagcggtttgtatggaatg

SEQ ID NO: 4277463 - DNA, 25 bp, Homo sapien
tcatcggtttgcccttccagtgtta

SEQ ID NO: 4277464 - DNA, 25 bp, Homo sapien
gttcatcggtttgcccttccagtgt

SEQ ID NO: 4277465 - DNA, 25 bp, Homo sapien
atcggtttgcccttccagtgttaca

SEQ ID NO: 4277466 - DNA, 25 bp, Homo sapien
cggtttgcccttccagtgttacatg

SEQ ID NO: 4277467 - DNA, 25 bp, Homo sapien
tcttagagggcagtaagggagccac

SEQ ID NO: 4277468 - DNA, 25 bp, Homo sapien
gcagcagcaaatgaacctcatgact

SEQ ID NO: 4277469 - DNA, 25 bp, Homo sapien
tattatacagccatagcagcagcaa

SEQ ID NO: 4277470 - DNA, 25 bp, Homo sapien
gctgttcagactaaacaagaatttg

SEQ ID NO: 4277471 - DNA, 25 bp, Homo sapien
gctgtttcagagctggtgtgcgcta

SEQ ID NO: 4277472 - DNA, 25 bp, Homo sapien
tattaccatgcattcatgttctatt

SEQ ID NO: 4277473 - DNA, 25 bp, Homo sapien
tattaatggaaaatactttgattgg

SEQ ID NO: 4277474 - DNA, 25 bp, Homo sapien
gattctcatctcgaggaggagctgt

SEQ ID NO: 4277475 - DNA, 25 bp, Homo sapien
gaattgattcggaaggccatgcagc

SEQ ID NO: 4277476 - DNA, 25 bp, Homo sapien
cagaacaaattgtgcactacaatgg

SEQ ID NO: 4277477 - DNA, 25 bp, Homo sapien
ggccatgcagctaactttgtagaaa

SEQ ID NO: 4277478 - DNA, 25 bp, Homo sapien
caaattgtgcactacaatgggagca

SEQ ID NO: 4277479 - DNA, 25 bp, Homo sapien
actcgaggatcaatacctgttttct

SEQ ID NO: 4277480 - DNA, 25 bp, Homo sapien
agtacaaaccactgccacagatcag

SEQ ID NO: 4277481 - DNA, 25 bp, Homo sapien
gtacaaaccactgccacagatcagc

SEQ ID NO: 4277482 - DNA, 25 bp, Homo sapien
acaaaccactgccacagatcagcaa

SEQ ID NO: 4277483 - DNA, 25 bp, Homo sapien
tttgattcccaagtaattatttatg

SEQ ID NO: 4277484 - DNA, 25 bp, Homo sapien
ttgattcccaagtaattatttatgg

SEQ ID NO: 4277485 - DNA, 25 bp, Homo sapien
caaattttcctcagcactgcttttg

SEQ ID NO: 4277486 - DNA, 25 bp, Homo sapien
gcgacaaattttcctcagcactgct

SEQ ID NO: 4277487 - DNA, 25 bp, Homo sapien
cagcgacaaattttcctcagcactg

SEQ ID NO: 4277488 - DNA, 25 bp, Homo sapien
cgacaaattttcctcagcactgctt

SEQ ID NO: 4277489 - DNA, 25 bp, Homo sapien
tattttctaagttctcttgctggga

SEQ ID NO: 4277490 - DNA, 25 bp, Homo sapien
ttttctttgaaccagtggttcagta

SEQ ID NO: 4277491 - DNA, 25 bp, Homo sapien
tgtctcaggtattttctaagttctc

SEQ ID NO: 4277492 - DNA, 25 bp, Homo sapien
tctaagttctcttgctgggattttt

SEQ ID NO: 4277493 - DNA, 25 bp, Homo sapien
gagaagccacttgagcagacatttg

SEQ ID NO: 4277494 - DNA, 25 bp, Homo sapien
cttccttgggaagtggaatgatgag

SEQ ID NO: 4277495 - DNA, 25 bp, Homo sapien
gcagacatttgcaacaatggtgtct

SEQ ID NO: 4277496 - DNA, 25 bp, Homo sapien
attaaccagaagggctcggagaagc

SEQ ID NO: 4277497 - DNA, 25 bp, Homo sapien
aatatgagatgggatcgactaagta

SEQ ID NO: 4277498 - DNA, 25 bp, Homo sapien
tattttattggatcaggtagcagaa

SEQ ID NO: 4277499 - DNA, 25 bp, Homo sapien
gtattttattggatcaggtagcaga

SEQ ID NO: 4277500 - DNA, 25 bp, Homo sapien
gagatgggatcgactaagtatttta

SEQ ID NO: 4277501 - DNA, 25 bp, Homo sapien
ccagggccacttagttatcttcaga

SEQ ID NO: 4277502 - DNA, 25 bp, Homo sapien
tatgtacaccaactctaaacgaacc

SEQ ID NO: 4277503 - DNA, 25 bp, Homo sapien
tagtagtaatatgacccagggccac

SEQ ID NO: 4277504 - DNA, 25 bp, Homo sapien
tgggatccaacacaccttggtttga

SEQ ID NO: 4277505 - DNA, 25 bp, Homo sapien
tttctagtggactctgctggccagg

SEQ ID NO: 4277506 - DNA, 25 bp, Homo sapien
tagatagaaccaatgtgatccagag

SEQ ID NO: 4277507 - DNA, 25 bp, Homo sapien
gcaaaccaggaaggcgtgttccgaa

SEQ ID NO: 4277508 - DNA, 25 bp, Homo sapien
ttagctcgtcgttcacttcaggccc

SEQ ID NO: 4277509 - DNA, 25 bp, Homo sapien
catgtgggacaaaagcttgaagaac

SEQ ID NO: 4277510 - DNA, 25 bp, Homo sapien
tgcatgtgggacaaaagcttgaaga

SEQ ID NO: 4277511 - DNA, 25 bp, Homo sapien
ttgcatgtgggacaaaagcttgaag

SEQ ID NO: 4277512 - DNA, 25 bp, Homo sapien
agactaggagttttgcatgtgggac

SEQ ID NO: 4277513 - DNA, 25 bp, Homo sapien
ggaactggtgccttgaagactgact

SEQ ID NO: 4277514 - DNA, 25 bp, Homo sapien
gtgccaagcaatatgcgggaactgg

SEQ ID NO: 4277515 - DNA, 25 bp, Homo sapien
cctgggctgacaacgcaaatgcttg

SEQ ID NO: 4277516 - DNA, 25 bp, Homo sapien
tgacaacgcaaatgcttgtgccaag

SEQ ID NO: 4277517 - DNA, 25 bp, Homo sapien
ggacttataatggatggctggaact

SEQ ID NO: 4277518 - DNA, 25 bp, Homo sapien
tcaatgatacgatattataagaaca

SEQ ID NO: 4277519 - DNA, 25 bp, Homo sapien
aagagaactcatttgggacttataa

SEQ ID NO: 4277520 - DNA, 25 bp, Homo sapien
tataagaacaacttttccgatggat

SEQ ID NO: 4277521 - DNA, 25 bp, Homo sapien
catagtcctttaagtgttccaaggg

SEQ ID NO: 4277522 - DNA, 25 bp, Homo sapien
tccaagggactggaaattcctggct

SEQ ID NO: 4277523 - DNA, 25 bp, Homo sapien
attcagtggatgaattagaatctca

SEQ ID NO: 4277524 - DNA, 25 bp, Homo sapien
gaattagaatctcatagtcctttaa

SEQ ID NO: 4277525 - DNA, 25 bp, Homo sapien
attatcatggttgttgccttttcaa

SEQ ID NO: 4277526 - DNA, 25 bp, Homo sapien
tgccttttcaatgtgcattatctgt

SEQ ID NO: 4277527 - DNA, 25 bp, Homo sapien
ggttgttgccttttcaatgtgcatt

SEQ ID NO: 4277528 - DNA, 25 bp, Homo sapien
ttgcctattatcatggttgttgcct

SEQ ID NO: 4277529 - DNA, 25 bp, Homo sapien
gaaacactggcctatgtgctcttct

SEQ ID NO: 4277530 - DNA, 25 bp, Homo sapien
gtgacacttggacagaaacactggc

SEQ ID NO: 4277531 - DNA, 25 bp, Homo sapien
gtcaatttaattagctgttgcagaa

SEQ ID NO: 4277532 - DNA, 25 bp, Homo sapien
tgaattcagcttgcagaatggaagc

SEQ ID NO: 4277533 - DNA, 25 bp, Homo sapien
aatataacctgaattcagcttgcag

SEQ ID NO: 4277534 - DNA, 25 bp, Homo sapien
tactattgggacagttagatttata

SEQ ID NO: 4277535 - DNA, 25 bp, Homo sapien
ttacgctagaggtccaaagctgcct

SEQ ID NO: 4277536 - DNA, 25 bp, Homo sapien
ttatcccaatgtggaagatgcccat

SEQ ID NO: 4277537 - DNA, 25 bp, Homo sapien
actcattgagacacgcaggcctctg

SEQ ID NO: 4277538 - DNA, 25 bp, Homo sapien
catattgcacttggagggtaacagc

SEQ ID NO: 4277539 - DNA, 25 bp, Homo sapien
cacaatagggtaagtaaatatagcc

SEQ ID NO: 4277540 - DNA, 25 bp, Homo sapien
gaactgctaatgtggctgctttgta

SEQ ID NO: 4277541 - DNA, 25 bp, Homo sapien
cagtatttcagaatcctgcgacgat

SEQ ID NO: 4277542 - DNA, 25 bp, Homo sapien
gctgctgggcatttcacttaaagaa

SEQ ID NO: 4277543 - DNA, 25 bp, Homo sapien
ttaagcctatgggaaagtcagagcc

SEQ ID NO: 4277544 - DNA, 25 bp, Homo sapien
tagtatctgtaaaaccgtgagcggc

SEQ ID NO: 4277545 - DNA, 25 bp, Homo sapien
cccaggtggttggaatgcgctgcaa

SEQ ID NO: 4277546 - DNA, 25 bp, Homo sapien
caaggaagcactggacgttagagca

SEQ ID NO: 4277547 - DNA, 25 bp, Homo sapien
ggtaatctttggtcacgagctggcc

SEQ ID NO: 4277548 - DNA, 25 bp, Homo sapien
tctcccctcttgaggcgacgctgaa

SEQ ID NO: 4277549 - DNA, 25 bp, Homo sapien
cagccagtgcataggccgggtaatc

SEQ ID NO: 4277550 - DNA, 25 bp, Homo sapien
gcgacgctgaacaaaagtccccagg

SEQ ID NO: 4277551 - DNA, 25 bp, Homo sapien
tatttccatgtcgtgacaaataacc

SEQ ID NO: 4277552 - DNA, 25 bp, Homo sapien
gatatttccatgtcgtgacaaataa

SEQ ID NO: 4277553 - DNA, 25 bp, Homo sapien
cagtgatatttccatgtcgtgacaa

SEQ ID NO: 4277554 - DNA, 25 bp, Homo sapien
ttccatgtcgtgacaaataacctac

SEQ ID NO: 4277555 - DNA, 25 bp, Homo sapien
catggaaatagtcccctggtttcgg

SEQ ID NO: 4277556 - DNA, 25 bp, Homo sapien
cttttcagtggccatgggggcccag

SEQ ID NO: 4277557 - DNA, 25 bp, Homo sapien
ttcggaaaatgaatggcccatgctt

SEQ ID NO: 4277558 - DNA, 25 bp, Homo sapien
ccacaccatggaaatagtcccctgg

SEQ ID NO: 4277559 - DNA, 25 bp, Homo sapien
gacaatcagcagtgggcttacgcca

SEQ ID NO: 4277560 - DNA, 25 bp, Homo sapien
ggtccccgtgaggatgtagtcgctc

SEQ ID NO: 4277561 - DNA, 25 bp, Homo sapien
tagtcgctcaggtagaagacaaaga

SEQ ID NO: 4277562 - DNA, 25 bp, Homo sapien
ggcgtcccaggcttgatacttcagg

SEQ ID NO: 4277563 - DNA, 25 bp, Homo sapien
gctgctgacgtagttggactctagg

SEQ ID NO: 4277564 - DNA, 25 bp, Homo sapien
cctgctgcatgtcctgggtgtccat

SEQ ID NO: 4277565 - DNA, 25 bp, Homo sapien
ctttgctgctgctgacgtagttgga

SEQ ID NO: 4277566 - DNA, 25 bp, Homo sapien
catgtcctgggtgtccatgcgaggc

SEQ ID NO: 4277567 - DNA, 25 bp, Homo sapien
tacacgtagcacacggcaatcgtct

SEQ ID NO: 4277568 - DNA, 25 bp, Homo sapien
catcgtgaacaccatgccaatggca

SEQ ID NO: 4277569 - DNA, 25 bp, Homo sapien
cagtgtggccgcgtagtcgttgaat

SEQ ID NO: 4277570 - DNA, 25 bp, Homo sapien
gcacagttgacaaggcacaccagac

SEQ ID NO: 4277571 - DNA, 25 bp, Homo sapien
tgggggccacaagaccagctgctca

SEQ ID NO: 4277572 - DNA, 25 bp, Homo sapien
gggggccacaagaccagctgctcac

SEQ ID NO: 4277573 - DNA, 25 bp, Homo sapien
ctgggggccacaagaccagctgctc

SEQ ID NO: 4277574 - DNA, 25 bp, Homo sapien
aatccactgagtttgtacttaagaa

SEQ ID NO: 4277575 - DNA, 25 bp, Homo sapien
ggttccttgggtggatacatatgta

SEQ ID NO: 4277576 - DNA, 25 bp, Homo sapien
tttataatggtcatacttcaggcca

SEQ ID NO: 4277577 - DNA, 25 bp, Homo sapien
tggtggttccttgggtggatacata

SEQ ID NO: 4277578 - DNA, 25 bp, Homo sapien
tgtagacgatgaatgccaggccagt

SEQ ID NO: 4277579 - DNA, 25 bp, Homo sapien
tggcctctgtgtagacgatgaatgc

SEQ ID NO: 4277580 - DNA, 25 bp, Homo sapien
ccagcatgctcccaatgcccagcat

SEQ ID NO: 4277581 - DNA, 25 bp, Homo sapien
cagctgggacacctccatgttttta

SEQ ID NO: 4277582 - DNA, 25 bp, Homo sapien
tttctgcttctaatgtgatgaccga

SEQ ID NO: 4277583 - DNA, 25 bp, Homo sapien
tgtcctgaaacctccgtggctggga

SEQ ID NO: 4277584 - DNA, 25 bp, Homo sapien
gatgaccgactaggtgtcctgaaac

SEQ ID NO: 4277585 - DNA, 25 bp, Homo sapien
ctaatgtgatgaccgactaggtgtc

SEQ ID NO: 4277586 - DNA, 25 bp, Homo sapien
catctcgctgtatttgcttgggtag

SEQ ID NO: 4277587 - DNA, 25 bp, Homo sapien
taggcagatgcgaggtagcccttca

SEQ ID NO: 4277588 - DNA, 25 bp, Homo sapien
tttgatttgcgggaacatctcgctg

SEQ ID NO: 4277589 - DNA, 25 bp, Homo sapien
gtctagctccgattccaagctgcag

SEQ ID NO: 4277590 - DNA, 25 bp, Homo sapien
cccaggccaagtgagaagaagatct

SEQ ID NO: 4277591 - DNA, 25 bp, Homo sapien
tctgggtggctgcattgatccaggc

SEQ ID NO: 4277592 - DNA, 25 bp, Homo sapien
ctcattgtagctggcgaaggcgatc

SEQ ID NO: 4277593 - DNA, 25 bp, Homo sapien
gcttctggcagttgttggatggctc

SEQ ID NO: 4277594 - DNA, 25 bp, Homo sapien
tggaaggccagcagggacagggctg

SEQ ID NO: 4277595 - DNA, 25 bp, Homo sapien
aggccagcagggacagggctgatga

SEQ ID NO: 4277596 - DNA, 25 bp, Homo sapien
ctggaaggccagcagggacagggct

SEQ ID NO: 4277597 - DNA, 25 bp, Homo sapien
ccagcagggacagggctgatgatcc

SEQ ID NO: 4277598 - DNA, 25 bp, Homo sapien
tcagccataggaggtgtgtaaccag

SEQ ID NO: 4277599 - DNA, 25 bp, Homo sapien
gacataaggtgctacgtatcctcca

SEQ ID NO: 4277600 - DNA, 25 bp, Homo sapien
tgggttgactctcggcactgacatc

SEQ ID NO: 4277601 - DNA, 25 bp, Homo sapien
tgctcagacccgcaacaggagagta

SEQ ID NO: 4277602 - DNA, 25 bp, Homo sapien
gataagtgaggggtgcccgtagggc

SEQ ID NO: 4277603 - DNA, 25 bp, Homo sapien
gtgcccgtagggcccttccgcttca

SEQ ID NO: 4277604 - DNA, 25 bp, Homo sapien
ggcaggataagtgaggggtgcccgt

SEQ ID NO: 4277605 - DNA, 25 bp, Homo sapien
gcccgtagggcccttccgcttcagc

SEQ ID NO: 4277606 - DNA, 25 bp, Homo sapien
tgaggcccctgatgaggtagatgat

SEQ ID NO: 4277607 - DNA, 25 bp, Homo sapien
cacgcaatagggcagtgacgccgtg

SEQ ID NO: 4277608 - DNA, 25 bp, Homo sapien
tagatgatgagcacgcaatagggca

SEQ ID NO: 4277609 - DNA, 25 bp, Homo sapien
tgaacatgtacatgaggccattggt

SEQ ID NO: 4277610 - DNA, 25 bp, Homo sapien
tcgtagcccgtgtggttaccattca

SEQ ID NO: 4277611 - DNA, 25 bp, Homo sapien
ttaccattcagtgggcagacagacc

SEQ ID NO: 4277612 - DNA, 25 bp, Homo sapien
gacggcgagatattgagggttttcc

SEQ ID NO: 4277613 - DNA, 25 bp, Homo sapien
tcggtgccacgcaggatgcacaggt

SEQ ID NO: 4277614 - DNA, 25 bp, Homo sapien
gttctggcacgggccccccggctca

SEQ ID NO: 4277615 - DNA, 25 bp, Homo sapien
tttctcgctcctactcctgttctgg

SEQ ID NO: 4277616 - DNA, 25 bp, Homo sapien
ctgttctggcacgggccccccggct

SEQ ID NO: 4277617 - DNA, 25 bp, Homo sapien
ccctttctcgctcctactcctgttc

SEQ ID NO: 4277618 - DNA, 25 bp, Homo sapien
ccagaaggcccaggcgttgatgacg

SEQ ID NO: 4277619 - DNA, 25 bp, Homo sapien
gatgacgttgtagtacatggagagg

SEQ ID NO: 4277620 - DNA, 25 bp, Homo sapien
aggaagaaagagaccaccacgctgg

SEQ ID NO: 4277621 - DNA, 25 bp, Homo sapien
aagaaagagaccaccacgctggcga

SEQ ID NO: 4277622 - DNA, 25 bp, Homo sapien
gggccgcgctgaggactgaggatgg

SEQ ID NO: 4277623 - DNA, 25 bp, Homo sapien
cgcgctgaggactgaggatggccct

SEQ ID NO: 4277624 - DNA, 25 bp, Homo sapien
aggcccagcgtgtgctcccaggaca

SEQ ID NO: 4277625 - DNA, 25 bp, Homo sapien
gctgaggactgaggatggcccttcc

SEQ ID NO: 4277626 - DNA, 25 bp, Homo sapien
cttgtccagatgtacagttatgctc

SEQ ID NO: 4277627 - DNA, 25 bp, Homo sapien
cagatgtacagttatgctccctcct

SEQ ID NO: 4277628 - DNA, 25 bp, Homo sapien
tgtacagttatgctccctccttggc

SEQ ID NO: 4277629 - DNA, 25 bp, Homo sapien
tacagttatgctccctccttggctc

SEQ ID NO: 4277630 - DNA, 25 bp, Homo sapien
gcggcattccctccacgataagcat

SEQ ID NO: 4277631 - DNA, 25 bp, Homo sapien
cgacaccactgaggtacgggctgat

SEQ ID NO: 4277632 - DNA, 25 bp, Homo sapien
cagttccaggtacaagagcggcatt

SEQ ID NO: 4277633 - DNA, 25 bp, Homo sapien
gatggtcctccaggcgccgatgctg

SEQ ID NO: 4277634 - DNA, 25 bp, Homo sapien
ctgctctattctgtgagactctcca

SEQ ID NO: 4277635 - DNA, 25 bp, Homo sapien
tgtaatgtttaatgtaaggaacacc

SEQ ID NO: 4277636 - DNA, 25 bp, Homo sapien
taatgtaaggaacaccgagcacacc

SEQ ID NO: 4277637 - DNA, 25 bp, Homo sapien
ttcccatttggagtcaaacccagtc

SEQ ID NO: 4277638 - DNA, 25 bp, Homo sapien
tgaaggggaagtaggcacgtcttac

SEQ ID NO: 4277639 - DNA, 25 bp, Homo sapien
cctcaggaaacttgcaattttggaa

SEQ ID NO: 4277640 - DNA, 25 bp, Homo sapien
caggaaacttgcaattttggaagaa

SEQ ID NO: 4277641 - DNA, 25 bp, Homo sapien
gcctcaggaaacttgcaattttgga

SEQ ID NO: 4277642 - DNA, 25 bp, Homo sapien
attaacattcctcatgccgggccgg

SEQ ID NO: 4277643 - DNA, 25 bp, Homo sapien
ctggaatgtaatcttcagaattaac

SEQ ID NO: 4277644 - DNA, 25 bp, Homo sapien
ggaatgtaatcttcagaattaacat

SEQ ID NO: 4277645 - DNA, 25 bp, Homo sapien
aattaacattcctcatgccgggccg

SEQ ID NO: 4277646 - DNA, 25 bp, Homo sapien
ccacggcgtacgagatgcaggcgaa

SEQ ID NO: 4277647 - DNA, 25 bp, Homo sapien
aactgtagcgagttggcccacagcg

SEQ ID NO: 4277648 - DNA, 25 bp, Homo sapien
ctggcacaggtacgggaatcgccac

SEQ ID NO: 4277649 - DNA, 25 bp, Homo sapien
agatgcaggcgaacacgaactgtag

SEQ ID NO: 4277650 - DNA, 25 bp, Homo sapien
ggccccggcctcggcgcgctcggct

SEQ ID NO: 4277651 - DNA, 25 bp, Homo sapien
cgcgctcggctccggctcgggggtc

SEQ ID NO: 4277652 - DNA, 25 bp, Homo sapien
gcgcgctcggctccggctcgggggt

SEQ ID NO: 4277653 - DNA, 25 bp, Homo sapien
ggcctcggcgcgctcggctccggct

SEQ ID NO: 4277654 - DNA, 25 bp, Homo sapien
cggcacggcagtctcagtgcgcggt

SEQ ID NO: 4277655 - DNA, 25 bp, Homo sapien
aggcgcgccgtcccaccccggctcg

SEQ ID NO: 4277656 - DNA, 25 bp, Homo sapien
cggcagtctcagtgcgcggtcgcca

SEQ ID NO: 4277657 - DNA, 25 bp, Homo sapien
gcacggcagtctcagtgcgcggtcg

SEQ ID NO: 4277658 - DNA, 25 bp, Homo sapien
gcagctagctggtttttaaattgct

SEQ ID NO: 4277659 - DNA, 25 bp, Homo sapien
agctagctggtttttaaattgctaa

SEQ ID NO: 4277660 - DNA, 25 bp, Homo sapien
cagctagctggtttttaaattgcta

SEQ ID NO: 4277661 - DNA, 25 bp, Homo sapien
gaaggcacccgagattgcagaggac

SEQ ID NO: 4277662 - DNA, 25 bp, Homo sapien
tcgcggccgggaaggcacccgagat

SEQ ID NO: 4277663 - DNA, 25 bp, Homo sapien
tggtaaatggatgacggcgagcccc

SEQ ID NO: 4277664 - DNA, 25 bp, Homo sapien
cgtccgagaggcgaggctggtaaat

SEQ ID NO: 4277665 - DNA, 25 bp, Homo sapien
tataacaagacgcagagagcctcca

SEQ ID NO: 4277666 - DNA, 25 bp, Homo sapien
tccaggatcggaggaactgctggcc

SEQ ID NO: 4277667 - DNA, 25 bp, Homo sapien
cactgagctattccaagcaatttag

SEQ ID NO: 4277668 - DNA, 25 bp, Homo sapien
caacatggctgcacagaactggcac

SEQ ID NO: 4277669 - DNA, 25 bp, Homo sapien
gataacaactaatgggacacagatg

SEQ ID NO: 4277670 - DNA, 25 bp, Homo sapien
ctgtgagatatgataacaactaatg

SEQ ID NO: 4277671 - DNA, 25 bp, Homo sapien
acaactaatgggacacagatgactt

SEQ ID NO: 4277672 - DNA, 25 bp, Homo sapien
gagatatgataacaactaatgggac

SEQ ID NO: 4277673 - DNA, 25 bp, Homo sapien
aaatggcaagagattggcaaaccaa

SEQ ID NO: 4277674 - DNA, 25 bp, Homo sapien
tggcaagagattggcaaaccaaaca

SEQ ID NO: 4277675 - DNA, 25 bp, Homo sapien
gaaaatggcaagagattggcaaacc

SEQ ID NO: 4277676 - DNA, 25 bp, Homo sapien
ttggaaaatggcaagagattggcaa

SEQ ID NO: 4277677 - DNA, 25 bp, Homo sapien
tgatgacacaatccaaaagacacca

SEQ ID NO: 4277678 - DNA, 25 bp, Homo sapien
tacacgcttacttgatgaaggagct

SEQ ID NO: 4277679 - DNA, 25 bp, Homo sapien
ggcaaagctttggaacataggcatt

SEQ ID NO: 4277680 - DNA, 25 bp, Homo sapien
ctggaagactggcttacatgacaat

SEQ ID NO: 4277681 - DNA, 25 bp, Homo sapien
aagggcttaaaatttgagcatctct

SEQ ID NO: 4277682 - DNA, 25 bp, Homo sapien
tctctttcagttaatcagaatggaa

SEQ ID NO: 4277683 - DNA, 25 bp, Homo sapien
aatctctttcagttaatcagaatgg

SEQ ID NO: 4277684 - DNA, 25 bp, Homo sapien
ttgagcatctctataaatctctttc

SEQ ID NO: 4277685 - DNA, 25 bp, Homo sapien
ttaatataggttaaaatgtaataca

SEQ ID NO: 4277686 - DNA, 25 bp, Homo sapien
catttaaacatttatttaatatagg

SEQ ID NO: 4277687 - DNA, 25 bp, Homo sapien
ggttaaaatgtaatacataaagaga

SEQ ID NO: 4277688 - DNA, 25 bp, Homo sapien
tataggttaaaatgtaatacataaa

SEQ ID NO: 4277689 - DNA, 25 bp, Homo sapien
gaatggtttctgaaggccacactag

SEQ ID NO: 4277690 - DNA, 25 bp, Homo sapien
aaagctgcattgtgatggccatcaa

SEQ ID NO: 4277691 - DNA, 25 bp, Homo sapien
tctgtgcataactcagcagcaggcc

SEQ ID NO: 4277692 - DNA, 25 bp, Homo sapien
gaatgaagccctcaacaaaagctcc

SEQ ID NO: 4277693 - DNA, 25 bp, Homo sapien
caaaatcgtctgagaaaaccaggcc

SEQ ID NO: 4277694 - DNA, 25 bp, Homo sapien
tatcactgccttacataactgtgga

SEQ ID NO: 4277695 - DNA, 25 bp, Homo sapien
gcaaaaaatgctgaacctcctctga

SEQ ID NO: 4277696 - DNA, 25 bp, Homo sapien
cctatgctccaatcagtaaactcgt

SEQ ID NO: 4277697 - DNA, 25 bp, Homo sapien
aagagacatatttatttgtaataac

SEQ ID NO: 4277698 - DNA, 25 bp, Homo sapien
gagacatatttatttgtaataactc

SEQ ID NO: 4277699 - DNA, 25 bp, Homo sapien
gacatatttatttgtaataactctc

SEQ ID NO: 4277700 - DNA, 25 bp, Homo sapien
taaagagacatatttatttgtaata

SEQ ID NO: 4277701 - DNA, 25 bp, Homo sapien
atttttacccatggggaatgcataa

SEQ ID NO: 4277702 - DNA, 25 bp, Homo sapien
cccatggggaatgcataagtacaaa

SEQ ID NO: 4277703 - DNA, 25 bp, Homo sapien
tttacccatggggaatgcataagta

SEQ ID NO: 4277704 - DNA, 25 bp, Homo sapien
tacccatggggaatgcataagtaca

SEQ ID NO: 4277705 - DNA, 25 bp, Homo sapien
cagtgcatgtgagctaagactctgg

SEQ ID NO: 4277706 - DNA, 25 bp, Homo sapien
tgaccagacagaatcactaggtttt

SEQ ID NO: 4277707 - DNA, 25 bp, Homo sapien
tactaatgcagaaggataagcctct

SEQ ID NO: 4277708 - DNA, 25 bp, Homo sapien
tcaactagctgaaaataggaactct

SEQ ID NO: 4277709 - DNA, 25 bp, Homo sapien
ggtgagactgcttgtatgtttgcat

SEQ ID NO: 4277710 - DNA, 25 bp, Homo sapien
gaggtgagactgcttgtatgtttgc

SEQ ID NO: 4277711 - DNA, 25 bp, Homo sapien
gtgagactgcttgtatgtttgcatg

SEQ ID NO: 4277712 - DNA, 25 bp, Homo sapien
aggtgagactgcttgtatgtttgca

SEQ ID NO: 4277713 - DNA, 25 bp, Homo sapien
tgatacgactatatgagtaaagggc

SEQ ID NO: 4277714 - DNA, 25 bp, Homo sapien
taggccagatcactgctaaggctcc

SEQ ID NO: 4277715 - DNA, 25 bp, Homo sapien
tgctcccctggaactctgataaagg

SEQ ID NO: 4277716 - DNA, 25 bp, Homo sapien
taaagggctagcaaatctacttctc

SEQ ID NO: 4277717 - DNA, 25 bp, Homo sapien
aatgatccagcaactaccaccggct

SEQ ID NO: 4277718 - DNA, 25 bp, Homo sapien
gaaggcttctggactaaatgatcca

SEQ ID NO: 4277719 - DNA, 25 bp, Homo sapien
caccggcttgacctctctggaacaa

SEQ ID NO: 4277720 - DNA, 25 bp, Homo sapien
tactgtaggcctgtgtgagtctaaa

SEQ ID NO: 4277721 - DNA, 25 bp, Homo sapien
tcatgtttcgataagctgctgtttg

SEQ ID NO: 4277722 - DNA, 25 bp, Homo sapien
tctttcatgtttcgataagctgctg

SEQ ID NO: 4277723 - DNA, 25 bp, Homo sapien
tgtttcgataagctgctgtttgctg

SEQ ID NO: 4277724 - DNA, 25 bp, Homo sapien
tctctttcatgtttcgataagctgc

SEQ ID NO: 4277725 - DNA, 25 bp, Homo sapien
gcttagtaaaaaatgtcagcccatt

SEQ ID NO: 4277726 - DNA, 25 bp, Homo sapien
cttagtaaaaaatgtcagcccatta

SEQ ID NO: 4277727 - DNA, 25 bp, Homo sapien
tgcttagtaaaaaatgtcagcccat

SEQ ID NO: 4277728 - DNA, 25 bp, Homo sapien
ctgcttagtaaaaaatgtcagccca

SEQ ID NO: 4277729 - DNA, 25 bp, Homo sapien
atataaaactaagactatccaaact

SEQ ID NO: 4277730 - DNA, 25 bp, Homo sapien
caactcccatattcttaagagtcta

SEQ ID NO: 4277731 - DNA, 25 bp, Homo sapien
catattcttaagagtctaatcccca

SEQ ID NO: 4277732 - DNA, 25 bp, Homo sapien
tcttaagagtctaatccccaaagtg

SEQ ID NO: 4277733 - DNA, 25 bp, Homo sapien
ggcctcaactcccatattcttaaga

SEQ ID NO: 4277734 - DNA, 25 bp, Homo sapien
ctgaaccctgagtagatcgtgcttg

SEQ ID NO: 4277735 - DNA, 25 bp, Homo sapien
taaggcagcgacagtgttttctaag

SEQ ID NO: 4277736 - DNA, 25 bp, Homo sapien
actctttaaggcagcgacagtgttt

SEQ ID NO: 4277737 - DNA, 25 bp, Homo sapien
tagatcgtgcttggctgtcgccaga

SEQ ID NO: 4277738 - DNA, 25 bp, Homo sapien
tgatttccttgatcaagctgtaaat

SEQ ID NO: 4277739 - DNA, 25 bp, Homo sapien
caagctgtaaatcttgcagtgcttt

SEQ ID NO: 4277740 - DNA, 25 bp, Homo sapien
ctagttttgacttttcatccagtgc

SEQ ID NO: 4277741 - DNA, 25 bp, Homo sapien
taaatcttgcagtgctttttctagt

SEQ ID NO: 4277742 - DNA, 25 bp, Homo sapien
caatggtcttcaaccttgacttcaa

SEQ ID NO: 4277743 - DNA, 25 bp, Homo sapien
ctgtatttcaatggtcttcaacctt

SEQ ID NO: 4277744 - DNA, 25 bp, Homo sapien
tatttcaatggtcttcaaccttgac

SEQ ID NO: 4277745 - DNA, 25 bp, Homo sapien
ttcaatggtcttcaaccttgacttc

SEQ ID NO: 4277746 - DNA, 25 bp, Homo sapien
acaactgagtcttctctgctaccca

SEQ ID NO: 4277747 - DNA, 25 bp, Homo sapien
ctactgttatccacacacaactgag

SEQ ID NO: 4277748 - DNA, 25 bp, Homo sapien
tgttatccacacacaactgagtctt

SEQ ID NO: 4277749 - DNA, 25 bp, Homo sapien
tccacacacaactgagtcttctctg

SEQ ID NO: 4277750 - DNA, 25 bp, Homo sapien
gctctctagaaggttaagtatgccc

SEQ ID NO: 4277751 - DNA, 25 bp, Homo sapien
ttctgtttctccaccctaggcaatg

SEQ ID NO: 4277752 - DNA, 25 bp, Homo sapien
aatggactaattatcctcagaggac

SEQ ID NO: 4277753 - DNA, 25 bp, Homo sapien
tgtccatcaataaacgctgtccaaa

SEQ ID NO: 4277754 - DNA, 25 bp, Homo sapien
aagtggagcaagttttggctttgtg

SEQ ID NO: 4277755 - DNA, 25 bp, Homo sapien
cattaagtggagcaagttttggctt

SEQ ID NO: 4277756 - DNA, 25 bp, Homo sapien
tttttgtttgaagatgtaatctctg

SEQ ID NO: 4277757 - DNA, 25 bp, Homo sapien
ttttgtttgaagatgtaatctctgc

SEQ ID NO: 4277758 - DNA, 25 bp, Homo sapien
ttgtttgaagatgtaatctctgctt

SEQ ID NO: 4277759 - DNA, 25 bp, Homo sapien
tttgtttgaagatgtaatctctgct

SEQ ID NO: 4277760 - DNA, 25 bp, Homo sapien
gttgagaacctaaaccacatggact

SEQ ID NO: 4277761 - DNA, 25 bp, Homo sapien
ccatctgaagatttgcaaaggccaa

SEQ ID NO: 4277762 - DNA, 25 bp, Homo sapien
cataggttgtcctcagcgttgttca

SEQ ID NO: 4277763 - DNA, 25 bp, Homo sapien
gagaacagagcaagatggaccaaac

SEQ ID NO: 4277764 - DNA, 25 bp, Homo sapien
tccattgaggacttcagagacttca

SEQ ID NO: 4277765 - DNA, 25 bp, Homo sapien
gaaccacagcttgtaatccattgag

SEQ ID NO: 4277766 - DNA, 25 bp, Homo sapien
gctgtcgcagaagtaacacattggt

SEQ ID NO: 4277767 - DNA, 25 bp, Homo sapien
catctatggtgaaggtgtcctccac

SEQ ID NO: 4277768 - DNA, 25 bp, Homo sapien
gaatccatgttcctatttggtttgc

SEQ ID NO: 4277769 - DNA, 25 bp, Homo sapien
ccatgttcctatttggtttgcttag

SEQ ID NO: 4277770 - DNA, 25 bp, Homo sapien
cagaaagaatccatgttcctatttg

SEQ ID NO: 4277771 - DNA, 25 bp, Homo sapien
tgttcctatttggtttgcttagagt

SEQ ID NO: 4277772 - DNA, 25 bp, Homo sapien
tcaagcctctctttgaacgagcaaa

SEQ ID NO: 4277773 - DNA, 25 bp, Homo sapien
gaagcaggaatctacagttttgagt

SEQ ID NO: 4277774 - DNA, 25 bp, Homo sapien
gctctccttgaggtcttggaagcag

SEQ ID NO: 4277775 - DNA, 25 bp, Homo sapien
gaacgagcaaaacgcatataattaa

SEQ ID NO: 4277776 - DNA, 25 bp, Homo sapien
cggtgcggcgcctgagggtcggtta

SEQ ID NO: 4277777 - DNA, 25 bp, Homo sapien
tcctgtgcgcggtgcggcgcctgag

SEQ ID NO: 4277778 - DNA, 25 bp, Homo sapien
cggcgcctgagggtcggttactcac

SEQ ID NO: 4277779 - DNA, 25 bp, Homo sapien
ccggccgcgctctctcctgtgcgcg

SEQ ID NO: 4277780 - DNA, 25 bp, Homo sapien
gccgagggtagttggaccacagaaa

SEQ ID NO: 4277781 - DNA, 25 bp, Homo sapien
gcggtgccccgccaagcctgggatc

SEQ ID NO: 4277782 - DNA, 25 bp, Homo sapien
agggtaggttgtttagaagcctctg

SEQ ID NO: 4277783 - DNA, 25 bp, Homo sapien
ctaaaggaacgggagaggccaggcg

SEQ ID NO: 4277784 - DNA, 25 bp, Homo sapien
tggtcgattaattgtttcataaccc

SEQ ID NO: 4277785 - DNA, 25 bp, Homo sapien
tcatgagctttctttgagcaggcat

SEQ ID NO: 4277786 - DNA, 25 bp, Homo sapien
ctgtggtcgattaattgtttcataa

SEQ ID NO: 4277787 - DNA, 25 bp, Homo sapien
ttcatgagctttctttgagcaggca

SEQ ID NO: 4277788 - DNA, 25 bp, Homo sapien
gtagggtacaacttgatggattttc

SEQ ID NO: 4277789 - DNA, 25 bp, Homo sapien
tgggtagggtacaacttgatggatt

SEQ ID NO: 4277790 - DNA, 25 bp, Homo sapien
agggtgggtagggtacaacttgatg

SEQ ID NO: 4277791 - DNA, 25 bp, Homo sapien
tacaacttgatggattttctctgcc

SEQ ID NO: 4277792 - DNA, 25 bp, Homo sapien
gaactctggcctctaggaagctgtc

SEQ ID NO: 4277793 - DNA, 25 bp, Homo sapien
cttgcgattaatccactgtgaactc

SEQ ID NO: 4277794 - DNA, 25 bp, Homo sapien
gacatagttggaggtgttgctcctt

SEQ ID NO: 4277795 - DNA, 25 bp, Homo sapien
gctgtccaagaaatagggacatagt

SEQ ID NO: 4277796 - DNA, 25 bp, Homo sapien
ctctattcagcacagggtcgaagta

SEQ ID NO: 4277797 - DNA, 25 bp, Homo sapien
gatgtgcttaggagaggcgatggac

SEQ ID NO: 4277798 - DNA, 25 bp, Homo sapien
cacagggtcgaagtacactggcctt

SEQ ID NO: 4277799 - DNA, 25 bp, Homo sapien
tcgaagtacactggccttgtgcaga

SEQ ID NO: 4277800 - DNA, 25 bp, Homo sapien
ctttgtcattcttatggagctcatt

SEQ ID NO: 4277801 - DNA, 25 bp, Homo sapien
gtcattcttatggagctcatttttc

SEQ ID NO: 4277802 - DNA, 25 bp, Homo sapien
ttgtcattcttatggagctcatttt

SEQ ID NO: 4277803 - DNA, 25 bp, Homo sapien
atctttgtcattcttatggagctca

SEQ ID NO: 4277804 - DNA, 25 bp, Homo sapien
tttccactgaccgttctatcactct

SEQ ID NO: 4277805 - DNA, 25 bp, Homo sapien
tatcactctccagaagggtgatcat

SEQ ID NO: 4277806 - DNA, 25 bp, Homo sapien
gattacatttccactgaccgttcta

SEQ ID NO: 4277807 - DNA, 25 bp, Homo sapien
cttgtggccatcgattacatttcca

SEQ ID NO: 4277808 - DNA, 25 bp, Homo sapien
gctcatctataaagtcctcttttct

SEQ ID NO: 4277809 - DNA, 25 bp, Homo sapien
cctcttttctctggaagacctccat

SEQ ID NO: 4277810 - DNA, 25 bp, Homo sapien
cataacagctcatctataaagtcct

SEQ ID NO: 4277811 - DNA, 25 bp, Homo sapien
aacagctcatctataaagtcctctt

SEQ ID NO: 4277812 - DNA, 25 bp, Homo sapien
tttccccattccctgtaagcagctg

SEQ ID NO: 4277813 - DNA, 25 bp, Homo sapien
ggcaagcctgacaaggctgacttct

SEQ ID NO: 4277814 - DNA, 25 bp, Homo sapien
caaggctgacttctctcgatgggat

SEQ ID NO: 4277815 - DNA, 25 bp, Homo sapien
gacttctctcgatgggatcctccaa

SEQ ID NO: 4277816 - DNA, 25 bp, Homo sapien
tgttactccatagacggctggcaag

SEQ ID NO: 4277817 - DNA, 25 bp, Homo sapien
tagttctgaattagctgttactcca

SEQ ID NO: 4277818 - DNA, 25 bp, Homo sapien
tgaattagctgttactccatagacg

SEQ ID NO: 4277819 - DNA, 25 bp, Homo sapien
ctccatagacggctggcaagtccat

SEQ ID NO: 4277820 - DNA, 25 bp, Homo sapien
gttggcaggcatctgatccaggcat

SEQ ID NO: 4277821 - DNA, 25 bp, Homo sapien
ccctgctgggcggttggcaggcatc

SEQ ID NO: 4277822 - DNA, 25 bp, Homo sapien
tgggcggttggcaggcatctgatcc

SEQ ID NO: 4277823 - DNA, 25 bp, Homo sapien
gcttgtgttgggagcccctgggccc

SEQ ID NO: 4277824 - DNA, 25 bp, Homo sapien
gctgacagccggagatgacactgag

SEQ ID NO: 4277825 - DNA, 25 bp, Homo sapien
ctgacagccggagatgacactgaga

SEQ ID NO: 4277826 - DNA, 25 bp, Homo sapien
agaagtgaagtgccagaaggttttc

SEQ ID NO: 4277827 - DNA, 25 bp, Homo sapien
aagtgaagtgccagaaggttttcat

SEQ ID NO: 4277828 - DNA, 25 bp, Homo sapien
gattgcatcctgagagagctgacac

SEQ ID NO: 4277829 - DNA, 25 bp, Homo sapien
ggactggacgccaatgcttttccca

SEQ ID NO: 4277830 - DNA, 25 bp, Homo sapien
cccattgtagttgttacagagagtc

SEQ ID NO: 4277831 - DNA, 25 bp, Homo sapien
gaactgactagaccaggactggacg

SEQ ID NO: 4277832 - DNA, 25 bp, Homo sapien
cctaaggctggatgggtaagaacac

SEQ ID NO: 4277833 - DNA, 25 bp, Homo sapien
gaacactgggtatgcaggagatcca

SEQ ID NO: 4277834 - DNA, 25 bp, Homo sapien
gcatgggtcctgtctcattataacc

SEQ ID NO: 4277835 - DNA, 25 bp, Homo sapien
agatccatagtgtggttgggcgcca

SEQ ID NO: 4277836 - DNA, 25 bp, Homo sapien
taaaagtgggctgacttacagcaag

SEQ ID NO: 4277837 - DNA, 25 bp, Homo sapien
gtaaaagtgggctgacttacagcaa

SEQ ID NO: 4277838 - DNA, 25 bp, Homo sapien
aaaagtgggctgacttacagcaaga

SEQ ID NO: 4277839 - DNA, 25 bp, Homo sapien
aaagtgggctgacttacagcaagag

SEQ ID NO: 4277840 - DNA, 25 bp, Homo sapien
tccacacctttgacaatctgacaaa

SEQ ID NO: 4277841 - DNA, 25 bp, Homo sapien
tctatcagatctaatgacaaccttc

SEQ ID NO: 4277842 - DNA, 25 bp, Homo sapien
tccgagtggagataaacataaatga

SEQ ID NO: 4277843 - DNA, 25 bp, Homo sapien
tctgacaaagcctatagcccctttc

SEQ ID NO: 4277844 - DNA, 25 bp, Homo sapien
gacgttttggcctcccagaaatggc

SEQ ID NO: 4277845 - DNA, 25 bp, Homo sapien
tcagagtcggccttgggagcagaaa

SEQ ID NO: 4277846 - DNA, 25 bp, Homo sapien
tgatgattctatggacccacaggcc

SEQ ID NO: 4277847 - DNA, 25 bp, Homo sapien
tttggtaaggacactcatgcatctc

SEQ ID NO: 4277848 - DNA, 25 bp, Homo sapien
actttgtgccaaacgtgcctccttg

SEQ ID NO: 4277849 - DNA, 25 bp, Homo sapien
ttggttctaagcatcacgaatggct

SEQ ID NO: 4277850 - DNA, 25 bp, Homo sapien
tggacctggaggacaacactttgtg

SEQ ID NO: 4277851 - DNA, 25 bp, Homo sapien
gtaaacaagaatggccgtctcgatg

SEQ ID NO: 4277852 - DNA, 25 bp, Homo sapien
tgaaaccacatagttaggaagtcac

SEQ ID NO: 4277853 - DNA, 25 bp, Homo sapien
ccaagatgttttgtagctgcagaga

SEQ ID NO: 4277854 - DNA, 25 bp, Homo sapien
gcaaacttgagcttaaacagcaacc

SEQ ID NO: 4277855 - DNA, 25 bp, Homo sapien
atctgggatcccaaggacgcttcct

SEQ ID NO: 4277856 - DNA, 25 bp, Homo sapien
ttctgggtaagctgcaaccggtcct

SEQ ID NO: 4277857 - DNA, 25 bp, Homo sapien
tcacaagggtagctggaggaactgc

SEQ ID NO: 4277858 - DNA, 25 bp, Homo sapien
cagaaggtcatcagcttggccagag

SEQ ID NO: 4277859 - DNA, 25 bp, Homo sapien
gaaatgacctcttacttgtggcccc

SEQ ID NO: 4277860 - DNA, 25 bp, Homo sapien
caatgctttgagctgtggagaggtc

SEQ ID NO: 4277861 - DNA, 25 bp, Homo sapien
gaatcacccagacaaaagggccaga

SEQ ID NO: 4277862 - DNA, 25 bp, Homo sapien
caccgactcgcatgatggctgtgta

SEQ ID NO: 4277863 - DNA, 25 bp, Homo sapien
gaaagagagtgcagcttagaggccc

SEQ ID NO: 4277864 - DNA, 25 bp, Homo sapien
caagaggcctgtagccaactgtgct

SEQ ID NO: 4277865 - DNA, 25 bp, Homo sapien
gaaacattgcctgagcccttcaacg

SEQ ID NO: 4277866 - DNA, 25 bp, Homo sapien
aacctttggcagagcatccctttgg

SEQ ID NO: 4277867 - DNA, 25 bp, Homo sapien
tgtgacaacagctgagtctctactt

SEQ ID NO: 4277868 - DNA, 25 bp, Homo sapien
tcaaccgtcaagtgataaaatacct

SEQ ID NO: 4277869 - DNA, 25 bp, Homo sapien
caaccgtcaagtgataaaatacctt

SEQ ID NO: 4277870 - DNA, 25 bp, Homo sapien
catgccccatttcctgtctgtctag

SEQ ID NO: 4277871 - DNA, 25 bp, Homo sapien
gtggtcactgcagtgacctggctgg

SEQ ID NO: 4277872 - DNA, 25 bp, Homo sapien
ctgaaagtccgaggggtggcagctg

SEQ ID NO: 4277873 - DNA, 25 bp, Homo sapien
ctgtctgtctagtggagttctctcc

SEQ ID NO: 4277874 - DNA, 25 bp, Homo sapien
tagatgccgggtgtgcgaaccttga

SEQ ID NO: 4277875 - DNA, 25 bp, Homo sapien
gaaggtattgtcgaagatgagcatg

SEQ ID NO: 4277876 - DNA, 25 bp, Homo sapien
tggatgttctccttgtgggagttgc

SEQ ID NO: 4277877 - DNA, 25 bp, Homo sapien
tgcatcgggtcgtgggaatgaggac

SEQ ID NO: 4277878 - DNA, 25 bp, Homo sapien
gacaacggaagcagcatcttagcaa

SEQ ID NO: 4277879 - DNA, 25 bp, Homo sapien
taggctagagccaaccaacatttaa

SEQ ID NO: 4277880 - DNA, 25 bp, Homo sapien
ctaatgaggtaaacttccccagaag

SEQ ID NO: 4277881 - DNA, 25 bp, Homo sapien
tggaccagaaggtctacagacaacg

SEQ ID NO: 4277882 - DNA, 25 bp, Homo sapien
aatgagaagggatctggctgttcct

SEQ ID NO: 4277883 - DNA, 25 bp, Homo sapien
taggacaatttagccaatgagaagg

SEQ ID NO: 4277884 - DNA, 25 bp, Homo sapien
tctacatgttgggtacacagttccc

SEQ ID NO: 4277885 - DNA, 25 bp, Homo sapien
tatctaagatttaccctcccaggac

SEQ ID NO: 4277886 - DNA, 25 bp, Homo sapien
agacactggttatcaggcaatgcag

SEQ ID NO: 4277887 - DNA, 25 bp, Homo sapien
caagacactggttatcaggcaatgc

SEQ ID NO: 4277888 - DNA, 25 bp, Homo sapien
ttcaagacactggttatcaggcaat

SEQ ID NO: 4277889 - DNA, 25 bp, Homo sapien
tatgaaaggacagttttcaagacac

SEQ ID NO: 4277890 - DNA, 25 bp, Homo sapien
cacctctcaaacttcaaaggattca

SEQ ID NO: 4277891 - DNA, 25 bp, Homo sapien
taaattagaaatcaagagcagatct

SEQ ID NO: 4277892 - DNA, 25 bp, Homo sapien
tacaaagtatgttctaggtctacaa

SEQ ID NO: 4277893 - DNA, 25 bp, Homo sapien
tcaagagcagatctctggaaaatct

SEQ ID NO: 4277894 - DNA, 25 bp, Homo sapien
gctggcgatctcatccactgtgagg

SEQ ID NO: 4277895 - DNA, 25 bp, Homo sapien
tggaagaccacactgaaggagatgc

SEQ ID NO: 4277896 - DNA, 25 bp, Homo sapien
gctggacctcacaaacagctccctg

SEQ ID NO: 4277897 - DNA, 25 bp, Homo sapien
cttacactgatccagcggtgtgtcc

SEQ ID NO: 4277898 - DNA, 25 bp, Homo sapien
tgccccacgggcatgtcttcagtgt

SEQ ID NO: 4277899 - DNA, 25 bp, Homo sapien
ttcagtgtcctcaggcgttagcgag

SEQ ID NO: 4277900 - DNA, 25 bp, Homo sapien
tcagcaggcagatttccgaatcctg

SEQ ID NO: 4277901 - DNA, 25 bp, Homo sapien
cgttagcgaggttgatgtagtatcc

SEQ ID NO: 4277902 - DNA, 25 bp, Homo sapien
agccaaatccagatgcatgggggat

SEQ ID NO: 4277903 - DNA, 25 bp, Homo sapien
ctttaatcatagaggccatgacaga

SEQ ID NO: 4277904 - DNA, 25 bp, Homo sapien
tcctggggtccgcagtcttggagtc

SEQ ID NO: 4277905 - DNA, 25 bp, Homo sapien
tgcatgggggatcctttaatcatag

SEQ ID NO: 4277906 - DNA, 25 bp, Homo sapien
ttccttgctattgaggcagcctcag

SEQ ID NO: 4277907 - DNA, 25 bp, Homo sapien
gacagcaaccaaagcatgaccacta

SEQ ID NO: 4277908 - DNA, 25 bp, Homo sapien
taggaaatgttcaagcaactcagag

SEQ ID NO: 4277909 - DNA, 25 bp, Homo sapien
aactcagaggatgtcaagggatgta

SEQ ID NO: 4277910 - DNA, 25 bp, Homo sapien
ggtcatggcagcctactgctagctt

SEQ ID NO: 4277911 - DNA, 25 bp, Homo sapien
ggcagcctactgctagcttggctga

SEQ ID NO: 4277912 - DNA, 25 bp, Homo sapien
cctactgctagcttggctgatggca

SEQ ID NO: 4277913 - DNA, 25 bp, Homo sapien
catggcagcctactgctagcttggc

SEQ ID NO: 4277914 - DNA, 25 bp, Homo sapien
tgaatgtttttagttcgcctagaag

SEQ ID NO: 4277915 - DNA, 25 bp, Homo sapien
tacacatgaatttgcacaggtcctt

SEQ ID NO: 4277916 - DNA, 25 bp, Homo sapien
aaaagctggaacaggaagataccaa

SEQ ID NO: 4277917 - DNA, 25 bp, Homo sapien
cgagagcgagtcaagcaataatggg

SEQ ID NO: 4277918 - DNA, 25 bp, Homo sapien
ttagtcccagatccgccttggtggc

SEQ ID NO: 4277919 - DNA, 25 bp, Homo sapien
gagagagagctgtaggatagtcact

SEQ ID NO: 4277920 - DNA, 25 bp, Homo sapien
ttggtggccgaagaccagcacactg

SEQ ID NO: 4277921 - DNA, 25 bp, Homo sapien
tctgtttttgttcctactgggcagg

SEQ ID NO: 4277922 - DNA, 25 bp, Homo sapien
ccgcatttgggtcgagagaatcagt

SEQ ID NO: 4277923 - DNA, 25 bp, Homo sapien
atcaaacacagcgtcgtccggtggc

SEQ ID NO: 4277924 - DNA, 25 bp, Homo sapien
tgtgatgatatcaaacacagcgtcg

SEQ ID NO: 4277925 - DNA, 25 bp, Homo sapien
aagaggagccggactcctgtatctg

SEQ ID NO: 4277926 - DNA, 25 bp, Homo sapien
agaaagttgtatcatgttcatggac

SEQ ID NO: 4277927 - DNA, 25 bp, Homo sapien
cctagaatagccaatactttgataa

SEQ ID NO: 4277928 - DNA, 25 bp, Homo sapien
gaacctgccttgtaaggctggcaga

SEQ ID NO: 4277929 - DNA, 25 bp, Homo sapien
gcagggatctaaaatgatgtccact

SEQ ID NO: 4277930 - DNA, 25 bp, Homo sapien
gatatggatggttccagacacaact

SEQ ID NO: 4277931 - DNA, 25 bp, Homo sapien
tagacggcattctccaaagcatggg

SEQ ID NO: 4277932 - DNA, 25 bp, Homo sapien
tctgctagggtgtgctcaaaaccga

SEQ ID NO: 4277933 - DNA, 25 bp, Homo sapien
cattaacaggtacatagacttcagg

SEQ ID NO: 4277934 - DNA, 25 bp, Homo sapien
tctggaaacaggctcggcagcagcg

SEQ ID NO: 4277935 - DNA, 25 bp, Homo sapien
cagtagtaacagaagatgcggccac

SEQ ID NO: 4277936 - DNA, 25 bp, Homo sapien
ggctctccctggctagtgcctgagc

SEQ ID NO: 4277937 - DNA, 25 bp, Homo sapien
tttgccaccgtgcttgctcaggacg

SEQ ID NO: 4277938 - DNA, 25 bp, Homo sapien
gctgaactcccgcttacagtcgagg

SEQ ID NO: 4277939 - DNA, 25 bp, Homo sapien
atccagctgaactcccgcttacagt

SEQ ID NO: 4277940 - DNA, 25 bp, Homo sapien
gcaccatccagctgaactcccgctt

SEQ ID NO: 4277941 - DNA, 25 bp, Homo sapien
ctcccgcttacagtcgaggcagtgg

SEQ ID NO: 4277942 - DNA, 25 bp, Homo sapien
ggtcattcctctcacgatttgtcac

SEQ ID NO: 4277943 - DNA, 25 bp, Homo sapien
gagcagctctatcagccgctcctcg

SEQ ID NO: 4277944 - DNA, 25 bp, Homo sapien
ttctggtcattcctctcacgatttg

SEQ ID NO: 4277945 - DNA, 25 bp, Homo sapien
cgctcctcgagatacttcttggttc

SEQ ID NO: 4277946 - DNA, 25 bp, Homo sapien
ttgctagtgcagctcagcttctctc

SEQ ID NO: 4277947 - DNA, 25 bp, Homo sapien
gcactctgcaagatggttgctagtg

SEQ ID NO: 4277948 - DNA, 25 bp, Homo sapien
gcttctctcccatgtctgcttgggt

SEQ ID NO: 4277949 - DNA, 25 bp, Homo sapien
tttctaggtcttcacgcagggcagc

SEQ ID NO: 4277950 - DNA, 25 bp, Homo sapien
cagctgccggccttgctcctcaagc

SEQ ID NO: 4277951 - DNA, 25 bp, Homo sapien
ctgcagctgccggccttgctcctca

SEQ ID NO: 4277952 - DNA, 25 bp, Homo sapien
ccggccttgctcctcaagctggccc

SEQ ID NO: 4277953 - DNA, 25 bp, Homo sapien
ctgccggccttgctcctcaagctgg

SEQ ID NO: 4277954 - DNA, 25 bp, Homo sapien
tgaggctcttgcactcttcaccagc

SEQ ID NO: 4277955 - DNA, 25 bp, Homo sapien
ctgaggctcttgcactcttcaccag

SEQ ID NO: 4277956 - DNA, 25 bp, Homo sapien
gaggctcttgcactcttcaccagca

SEQ ID NO: 4277957 - DNA, 25 bp, Homo sapien
gataggacatgaggcagctgtgaac

SEQ ID NO: 4277958 - DNA, 25 bp, Homo sapien
ggacatgaggcagctgtgaactgct

SEQ ID NO: 4277959 - DNA, 25 bp, Homo sapien
ttaagaactcagagataggacatga

SEQ ID NO: 4277960 - DNA, 25 bp, Homo sapien
tattcattaagaactcagagatagg

SEQ ID NO: 4277961 - DNA, 25 bp, Homo sapien
cctcatggctaaaggtgcatcttcc

SEQ ID NO: 4277962 - DNA, 25 bp, Homo sapien
agcccaagtggttgaagctaggatt

SEQ ID NO: 4277963 - DNA, 25 bp, Homo sapien
cccaagtggttgaagctaggattac

SEQ ID NO: 4277964 - DNA, 25 bp, Homo sapien
ctgcctcatggctaaaggtgcatct

SEQ ID NO: 4277965 - DNA, 25 bp, Homo sapien
tggtcacccaagtgccggatgctgg

SEQ ID NO: 4277966 - DNA, 25 bp, Homo sapien
ggatggctgattcccgctgctgcaa

SEQ ID NO: 4277967 - DNA, 25 bp, Homo sapien
ggttacgcccgaccacattctgtag

SEQ ID NO: 4277968 - DNA, 25 bp, Homo sapien
gctgcaaagcctggtaatcggcctg

SEQ ID NO: 4277969 - DNA, 25 bp, Homo sapien
ggtatcgtctaactgtgcctcctgc

SEQ ID NO: 4277970 - DNA, 25 bp, Homo sapien
cagcaagccgctcgagcatacccac

SEQ ID NO: 4277971 - DNA, 25 bp, Homo sapien
ttgcaccttggtatcgtctaactgt

SEQ ID NO: 4277972 - DNA, 25 bp, Homo sapien
ccctcttgcaccttggtatcgtcta

SEQ ID NO: 4277973 - DNA, 25 bp, Homo sapien
gtcactcacatgttggctcacctgt

SEQ ID NO: 4277974 - DNA, 25 bp, Homo sapien
gcccgggcatcctctttcagctgaa

SEQ ID NO: 4277975 - DNA, 25 bp, Homo sapien
tgttgacctcctcgaccttggttct

SEQ ID NO: 4277976 - DNA, 25 bp, Homo sapien
tcctcccaggagctcgtgtgggcca

SEQ ID NO: 4277977 - DNA, 25 bp, Homo sapien
tttgtgtctgatgccgtatctgcct

SEQ ID NO: 4277978 - DNA, 25 bp, Homo sapien
catctcctgggccgcatcactggga

SEQ ID NO: 4277979 - DNA, 25 bp, Homo sapien
ctgggaataggttcttgccggccct

SEQ ID NO: 4277980 - DNA, 25 bp, Homo sapien
cctttgtgtctgatgccgtatctgc

SEQ ID NO: 4277981 - DNA, 25 bp, Homo sapien
tttcttgtccagtgagtcccgtgtg

SEQ ID NO: 4277982 - DNA, 25 bp, Homo sapien
tttttcttgtccagtgagtcccgtg

SEQ ID NO: 4277983 - DNA, 25 bp, Homo sapien
ttttcttgtccagtgagtcccgtgt

SEQ ID NO: 4277984 - DNA, 25 bp, Homo sapien
tcttgtccagtgagtcccgtgtggc

SEQ ID NO: 4277985 - DNA, 25 bp, Homo sapien
caactggtccagctctagtcgcatc

SEQ ID NO: 4277986 - DNA, 25 bp, Homo sapien
tcaggtcaaagttggacaccatctc

SEQ ID NO: 4277987 - DNA, 25 bp, Homo sapien
gcgaacgttgtcctccgctgcagtg

SEQ ID NO: 4277988 - DNA, 25 bp, Homo sapien
taccaagcaagtgaggcgaacgttg

SEQ ID NO: 4277989 - DNA, 25 bp, Homo sapien
tagctgctcaccaagctgctcatgc

SEQ ID NO: 4277990 - DNA, 25 bp, Homo sapien
gcaggtagctgctcaccaagctgct

SEQ ID NO: 4277991 - DNA, 25 bp, Homo sapien
tgcggctagggggtttccacaggta

SEQ ID NO: 4277992 - DNA, 25 bp, Homo sapien
ctgcggctagggggtttccacaggt

SEQ ID NO: 4277993 - DNA, 25 bp, Homo sapien
tcagctcatagagttggcccacaat

SEQ ID NO: 4277994 - DNA, 25 bp, Homo sapien
aatgtccgagctcagctttggctgc

SEQ ID NO: 4277995 - DNA, 25 bp, Homo sapien
aagtcaaagcccctcgacgccaggt

SEQ ID NO: 4277996 - DNA, 25 bp, Homo sapien
gcatccaagtcaaagcccctcgacg

SEQ ID NO: 4277997 - DNA, 25 bp, Homo sapien
tgcaccaaggagtagcgaataaatg

SEQ ID NO: 4277998 - DNA, 25 bp, Homo sapien
tgccaacctctggtgcaccaaggag

SEQ ID NO: 4277999 - DNA, 25 bp, Homo sapien
gctgtaaggtgtctgccaacctctg

SEQ ID NO: 4278000 - DNA, 25 bp, Homo sapien
ccaaggagtagcgaataaatgctct

SEQ ID NO: 4278001 - DNA, 25 bp, Homo sapien
gcccaggagggtggccttctctttc

SEQ ID NO: 4278002 - DNA, 25 bp, Homo sapien
ggcaggcacagaagtaatcccagta

SEQ ID NO: 4278003 - DNA, 25 bp, Homo sapien
ctctgagatagacttgacaaagcgg

SEQ ID NO: 4278004 - DNA, 25 bp, Homo sapien
caaagcggatcccatcattggctcc

SEQ ID NO: 4278005 - DNA, 25 bp, Homo sapien
tgcaggagatactcaagtttataag

SEQ ID NO: 4278006 - DNA, 25 bp, Homo sapien
tggtgctgtcatccgtgatgggttc

SEQ ID NO: 4278007 - DNA, 25 bp, Homo sapien
aagaaaatttatgcaagctggtgct

SEQ ID NO: 4278008 - DNA, 25 bp, Homo sapien
tgtcatccgtgatgggttcccctgc

SEQ ID NO: 4278009 - DNA, 25 bp, Homo sapien
taaacactcgcaacctgatctggga

SEQ ID NO: 4278010 - DNA, 25 bp, Homo sapien
agggacttgtccaacattttcgagg

SEQ ID NO: 4278011 - DNA, 25 bp, Homo sapien
ttcgagggttaaaagagaagccaga

SEQ ID NO: 4278012 - DNA, 25 bp, Homo sapien
tagaagtgtctgcaatggctggcac

SEQ ID NO: 4278013 - DNA, 25 bp, Homo sapien
tgcaagtctcggatgattctctgga

SEQ ID NO: 4278014 - DNA, 25 bp, Homo sapien
ttgcaagtctcggatgattctctgg

SEQ ID NO: 4278015 - DNA, 25 bp, Homo sapien
cttgcaagtctcggatgattctctg

SEQ ID NO: 4278016 - DNA, 25 bp, Homo sapien
ggtgagtttgcctttcttgtctgta

SEQ ID NO: 4278017 - DNA, 25 bp, Homo sapien
cctttcttgtctgtatgtctcctgc

SEQ ID NO: 4278018 - DNA, 25 bp, Homo sapien
gcctttcttgtctgtatgtctcctg

SEQ ID NO: 4278019 - DNA, 25 bp, Homo sapien
gagtttgcctttcttgtctgtatgt

SEQ ID NO: 4278020 - DNA, 25 bp, Homo sapien
aaggctcagaatttcggccctcggt

SEQ ID NO: 4278021 - DNA, 25 bp, Homo sapien
tcggccctcggtggctgtctgctca

SEQ ID NO: 4278022 - DNA, 25 bp, Homo sapien
ggctcagaatttcggccctcggtgg

SEQ ID NO: 4278023 - DNA, 25 bp, Homo sapien
agaatttcggccctcggtggctgtc

SEQ ID NO: 4278024 - DNA, 25 bp, Homo sapien
caagtaatgtgaacaccctgagtgt

SEQ ID NO: 4278025 - DNA, 25 bp, Homo sapien
cagcatctcccaagtaatgtgaaca

SEQ ID NO: 4278026 - DNA, 25 bp, Homo sapien
ctgagtgttctaacacatgccacct

SEQ ID NO: 4278027 - DNA, 25 bp, Homo sapien
ccttgccctcgtggctccaggagtc

SEQ ID NO: 4278028 - DNA, 25 bp, Homo sapien
aaccttcgttgctgtctctgacagg

SEQ ID NO: 4278029 - DNA, 25 bp, Homo sapien
tttaagcctatccaaaatgtctgaa

SEQ ID NO: 4278030 - DNA, 25 bp, Homo sapien
tctgacaggctctttcaaatatcag

SEQ ID NO: 4278031 - DNA, 25 bp, Homo sapien
cagtccttgttgcacaacatgtaaa

SEQ ID NO: 4278032 - DNA, 25 bp, Homo sapien
aggtgacaatgacaggcatgagaat

SEQ ID NO: 4278033 - DNA, 25 bp, Homo sapien
acaatctctggaacaactgcatcaa

SEQ ID NO: 4278034 - DNA, 25 bp, Homo sapien
taattaagaactcaactggtgcatc

SEQ ID NO: 4278035 - DNA, 25 bp, Homo sapien
tacttgacgctgtggggctgagaaa

SEQ ID NO: 4278036 - DNA, 25 bp, Homo sapien
tcttttttcagatgcaatgttgaga

SEQ ID NO: 4278037 - DNA, 25 bp, Homo sapien
gtaaacttccttcatgtgaattaat

SEQ ID NO: 4278038 - DNA, 25 bp, Homo sapien
catgtgaattaattaagaattgcaa

SEQ ID NO: 4278039 - DNA, 25 bp, Homo sapien
cagatgcaatgttgagaggtaaact

SEQ ID NO: 4278040 - DNA, 25 bp, Homo sapien
aatatgggtcaaagctaccagctgc

SEQ ID NO: 4278041 - DNA, 25 bp, Homo sapien
gccttggtgaccaatatgggtcaaa

SEQ ID NO: 4278042 - DNA, 25 bp, Homo sapien
agtccatagccttggtgaccaatat

SEQ ID NO: 4278043 - DNA, 25 bp, Homo sapien
aagctaccagctgctctgatcttgc

SEQ ID NO: 4278044 - DNA, 25 bp, Homo sapien
ctgttatgggtgattcctctcatca

SEQ ID NO: 4278045 - DNA, 25 bp, Homo sapien
tatgggtgattcctctcatcacaaa

SEQ ID NO: 4278046 - DNA, 25 bp, Homo sapien
gggtgattcctctcatcacaaacat

SEQ ID NO: 4278047 - DNA, 25 bp, Homo sapien
gttatgggtgattcctctcatcaca

SEQ ID NO: 4278048 - DNA, 25 bp, Homo sapien
tttctaaccgaccaacagaggcagg

SEQ ID NO: 4278049 - DNA, 25 bp, Homo sapien
gagatccgagcaccagcggagtctt

SEQ ID NO: 4278050 - DNA, 25 bp, Homo sapien
taaacttcctaaagaccacgcaggc

SEQ ID NO: 4278051 - DNA, 25 bp, Homo sapien
gcttgttctgagacgccgcatggtg

SEQ ID NO: 4278052 - DNA, 25 bp, Homo sapien
tcgtgggtccaccgccgggcagaac

SEQ ID NO: 4278053 - DNA, 25 bp, Homo sapien
gccatgacgcgcacaccaagagggt

SEQ ID NO: 4278054 - DNA, 25 bp, Homo sapien
cgccgggcagaaccgaaactttctg

SEQ ID NO: 4278055 - DNA, 25 bp, Homo sapien
aagaggacgggaacgcggtgctgac

SEQ ID NO: 4278056 - DNA, 25 bp, Homo sapien
ttaggtccagggctcaaatgtcatt

SEQ ID NO: 4278057 - DNA, 25 bp, Homo sapien
tctgggacagaatgatcaacaaagc

SEQ ID NO: 4278058 - DNA, 25 bp, Homo sapien
caaaaaagatgatgtttaggccggt

SEQ ID NO: 4278059 - DNA, 25 bp, Homo sapien
cccagacaagttcacaagaagctca

SEQ ID NO: 4278060 - DNA, 25 bp, Homo sapien
gacatgctccgctcagagatcagcg

SEQ ID NO: 4278061 - DNA, 25 bp, Homo sapien
gagagataggcctgcaagagtccag

SEQ ID NO: 4278062 - DNA, 25 bp, Homo sapien
caaaagatggtctcctgttaactca

SEQ ID NO: 4278063 - DNA, 25 bp, Homo sapien
tttccactccagttgaggccattgg

SEQ ID NO: 4278064 - DNA, 25 bp, Homo sapien
ccacgatggcgaagatgagcttgac

SEQ ID NO: 4278065 - DNA, 25 bp, Homo sapien
gatctgggtccgaaacagcgtctgc

SEQ ID NO: 4278066 - DNA, 25 bp, Homo sapien
gaggatctccacgtagcagaacagg

SEQ ID NO: 4278067 - DNA, 25 bp, Homo sapien
tagagcaccgggttaaagcagcagt

SEQ ID NO: 4278068 - DNA, 25 bp, Homo sapien
gtaccacgtgagttcggaataatca

SEQ ID NO: 4278069 - DNA, 25 bp, Homo sapien
gtgaggtaccacgtgagttcggaat

SEQ ID NO: 4278070 - DNA, 25 bp, Homo sapien
cggaataatcacagcccgaagaaag

SEQ ID NO: 4278071 - DNA, 25 bp, Homo sapien
ctggtagacggaggtgaggtaccac

SEQ ID NO: 4278072 - DNA, 25 bp, Homo sapien
gggctcactaccgacaggtagcggt

SEQ ID NO: 4278073 - DNA, 25 bp, Homo sapien
atgaagatgttggtgagggactcca

SEQ ID NO: 4278074 - DNA, 25 bp, Homo sapien
aacaagcaggcgaacaccaggtctg

SEQ ID NO: 4278075 - DNA, 25 bp, Homo sapien
gggagatccacacaggcaacaagca

SEQ ID NO: 4278076 - DNA, 25 bp, Homo sapien
tggctctgaaggtcatagtaaaaaa

SEQ ID NO: 4278077 - DNA, 25 bp, Homo sapien
cagtggtggcgagggtagcaaagac

SEQ ID NO: 4278078 - DNA, 25 bp, Homo sapien
ccaggcagtataggacagtggtggc

SEQ ID NO: 4278079 - DNA, 25 bp, Homo sapien
ctggttctcacacggctggctctga

SEQ ID NO: 4278080 - DNA, 25 bp, Homo sapien
ccagatggcagggacgtttagagca

SEQ ID NO: 4278081 - DNA, 25 bp, Homo sapien
ggaccagatggcagggacgtttaga

SEQ ID NO: 4278082 - DNA, 25 bp, Homo sapien
accagatggcagggacgtttagagc

SEQ ID NO: 4278083 - DNA, 25 bp, Homo sapien
ctggaccagatggcagggacgttta

SEQ ID NO: 4278084 - DNA, 25 bp, Homo sapien
tgatctctccccaaagtggctccag

SEQ ID NO: 4278085 - DNA, 25 bp, Homo sapien
gagacactggtagaagctgcatgat

SEQ ID NO: 4278086 - DNA, 25 bp, Homo sapien
tgttcattaatgcagccacaagggc

SEQ ID NO: 4278087 - DNA, 25 bp, Homo sapien
cccaagttcaagaggtgaggatact

SEQ ID NO: 4278088 - DNA, 25 bp, Homo sapien
ggcttcgtgtcaaactctagacggg

SEQ ID NO: 4278089 - DNA, 25 bp, Homo sapien
taatactggcaaaagctagttttct

SEQ ID NO: 4278090 - DNA, 25 bp, Homo sapien
tactggcaaaagctagttttctggg

SEQ ID NO: 4278091 - DNA, 25 bp, Homo sapien
tctagacgggtggagtacaagacca

SEQ ID NO: 4278092 - DNA, 25 bp, Homo sapien
gtcttcctttccagctcggcgttgt

SEQ ID NO: 4278093 - DNA, 25 bp, Homo sapien
cacgccgtcttcctttccagctcgg

SEQ ID NO: 4278094 - DNA, 25 bp, Homo sapien
agcagcacgccgtcttcctttccag

SEQ ID NO: 4278095 - DNA, 25 bp, Homo sapien
gagcagcacgccgtcttcctttcca

SEQ ID NO: 4278096 - DNA, 25 bp, Homo sapien
tacttttgctagttagtctcaagtc

SEQ ID NO: 4278097 - DNA, 25 bp, Homo sapien
tgctagttagtctcaagtcaatctt

SEQ ID NO: 4278098 - DNA, 25 bp, Homo sapien
cttttgctagttagtctcaagtcaa

SEQ ID NO: 4278099 - DNA, 25 bp, Homo sapien
tttgctagttagtctcaagtcaatc

SEQ ID NO: 4278100 - DNA, 25 bp, Homo sapien
ctgctgtccccctggtagtcatcaa

SEQ ID NO: 4278101 - DNA, 25 bp, Homo sapien
tgctgtccccctggtagtcatcaaa

SEQ ID NO: 4278102 - DNA, 25 bp, Homo sapien
gctgtccccctggtagtcatcaaac

SEQ ID NO: 4278103 - DNA, 25 bp, Homo sapien
tcatgaacttgaaagcatttacgta

SEQ ID NO: 4278104 - DNA, 25 bp, Homo sapien
gagttgagtatgtaaacccactatt

SEQ ID NO: 4278105 - DNA, 25 bp, Homo sapien
ggcaggagttgagtatgtaaaccca

SEQ ID NO: 4278106 - DNA, 25 bp, Homo sapien
catgaacttgaaagcatttacgtat

SEQ ID NO: 4278107 - DNA, 25 bp, Homo sapien
ctgtcagtatggcactgagtgggat

SEQ ID NO: 4278108 - DNA, 25 bp, Homo sapien
cactgagtgggatgtagtctttacc

SEQ ID NO: 4278109 - DNA, 25 bp, Homo sapien
tgagtgggatgtagtctttaccatc

SEQ ID NO: 4278110 - DNA, 25 bp, Homo sapien
tatggcactgagtgggatgtagtct

SEQ ID NO: 4278111 - DNA, 25 bp, Homo sapien
tagatttcaggagtggagtactcag

SEQ ID NO: 4278112 - DNA, 25 bp, Homo sapien
aggcaactgcagaagtgctcatcca

SEQ ID NO: 4278113 - DNA, 25 bp, Homo sapien
atagatttcaggagtggagtactca

SEQ ID NO: 4278114 - DNA, 25 bp, Homo sapien
ggcaactgcagaagtgctcatccat

SEQ ID NO: 4278115 - DNA, 25 bp, Homo sapien
agaagatttcccacagcaatactcc

SEQ ID NO: 4278116 - DNA, 25 bp, Homo sapien
aaggagaagatttcccacagcaata

SEQ ID NO: 4278117 - DNA, 25 bp, Homo sapien
ctaaggagaagatttcccacagcaa

SEQ ID NO: 4278118 - DNA, 25 bp, Homo sapien
ggagaagatttcccacagcaatact

SEQ ID NO: 4278119 - DNA, 25 bp, Homo sapien
ccaaagctctcgctgctggtgatgc

SEQ ID NO: 4278120 - DNA, 25 bp, Homo sapien
taatcggcgttcttgtaaatatcct

SEQ ID NO: 4278121 - DNA, 25 bp, Homo sapien
atcggcgttcttgtaaatatcctgg

SEQ ID NO: 4278122 - DNA, 25 bp, Homo sapien
tgaaacttggagctcccaaagctct

SEQ ID NO: 4278123 - DNA, 25 bp, Homo sapien
cttacgctccatgtgtgatgccaca

SEQ ID NO: 4278124 - DNA, 25 bp, Homo sapien
gtgatgccacatccttgtcgagaaa

SEQ ID NO: 4278125 - DNA, 25 bp, Homo sapien
catgtgtgatgccacatccttgtcg

SEQ ID NO: 4278126 - DNA, 25 bp, Homo sapien
gccacatccttgtcgagaaaaaata

SEQ ID NO: 4278127 - DNA, 25 bp, Homo sapien
agcatggtctttctgtggaattctc

SEQ ID NO: 4278128 - DNA, 25 bp, Homo sapien
cagcatggtctttctgtggaattct

SEQ ID NO: 4278129 - DNA, 25 bp, Homo sapien
aaagcaatgggcagcatggtctttc

SEQ ID NO: 4278130 - DNA, 25 bp, Homo sapien
ggtacacttagtcccagtctctgga

SEQ ID NO: 4278131 - DNA, 25 bp, Homo sapien
catgctgtgccaagagtcagaacct

SEQ ID NO: 4278132 - DNA, 25 bp, Homo sapien
ttccaagagcccaaatcctgcggtg

SEQ ID NO: 4278133 - DNA, 25 bp, Homo sapien
caagatggcagtcggaactctgacc

SEQ ID NO: 4278134 - DNA, 25 bp, Homo sapien
cagcagagagttcatgctcccctgt

SEQ ID NO: 4278135 - DNA, 25 bp, Homo sapien
agagagttcatgctcccctgtggag

SEQ ID NO: 4278136 - DNA, 25 bp, Homo sapien
cagaacccagcagagagttcatgct

SEQ ID NO: 4278137 - DNA, 25 bp, Homo sapien
gaacccagcagagagttcatgctcc

SEQ ID NO: 4278138 - DNA, 25 bp, Homo sapien
caacttgtagtcgatccagaaggga

SEQ ID NO: 4278139 - DNA, 25 bp, Homo sapien
tgaaacagcttccactctcgtaggc

SEQ ID NO: 4278140 - DNA, 25 bp, Homo sapien
cagatgatcatgaccaacaaaggca

SEQ ID NO: 4278141 - DNA, 25 bp, Homo sapien
caaactctgtggtcgtgtcatagtc

SEQ ID NO: 4278142 - DNA, 25 bp, Homo sapien
actctgctactaaaggcagtgggca

SEQ ID NO: 4278143 - DNA, 25 bp, Homo sapien
tttactctgctactaaaggcagtgg

SEQ ID NO: 4278144 - DNA, 25 bp, Homo sapien
tgtctttactctgctactaaaggca

SEQ ID NO: 4278145 - DNA, 25 bp, Homo sapien
ctttactctgctactaaaggcagtg

SEQ ID NO: 4278146 - DNA, 25 bp, Homo sapien
ggagcccctagctgcatgcatgtct

SEQ ID NO: 4278147 - DNA, 25 bp, Homo sapien
ttgcccagcctactcaaagaattcc

SEQ ID NO: 4278148 - DNA, 25 bp, Homo sapien
gctacagtattaattgccttggaga

SEQ ID NO: 4278149 - DNA, 25 bp, Homo sapien
cttggagatgcatccatgggctact

SEQ ID NO: 4278150 - DNA, 25 bp, Homo sapien
gtttcaagatcctgaccaagtagga

SEQ ID NO: 4278151 - DNA, 25 bp, Homo sapien
ctggttccaagggactttgtccgtg

SEQ ID NO: 4278152 - DNA, 25 bp, Homo sapien
ttcaagatcctgaccaagtaggaag

SEQ ID NO: 4278153 - DNA, 25 bp, Homo sapien
tgtccgtgaagtctttgtttctggg

SEQ ID NO: 4278154 - DNA, 25 bp, Homo sapien
gaatgtctcctatgtgcaagaaaat

SEQ ID NO: 4278155 - DNA, 25 bp, Homo sapien
gttgaatgtctcctatgtgcaagaa

SEQ ID NO: 4278156 - DNA, 25 bp, Homo sapien
tgtctcctatgtgcaagaaaattgt

SEQ ID NO: 4278157 - DNA, 25 bp, Homo sapien
ttgaatgtctcctatgtgcaagaaa

SEQ ID NO: 4278158 - DNA, 25 bp, Homo sapien
ggttacgtctgtccagatctctaaa

SEQ ID NO: 4278159 - DNA, 25 bp, Homo sapien
tttgaacatgaaggttacgtctgtc

SEQ ID NO: 4278160 - DNA, 25 bp, Homo sapien
aacatgaaggttacgtctgtccaga

SEQ ID NO: 4278161 - DNA, 25 bp, Homo sapien
cctgaaggaatatgttgaagctaat

SEQ ID NO: 4278162 - DNA, 25 bp, Homo sapien
ggccacatgggctctgctccaccag

SEQ ID NO: 4278163 - DNA, 25 bp, Homo sapien
ctccaccagccccatcgacaggctc

SEQ ID NO: 4278164 - DNA, 25 bp, Homo sapien
aggccacatgggctctgctccacca

SEQ ID NO: 4278165 - DNA, 25 bp, Homo sapien
gccccatcgacaggctcccaggacg

SEQ ID NO: 4278166 - DNA, 25 bp, Homo sapien
tgggctgcgtcaaactgcccacagg

SEQ ID NO: 4278167 - DNA, 25 bp, Homo sapien
ccaggatgtccagagtttcccagca

SEQ ID NO: 4278168 - DNA, 25 bp, Homo sapien
gaagtctgcttccatgtaacctctc

SEQ ID NO: 4278169 - DNA, 25 bp, Homo sapien
gactgctggttgtcaagctccctca

SEQ ID NO: 4278170 - DNA, 25 bp, Homo sapien
gattcttcagcagaggagggaaagg

SEQ ID NO: 4278171 - DNA, 25 bp, Homo sapien
tggaaagttgtcccgcaggcagctg

SEQ ID NO: 4278172 - DNA, 25 bp, Homo sapien
agattcttcagcagaggagggaaag

SEQ ID NO: 4278173 - DNA, 25 bp, Homo sapien
tggctgaagattcttcagcagagga

SEQ ID NO: 4278174 - DNA, 25 bp, Homo sapien
gctctctctccatagcacagttgga

SEQ ID NO: 4278175 - DNA, 25 bp, Homo sapien
tccatagcacagttggaggtggaag

SEQ ID NO: 4278176 - DNA, 25 bp, Homo sapien
gaagcactgggtcccagaaagctga

SEQ ID NO: 4278177 - DNA, 25 bp, Homo sapien
atggtacctggaaaggcagtggctc

SEQ ID NO: 4278178 - DNA, 25 bp, Homo sapien
gaatattgtgatgctcattagacac

SEQ ID NO: 4278179 - DNA, 25 bp, Homo sapien
cagggcttaagacatcaatttgaga

SEQ ID NO: 4278180 - DNA, 25 bp, Homo sapien
aattttgagtaggaatttgggtcag

SEQ ID NO: 4278181 - DNA, 25 bp, Homo sapien
gatgaaattttgagtaggaatttgg

SEQ ID NO: 4278182 - DNA, 25 bp, Homo sapien
cctggtggaggcgtagtggtaacag

SEQ ID NO: 4278183 - DNA, 25 bp, Homo sapien
gccctggtggaggcgtagtggtaac

SEQ ID NO: 4278184 - DNA, 25 bp, Homo sapien
gtggaggcgtagtggtaacagagag

SEQ ID NO: 4278185 - DNA, 25 bp, Homo sapien
tggtggaggcgtagtggtaacagag

SEQ ID NO: 4278186 - DNA, 25 bp, Homo sapien
ctatatttaataccctgccctagaa

SEQ ID NO: 4278187 - DNA, 25 bp, Homo sapien
tcatcgtaaaccaatcagtttagtg

SEQ ID NO: 4278188 - DNA, 25 bp, Homo sapien
tgcctatatttaataccctgcccta

SEQ ID NO: 4278189 - DNA, 25 bp, Homo sapien
atcgtaaaccaatcagtttagtggg

SEQ ID NO: 4278190 - DNA, 25 bp, Homo sapien
atccagcaccctgtagccctcaaac

SEQ ID NO: 4278191 - DNA, 25 bp, Homo sapien
caccctgtagccctcaaacacatgc

SEQ ID NO: 4278192 - DNA, 25 bp, Homo sapien
cctgtagccctcaaacacatgccct

SEQ ID NO: 4278193 - DNA, 25 bp, Homo sapien
ctatgcatccagcaccctgtagccc

SEQ ID NO: 4278194 - DNA, 25 bp, Homo sapien
gtccctttccagcttgagttcctga

SEQ ID NO: 4278195 - DNA, 25 bp, Homo sapien
agatggtccctttccagcttgagtt

SEQ ID NO: 4278196 - DNA, 25 bp, Homo sapien
ttgttcagcatcataatctgctatt

SEQ ID NO: 4278197 - DNA, 25 bp, Homo sapien
tccttttgttcagcatcataatctg

SEQ ID NO: 4278198 - DNA, 25 bp, Homo sapien
agagctcagtaggagtcaccagagt

SEQ ID NO: 4278199 - DNA, 25 bp, Homo sapien
gagagctcagtaggagtcaccagag

SEQ ID NO: 4278200 - DNA, 25 bp, Homo sapien
gagctcagtaggagtcaccagagtt

SEQ ID NO: 4278201 - DNA, 25 bp, Homo sapien
cttttggagggatctatacttctag

SEQ ID NO: 4278202 - DNA, 25 bp, Homo sapien
gccaagaatgtagaattctttatat

SEQ ID NO: 4278203 - DNA, 25 bp, Homo sapien
tgccattacttttggagggatctat

SEQ ID NO: 4278204 - DNA, 25 bp, Homo sapien
gagggatctatacttctagagatga

SEQ ID NO: 4278205 - DNA, 25 bp, Homo sapien
caacagcatatgtgtatgcagtggc

SEQ ID NO: 4278206 - DNA, 25 bp, Homo sapien
tggaccccaacagcatatgtgtatg

SEQ ID NO: 4278207 - DNA, 25 bp, Homo sapien
tgtggaccccaacagcatatgtgta

SEQ ID NO: 4278208 - DNA, 25 bp, Homo sapien
ccccaacagcatatgtgtatgcagt

SEQ ID NO: 4278209 - DNA, 25 bp, Homo sapien
ctgagctgcgtcttggtcccaccca

SEQ ID NO: 4278210 - DNA, 25 bp, Homo sapien
tgagctgcgtcttggtcccacccat

SEQ ID NO: 4278211 - DNA, 25 bp, Homo sapien
tgaaatctgagaggctgaaatctgt

SEQ ID NO: 4278212 - DNA, 25 bp, Homo sapien
ttccaccagctgagggtttctatcg

SEQ ID NO: 4278213 - DNA, 25 bp, Homo sapien
tgagggtttctatcgtaaagggtga

SEQ ID NO: 4278214 - DNA, 25 bp, Homo sapien
gtttgtctccactccaggtcaccct

SEQ ID NO: 4278215 - DNA, 25 bp, Homo sapien
cagcctggacattgaaaagcttttc

SEQ ID NO: 4278216 - DNA, 25 bp, Homo sapien
gaaaagcttttcttgagcaattatt

SEQ ID NO: 4278217 - DNA, 25 bp, Homo sapien
ggcagcctggacattgaaaagcttt

SEQ ID NO: 4278218 - DNA, 25 bp, Homo sapien
agcttttcttgagcaattatttcca

SEQ ID NO: 4278219 - DNA, 25 bp, Homo sapien
aaatcctggtgctgtggcgacactg

SEQ ID NO: 4278220 - DNA, 25 bp, Homo sapien
aaatgaagctcctttcgtagtcaaa

SEQ ID NO: 4278221 - DNA, 25 bp, Homo sapien
ccagctgcttcaatgtcatgggcta

SEQ ID NO: 4278222 - DNA, 25 bp, Homo sapien
gaatatcaatatcactctgcagaca

SEQ ID NO: 4278223 - DNA, 25 bp, Homo sapien
tgtatttttagtggagatggagttt

SEQ ID NO: 4278224 - DNA, 25 bp, Homo sapien
actacaggcatctgggtaatttttt

SEQ ID NO: 4278225 - DNA, 25 bp, Homo sapien
gggactacaggcatctgggtaattt

SEQ ID NO: 4278226 - DNA, 25 bp, Homo sapien
atggagtttcaccatgttagccagg

SEQ ID NO: 4278227 - DNA, 25 bp, Homo sapien
aagacattgattccaacccccatag

SEQ ID NO: 4278228 - DNA, 25 bp, Homo sapien
tcaggggttcacgtcttcagtggag

SEQ ID NO: 4278229 - DNA, 25 bp, Homo sapien
tgaagttgtgactgaattgccgcac

SEQ ID NO: 4278230 - DNA, 25 bp, Homo sapien
ttgtgactgaattgccgcactctca

SEQ ID NO: 4278231 - DNA, 25 bp, Homo sapien
tgttccttatcatcttgatccggag

SEQ ID NO: 4278232 - DNA, 25 bp, Homo sapien
catcttgatccggagtggtagttac

SEQ ID NO: 4278233 - DNA, 25 bp, Homo sapien
tccggagtggtagttacatgcatgt

SEQ ID NO: 4278234 - DNA, 25 bp, Homo sapien
aagtgatagggatgttccttatcat

SEQ ID NO: 4278235 - DNA, 25 bp, Homo sapien
gaaagatttgcagagagatgagtct

SEQ ID NO: 4278236 - DNA, 25 bp, Homo sapien
tatgtgcccacaagaagttgtgtct

SEQ ID NO: 4278237 - DNA, 25 bp, Homo sapien
gatgagtcttagctgaaatcttgaa

SEQ ID NO: 4278238 - DNA, 25 bp, Homo sapien
gagatgccttctgaatatgtgccca

SEQ ID NO: 4278239 - DNA, 25 bp, Homo sapien
caatctcccgaaggagtcaccctgt

SEQ ID NO: 4278240 - DNA, 25 bp, Homo sapien
atgttatgcgcatccatatgaagag

SEQ ID NO: 4278241 - DNA, 25 bp, Homo sapien
ttaatcatgtaggtgcaggcagact

SEQ ID NO: 4278242 - DNA, 25 bp, Homo sapien
tgaggagaggggaccaatctcccga

SEQ ID NO: 4278243 - DNA, 25 bp, Homo sapien
tggactcgtggtcaccacatacctt

SEQ ID NO: 4278244 - DNA, 25 bp, Homo sapien
ttcctggtccccgtattgaatcagc

SEQ ID NO: 4278245 - DNA, 25 bp, Homo sapien
cgtgactgtcatggcaggttcctgg

SEQ ID NO: 4278246 - DNA, 25 bp, Homo sapien
gtttctgcgaacactggtgagaggc

SEQ ID NO: 4278247 - DNA, 25 bp, Homo sapien
ttttatacgtcagcatgctttcggg

SEQ ID NO: 4278248 - DNA, 25 bp, Homo sapien
taaaaagcaagtgcgtggtttgacc

SEQ ID NO: 4278249 - DNA, 25 bp, Homo sapien
ccctgttgccgggtgtgaccaatta

SEQ ID NO: 4278250 - DNA, 25 bp, Homo sapien
tatctattaggagccggcttttccc

SEQ ID NO: 4278251 - DNA, 25 bp, Homo sapien
tgcaccaaaaagtggcctcagcctg

SEQ ID NO: 4278252 - DNA, 25 bp, Homo sapien
ttatgactatcagggcccagcgtag

SEQ ID NO: 4278253 - DNA, 25 bp, Homo sapien
ccattaatgggaagagggccactca

SEQ ID NO: 4278254 - DNA, 25 bp, Homo sapien
taatgtgcggagtcgtgtgcctacg

SEQ ID NO: 4278255 - DNA, 25 bp, Homo sapien
gggtacccatcccacagtgctatta

SEQ ID NO: 4278256 - DNA, 25 bp, Homo sapien
ggtcttgtggcatcctttgtccaaa

SEQ ID NO: 4278257 - DNA, 25 bp, Homo sapien
aaacttgccacgttgcgttccaggc

SEQ ID NO: 4278258 - DNA, 25 bp, Homo sapien
tactgcacgttacctcactagccag

SEQ ID NO: 4278259 - DNA, 25 bp, Homo sapien
taaagcacaaccatctcccttagag

SEQ ID NO: 4278260 - DNA, 25 bp, Homo sapien
aatgtgtggagttgtgtgcctgcct

SEQ ID NO: 4278261 - DNA, 25 bp, Homo sapien
ccttagagtgggctaaatctactgc

SEQ ID NO: 4278262 - DNA, 25 bp, Homo sapien
ggtgcaagccatatgtagtgtcagc

SEQ ID NO: 4278263 - DNA, 25 bp, Homo sapien
actcatcatgtctgtagagccttag

SEQ ID NO: 4278264 - DNA, 25 bp, Homo sapien
aactgaagtggtgttatgggaagtc

SEQ ID NO: 4278265 - DNA, 25 bp, Homo sapien
tgaaacttcttctaactgagcttac

SEQ ID NO: 4278266 - DNA, 25 bp, Homo sapien
cacagccgaccaagcatggctactt

SEQ ID NO: 4278267 - DNA, 25 bp, Homo sapien
tatcaggagtttatgatttttctcc

SEQ ID NO: 4278268 - DNA, 25 bp, Homo sapien
atggaaaatagaacgaacctacgtg

SEQ ID NO: 4278269 - DNA, 25 bp, Homo sapien
ttatcaggagtttatgatttttctc

SEQ ID NO: 4278270 - DNA, 25 bp, Homo sapien
tgcaggcagaggcccaaccatcctg

SEQ ID NO: 4278271 - DNA, 25 bp, Homo sapien
ctgtttctggggtggcctgtgcagc

SEQ ID NO: 4278272 - DNA, 25 bp, Homo sapien
tataacctagcgtgaacagagagac

SEQ ID NO: 4278273 - DNA, 25 bp, Homo sapien
cagatccattgctgacccatgatgg

SEQ ID NO: 4278274 - DNA, 25 bp, Homo sapien
cagagagacacagcgatgttccatt

SEQ ID NO: 4278275 - DNA, 25 bp, Homo sapien
tttggaggccatttgctacagcaat

SEQ ID NO: 4278276 - DNA, 25 bp, Homo sapien
aacaggagaatttcataggtgggcc

SEQ ID NO: 4278277 - DNA, 25 bp, Homo sapien
tggcattatcactgctgtggctacc

SEQ ID NO: 4278278 - DNA, 25 bp, Homo sapien
tgtggctaccccatcagatgttgct

SEQ ID NO: 4278279 - DNA, 25 bp, Homo sapien
taggtgggcctcaatttcactttag

SEQ ID NO: 4278280 - DNA, 25 bp, Homo sapien
gcaagtgatgagcaactgaacctac

SEQ ID NO: 4278281 - DNA, 25 bp, Homo sapien
taggaaaaccggtgcttggcctggc

SEQ ID NO: 4278282 - DNA, 25 bp, Homo sapien
tgcacgtgcactgagacagctatgt

SEQ ID NO: 4278283 - DNA, 25 bp, Homo sapien
tacccaagactgcaagaaagaggag

SEQ ID NO: 4278284 - DNA, 25 bp, Homo sapien
cttcctgaggaattcacaggcttcc

SEQ ID NO: 4278285 - DNA, 25 bp, Homo sapien
ttacttcctgaggaattcacaggct

SEQ ID NO: 4278286 - DNA, 25 bp, Homo sapien
tcctgaggaattcacaggcttccag

SEQ ID NO: 4278287 - DNA, 25 bp, Homo sapien
tacttcctgaggaattcacaggctt

SEQ ID NO: 4278288 - DNA, 25 bp, Homo sapien
tagcttctcccggaatgtgaacctg

SEQ ID NO: 4278289 - DNA, 25 bp, Homo sapien
acattggtggtcctctagcttctcc

SEQ ID NO: 4278290 - DNA, 25 bp, Homo sapien
tctcaagttcacaagacattggtgg

SEQ ID NO: 4278291 - DNA, 25 bp, Homo sapien
tgcacttgtctctgattgaatcgac

SEQ ID NO: 4278292 - DNA, 25 bp, Homo sapien
catgtggtctatgcagtcctgagct

SEQ ID NO: 4278293 - DNA, 25 bp, Homo sapien
accgggagccttacaatactctgtg

SEQ ID NO: 4278294 - DNA, 25 bp, Homo sapien
gaatgattgcagtgcacagggagct

SEQ ID NO: 4278295 - DNA, 25 bp, Homo sapien
aaatcccacagttatcaccgggagc

SEQ ID NO: 4278296 - DNA, 25 bp, Homo sapien
taatgcctgcgacatactgtggtcc

SEQ ID NO: 4278297 - DNA, 25 bp, Homo sapien
ttttggtttcagactggaataagca

SEQ ID NO: 4278298 - DNA, 25 bp, Homo sapien
taagcaaaacttgtccgggcagtca

SEQ ID NO: 4278299 - DNA, 25 bp, Homo sapien
tcagtgttgtcattgaacagaaggt

SEQ ID NO: 4278300 - DNA, 25 bp, Homo sapien
agaggatcgagtgggctggtgcacc

SEQ ID NO: 4278301 - DNA, 25 bp, Homo sapien
gctaagaaagcactagaagccctgt

SEQ ID NO: 4278302 - DNA, 25 bp, Homo sapien
taacatgagcccacacagctaagaa

SEQ ID NO: 4278303 - DNA, 25 bp, Homo sapien
tcaccatgagcttcaagtagaggac

SEQ ID NO: 4278304 - DNA, 25 bp, Homo sapien
tccgagacaccacggcatgattcgg

SEQ ID NO: 4278305 - DNA, 25 bp, Homo sapien
gagcaacacctgtttcaggcgttcc

SEQ ID NO: 4278306 - DNA, 25 bp, Homo sapien
ggcgttccaccttatccatccgaga

SEQ ID NO: 4278307 - DNA, 25 bp, Homo sapien
cacaggcttccgtttgccatcgagg

SEQ ID NO: 4278308 - DNA, 25 bp, Homo sapien
tccttagcccatgcctcattgttat

SEQ ID NO: 4278309 - DNA, 25 bp, Homo sapien
ttcaaatccttagcccatgcctcat

SEQ ID NO: 4278310 - DNA, 25 bp, Homo sapien
ttagcccatgcctcattgttatttc

SEQ ID NO: 4278311 - DNA, 25 bp, Homo sapien
aaatccttagcccatgcctcattgt

SEQ ID NO: 4278312 - DNA, 25 bp, Homo sapien
ggagaaaaagaaggtggcatcatcc

SEQ ID NO: 4278313 - DNA, 25 bp, Homo sapien
ggtgggtgtggccattccactgacc

SEQ ID NO: 4278314 - DNA, 25 bp, Homo sapien
tcatcctacacaagctgtacaaact

SEQ ID NO: 4278315 - DNA, 25 bp, Homo sapien
catgaacctcgaaaacgatgctaag

SEQ ID NO: 4278316 - DNA, 25 bp, Homo sapien
ccaaagactctgctttgaaggagaa

SEQ ID NO: 4278317 - DNA, 25 bp, Homo sapien
tgccaaagactctgctttgaaggag

SEQ ID NO: 4278318 - DNA, 25 bp, Homo sapien
caaagactctgctttgaaggagaaa

SEQ ID NO: 4278319 - DNA, 25 bp, Homo sapien
gccaaagactctgctttgaaggaga

SEQ ID NO: 4278320 - DNA, 25 bp, Homo sapien
ttcacaaatgcaacgtctccagcat

SEQ ID NO: 4278321 - DNA, 25 bp, Homo sapien
ctttcacaaatgcaacgtctccagc

SEQ ID NO: 4278322 - DNA, 25 bp, Homo sapien
tttcacaaatgcaacgtctccagca

SEQ ID NO: 4278323 - DNA, 25 bp, Homo sapien
tctttcacaaatgcaacgtctccag

SEQ ID NO: 4278324 - DNA, 25 bp, Homo sapien
tctaggaatttactgtttacagcgg

SEQ ID NO: 4278325 - DNA, 25 bp, Homo sapien
caggcaatctaacatgaagtaagac

SEQ ID NO: 4278326 - DNA, 25 bp, Homo sapien
tttacagcggcagattgaacacagg

SEQ ID NO: 4278327 - DNA, 25 bp, Homo sapien
gaaatctaaagatatgcgacccagg

SEQ ID NO: 4278328 - DNA, 25 bp, Homo sapien
ccacagatgtgcaggcggcctacac

SEQ ID NO: 4278329 - DNA, 25 bp, Homo sapien
gatgaaactgtgatagcacccagag

SEQ ID NO: 4278330 - DNA, 25 bp, Homo sapien
gaaactgtgatagcacccagagaga

SEQ ID NO: 4278331 - DNA, 25 bp, Homo sapien
tacacagcaaccagtccaaactgca

SEQ ID NO: 4278332 - DNA, 25 bp, Homo sapien
cccggatgaatggtgctgtaaaacg

SEQ ID NO: 4278333 - DNA, 25 bp, Homo sapien
gctattgaggcctactgctgttgat

SEQ ID NO: 4278334 - DNA, 25 bp, Homo sapien
taaaaagttcagacaccctcagaca

SEQ ID NO: 4278335 - DNA, 25 bp, Homo sapien
cactggtaaatagtgcccctgagaa

SEQ ID NO: 4278336 - DNA, 25 bp, Homo sapien
tgggcacgcacttattctcaccctg

SEQ ID NO: 4278337 - DNA, 25 bp, Homo sapien
attagatctcgggtcagacccaggg

SEQ ID NO: 4278338 - DNA, 25 bp, Homo sapien
gacccaggggcacagctttgactga

SEQ ID NO: 4278339 - DNA, 25 bp, Homo sapien
tcgtcgccaatacacagagcacaga

SEQ ID NO: 4278340 - DNA, 25 bp, Homo sapien
cagagcctgtgagttgcctagtcca

SEQ ID NO: 4278341 - DNA, 25 bp, Homo sapien
tgtaggcacagatggacacccaact

SEQ ID NO: 4278342 - DNA, 25 bp, Homo sapien
tacctaacagccgatgcagggtggt

SEQ ID NO: 4278343 - DNA, 25 bp, Homo sapien
aatatcagcaggagtgttgggcgcc

SEQ ID NO: 4278344 - DNA, 25 bp, Homo sapien
caggagcccgtctggttgaagagca

SEQ ID NO: 4278345 - DNA, 25 bp, Homo sapien
cagtcctgtccacggcggtgtggca

SEQ ID NO: 4278346 - DNA, 25 bp, Homo sapien
tagtgtctgatctcctaaccaccgc

SEQ ID NO: 4278347 - DNA, 25 bp, Homo sapien
ctttcacagagttccaggtaaggct

SEQ ID NO: 4278348 - DNA, 25 bp, Homo sapien
cttccacaggtctatccacacagtt

SEQ ID NO: 4278349 - DNA, 25 bp, Homo sapien
cacagttaggatcagggtcactgct

SEQ ID NO: 4278350 - DNA, 25 bp, Homo sapien
tatccacacagttaggatcagggtc

SEQ ID NO: 4278351 - DNA, 25 bp, Homo sapien
cacaggtctatccacacagttagga

SEQ ID NO: 4278352 - DNA, 25 bp, Homo sapien
aaaccacatttgcctgcagtgtaca

SEQ ID NO: 4278353 - DNA, 25 bp, Homo sapien
gcctgcagtgtacacatatcctcca

SEQ ID NO: 4278354 - DNA, 25 bp, Homo sapien
cagtgtacacatatcctccatccaa

SEQ ID NO: 4278355 - DNA, 25 bp, Homo sapien
tgtacacatatcctccatccaaact

SEQ ID NO: 4278356 - DNA, 25 bp, Homo sapien
tccactggttacacttgcgcagctc

SEQ ID NO: 4278357 - DNA, 25 bp, Homo sapien
aggtcacgctgccttcgctcaagcc

SEQ ID NO: 4278358 - DNA, 25 bp, Homo sapien
tcaagccactccactggttacactt

SEQ ID NO: 4278359 - DNA, 25 bp, Homo sapien
cactccactggttacacttgcgcag

SEQ ID NO: 4278360 - DNA, 25 bp, Homo sapien
cttgaacagcagatctttctgccca

SEQ ID NO: 4278361 - DNA, 25 bp, Homo sapien
gtgaagtagccggagccaaggtaca

SEQ ID NO: 4278362 - DNA, 25 bp, Homo sapien
gaatttcggtgacttgtcctttcca

SEQ ID NO: 4278363 - DNA, 25 bp, Homo sapien
tcgaaaacccaatggcagagtcctt

SEQ ID NO: 4278364 - DNA, 25 bp, Homo sapien
tgccacaacggcatgagaagggacc

SEQ ID NO: 4278365 - DNA, 25 bp, Homo sapien
ttccgagtgttgtctgggcagagta

SEQ ID NO: 4278366 - DNA, 25 bp, Homo sapien
tgaacttgtccactggcttccgagt

SEQ ID NO: 4278367 - DNA, 25 bp, Homo sapien
tgtgcctggcggagaagattccaga

SEQ ID NO: 4278368 - DNA, 25 bp, Homo sapien
gactggaggacgcattgccaagcac

SEQ ID NO: 4278369 - DNA, 25 bp, Homo sapien
gagctgtgccctgtaggaatcttga

SEQ ID NO: 4278370 - DNA, 25 bp, Homo sapien
tctaattagctcaaaggtcagagtc

SEQ ID NO: 4278371 - DNA, 25 bp, Homo sapien
ggtctgccatgaacttaggaatcta

SEQ ID NO: 4278372 - DNA, 25 bp, Homo sapien
tctgataaaagccacgtctccagcc

SEQ ID NO: 4278373 - DNA, 25 bp, Homo sapien
ctctgataaaagccacgtctccagc

SEQ ID NO: 4278374 - DNA, 25 bp, Homo sapien
aacactgtgctctctctgataaaag

SEQ ID NO: 4278375 - DNA, 25 bp, Homo sapien
tctctgataaaagccacgtctccag

SEQ ID NO: 4278376 - DNA, 25 bp, Homo sapien
ccgcacacaggcgacacaggttggg

SEQ ID NO: 4278377 - DNA, 25 bp, Homo sapien
ccagagtagctgaagtacggttcct

SEQ ID NO: 4278378 - DNA, 25 bp, Homo sapien
cctttatctgcaccgggaacacagc

SEQ ID NO: 4278379 - DNA, 25 bp, Homo sapien
gggaactgtcctttatctgcaccgg

SEQ ID NO: 4278380 - DNA, 25 bp, Homo sapien
gcctcaatgggctcaggtggacccg

SEQ ID NO: 4278381 - DNA, 25 bp, Homo sapien
tgcctcaatgggctcaggtggaccc

SEQ ID NO: 4278382 - DNA, 25 bp, Homo sapien
ctgcctcaatgggctcaggtggacc

SEQ ID NO: 4278383 - DNA, 25 bp, Homo sapien
cctcaatgggctcaggtggacccgt

SEQ ID NO: 4278384 - DNA, 25 bp, Homo sapien
ttcgttcagctgaaagctgccgccc

SEQ ID NO: 4278385 - DNA, 25 bp, Homo sapien
cagccacggcataatagtgagttcg

SEQ ID NO: 4278386 - DNA, 25 bp, Homo sapien
gacttcagaccttgcagttcgttca

SEQ ID NO: 4278387 - DNA, 25 bp, Homo sapien
ccaattcaagaatggacgaagtgtc

SEQ ID NO: 4278388 - DNA, 25 bp, Homo sapien
aaggggcagacagaattgaaagttc

SEQ ID NO: 4278389 - DNA, 25 bp, Homo sapien
aaaggggcagacagaattgaaagtt

SEQ ID NO: 4278390 - DNA, 25 bp, Homo sapien
ggcctctgggtccccaggcagaact

SEQ ID NO: 4278391 - DNA, 25 bp, Homo sapien
ctctgggtccccaggcagaactcac

SEQ ID NO: 4278392 - DNA, 25 bp, Homo sapien
cgtggcctctgggtccccaggcaga

SEQ ID NO: 4278393 - DNA, 25 bp, Homo sapien
gtggcctctgggtccccaggcagaa

SEQ ID NO: 4278394 - DNA, 25 bp, Homo sapien
tcggtcccgtagacttccgccgcta

SEQ ID NO: 4278395 - DNA, 25 bp, Homo sapien
ccgccgctacaggtcgcagtttgta

SEQ ID NO: 4278396 - DNA, 25 bp, Homo sapien
gaaaccaccatcaagggtcacagca

SEQ ID NO: 4278397 - DNA, 25 bp, Homo sapien
ggccaggcctgcctcgtatatgaaa

SEQ ID NO: 4278398 - DNA, 25 bp, Homo sapien
gagggccacgcacttttctcatatt

SEQ ID NO: 4278399 - DNA, 25 bp, Homo sapien
cattttgtggcctcgggttgggata

SEQ ID NO: 4278400 - DNA, 25 bp, Homo sapien
ctcatattcctttgccattggaagc

SEQ ID NO: 4278401 - DNA, 25 bp, Homo sapien
gggatacggcgcaccactgaacact

SEQ ID NO: 4278402 - DNA, 25 bp, Homo sapien
tgcaatggcactttggggtacaagc

SEQ ID NO: 4278403 - DNA, 25 bp, Homo sapien
cactttggggtacaagccaccatcc

SEQ ID NO: 4278404 - DNA, 25 bp, Homo sapien
caaacttcagacctcagtaggcgcc

SEQ ID NO: 4278405 - DNA, 25 bp, Homo sapien
gccaccatcccaattgactgcagga

SEQ ID NO: 4278406 - DNA, 25 bp, Homo sapien
acagcaggacgaggaagacaagttt

SEQ ID NO: 4278407 - DNA, 25 bp, Homo sapien
gcaggacgaggaagacaagtttcat

SEQ ID NO: 4278408 - DNA, 25 bp, Homo sapien
aggaacagcaggacgaggaagacaa

SEQ ID NO: 4278409 - DNA, 25 bp, Homo sapien
gaggaacagcaggacgaggaagaca

SEQ ID NO: 4278410 - DNA, 25 bp, Homo sapien
caaacgaaggctctgccacttgcgc

SEQ ID NO: 4278411 - DNA, 25 bp, Homo sapien
ggtctacttgttccttgaggatcca

SEQ ID NO: 4278412 - DNA, 25 bp, Homo sapien
tgaggatccaggctccgaaaagccc

SEQ ID NO: 4278413 - DNA, 25 bp, Homo sapien
cactagtctgcaagcccctaggagt

SEQ ID NO: 4278414 - DNA, 25 bp, Homo sapien
aacactggtctatgggacatctcca

SEQ ID NO: 4278415 - DNA, 25 bp, Homo sapien
tatgggacatctccaacgtgccagg

SEQ ID NO: 4278416 - DNA, 25 bp, Homo sapien
gacatctccaacgtgccaggagttg

SEQ ID NO: 4278417 - DNA, 25 bp, Homo sapien
cattcattcaacactggtctatggg

SEQ ID NO: 4278418 - DNA, 25 bp, Homo sapien
gccagtggacagtagagctagaaat

SEQ ID NO: 4278419 - DNA, 25 bp, Homo sapien
tagagctagaaatccacccgggacc

SEQ ID NO: 4278420 - DNA, 25 bp, Homo sapien
gtttccagctgagtggacttgggca

SEQ ID NO: 4278421 - DNA, 25 bp, Homo sapien
gggcaatgcaccctgttcatggtct

SEQ ID NO: 4278422 - DNA, 25 bp, Homo sapien
tctggaggggactgctccacaggct

SEQ ID NO: 4278423 - DNA, 25 bp, Homo sapien
gccctcctacaaggttgcattctgg

SEQ ID NO: 4278424 - DNA, 25 bp, Homo sapien
tcctacaaggttgcattctggaggg

SEQ ID NO: 4278425 - DNA, 25 bp, Homo sapien
tggtgctgccctcctacaaggttgc

SEQ ID NO: 4278426 - DNA, 25 bp, Homo sapien
tctgggaagccaatagcagaaagcc

SEQ ID NO: 4278427 - DNA, 25 bp, Homo sapien
tctactcattaaattctggatcaag

SEQ ID NO: 4278428 - DNA, 25 bp, Homo sapien
tggctggcaggtgatgataagggct

SEQ ID NO: 4278429 - DNA, 25 bp, Homo sapien
ctggatcaagtcagaccacagccca

SEQ ID NO: 4278430 - DNA, 25 bp, Homo sapien
gaagctgacattgatatgttactat

SEQ ID NO: 4278431 - DNA, 25 bp, Homo sapien
tacaaagaccgttcagagatttccc

SEQ ID NO: 4278432 - DNA, 25 bp, Homo sapien
ttgttaccatcttacgttactatgg

SEQ ID NO: 4278433 - DNA, 25 bp, Homo sapien
gccagaccttatttggattccatca

SEQ ID NO: 4278434 - DNA, 25 bp, Homo sapien
tgctctgtcttgattaatgacatta

SEQ ID NO: 4278435 - DNA, 25 bp, Homo sapien
agtgccaagcaaagcggggaaagtc

SEQ ID NO: 4278436 - DNA, 25 bp, Homo sapien
tgagtgccaagcaaagcggggaaag

SEQ ID NO: 4278437 - DNA, 25 bp, Homo sapien
gaacccactaactatcacaagaata

SEQ ID NO: 4278438 - DNA, 25 bp, Homo sapien
cactgacaagtagtgtgggagaagc

SEQ ID NO: 4278439 - DNA, 25 bp, Homo sapien
tgatgacggatcttgccactgacaa

SEQ ID NO: 4278440 - DNA, 25 bp, Homo sapien
gagctcactgaagactacagccaag

SEQ ID NO: 4278441 - DNA, 25 bp, Homo sapien
tcaagaaagaattggaaagcccttc

SEQ ID NO: 4278442 - DNA, 25 bp, Homo sapien
cagtctatttgtatgaaagcccctc

SEQ ID NO: 4278443 - DNA, 25 bp, Homo sapien
tggccatatgtaacacataccttag

SEQ ID NO: 4278444 - DNA, 25 bp, Homo sapien
taagattcaacgaaggtgatttctc

SEQ ID NO: 4278445 - DNA, 25 bp, Homo sapien
gtatcagtctatttgcatcatgtca

SEQ ID NO: 4278446 - DNA, 25 bp, Homo sapien
caccttggaacggtttggagcactc

SEQ ID NO: 4278447 - DNA, 25 bp, Homo sapien
tccagtccatggagggagatactca

SEQ ID NO: 4278448 - DNA, 25 bp, Homo sapien
cctgttcaggagtatggtagccaca

SEQ ID NO: 4278449 - DNA, 25 bp, Homo sapien
tgtacctacaagtctctcctgggag

SEQ ID NO: 4278450 - DNA, 25 bp, Homo sapien
tcaaagttgaaggctaaaagacact

SEQ ID NO: 4278451 - DNA, 25 bp, Homo sapien
aaagacactttggtggtatagctgg

SEQ ID NO: 4278452 - DNA, 25 bp, Homo sapien
ttgaaggctaaaagacactttggtg

SEQ ID NO: 4278453 - DNA, 25 bp, Homo sapien
agttgaaggctaaaagacactttgg

SEQ ID NO: 4278454 - DNA, 25 bp, Homo sapien
atcaaaatgttggcgatcccgttca

SEQ ID NO: 4278455 - DNA, 25 bp, Homo sapien
cacattgggcattatcaataggatt

SEQ ID NO: 4278456 - DNA, 25 bp, Homo sapien
caaaatgttggcgatcccgttcact

SEQ ID NO: 4278457 - DNA, 25 bp, Homo sapien
catcttcacattgggcattatcaat

SEQ ID NO: 4278458 - DNA, 25 bp, Homo sapien
accatctggtaaggcttggtaatgc

SEQ ID NO: 4278459 - DNA, 25 bp, Homo sapien
gacaaccatctggtaaggcttggta

SEQ ID NO: 4278460 - DNA, 25 bp, Homo sapien
tgtgacaaccatctggtaaggcttg

SEQ ID NO: 4278461 - DNA, 25 bp, Homo sapien
ggtaaggcttggtaatgccttcata

SEQ ID NO: 4278462 - DNA, 25 bp, Homo sapien
tcgctagtggttgcgttaacagcca

SEQ ID NO: 4278463 - DNA, 25 bp, Homo sapien
gttgcgttaacagccacctggtgct

SEQ ID NO: 4278464 - DNA, 25 bp, Homo sapien
gggaaatattctcgctagtggttgc

SEQ ID NO: 4278465 - DNA, 25 bp, Homo sapien
ggagtcctggggaaatattctcgct

SEQ ID NO: 4278466 - DNA, 25 bp, Homo sapien
cttcaggttcagcatggaataggga

SEQ ID NO: 4278467 - DNA, 25 bp, Homo sapien
tttatacaagagaaagctctgcagc

SEQ ID NO: 4278468 - DNA, 25 bp, Homo sapien
gtccccactgacgactaacagagtg

SEQ ID NO: 4278469 - DNA, 25 bp, Homo sapien
tgtggatgagtcacaaagggcagtt

SEQ ID NO: 4278470 - DNA, 25 bp, Homo sapien
tcctagctttaagcaatcctccttc

SEQ ID NO: 4278471 - DNA, 25 bp, Homo sapien
actcctagctttaagcaatcctcct

SEQ ID NO: 4278472 - DNA, 25 bp, Homo sapien
ctccttccttggcctcccaaagtgc

SEQ ID NO: 4278473 - DNA, 25 bp, Homo sapien
actatgtggcctagccttgtcttga

SEQ ID NO: 4278474 - DNA, 25 bp, Homo sapien
ggtgccattctacggagactaaagc

SEQ ID NO: 4278475 - DNA, 25 bp, Homo sapien
tccacttctgtagagtgaaggaaag

SEQ ID NO: 4278476 - DNA, 25 bp, Homo sapien
catacatgtatgatgcagactggaa

SEQ ID NO: 4278477 - DNA, 25 bp, Homo sapien
gaagaggtgttcaaatgcacgtaaa

SEQ ID NO: 4278478 - DNA, 25 bp, Homo sapien
tgtctatatcttgcggcaggtcggt

SEQ ID NO: 4278479 - DNA, 25 bp, Homo sapien
tatctacaaatgtaacttgcttcaa

SEQ ID NO: 4278480 - DNA, 25 bp, Homo sapien
ttcgacatccgcaggacacagattg

SEQ ID NO: 4278481 - DNA, 25 bp, Homo sapien
gctgctgatatccaaccactgcaaa

SEQ ID NO: 4278482 - DNA, 25 bp, Homo sapien
caatctcccaattctggaggaatgc

SEQ ID NO: 4278483 - DNA, 25 bp, Homo sapien
tctcccaattctggaggaatgctct

SEQ ID NO: 4278484 - DNA, 25 bp, Homo sapien
ctcccaattctggaggaatgctctt

SEQ ID NO: 4278485 - DNA, 25 bp, Homo sapien
cacaatctcccaattctggaggaat

SEQ ID NO: 4278486 - DNA, 25 bp, Homo sapien
aaagaggatttgctcaaaatactcc

SEQ ID NO: 4278487 - DNA, 25 bp, Homo sapien
agaggatttgctcaaaatactccat

SEQ ID NO: 4278488 - DNA, 25 bp, Homo sapien
taaaaaagaggatttgctcaaaata

SEQ ID NO: 4278489 - DNA, 25 bp, Homo sapien
aaaaagaggatttgctcaaaatact

SEQ ID NO: 4278490 - DNA, 25 bp, Homo sapien
aagatgtgagatttggttttttggc

SEQ ID NO: 4278491 - DNA, 25 bp, Homo sapien
tgtaggaatgatttgaatcaaggta

SEQ ID NO: 4278492 - DNA, 25 bp, Homo sapien
tgtctgctccttcaatgaatctggg

SEQ ID NO: 4278493 - DNA, 25 bp, Homo sapien
tgcttatgtaccattctctcaggtg

SEQ ID NO: 4278494 - DNA, 25 bp, Homo sapien
ggaaaactccatggcagttgaaggg

SEQ ID NO: 4278495 - DNA, 25 bp, Homo sapien
tgggatgaggtgtggaaaactccat

SEQ ID NO: 4278496 - DNA, 25 bp, Homo sapien
gagtccatagtgatccttctttttt

SEQ ID NO: 4278497 - DNA, 25 bp, Homo sapien
aatgtgctttacaaccattgccctc

SEQ ID NO: 4278498 - DNA, 25 bp, Homo sapien
ccttcggcacttcggcaagtaagta

SEQ ID NO: 4278499 - DNA, 25 bp, Homo sapien
tgcccttcggcacttcggcaagtaa

SEQ ID NO: 4278500 - DNA, 25 bp, Homo sapien
gctgcccttcggcacttcggcaagt

SEQ ID NO: 4278501 - DNA, 25 bp, Homo sapien
tcggcacttcggcaagtaagtaatt

SEQ ID NO: 4278502 - DNA, 25 bp, Homo sapien
tgcattcggccacaaagttccactc

SEQ ID NO: 4278503 - DNA, 25 bp, Homo sapien
ccattcttgcagtatacagcctggg

SEQ ID NO: 4278504 - DNA, 25 bp, Homo sapien
gttcaaacacaaacgcactgctccg

SEQ ID NO: 4278505 - DNA, 25 bp, Homo sapien
tcttgtccagaagccgcacgctggt

SEQ ID NO: 4278506 - DNA, 25 bp, Homo sapien
cacagatggatagccttttcccgga

SEQ ID NO: 4278507 - DNA, 25 bp, Homo sapien
ttttcccggaatgccggagcctcca

SEQ ID NO: 4278508 - DNA, 25 bp, Homo sapien
tgtagaaaacggaaagccatacaaa

SEQ ID NO: 4278509 - DNA, 25 bp, Homo sapien
accaccaggcactgtcaagtgtaag

SEQ ID NO: 4278510 - DNA, 25 bp, Homo sapien
tgatgacagaaatgtcgaagacaac

SEQ ID NO: 4278511 - DNA, 25 bp, Homo sapien
gaaatgtcgaagacaaccactttat

SEQ ID NO: 4278512 - DNA, 25 bp, Homo sapien
ttctccaaggcgctcttctcaagcc

SEQ ID NO: 4278513 - DNA, 25 bp, Homo sapien
cgaagacaaccactttatgtcccat

SEQ ID NO: 4278514 - DNA, 25 bp, Homo sapien
cagtcttcgtggtgctattcagcta

SEQ ID NO: 4278515 - DNA, 25 bp, Homo sapien
gaaggtctattccagtgtccaggtc

SEQ ID NO: 4278516 - DNA, 25 bp, Homo sapien
taagttgataactgacaccgtgggt

SEQ ID NO: 4278517 - DNA, 25 bp, Homo sapien
tattcagctatgttccgtgtgcacc

SEQ ID NO: 4278518 - DNA, 25 bp, Homo sapien
cacagggctcgtgttctctagatca

SEQ ID NO: 4278519 - DNA, 25 bp, Homo sapien
taaaggaacgctacgcatcatcctg

SEQ ID NO: 4278520 - DNA, 25 bp, Homo sapien
gaaatctattgcatagcagggcgac

SEQ ID NO: 4278521 - DNA, 25 bp, Homo sapien
ggaagaattactccctacacacagg

SEQ ID NO: 4278522 - DNA, 25 bp, Homo sapien
caggctatatttgtaggcggataat

SEQ ID NO: 4278523 - DNA, 25 bp, Homo sapien
tgtttacacccgctgagcagcacgg

SEQ ID NO: 4278524 - DNA, 25 bp, Homo sapien
cgtgcctgtgcgctaacaggctata

SEQ ID NO: 4278525 - DNA, 25 bp, Homo sapien
gaggacatgtgctaaatcaactatc

SEQ ID NO: 4278526 - DNA, 25 bp, Homo sapien
tgcaagcggcacatcagagtccggg

SEQ ID NO: 4278527 - DNA, 25 bp, Homo sapien
cctgcaagcggcacatcagagtccg

SEQ ID NO: 4278528 - DNA, 25 bp, Homo sapien
gctgagataaattcccgtgattggg

SEQ ID NO: 4278529 - DNA, 25 bp, Homo sapien
gggaggctgagataaattcccgtga

SEQ ID NO: 4278530 - DNA, 25 bp, Homo sapien
tgtggtaagcggaggttctcctctt

SEQ ID NO: 4278531 - DNA, 25 bp, Homo sapien
ttctacccggctgtggtaagcggag

SEQ ID NO: 4278532 - DNA, 25 bp, Homo sapien
ctgtggtaagcggaggttctcctct

SEQ ID NO: 4278533 - DNA, 25 bp, Homo sapien
caggcatttctacccggctgtggta

SEQ ID NO: 4278534 - DNA, 25 bp, Homo sapien
gtcacagaaccctttcaccttcttg

SEQ ID NO: 4278535 - DNA, 25 bp, Homo sapien
tggtcacagaaccctttcaccttct

SEQ ID NO: 4278536 - DNA, 25 bp, Homo sapien
cagaaccctttcaccttcttgattt

SEQ ID NO: 4278537 - DNA, 25 bp, Homo sapien
cacagaaccctttcaccttcttgat

SEQ ID NO: 4278538 - DNA, 25 bp, Homo sapien
taatcgacattgacctatttccaga

SEQ ID NO: 4278539 - DNA, 25 bp, Homo sapien
acttttatgctagttggcatctgcc

SEQ ID NO: 4278540 - DNA, 25 bp, Homo sapien
ccgtctgcacgtactaccactttta

SEQ ID NO: 4278541 - DNA, 25 bp, Homo sapien
tgctacaatgtcctaactgaaagat

SEQ ID NO: 4278542 - DNA, 25 bp, Homo sapien
cctccgcatccggggttcaagccat

SEQ ID NO: 4278543 - DNA, 25 bp, Homo sapien
ggactgcaatgacgcgatcttggtt

SEQ ID NO: 4278544 - DNA, 25 bp, Homo sapien
acctccgcatccggggttcaagcca

SEQ ID NO: 4278545 - DNA, 25 bp, Homo sapien
gctggactgcaatgacgcgatcttg

SEQ ID NO: 4278546 - DNA, 25 bp, Homo sapien
gttcagattattggagactaattct

SEQ ID NO: 4278547 - DNA, 25 bp, Homo sapien
tatgttcagattattggagactaat

SEQ ID NO: 4278548 - DNA, 25 bp, Homo sapien
tatatgttcagattattggagacta

SEQ ID NO: 4278549 - DNA, 25 bp, Homo sapien
gaattatatgttcagattattggag

SEQ ID NO: 4278550 - DNA, 25 bp, Homo sapien
cagccgcatccccggggtcaatact

SEQ ID NO: 4278551 - DNA, 25 bp, Homo sapien
ggccagccgcatccccggggtcaat

SEQ ID NO: 4278552 - DNA, 25 bp, Homo sapien
ccgcatccccggggtcaatactggt

SEQ ID NO: 4278553 - DNA, 25 bp, Homo sapien
ctaggagtctctgcgcttccctgca

SEQ ID NO: 4278554 - DNA, 25 bp, Homo sapien
ttctccttggtgatacagcacttct

SEQ ID NO: 4278555 - DNA, 25 bp, Homo sapien
tctccttggtgatacagcacttctg

SEQ ID NO: 4278556 - DNA, 25 bp, Homo sapien
tcttctccttggtgatacagcactt

SEQ ID NO: 4278557 - DNA, 25 bp, Homo sapien
tccttggtgatacagcacttctgac

SEQ ID NO: 4278558 - DNA, 25 bp, Homo sapien
gatttgtcccagttccatatagtga

SEQ ID NO: 4278559 - DNA, 25 bp, Homo sapien
gatgctgattgtgtggtgtaaacca

SEQ ID NO: 4278560 - DNA, 25 bp, Homo sapien
cagttccatatagtgagctctccat

SEQ ID NO: 4278561 - DNA, 25 bp, Homo sapien
accagtagttctcagatttgtccca

SEQ ID NO: 4278562 - DNA, 25 bp, Homo sapien
ctttgtcatcttggttatgtgcatc

SEQ ID NO: 4278563 - DNA, 25 bp, Homo sapien
tgtcatcttggttatgtgcatcttc

SEQ ID NO: 4278564 - DNA, 25 bp, Homo sapien
tttgtcatcttggttatgtgcatct

SEQ ID NO: 4278565 - DNA, 25 bp, Homo sapien
ttgtcatcttggttatgtgcatctt

SEQ ID NO: 4278566 - DNA, 25 bp, Homo sapien
tcttccattgtttggggacagccat

SEQ ID NO: 4278567 - DNA, 25 bp, Homo sapien
gacacatttggttcgactgaatcga

SEQ ID NO: 4278568 - DNA, 25 bp, Homo sapien
taaggcttgcgagggacaaatgttc

SEQ ID NO: 4278569 - DNA, 25 bp, Homo sapien
tcacaggcggtcaagtgcgacacat

SEQ ID NO: 4278570 - DNA, 25 bp, Homo sapien
gatttgctgaacgtgaattggctcc

SEQ ID NO: 4278571 - DNA, 25 bp, Homo sapien
cccaggctatgccactcagagtcct

SEQ ID NO: 4278572 - DNA, 25 bp, Homo sapien
gtacagaagtagggcatagaaagct

SEQ ID NO: 4278573 - DNA, 25 bp, Homo sapien
gcatagaaagctgacttgggtggcc

SEQ ID NO: 4278574 - DNA, 25 bp, Homo sapien
tagggcatagaaagctgacttgggt

SEQ ID NO: 4278575 - DNA, 25 bp, Homo sapien
ttccgatttgactctgggtagccag

SEQ ID NO: 4278576 - DNA, 25 bp, Homo sapien
tgtgttgtcccttcacaaaatggaa

SEQ ID NO: 4278577 - DNA, 25 bp, Homo sapien
gctctgctctaattaatactctgtg

SEQ ID NO: 4278578 - DNA, 25 bp, Homo sapien
tccaggatctaatagggcagcagca

SEQ ID NO: 4278579 - DNA, 25 bp, Homo sapien
tacattcagcaaagttagagtggga

SEQ ID NO: 4278580 - DNA, 25 bp, Homo sapien
ggaacacactctggactaaggaaga

SEQ ID NO: 4278581 - DNA, 25 bp, Homo sapien
catgatccaggagcagtgagtattc

SEQ ID NO: 4278582 - DNA, 25 bp, Homo sapien
gcaggtcctgggtactttgaggaaa

SEQ ID NO: 4278583 - DNA, 25 bp, Homo sapien
gctcgtagaacttgctgaaaatcaa

SEQ ID NO: 4278584 - DNA, 25 bp, Homo sapien
tattgctgctcgtagaacttgctga

SEQ ID NO: 4278585 - DNA, 25 bp, Homo sapien
tgccatctcgggctatttctgaata

SEQ ID NO: 4278586 - DNA, 25 bp, Homo sapien
ttctgaatattgctgctcgtagaac

SEQ ID NO: 4278587 - DNA, 25 bp, Homo sapien
gctgtcatccgtgcttgtccctggg

SEQ ID NO: 4278588 - DNA, 25 bp, Homo sapien
tgctgtcatccgtgcttgtccctgg

SEQ ID NO: 4278589 - DNA, 25 bp, Homo sapien
ctgtcatccgtgcttgtccctgggg

SEQ ID NO: 4278590 - DNA, 25 bp, Homo sapien
gatgaatagtcctgtgctagtgcct

SEQ ID NO: 4278591 - DNA, 25 bp, Homo sapien
tggtttggctgcatgacagcaaggt

SEQ ID NO: 4278592 - DNA, 25 bp, Homo sapien
tgcttgctcgtatgtccgcctggtt

SEQ ID NO: 4278593 - DNA, 25 bp, Homo sapien
tgctcatgtacagatgcgtgggtgc

SEQ ID NO: 4278594 - DNA, 25 bp, Homo sapien
agcagcatagaatagaagagggcag

SEQ ID NO: 4278595 - DNA, 25 bp, Homo sapien
gcagtaaagcagcatagaatagaag

SEQ ID NO: 4278596 - DNA, 25 bp, Homo sapien
taaagcagcatagaatagaagaggg

SEQ ID NO: 4278597 - DNA, 25 bp, Homo sapien
tggcagtaaagcagcatagaataga

SEQ ID NO: 4278598 - DNA, 25 bp, Homo sapien
tgcatagcccaggtaagcatcagag

SEQ ID NO: 4278599 - DNA, 25 bp, Homo sapien
atagcccaggtaagcatcagagcca

SEQ ID NO: 4278600 - DNA, 25 bp, Homo sapien
gcatagcccaggtaagcatcagagc

SEQ ID NO: 4278601 - DNA, 25 bp, Homo sapien
catagcccaggtaagcatcagagcc

SEQ ID NO: 4278602 - DNA, 25 bp, Homo sapien
ctggatacaccatcacacgaggcct

SEQ ID NO: 4278603 - DNA, 25 bp, Homo sapien
gatacaccatcacacgaggcctggc

SEQ ID NO: 4278604 - DNA, 25 bp, Homo sapien
ggatacaccatcacacgaggcctgg

SEQ ID NO: 4278605 - DNA, 25 bp, Homo sapien
tggatacaccatcacacgaggcctg

SEQ ID NO: 4278606 - DNA, 25 bp, Homo sapien
acacagcgacctgtgcactccagta

SEQ ID NO: 4278607 - DNA, 25 bp, Homo sapien
ctccacagtcaagggacaaagtgac

SEQ ID NO: 4278608 - DNA, 25 bp, Homo sapien
actccagtgcacacagcgacctgtg

SEQ ID NO: 4278609 - DNA, 25 bp, Homo sapien
agcgacctgtgcactccagtacact

SEQ ID NO: 4278610 - DNA, 25 bp, Homo sapien
gctgacgaccgtagatgcagcaatt

SEQ ID NO: 4278611 - DNA, 25 bp, Homo sapien
ctgacgaccgtagatgcagcaattc

SEQ ID NO: 4278612 - DNA, 25 bp, Homo sapien
tgctgacgaccgtagatgcagcaat

SEQ ID NO: 4278613 - DNA, 25 bp, Homo sapien
accactgggtgctgacgaccgtaga

SEQ ID NO: 4278614 - DNA, 25 bp, Homo sapien
tgacaagtcctaaatgtactgctgc

SEQ ID NO: 4278615 - DNA, 25 bp, Homo sapien
tgcatatctgaactcctggagcaca

SEQ ID NO: 4278616 - DNA, 25 bp, Homo sapien
cgtgggccgtgctgcttgacaagtc

SEQ ID NO: 4278617 - DNA, 25 bp, Homo sapien
tggagcacatccagtcggacaatga

SEQ ID NO: 4278618 - DNA, 25 bp, Homo sapien
ctggagtcgtgcagtcacccagctg

SEQ ID NO: 4278619 - DNA, 25 bp, Homo sapien
atgaggccgtgtgggtccagtccat

SEQ ID NO: 4278620 - DNA, 25 bp, Homo sapien
gcacctgggctctggtatgaggccg

SEQ ID NO: 4278621 - DNA, 25 bp, Homo sapien
agtgctggagtcgtgcagtcaccca

SEQ ID NO: 4278622 - DNA, 25 bp, Homo sapien
ctcgaccctccaggctcagggatct

SEQ ID NO: 4278623 - DNA, 25 bp, Homo sapien
cgaccctccaggctcagggatcttc

SEQ ID NO: 4278624 - DNA, 25 bp, Homo sapien
cctccaggctcagggatcttcccac

SEQ ID NO: 4278625 - DNA, 25 bp, Homo sapien
accctccaggctcagggatcttccc

SEQ ID NO: 4278626 - DNA, 25 bp, Homo sapien
ccagtcccggtaagcatgagtgcct

SEQ ID NO: 4278627 - DNA, 25 bp, Homo sapien
gcacatttagtggaaccagccagag

SEQ ID NO: 4278628 - DNA, 25 bp, Homo sapien
catcatctctgggactctgcgggtg

SEQ ID NO: 4278629 - DNA, 25 bp, Homo sapien
gcaagggctcgcagatctcaaagga

SEQ ID NO: 4278630 - DNA, 25 bp, Homo sapien
cagtgccgccgtttacgtcatgggt

SEQ ID NO: 4278631 - DNA, 25 bp, Homo sapien
tctgagggtttattggtcagggccc

SEQ ID NO: 4278632 - DNA, 25 bp, Homo sapien
tgttgactgcatacccagtgaggct

SEQ ID NO: 4278633 - DNA, 25 bp, Homo sapien
tcatgggtacgtggcctgcagttca

SEQ ID NO: 4278634 - DNA, 25 bp, Homo sapien
ctttctggatgtgctcgtaacagga

SEQ ID NO: 4278635 - DNA, 25 bp, Homo sapien
tggagtgccagtggccaggtaagcg

SEQ ID NO: 4278636 - DNA, 25 bp, Homo sapien
gagtgccagtggccaggtaagcggt

SEQ ID NO: 4278637 - DNA, 25 bp, Homo sapien
agtgccagtggccaggtaagcggtg

SEQ ID NO: 4278638 - DNA, 25 bp, Homo sapien
caggaagtcatacaggcctcctgtg

SEQ ID NO: 4278639 - DNA, 25 bp, Homo sapien
tcatacaggcctcctgtgtggttgg

SEQ ID NO: 4278640 - DNA, 25 bp, Homo sapien
ggatcaggtggatctcggctcccag

SEQ ID NO: 4278641 - DNA, 25 bp, Homo sapien
gggtccatcatgtcacggatcaggt

SEQ ID NO: 4278642 - DNA, 25 bp, Homo sapien
ggaaggagcgctggcctggatggct

SEQ ID NO: 4278643 - DNA, 25 bp, Homo sapien
agaagaggcctgtcgcggacaggca

SEQ ID NO: 4278644 - DNA, 25 bp, Homo sapien
tggagaacaccgccccaccaagaga

SEQ ID NO: 4278645 - DNA, 25 bp, Homo sapien
gacacctggggtgtggtcctcactc

SEQ ID NO: 4278646 - DNA, 25 bp, Homo sapien
ggttcagaggtatcagaagatatcg

SEQ ID NO: 4278647 - DNA, 25 bp, Homo sapien
aagctgcatccataaaccctggggt

SEQ ID NO: 4278648 - DNA, 25 bp, Homo sapien
gaggtatcagaagatatcgtggttg

SEQ ID NO: 4278649 - DNA, 25 bp, Homo sapien
ctggggttcagaggtatcagaagat

SEQ ID NO: 4278650 - DNA, 25 bp, Homo sapien
accgtgccctcaatttccccgtatg

SEQ ID NO: 4278651 - DNA, 25 bp, Homo sapien
gcgcgcgacaccacgtagatgagaa

SEQ ID NO: 4278652 - DNA, 25 bp, Homo sapien
agcttctcccgtgggtccaccgtgg

SEQ ID NO: 4278653 - DNA, 25 bp, Homo sapien
atttccccgtatgtcctctccagca

SEQ ID NO: 4278654 - DNA, 25 bp, Homo sapien
acacttgtccctgaccagggagtac

SEQ ID NO: 4278655 - DNA, 25 bp, Homo sapien
gctgacaggaaacacttgtccctga

SEQ ID NO: 4278656 - DNA, 25 bp, Homo sapien
caggaaacacttgtccctgaccagg

SEQ ID NO: 4278657 - DNA, 25 bp, Homo sapien
caggcactcggtggctgacaggaaa

SEQ ID NO: 4278658 - DNA, 25 bp, Homo sapien
ggctggatgaggccatggcccccca

SEQ ID NO: 4278659 - DNA, 25 bp, Homo sapien
gtgggctggatgaggccatggcccc

SEQ ID NO: 4278660 - DNA, 25 bp, Homo sapien
tggatgaggccatggccccccagct

SEQ ID NO: 4278661 - DNA, 25 bp, Homo sapien
cccagctctgacatcccctccttcc

SEQ ID NO: 4278662 - DNA, 25 bp, Homo sapien
tgattgctcgtcagcgtgaggtcct

SEQ ID NO: 4278663 - DNA, 25 bp, Homo sapien
gattgctcgtcagcgtgaggtcctt

SEQ ID NO: 4278664 - DNA, 25 bp, Homo sapien
ctgattgctcgtcagcgtgaggtcc

SEQ ID NO: 4278665 - DNA, 25 bp, Homo sapien
tcagttgaacacctagatccagcca

SEQ ID NO: 4278666 - DNA, 25 bp, Homo sapien
ccaacagaaatggaaggtgcttccc

SEQ ID NO: 4278667 - DNA, 25 bp, Homo sapien
aaagtgagacaggaggctctgcctc

SEQ ID NO: 4278668 - DNA, 25 bp, Homo sapien
ccctgtgtaacaaaggagacctgga

SEQ ID NO: 4278669 - DNA, 25 bp, Homo sapien
actcgagcagttgggtatcaggaaa

SEQ ID NO: 4278670 - DNA, 25 bp, Homo sapien
gcagcaccaatccatgcacctggag

SEQ ID NO: 4278671 - DNA, 25 bp, Homo sapien
ttctgcacatccaggaactcgagca

SEQ ID NO: 4278672 - DNA, 25 bp, Homo sapien
tgtcctcccgctcatgaagcagcag

SEQ ID NO: 4278673 - DNA, 25 bp, Homo sapien
tggatccccatttgactgaaagcaa

SEQ ID NO: 4278674 - DNA, 25 bp, Homo sapien
tcctaggagcagacgcatgaggcct

SEQ ID NO: 4278675 - DNA, 25 bp, Homo sapien
caaattgtaaggtttgctccaggga

SEQ ID NO: 4278676 - DNA, 25 bp, Homo sapien
cagaggtcatgggtcattctaatcc

SEQ ID NO: 4278677 - DNA, 25 bp, Homo sapien
gctctaaggcaactcgcagcagacc

SEQ ID NO: 4278678 - DNA, 25 bp, Homo sapien
ctggcccttgcgctctaaggcaact

SEQ ID NO: 4278679 - DNA, 25 bp, Homo sapien
tgcgctctaaggcaactcgcagcag

SEQ ID NO: 4278680 - DNA, 25 bp, Homo sapien
ccttgcgctctaaggcaactcgcag

SEQ ID NO: 4278681 - DNA, 25 bp, Homo sapien
cagaagttagaaggttggagctcca

SEQ ID NO: 4278682 - DNA, 25 bp, Homo sapien
aggtgtgttccgagtccagggccaa

SEQ ID NO: 4278683 - DNA, 25 bp, Homo sapien
cagcagcagaaggaactatagcatc

SEQ ID NO: 4278684 - DNA, 25 bp, Homo sapien
gagttctaccaccagtcaacaaagg

SEQ ID NO: 4278685 - DNA, 25 bp, Homo sapien
agtgcacctgcggtcagagtcagcc

SEQ ID NO: 4278686 - DNA, 25 bp, Homo sapien
tgagagtgcacctgcggtcagagtc

SEQ ID NO: 4278687 - DNA, 25 bp, Homo sapien
tcttggactctagctgagggctgca

SEQ ID NO: 4278688 - DNA, 25 bp, Homo sapien
cagcccagcgcctggttgggtcttg

SEQ ID NO: 4278689 - DNA, 25 bp, Homo sapien
tgatgcctggaaagggcacactagt

SEQ ID NO: 4278690 - DNA, 25 bp, Homo sapien
tcctcccaaatgcaaggcagaactg

SEQ ID NO: 4278691 - DNA, 25 bp, Homo sapien
agtagctgtcccgtttgccaccgag

SEQ ID NO: 4278692 - DNA, 25 bp, Homo sapien
aaagggcacactagtgtcacagggc

SEQ ID NO: 4278693 - DNA, 25 bp, Homo sapien
ttggccccgacacctgcgtaggtag

SEQ ID NO: 4278694 - DNA, 25 bp, Homo sapien
aggtgcttgttggccccgacacctg

SEQ ID NO: 4278695 - DNA, 25 bp, Homo sapien
ccgacacctgcgtaggtagcctgga

SEQ ID NO: 4278696 - DNA, 25 bp, Homo sapien
cctgcgtaggtagcctggaaggtca

SEQ ID NO: 4278697 - DNA, 25 bp, Homo sapien
gggccttgggctcccggtgctgcag

SEQ ID NO: 4278698 - DNA, 25 bp, Homo sapien
cagggccttgggctcccggtgctgc

SEQ ID NO: 4278699 - DNA, 25 bp, Homo sapien
gccttgggctcccggtgctgcagca

SEQ ID NO: 4278700 - DNA, 25 bp, Homo sapien
ccttgggctcccggtgctgcagcag

SEQ ID NO: 4278701 - DNA, 25 bp, Homo sapien
gcccacactgtcctcagggtgggtc

SEQ ID NO: 4278702 - DNA, 25 bp, Homo sapien
ctgcccacactgtcctcagggtggg

SEQ ID NO: 4278703 - DNA, 25 bp, Homo sapien
tgcccacactgtcctcagggtgggt

SEQ ID NO: 4278704 - DNA, 25 bp, Homo sapien
actgcccacactgtcctcagggtgg

SEQ ID NO: 4278705 - DNA, 25 bp, Homo sapien
gcccaccctaacctgtgcatgctca

SEQ ID NO: 4278706 - DNA, 25 bp, Homo sapien
cagcccaccctaacctgtgcatgct

SEQ ID NO: 4278707 - DNA, 25 bp, Homo sapien
ccaccctaacctgtgcatgctcaca

SEQ ID NO: 4278708 - DNA, 25 bp, Homo sapien
caccctaacctgtgcatgctcacac

SEQ ID NO: 4278709 - DNA, 25 bp, Homo sapien
ctgagacctacgcagctccctggag

SEQ ID NO: 4278710 - DNA, 25 bp, Homo sapien
ctctcgcaggacaggtaatcctgag

SEQ ID NO: 4278711 - DNA, 25 bp, Homo sapien
gctgtagactccctgccagcggctt

SEQ ID NO: 4278712 - DNA, 25 bp, Homo sapien
cagcacacacaaagtcccggaaggg

SEQ ID NO: 4278713 - DNA, 25 bp, Homo sapien
ggcagagagagatggagctgaggta

SEQ ID NO: 4278714 - DNA, 25 bp, Homo sapien
gatggagggtgggtgatggggcaga

SEQ ID NO: 4278715 - DNA, 25 bp, Homo sapien
gagggtgggtgatggggcagagaga

SEQ ID NO: 4278716 - DNA, 25 bp, Homo sapien
tgcgatggggatggagggtgggtga

SEQ ID NO: 4278717 - DNA, 25 bp, Homo sapien
ggaggaagagcagcagagaaaggga

SEQ ID NO: 4278718 - DNA, 25 bp, Homo sapien
ctccacggctccaggaggaagagca

SEQ ID NO: 4278719 - DNA, 25 bp, Homo sapien
ggaagagcagcagagaaagggacag

SEQ ID NO: 4278720 - DNA, 25 bp, Homo sapien
gaagagcagcagagaaagggacaga

SEQ ID NO: 4278721 - DNA, 25 bp, Homo sapien
aagacagacagaagcatatggaatc

SEQ ID NO: 4278722 - DNA, 25 bp, Homo sapien
gaagacagacagaagcatatggaat

SEQ ID NO: 4278723 - DNA, 25 bp, Homo sapien
tgggattcccctccaagacatcccc

SEQ ID NO: 4278724 - DNA, 25 bp, Homo sapien
gattcccctccaagacatccccctc

SEQ ID NO: 4278725 - DNA, 25 bp, Homo sapien
gtctgggattcccctccaagacatc

SEQ ID NO: 4278726 - DNA, 25 bp, Homo sapien
tctgggattcccctccaagacatcc

SEQ ID NO: 4278727 - DNA, 25 bp, Homo sapien
ttcctgtggttgatcccgccctggc

SEQ ID NO: 4278728 - DNA, 25 bp, Homo sapien
gttgatcccgccctggccaacaggc

SEQ ID NO: 4278729 - DNA, 25 bp, Homo sapien
ggttccttcctgtggttgatcccgc

SEQ ID NO: 4278730 - DNA, 25 bp, Homo sapien
tggttgatcccgccctggccaacag

SEQ ID NO: 4278731 - DNA, 25 bp, Homo sapien
tgccccactgccgaacgagccctcc

SEQ ID NO: 4278732 - DNA, 25 bp, Homo sapien
gtctggtgggagggcagccgtgtcc

SEQ ID NO: 4278733 - DNA, 25 bp, Homo sapien
cttgcaggtactgctcgggtctggt

SEQ ID NO: 4278734 - DNA, 25 bp, Homo sapien
ggtgggagggcagccgtgtccagca

SEQ ID NO: 4278735 - DNA, 25 bp, Homo sapien
actggtactggtggagggcgtgtat

SEQ ID NO: 4278736 - DNA, 25 bp, Homo sapien
acagctgctcgaggcactggtactg

SEQ ID NO: 4278737 - DNA, 25 bp, Homo sapien
ggtactggtggagggcgtgtattct

SEQ ID NO: 4278738 - DNA, 25 bp, Homo sapien
actgaaggccagtgcctccagggac

SEQ ID NO: 4278739 - DNA, 25 bp, Homo sapien
gtgaaggtgccctcatacagggagt

SEQ ID NO: 4278740 - DNA, 25 bp, Homo sapien
tacagggagtcgtcttcagagagga

SEQ ID NO: 4278741 - DNA, 25 bp, Homo sapien
ctcatacagggagtcgtcttcagag

SEQ ID NO: 4278742 - DNA, 25 bp, Homo sapien
cctggtgaaggtgccctcatacagg

SEQ ID NO: 4278743 - DNA, 25 bp, Homo sapien
cactcagtgaaggtgacatggagca

SEQ ID NO: 4278744 - DNA, 25 bp, Homo sapien
taattgggactctagcctttggcct

SEQ ID NO: 4278745 - DNA, 25 bp, Homo sapien
caagatcagggtgggagcttagccc

SEQ ID NO: 4278746 - DNA, 25 bp, Homo sapien
aataatgacatcaacctgcagggct

SEQ ID NO: 4278747 - DNA, 25 bp, Homo sapien
accatgacccctgggccgtggcgct

SEQ ID NO: 4278748 - DNA, 25 bp, Homo sapien
gccacatgccaatgtagcgctcacc

SEQ ID NO: 4278749 - DNA, 25 bp, Homo sapien
cgtcttgtccgcctggaaggtgccc

SEQ ID NO: 4278750 - DNA, 25 bp, Homo sapien
gtggcgctgaccagcctgccacatg

SEQ ID NO: 4278751 - DNA, 25 bp, Homo sapien
cagagttggatcagactcattccca

SEQ ID NO: 4278752 - DNA, 25 bp, Homo sapien
cagtttttagacgtgacagagcagg

SEQ ID NO: 4278753 - DNA, 25 bp, Homo sapien
gtgaccaagattcgctcagcctgag

SEQ ID NO: 4278754 - DNA, 25 bp, Homo sapien
gcaacaatctggtctgtgagggccc

SEQ ID NO: 4278755 - DNA, 25 bp, Homo sapien
aagtagcccttgtacacctcgtcgg

SEQ ID NO: 4278756 - DNA, 25 bp, Homo sapien
aaggaccccaaatccgtgccgcagg

SEQ ID NO: 4278757 - DNA, 25 bp, Homo sapien
ctcaatgccatagccgctcctctgg

SEQ ID NO: 4278758 - DNA, 25 bp, Homo sapien
cagtggcccgtgtacctgaagggct

SEQ ID NO: 4278759 - DNA, 25 bp, Homo sapien
gtgacacttgtaacagtcgaacttg

SEQ ID NO: 4278760 - DNA, 25 bp, Homo sapien
tgccttctcgccagtgacacttgta

SEQ ID NO: 4278761 - DNA, 25 bp, Homo sapien
aacagtcgaacttgtcctcagaggc

SEQ ID NO: 4278762 - DNA, 25 bp, Homo sapien
cacttgtaacagtcgaacttgtcct

SEQ ID NO: 4278763 - DNA, 25 bp, Homo sapien
ctggggcagcaggcggatgccgaag

SEQ ID NO: 4278764 - DNA, 25 bp, Homo sapien
atggttgtgggggtggggatcagcc

SEQ ID NO: 4278765 - DNA, 25 bp, Homo sapien
cagcatggttgtgggggtggggatc

SEQ ID NO: 4278766 - DNA, 25 bp, Homo sapien
catggttgtgggggtggggatcagc

SEQ ID NO: 4278767 - DNA, 25 bp, Homo sapien
ctgacagcatggttgtgggggtggg

SEQ ID NO: 4278768 - DNA, 25 bp, Homo sapien
cgtgattccgcccatccggccattt

SEQ ID NO: 4278769 - DNA, 25 bp, Homo sapien
gattccgcccatccggccatttcag

SEQ ID NO: 4278770 - DNA, 25 bp, Homo sapien
tccccacgtgattccgcccatccgg

SEQ ID NO: 4278771 - DNA, 25 bp, Homo sapien
gcccatccggccatttcagggttcc

SEQ ID NO: 4278772 - DNA, 25 bp, Homo sapien
tggtgaacagcccaggtcaccttcc

SEQ ID NO: 4278773 - DNA, 25 bp, Homo sapien
tctgcctggaaggtatattctgcgc

SEQ ID NO: 4278774 - DNA, 25 bp, Homo sapien
tatattctgcgcagcggcagtcggg

SEQ ID NO: 4278775 - DNA, 25 bp, Homo sapien
tcgccctcgtaggtggcctggcaga

SEQ ID NO: 4278776 - DNA, 25 bp, Homo sapien
gggcgtgaggaggtgaaacgtgcac

SEQ ID NO: 4278777 - DNA, 25 bp, Homo sapien
gagaactcttcttcgggcgtgagga

SEQ ID NO: 4278778 - DNA, 25 bp, Homo sapien
gcacaaaaggagaactcttcttcgg

SEQ ID NO: 4278779 - DNA, 25 bp, Homo sapien
aaaggagaactcttcttcgggcgtg

SEQ ID NO: 4278780 - DNA, 25 bp, Homo sapien
gcttcagatcaaaggtgtggacatt

SEQ ID NO: 4278781 - DNA, 25 bp, Homo sapien
cttcagatcaaaggtgtggacattg

SEQ ID NO: 4278782 - DNA, 25 bp, Homo sapien
ccgcaacggtgcgaccgtcacgggt

SEQ ID NO: 4278783 - DNA, 25 bp, Homo sapien
accgtcacgggtacgtcctggctgt

SEQ ID NO: 4278784 - DNA, 25 bp, Homo sapien
atcatcaaagagcagcacacgctca

SEQ ID NO: 4278785 - DNA, 25 bp, Homo sapien
gctcagcccgcaacggtgcgaccgt

SEQ ID NO: 4278786 - DNA, 25 bp, Homo sapien
ggtccaaacctcagggcacagggga

SEQ ID NO: 4278787 - DNA, 25 bp, Homo sapien
tccaaacctcagggcacaggggact

SEQ ID NO: 4278788 - DNA, 25 bp, Homo sapien
gtccaaacctcagggcacaggggac

SEQ ID NO: 4278789 - DNA, 25 bp, Homo sapien
aggtccaaacctcagggcacagggg

SEQ ID NO: 4278790 - DNA, 25 bp, Homo sapien
aaggactgcaggttcccaaagaggg

SEQ ID NO: 4278791 - DNA, 25 bp, Homo sapien
tgcttcatgaaggactgcaggttcc

SEQ ID NO: 4278792 - DNA, 25 bp, Homo sapien
gtgccagagagcctgtgtggccaca

SEQ ID NO: 4278793 - DNA, 25 bp, Homo sapien
cctggtccaactcctgcttcatgaa

SEQ ID NO: 4278794 - DNA, 25 bp, Homo sapien
acgtactgttgcacgtgatgggcga

SEQ ID NO: 4278795 - DNA, 25 bp, Homo sapien
ctgccgcagcgccttccgctggccc

SEQ ID NO: 4278796 - DNA, 25 bp, Homo sapien
gcaggaggagcacgtactgttgcac

SEQ ID NO: 4278797 - DNA, 25 bp, Homo sapien
acgtgatgggcgagtggctggtgga

SEQ ID NO: 4278798 - DNA, 25 bp, Homo sapien
atgcagcttgtgtaggactcaatgt

SEQ ID NO: 4278799 - DNA, 25 bp, Homo sapien
gcagcttgtgtaggactcaatgtac

SEQ ID NO: 4278800 - DNA, 25 bp, Homo sapien
tgcagcttgtgtaggactcaatgta

SEQ ID NO: 4278801 - DNA, 25 bp, Homo sapien
ctgggagctcttgtgcagctgttgc

SEQ ID NO: 4278802 - DNA, 25 bp, Homo sapien
gtgggcctgcagtacacggtcagca

SEQ ID NO: 4278803 - DNA, 25 bp, Homo sapien
agtgagtgcaggctttcctccgtca

SEQ ID NO: 4278804 - DNA, 25 bp, Homo sapien
gtggagtccgggtaacgcagcctct

SEQ ID NO: 4278805 - DNA, 25 bp, Homo sapien
caaggctgttgacatgggcgagggt

SEQ ID NO: 4278806 - DNA, 25 bp, Homo sapien
gttgacatgggcgagggtggctgag

SEQ ID NO: 4278807 - DNA, 25 bp, Homo sapien
tgacatgggcgagggtggctgagaa

SEQ ID NO: 4278808 - DNA, 25 bp, Homo sapien
tggaggacaaggctgttgacatggg

SEQ ID NO: 4278809 - DNA, 25 bp, Homo sapien
cagccatggaggactttagagcaag

SEQ ID NO: 4278810 - DNA, 25 bp, Homo sapien
ttagagcaaggtaatgatgggatcc

SEQ ID NO: 4278811 - DNA, 25 bp, Homo sapien
gtaatgatgggatccaaagtcacat

SEQ ID NO: 4278812 - DNA, 25 bp, Homo sapien
actgtgcctcagtcggccgtggaca

SEQ ID NO: 4278813 - DNA, 25 bp, Homo sapien
tcctccagactcaagttggcaactg

SEQ ID NO: 4278814 - DNA, 25 bp, Homo sapien
aactgagtcacaccacccagaggaa

SEQ ID NO: 4278815 - DNA, 25 bp, Homo sapien
cagaggaacgggcagaagttaagca

SEQ ID NO: 4278816 - DNA, 25 bp, Homo sapien
aagctgggattctggttaggtgacc

SEQ ID NO: 4278817 - DNA, 25 bp, Homo sapien
cacctggacgagctaagcgtggagc

SEQ ID NO: 4278818 - DNA, 25 bp, Homo sapien
agctaagcgtggagcgcagacaccc

SEQ ID NO: 4278819 - DNA, 25 bp, Homo sapien
ccccacctggacgagctaagcgtgg

SEQ ID NO: 4278820 - DNA, 25 bp, Homo sapien
tggagcgcagacacccgtccgcaga

SEQ ID NO: 4278821 - DNA, 25 bp, Homo sapien
cgccgggactgcctgtgcggctcct

SEQ ID NO: 4278822 - DNA, 25 bp, Homo sapien
ccgcgccgggactgcctgtgcggct

SEQ ID NO: 4278823 - DNA, 25 bp, Homo sapien
agcgctgtggttgccccgcgccggg

SEQ ID NO: 4278824 - DNA, 25 bp, Homo sapien
ctgagcgctgtggttgccccgcgcc

SEQ ID NO: 4278825 - DNA, 25 bp, Homo sapien
caaggggggcccacaagtgagggag

SEQ ID NO: 4278826 - DNA, 25 bp, Homo sapien
acagcaacctgggcacggaggcaag

SEQ ID NO: 4278827 - DNA, 25 bp, Homo sapien
tttaattgagcacctcatctccacc

SEQ ID NO: 4278828 - DNA, 25 bp, Homo sapien
aatgtttaattgagcacctcatctc

SEQ ID NO: 4278829 - DNA, 25 bp, Homo sapien
gggcctgcccgttgaggcagtccca

SEQ ID NO: 4278830 - DNA, 25 bp, Homo sapien
ggcctcgctcttctggcagcctgca

SEQ ID NO: 4278831 - DNA, 25 bp, Homo sapien
cctccatggagcagaccaagggctc

SEQ ID NO: 4278832 - DNA, 25 bp, Homo sapien
gtaccacgtgccctccatggagcag

SEQ ID NO: 4278833 - DNA, 25 bp, Homo sapien
tccagtgttggtaggaggagacctg

SEQ ID NO: 4278834 - DNA, 25 bp, Homo sapien
tttgttgttcaggatgatgacttcc

SEQ ID NO: 4278835 - DNA, 25 bp, Homo sapien
gaatggtccggaactgaggccacat

SEQ ID NO: 4278836 - DNA, 25 bp, Homo sapien
tgtgggtgtcctccgcacacatcat

SEQ ID NO: 4278837 - DNA, 25 bp, Homo sapien
catctgggacttgatgatctgaacc

SEQ ID NO: 4278838 - DNA, 25 bp, Homo sapien
cgtcacagtgcagcgggaatggtcc

SEQ ID NO: 4278839 - DNA, 25 bp, Homo sapien
gatgggccgcacgtaattgctgtac

SEQ ID NO: 4278840 - DNA, 25 bp, Homo sapien
gaggcggtctgcgtcatctggtcaa

SEQ ID NO: 4278841 - DNA, 25 bp, Homo sapien
tgggcccggtacctgctatgcatga

SEQ ID NO: 4278842 - DNA, 25 bp, Homo sapien
atgtgtgtgccattggcccgcacgc

SEQ ID NO: 4278843 - DNA, 25 bp, Homo sapien
caccgccgagccacggcttctgggt

SEQ ID NO: 4278844 - DNA, 25 bp, Homo sapien
ggtcctgctcgtaggaaaagccaca

SEQ ID NO: 4278845 - DNA, 25 bp, Homo sapien
aggcaatgatggtgccggcacagat

SEQ ID NO: 4278846 - DNA, 25 bp, Homo sapien
ggtatgggtcgactttgccttcaga

SEQ ID NO: 4278847 - DNA, 25 bp, Homo sapien
tccatggtggtcgagggcagtgtct

SEQ ID NO: 4278848 - DNA, 25 bp, Homo sapien
ctccatggtggtcgagggcagtgtc

SEQ ID NO: 4278849 - DNA, 25 bp, Homo sapien
agcggtatgggtcgactttgccttc

SEQ ID NO: 4278850 - DNA, 25 bp, Homo sapien
tggacgctctggtcggcgggatcag

SEQ ID NO: 4278851 - DNA, 25 bp, Homo sapien
tctggtcggcgggatcagcagtgga

SEQ ID NO: 4278852 - DNA, 25 bp, Homo sapien
cacactggacgctctggtcggcggg

SEQ ID NO: 4278853 - DNA, 25 bp, Homo sapien
tggtcggcgggatcagcagtggaca

SEQ ID NO: 4278854 - DNA, 25 bp, Homo sapien
cggaggacgtcgagcggattagagg

SEQ ID NO: 4278855 - DNA, 25 bp, Homo sapien
aaggcgagggccgcgtcaggcgggt

SEQ ID NO: 4278856 - DNA, 25 bp, Homo sapien
gacgtcgagcggattagaggtggaa

SEQ ID NO: 4278857 - DNA, 25 bp, Homo sapien
ctgcggaggacgtcgagcggattag

SEQ ID NO: 4278858 - DNA, 25 bp, Homo sapien
gcagggcaccggcgcgggagggggc

SEQ ID NO: 4278859 - DNA, 25 bp, Homo sapien
ctgcagacctcagcaacagaagcag

SEQ ID NO: 4278860 - DNA, 25 bp, Homo sapien
gggcaccggcgcgggagggggcaga

SEQ ID NO: 4278861 - DNA, 25 bp, Homo sapien
agcagcagggcaccggcgcgggagg

SEQ ID NO: 4278862 - DNA, 25 bp, Homo sapien
gcgcgacggtctggcaccagcgacc

SEQ ID NO: 4278863 - DNA, 25 bp, Homo sapien
ccgcgcgcgacggtctggcaccagc

SEQ ID NO: 4278864 - DNA, 25 bp, Homo sapien
ctgcccgcgcgcgacggtctggcac

SEQ ID NO: 4278865 - DNA, 25 bp, Homo sapien
cgacggtctggcaccagcgacccat

SEQ ID NO: 4278866 - DNA, 25 bp, Homo sapien
tggcagccgactgcgtctctccgga

SEQ ID NO: 4278867 - DNA, 25 bp, Homo sapien
gactgcgtctctccggaaggcgctc

SEQ ID NO: 4278868 - DNA, 25 bp, Homo sapien
cgactgcgtctctccggaaggcgct

SEQ ID NO: 4278869 - DNA, 25 bp, Homo sapien
agccgactgcgtctctccggaaggc

SEQ ID NO: 4278870 - DNA, 25 bp, Homo sapien
ctgttggccgcatgccgcggcctct

SEQ ID NO: 4278871 - DNA, 25 bp, Homo sapien
gttggccgcatgccgcggcctctgg

SEQ ID NO: 4278872 - DNA, 25 bp, Homo sapien
tgttggccgcatgccgcggcctctg

SEQ ID NO: 4278873 - DNA, 25 bp, Homo sapien
tcctggagtccctcaacttaatctc

SEQ ID NO: 4278874 - DNA, 25 bp, Homo sapien
taatctcggccgattctcagacctc

SEQ ID NO: 4278875 - DNA, 25 bp, Homo sapien
ctcactccgctggtccaagcagtct

SEQ ID NO: 4278876 - DNA, 25 bp, Homo sapien
ctcgtggtgtctgacccgcaagggc

SEQ ID NO: 4278877 - DNA, 25 bp, Homo sapien
ctcgcagcccattgccctggactgg

SEQ ID NO: 4278878 - DNA, 25 bp, Homo sapien
gatgaagaccaaacctcaggggctg

SEQ ID NO: 4278879 - DNA, 25 bp, Homo sapien
caagtgaccctactttccctccagc

SEQ ID NO: 4278880 - DNA, 25 bp, Homo sapien
atctccaagtgaccctactttccct

SEQ ID NO: 4278881 - DNA, 25 bp, Homo sapien
ggccaatccatgctccaatctctga

SEQ ID NO: 4278882 - DNA, 25 bp, Homo sapien
tcttgggatacacacttgagctggc

SEQ ID NO: 4278883 - DNA, 25 bp, Homo sapien
tcaagccaggatattctaacatgtg

SEQ ID NO: 4278884 - DNA, 25 bp, Homo sapien
taacatgtgtccaggcttgtggtct

SEQ ID NO: 4278885 - DNA, 25 bp, Homo sapien
ggagaagctagtgggttctgaaaca

SEQ ID NO: 4278886 - DNA, 25 bp, Homo sapien
gcagacccatggaaggatatgaagg

SEQ ID NO: 4278887 - DNA, 25 bp, Homo sapien
tctgaaacatggtccatggttgtgg

SEQ ID NO: 4278888 - DNA, 25 bp, Homo sapien
ctgcagacccatggaaggatatgaa

SEQ ID NO: 4278889 - DNA, 25 bp, Homo sapien
atggtgagttacttgggaagaggcc

SEQ ID NO: 4278890 - DNA, 25 bp, Homo sapien
tggccatggtgagttacttgggaag

SEQ ID NO: 4278891 - DNA, 25 bp, Homo sapien
ggccatggtgagttacttgggaaga

SEQ ID NO: 4278892 - DNA, 25 bp, Homo sapien
ctggccatggtgagttacttgggaa

SEQ ID NO: 4278893 - DNA, 25 bp, Homo sapien
ggagggactgtccttgaaacaccgc

SEQ ID NO: 4278894 - DNA, 25 bp, Homo sapien
agaaagtaacagtggctctcggacc

SEQ ID NO: 4278895 - DNA, 25 bp, Homo sapien
catcctgggcaacctctcgtctcca

SEQ ID NO: 4278896 - DNA, 25 bp, Homo sapien
gcaacctctcgtctccacttctgag

SEQ ID NO: 4278897 - DNA, 25 bp, Homo sapien
caaggagcccagtagaatgtagcca

SEQ ID NO: 4278898 - DNA, 25 bp, Homo sapien
cagtagaatgtagccagtgaggaaa

SEQ ID NO: 4278899 - DNA, 25 bp, Homo sapien
ggagcccagtagaatgtagccagtg

SEQ ID NO: 4278900 - DNA, 25 bp, Homo sapien
gctcaaggagcccagtagaatgtag

SEQ ID NO: 4278901 - DNA, 25 bp, Homo sapien
tgatccactggttgaagtgggcagt

SEQ ID NO: 4278902 - DNA, 25 bp, Homo sapien
cagtcctgatccactggttgaagtg

SEQ ID NO: 4278903 - DNA, 25 bp, Homo sapien
acctcagtcctgatccactggttga

SEQ ID NO: 4278904 - DNA, 25 bp, Homo sapien
gcaacctcagtcctgatccactggt

SEQ ID NO: 4278905 - DNA, 25 bp, Homo sapien
ggaagtggcgctggccacaactaaa

SEQ ID NO: 4278906 - DNA, 25 bp, Homo sapien
tgggaagtggcgctggccacaacta

SEQ ID NO: 4278907 - DNA, 25 bp, Homo sapien
ggccacaactaaagctccagcttac

SEQ ID NO: 4278908 - DNA, 25 bp, Homo sapien
gcgctggccacaactaaagctccag

SEQ ID NO: 4278909 - DNA, 25 bp, Homo sapien
ttgtccatttggcagacaagggagc

SEQ ID NO: 4278910 - DNA, 25 bp, Homo sapien
ggcagacaagggagcttccagagtc

SEQ ID NO: 4278911 - DNA, 25 bp, Homo sapien
catttggcagacaagggagcttcca

SEQ ID NO: 4278912 - DNA, 25 bp, Homo sapien
agacaagggagcttccagagtcaac

SEQ ID NO: 4278913 - DNA, 25 bp, Homo sapien
ctgtgccacgtggtaccatttgttc

SEQ ID NO: 4278914 - DNA, 25 bp, Homo sapien
cccagacctttcttaagcccagtgt

SEQ ID NO: 4278915 - DNA, 25 bp, Homo sapien
gcccagacctttcttaagcccagtg

SEQ ID NO: 4278916 - DNA, 25 bp, Homo sapien
cagacctttcttaagcccagtgtta

SEQ ID NO: 4278917 - DNA, 25 bp, Homo sapien
ctggcccagagcccagcatacggtg

SEQ ID NO: 4278918 - DNA, 25 bp, Homo sapien
tggcccagagcccagcatacggtgt

SEQ ID NO: 4278919 - DNA, 25 bp, Homo sapien
ctttctgagtgatcctgcgggtacc

SEQ ID NO: 4278920 - DNA, 25 bp, Homo sapien
gggtacgcatcaggctttctgagtg

SEQ ID NO: 4278921 - DNA, 25 bp, Homo sapien
agacttgcagtgtggaacgggcacc

SEQ ID NO: 4278922 - DNA, 25 bp, Homo sapien
tgcgggtaccactcccagtagactt

SEQ ID NO: 4278923 - DNA, 25 bp, Homo sapien
atggcccacatctgggcatgtagct

SEQ ID NO: 4278924 - DNA, 25 bp, Homo sapien
ggcatgtagctgatgcccagaagtg

SEQ ID NO: 4278925 - DNA, 25 bp, Homo sapien
tcacttatgcaaaacaggttctgcc

SEQ ID NO: 4278926 - DNA, 25 bp, Homo sapien
tgcaaaacaggttctgcccgcacat

SEQ ID NO: 4278927 - DNA, 25 bp, Homo sapien
agaaggactgccatcactaccttca

SEQ ID NO: 4278928 - DNA, 25 bp, Homo sapien
gagaaggactgccatcactaccttc

SEQ ID NO: 4278929 - DNA, 25 bp, Homo sapien
tgagaaggactgccatcactacctt

SEQ ID NO: 4278930 - DNA, 25 bp, Homo sapien
ctgagaaggactgccatcactacct

SEQ ID NO: 4278931 - DNA, 25 bp, Homo sapien
ggtggactcccaccatcacggagta

SEQ ID NO: 4278932 - DNA, 25 bp, Homo sapien
cctgagacatgagattgctgaaatc

SEQ ID NO: 4278933 - DNA, 25 bp, Homo sapien
cacgagatggagtccctgagcttta

SEQ ID NO: 4278934 - DNA, 25 bp, Homo sapien
tatgaatcaccatgcgagtgagcgg

SEQ ID NO: 4278935 - DNA, 25 bp, Homo sapien
ggagccactgcagatgtacgtgccc

SEQ ID NO: 4278936 - DNA, 25 bp, Homo sapien
ctctgcaagcagtgcgcagccgtga

SEQ ID NO: 4278937 - DNA, 25 bp, Homo sapien
tacgtgcccaggaaaaggatgctca

SEQ ID NO: 4278938 - DNA, 25 bp, Homo sapien
ccactgcagatgtacgtgcccagga

SEQ ID NO: 4278939 - DNA, 25 bp, Homo sapien
tgcctacctctaccagcttcccctt

SEQ ID NO: 4278940 - DNA, 25 bp, Homo sapien
atggccacttgcctacctctaccag

SEQ ID NO: 4278941 - DNA, 25 bp, Homo sapien
gccacttgcctacctctaccagctt

SEQ ID NO: 4278942 - DNA, 25 bp, Homo sapien
acttgcctacctctaccagcttccc

SEQ ID NO: 4278943 - DNA, 25 bp, Homo sapien
ctgaccgcaggcccggagccagggc

SEQ ID NO: 4278944 - DNA, 25 bp, Homo sapien
tgaccgcaggcccggagccagggcc

SEQ ID NO: 4278945 - DNA, 25 bp, Homo sapien
atctaatctggcagaggaaagcgga

SEQ ID NO: 4278946 - DNA, 25 bp, Homo sapien
ttcaatagacggctgataatctaat

SEQ ID NO: 4278947 - DNA, 25 bp, Homo sapien
gataatctaatctggcagaggaaag

SEQ ID NO: 4278948 - DNA, 25 bp, Homo sapien
ggaaagcggagatgtaaggctttga

SEQ ID NO: 4278949 - DNA, 25 bp, Homo sapien
tgggtatctactcctcaatgctcct

SEQ ID NO: 4278950 - DNA, 25 bp, Homo sapien
agtgggtatctactcctcaatgctc

SEQ ID NO: 4278951 - DNA, 25 bp, Homo sapien
caagtgggtatctactcctcaatgc

SEQ ID NO: 4278952 - DNA, 25 bp, Homo sapien
ggcaagtgggtatctactcctcaat

SEQ ID NO: 4278953 - DNA, 25 bp, Homo sapien
catgtttaatccctgctctcctggt

SEQ ID NO: 4278954 - DNA, 25 bp, Homo sapien
cagattccagaatccttctaggcca

SEQ ID NO: 4278955 - DNA, 25 bp, Homo sapien
tgaagatggacacatgaccttggtc

SEQ ID NO: 4278956 - DNA, 25 bp, Homo sapien
caccctgactctttttgaagatgga

SEQ ID NO: 4278957 - DNA, 25 bp, Homo sapien
agcagccagcacaggaacaggaggc

SEQ ID NO: 4278958 - DNA, 25 bp, Homo sapien
cagccagcacaggaacaggaggcag

SEQ ID NO: 4278959 - DNA, 25 bp, Homo sapien
caggagcccatctggggctgcagca

SEQ ID NO: 4278960 - DNA, 25 bp, Homo sapien
gcagcagccagcacaggaacaggag

SEQ ID NO: 4278961 - DNA, 25 bp, Homo sapien
aggctccattgctcatttgcttctt

SEQ ID NO: 4278962 - DNA, 25 bp, Homo sapien
gctccattgctcatttgcttcttga

SEQ ID NO: 4278963 - DNA, 25 bp, Homo sapien
ggctccattgctcatttgcttcttg

SEQ ID NO: 4278964 - DNA, 25 bp, Homo sapien
aaggctccattgctcatttgcttct

SEQ ID NO: 4278965 - DNA, 25 bp, Homo sapien
cagaatccatctgccctcaacttca

SEQ ID NO: 4278966 - DNA, 25 bp, Homo sapien
gggtgtacacacctggattctgtgc

SEQ ID NO: 4278967 - DNA, 25 bp, Homo sapien
tggtgatgcgggtgtacacacctgg

SEQ ID NO: 4278968 - DNA, 25 bp, Homo sapien
gatgcgggtgtacacacctggattc

SEQ ID NO: 4278969 - DNA, 25 bp, Homo sapien
cggtcacacctcttgttgtccatga

SEQ ID NO: 4278970 - DNA, 25 bp, Homo sapien
cccataattggtggcacagatcatg

SEQ ID NO: 4278971 - DNA, 25 bp, Homo sapien
cttgtaatgccggtcacacctcttg

SEQ ID NO: 4278972 - DNA, 25 bp, Homo sapien
tttccccataattggtggcacagat

SEQ ID NO: 4278973 - DNA, 25 bp, Homo sapien
ctgaaaagcgctgcttaacctggct

SEQ ID NO: 4278974 - DNA, 25 bp, Homo sapien
cactgcgtcccaaccttcaggttga

SEQ ID NO: 4278975 - DNA, 25 bp, Homo sapien
ctgcgtcccaaccttcaggttgaaa

SEQ ID NO: 4278976 - DNA, 25 bp, Homo sapien
aacactgcgtcccaaccttcaggtt

SEQ ID NO: 4278977 - DNA, 25 bp, Homo sapien
gtcacccaacactgcgtcccaacct

SEQ ID NO: 4278978 - DNA, 25 bp, Homo sapien
tacttggggtgcataatgatgtccc

SEQ ID NO: 4278979 - DNA, 25 bp, Homo sapien
gccctgctgaagttcatgggctgca

SEQ ID NO: 4278980 - DNA, 25 bp, Homo sapien
tgcagcttggaggtgccaagcacca

SEQ ID NO: 4278981 - DNA, 25 bp, Homo sapien
tgaaggtggacaagggcaacgtcac

SEQ ID NO: 4278982 - DNA, 25 bp, Homo sapien
ctccacacacgtgctcattttccat

SEQ ID NO: 4278983 - DNA, 25 bp, Homo sapien
gtcaccacccagctggggtcaatga

SEQ ID NO: 4278984 - DNA, 25 bp, Homo sapien
caatgagggcccctccacacacgtg

SEQ ID NO: 4278985 - DNA, 25 bp, Homo sapien
ccttggatgcagtgggccgcagtca

SEQ ID NO: 4278986 - DNA, 25 bp, Homo sapien
cctcccagggccaatggcgggtcat

SEQ ID NO: 4278987 - DNA, 25 bp, Homo sapien
cacctcccagggccaatggcgggtc

SEQ ID NO: 4278988 - DNA, 25 bp, Homo sapien
acctcccagggccaatggcgggtca

SEQ ID NO: 4278989 - DNA, 25 bp, Homo sapien
tcctccgaccaccagggctcaccac

SEQ ID NO: 4278990 - DNA, 25 bp, Homo sapien
cctccgaccaccagggctcaccaca

SEQ ID NO: 4278991 - DNA, 25 bp, Homo sapien
tccgaccaccagggctcaccacaaa

SEQ ID NO: 4278992 - DNA, 25 bp, Homo sapien
ctccgaccaccagggctcaccacaa

SEQ ID NO: 4278993 - DNA, 25 bp, Homo sapien
aagtaacatacattttcagcagcga

SEQ ID NO: 4278994 - DNA, 25 bp, Homo sapien
atcagcataaatggcaagacagtcc

SEQ ID NO: 4278995 - DNA, 25 bp, Homo sapien
tttatcccagcacaaccaactagaa

SEQ ID NO: 4278996 - DNA, 25 bp, Homo sapien
tcagcagcgaaaaaatgataaaagt

SEQ ID NO: 4278997 - DNA, 25 bp, Homo sapien
tgaagaacaggagtaacccaacgct

SEQ ID NO: 4278998 - DNA, 25 bp, Homo sapien
caggaccgatgagaatagaggccca

SEQ ID NO: 4278999 - DNA, 25 bp, Homo sapien
taatgaattagggtagagttctggc

SEQ ID NO: 4279000 - DNA, 25 bp, Homo sapien
tcagtcatccattctataatgaatt

SEQ ID NO: 4279001 - DNA, 25 bp, Homo sapien
tggattggttgtgtcctctttataa

SEQ ID NO: 4279002 - DNA, 25 bp, Homo sapien
ggattggttgtgtcctctttataac

SEQ ID NO: 4279003 - DNA, 25 bp, Homo sapien
ctggattggttgtgtcctctttata

SEQ ID NO: 4279004 - DNA, 25 bp, Homo sapien
aacatcgtcgtgtatgccagactgc

SEQ ID NO: 4279005 - DNA, 25 bp, Homo sapien
gagaaacatcgtcgtgtatgccaga

SEQ ID NO: 4279006 - DNA, 25 bp, Homo sapien
tgcaggagaaacatcgtcgtgtatg

SEQ ID NO: 4279007 - DNA, 25 bp, Homo sapien
caggagaaacatcgtcgtgtatgcc

SEQ ID NO: 4279008 - DNA, 25 bp, Homo sapien
gtggtgttgagcagtccagtttgga

SEQ ID NO: 4279009 - DNA, 25 bp, Homo sapien
ggtggtgttgagcagtccagtttgg

SEQ ID NO: 4279010 - DNA, 25 bp, Homo sapien
agggcacaggtgagccgctggccct

SEQ ID NO: 4279011 - DNA, 25 bp, Homo sapien
cggcggctcaggaccgagggcctgg

SEQ ID NO: 4279012 - DNA, 25 bp, Homo sapien
gctcaggaccgagggcctggaggtt

SEQ ID NO: 4279013 - DNA, 25 bp, Homo sapien
agcaggacgcggcggctcaggaccg

SEQ ID NO: 4279014 - DNA, 25 bp, Homo sapien
aggacgcggcggctcaggaccgagg

SEQ ID NO: 4279015 - DNA, 25 bp, Homo sapien
tgggggccatcataaggccatgagg

SEQ ID NO: 4279016 - DNA, 25 bp, Homo sapien
atcgaggctcgaccgtgagacggcc

SEQ ID NO: 4279017 - DNA, 25 bp, Homo sapien
tcgaccgtgagacggccatgaggct

SEQ ID NO: 4279018 - DNA, 25 bp, Homo sapien
gggatcgaggctcgaccgtgagacg

SEQ ID NO: 4279019 - DNA, 25 bp, Homo sapien
aggctcgaccgtgagacggccatga

SEQ ID NO: 4279020 - DNA, 25 bp, Homo sapien
agcccggcatgtgcctggcgtctgc

SEQ ID NO: 4279021 - DNA, 25 bp, Homo sapien
tgatggcgccgggaactcccgacag

SEQ ID NO: 4279022 - DNA, 25 bp, Homo sapien
cacacgtgaccgcactgtagcacgt

SEQ ID NO: 4279023 - DNA, 25 bp, Homo sapien
ctgcggagacggttcccgagagccc

SEQ ID NO: 4279024 - DNA, 25 bp, Homo sapien
ttccctcacctctatctcctgcctg

SEQ ID NO: 4279025 - DNA, 25 bp, Homo sapien
ccctcacctctatctcctgcctgtt

SEQ ID NO: 4279026 - DNA, 25 bp, Homo sapien
tccctcacctctatctcctgcctgt

SEQ ID NO: 4279027 - DNA, 25 bp, Homo sapien
gagtttcacaattactcttggtttg

SEQ ID NO: 4279028 - DNA, 25 bp, Homo sapien
tggagagtttcacaattactcttgg

SEQ ID NO: 4279029 - DNA, 25 bp, Homo sapien
cactggagagtttcacaattactct

SEQ ID NO: 4279030 - DNA, 25 bp, Homo sapien
ttcacaattactcttggtttgagaa

SEQ ID NO: 4279031 - DNA, 25 bp, Homo sapien
ctgctgaccaagaacgctgtaatgg

SEQ ID NO: 4279032 - DNA, 25 bp, Homo sapien
tgaccaagaacgctgtaatgggatg

SEQ ID NO: 4279033 - DNA, 25 bp, Homo sapien
accaagaacgctgtaatgggatgtt

SEQ ID NO: 4279034 - DNA, 25 bp, Homo sapien
tgctgaccaagaacgctgtaatggg

SEQ ID NO: 4279035 - DNA, 25 bp, Homo sapien
ctggtaacgcctccttcactctctg

SEQ ID NO: 4279036 - DNA, 25 bp, Homo sapien
aacacaacttgtggtgtccctgaaa

SEQ ID NO: 4279037 - DNA, 25 bp, Homo sapien
gagcagctggccctctagaccagag

SEQ ID NO: 4279038 - DNA, 25 bp, Homo sapien
caagaatgggttgctccaaaagaac

SEQ ID NO: 4279039 - DNA, 25 bp, Homo sapien
caggtgatcaataatccatttcttg

SEQ ID NO: 4279040 - DNA, 25 bp, Homo sapien
tgatcaataatccatttcttgtaga

SEQ ID NO: 4279041 - DNA, 25 bp, Homo sapien
ggtgatcaataatccatttcttgta

SEQ ID NO: 4279042 - DNA, 25 bp, Homo sapien
aggtgatcaataatccatttcttgt

SEQ ID NO: 4279043 - DNA, 25 bp, Homo sapien
tatcctttgcgaccgcagccaatgc

SEQ ID NO: 4279044 - DNA, 25 bp, Homo sapien
tccagggtatcctttgcgaccgcag

SEQ ID NO: 4279045 - DNA, 25 bp, Homo sapien
ggtatcctttgcgaccgcagccaat

SEQ ID NO: 4279046 - DNA, 25 bp, Homo sapien
agggtatcctttgcgaccgcagcca

SEQ ID NO: 4279047 - DNA, 25 bp, Homo sapien
ccatgtgccatttaattcacagacc

SEQ ID NO: 4279048 - DNA, 25 bp, Homo sapien
ctggacccatgtgccatttaattca

SEQ ID NO: 4279049 - DNA, 25 bp, Homo sapien
gtgccatttaattcacagaccaggg

SEQ ID NO: 4279050 - DNA, 25 bp, Homo sapien
ggacccatgtgccatttaattcaca

SEQ ID NO: 4279051 - DNA, 25 bp, Homo sapien
gacgcataatgtttagctcagtctc

SEQ ID NO: 4279052 - DNA, 25 bp, Homo sapien
ggtcattatagccacagacggtccc

SEQ ID NO: 4279053 - DNA, 25 bp, Homo sapien
tcacaacatttctcatgacgcataa

SEQ ID NO: 4279054 - DNA, 25 bp, Homo sapien
ccctcgtgaccattttactcttgga

SEQ ID NO: 4279055 - DNA, 25 bp, Homo sapien
ctgaagaacaagtggcattggtcct

SEQ ID NO: 4279056 - DNA, 25 bp, Homo sapien
aagaacaagtggcattggtcctgaa

SEQ ID NO: 4279057 - DNA, 25 bp, Homo sapien
tgaagaacaagtggcattggtcctg

SEQ ID NO: 4279058 - DNA, 25 bp, Homo sapien
agaacaagtggcattggtcctgaaa

SEQ ID NO: 4279059 - DNA, 25 bp, Homo sapien
gagtggatcttcacaaagggataga

SEQ ID NO: 4279060 - DNA, 25 bp, Homo sapien
caagagagtggatcttcacaaaggg

SEQ ID NO: 4279061 - DNA, 25 bp, Homo sapien
agggatagaacaggagcccccagtg

SEQ ID NO: 4279062 - DNA, 25 bp, Homo sapien
caatttacaagagagtggatcttca

SEQ ID NO: 4279063 - DNA, 25 bp, Homo sapien
tgaaatttaccctgaagagaaccca

SEQ ID NO: 4279064 - DNA, 25 bp, Homo sapien
tattggcagacagctcatcaccctg

SEQ ID NO: 4279065 - DNA, 25 bp, Homo sapien
cccaaggtcccaatatgacgacaga

SEQ ID NO: 4279066 - DNA, 25 bp, Homo sapien
tcaacccatcaaggcaggtccttct

SEQ ID NO: 4279067 - DNA, 25 bp, Homo sapien
cccacctcagcatcctgcctgtctc

SEQ ID NO: 4279068 - DNA, 25 bp, Homo sapien
cacctcagcatcctgcctgtctcac

SEQ ID NO: 4279069 - DNA, 25 bp, Homo sapien
ccacctcagcatcctgcctgtctca

SEQ ID NO: 4279070 - DNA, 25 bp, Homo sapien
caatgtcgcttgtcaaagtggcaaa

SEQ ID NO: 4279071 - DNA, 25 bp, Homo sapien
gctggatatgtgaggaataattcac

SEQ ID NO: 4279072 - DNA, 25 bp, Homo sapien
cgagcagagcaagggcaatgtcgct

SEQ ID NO: 4279073 - DNA, 25 bp, Homo sapien
cacgcaggctggatatgtgaggaat

SEQ ID NO: 4279074 - DNA, 25 bp, Homo sapien
tctcaaactgggatcaccagtgcct

SEQ ID NO: 4279075 - DNA, 25 bp, Homo sapien
actgggatcaccagtgcctctttgg

SEQ ID NO: 4279076 - DNA, 25 bp, Homo sapien
ggaaaaatgatgtctcaaactggga

SEQ ID NO: 4279077 - DNA, 25 bp, Homo sapien
tgatgtctcaaactgggatcaccag

SEQ ID NO: 4279078 - DNA, 25 bp, Homo sapien
agcacccagcgcctgtcgatgaggg

SEQ ID NO: 4279079 - DNA, 25 bp, Homo sapien
gtgagcacccagcgcctgtcgatga

SEQ ID NO: 4279080 - DNA, 25 bp, Homo sapien
tccgcagtggtgtatgttgctggtc

SEQ ID NO: 4279081 - DNA, 25 bp, Homo sapien
agggagcctccgcagtggtgtatgt

SEQ ID NO: 4279082 - DNA, 25 bp, Homo sapien
ttcttgtttggggctggcaatcctc

SEQ ID NO: 4279083 - DNA, 25 bp, Homo sapien
cttcttgtttggggctggcaatcct

SEQ ID NO: 4279084 - DNA, 25 bp, Homo sapien
atcctctctctcaaatcatctaggt

SEQ ID NO: 4279085 - DNA, 25 bp, Homo sapien
ggcggaggcgggttatctatcctct

SEQ ID NO: 4279086 - DNA, 25 bp, Homo sapien
tcatctaggtcagggtctgaccctc

SEQ ID NO: 4279087 - DNA, 25 bp, Homo sapien
tggaagtgaagccactaccttccca

SEQ ID NO: 4279088 - DNA, 25 bp, Homo sapien
gattccgtcggattccaaggcttct

SEQ ID NO: 4279089 - DNA, 25 bp, Homo sapien
caggacagatctagcaccagaaaca

SEQ ID NO: 4279090 - DNA, 25 bp, Homo sapien
gaatttcgggtgcacaggagacgtc

SEQ ID NO: 4279091 - DNA, 25 bp, Homo sapien
tggaatcctcctcgggtcggtatgg

SEQ ID NO: 4279092 - DNA, 25 bp, Homo sapien
gggttgaaggaactgaagccagatc

SEQ ID NO: 4279093 - DNA, 25 bp, Homo sapien
aggaactgaagccagatcaggaggt

SEQ ID NO: 4279094 - DNA, 25 bp, Homo sapien
ctccacggcccctgcggaggccgtc

SEQ ID NO: 4279095 - DNA, 25 bp, Homo sapien
tgagcaggggttgaaggaactgaag

SEQ ID NO: 4279096 - DNA, 25 bp, Homo sapien
gagggattaccaaggctaacaaaga

SEQ ID NO: 4279097 - DNA, 25 bp, Homo sapien
aaagcagatcaccagttgaggacag

SEQ ID NO: 4279098 - DNA, 25 bp, Homo sapien
gttgaaacatgtggcataaaccttg

SEQ ID NO: 4279099 - DNA, 25 bp, Homo sapien
cagtaatagctgcagatgtgtgtcc

SEQ ID NO: 4279100 - DNA, 25 bp, Homo sapien
gaattagctcagactagaccagcag

SEQ ID NO: 4279101 - DNA, 25 bp, Homo sapien
ggagcactaaccagcatttcagcag

SEQ ID NO: 4279102 - DNA, 25 bp, Homo sapien
tcctttagcacactcgactggttga

SEQ ID NO: 4279103 - DNA, 25 bp, Homo sapien
cacagccttattgcacttaggagca

SEQ ID NO: 4279104 - DNA, 25 bp, Homo sapien
gagggcccgtggattccaactggca

SEQ ID NO: 4279105 - DNA, 25 bp, Homo sapien
gagccctgaaaccagaaccacgtct

SEQ ID NO: 4279106 - DNA, 25 bp, Homo sapien
tggccctctagctggaatcggttca

SEQ ID NO: 4279107 - DNA, 25 bp, Homo sapien
tgaattcaaacaggaagcttgtctc

SEQ ID NO: 4279108 - DNA, 25 bp, Homo sapien
ggtatcctttgcgaccgcagccaat

SEQ ID NO: 4279109 - DNA, 25 bp, Homo sapien
tatcctttgcgaccgcagccaatgc

SEQ ID NO: 4279110 - DNA, 25 bp, Homo sapien
tccagggtatcctttgcgaccgcag

SEQ ID NO: 4279111 - DNA, 25 bp, Homo sapien
agggtatcctttgcgaccgcagcca

SEQ ID NO: 4279112 - DNA, 25 bp, Homo sapien
ccatgtgccatttaattcacagacc

SEQ ID NO: 4279113 - DNA, 25 bp, Homo sapien
gtgccatttaattcacagaccaggg

SEQ ID NO: 4279114 - DNA, 25 bp, Homo sapien
ctggacccatgtgccatttaattca

SEQ ID NO: 4279115 - DNA, 25 bp, Homo sapien
ggacccatgtgccatttaattcaca

SEQ ID NO: 4279116 - DNA, 25 bp, Homo sapien
tgaagaataatgcttagctcagcct

SEQ ID NO: 4279117 - DNA, 25 bp, Homo sapien
gaggctcagttactatcttttctga

SEQ ID NO: 4279118 - DNA, 25 bp, Homo sapien
tatcatgaagaataatgcttagctc

SEQ ID NO: 4279119 - DNA, 25 bp, Homo sapien
ccttggtcattatagccacagatgg

SEQ ID NO: 4279120 - DNA, 25 bp, Homo sapien
tctgtccctccctttagcttgtaga

SEQ ID NO: 4279121 - DNA, 25 bp, Homo sapien
agggcaccgagcaacattttccctg

SEQ ID NO: 4279122 - DNA, 25 bp, Homo sapien
cttgtagatcaaccccagggcaccg

SEQ ID NO: 4279123 - DNA, 25 bp, Homo sapien
gggctgctgtagtcttgcttcatag

SEQ ID NO: 4279124 - DNA, 25 bp, Homo sapien
gcagggcaagggcaatgtcattttc

SEQ ID NO: 4279125 - DNA, 25 bp, Homo sapien
cacacaagctggatgtgcgtggagt

SEQ ID NO: 4279126 - DNA, 25 bp, Homo sapien
ttccaggagacgtaaaatatcggtg

SEQ ID NO: 4279127 - DNA, 25 bp, Homo sapien
aatatcggtggataacgacgtcacg

SEQ ID NO: 4279128 - DNA, 25 bp, Homo sapien
ctgttttggagcgatgatgcacatt

SEQ ID NO: 4279129 - DNA, 25 bp, Homo sapien
ttggagcgatgatgcacatttgtgt

SEQ ID NO: 4279130 - DNA, 25 bp, Homo sapien
gttttggagcgatgatgcacatttg

SEQ ID NO: 4279131 - DNA, 25 bp, Homo sapien
tttggagcgatgatgcacatttgtg

SEQ ID NO: 4279132 - DNA, 25 bp, Homo sapien
agtagtccccagatcagcggcggag

SEQ ID NO: 4279133 - DNA, 25 bp, Homo sapien
gacccctgaccactttagccagtag

SEQ ID NO: 4279134 - DNA, 25 bp, Homo sapien
cacccagactggataaaaactatgg

SEQ ID NO: 4279135 - DNA, 25 bp, Homo sapien
ggtaccatcttcctatgccagccag

SEQ ID NO: 4279136 - DNA, 25 bp, Homo sapien
gagtacccagtgtctggcgataagg

SEQ ID NO: 4279137 - DNA, 25 bp, Homo sapien
gcagtgagtacccagtgtctggcga

SEQ ID NO: 4279138 - DNA, 25 bp, Homo sapien
cagtgagcggcagtgagtacccagt

SEQ ID NO: 4279139 - DNA, 25 bp, Homo sapien
tgtctggcgataagggagcctccgc

SEQ ID NO: 4279140 - DNA, 25 bp, Homo sapien
ggagccggcaatcctccagttatcc

SEQ ID NO: 4279141 - DNA, 25 bp, Homo sapien
tggagccggcaatcctccagttatc

SEQ ID NO: 4279142 - DNA, 25 bp, Homo sapien
ctggagccggcaatcctccagttat

SEQ ID NO: 4279143 - DNA, 25 bp, Homo sapien
gagccggcaatcctccagttatcct

SEQ ID NO: 4279144 - DNA, 25 bp, Homo sapien
tgctactgtccctttggtccatgtt

SEQ ID NO: 4279145 - DNA, 25 bp, Homo sapien
agagcctggtaagaatcagactcac

SEQ ID NO: 4279146 - DNA, 25 bp, Homo sapien
gatgatagtgtgtgtgggattgcca

SEQ ID NO: 4279147 - DNA, 25 bp, Homo sapien
ccctttggtccatgttgatgatagt

SEQ ID NO: 4279148 - DNA, 25 bp, Homo sapien
tggcggctcccatccgctcgctccg

SEQ ID NO: 4279149 - DNA, 25 bp, Homo sapien
catccgctcgctccggggtcctggc

SEQ ID NO: 4279150 - DNA, 25 bp, Homo sapien
gaagtaacaccgaagcggggcgcac

SEQ ID NO: 4279151 - DNA, 25 bp, Homo sapien
ggggcgcactgcgttccccctggac

SEQ ID NO: 4279152 - DNA, 25 bp, Homo sapien
aagagcagtgctacgcctccctgcg

SEQ ID NO: 4279153 - DNA, 25 bp, Homo sapien
gggaagagcagtgctacgcctccct

SEQ ID NO: 4279154 - DNA, 25 bp, Homo sapien
ctgaggggagcgcggaggggaagag

SEQ ID NO: 4279155 - DNA, 25 bp, Homo sapien
aggggaagagcagtgctacgcctcc

SEQ ID NO: 4279156 - DNA, 25 bp, Homo sapien
gcctgcccgggcctcttcgagccat

SEQ ID NO: 4279157 - DNA, 25 bp, Homo sapien
accctgcctgcccgggcctcttcga

SEQ ID NO: 4279158 - DNA, 25 bp, Homo sapien
cctgcctgcccgggcctcttcgagc

SEQ ID NO: 4279159 - DNA, 25 bp, Homo sapien
tgcctgcccgggcctcttcgagcca

SEQ ID NO: 4279160 - DNA, 25 bp, Homo sapien
ctgccgctctgggacgccatggata

SEQ ID NO: 4279161 - DNA, 25 bp, Homo sapien
tcgtggcgccgcctcgcagcggttt

SEQ ID NO: 4279162 - DNA, 25 bp, Homo sapien
tccacgccggccatgggttctggcg

SEQ ID NO: 4279163 - DNA, 25 bp, Homo sapien
gccatggatactgccggcgacctca

SEQ ID NO: 4279164 - DNA, 25 bp, Homo sapien
gatgattgaatcatatggtgggtct

SEQ ID NO: 4279165 - DNA, 25 bp, Homo sapien
gcttaccttcaaatattgatatgac

SEQ ID NO: 4279166 - DNA, 25 bp, Homo sapien
caaatattgatatgacttggctctg

SEQ ID NO: 4279167 - DNA, 25 bp, Homo sapien
attacagcttaccttcaaatattga

SEQ ID NO: 4279168 - DNA, 25 bp, Homo sapien
tgccagctactctgcttgagaagct

SEQ ID NO: 4279169 - DNA, 25 bp, Homo sapien
agacatgagaagcacttgaatctag

SEQ ID NO: 4279170 - DNA, 25 bp, Homo sapien
aataaaatgtgggtacaggcattga

SEQ ID NO: 4279171 - DNA, 25 bp, Homo sapien
aaataaaatgtgggtacaggcattg

SEQ ID NO: 4279172 - DNA, 25 bp, Homo sapien
ccaagaattgccatacatcctctga

SEQ ID NO: 4279173 - DNA, 25 bp, Homo sapien
gtcttttgtacacccacaggcccaa

SEQ ID NO: 4279174 - DNA, 25 bp, Homo sapien
gtcagcaactgggacacaaggcatc

SEQ ID NO: 4279175 - DNA, 25 bp, Homo sapien
caaggcatcatgtctcaaggctgca

SEQ ID NO: 4279176 - DNA, 25 bp, Homo sapien
tcctctctggttggatgaaacttga

SEQ ID NO: 4279177 - DNA, 25 bp, Homo sapien
aattgctcagcttatggctccctag

SEQ ID NO: 4279178 - DNA, 25 bp, Homo sapien
gcaatgcacagcttacgtggtggca

SEQ ID NO: 4279179 - DNA, 25 bp, Homo sapien
gaaacttgaatgtctcctggtactg

SEQ ID NO: 4279180 - DNA, 25 bp, Homo sapien
ttaatggtctgaaatttctgttttg

SEQ ID NO: 4279181 - DNA, 25 bp, Homo sapien
aaatttctgttttgcaactggtgac

SEQ ID NO: 4279182 - DNA, 25 bp, Homo sapien
taatggtctgaaatttctgttttgc

SEQ ID NO: 4279183 - DNA, 25 bp, Homo sapien
ctgaaatttctgttttgcaactggt

SEQ ID NO: 4279184 - DNA, 25 bp, Homo sapien
gtgtccccaataaccaggccagtag

SEQ ID NO: 4279185 - DNA, 25 bp, Homo sapien
tgggtagccccaagagagttagtgt

SEQ ID NO: 4279186 - DNA, 25 bp, Homo sapien
tgagccagaatcagtaagcacccca

SEQ ID NO: 4279187 - DNA, 25 bp, Homo sapien
tacaaagctccatgcggaaatgctg

SEQ ID NO: 4279188 - DNA, 25 bp, Homo sapien
tcagcgaccacagccgatgccccag

SEQ ID NO: 4279189 - DNA, 25 bp, Homo sapien
attatattcacaggccaagcggccc

SEQ ID NO: 4279190 - DNA, 25 bp, Homo sapien
cattatattcacaggccaagcggcc

SEQ ID NO: 4279191 - DNA, 25 bp, Homo sapien
gacccatgtgtcattatattcacag

SEQ ID NO: 4279192 - DNA, 25 bp, Homo sapien
ctggacccatgtgtcattatattca

SEQ ID NO: 4279193 - DNA, 25 bp, Homo sapien
ttattacattcctcatagcacatga

SEQ ID NO: 4279194 - DNA, 25 bp, Homo sapien
tattattacatccttagtagatgac

SEQ ID NO: 4279195 - DNA, 25 bp, Homo sapien
catagcacatgatgtattggtccac

SEQ ID NO: 4279196 - DNA, 25 bp, Homo sapien
agatgacaaggccttctgtattatc

SEQ ID NO: 4279197 - DNA, 25 bp, Homo sapien
gaagaatttctgatgcaagtttctc

SEQ ID NO: 4279198 - DNA, 25 bp, Homo sapien
tgaagaatttctgatgcaagtttct

SEQ ID NO: 4279199 - DNA, 25 bp, Homo sapien
agaatttctgatgcaagtttctctc

SEQ ID NO: 4279200 - DNA, 25 bp, Homo sapien
aagaatttctgatgcaagtttctct

SEQ ID NO: 4279201 - DNA, 25 bp, Homo sapien
tggccttcatgtctactccaggagt

SEQ ID NO: 4279202 - DNA, 25 bp, Homo sapien
tactccaggagtaagggtgcctcct

SEQ ID NO: 4279203 - DNA, 25 bp, Homo sapien
agtttgcttcctgccttgaagtctc

SEQ ID NO: 4279204 - DNA, 25 bp, Homo sapien
ctccaggagtaagggtgcctcctct

SEQ ID NO: 4279205 - DNA, 25 bp, Homo sapien
atccggtcacccagcacctggtcct

SEQ ID NO: 4279206 - DNA, 25 bp, Homo sapien
ccatccggtcacccagcacctggtc

SEQ ID NO: 4279207 - DNA, 25 bp, Homo sapien
ccggtcacccagcacctggtcctac

SEQ ID NO: 4279208 - DNA, 25 bp, Homo sapien
tccggtcacccagcacctggtccta

SEQ ID NO: 4279209 - DNA, 25 bp, Homo sapien
tcattatagacactccgatctccca

SEQ ID NO: 4279210 - DNA, 25 bp, Homo sapien
gagaacttagggtggacaaaagctc

SEQ ID NO: 4279211 - DNA, 25 bp, Homo sapien
agctctttggactgagaccaccaca

SEQ ID NO: 4279212 - DNA, 25 bp, Homo sapien
ttctcctgagggatgcagataggct

SEQ ID NO: 4279213 - DNA, 25 bp, Homo sapien
cacctcccttcctccgcgtccactc

SEQ ID NO: 4279214 - DNA, 25 bp, Homo sapien
ttcctccgcgtccactcctcccacg

SEQ ID NO: 4279215 - DNA, 25 bp, Homo sapien
cagcacccacgtggcggtgaccagg

SEQ ID NO: 4279216 - DNA, 25 bp, Homo sapien
ccgcgtccactcctcccacgattct

SEQ ID NO: 4279217 - DNA, 25 bp, Homo sapien
gcgccccgacgacagccaagaagga

SEQ ID NO: 4279218 - DNA, 25 bp, Homo sapien
cccgggcgccccgacgacagccaag

SEQ ID NO: 4279219 - DNA, 25 bp, Homo sapien
cgggcgccccgacgacagccaagaa

SEQ ID NO: 4279220 - DNA, 25 bp, Homo sapien
ggcgccccgacgacagccaagaagg

SEQ ID NO: 4279221 - DNA, 25 bp, Homo sapien
ctggaaaggacgtaaacagattgag

SEQ ID NO: 4279222 - DNA, 25 bp, Homo sapien
gaaaggacgtaaacagattgagtgg

SEQ ID NO: 4279223 - DNA, 25 bp, Homo sapien
ctcgcttcggggttctcgccgccct

SEQ ID NO: 4279224 - DNA, 25 bp, Homo sapien
tggggggcccgcttcaggtcctgga

SEQ ID NO: 4279225 - DNA, 25 bp, Homo sapien
gggacgggaggcgtggcgccgccat

SEQ ID NO: 4279226 - DNA, 25 bp, Homo sapien
gagaggggacgggaggcgtggcgcc

SEQ ID NO: 4279227 - DNA, 25 bp, Homo sapien
gaggggacgggaggcgtggcgccgc

SEQ ID NO: 4279228 - DNA, 25 bp, Homo sapien
ggagaggggacgggaggcgtggcgc

SEQ ID NO: 4279229 - DNA, 25 bp, Homo sapien
gcccgcccagttctgcccgggccag

SEQ ID NO: 4279230 - DNA, 25 bp, Homo sapien
ccgcccagttctgcccgggccaggg

SEQ ID NO: 4279231 - DNA, 25 bp, Homo sapien
cccgcccagttctgcccgggccagg

SEQ ID NO: 4279232 - DNA, 25 bp, Homo sapien
cacgccaggaggccccgggagccgc

SEQ ID NO: 4279233 - DNA, 25 bp, Homo sapien
tgaaggagcagaagccacgccagga

SEQ ID NO: 4279234 - DNA, 25 bp, Homo sapien
ctgaaggagcagaagccacgccagg

SEQ ID NO: 4279235 - DNA, 25 bp, Homo sapien
cccgggagccgccgccagaggacat

SEQ ID NO: 4279236 - DNA, 25 bp, Homo sapien
tctgggaattcatggaggagccctc

SEQ ID NO: 4279237 - DNA, 25 bp, Homo sapien
aggatgggccttctgggaattcatg

SEQ ID NO: 4279238 - DNA, 25 bp, Homo sapien
ccttctgggaattcatggaggagcc

SEQ ID NO: 4279239 - DNA, 25 bp, Homo sapien
cttgtaggcatggtacctggcctgg

SEQ ID NO: 4279240 - DNA, 25 bp, Homo sapien
agtcacgtgtccacccgacaggtag

SEQ ID NO: 4279241 - DNA, 25 bp, Homo sapien
gcaagtcacgtgtccacccgacagg

SEQ ID NO: 4279242 - DNA, 25 bp, Homo sapien
acaggtagccgagggagagaggaaa

SEQ ID NO: 4279243 - DNA, 25 bp, Homo sapien
tccacccgacaggtagccgagggag

SEQ ID NO: 4279244 - DNA, 25 bp, Homo sapien
tgagcccatgagtcacgagttcata

SEQ ID NO: 4279245 - DNA, 25 bp, Homo sapien
ttgagcccatgagtcacgagttcat

SEQ ID NO: 4279246 - DNA, 25 bp, Homo sapien
acttggtagtcaagtgtgggccacc

SEQ ID NO: 4279247 - DNA, 25 bp, Homo sapien
ctaagatgtcttcttcgaaatggaa

SEQ ID NO: 4279248 - DNA, 25 bp, Homo sapien
tggaagtaaaactgactaaaggagc

SEQ ID NO: 4279249 - DNA, 25 bp, Homo sapien
tgcctgggcttgctacagtatatca

SEQ ID NO: 4279250 - DNA, 25 bp, Homo sapien
cacatccagtggtaaatagtggaag

SEQ ID NO: 4279251 - DNA, 25 bp, Homo sapien
gaagataagtcatcagagattttac

SEQ ID NO: 4279252 - DNA, 25 bp, Homo sapien
acaaaacctcaatgtagaaagatga

SEQ ID NO: 4279253 - DNA, 25 bp, Homo sapien
gtgaagaagcacaataactaaaatg

SEQ ID NO: 4279254 - DNA, 25 bp, Homo sapien
gatggcctcaacagtggatttgatt

SEQ ID NO: 4279255 - DNA, 25 bp, Homo sapien
caatggcggtaaactgtgaaagagc

SEQ ID NO: 4279256 - DNA, 25 bp, Homo sapien
tgtgggtcctcagtcactcatgggc

SEQ ID NO: 4279257 - DNA, 25 bp, Homo sapien
aagatgccctcattggccaagtgca

SEQ ID NO: 4279258 - DNA, 25 bp, Homo sapien
tccttcccctgaattagatctgagg

SEQ ID NO: 4279259 - DNA, 25 bp, Homo sapien
caattggtggacatgcagtgagaca

SEQ ID NO: 4279260 - DNA, 25 bp, Homo sapien
tcagctttcccacccgtgacagggt

SEQ ID NO: 4279261 - DNA, 25 bp, Homo sapien
gggattgcacgctgtcttctgctga

SEQ ID NO: 4279262 - DNA, 25 bp, Homo sapien
cagtttcaccatcggagtcagggca

SEQ ID NO: 4279263 - DNA, 25 bp, Homo sapien
ccagagacggcaaccacgtggagag

SEQ ID NO: 4279264 - DNA, 25 bp, Homo sapien
gactccaggccgctggtgtcagcat

SEQ ID NO: 4279265 - DNA, 25 bp, Homo sapien
tgtcacaggtaagcacagcctgaga

SEQ ID NO: 4279266 - DNA, 25 bp, Homo sapien
tgtcagcatcacacatgggagatga

SEQ ID NO: 4279267 - DNA, 25 bp, Homo sapien
agtgcagattacagaggaggaggga

SEQ ID NO: 4279268 - DNA, 25 bp, Homo sapien
caggatgtcaagtgagcactgcagc

SEQ ID NO: 4279269 - DNA, 25 bp, Homo sapien
ggttcaggagggagtgggtgcctac

SEQ ID NO: 4279270 - DNA, 25 bp, Homo sapien
aaaggcagtgcagattacagaggag

SEQ ID NO: 4279271 - DNA, 25 bp, Homo sapien
ctggacatgatgtgcttcacaaatg

SEQ ID NO: 4279272 - DNA, 25 bp, Homo sapien
tagctggacatgatgtgcttcacaa

SEQ ID NO: 4279273 - DNA, 25 bp, Homo sapien
agctggacatgatgtgcttcacaaa

SEQ ID NO: 4279274 - DNA, 25 bp, Homo sapien
ttagctggacatgatgtgcttcaca

SEQ ID NO: 4279275 - DNA, 25 bp, Homo sapien
gccatcaacttctccacttcgtctt

SEQ ID NO: 4279276 - DNA, 25 bp, Homo sapien
cagccattggagtcctcttgcccag

SEQ ID NO: 4279277 - DNA, 25 bp, Homo sapien
tcctcttgcccagccatcaacttct

SEQ ID NO: 4279278 - DNA, 25 bp, Homo sapien
tgcagccattggagtcctcttgccc

SEQ ID NO: 4279279 - DNA, 25 bp, Homo sapien
tggccagcacgtggcgaagctcagc

SEQ ID NO: 4279280 - DNA, 25 bp, Homo sapien
tccttgtcgaagacccgcagcccct

SEQ ID NO: 4279281 - DNA, 25 bp, Homo sapien
gcgtggccagcacgtggcgaagctc

SEQ ID NO: 4279282 - DNA, 25 bp, Homo sapien
attgccctccttgtcgaagacccgc

SEQ ID NO: 4279283 - DNA, 25 bp, Homo sapien
tctcacacttgggtgtgcggtcgaa

SEQ ID NO: 4279284 - DNA, 25 bp, Homo sapien
gtgatcttcatctcacacttgggtg

SEQ ID NO: 4279285 - DNA, 25 bp, Homo sapien
acacttgggtgtgcggtcgaacagc

SEQ ID NO: 4279286 - DNA, 25 bp, Homo sapien
gcggtcgaacagcatgaaggcttcc

SEQ ID NO: 4279287 - DNA, 25 bp, Homo sapien
ttcaatctgctcaggtgtgaactca

SEQ ID NO: 4279288 - DNA, 25 bp, Homo sapien
cttcaatctgctcaggtgtgaactc

SEQ ID NO: 4279289 - DNA, 25 bp, Homo sapien
tcaatctgctcaggtgtgaactcaa

SEQ ID NO: 4279290 - DNA, 25 bp, Homo sapien
caatctgctcaggtgtgaactcaat

SEQ ID NO: 4279291 - DNA, 25 bp, Homo sapien
ctgatgctcccggttctggacagat

SEQ ID NO: 4279292 - DNA, 25 bp, Homo sapien
ccccagtcaggctggctttgcttgg

SEQ ID NO: 4279293 - DNA, 25 bp, Homo sapien
agatgtaccttaagccacaagcccc

SEQ ID NO: 4279294 - DNA, 25 bp, Homo sapien
gttctggacagatgtaccttaagcc

SEQ ID NO: 4279295 - DNA, 25 bp, Homo sapien
ccagtgttgggaagaacaggttgtc

SEQ ID NO: 4279296 - DNA, 25 bp, Homo sapien
tggcttctggcttgacccagtgttg

SEQ ID NO: 4279297 - DNA, 25 bp, Homo sapien
caggttgtcattcctggctccctga

SEQ ID NO: 4279298 - DNA, 25 bp, Homo sapien
cctactgagattagggtctctgggc

SEQ ID NO: 4279299 - DNA, 25 bp, Homo sapien
gatcttggaagcatcaaactcgacc

SEQ ID NO: 4279300 - DNA, 25 bp, Homo sapien
cttgatcttggaagcatcaaactcg

SEQ ID NO: 4279301 - DNA, 25 bp, Homo sapien
tgatcttggaagcatcaaactcgac

SEQ ID NO: 4279302 - DNA, 25 bp, Homo sapien
tcttggaagcatcaaactcgacctc

SEQ ID NO: 4279303 - DNA, 25 bp, Homo sapien
cttgggggctgccttggcatcatcc

SEQ ID NO: 4279304 - DNA, 25 bp, Homo sapien
cttagggcgctcaggctcaggggga

SEQ ID NO: 4279305 - DNA, 25 bp, Homo sapien
tgccttggcatcatccttcttgggc

SEQ ID NO: 4279306 - DNA, 25 bp, Homo sapien
gctgccttggcatcatccttcttgg

SEQ ID NO: 4279307 - DNA, 25 bp, Homo sapien
ctgtaagtacagagagggatgtgga

SEQ ID NO: 4279308 - DNA, 25 bp, Homo sapien
taagtacagagagggatgtggagag

SEQ ID NO: 4279309 - DNA, 25 bp, Homo sapien
gtaagtacagagagggatgtggaga

SEQ ID NO: 4279310 - DNA, 25 bp, Homo sapien
tgtaagtacagagagggatgtggag

SEQ ID NO: 4279311 - DNA, 25 bp, Homo sapien
caggcctttatcctgcccggatacc

SEQ ID NO: 4279312 - DNA, 25 bp, Homo sapien
catcaggacccagatgaaggctagg

SEQ ID NO: 4279313 - DNA, 25 bp, Homo sapien
atgaaggctagggccaggatggtga

SEQ ID NO: 4279314 - DNA, 25 bp, Homo sapien
agatgaaggctagggccaggatggt

SEQ ID NO: 4279315 - DNA, 25 bp, Homo sapien
ctcatcaggacccagatgaaggcta

SEQ ID NO: 4279316 - DNA, 25 bp, Homo sapien
attttgtataagatctgaggttcag

SEQ ID NO: 4279317 - DNA, 25 bp, Homo sapien
aattttgtataagatctgaggttca

SEQ ID NO: 4279318 - DNA, 25 bp, Homo sapien
gatctgaggttcaggcttgggtttt

SEQ ID NO: 4279319 - DNA, 25 bp, Homo sapien
tgaaatgagtagtattccttacgct

SEQ ID NO: 4279320 - DNA, 25 bp, Homo sapien
taggtagtgaaatgagtagtattcc

SEQ ID NO: 4279321 - DNA, 25 bp, Homo sapien
aagtaagcccacaataggtagtgaa

SEQ ID NO: 4279322 - DNA, 25 bp, Homo sapien
attactgtaaagtaagcccacaata

SEQ ID NO: 4279323 - DNA, 25 bp, Homo sapien
aaaacacccatatccggtgccttca

SEQ ID NO: 4279324 - DNA, 25 bp, Homo sapien
cacagtcatggccaatgcgaagtga

SEQ ID NO: 4279325 - DNA, 25 bp, Homo sapien
tggccaatgcgaagtgaagacaggt

SEQ ID NO: 4279326 - DNA, 25 bp, Homo sapien
gtgccttcacggctgctgacacagt

SEQ ID NO: 4279327 - DNA, 25 bp, Homo sapien
cttgagaacacacaggccgatggag

SEQ ID NO: 4279328 - DNA, 25 bp, Homo sapien
gatgagtgcagcttcacaactgacc

SEQ ID NO: 4279329 - DNA, 25 bp, Homo sapien
tccaagcccagatcataagaaagcc

SEQ ID NO: 4279330 - DNA, 25 bp, Homo sapien
tctaagtgtcgactgggcgtagtga

SEQ ID NO: 4279331 - DNA, 25 bp, Homo sapien
tggaactccgtcactttacgttgga

SEQ ID NO: 4279332 - DNA, 25 bp, Homo sapien
tattaacctgcctgagacttactgg

SEQ ID NO: 4279333 - DNA, 25 bp, Homo sapien
cattatcactgtttatcttgctggg

SEQ ID NO: 4279334 - DNA, 25 bp, Homo sapien
gaaatggtggcgagtactgaaccct

SEQ ID NO: 4279335 - DNA, 25 bp, Homo sapien
gaaggttggctcagttctcaaggaa

SEQ ID NO: 4279336 - DNA, 25 bp, Homo sapien
cagtccagtaagtggcaaggtttaa

SEQ ID NO: 4279337 - DNA, 25 bp, Homo sapien
tattagggccctcattttgcaaagg

SEQ ID NO: 4279338 - DNA, 25 bp, Homo sapien
gggccccagctttacagagagttct

SEQ ID NO: 4279339 - DNA, 25 bp, Homo sapien
catatgtacatccacatgtgcagac

SEQ ID NO: 4279340 - DNA, 25 bp, Homo sapien
tgcaggacaggcctgatgggcgagt

SEQ ID NO: 4279341 - DNA, 25 bp, Homo sapien
acaaggagctgacctcatccatggg

SEQ ID NO: 4279342 - DNA, 25 bp, Homo sapien
cacaggcacgcccagagttgttgct

SEQ ID NO: 4279343 - DNA, 25 bp, Homo sapien
tgttcggtggcagcatccactgcag

SEQ ID NO: 4279344 - DNA, 25 bp, Homo sapien
tcagtcggagtcacaggtcttttgt

SEQ ID NO: 4279345 - DNA, 25 bp, Homo sapien
tcttcctggcctttcagcctttcac

SEQ ID NO: 4279346 - DNA, 25 bp, Homo sapien
cactgcagaggctaggctgtcttcc

SEQ ID NO: 4279347 - DNA, 25 bp, Homo sapien
tctgagtccgcttttttagtttctc

SEQ ID NO: 4279348 - DNA, 25 bp, Homo sapien
atggccctctgagtccgctttttta

SEQ ID NO: 4279349 - DNA, 25 bp, Homo sapien
tggccctctgagtccgcttttttag

SEQ ID NO: 4279350 - DNA, 25 bp, Homo sapien
tccgaggagcgaggttggccaggtc

SEQ ID NO: 4279351 - DNA, 25 bp, Homo sapien
cttccgaggagcgaggttggccagg

SEQ ID NO: 4279352 - DNA, 25 bp, Homo sapien
ggcttccgaggagcgaggttggcca

SEQ ID NO: 4279353 - DNA, 25 bp, Homo sapien
caggcttccgaggagcgaggttggc

SEQ ID NO: 4279354 - DNA, 25 bp, Homo sapien
agcaagtggcgaagagaaacaggac

SEQ ID NO: 4279355 - DNA, 25 bp, Homo sapien
acagaagcagcgaggatgccagggt

SEQ ID NO: 4279356 - DNA, 25 bp, Homo sapien
gggaggagacacacatcagggtgga

SEQ ID NO: 4279357 - DNA, 25 bp, Homo sapien
gaagggaataaagaagtgacgagaa

SEQ ID NO: 4279358 - DNA, 25 bp, Homo sapien
ctcctcgatgacgggctcgggcttg

SEQ ID NO: 4279359 - DNA, 25 bp, Homo sapien
tcctcgatgacgggctcgggcttgg

SEQ ID NO: 4279360 - DNA, 25 bp, Homo sapien
tgctggttattctcagagagcaaag

SEQ ID NO: 4279361 - DNA, 25 bp, Homo sapien
aggcccaactcctgtcctggtactg

SEQ ID NO: 4279362 - DNA, 25 bp, Homo sapien
tggagggtggctgacagtgccagga

SEQ ID NO: 4279363 - DNA, 25 bp, Homo sapien
tactgctggttattctcagagagca

SEQ ID NO: 4279364 - DNA, 25 bp, Homo sapien
tcatcctccgggacatagttccgca

SEQ ID NO: 4279365 - DNA, 25 bp, Homo sapien
gacatagttccgcagcctaagttcc

SEQ ID NO: 4279366 - DNA, 25 bp, Homo sapien
tccgggacatagttccgcagcctaa

SEQ ID NO: 4279367 - DNA, 25 bp, Homo sapien
tgcaaccggtttggcctggggcacc

SEQ ID NO: 4279368 - DNA, 25 bp, Homo sapien
aaaatgtgtccctggtaactccaca

SEQ ID NO: 4279369 - DNA, 25 bp, Homo sapien
ggtaactccacagggcggcagggcg

SEQ ID NO: 4279370 - DNA, 25 bp, Homo sapien
tcaggggctcatcaaatcctagccc

SEQ ID NO: 4279371 - DNA, 25 bp, Homo sapien
ggctcatcaaatcctagccccacac

SEQ ID NO: 4279372 - DNA, 25 bp, Homo sapien
ctctttcggttcttgaccagtggtc

SEQ ID NO: 4279373 - DNA, 25 bp, Homo sapien
tgtctggaccaggtaaaagtgctgc

SEQ ID NO: 4279374 - DNA, 25 bp, Homo sapien
tctggaccaggtaaaagtgctgctg

SEQ ID NO: 4279375 - DNA, 25 bp, Homo sapien
gaaaagtcctgggcctctaaggcag

SEQ ID NO: 4279376 - DNA, 25 bp, Homo sapien
ggagccttggggctgggctgaacca

SEQ ID NO: 4279377 - DNA, 25 bp, Homo sapien
cccctgagcctggagccttggggct

SEQ ID NO: 4279378 - DNA, 25 bp, Homo sapien
cagggcccctgagcctggagccttg

SEQ ID NO: 4279379 - DNA, 25 bp, Homo sapien
ctggagccttggggctgggctgaac

SEQ ID NO: 4279380 - DNA, 25 bp, Homo sapien
ggcgatggggcagtaccagcatagc

SEQ ID NO: 4279381 - DNA, 25 bp, Homo sapien
ctgcgggcgatggggcagtaccagc

SEQ ID NO: 4279382 - DNA, 25 bp, Homo sapien
tgcgggcgatggggcagtaccagca

SEQ ID NO: 4279383 - DNA, 25 bp, Homo sapien
cgggcgatggggcagtaccagcata

SEQ ID NO: 4279384 - DNA, 25 bp, Homo sapien
cgtcccccatccttgaacacctgcc

SEQ ID NO: 4279385 - DNA, 25 bp, Homo sapien
ccatccttgaacacctgcctcgggc

SEQ ID NO: 4279386 - DNA, 25 bp, Homo sapien
cccatccttgaacacctgcctcggg

SEQ ID NO: 4279387 - DNA, 25 bp, Homo sapien
cccgtcccccatccttgaacacctg

SEQ ID NO: 4279388 - DNA, 25 bp, Homo sapien
ccacctttctgaggacaactggagc

SEQ ID NO: 4279389 - DNA, 25 bp, Homo sapien
gaggacaactggagccaaacaatgg

SEQ ID NO: 4279390 - DNA, 25 bp, Homo sapien
gagccaaacaatggttctgccaccc

SEQ ID NO: 4279391 - DNA, 25 bp, Homo sapien
tctggaagccacctttctgaggaca

SEQ ID NO: 4279392 - DNA, 25 bp, Homo sapien
taatgcagcaaataagcgaggctct

SEQ ID NO: 4279393 - DNA, 25 bp, Homo sapien
taattctgaaaaggtctcctcaggc

SEQ ID NO: 4279394 - DNA, 25 bp, Homo sapien
ggccctacagtgtatctggttagac

SEQ ID NO: 4279395 - DNA, 25 bp, Homo sapien
tttccaaggactatctaatgcagca

SEQ ID NO: 4279396 - DNA, 25 bp, Homo sapien
ccagctaatgggacatagggagccg

SEQ ID NO: 4279397 - DNA, 25 bp, Homo sapien
agtgacctggagagtaactgaggca

SEQ ID NO: 4279398 - DNA, 25 bp, Homo sapien
taaagcatgatgaactagctacatc

SEQ ID NO: 4279399 - DNA, 25 bp, Homo sapien
tatatggaactgaccaccaggcagg

SEQ ID NO: 4279400 - DNA, 25 bp, Homo sapien
ctgtgtaactcccttggcgtcactc

SEQ ID NO: 4279401 - DNA, 25 bp, Homo sapien
tctgtgtaactcccttggcgtcact

SEQ ID NO: 4279402 - DNA, 25 bp, Homo sapien
gatctgtgtaactcccttggcgtca

SEQ ID NO: 4279403 - DNA, 25 bp, Homo sapien
atctgtgtaactcccttggcgtcac

SEQ ID NO: 4279404 - DNA, 25 bp, Homo sapien
cagagactgggagaccgatgagtgc

SEQ ID NO: 4279405 - DNA, 25 bp, Homo sapien
gcagagaaggcctcgacaagggcct

SEQ ID NO: 4279406 - DNA, 25 bp, Homo sapien
tctgagatgttgagattttaaggtc

SEQ ID NO: 4279407 - DNA, 25 bp, Homo sapien
ttttaaggtctgaacaggacagcca

SEQ ID NO: 4279408 - DNA, 25 bp, Homo sapien
tgagatgcttggtctttggctcccc

SEQ ID NO: 4279409 - DNA, 25 bp, Homo sapien
cttctctgagatgcttggtctttgg

SEQ ID NO: 4279410 - DNA, 25 bp, Homo sapien
gatgcttggtctttggctccccatc

SEQ ID NO: 4279411 - DNA, 25 bp, Homo sapien
tctctgagatgcttggtctttggct

SEQ ID NO: 4279412 - DNA, 25 bp, Homo sapien
tctcataggcacaactggagcctca

SEQ ID NO: 4279413 - DNA, 25 bp, Homo sapien
aaaatccataactcttggctgggcg

SEQ ID NO: 4279414 - DNA, 25 bp, Homo sapien
ggtacacgcctgctgcatctcatag

SEQ ID NO: 4279415 - DNA, 25 bp, Homo sapien
tggcccagggagctaaagaacagga

SEQ ID NO: 4279416 - DNA, 25 bp, Homo sapien
ctttaggtggtgagaaatgcagcca

SEQ ID NO: 4279417 - DNA, 25 bp, Homo sapien
atggctttaggtggtgagaaatgca

SEQ ID NO: 4279418 - DNA, 25 bp, Homo sapien
ctggatggctttaggtggtgagaaa

SEQ ID NO: 4279419 - DNA, 25 bp, Homo sapien
gctggatggctttaggtggtgagaa

SEQ ID NO: 4279420 - DNA, 25 bp, Homo sapien
agcagaaagggctcttctttcccca

SEQ ID NO: 4279421 - DNA, 25 bp, Homo sapien
cacctgccctgggtaagggcagaga

SEQ ID NO: 4279422 - DNA, 25 bp, Homo sapien
gaaggagcggcagacacctgccctg

SEQ ID NO: 4279423 - DNA, 25 bp, Homo sapien
cccacactgggctagtggggcaaga

SEQ ID NO: 4279424 - DNA, 25 bp, Homo sapien
cccactcaatacccttcccaaatct

SEQ ID NO: 4279425 - DNA, 25 bp, Homo sapien
cactccccactcaatacccttccca

SEQ ID NO: 4279426 - DNA, 25 bp, Homo sapien
caatacccttcccaaatcttgccat

SEQ ID NO: 4279427 - DNA, 25 bp, Homo sapien
actcaatacccttcccaaatcttgc

SEQ ID NO: 4279428 - DNA, 25 bp, Homo sapien
gggattagctaagagccactgctct

SEQ ID NO: 4279429 - DNA, 25 bp, Homo sapien
tgcttcaccaagacattaggagatg

SEQ ID NO: 4279430 - DNA, 25 bp, Homo sapien
tgtgcagtgtagacagatctgattc

SEQ ID NO: 4279431 - DNA, 25 bp, Homo sapien
ggtggtgactaccatccaagaggct

SEQ ID NO: 4279432 - DNA, 25 bp, Homo sapien
cacaaactctggctggtagatagga

SEQ ID NO: 4279433 - DNA, 25 bp, Homo sapien
gatctgtaaggcctgtagaacaaaa

SEQ ID NO: 4279434 - DNA, 25 bp, Homo sapien
gggactggaacaaccacccagactc

SEQ ID NO: 4279435 - DNA, 25 bp, Homo sapien
ccagggactggaacaaccacccaga

SEQ ID NO: 4279436 - DNA, 25 bp, Homo sapien
taatacatggcccagttgaggagcc

SEQ ID NO: 4279437 - DNA, 25 bp, Homo sapien
gaatcttccacggtaagacctggga

SEQ ID NO: 4279438 - DNA, 25 bp, Homo sapien
gatagaggataaactagcagcagcc

SEQ ID NO: 4279439 - DNA, 25 bp, Homo sapien
gcagcccagggaacggttataaaca

SEQ ID NO: 4279440 - DNA, 25 bp, Homo sapien
tagctggaactataagtgcacgaca

SEQ ID NO: 4279441 - DNA, 25 bp, Homo sapien
tggaactataagtgcacgacaccat

SEQ ID NO: 4279442 - DNA, 25 bp, Homo sapien
gctggaactataagtgcacgacacc

SEQ ID NO: 4279443 - DNA, 25 bp, Homo sapien
gtagctggaactataagtgcacgac

SEQ ID NO: 4279444 - DNA, 25 bp, Homo sapien
ggcccatggctacagtactagacag

SEQ ID NO: 4279445 - DNA, 25 bp, Homo sapien
ttgaaagtcacaggtggcccatggc

SEQ ID NO: 4279446 - DNA, 25 bp, Homo sapien
cccaattcagggcaatcgctcagga

SEQ ID NO: 4279447 - DNA, 25 bp, Homo sapien
caggaccacttcaaatgcagcccaa

SEQ ID NO: 4279448 - DNA, 25 bp, Homo sapien
gccaagttaatcatcacctttagag

SEQ ID NO: 4279449 - DNA, 25 bp, Homo sapien
cacctttagagagcctccatttggc

SEQ ID NO: 4279450 - DNA, 25 bp, Homo sapien
aatcatcacctttagagagcctcca

SEQ ID NO: 4279451 - DNA, 25 bp, Homo sapien
agttaatcatcacctttagagagcc

SEQ ID NO: 4279452 - DNA, 25 bp, Homo sapien
gatgccagagtttcatccacacagc

SEQ ID NO: 4279453 - DNA, 25 bp, Homo sapien
gtgcttgctgtcaaactccctggag

SEQ ID NO: 4279454 - DNA, 25 bp, Homo sapien
tgccctgccggacagcactgtaaag

SEQ ID NO: 4279455 - DNA, 25 bp, Homo sapien
tcaacgggaactggctgacctacaa

SEQ ID NO: 4279456 - DNA, 25 bp, Homo sapien
gagaaggtgctcaatcctggtgtct

SEQ ID NO: 4279457 - DNA, 25 bp, Homo sapien
ctaaaaatgtgaagccgcttcctct

SEQ ID NO: 4279458 - DNA, 25 bp, Homo sapien
cctggtgtctgttgtcacatcagaa

SEQ ID NO: 4279459 - DNA, 25 bp, Homo sapien
caggtgctctccaagtgcaggcaga

SEQ ID NO: 4279460 - DNA, 25 bp, Homo sapien
catagaggaacggaacaaatcacgc

SEQ ID NO: 4279461 - DNA, 25 bp, Homo sapien
tgtctgactcagaatcgaaggcggg

SEQ ID NO: 4279462 - DNA, 25 bp, Homo sapien
tttttgcacgaaacgactccggctg

SEQ ID NO: 4279463 - DNA, 25 bp, Homo sapien
gggttaaagaccagctaggccatag

SEQ ID NO: 4279464 - DNA, 25 bp, Homo sapien
acgaccgcaccagcgccagaggagt

SEQ ID NO: 4279465 - DNA, 25 bp, Homo sapien
aacacccgggaagcaggagtcagat

SEQ ID NO: 4279466 - DNA, 25 bp, Homo sapien
gatggactgcgggtcgctgaccact

SEQ ID NO: 4279467 - DNA, 25 bp, Homo sapien
gccctcggcagctgtctttccttat

SEQ ID NO: 4279468 - DNA, 25 bp, Homo sapien
tagccggcccacaccagccgtagtt

SEQ ID NO: 4279469 - DNA, 25 bp, Homo sapien
gcaacgcctcttcctctagccggcc

SEQ ID NO: 4279470 - DNA, 25 bp, Homo sapien
ttcagccgttcctttcgccgcaacg

SEQ ID NO: 4279471 - DNA, 25 bp, Homo sapien
ccacaccagccgtagttgcctccat

SEQ ID NO: 4279472 - DNA, 25 bp, Homo sapien
cccctccttttctcccgtcttgcat

SEQ ID NO: 4279473 - DNA, 25 bp, Homo sapien
gcccctccttttctcccgtcttgca

SEQ ID NO: 4279474 - DNA, 25 bp, Homo sapien
ctcgcagggcaggtatggagcatag

SEQ ID NO: 4279475 - DNA, 25 bp, Homo sapien
ggagcataggctggcaggttgtagc

SEQ ID NO: 4279476 - DNA, 25 bp, Homo sapien
gtatggagcataggctggcaggttg

SEQ ID NO: 4279477 - DNA, 25 bp, Homo sapien
ggcaggtatggagcataggctggca

SEQ ID NO: 4279478 - DNA, 25 bp, Homo sapien
ccggcagttccactcggtggcggca

SEQ ID NO: 4279479 - DNA, 25 bp, Homo sapien
tggcaggcacgcctggagagccctg

SEQ ID NO: 4279480 - DNA, 25 bp, Homo sapien
gagctcatcccggaattcttctact

SEQ ID NO: 4279481 - DNA, 25 bp, Homo sapien
gagccctgccgatgtgaaggagctc

SEQ ID NO: 4279482 - DNA, 25 bp, Homo sapien
tgaccaacgagaaggtaggcgatgt

SEQ ID NO: 4279483 - DNA, 25 bp, Homo sapien
tgtctccagctgaccaacgagaagg

SEQ ID NO: 4279484 - DNA, 25 bp, Homo sapien
gatgtggtgctacccccgtgggcca

SEQ ID NO: 4279485 - DNA, 25 bp, Homo sapien
gtaggcgatgtggtgctacccccgt

SEQ ID NO: 4279486 - DNA, 25 bp, Homo sapien
gtcggagtatgtgtctgcacaccta

SEQ ID NO: 4279487 - DNA, 25 bp, Homo sapien
gtcttctattactgcacctatgagg

SEQ ID NO: 4279488 - DNA, 25 bp, Homo sapien
cacctacacgagtggatcgacctca

SEQ ID NO: 4279489 - DNA, 25 bp, Homo sapien
gatcgacctcatctttggctacaag

SEQ ID NO: 4279490 - DNA, 25 bp, Homo sapien
gagggcattatcagcaactttgggc

SEQ ID NO: 4279491 - DNA, 25 bp, Homo sapien
accatgtgacagatgagcgggaacg

SEQ ID NO: 4279492 - DNA, 25 bp, Homo sapien
gaaggctctggagggcattatcagc

SEQ ID NO: 4279493 - DNA, 25 bp, Homo sapien
tttgggcagactccctgtcagctgc

SEQ ID NO: 4279494 - DNA, 25 bp, Homo sapien
ttccagcacctggacgaactcaagg

SEQ ID NO: 4279495 - DNA, 25 bp, Homo sapien
tggacactaactcacctagcatctt

SEQ ID NO: 4279496 - DNA, 25 bp, Homo sapien
acgaactcaaggcattcttcgcaga

SEQ ID NO: 4279497 - DNA, 25 bp, Homo sapien
catcgccttgcacgcctggacacta

SEQ ID NO: 4279498 - DNA, 25 bp, Homo sapien
tcagtgatggtgtacccctggtgct

SEQ ID NO: 4279499 - DNA, 25 bp, Homo sapien
ttgtcagtgatggtgtacccctggt

SEQ ID NO: 4279500 - DNA, 25 bp, Homo sapien
gatggtgtacccctggtgctagccc

SEQ ID NO: 4279501 - DNA, 25 bp, Homo sapien
gtgtacccctggtgctagccctggt

SEQ ID NO: 4279502 - DNA, 25 bp, Homo sapien
ggttgccctatgaccgcaacataag

SEQ ID NO: 4279503 - DNA, 25 bp, Homo sapien
cgcaacataagcaactacttcagct

SEQ ID NO: 4279504 - DNA, 25 bp, Homo sapien
gccctatgaccgcaacataagcaac

SEQ ID NO: 4279505 - DNA, 25 bp, Homo sapien
tatgaccgcaacataagcaactact

SEQ ID NO: 4279506 - DNA, 25 bp, Homo sapien
ggcagcctgcgggtgactgcactac

SEQ ID NO: 4279507 - DNA, 25 bp, Homo sapien
tggccccggatggaaagctgctatt

SEQ ID NO: 4279508 - DNA, 25 bp, Homo sapien
tgcactaccccgtggcaagctgttg

SEQ ID NO: 4279509 - DNA, 25 bp, Homo sapien
tgctattcagcggtggccactggga

SEQ ID NO: 4279510 - DNA, 25 bp, Homo sapien
catggtgtggcggctcctgcatcag

SEQ ID NO: 4279511 - DNA, 25 bp, Homo sapien
atgtagtaacctgccttgcactgga

SEQ ID NO: 4279512 - DNA, 25 bp, Homo sapien
tgtggcatctacctcatctcaggct

SEQ ID NO: 4279513 - DNA, 25 bp, Homo sapien
aggctcccgggacaccacgtgcatg

SEQ ID NO: 4279514 - DNA, 25 bp, Homo sapien
gctgtgtggccatcagcactgaact

SEQ ID NO: 4279515 - DNA, 25 bp, Homo sapien
aggcctggcaccaaagcctgtgcag

SEQ ID NO: 4279516 - DNA, 25 bp, Homo sapien
cctgtgcaggtcctgtatgggcatg

SEQ ID NO: 4279517 - DNA, 25 bp, Homo sapien
gcactgaacttgacatggctgtgtc

SEQ ID NO: 4279518 - DNA, 25 bp, Homo sapien
tttgtagcggcactacggcctctgg

SEQ ID NO: 4279519 - DNA, 25 bp, Homo sapien
acagagctcagcgtgggaacgtcct

SEQ ID NO: 4279520 - DNA, 25 bp, Homo sapien
ggtccgaaggccagattgtggtaca

SEQ ID NO: 4279521 - DNA, 25 bp, Homo sapien
tgatcatacacactgtacgccgcgg

SEQ ID NO: 4279522 - DNA, 25 bp, Homo sapien
gaatacaaccctactgaggcgcgct

SEQ ID NO: 4279523 - DNA, 25 bp, Homo sapien
tcctcgggagagacggaatacaacc

SEQ ID NO: 4279524 - DNA, 25 bp, Homo sapien
tgtttcgtcaaagcacgagggccgc

SEQ ID NO: 4279525 - DNA, 25 bp, Homo sapien
gagggccgcctgtggccttaattcc

SEQ ID NO: 4279526 - DNA, 25 bp, Homo sapien
ttatcaacatagcacaaggctggcc

SEQ ID NO: 4279527 - DNA, 25 bp, Homo sapien
tcctgtgatcctagcatgtagaggc

SEQ ID NO: 4279528 - DNA, 25 bp, Homo sapien
tgccaacagctcacaactaggtaat

SEQ ID NO: 4279529 - DNA, 25 bp, Homo sapien
ccttgcaggagaacttaaactgtcc

SEQ ID NO: 4279530 - DNA, 25 bp, Homo sapien
tttgtgtttcacattctcattgcac

SEQ ID NO: 4279531 - DNA, 25 bp, Homo sapien
tgtacttcttaatgtactccttggt

SEQ ID NO: 4279532 - DNA, 25 bp, Homo sapien
tgtcctctttgggtttgtaaacagc

SEQ ID NO: 4279533 - DNA, 25 bp, Homo sapien
tccttattcataacaccgtgagtca

SEQ ID NO: 4279534 - DNA, 25 bp, Homo sapien
cagtttgcccagaacattgcctggt

SEQ ID NO: 4279535 - DNA, 25 bp, Homo sapien
tgtcatgtaaggtacgcatccctcc

SEQ ID NO: 4279536 - DNA, 25 bp, Homo sapien
ccacagccaccaatcagagcagaaa

SEQ ID NO: 4279537 - DNA, 25 bp, Homo sapien
tgcctggtgggctaccaaaagcaag

SEQ ID NO: 4279538 - DNA, 25 bp, Homo sapien
ttccggtaagggttcaggcactgga

SEQ ID NO: 4279539 - DNA, 25 bp, Homo sapien
cactttgcagtcaggtttccggtaa

SEQ ID NO: 4279540 - DNA, 25 bp, Homo sapien
gtcttcagttgtggtaattcttccc

SEQ ID NO: 4279541 - DNA, 25 bp, Homo sapien
ggcactggacgatgaactgggacat

SEQ ID NO: 4279542 - DNA, 25 bp, Homo sapien
taccagtatgttcacaaagggacca

SEQ ID NO: 4279543 - DNA, 25 bp, Homo sapien
gagaaaaggatacgggctcagcctg

SEQ ID NO: 4279544 - DNA, 25 bp, Homo sapien
cgttgctcaacagtccagagagggc

SEQ ID NO: 4279545 - DNA, 25 bp, Homo sapien
tgaggcttagcaatcccaggaacca

SEQ ID NO: 4279546 - DNA, 25 bp, Homo sapien
tcttgtgctatagcccatcaggcca

SEQ ID NO: 4279547 - DNA, 25 bp, Homo sapien
aaaattctgcaatggttcccgataa

SEQ ID NO: 4279548 - DNA, 25 bp, Homo sapien
aacagccctcccatatcttgtgcta

SEQ ID NO: 4279549 - DNA, 25 bp, Homo sapien
gaagaagaacaataccattccacct

SEQ ID NO: 4279550 - DNA, 25 bp, Homo sapien
cttttctttgctagttcactggagg

SEQ ID NO: 4279551 - DNA, 25 bp, Homo sapien
tgcttttctttgctagttcactgga

SEQ ID NO: 4279552 - DNA, 25 bp, Homo sapien
gcttttctttgctagttcactggag

SEQ ID NO: 4279553 - DNA, 25 bp, Homo sapien
tttctttgctagttcactggaggtg

SEQ ID NO: 4279554 - DNA, 25 bp, Homo sapien
tatgagtatgctccacagtaagacc

SEQ ID NO: 4279555 - DNA, 25 bp, Homo sapien
gagaaaggtggcactcccttggctt

SEQ ID NO: 4279556 - DNA, 25 bp, Homo sapien
aaagcagctggactagctccagaga

SEQ ID NO: 4279557 - DNA, 25 bp, Homo sapien
cccttggctttaggctgttacaaat

SEQ ID NO: 4279558 - DNA, 25 bp, Homo sapien
gtactgaaattcatgaaaccctctc

SEQ ID NO: 4279559 - DNA, 25 bp, Homo sapien
gaaattcatgaaaccctctcttcat

SEQ ID NO: 4279560 - DNA, 25 bp, Homo sapien
ctgaaattcatgaaaccctctcttc

SEQ ID NO: 4279561 - DNA, 25 bp, Homo sapien
tggaaatcatgaaccaaaatggaat

SEQ ID NO: 4279562 - DNA, 25 bp, Homo sapien
aggacatacccagctaatacttctc

SEQ ID NO: 4279563 - DNA, 25 bp, Homo sapien
ccaagagggtatggcttgagttaca

SEQ ID NO: 4279564 - DNA, 25 bp, Homo sapien
ggcagagcaggacatacccagctaa

SEQ ID NO: 4279565 - DNA, 25 bp, Homo sapien
aattaaatactgattagagggctgg

SEQ ID NO: 4279566 - DNA, 25 bp, Homo sapien
gatacctttgaatctccattggaac

SEQ ID NO: 4279567 - DNA, 25 bp, Homo sapien
cattggaactactactctataaccc

SEQ ID NO: 4279568 - DNA, 25 bp, Homo sapien
taacaactgagtgaagctgatacct

SEQ ID NO: 4279569 - DNA, 25 bp, Homo sapien
cttttgcaggcctctaaagtccttg

SEQ ID NO: 4279570 - DNA, 25 bp, Homo sapien
gggttttcatcatatgttggagttc

SEQ ID NO: 4279571 - DNA, 25 bp, Homo sapien
cttcatgctcaaggctggcatcatc

SEQ ID NO: 4279572 - DNA, 25 bp, Homo sapien
tttcatcatatgttggagttcccag

SEQ ID NO: 4279573 - DNA, 25 bp, Homo sapien
tcatgctcaaggctggcatcatctc

SEQ ID NO: 4279574 - DNA, 25 bp, Homo sapien
taagattagtgtccctaaggatgcc

SEQ ID NO: 4279575 - DNA, 25 bp, Homo sapien
tctaagtaccctctcgaagaagtag

SEQ ID NO: 4279576 - DNA, 25 bp, Homo sapien
gctgctgtacatggctaaaaggaac

SEQ ID NO: 4279577 - DNA, 25 bp, Homo sapien
aaaacaagtggcctgtgggcatagt

SEQ ID NO: 4279578 - DNA, 25 bp, Homo sapien
tgggcaacaaagaaagactctgtct

SEQ ID NO: 4279579 - DNA, 25 bp, Homo sapien
ctgggcaacaaagaaagactctgtc

SEQ ID NO: 4279580 - DNA, 25 bp, Homo sapien
tgaagccaggagttcgtgcagatca

SEQ ID NO: 4279581 - DNA, 25 bp, Homo sapien
gagttcgtgcagatcagtctgggca

SEQ ID NO: 4279582 - DNA, 25 bp, Homo sapien
tccagttgggaggtaagacaatggt

SEQ ID NO: 4279583 - DNA, 25 bp, Homo sapien
gatccaagagattatttgtcacaac

SEQ ID NO: 4279584 - DNA, 25 bp, Homo sapien
gtagtaataaatcttcccttctgga

SEQ ID NO: 4279585 - DNA, 25 bp, Homo sapien
cttctggatctcgagctgtcttcca

SEQ ID NO: 4279586 - DNA, 25 bp, Homo sapien
gctgccctggtgcaactattgtagt

SEQ ID NO: 4279587 - DNA, 25 bp, Homo sapien
cttgtggatgagctgtgaaaatctg

SEQ ID NO: 4279588 - DNA, 25 bp, Homo sapien
tgtagtcactgctgcggctggctgt

SEQ ID NO: 4279589 - DNA, 25 bp, Homo sapien
gagctgtgaaaatctgttgcccctg

SEQ ID NO: 4279590 - DNA, 25 bp, Homo sapien
caggtggacagtttctataagcaaa

SEQ ID NO: 4279591 - DNA, 25 bp, Homo sapien
ctgtttagctttcaatgacattgga

SEQ ID NO: 4279592 - DNA, 25 bp, Homo sapien
catagaaattctccaactgtttagc

SEQ ID NO: 4279593 - DNA, 25 bp, Homo sapien
ggatatccaagaaacaatgccacgc

SEQ ID NO: 4279594 - DNA, 25 bp, Homo sapien
ctataaacacttgggctacactaag

SEQ ID NO: 4279595 - DNA, 25 bp, Homo sapien
tagactataaacacttgggctacac

SEQ ID NO: 4279596 - DNA, 25 bp, Homo sapien
aagttgctttgagtaagtgagtggt

SEQ ID NO: 4279597 - DNA, 25 bp, Homo sapien
tacacctgtatagggaactaactat

SEQ ID NO: 4279598 - DNA, 25 bp, Homo sapien
tacaagtagtccatggtaagacttc

SEQ ID NO: 4279599 - DNA, 25 bp, Homo sapien
tctcccttgggagaaatggaggcct

SEQ ID NO: 4279600 - DNA, 25 bp, Homo sapien
tggaggcctgctaacaacaatgtga

SEQ ID NO: 4279601 - DNA, 25 bp, Homo sapien
attaccatgatgaagggttctccct

SEQ ID NO: 4279602 - DNA, 25 bp, Homo sapien
tatggttgcttgagactgtgcagga

SEQ ID NO: 4279603 - DNA, 25 bp, Homo sapien
catgtctgtccttgataatatatgg

SEQ ID NO: 4279604 - DNA, 25 bp, Homo sapien
tacaattggtggagttgtctgtgaa

SEQ ID NO: 4279605 - DNA, 25 bp, Homo sapien
taaggtgatgtcacaccatagactg

SEQ ID NO: 4279606 - DNA, 25 bp, Homo sapien
gtacactgacagactgttggtttga

SEQ ID NO: 4279607 - DNA, 25 bp, Homo sapien
actggcaagacagcaacgctggagt

SEQ ID NO: 4279608 - DNA, 25 bp, Homo sapien
ttggtgtactacaccatcactctgg

SEQ ID NO: 4279609 - DNA, 25 bp, Homo sapien
gctgccacatgtggcaccactggta

SEQ ID NO: 4279610 - DNA, 25 bp, Homo sapien
cagcaacgctggagtcttggtgtac

SEQ ID NO: 4279611 - DNA, 25 bp, Homo sapien
acaacttccggcgttcctctgtaga

SEQ ID NO: 4279612 - DNA, 25 bp, Homo sapien
cataggcctgcatgggataacctgg

SEQ ID NO: 4279613 - DNA, 25 bp, Homo sapien
taaccaagagagtcatagggcagtg

SEQ ID NO: 4279614 - DNA, 25 bp, Homo sapien
cctctgtagaaagtttattgcggtc

SEQ ID NO: 4279615 - DNA, 25 bp, Homo sapien
cagactggtgtgcaatggtgtgata

SEQ ID NO: 4279616 - DNA, 25 bp, Homo sapien
gccactgcgctcggccgcaaatttt

SEQ ID NO: 4279617 - DNA, 25 bp, Homo sapien
ccactgcgctcggccgcaaattttt

SEQ ID NO: 4279618 - DNA, 25 bp, Homo sapien
actggtgtgcaatggtgtgatatca

SEQ ID NO: 4279619 - DNA, 25 bp, Homo sapien
tcttcggggcaggtgtttgatctct

SEQ ID NO: 4279620 - DNA, 25 bp, Homo sapien
gtgagagggagcttcttcgtttcct

SEQ ID NO: 4279621 - DNA, 25 bp, Homo sapien
ttgttccccgctcataggcagaaga

SEQ ID NO: 4279622 - DNA, 25 bp, Homo sapien
tcttgacctattaggagtcttcggg

SEQ ID NO: 4279623 - DNA, 25 bp, Homo sapien
tataggctggtttcatatcttatga

SEQ ID NO: 4279624 - DNA, 25 bp, Homo sapien
tgctaagcataagaacctcaatgag

SEQ ID NO: 4279625 - DNA, 25 bp, Homo sapien
aaagttgcccctccttataggctgg

SEQ ID NO: 4279626 - DNA, 25 bp, Homo sapien
taaaaaagtggcttatcaggcaaca

SEQ ID NO: 4279627 - DNA, 25 bp, Homo sapien
atatgtgaggcagacaagtcattcc

SEQ ID NO: 4279628 - DNA, 25 bp, Homo sapien
tgcaccttagaatatgtgaggcaga

SEQ ID NO: 4279629 - DNA, 25 bp, Homo sapien
tgactctgcaccttagaatatgtga

SEQ ID NO: 4279630 - DNA, 25 bp, Homo sapien
caacagttcatattctgactctgca

SEQ ID NO: 4279631 - DNA, 25 bp, Homo sapien
gtttgaactggatgaaagtccactt

SEQ ID NO: 4279632 - DNA, 25 bp, Homo sapien
tctgctcaaggtgaagataaggatg

SEQ ID NO: 4279633 - DNA, 25 bp, Homo sapien
tcttctaactgtgccacccaagaca

SEQ ID NO: 4279634 - DNA, 25 bp, Homo sapien
taagtggtaaagtccagaaaccaga

SEQ ID NO: 4279635 - DNA, 25 bp, Homo sapien
ttttctttggaattcgatatacctc

SEQ ID NO: 4279636 - DNA, 25 bp, Homo sapien
caagtattcataattctaatgtgca

SEQ ID NO: 4279637 - DNA, 25 bp, Homo sapien
tgcaaaaccaacatgactaatggcc

SEQ ID NO: 4279638 - DNA, 25 bp, Homo sapien
ggccaatgtaatatctactttcaca

SEQ ID NO: 4279639 - DNA, 25 bp, Homo sapien
tgtatgtgtaaagacaattcctact

SEQ ID NO: 4279640 - DNA, 25 bp, Homo sapien
ttgaaccggggtctctgtcgcacag

SEQ ID NO: 4279641 - DNA, 25 bp, Homo sapien
ttttgaaccggggtctctgtcgcac

SEQ ID NO: 4279642 - DNA, 25 bp, Homo sapien
tttgaaccggggtctctgtcgcaca

SEQ ID NO: 4279643 - DNA, 25 bp, Homo sapien
tttttgaaccggggtctctgtcgca

SEQ ID NO: 4279644 - DNA, 25 bp, Homo sapien
tgtggatgccagacatgcgtatttt

SEQ ID NO: 4279645 - DNA, 25 bp, Homo sapien
tctgtgtgtcttactcctctgtctg

SEQ ID NO: 4279646 - DNA, 25 bp, Homo sapien
tacattcccatctgctactatgagg

SEQ ID NO: 4279647 - DNA, 25 bp, Homo sapien
tgccctcagctaagagacatctggg

SEQ ID NO: 4279648 - DNA, 25 bp, Homo sapien
tactgactaatgaccaggagctact

SEQ ID NO: 4279649 - DNA, 25 bp, Homo sapien
tagcggcagttaatgtaccaccaga

SEQ ID NO: 4279650 - DNA, 25 bp, Homo sapien
cagccacgcgaggataactttgaca

SEQ ID NO: 4279651 - DNA, 25 bp, Homo sapien
tatgtacctaagcacttggagctgc

SEQ ID NO: 4279652 - DNA, 25 bp, Homo sapien
ctaagactagatttagttattcctt

SEQ ID NO: 4279653 - DNA, 25 bp, Homo sapien
gatcaaatctcgtataggccaacca

SEQ ID NO: 4279654 - DNA, 25 bp, Homo sapien
ccttgttaacaagtacagatcaaat

SEQ ID NO: 4279655 - DNA, 25 bp, Homo sapien
ttgttatatagagatcagattatct

SEQ ID NO: 4279656 - DNA, 25 bp, Homo sapien
gcatggcagcccatgcctatagtcc

SEQ ID NO: 4279657 - DNA, 25 bp, Homo sapien
gttgaggcaggtggagctcttgagc

SEQ ID NO: 4279658 - DNA, 25 bp, Homo sapien
ctgggcatggcagcccatgcctata

SEQ ID NO: 4279659 - DNA, 25 bp, Homo sapien
gaggttgaggcaggtggagctcttg

SEQ ID NO: 4279660 - DNA, 25 bp, Homo sapien
acctctcaagatagttgtacaacca

SEQ ID NO: 4279661 - DNA, 25 bp, Homo sapien
taaaggccattatgtgaacaactgg

SEQ ID NO: 4279662 - DNA, 25 bp, Homo sapien
gactcgtcactagaatgtgtgtaac

SEQ ID NO: 4279663 - DNA, 25 bp, Homo sapien
tgacttggtcacagtcctaagggaa

SEQ ID NO: 4279664 - DNA, 25 bp, Homo sapien
aaccagaatgtttagagcagccaga

SEQ ID NO: 4279665 - DNA, 25 bp, Homo sapien
ccaaaagagtaaagtgaaaatgact

SEQ ID NO: 4279666 - DNA, 25 bp, Homo sapien
agcagccagattctgcactttatct

SEQ ID NO: 4279667 - DNA, 25 bp, Homo sapien
tcttttagatcagatgttggcaaac

SEQ ID NO: 4279668 - DNA, 25 bp, Homo sapien
ctctaccactgaagtacaaaagcag

SEQ ID NO: 4279669 - DNA, 25 bp, Homo sapien
tctaccactgaagtacaaaagcagc

SEQ ID NO: 4279670 - DNA, 25 bp, Homo sapien
ccagtctttctcacaactactcaac

SEQ ID NO: 4279671 - DNA, 25 bp, Homo sapien
tagcgagggagtgaaattccaaaca

SEQ ID NO: 4279672 - DNA, 25 bp, Homo sapien
ggccaacccttgatttagatgaaag

SEQ ID NO: 4279673 - DNA, 25 bp, Homo sapien
gatttcacatacaatattagcgagg

SEQ ID NO: 4279674 - DNA, 25 bp, Homo sapien
gaaatgcacatcctataatctaagt

SEQ ID NO: 4279675 - DNA, 25 bp, Homo sapien
tctcgccaggagtagggattttccc

SEQ ID NO: 4279676 - DNA, 25 bp, Homo sapien
gattttcccggaacgacatccattg

SEQ ID NO: 4279677 - DNA, 25 bp, Homo sapien
aacgccggcgccagtgagttaacca

SEQ ID NO: 4279678 - DNA, 25 bp, Homo sapien
cattgtcggcaatggacgcaccaaa

SEQ ID NO: 4279679 - DNA, 25 bp, Homo sapien
gtttcttcacagaatgcacgctagg

SEQ ID NO: 4279680 - DNA, 25 bp, Homo sapien
tcagcacgaagttggaaatggagtt

SEQ ID NO: 4279681 - DNA, 25 bp, Homo sapien
gcacgctaggttctcgtttttcttc

SEQ ID NO: 4279682 - DNA, 25 bp, Homo sapien
aaaaggagacacatggtcagctggt

SEQ ID NO: 4279683 - DNA, 25 bp, Homo sapien
tttatttggttgcttcatctccggc

SEQ ID NO: 4279684 - DNA, 25 bp, Homo sapien
gaaataggcatttaaaagcaggccc

SEQ ID NO: 4279685 - DNA, 25 bp, Homo sapien
tgttcccacagggtcctcaagacgt

SEQ ID NO: 4279686 - DNA, 25 bp, Homo sapien
cattgggtcaaatcacaggatctaa

SEQ ID NO: 4279687 - DNA, 25 bp, Homo sapien
tccttcactcaacggagggacagca

SEQ ID NO: 4279688 - DNA, 25 bp, Homo sapien
gagcacgcgatgtattctcactaga

SEQ ID NO: 4279689 - DNA, 25 bp, Homo sapien
gccttctagctcactggttgcatca

SEQ ID NO: 4279690 - DNA, 25 bp, Homo sapien
tttgggctctatttcagcgtcagct

SEQ ID NO: 4279691 - DNA, 25 bp, Homo sapien
tgagaccagcgttgaataattggaa

SEQ ID NO: 4279692 - DNA, 25 bp, Homo sapien
ctgagaccagcgttgaataattgga

SEQ ID NO: 4279693 - DNA, 25 bp, Homo sapien
tttagtaggaatgggcaagtgttcc

SEQ ID NO: 4279694 - DNA, 25 bp, Homo sapien
agtaggaatgggcaagtgttccaaa

SEQ ID NO: 4279695 - DNA, 25 bp, Homo sapien
ttagtaggaatgggcaagtgttcca

SEQ ID NO: 4279696 - DNA, 25 bp, Homo sapien
gtaggaatgggcaagtgttccaaag

SEQ ID NO: 4279697 - DNA, 25 bp, Homo sapien
cgtaactccactaataatgctgcca

SEQ ID NO: 4279698 - DNA, 25 bp, Homo sapien
gaaaggtaaagacatcgtaactcca

SEQ ID NO: 4279699 - DNA, 25 bp, Homo sapien
tattatcacatatccacaaccgagg

SEQ ID NO: 4279700 - DNA, 25 bp, Homo sapien
catgggacaaactactaacaaggtg

SEQ ID NO: 4279701 - DNA, 25 bp, Homo sapien
agatccacaacaaagacagcccatg

SEQ ID NO: 4279702 - DNA, 25 bp, Homo sapien
agcccatgacgttccagaaaggact

SEQ ID NO: 4279703 - DNA, 25 bp, Homo sapien
tgccatccagatccacaacaaagac

SEQ ID NO: 4279704 - DNA, 25 bp, Homo sapien
tttcccggccgtcacctagctctgc

SEQ ID NO: 4279705 - DNA, 25 bp, Homo sapien
cattagccgggataagctgagcacc

SEQ ID NO: 4279706 - DNA, 25 bp, Homo sapien
tcagagagaccctcaccattttcca

SEQ ID NO: 4279707 - DNA, 25 bp, Homo sapien
tatgagttccagacaggtaagtttc

SEQ ID NO: 4279708 - DNA, 25 bp, Homo sapien
gctccaaagtttcaattctaaccat

SEQ ID NO: 4279709 - DNA, 25 bp, Homo sapien
atctcctgatcttgtgatctgcccg

SEQ ID NO: 4279710 - DNA, 25 bp, Homo sapien
tacaggcccgtgccaccatatccag

SEQ ID NO: 4279711 - DNA, 25 bp, Homo sapien
actacaggcccgtgccaccatatcc

SEQ ID NO: 4279712 - DNA, 25 bp, Homo sapien
ctcctgatcttgtgatctgcccgcc

SEQ ID NO: 4279713 - DNA, 25 bp, Homo sapien
aaagatgaataacccttgaacattc

SEQ ID NO: 4279714 - DNA, 25 bp, Homo sapien
aattaggcatgttatgactgtttaa

SEQ ID NO: 4279715 - DNA, 25 bp, Homo sapien
tcctcagcggttatactgtaacaca

SEQ ID NO: 4279716 - DNA, 25 bp, Homo sapien
tgaacattcctcagcggttatactg

SEQ ID NO: 4279717 - DNA, 25 bp, Homo sapien
gggactccactctacagtttaactg

SEQ ID NO: 4279718 - DNA, 25 bp, Homo sapien
cagagacaagatgctggattggagc

SEQ ID NO: 4279719 - DNA, 25 bp, Homo sapien
gaaacatctattgttatggccatag

SEQ ID NO: 4279720 - DNA, 25 bp, Homo sapien
gccatagttgcctcaaaggtaggag

SEQ ID NO: 4279721 - DNA, 25 bp, Homo sapien
tctatctccccatctaaacagaaaa

SEQ ID NO: 4279722 - DNA, 25 bp, Homo sapien
tgttcatgttgggtggtggaaatac

SEQ ID NO: 4279723 - DNA, 25 bp, Homo sapien
tgctgactaacaccggtaaaccctc

SEQ ID NO: 4279724 - DNA, 25 bp, Homo sapien
aagtccaggaatgagctaactgcaa

SEQ ID NO: 4279725 - DNA, 25 bp, Homo sapien
ggctgatccgcagaaacatttctgg

SEQ ID NO: 4279726 - DNA, 25 bp, Homo sapien
tgaatccttcttacgagatcgttcc

SEQ ID NO: 4279727 - DNA, 25 bp, Homo sapien
aggtaaccccggcaattggctgatc

SEQ ID NO: 4279728 - DNA, 25 bp, Homo sapien
tgctgctctgatgctgactctgttt

SEQ ID NO: 4279729 - DNA, 25 bp, Homo sapien
ccagcctcccaggcgtagttttttg

SEQ ID NO: 4279730 - DNA, 25 bp, Homo sapien
agtcatgaattggttgactaatata

SEQ ID NO: 4279731 - DNA, 25 bp, Homo sapien
catgaattggttgactaatatacct

SEQ ID NO: 4279732 - DNA, 25 bp, Homo sapien
tgaattggttgactaatataccttt

SEQ ID NO: 4279733 - DNA, 25 bp, Homo sapien
ctctggaactgatagtcaaacgtta

SEQ ID NO: 4279734 - DNA, 25 bp, Homo sapien
caaccctcagttgtccgttcacagt

SEQ ID NO: 4279735 - DNA, 25 bp, Homo sapien
caaacgttaactctgagcctgaagg

SEQ ID NO: 4279736 - DNA, 25 bp, Homo sapien
gaactgatagtcaaacgttaactct

SEQ ID NO: 4279737 - DNA, 25 bp, Homo sapien
gacactgtacagtgagagtctcaca

SEQ ID NO: 4279738 - DNA, 25 bp, Homo sapien
tgtcactgagtatcaaaggcaagtc

SEQ ID NO: 4279739 - DNA, 25 bp, Homo sapien
taaaaattggcaaacagaggatgct

SEQ ID NO: 4279740 - DNA, 25 bp, Homo sapien
caaaacctaggttgaatgattccac

SEQ ID NO: 4279741 - DNA, 25 bp, Homo sapien
tgggtttcacaatttggttcacagc

SEQ ID NO: 4279742 - DNA, 25 bp, Homo sapien
tcatgaaacgagagcaatttccttt

SEQ ID NO: 4279743 - DNA, 25 bp, Homo sapien
acagctgtgattcatgaaacgagag

SEQ ID NO: 4279744 - DNA, 25 bp, Homo sapien
ttcctttttgagtggcatctattat

SEQ ID NO: 4279745 - DNA, 25 bp, Homo sapien
gatgtttttgtttcgtgcatactcc

SEQ ID NO: 4279746 - DNA, 25 bp, Homo sapien
gcatactccttcactcgagctttaa

SEQ ID NO: 4279747 - DNA, 25 bp, Homo sapien
tcagggccatgaaatagtaatggat

SEQ ID NO: 4279748 - DNA, 25 bp, Homo sapien
tttatgatcgagtacctctccacaa

SEQ ID NO: 4279749 - DNA, 25 bp, Homo sapien
taatggattctgtcccaacttcttt

SEQ ID NO: 4279750 - DNA, 25 bp, Homo sapien
acagtaaacacttggtagttgcttg

SEQ ID NO: 4279751 - DNA, 25 bp, Homo sapien
taaacacttggtagttgcttggaat

SEQ ID NO: 4279752 - DNA, 25 bp, Homo sapien
tcttctactcttatcccaactcaat

SEQ ID NO: 4279753 - DNA, 25 bp, Homo sapien
tttctgtgagtatgacttccacatc

SEQ ID NO: 4279754 - DNA, 25 bp, Homo sapien
tattggaacaataatccccatttgg

SEQ ID NO: 4279755 - DNA, 25 bp, Homo sapien
gttttctctgaaaccgtctattgga

SEQ ID NO: 4279756 - DNA, 25 bp, Homo sapien
taatccccatttggacaccgagaag

SEQ ID NO: 4279757 - DNA, 25 bp, Homo sapien
taagacaatcttccccacatgctat

SEQ ID NO: 4279758 - DNA, 25 bp, Homo sapien
ccttgagctctttcatctttagaaa

SEQ ID NO: 4279759 - DNA, 25 bp, Homo sapien
tctttagaaagaggtgtacactcac

SEQ ID NO: 4279760 - DNA, 25 bp, Homo sapien
tcatgagaagacgattaagacaatc

SEQ ID NO: 4279761 - DNA, 25 bp, Homo sapien
gtgatggtgattaagtcacacaaga

SEQ ID NO: 4279762 - DNA, 25 bp, Homo sapien
gactaatacagtacccaaagatact

SEQ ID NO: 4279763 - DNA, 25 bp, Homo sapien
gccggcctttctcgtgttattcttg

SEQ ID NO: 4279764 - DNA, 25 bp, Homo sapien
taatacagtacccaaagatacttca

SEQ ID NO: 4279765 - DNA, 25 bp, Homo sapien
tgagtgcaagccatccacatgtggt

SEQ ID NO: 4279766 - DNA, 25 bp, Homo sapien
cacaacagactggagacggtttctt

SEQ ID NO: 4279767 - DNA, 25 bp, Homo sapien
gatcccagtaaccattgccttgcca

SEQ ID NO: 4279768 - DNA, 25 bp, Homo sapien
gacccagagggtcagatttcacatc

SEQ ID NO: 4279769 - DNA, 25 bp, Homo sapien
gaagctgaactagtgctaccgatgc

SEQ ID NO: 4279770 - DNA, 25 bp, Homo sapien
gatgaagcaatacctgaactcccaa

SEQ ID NO: 4279771 - DNA, 25 bp, Homo sapien
ttttgcagcaagaaaccctcgtatc

SEQ ID NO: 4279772 - DNA, 25 bp, Homo sapien
tttagcactgcatccagaactggag

SEQ ID NO: 4279773 - DNA, 25 bp, Homo sapien
aatatgatgaccctcgtcggaatcc

SEQ ID NO: 4279774 - DNA, 25 bp, Homo sapien
ctgtcatgcttagaatatgatgacc

SEQ ID NO: 4279775 - DNA, 25 bp, Homo sapien
gggaagcactactgtcatgcttaga

SEQ ID NO: 4279776 - DNA, 25 bp, Homo sapien
tcgtcggaatcccagttcattaggg

SEQ ID NO: 4279777 - DNA, 25 bp, Homo sapien
tgtgtatggccgagaatagcgcgtc

SEQ ID NO: 4279778 - DNA, 25 bp, Homo sapien
tactggtaagggtactggtgctgcc

SEQ ID NO: 4279779 - DNA, 25 bp, Homo sapien
gacctagagtgagatctgctccgcc

SEQ ID NO: 4279780 - DNA, 25 bp, Homo sapien
cctatggtagcgacgatcagagtca

SEQ ID NO: 4279781 - DNA, 25 bp, Homo sapien
ttcagccaagaaaacatgcaaaaga

SEQ ID NO: 4279782 - DNA, 25 bp, Homo sapien
tcagccaagaaaacatgcaaaagaa

SEQ ID NO: 4279783 - DNA, 25 bp, Homo sapien
ctatttccattcagccaagaaaaca

SEQ ID NO: 4279784 - DNA, 25 bp, Homo sapien
ttccattcagccaagaaaacatgca

SEQ ID NO: 4279785 - DNA, 25 bp, Homo sapien
caacaataagatggagtaggaggca

SEQ ID NO: 4279786 - DNA, 25 bp, Homo sapien
gcagaaagaagccaacaataagatg

SEQ ID NO: 4279787 - DNA, 25 bp, Homo sapien
ctgaatataaggtgtaaggcagaaa

SEQ ID NO: 4279788 - DNA, 25 bp, Homo sapien
gaagccaacaataagatggagtagg

SEQ ID NO: 4279789 - DNA, 25 bp, Homo sapien
ccaaaagtgaggtcctaggtctcac

SEQ ID NO: 4279790 - DNA, 25 bp, Homo sapien
gaatctggataagaacttaactaag

SEQ ID NO: 4279791 - DNA, 25 bp, Homo sapien
tctactgaatttcgtaactacaaat

SEQ ID NO: 4279792 - DNA, 25 bp, Homo sapien
gacttcaaaaattcactcctaccta

SEQ ID NO: 4279793 - DNA, 25 bp, Homo sapien
tgccccatcctacactatacctcat

SEQ ID NO: 4279794 - DNA, 25 bp, Homo sapien
taaggatccaccttgtaaaagcagt

SEQ ID NO: 4279795 - DNA, 25 bp, Homo sapien
acacccggcctgaatgacattttag

SEQ ID NO: 4279796 - DNA, 25 bp, Homo sapien
caatcagaggctatttgttcaataa

SEQ ID NO: 4279797 - DNA, 25 bp, Homo sapien
ctaggtctgtaaaggcaaaatgtca

SEQ ID NO: 4279798 - DNA, 25 bp, Homo sapien
agtaacatggcacagaggtacatca

SEQ ID NO: 4279799 - DNA, 25 bp, Homo sapien
gaagtaacatggcacagaggtacat

SEQ ID NO: 4279800 - DNA, 25 bp, Homo sapien
catggcacagaggtacatcaaataa

SEQ ID NO: 4279801 - DNA, 25 bp, Homo sapien
ttgaagtaacatggcacagaggtac

SEQ ID NO: 4279802 - DNA, 25 bp, Homo sapien
gggattacagtattatcactttctt

SEQ ID NO: 4279803 - DNA, 25 bp, Homo sapien
tactgggattacagtattatcactt

SEQ ID NO: 4279804 - DNA, 25 bp, Homo sapien
ctgggattacagtattatcactttc

SEQ ID NO: 4279805 - DNA, 25 bp, Homo sapien
gtactgggattacagtattatcact

SEQ ID NO: 4279806 - DNA, 25 bp, Homo sapien
tgtcacccagagtctaggctggagt

SEQ ID NO: 4279807 - DNA, 25 bp, Homo sapien
acgggctcacttatcttgcccaagc

SEQ ID NO: 4279808 - DNA, 25 bp, Homo sapien
ctcagggaccactaaagcctttcct

SEQ ID NO: 4279809 - DNA, 25 bp, Homo sapien
tatctaccttaatccactcagggac

SEQ ID NO: 4279810 - DNA, 25 bp, Homo sapien
tacggaattctaatcagtgaggaaa

SEQ ID NO: 4279811 - DNA, 25 bp, Homo sapien
tcaactggtatagtatctcaaacat

SEQ ID NO: 4279812 - DNA, 25 bp, Homo sapien
actacacaagtgagtaaagctaact

SEQ ID NO: 4279813 - DNA, 25 bp, Homo sapien
tctcaaatgtgtcactacggaattc

SEQ ID NO: 4279814 - DNA, 25 bp, Homo sapien
tccgttcaatgtggtagtatgcagc

SEQ ID NO: 4279815 - DNA, 25 bp, Homo sapien
taaactgcaaaaggctatctgtgtg

SEQ ID NO: 4279816 - DNA, 25 bp, Homo sapien
gatcataataatgggctggacgtgg

SEQ ID NO: 4279817 - DNA, 25 bp, Homo sapien
gaataaccctggtacatccgttcaa

SEQ ID NO: 4279818 - DNA, 25 bp, Homo sapien
taatcagagacaaaacttaagtgct

SEQ ID NO: 4279819 - DNA, 25 bp, Homo sapien
ctataaacagctcacttgaggaggc

SEQ ID NO: 4279820 - DNA, 25 bp, Homo sapien
aatgtatacctcacagaaacaacac

SEQ ID NO: 4279821 - DNA, 25 bp, Homo sapien
tatgacaaagaactactccaagctg

SEQ ID NO: 4279822 - DNA, 25 bp, Homo sapien
ggttttcatgcctacatctacagag

SEQ ID NO: 4279823 - DNA, 25 bp, Homo sapien
caaaagttaaagtacgcagctggtt

SEQ ID NO: 4279824 - DNA, 25 bp, Homo sapien
aaactgcaggttgagtaacgcttac

SEQ ID NO: 4279825 - DNA, 25 bp, Homo sapien
tacagtagtacaatcccagcttgct

SEQ ID NO: 4279826 - DNA, 25 bp, Homo sapien
tggaaacaccaaagtcctgctaagg

SEQ ID NO: 4279827 - DNA, 25 bp, Homo sapien
gacagagaagctggtcaacttttga

SEQ ID NO: 4279828 - DNA, 25 bp, Homo sapien
ccagcagagccacgtaatagattta

SEQ ID NO: 4279829 - DNA, 25 bp, Homo sapien
tgagcagcctcttaaccaggatagg

SEQ ID NO: 4279830 - DNA, 25 bp, Homo sapien
aagtactatactggcctcctgtgca

SEQ ID NO: 4279831 - DNA, 25 bp, Homo sapien
tgcacatttgcagtcctagatacat

SEQ ID NO: 4279832 - DNA, 25 bp, Homo sapien
cagttggcttcctaaggtatctcta

SEQ ID NO: 4279833 - DNA, 25 bp, Homo sapien
aagaaggtaacctggcctgtagcac

SEQ ID NO: 4279834 - DNA, 25 bp, Homo sapien
tgatgaccccaactagaagcactta

SEQ ID NO: 4279835 - DNA, 25 bp, Homo sapien
gatgaagtcatcgtccaaggttaaa

SEQ ID NO: 4279836 - DNA, 25 bp, Homo sapien
ggcacttggtcatttctcccctgag

SEQ ID NO: 4279837 - DNA, 25 bp, Homo sapien
gaaacacaatgtcctctatgctgct

SEQ ID NO: 4279838 - DNA, 25 bp, Homo sapien
ctcaccggcgccctcttgccgggcc

SEQ ID NO: 4279839 - DNA, 25 bp, Homo sapien
gggcccggacgagccacgaggagcc

SEQ ID NO: 4279840 - DNA, 25 bp, Homo sapien
acgaggagcccgagaggaccgccga

SEQ ID NO: 4279841 - DNA, 25 bp, Homo sapien
gggatggccgggtcggtgcggacac

SEQ ID NO: 4279842 - DNA, 25 bp, Homo sapien
tcgggtgctccgggtcgtagaaatc

SEQ ID NO: 4279843 - DNA, 25 bp, Homo sapien
gtagaaatcccccatcttcggaggc

SEQ ID NO: 4279844 - DNA, 25 bp, Homo sapien
aaatcccccatcttcggaggcggct

SEQ ID NO: 4279845 - DNA, 25 bp, Homo sapien
tgctccgggtcgtagaaatccccca

SEQ ID NO: 4279846 - DNA, 25 bp, Homo sapien
gagagcatcttgcactgtttcctgg

SEQ ID NO: 4279847 - DNA, 25 bp, Homo sapien
tttttttgagagcatcttgcactgt

SEQ ID NO: 4279848 - DNA, 25 bp, Homo sapien
tgtgttcaaatgaatctcgtgcctc

SEQ ID NO: 4279849 - DNA, 25 bp, Homo sapien
tttgagagcatcttgcactgtttcc

SEQ ID NO: 4279850 - DNA, 25 bp, Homo sapien
gcaggacttactaacaaccaatctc

SEQ ID NO: 4279851 - DNA, 25 bp, Homo sapien
ggcatccgttaggtgttaactacaa

SEQ ID NO: 4279852 - DNA, 25 bp, Homo sapien
taagaaatactcgttccaggctggg

SEQ ID NO: 4279853 - DNA, 25 bp, Homo sapien
gactggcttgtcatacacttataca

SEQ ID NO: 4279854 - DNA, 25 bp, Homo sapien
acccggcagtgggatctgaataata

SEQ ID NO: 4279855 - DNA, 25 bp, Homo sapien
tgtttatgaaacaccactagtatag

SEQ ID NO: 4279856 - DNA, 25 bp, Homo sapien
cggcagtgggatctgaataatataa

SEQ ID NO: 4279857 - DNA, 25 bp, Homo sapien
aaatgtgtttatgaaacaccactag

SEQ ID NO: 4279858 - DNA, 25 bp, Homo sapien
catacttatataggtcaggaatgct

SEQ ID NO: 4279859 - DNA, 25 bp, Homo sapien
ttacaaatagatgtaaaactggcct

SEQ ID NO: 4279860 - DNA, 25 bp, Homo sapien
ttagaatcccataactgggctgggc

SEQ ID NO: 4279861 - DNA, 25 bp, Homo sapien
tactggactgaaaataactcgaaag

SEQ ID NO: 4279862 - DNA, 25 bp, Homo sapien
tcagccttgacagtgatcccagttc

SEQ ID NO: 4279863 - DNA, 25 bp, Homo sapien
tgacagtgatcccagttcctattca

SEQ ID NO: 4279864 - DNA, 25 bp, Homo sapien
cagttcctattcagggtaaatcgtt

SEQ ID NO: 4279865 - DNA, 25 bp, Homo sapien
ttcagggtaaatcgttcactttcac

SEQ ID NO: 4279866 - DNA, 25 bp, Homo sapien
ggaggatgctcctcccaacatgcag

SEQ ID NO: 4279867 - DNA, 25 bp, Homo sapien
tgctgggtcccagcattggagtaga

SEQ ID NO: 4279868 - DNA, 25 bp, Homo sapien
tctgtggagatgagcaaggttgtcc

SEQ ID NO: 4279869 - DNA, 25 bp, Homo sapien
cctttaaggtactggcgatgaggtt

SEQ ID NO: 4279870 - DNA, 25 bp, Homo sapien
ctattttctatgtgcctgctggagg

SEQ ID NO: 4279871 - DNA, 25 bp, Homo sapien
ctgctggaggcccatcatggttttc

SEQ ID NO: 4279872 - DNA, 25 bp, Homo sapien
cctgctggaggcccatcatggtttt

SEQ ID NO: 4279873 - DNA, 25 bp, Homo sapien
tgtatcacctaatgagtatgttaat

SEQ ID NO: 4279874 - DNA, 25 bp, Homo sapien
gaatgtatcacctaatgagtatgtt

SEQ ID NO: 4279875 - DNA, 25 bp, Homo sapien
cctaatgagtatgttaataaataac

SEQ ID NO: 4279876 - DNA, 25 bp, Homo sapien
cacctaatgagtatgttaataaata

SEQ ID NO: 4279877 - DNA, 25 bp, Homo sapien
ccccgtgtgcatctgccacttgctg

SEQ ID NO: 4279878 - DNA, 25 bp, Homo sapien
gggcttctgccccgtgtgcatctgc

SEQ ID NO: 4279879 - DNA, 25 bp, Homo sapien
tgccccgtgtgcatctgccacttgc

SEQ ID NO: 4279880 - DNA, 25 bp, Homo sapien
ttgggcttctgccccgtgtgcatct

SEQ ID NO: 4279881 - DNA, 25 bp, Homo sapien
caaggccttagtagaatggagaccc

SEQ ID NO: 4279882 - DNA, 25 bp, Homo sapien
aggagtgtgcagtgcacagggccct

SEQ ID NO: 4279883 - DNA, 25 bp, Homo sapien
tctgtgttctggctccagacaaggc

SEQ ID NO: 4279884 - DNA, 25 bp, Homo sapien
gtagaatggagaccctctgcaccag

SEQ ID NO: 4279885 - DNA, 25 bp, Homo sapien
ctggagacataggcctctgagttac

SEQ ID NO: 4279886 - DNA, 25 bp, Homo sapien
tcctggagacataggcctctgagtt

SEQ ID NO: 4279887 - DNA, 25 bp, Homo sapien
cctcctggagacataggcctctgag

SEQ ID NO: 4279888 - DNA, 25 bp, Homo sapien
atcctcctggagacataggcctctg

SEQ ID NO: 4279889 - DNA, 25 bp, Homo sapien
cattgtagaaggagatggaatcagg

SEQ ID NO: 4279890 - DNA, 25 bp, Homo sapien
gagatggaatcagggccctcaggaa

SEQ ID NO: 4279891 - DNA, 25 bp, Homo sapien
cttctgctctatcttgactttggca

SEQ ID NO: 4279892 - DNA, 25 bp, Homo sapien
gctggctgaatttgtcctggtcatc

SEQ ID NO: 4279893 - DNA, 25 bp, Homo sapien
caaaggactcattgtaccagatgtc

SEQ ID NO: 4279894 - DNA, 25 bp, Homo sapien
gatgacaaaggactcattgtaccag

SEQ ID NO: 4279895 - DNA, 25 bp, Homo sapien
aaggactcattgtaccagatgtcaa

SEQ ID NO: 4279896 - DNA, 25 bp, Homo sapien
catgtcctcagggatgacaaaggac

SEQ ID NO: 4279897 - DNA, 25 bp, Homo sapien
ggcaatactggatctcagccctgag

SEQ ID NO: 4279898 - DNA, 25 bp, Homo sapien
tactcgctgcggtactgcttcttga

SEQ ID NO: 4279899 - DNA, 25 bp, Homo sapien
cctgaggtcacgcaggtcctggtac

SEQ ID NO: 4279900 - DNA, 25 bp, Homo sapien
gacactgatccactaggtgctggca

SEQ ID NO: 4279901 - DNA, 25 bp, Homo sapien
agaagtcaggaaatgaggaggtgtc

SEQ ID NO: 4279902 - DNA, 25 bp, Homo sapien
aagtcaggaaatgaggaggtgtcca

SEQ ID NO: 4279903 - DNA, 25 bp, Homo sapien
agtcaggaaatgaggaggtgtccac

SEQ ID NO: 4279904 - DNA, 25 bp, Homo sapien
gaagaagtcaggaaatgaggaggtg

SEQ ID NO: 4279905 - DNA, 25 bp, Homo sapien
tgtgagtgagatgatgcatctgact

SEQ ID NO: 4279906 - DNA, 25 bp, Homo sapien
ctgtgagtgagatgatgcatctgac

SEQ ID NO: 4279907 - DNA, 25 bp, Homo sapien
cctgtgagtgagatgatgcatctga

SEQ ID NO: 4279908 - DNA, 25 bp, Homo sapien
tagcgagggaaagcccagtaacctg

SEQ ID NO: 4279909 - DNA, 25 bp, Homo sapien
agggaaagcccagtaacctgtggtg

SEQ ID NO: 4279910 - DNA, 25 bp, Homo sapien
cctggaacagggttgtgatttagcg

SEQ ID NO: 4279911 - DNA, 25 bp, Homo sapien
ttgtgatttagcgagggaaagccca

SEQ ID NO: 4279912 - DNA, 25 bp, Homo sapien
tgaaagtgagtcccttggctctctg

SEQ ID NO: 4279913 - DNA, 25 bp, Homo sapien
gaaagtgagtcccttggctctctgg

SEQ ID NO: 4279914 - DNA, 25 bp, Homo sapien
tggtttttcatagtccctaccagca

SEQ ID NO: 4279915 - DNA, 25 bp, Homo sapien
ttggtttttcatagtccctaccagc

SEQ ID NO: 4279916 - DNA, 25 bp, Homo sapien
ggtttttcatagtccctaccagcag

SEQ ID NO: 4279917 - DNA, 25 bp, Homo sapien
tgcttctcccgtagtgacttctgga

SEQ ID NO: 4279918 - DNA, 25 bp, Homo sapien
ctcaaaggccactggtttggagggt

SEQ ID NO: 4279919 - DNA, 25 bp, Homo sapien
ttggtcacatcaatctcccgcttga

SEQ ID NO: 4279920 - DNA, 25 bp, Homo sapien
cggttgatctcactaccttgctcat

SEQ ID NO: 4279921 - DNA, 25 bp, Homo sapien
ccctttgagaactctggttaatgag

SEQ ID NO: 4279922 - DNA, 25 bp, Homo sapien
tagaaggatagaggcagaatgaaac

SEQ ID NO: 4279923 - DNA, 25 bp, Homo sapien
aaagaacatggagggatagaaggat

SEQ ID NO: 4279924 - DNA, 25 bp, Homo sapien
ggctaaggccatgcagtatgtttaa

SEQ ID NO: 4279925 - DNA, 25 bp, Homo sapien
ctaattgggcgtaattcctccttcg

SEQ ID NO: 4279926 - DNA, 25 bp, Homo sapien
atgctggaagtttcccggtcccgcg

SEQ ID NO: 4279927 - DNA, 25 bp, Homo sapien
gaaagcatgtctttgacatccccat

SEQ ID NO: 4279928 - DNA, 25 bp, Homo sapien
gatgggaccagctgggtcttggagg

SEQ ID NO: 4279929 - DNA, 25 bp, Homo sapien
ttggtgcctttctccgagaagaggc

SEQ ID NO: 4279930 - DNA, 25 bp, Homo sapien
accgaactggcaggaggatgcccat

SEQ ID NO: 4279931 - DNA, 25 bp, Homo sapien
aggcagatctgaggaccgaactggc

SEQ ID NO: 4279932 - DNA, 25 bp, Homo sapien
cccaaaggtctgaggatagaaaatc

SEQ ID NO: 4279933 - DNA, 25 bp, Homo sapien
tcacccactaggtggccatcaacat

SEQ ID NO: 4279934 - DNA, 25 bp, Homo sapien
gcgactccgagtccaaagttttgtc

SEQ ID NO: 4279935 - DNA, 25 bp, Homo sapien
gagtggctctttgaatgtcttcttg

SEQ ID NO: 4279936 - DNA, 25 bp, Homo sapien
tgtccttcaggctcacccactaggt

SEQ ID NO: 4279937 - DNA, 25 bp, Homo sapien
caaagtcattcctgtcaatgagggt

SEQ ID NO: 4279938 - DNA, 25 bp, Homo sapien
tgagggtgtacttcctgcgcaaagt

SEQ ID NO: 4279939 - DNA, 25 bp, Homo sapien
tacttcctgcgcaaagtggactcca

SEQ ID NO: 4279940 - DNA, 25 bp, Homo sapien
gtcaatgagggtgtacttcctgcgc

SEQ ID NO: 4279941 - DNA, 25 bp, Homo sapien
ccggaactggttgaacacctccttg

SEQ ID NO: 4279942 - DNA, 25 bp, Homo sapien
ccttgatctgtctaaggctgattat

SEQ ID NO: 4279943 - DNA, 25 bp, Homo sapien
tcagaaccacccggaactggttgaa

SEQ ID NO: 4279944 - DNA, 25 bp, Homo sapien
tgaacacctccttgatctgtctaag

SEQ ID NO: 4279945 - DNA, 25 bp, Homo sapien
cataggtcacaaaggtgcggttggt

SEQ ID NO: 4279946 - DNA, 25 bp, Homo sapien
gtcgatctcgtccagtgtcccctcc

SEQ ID NO: 4279947 - DNA, 25 bp, Homo sapien
gatttcatccatggggtcataggtc

SEQ ID NO: 4279948 - DNA, 25 bp, Homo sapien
tccgcacctgggagttgatctcagc

SEQ ID NO: 4279949 - DNA, 25 bp, Homo sapien
gaacatgtggataagcaacaagaac

SEQ ID NO: 4279950 - DNA, 25 bp, Homo sapien
gcaacaagaacctgagcccacaggg

SEQ ID NO: 4279951 - DNA, 25 bp, Homo sapien
catgtggataagcaacaagaacctg

SEQ ID NO: 4279952 - DNA, 25 bp, Homo sapien
gataagcaacaagaacctgagccca

SEQ ID NO: 4279953 - DNA, 25 bp, Homo sapien
tcctgcttgagtagtgctagttcct

SEQ ID NO: 4279954 - DNA, 25 bp, Homo sapien
ctgcttgagtagtgctagttccttc

SEQ ID NO: 4279955 - DNA, 25 bp, Homo sapien
agctcctgcttgagtagtgctagtt

SEQ ID NO: 4279956 - DNA, 25 bp, Homo sapien
aggctgtcatggatagccagctcct

SEQ ID NO: 4279957 - DNA, 25 bp, Homo sapien
cacatctcacacaagcgtatgaaca

SEQ ID NO: 4279958 - DNA, 25 bp, Homo sapien
tctcacacaagcgtatgaacacaca

SEQ ID NO: 4279959 - DNA, 25 bp, Homo sapien
acacaagcgtatgaacacacaatca

SEQ ID NO: 4279960 - DNA, 25 bp, Homo sapien
tcacacaagcgtatgaacacacaat

SEQ ID NO: 4279961 - DNA, 25 bp, Homo sapien
gataaatgtgaagcttctgcatacc

SEQ ID NO: 4279962 - DNA, 25 bp, Homo sapien
aataatagagactgtcgtttgggcc

SEQ ID NO: 4279963 - DNA, 25 bp, Homo sapien
tcacttagctactcccctgttaaag

SEQ ID NO: 4279964 - DNA, 25 bp, Homo sapien
cgtttgggccacttcaggcatctag

SEQ ID NO: 4279965 - DNA, 25 bp, Homo sapien
tcagtggtgactagcttcatcctgc

SEQ ID NO: 4279966 - DNA, 25 bp, Homo sapien
atggcaggctcagtggtgactagct

SEQ ID NO: 4279967 - DNA, 25 bp, Homo sapien
gcaggctcagtggtgactagcttca

SEQ ID NO: 4279968 - DNA, 25 bp, Homo sapien
gactagcttcatcctgctggcaaat

SEQ ID NO: 4279969 - DNA, 25 bp, Homo sapien
cccctgagacccctccaacagctcc

SEQ ID NO: 4279970 - DNA, 25 bp, Homo sapien
ccctgagacccctccaacagctcct

SEQ ID NO: 4279971 - DNA, 25 bp, Homo sapien
gtgtgtggatcctagctctgggccc

SEQ ID NO: 4279972 - DNA, 25 bp, Homo sapien
cctctgggcctcacgttacttagga

SEQ ID NO: 4279973 - DNA, 25 bp, Homo sapien
ttgatcccaattccaggagcagcac

SEQ ID NO: 4279974 - DNA, 25 bp, Homo sapien
cctcagcaactgtggctcagactca

SEQ ID NO: 4279975 - DNA, 25 bp, Homo sapien
agcttctccatagatgtttgtcacg

SEQ ID NO: 4279976 - DNA, 25 bp, Homo sapien
ccatagatgtttgtcacgaggacca

SEQ ID NO: 4279977 - DNA, 25 bp, Homo sapien
tgtttgtcacgaggaccatattgca

SEQ ID NO: 4279978 - DNA, 25 bp, Homo sapien
tgggcagcttctccatagatgtttg

SEQ ID NO: 4279979 - DNA, 25 bp, Homo sapien
cgtgggtgagcttgcactgccgaaa

SEQ ID NO: 4279980 - DNA, 25 bp, Homo sapien
tccccaagggcaatgatggcctgct

SEQ ID NO: 4279981 - DNA, 25 bp, Homo sapien
ggcctgctccaggaatgagagcgat

SEQ ID NO: 4279982 - DNA, 25 bp, Homo sapien
taacgagtccttcagagcgtgggtg

SEQ ID NO: 4279983 - DNA, 25 bp, Homo sapien
caatgtcatgcgattgtattccatc

SEQ ID NO: 4279984 - DNA, 25 bp, Homo sapien
tcaatgtcatgcgattgtattccat

SEQ ID NO: 4279985 - DNA, 25 bp, Homo sapien
tgtcatgcgattgtattccatcttg

SEQ ID NO: 4279986 - DNA, 25 bp, Homo sapien
aatgtcatgcgattgtattccatct

SEQ ID NO: 4279987 - DNA, 25 bp, Homo sapien
cctctgataaggtccgggaatgggc

SEQ ID NO: 4279988 - DNA, 25 bp, Homo sapien
ttcctctgataaggtccgggaatgg

SEQ ID NO: 4279989 - DNA, 25 bp, Homo sapien
tcctctgataaggtccgggaatggg

SEQ ID NO: 4279990 - DNA, 25 bp, Homo sapien
tttcctctgataaggtccgggaatg

SEQ ID NO: 4279991 - DNA, 25 bp, Homo sapien
ttttgttcatagtgtgggaggctat

SEQ ID NO: 4279992 - DNA, 25 bp, Homo sapien
gaggctataatcctgttggtctcac

SEQ ID NO: 4279993 - DNA, 25 bp, Homo sapien
catagtgtgggaggctataatcctg

SEQ ID NO: 4279994 - DNA, 25 bp, Homo sapien
ctctaagtagatggtgaaaatgcag

SEQ ID NO: 4279995 - DNA, 25 bp, Homo sapien
ggacaggagatcaaacaggctctca

SEQ ID NO: 4279996 - DNA, 25 bp, Homo sapien
ttccaagtaggaaacacgcacagtg

SEQ ID NO: 4279997 - DNA, 25 bp, Homo sapien
tcctgacttgtgaggtgaactgaca

SEQ ID NO: 4279998 - DNA, 25 bp, Homo sapien
caaaaaggaggctgaatgcatcctc

SEQ ID NO: 4279999 - DNA, 25 bp, Homo sapien
tcatggtgtatgtcttgccagctcc

SEQ ID NO: 4280000 - DNA, 25 bp, Homo sapien
gtatgtcttgccagctcccgtctgc

SEQ ID NO: 4280001 - DNA, 25 bp, Homo sapien
ccccatcatggtgtatgtcttgcca

SEQ ID NO: 4280002 - DNA, 25 bp, Homo sapien
gatcccccggtgcttgtaattctca

SEQ ID NO: 4280003 - DNA, 25 bp, Homo sapien
atttgcatctcttactcctcaggtt

SEQ ID NO: 4280004 - DNA, 25 bp, Homo sapien
catccaacttaaacgaccagtctgt

SEQ ID NO: 4280005 - DNA, 25 bp, Homo sapien
cattatagccatcgagggcctgaga

SEQ ID NO: 4280006 - DNA, 25 bp, Homo sapien
tctcataaaccaagtcctgggaggc

SEQ ID NO: 4280007 - DNA, 25 bp, Homo sapien
tgggaggcatcgtgaagaactccat

SEQ ID NO: 4280008 - DNA, 25 bp, Homo sapien
gctggcttagggacatactgggtaa

SEQ ID NO: 4280009 - DNA, 25 bp, Homo sapien
gatgcatgccccttcatagtaagcc

SEQ ID NO: 4280010 - DNA, 25 bp, Homo sapien
tagattccataagcatagggaggcc

SEQ ID NO: 4280011 - DNA, 25 bp, Homo sapien
tagctgaggcctaatctggagggaa

SEQ ID NO: 4280012 - DNA, 25 bp, Homo sapien
tcatcggtgggtttgacacggacaa

SEQ ID NO: 4280013 - DNA, 25 bp, Homo sapien
tcatgagcaaagtcatcggtgggtt

SEQ ID NO: 4280014 - DNA, 25 bp, Homo sapien
caaagtcatcggtgggtttgacacg

SEQ ID NO: 4280015 - DNA, 25 bp, Homo sapien
ggtgggtttgacacggacaaatgca

SEQ ID NO: 4280016 - DNA, 25 bp, Homo sapien
actgcttgttaccattcttacgtcg

SEQ ID NO: 4280017 - DNA, 25 bp, Homo sapien
tgttaccattcttacgtcgcttcat

SEQ ID NO: 4280018 - DNA, 25 bp, Homo sapien
gaaatactgcttgttaccattctta

SEQ ID NO: 4280019 - DNA, 25 bp, Homo sapien
gcttgttaccattcttacgtcgctt

SEQ ID NO: 4280020 - DNA, 25 bp, Homo sapien
tattcaggaaatggcggtggttggt

SEQ ID NO: 4280021 - DNA, 25 bp, Homo sapien
tcatatgtgggtctatcttcagtca

SEQ ID NO: 4280022 - DNA, 25 bp, Homo sapien
taggtattcaggaaatggcggtggt

SEQ ID NO: 4280023 - DNA, 25 bp, Homo sapien
gaatcttcatatgtgggtctatctt

SEQ ID NO: 4280024 - DNA, 25 bp, Homo sapien
taagccgcggtcaggttgaaaggac

SEQ ID NO: 4280025 - DNA, 25 bp, Homo sapien
tagtacggaagagtccagacgacct

SEQ ID NO: 4280026 - DNA, 25 bp, Homo sapien
attagctccgaagaccgtaagccgc

SEQ ID NO: 4280027 - DNA, 25 bp, Homo sapien
gaagggctccgactggtgatcccaa

SEQ ID NO: 4280028 - DNA, 25 bp, Homo sapien
tttcagcagtccgggcgcacaccct

SEQ ID NO: 4280029 - DNA, 25 bp, Homo sapien
gcagtccgggcgcacacccttttcc

SEQ ID NO: 4280030 - DNA, 25 bp, Homo sapien
ctccccactcccaccggcgagcagc

SEQ ID NO: 4280031 - DNA, 25 bp, Homo sapien
ctcccaccggcgagcagcccctgct

SEQ ID NO: 4280032 - DNA, 25 bp, Homo sapien
gaaatgaagtccgaggtcctacgtc

SEQ ID NO: 4280033 - DNA, 25 bp, Homo sapien
gctgtgtacatagtcgccatggcaa

SEQ ID NO: 4280034 - DNA, 25 bp, Homo sapien
aagacttcggcggatgcacatgcga

SEQ ID NO: 4280035 - DNA, 25 bp, Homo sapien
ttccggcgccgaggagattcaacta

SEQ ID NO: 4280036 - DNA, 25 bp, Homo sapien
tggaggcaggggcggtggccggctc

SEQ ID NO: 4280037 - DNA, 25 bp, Homo sapien
cttctatggaggcaggggcggtggc

SEQ ID NO: 4280038 - DNA, 25 bp, Homo sapien
tatggaggcaggggcggtggccggc

SEQ ID NO: 4280039 - DNA, 25 bp, Homo sapien
tctatggaggcaggggcggtggccg

SEQ ID NO: 4280040 - DNA, 25 bp, Homo sapien
gaaactggtacctccagtggttcca

SEQ ID NO: 4280041 - DNA, 25 bp, Homo sapien
cttcttcctaggtggtataagcctg

SEQ ID NO: 4280042 - DNA, 25 bp, Homo sapien
tctgtgggatgtgttcaaagtccgt

SEQ ID NO: 4280043 - DNA, 25 bp, Homo sapien
caaagtccgtagatcttcctccagg

SEQ ID NO: 4280044 - DNA, 25 bp, Homo sapien
tccagtgaaacagacagtctgtgtt

SEQ ID NO: 4280045 - DNA, 25 bp, Homo sapien
cttgaaggtaaaggtcagagcttgg

SEQ ID NO: 4280046 - DNA, 25 bp, Homo sapien
aacagacagtctgtgttcagggcct

SEQ ID NO: 4280047 - DNA, 25 bp, Homo sapien
ctgatggctcttacgttccagtgaa

SEQ ID NO: 4280048 - DNA, 25 bp, Homo sapien
tgtgggtcctcatactcattatgtc

SEQ ID NO: 4280049 - DNA, 25 bp, Homo sapien
gtctaaagtgaacacccttgcccat

SEQ ID NO: 4280050 - DNA, 25 bp, Homo sapien
catactcattatgtctaaagtgaac

SEQ ID NO: 4280051 - DNA, 25 bp, Homo sapien
tcattatgtctaaagtgaacaccct

SEQ ID NO: 4280052 - DNA, 25 bp, Homo sapien
cgtcagagggagaagcttaagcatg

SEQ ID NO: 4280053 - DNA, 25 bp, Homo sapien
tattcttgatattcagagtcctgca

SEQ ID NO: 4280054 - DNA, 25 bp, Homo sapien
cactgctgtctcagacgtcagaggg

SEQ ID NO: 4280055 - DNA, 25 bp, Homo sapien
ggcttggagtatctgctcacatctg

SEQ ID NO: 4280056 - DNA, 25 bp, Homo sapien
tcagcgctgtattcctcagtggcca

SEQ ID NO: 4280057 - DNA, 25 bp, Homo sapien
ggctacgttgatcattggctcccat

SEQ ID NO: 4280058 - DNA, 25 bp, Homo sapien
catttgacagatgactgagctgaca

SEQ ID NO: 4280059 - DNA, 25 bp, Homo sapien
gaagcacatgctgtagaggcccagg

SEQ ID NO: 4280060 - DNA, 25 bp, Homo sapien
catgctgcttgtcgaaactcccagg

SEQ ID NO: 4280061 - DNA, 25 bp, Homo sapien
taattgcaggttgcaagccacggtg

SEQ ID NO: 4280062 - DNA, 25 bp, Homo sapien
tagggacctggtagacgaagcaaag

SEQ ID NO: 4280063 - DNA, 25 bp, Homo sapien
gaaatgtgtcaggagctgccaccgt

SEQ ID NO: 4280064 - DNA, 25 bp, Homo sapien
ccagaaggatagtgatcatgtctag

SEQ ID NO: 4280065 - DNA, 25 bp, Homo sapien
tgtttgttttgtgtccgtatccaga

SEQ ID NO: 4280066 - DNA, 25 bp, Homo sapien
gtctagtaaatttgtgatcttccca

SEQ ID NO: 4280067 - DNA, 25 bp, Homo sapien
atacttgcctaaggcaagtccctct

SEQ ID NO: 4280068 - DNA, 25 bp, Homo sapien
cacgttgaccatatgcacctctaga

SEQ ID NO: 4280069 - DNA, 25 bp, Homo sapien
gcactcttgactgggcctgtagtaa

SEQ ID NO: 4280070 - DNA, 25 bp, Homo sapien
ggtcctgaggcctcgcattgagctg

SEQ ID NO: 4280071 - DNA, 25 bp, Homo sapien
tctaactggagaagggcggtatcca

SEQ ID NO: 4280072 - DNA, 25 bp, Homo sapien
cagtaggttcctcagtccgatggtg

SEQ ID NO: 4280073 - DNA, 25 bp, Homo sapien
gacattgtactcagtgggccttggg

SEQ ID NO: 4280074 - DNA, 25 bp, Homo sapien
gctattcgtaaatggctggtctggc

SEQ ID NO: 4280075 - DNA, 25 bp, Homo sapien
ttcttggataacacacgggccttct

SEQ ID NO: 4280076 - DNA, 25 bp, Homo sapien
gagcatcttcatgcgattgttaacc

SEQ ID NO: 4280077 - DNA, 25 bp, Homo sapien
ggtagatcctaggagtgaaactgct

SEQ ID NO: 4280078 - DNA, 25 bp, Homo sapien
taatgaatggttcaggttcctccac

SEQ ID NO: 4280079 - DNA, 25 bp, Homo sapien
ccacattcttgtcggcacttggact

SEQ ID NO: 4280080 - DNA, 25 bp, Homo sapien
ttacccctgccaagcatagacaagg

SEQ ID NO: 4280081 - DNA, 25 bp, Homo sapien
catggcgcagagatgcactggagac

SEQ ID NO: 4280082 - DNA, 25 bp, Homo sapien
tggagacccttatcaaacacagagc

SEQ ID NO: 4280083 - DNA, 25 bp, Homo sapien
tagggctcaggcatccaatggagag

SEQ ID NO: 4280084 - DNA, 25 bp, Homo sapien
ttcaagactgtctagtggctgggca

SEQ ID NO: 4280085 - DNA, 25 bp, Homo sapien
caattactcagctttctagcaggcc

SEQ ID NO: 4280086 - DNA, 25 bp, Homo sapien
tacctctgagtccattaagtagatg

SEQ ID NO: 4280087 - DNA, 25 bp, Homo sapien
gatatctggtaaaacaagtctgctc

SEQ ID NO: 4280088 - DNA, 25 bp, Homo sapien
caatacgtgggagggcaagttcata

SEQ ID NO: 4280089 - DNA, 25 bp, Homo sapien
tgaagactactatcccagaagccgt

SEQ ID NO: 4280090 - DNA, 25 bp, Homo sapien
tgacctcgagcttaacacggacctg

SEQ ID NO: 4280091 - DNA, 25 bp, Homo sapien
tccaactggaatgaagctaggccct

SEQ ID NO: 4280092 - DNA, 25 bp, Homo sapien
gcatcttaacatatgagtaactaga

SEQ ID NO: 4280093 - DNA, 25 bp, Homo sapien
tcaatcgatcttttcccgtcggcct

SEQ ID NO: 4280094 - DNA, 25 bp, Homo sapien
tagtgggaattttggtgggtatcca

SEQ ID NO: 4280095 - DNA, 25 bp, Homo sapien
cagcatattctcttgtgaggcgcct

SEQ ID NO: 4280096 - DNA, 25 bp, Homo sapien
gggatagattcagtcggccagctgc

SEQ ID NO: 4280097 - DNA, 25 bp, Homo sapien
tgtgagttagctggcctgcgtgtcc

SEQ ID NO: 4280098 - DNA, 25 bp, Homo sapien
gatcccttggtgtgtgcagtcggcc

SEQ ID NO: 4280099 - DNA, 25 bp, Homo sapien
tagtgtcctccgcaagtacctcggc

SEQ ID NO: 4280100 - DNA, 25 bp, Homo sapien
ggtgtcttaagtgttgtcccatctg

SEQ ID NO: 4280101 - DNA, 25 bp, Homo sapien
ggactggggaccaatggcagccttc

SEQ ID NO: 4280102 - DNA, 25 bp, Homo sapien
agcgggtgagctacagcgaggaggg

SEQ ID NO: 4280103 - DNA, 25 bp, Homo sapien
ccttcagtgagatgccggtgtgctc

SEQ ID NO: 4280104 - DNA, 25 bp, Homo sapien
aggcccgcgaggctgcccgccagca

SEQ ID NO: 4280105 - DNA, 25 bp, Homo sapien
tgctggagcgcacgcagtccacctg

SEQ ID NO: 4280106 - DNA, 25 bp, Homo sapien
tctacgcagatctggagagcaaggt

SEQ ID NO: 4280107 - DNA, 25 bp, Homo sapien
gctctgctggagcgcacgcagtcca

SEQ ID NO: 4280108 - DNA, 25 bp, Homo sapien
agggccggccccaccagttgcaggt

SEQ ID NO: 4280109 - DNA, 25 bp, Homo sapien
tggtggctggcccacgactgcctga

SEQ ID NO: 4280110 - DNA, 25 bp, Homo sapien
tgcaatgcccgtagcacctgggcct

SEQ ID NO: 4280111 - DNA, 25 bp, Homo sapien
cacagcatggcgtggtgagcagtcc

SEQ ID NO: 4280112 - DNA, 25 bp, Homo sapien
agccacagccttgggactccctctc

SEQ ID NO: 4280113 - DNA, 25 bp, Homo sapien
tcttctcagaaccaccttcctcagg

SEQ ID NO: 4280114 - DNA, 25 bp, Homo sapien
cggtggggatgtgcccatcagctcc

SEQ ID NO: 4280115 - DNA, 25 bp, Homo sapien
cattgccaagctcagcattcggcct

SEQ ID NO: 4280116 - DNA, 25 bp, Homo sapien
tctggacactcaacaagacctgaac

SEQ ID NO: 4280117 - DNA, 25 bp, Homo sapien
tcagtgggcacagtctcttactccc

SEQ ID NO: 4280118 - DNA, 25 bp, Homo sapien
cagccttctggatccactctggaca

SEQ ID NO: 4280119 - DNA, 25 bp, Homo sapien
gacctgaacaggttttgcctacctg

SEQ ID NO: 4280120 - DNA, 25 bp, Homo sapien
agtccaggttcagtgcattggcccc

SEQ ID NO: 4280121 - DNA, 25 bp, Homo sapien
gcagcggctggaagatactcggctc

SEQ ID NO: 4280122 - DNA, 25 bp, Homo sapien
gctggaagatactcggctctttccc

SEQ ID NO: 4280123 - DNA, 25 bp, Homo sapien
aatattattacagtcaggaggcagc

SEQ ID NO: 4280124 - DNA, 25 bp, Homo sapien
actgccaaagttgcagacaatggca

SEQ ID NO: 4280125 - DNA, 25 bp, Homo sapien
cactgccaaagttgcagacaatggc

SEQ ID NO: 4280126 - DNA, 25 bp, Homo sapien
caccaggatctggcgggcaggctgg

SEQ ID NO: 4280127 - DNA, 25 bp, Homo sapien
agcaccaggatctggcgggcaggct

SEQ ID NO: 4280128 - DNA, 25 bp, Homo sapien
gatgacacccaagcttgcaccacag

SEQ ID NO: 4280129 - DNA, 25 bp, Homo sapien
tctgagatgacacccaagcttgcac

SEQ ID NO: 4280130 - DNA, 25 bp, Homo sapien
tgagatgacacccaagcttgcacca

SEQ ID NO: 4280131 - DNA, 25 bp, Homo sapien
agccctggccgccagtcaccagcag

SEQ ID NO: 4280132 - DNA, 25 bp, Homo sapien
gatggccccatcttgtcctccactg

SEQ ID NO: 4280133 - DNA, 25 bp, Homo sapien
aggtgacatccccacggtgagcaaa

SEQ ID NO: 4280134 - DNA, 25 bp, Homo sapien
gctgacccggctgccagtcagtaca

SEQ ID NO: 4280135 - DNA, 25 bp, Homo sapien
cacggtgagcaaacacatggctgac

SEQ ID NO: 4280136 - DNA, 25 bp, Homo sapien
ctggtcaatgtacacggtcgtgatg

SEQ ID NO: 4280137 - DNA, 25 bp, Homo sapien
acacggtcgtgatggcccctgagtg

SEQ ID NO: 4280138 - DNA, 25 bp, Homo sapien
tgtacacggtcgtgatggcccctga

SEQ ID NO: 4280139 - DNA, 25 bp, Homo sapien
tcaatgtacacggtcgtgatggccc

SEQ ID NO: 4280140 - DNA, 25 bp, Homo sapien
ggcagcacgagtcctccagacggaa

SEQ ID NO: 4280141 - DNA, 25 bp, Homo sapien
agaggcagcacgagtcctccagacg

SEQ ID NO: 4280142 - DNA, 25 bp, Homo sapien
gtgaagaggcagcacgagtcctcca

SEQ ID NO: 4280143 - DNA, 25 bp, Homo sapien
agcacgagtcctccagacggaacac

SEQ ID NO: 4280144 - DNA, 25 bp, Homo sapien
gctcccaccccgtgccgggccactc

SEQ ID NO: 4280145 - DNA, 25 bp, Homo sapien
atcaggctcccaccccgtgccgggc

SEQ ID NO: 4280146 - DNA, 25 bp, Homo sapien
gaatgcatcaggctcccaccccgtg

SEQ ID NO: 4280147 - DNA, 25 bp, Homo sapien
atgcatcaggctcccaccccgtgcc

SEQ ID NO: 4280148 - DNA, 25 bp, Homo sapien
cagtgtgtggtcttggctcccagtc

SEQ ID NO: 4280149 - DNA, 25 bp, Homo sapien
cgcccagcagcggctttcagggctg

SEQ ID NO: 4280150 - DNA, 25 bp, Homo sapien
tgtgggtcaggtgacaggccactgt

SEQ ID NO: 4280151 - DNA, 25 bp, Homo sapien
gtgacaggccactgtgtcgctgctg

SEQ ID NO: 4280152 - DNA, 25 bp, Homo sapien
tggagaggcaggggaactgccccgc

SEQ ID NO: 4280153 - DNA, 25 bp, Homo sapien
aggcaggggaactgccccgccctgg

SEQ ID NO: 4280154 - DNA, 25 bp, Homo sapien
agaggcaggggaactgccccgccct

SEQ ID NO: 4280155 - DNA, 25 bp, Homo sapien
ggagaggcaggggaactgccccgcc

SEQ ID NO: 4280156 - DNA, 25 bp, Homo sapien
aaccgttgagccgtgcagccacaat

SEQ ID NO: 4280157 - DNA, 25 bp, Homo sapien
agggaaccgttgagccgtgcagcca

SEQ ID NO: 4280158 - DNA, 25 bp, Homo sapien
tcaagggaaccgttgagccgtgcag

SEQ ID NO: 4280159 - DNA, 25 bp, Homo sapien
agaaatcaagggaaccgttgagccg

SEQ ID NO: 4280160 - DNA, 25 bp, Homo sapien
aaatattaaccaccttgtgcctcag

SEQ ID NO: 4280161 - DNA, 25 bp, Homo sapien
aagggccagttcaagaaggcacagg

SEQ ID NO: 4280162 - DNA, 25 bp, Homo sapien
actccaaatattaaccaccttgtgc

SEQ ID NO: 4280163 - DNA, 25 bp, Homo sapien
catgagagttaagggccagttcaag

SEQ ID NO: 4280164 - DNA, 25 bp, Homo sapien
aatgcaaccaagataccccaaaggc

SEQ ID NO: 4280165 - DNA, 25 bp, Homo sapien
tgccaccaacagtcaaggagccttg

SEQ ID NO: 4280166 - DNA, 25 bp, Homo sapien
agctctaggtcagatggtgctgcca

SEQ ID NO: 4280167 - DNA, 25 bp, Homo sapien
gagggttctgcaagcgcactctgta

SEQ ID NO: 4280168 - DNA, 25 bp, Homo sapien
agcggtaatgcctgaggagacctcc

SEQ ID NO: 4280169 - DNA, 25 bp, Homo sapien
ccaagaacaccagagcggtaatgcc

SEQ ID NO: 4280170 - DNA, 25 bp, Homo sapien
agcacagcaccccttcaatggcgtc

SEQ ID NO: 4280171 - DNA, 25 bp, Homo sapien
ctgaggagacctcctcgctgctgca

SEQ ID NO: 4280172 - DNA, 25 bp, Homo sapien
ggagtcccgagagcggccacagacc

SEQ ID NO: 4280173 - DNA, 25 bp, Homo sapien
ctccagatggaaccctcggcactgg

SEQ ID NO: 4280174 - DNA, 25 bp, Homo sapien
agctccaagctccagatggaaccct

SEQ ID NO: 4280175 - DNA, 25 bp, Homo sapien
cacgatgaggttgccctgcagctcc

SEQ ID NO: 4280176 - DNA, 25 bp, Homo sapien
aggaccgaggctgcgctgaaaagtt

SEQ ID NO: 4280177 - DNA, 25 bp, Homo sapien
gtcaattaagcaggtgaggtcaggc

SEQ ID NO: 4280178 - DNA, 25 bp, Homo sapien
caccatctgaaagtcgttcccagct

SEQ ID NO: 4280179 - DNA, 25 bp, Homo sapien
gaaaagttggtgtcaattaagcagg

SEQ ID NO: 4280180 - DNA, 25 bp, Homo sapien
tcaagcccgctgcccacgccactgt

SEQ ID NO: 4280181 - DNA, 25 bp, Homo sapien
tgcccacgccactgtcccggcgctg

SEQ ID NO: 4280182 - DNA, 25 bp, Homo sapien
aagcccgctgcccacgccactgtcc

SEQ ID NO: 4280183 - DNA, 25 bp, Homo sapien
gcccgctgcccacgccactgtcccg

SEQ ID NO: 4280184 - DNA, 25 bp, Homo sapien
acacgcagacgtggcctgccaggca

SEQ ID NO: 4280185 - DNA, 25 bp, Homo sapien
tctgcgcgtcccacacgcagacgtg

SEQ ID NO: 4280186 - DNA, 25 bp, Homo sapien
gcgttaggcaatccccggtctgcgc

SEQ ID NO: 4280187 - DNA, 25 bp, Homo sapien
cctgggcgcggaatgcgcgttaggc

SEQ ID NO: 4280188 - DNA, 25 bp, Homo sapien
gccgtcgctggccaggcactcgatg

SEQ ID NO: 4280189 - DNA, 25 bp, Homo sapien
gcatgccgtcgctggccaggcactc

SEQ ID NO: 4280190 - DNA, 25 bp, Homo sapien
atgccgtcgctggccaggcactcga

SEQ ID NO: 4280191 - DNA, 25 bp, Homo sapien
cgtcgctggccaggcactcgatgtc

SEQ ID NO: 4280192 - DNA, 25 bp, Homo sapien
tgttggtatgggccaggctccggcc

SEQ ID NO: 4280193 - DNA, 25 bp, Homo sapien
gttggtatgggccaggctccggccc

SEQ ID NO: 4280194 - DNA, 25 bp, Homo sapien
gtgttggtatgggccaggctccggc

SEQ ID NO: 4280195 - DNA, 25 bp, Homo sapien
ttggtatgggccaggctccggccct

SEQ ID NO: 4280196 - DNA, 25 bp, Homo sapien
agcaccaagacgatgccggtggcca

SEQ ID NO: 4280197 - DNA, 25 bp, Homo sapien
tctcgggtggcgcatagccgtagtc

SEQ ID NO: 4280198 - DNA, 25 bp, Homo sapien
catagcacgcggtagaggcagagca

SEQ ID NO: 4280199 - DNA, 25 bp, Homo sapien
aagcggcacgatctccgtctcgggt

SEQ ID NO: 4280200 - DNA, 25 bp, Homo sapien
cccagcaggtatgggccccggtggg

SEQ ID NO: 4280201 - DNA, 25 bp, Homo sapien
ttgtacagcgtgacgtctccatggg

SEQ ID NO: 4280202 - DNA, 25 bp, Homo sapien
gcgtgacgtctccatgggcctgcac

SEQ ID NO: 4280203 - DNA, 25 bp, Homo sapien
acagcgtgacgtctccatgggcctg

SEQ ID NO: 4280204 - DNA, 25 bp, Homo sapien
ggcactgcggccgtcctgagggtgc

SEQ ID NO: 4280205 - DNA, 25 bp, Homo sapien
tcaggcggagcgtgactgggatgac

SEQ ID NO: 4280206 - DNA, 25 bp, Homo sapien
gatgacgggcagcaggctgatgtac

SEQ ID NO: 4280207 - DNA, 25 bp, Homo sapien
cctccctcgggttcaggcggagcgt

SEQ ID NO: 4280208 - DNA, 25 bp, Homo sapien
gactgggctgtcatggacaacctct

SEQ ID NO: 4280209 - DNA, 25 bp, Homo sapien
taatagctgaagagcgtcggccagt

SEQ ID NO: 4280210 - DNA, 25 bp, Homo sapien
ccagtggcggaaggacaatttcctc

SEQ ID NO: 4280211 - DNA, 25 bp, Homo sapien
atgggctctgttccgtcacctgggc

SEQ ID NO: 4280212 - DNA, 25 bp, Homo sapien
ttatctcctcagaagccactagggt

SEQ ID NO: 4280213 - DNA, 25 bp, Homo sapien
cttctcccacaggcttatctcctca

SEQ ID NO: 4280214 - DNA, 25 bp, Homo sapien
tcccacaggcttatctcctcagaag

SEQ ID NO: 4280215 - DNA, 25 bp, Homo sapien
tctcccacaggcttatctcctcaga

SEQ ID NO: 4280216 - DNA, 25 bp, Homo sapien
gcagggaggacacaacgggcaactc

SEQ ID NO: 4280217 - DNA, 25 bp, Homo sapien
cactctaaggccaagtgcagcacca

SEQ ID NO: 4280218 - DNA, 25 bp, Homo sapien
ctggagcaccggccctccagaagag

SEQ ID NO: 4280219 - DNA, 25 bp, Homo sapien
tgcagcaccacaaggggcctggagc

SEQ ID NO: 4280220 - DNA, 25 bp, Homo sapien
catgatgaggcgctgtgccaggcgg

SEQ ID NO: 4280221 - DNA, 25 bp, Homo sapien
ggcgctgtgccaggcgggtgcgggc

SEQ ID NO: 4280222 - DNA, 25 bp, Homo sapien
tgatgaggcgctgtgccaggcgggt

SEQ ID NO: 4280223 - DNA, 25 bp, Homo sapien
atgaggcgctgtgccaggcgggtgc

SEQ ID NO: 4280224 - DNA, 25 bp, Homo sapien
caggaagtagacaacacgcagcctc

SEQ ID NO: 4280225 - DNA, 25 bp, Homo sapien
ttcggaaggaagacggctgcaacgt

SEQ ID NO: 4280226 - DNA, 25 bp, Homo sapien
tggtgtggggtgtggacggcctcac

SEQ ID NO: 4280227 - DNA, 25 bp, Homo sapien
aagtagacaacacgcagcctcttgg

SEQ ID NO: 4280228 - DNA, 25 bp, Homo sapien
cctcagggggcagtcgcttgttcag

SEQ ID NO: 4280229 - DNA, 25 bp, Homo sapien
ggggcagtcgcttgttcaggtctgc

SEQ ID NO: 4280230 - DNA, 25 bp, Homo sapien
ggcctcagggggcagtcgcttgttc

SEQ ID NO: 4280231 - DNA, 25 bp, Homo sapien
cgctcgtagcgcgttggctgtccca

SEQ ID NO: 4280232 - DNA, 25 bp, Homo sapien
tccatccggcgaatgtcaatggaca

SEQ ID NO: 4280233 - DNA, 25 bp, Homo sapien
ctccatccggcgaatgtcaatggac

SEQ ID NO: 4280234 - DNA, 25 bp, Homo sapien
aaggaagaagtcagacaccagcccc

SEQ ID NO: 4280235 - DNA, 25 bp, Homo sapien
tctgagatgtcggtgttgagacctc

SEQ ID NO: 4280236 - DNA, 25 bp, Homo sapien
gatgctggttggtcctcagctcaca

SEQ ID NO: 4280237 - DNA, 25 bp, Homo sapien
caagactgtaccctatcctgcagat

SEQ ID NO: 4280238 - DNA, 25 bp, Homo sapien
gcaactgccccggaacaatgaagag

SEQ ID NO: 4280239 - DNA, 25 bp, Homo sapien
ctggatggcgggcactagggtgaag

SEQ ID NO: 4280240 - DNA, 25 bp, Homo sapien
gatggcgggcactagggtgaagtag

SEQ ID NO: 4280241 - DNA, 25 bp, Homo sapien
cgggcactagggtgaagtagccgat

SEQ ID NO: 4280242 - DNA, 25 bp, Homo sapien
tggcgggcactagggtgaagtagcc

SEQ ID NO: 4280243 - DNA, 25 bp, Homo sapien
gaggatgatgcccagctccgtggcc

SEQ ID NO: 4280244 - DNA, 25 bp, Homo sapien
ccagctccgtggccatgttcttcat

SEQ ID NO: 4280245 - DNA, 25 bp, Homo sapien
tgcccagctccgtggccatgttctt

SEQ ID NO: 4280246 - DNA, 25 bp, Homo sapien
atgatgcccagctccgtggccatgt

SEQ ID NO: 4280247 - DNA, 25 bp, Homo sapien
gatggaccagctctcgctgcttagg

SEQ ID NO: 4280248 - DNA, 25 bp, Homo sapien
atggaccagctctcgctgcttaggc

SEQ ID NO: 4280249 - DNA, 25 bp, Homo sapien
cacatgaaccaggacgaagtacagt

SEQ ID NO: 4280250 - DNA, 25 bp, Homo sapien
cagtggcccactgcatattatgccg

SEQ ID NO: 4280251 - DNA, 25 bp, Homo sapien
gtttgctcacagagcgttaacagca

SEQ ID NO: 4280252 - DNA, 25 bp, Homo sapien
caagagcaagggacatttcaagggc

SEQ ID NO: 4280253 - DNA, 25 bp, Homo sapien
ccggggttgagaccacagacttggt

SEQ ID NO: 4280254 - DNA, 25 bp, Homo sapien
ggtctaccggggttgagaccacaga

SEQ ID NO: 4280255 - DNA, 25 bp, Homo sapien
tcacctccaggtctaccggggttga

SEQ ID NO: 4280256 - DNA, 25 bp, Homo sapien
ttgggcgatccgcagcttcacctcc

SEQ ID NO: 4280257 - DNA, 25 bp, Homo sapien
ccacagacatgagcagcgagctgag

SEQ ID NO: 4280258 - DNA, 25 bp, Homo sapien
catgagcagcgagctgagcactgtg

SEQ ID NO: 4280259 - DNA, 25 bp, Homo sapien
tcccacagacatgagcagcgagctg

SEQ ID NO: 4280260 - DNA, 25 bp, Homo sapien
gggccagcccccacttggacttgac

SEQ ID NO: 4280261 - DNA, 25 bp, Homo sapien
tcacaagggggatgagctcagcgac

SEQ ID NO: 4280262 - DNA, 25 bp, Homo sapien
gtggaccaggctctccgcccgaagg

SEQ ID NO: 4280263 - DNA, 25 bp, Homo sapien
tgagctcagcgacaccaatctcctc

SEQ ID NO: 4280264 - DNA, 25 bp, Homo sapien
cctccttgaagtgcacgtggaccag

SEQ ID NO: 4280265 - DNA, 25 bp, Homo sapien
tgcagaagcatcaggcgggcacgca

SEQ ID NO: 4280266 - DNA, 25 bp, Homo sapien
tggggtgcagaagcatcaggcgggc

SEQ ID NO: 4280267 - DNA, 25 bp, Homo sapien
gtgcagaagcatcaggcgggcacgc

SEQ ID NO: 4280268 - DNA, 25 bp, Homo sapien
gggtgcagaagcatcaggcgggcac

SEQ ID NO: 4280269 - DNA, 25 bp, Homo sapien
ggtgatggtgtaggagaccatcctc

SEQ ID NO: 4280270 - DNA, 25 bp, Homo sapien
ttggcatggtagtgctggaagacca

SEQ ID NO: 4280271 - DNA, 25 bp, Homo sapien
ggtgtaggagaccatcctcttcctg

SEQ ID NO: 4280272 - DNA, 25 bp, Homo sapien
gctcaccccgctgtacttcccagga

SEQ ID NO: 4280273 - DNA, 25 bp, Homo sapien
ctttacaggtctgaagggaacttgt

SEQ ID NO: 4280274 - DNA, 25 bp, Homo sapien
gctggtggatggtcccaatgatgtc

SEQ ID NO: 4280275 - DNA, 25 bp, Homo sapien
gcagcaggtcggtcacttgcagaca

SEQ ID NO: 4280276 - DNA, 25 bp, Homo sapien
tgtcaggatcagcatggaagcgttc

SEQ ID NO: 4280277 - DNA, 25 bp, Homo sapien
gaagtctgcagggttttaggctcgt

SEQ ID NO: 4280278 - DNA, 25 bp, Homo sapien
tgtctctcagcacgtggttccggat

SEQ ID NO: 4280279 - DNA, 25 bp, Homo sapien
ctccaccagttggaatgcccgggac

SEQ ID NO: 4280280 - DNA, 25 bp, Homo sapien
gaatgcccgggacaaaggtgaacga

SEQ ID NO: 4280281 - DNA, 25 bp, Homo sapien
cgaaatacatctactgccaggaggt

SEQ ID NO: 4280282 - DNA, 25 bp, Homo sapien
agtctccacccaacgctctgtgctg

SEQ ID NO: 4280283 - DNA, 25 bp, Homo sapien
tcagaagctgaccaacctcaatctc

SEQ ID NO: 4280284 - DNA, 25 bp, Homo sapien
tccacccaacgctctgtgctggcct

SEQ ID NO: 4280285 - DNA, 25 bp, Homo sapien
gctgttaaagtacatgaattcacaa

SEQ ID NO: 4280286 - DNA, 25 bp, Homo sapien
caggtgggggcgagtaatccttcac

SEQ ID NO: 4280287 - DNA, 25 bp, Homo sapien
tcctgttcctggcaaggggagtttc

SEQ ID NO: 4280288 - DNA, 25 bp, Homo sapien
tccttgtttgcggtcagagtccaca

SEQ ID NO: 4280289 - DNA, 25 bp, Homo sapien
tggtgaattccacaggtcctgttcc

SEQ ID NO: 4280290 - DNA, 25 bp, Homo sapien
agcaggctaagatgcagaaccctgt

SEQ ID NO: 4280291 - DNA, 25 bp, Homo sapien
gcaggctaagatgcagaaccctgtg

SEQ ID NO: 4280292 - DNA, 25 bp, Homo sapien
cagcaggctaagatgcagaaccctg

SEQ ID NO: 4280293 - DNA, 25 bp, Homo sapien
ttctcacgcagcctttcagtcaggg

SEQ ID NO: 4280294 - DNA, 25 bp, Homo sapien
aggagcccatggttgtagaaggccc

SEQ ID NO: 4280295 - DNA, 25 bp, Homo sapien
gaaggcccgagatatcttctcacgc

SEQ ID NO: 4280296 - DNA, 25 bp, Homo sapien
cacgcagcctttcagtcagggtcat

SEQ ID NO: 4280297 - DNA, 25 bp, Homo sapien
ttgctgccatcccggaaagtgacca

SEQ ID NO: 4280298 - DNA, 25 bp, Homo sapien
tgctgccatcccggaaagtgaccat

SEQ ID NO: 4280299 - DNA, 25 bp, Homo sapien
cttgctgccatcccggaaagtgacc

SEQ ID NO: 4280300 - DNA, 25 bp, Homo sapien
ggatcaccctggcacacacttgaca

SEQ ID NO: 4280301 - DNA, 25 bp, Homo sapien
gacaaagaacaacatgtgcaggtac

SEQ ID NO: 4280302 - DNA, 25 bp, Homo sapien
tgacaaagaacaacatgtgcaggta

SEQ ID NO: 4280303 - DNA, 25 bp, Homo sapien
cacacacttgacagcactgacaaag

SEQ ID NO: 4280304 - DNA, 25 bp, Homo sapien
cacagcttacatcacacttgatggt

SEQ ID NO: 4280305 - DNA, 25 bp, Homo sapien
gccacattactagaatgaaggagaa

SEQ ID NO: 4280306 - DNA, 25 bp, Homo sapien
aagacaaggatgccacttctattta

SEQ ID NO: 4280307 - DNA, 25 bp, Homo sapien
tagaaggcaatatcctcaacataat

SEQ ID NO: 4280308 - DNA, 25 bp, Homo sapien
catatgcttcacccactttttgata

SEQ ID NO: 4280309 - DNA, 25 bp, Homo sapien
tatgcttcacccactttttgatagg

SEQ ID NO: 4280310 - DNA, 25 bp, Homo sapien
ccagtgacgacaagcattttttcat

SEQ ID NO: 4280311 - DNA, 25 bp, Homo sapien
tctgatggccagtgacgacaagcat

SEQ ID NO: 4280312 - DNA, 25 bp, Homo sapien
gcacggctgctggacagcgccatgc

SEQ ID NO: 4280313 - DNA, 25 bp, Homo sapien
aacagcttcccggagcaactaggcc

SEQ ID NO: 4280314 - DNA, 25 bp, Homo sapien
caggggatgcgacgccgcgcatctc

SEQ ID NO: 4280315 - DNA, 25 bp, Homo sapien
gggccggccggtgcagggacacggc

SEQ ID NO: 4280316 - DNA, 25 bp, Homo sapien
gctctcggcccgcagtccggtgcgt

SEQ ID NO: 4280317 - DNA, 25 bp, Homo sapien
tcggcccgcagtccggtgcgtggcg

SEQ ID NO: 4280318 - DNA, 25 bp, Homo sapien
cgtgcgcgctctcggcccgcagtcc

SEQ ID NO: 4280319 - DNA, 25 bp, Homo sapien
gcggagcgcggcgtgcgcgctctcg

SEQ ID NO: 4280320 - DNA, 25 bp, Homo sapien
tcttggtcagcaacaagtcaggtag

SEQ ID NO: 4280321 - DNA, 25 bp, Homo sapien
tattagggaacttatggacacaagc

SEQ ID NO: 4280322 - DNA, 25 bp, Homo sapien
gacccgggacttatataccacagga

SEQ ID NO: 4280323 - DNA, 25 bp, Homo sapien
tctagaacaggccagaatgagttgc

SEQ ID NO: 4280324 - DNA, 25 bp, Homo sapien
gtgcaataattgctcactgactgtt

SEQ ID NO: 4280325 - DNA, 25 bp, Homo sapien
tcactgactgttgccttaacttcct

SEQ ID NO: 4280326 - DNA, 25 bp, Homo sapien
taattgctcactgactgttgcctta

SEQ ID NO: 4280327 - DNA, 25 bp, Homo sapien
tgctcactgactgttgccttaactt

SEQ ID NO: 4280328 - DNA, 25 bp, Homo sapien
agaattaagacaccatcagagatga

SEQ ID NO: 4280329 - DNA, 25 bp, Homo sapien
caagggagctttcactcgtggtgga

SEQ ID NO: 4280330 - DNA, 25 bp, Homo sapien
ggtcttgttcaaatagcactgcccc

SEQ ID NO: 4280331 - DNA, 25 bp, Homo sapien
tctgtgcccgcaacaaaaaagaaaa

SEQ ID NO: 4280332 - DNA, 25 bp, Homo sapien
aacttactttattccagccatgatt

SEQ ID NO: 4280333 - DNA, 25 bp, Homo sapien
aaacttactttattccagccatgat

SEQ ID NO: 4280334 - DNA, 25 bp, Homo sapien
gaaacttactttattccagccatga

SEQ ID NO: 4280335 - DNA, 25 bp, Homo sapien
ggaaacttactttattccagccatg

SEQ ID NO: 4280336 - DNA, 25 bp, Homo sapien
gccggtccagcctgaaatattacta

SEQ ID NO: 4280337 - DNA, 25 bp, Homo sapien
aaacagtcctatgtagcttcagctg

SEQ ID NO: 4280338 - DNA, 25 bp, Homo sapien
ttgtcaaccaaaaatgggcagctgg

SEQ ID NO: 4280339 - DNA, 25 bp, Homo sapien
tatcttccacgtccaaaaacagtcc

SEQ ID NO: 4280340 - DNA, 25 bp, Homo sapien
gtggactgcgggctgcgatggtctc

SEQ ID NO: 4280341 - DNA, 25 bp, Homo sapien
tgaagctctgatcccggtggactgc

SEQ ID NO: 4280342 - DNA, 25 bp, Homo sapien
caaaaaaggacacgcttttgtcctg

SEQ ID NO: 4280343 - DNA, 25 bp, Homo sapien
gtcctgtatcttatactggtaagtg

SEQ ID NO: 4280344 - DNA, 25 bp, Homo sapien
tgatagtcagatgtgccatctggta

SEQ ID NO: 4280345 - DNA, 25 bp, Homo sapien
gaggcctctatgagatgatagtcag

SEQ ID NO: 4280346 - DNA, 25 bp, Homo sapien
ccattacagtagtcatattggctca

SEQ ID NO: 4280347 - DNA, 25 bp, Homo sapien
gtaaaataaagcctatcaccagcta

SEQ ID NO: 4280348 - DNA, 25 bp, Homo sapien
catggttttgtacttgcgggctaga

SEQ ID NO: 4280349 - DNA, 25 bp, Homo sapien
ttactgctgactacaatgctctggg

SEQ ID NO: 4280350 - DNA, 25 bp, Homo sapien
tcttattgggtcaggagtgctcaac

SEQ ID NO: 4280351 - DNA, 25 bp, Homo sapien
tgtacattcactacagaggcccagg

SEQ ID NO: 4280352 - DNA, 25 bp, Homo sapien
tgcattccactctagacagctgtct

SEQ ID NO: 4280353 - DNA, 25 bp, Homo sapien
taagagtgccccactttggtcacaa

SEQ ID NO: 4280354 - DNA, 25 bp, Homo sapien
aatagacgacgcctgctgcagtact

SEQ ID NO: 4280355 - DNA, 25 bp, Homo sapien
gctaagcgcaatctggagcaggtct

SEQ ID NO: 4280356 - DNA, 25 bp, Homo sapien
caggcctgactctcccctatgtagt

SEQ ID NO: 4280357 - DNA, 25 bp, Homo sapien
gactctcccctatgtagtcaagaat

SEQ ID NO: 4280358 - DNA, 25 bp, Homo sapien
cacgggcaagaagcctgttgcccag

SEQ ID NO: 4280359 - DNA, 25 bp, Homo sapien
tagtcaagaatcacaggtacacggg

SEQ ID NO: 4280360 - DNA, 25 bp, Homo sapien
tatcagatggctctgatgactgagg

SEQ ID NO: 4280361 - DNA, 25 bp, Homo sapien
tcagcccgcagtatcagatggctct

SEQ ID NO: 4280362 - DNA, 25 bp, Homo sapien
cgcatctccactgtcgtgcacaagg

SEQ ID NO: 4280363 - DNA, 25 bp, Homo sapien
tctccactgtcgtgcacaaggacca

SEQ ID NO: 4280364 - DNA, 25 bp, Homo sapien
gaaggtcaaccctgccaaaaagtga

SEQ ID NO: 4280365 - DNA, 25 bp, Homo sapien
gctgaatctcagagggcaagtagga

SEQ ID NO: 4280366 - DNA, 25 bp, Homo sapien
gcaagtaggagttagccaagccaaa

SEQ ID NO: 4280367 - DNA, 25 bp, Homo sapien
tgtatgggagcacaacgaagaggca

SEQ ID NO: 4280368 - DNA, 25 bp, Homo sapien
aacagtgtggatggcaggttaccag

SEQ ID NO: 4280369 - DNA, 25 bp, Homo sapien
tatgtgcatatactttgagaggccg

SEQ ID NO: 4280370 - DNA, 25 bp, Homo sapien
gcaatggacaacaaaatataccgtg

SEQ ID NO: 4280371 - DNA, 25 bp, Homo sapien
aaaaaagaagtagcgaacagtgtgg

SEQ ID NO: 4280372 - DNA, 25 bp, Homo sapien
tggttcctggctctgcaactgtagc

SEQ ID NO: 4280373 - DNA, 25 bp, Homo sapien
aagttccctgaacagagcttccagg

SEQ ID NO: 4280374 - DNA, 25 bp, Homo sapien
caaaaagagggtggtagcaggtcac

SEQ ID NO: 4280375 - DNA, 25 bp, Homo sapien
gcttccaggcaggactttgcataca

SEQ ID NO: 4280376 - DNA, 25 bp, Homo sapien
ggctttacttttcagcaatggcagg

SEQ ID NO: 4280377 - DNA, 25 bp, Homo sapien
tggggggctttacttttcagcaatg

SEQ ID NO: 4280378 - DNA, 25 bp, Homo sapien
tttacttttcagcaatggcaggtaa

SEQ ID NO: 4280379 - DNA, 25 bp, Homo sapien
gggggctttacttttcagcaatggc

SEQ ID NO: 4280380 - DNA, 25 bp, Homo sapien
cagggtggctgcaaaagctttctgg

SEQ ID NO: 4280381 - DNA, 25 bp, Homo sapien
agggtggctgcaaaagctttctggg

SEQ ID NO: 4280382 - DNA, 25 bp, Homo sapien
gggtggctgcaaaagctttctgggc

SEQ ID NO: 4280383 - DNA, 25 bp, Homo sapien
tgtctgagttcttggaggtcacagg

SEQ ID NO: 4280384 - DNA, 25 bp, Homo sapien
aggtcacaggtgggcgcagagaagg

SEQ ID NO: 4280385 - DNA, 25 bp, Homo sapien
ctgtctgagttcttggaggtcacag

SEQ ID NO: 4280386 - DNA, 25 bp, Homo sapien
acaggtgggcgcagagaaggcagtt

SEQ ID NO: 4280387 - DNA, 25 bp, Homo sapien
ctcccgtacaaactcaaacaatggt

SEQ ID NO: 4280388 - DNA, 25 bp, Homo sapien
tgaatgaagtctagcacagccaccg

SEQ ID NO: 4280389 - DNA, 25 bp, Homo sapien
ctttagttcccagcacacggtggct

SEQ ID NO: 4280390 - DNA, 25 bp, Homo sapien
tccactgtctactggcttcagggcc

SEQ ID NO: 4280391 - DNA, 25 bp, Homo sapien
tggcctcacacccactgcataaggg

SEQ ID NO: 4280392 - DNA, 25 bp, Homo sapien
ttgtagtggacgaagaacagcagcc

SEQ ID NO: 4280393 - DNA, 25 bp, Homo sapien
tgggatgaggtataaccagcccctg

SEQ ID NO: 4280394 - DNA, 25 bp, Homo sapien
gaaaccccaagtcagagatgctaag

SEQ ID NO: 4280395 - DNA, 25 bp, Homo sapien
acgtgttgcttccgggctgggctgt

SEQ ID NO: 4280396 - DNA, 25 bp, Homo sapien
tgccacgtgttgcttccgggctggg

SEQ ID NO: 4280397 - DNA, 25 bp, Homo sapien
ccacgtgttgcttccgggctgggct

SEQ ID NO: 4280398 - DNA, 25 bp, Homo sapien
ctgccacgtgttgcttccgggctgg

SEQ ID NO: 4280399 - DNA, 25 bp, Homo sapien
tgagcctggaagacgacgtccactg

SEQ ID NO: 4280400 - DNA, 25 bp, Homo sapien
tcaaggaacacaagctgcccacgct

SEQ ID NO: 4280401 - DNA, 25 bp, Homo sapien
gacgacgtccactgcagacttgagt

SEQ ID NO: 4280402 - DNA, 25 bp, Homo sapien
gcagacttgagtccctcaaggaaca

SEQ ID NO: 4280403 - DNA, 25 bp, Homo sapien
gaatgcacgccccatgagtgagatg

SEQ ID NO: 4280404 - DNA, 25 bp, Homo sapien
gtttctttagcctattgacatggtg

SEQ ID NO: 4280405 - DNA, 25 bp, Homo sapien
taatgactaggccttgggttttatc

SEQ ID NO: 4280406 - DNA, 25 bp, Homo sapien
gagtgagatgatcccaaagtgttag

SEQ ID NO: 4280407 - DNA, 25 bp, Homo sapien
tgtgatctccaaccaaggaggacga

SEQ ID NO: 4280408 - DNA, 25 bp, Homo sapien
caggtaatgtcccaggctaggtcaa

SEQ ID NO: 4280409 - DNA, 25 bp, Homo sapien
caagaagttcatcggccttttggcc

SEQ ID NO: 4280410 - DNA, 25 bp, Homo sapien
agtgggaggcatccaacttagcagc

SEQ ID NO: 4280411 - DNA, 25 bp, Homo sapien
gatgctaccttagcccttcgagtaa

SEQ ID NO: 4280412 - DNA, 25 bp, Homo sapien
tgctaagttctgtacaatgcaaaca

SEQ ID NO: 4280413 - DNA, 25 bp, Homo sapien
caagctttagaccatgtgtgacaca

SEQ ID NO: 4280414 - DNA, 25 bp, Homo sapien
gaagtctcgaataagacatgctgag

SEQ ID NO: 4280415 - DNA, 25 bp, Homo sapien
cagggacctcatcatggagctccaa

SEQ ID NO: 4280416 - DNA, 25 bp, Homo sapien
catcatggagctccaaaatatttac

SEQ ID NO: 4280417 - DNA, 25 bp, Homo sapien
tcagggacctcatcatggagctcca

SEQ ID NO: 4280418 - DNA, 25 bp, Homo sapien
ggacctcatcatggagctccaaaat

SEQ ID NO: 4280419 - DNA, 25 bp, Homo sapien
gccacaaagcagactttacaattag

SEQ ID NO: 4280420 - DNA, 25 bp, Homo sapien
tactgtagtggctgaaggactggat

SEQ ID NO: 4280421 - DNA, 25 bp, Homo sapien
gcttctgtcccacgatactgtagtg

SEQ ID NO: 4280422 - DNA, 25 bp, Homo sapien
cacgatactgtagtggctgaaggac

SEQ ID NO: 4280423 - DNA, 25 bp, Homo sapien
taggtatcccaacaccaaggcttgg

SEQ ID NO: 4280424 - DNA, 25 bp, Homo sapien
ttattatttctgcacccatcttggg

SEQ ID NO: 4280425 - DNA, 25 bp, Homo sapien
gaaggaacgagatggcctagtaacc

SEQ ID NO: 4280426 - DNA, 25 bp, Homo sapien
taacctgttatcctaataaaatagc

SEQ ID NO: 4280427 - DNA, 25 bp, Homo sapien
tggtgtacaaggaaactcccatctg

SEQ ID NO: 4280428 - DNA, 25 bp, Homo sapien
gagagaaagtggtgtacaaggaaac

SEQ ID NO: 4280429 - DNA, 25 bp, Homo sapien
tggcatcacagagtagagtcagttt

SEQ ID NO: 4280430 - DNA, 25 bp, Homo sapien
atctgtcttggcatcacagagtaga

SEQ ID NO: 4280431 - DNA, 25 bp, Homo sapien
cttaatttctccacctgaagagttt

SEQ ID NO: 4280432 - DNA, 25 bp, Homo sapien
taatttctccacctgaagagtttat

SEQ ID NO: 4280433 - DNA, 25 bp, Homo sapien
ttaatttctccacctgaagagttta

SEQ ID NO: 4280434 - DNA, 25 bp, Homo sapien
atttctccacctgaagagtttattt

SEQ ID NO: 4280435 - DNA, 25 bp, Homo sapien
tgcggtggcgagatctcgggtcact

SEQ ID NO: 4280436 - DNA, 25 bp, Homo sapien
gccagacttgtctcgaactcttgac

SEQ ID NO: 4280437 - DNA, 25 bp, Homo sapien
gagtgcggtggcgagatctcgggtc

SEQ ID NO: 4280438 - DNA, 25 bp, Homo sapien
gcggtggcgagatctcgggtcactg

SEQ ID NO: 4280439 - DNA, 25 bp, Homo sapien
ccaccgcgcccggccgcttcccagg

SEQ ID NO: 4280440 - DNA, 25 bp, Homo sapien
ttagatgatgcacccgcctcggcct

SEQ ID NO: 4280441 - DNA, 25 bp, Homo sapien
cttagatgatgcacccgcctcggcc

SEQ ID NO: 4280442 - DNA, 25 bp, Homo sapien
tcccagggacttttaaggacacgca

SEQ ID NO: 4280443 - DNA, 25 bp, Homo sapien
cagaagcccactttcggcgggccca

SEQ ID NO: 4280444 - DNA, 25 bp, Homo sapien
cgttgagaatatgcgagatggccca

SEQ ID NO: 4280445 - DNA, 25 bp, Homo sapien
agccgttgagaatatgcgagatggc

SEQ ID NO: 4280446 - DNA, 25 bp, Homo sapien
gaatatgcgagatggcccagaagcc

SEQ ID NO: 4280447 - DNA, 25 bp, Homo sapien
taagcaggttattaagttccacgaa

SEQ ID NO: 4280448 - DNA, 25 bp, Homo sapien
tgttaagcaggttattaagttccac

SEQ ID NO: 4280449 - DNA, 25 bp, Homo sapien
ctgtcgggggtggtgttaagcaggt

SEQ ID NO: 4280450 - DNA, 25 bp, Homo sapien
tggtgttaagcaggttattaagttc

SEQ ID NO: 4280451 - DNA, 25 bp, Homo sapien
aggagaacccggagtgctgcagaga

SEQ ID NO: 4280452 - DNA, 25 bp, Homo sapien
aacccggagtgctgcagagacgacg

SEQ ID NO: 4280453 - DNA, 25 bp, Homo sapien
agctcctgggactagcgctctggag

SEQ ID NO: 4280454 - DNA, 25 bp, Homo sapien
ggactagcgctctggaggagaaccc

SEQ ID NO: 4280455 - DNA, 25 bp, Homo sapien
acgtccgtcgagtcccaggtggtag

SEQ ID NO: 4280456 - DNA, 25 bp, Homo sapien
caaggaagcgcgcatgcgcaatgcc

SEQ ID NO: 4280457 - DNA, 25 bp, Homo sapien
atgggcttctctgtgcgactgccag

SEQ ID NO: 4280458 - DNA, 25 bp, Homo sapien
gcaatgccacttttgcgagccagcc

SEQ ID NO: 4280459 - DNA, 25 bp, Homo sapien
tctgcagttcccatagctccttctg

SEQ ID NO: 4280460 - DNA, 25 bp, Homo sapien
cagtagtgggtgactgggctgcagc

SEQ ID NO: 4280461 - DNA, 25 bp, Homo sapien
agcaggcagcgacggtctcagcaga

SEQ ID NO: 4280462 - DNA, 25 bp, Homo sapien
ggcagccacacttccgatggctctg

SEQ ID NO: 4280463 - DNA, 25 bp, Homo sapien
agtgcatgttttagaccagccactg

SEQ ID NO: 4280464 - DNA, 25 bp, Homo sapien
gcacctggccgccagtgcatgtttt

SEQ ID NO: 4280465 - DNA, 25 bp, Homo sapien
gccgccagtgcatgttttagaccag

SEQ ID NO: 4280466 - DNA, 25 bp, Homo sapien
cctggccgccagtgcatgttttaga

SEQ ID NO: 4280467 - DNA, 25 bp, Homo sapien
tggtcatgctctcctccactttttt

SEQ ID NO: 4280468 - DNA, 25 bp, Homo sapien
ggtcatgctctcctccacttttttg

SEQ ID NO: 4280469 - DNA, 25 bp, Homo sapien
tcctgctggtcatgctctcctccac

SEQ ID NO: 4280470 - DNA, 25 bp, Homo sapien
ctggtcatgctctcctccacttttt

SEQ ID NO: 4280471 - DNA, 25 bp, Homo sapien
tgccagaagctagagtccggtgtct

SEQ ID NO: 4280472 - DNA, 25 bp, Homo sapien
tggtggttactcctggcaaccttgt

SEQ ID NO: 4280473 - DNA, 25 bp, Homo sapien
gcaaccttgtcgtggccttggacat

SEQ ID NO: 4280474 - DNA, 25 bp, Homo sapien
gtgaggagcaaagccatggcacttg

SEQ ID NO: 4280475 - DNA, 25 bp, Homo sapien
catggctgcactctcgtatctggag

SEQ ID NO: 4280476 - DNA, 25 bp, Homo sapien
acccagtttttcctgtgagcaccaa

SEQ ID NO: 4280477 - DNA, 25 bp, Homo sapien
gagcaccaaacaggcttgtggaaga

SEQ ID NO: 4280478 - DNA, 25 bp, Homo sapien
gagctacagggattctgactgttct

SEQ ID NO: 4280479 - DNA, 25 bp, Homo sapien
cctaatagtgtgaaattaggagtca

SEQ ID NO: 4280480 - DNA, 25 bp, Homo sapien
aaggaagatggataaatttgactac

SEQ ID NO: 4280481 - DNA, 25 bp, Homo sapien
catattaaaagctgtgcaacccggg

SEQ ID NO: 4280482 - DNA, 25 bp, Homo sapien
ggtggaaacaatgcttcaggaatga

SEQ ID NO: 4280483 - DNA, 25 bp, Homo sapien
gcttctgaactgggctagttcgccc

SEQ ID NO: 4280484 - DNA, 25 bp, Homo sapien
gacaagatattgttaccaaacttag

SEQ ID NO: 4280485 - DNA, 25 bp, Homo sapien
tggtcccatactcccagggggacaa

SEQ ID NO: 4280486 - DNA, 25 bp, Homo sapien
taatcccattaatgatcaccacggg

SEQ ID NO: 4280487 - DNA, 25 bp, Homo sapien
cagcagaagcaatgtacagacagca

SEQ ID NO: 4280488 - DNA, 25 bp, Homo sapien
gaaaaaacaacccaatgtatgcaat

SEQ ID NO: 4280489 - DNA, 25 bp, Homo sapien
aaaaagtcagttgaataacagcaca

SEQ ID NO: 4280490 - DNA, 25 bp, Homo sapien
caagaaatagactctgtacaagagg

SEQ ID NO: 4280491 - DNA, 25 bp, Homo sapien
tctgaagacagttcacatccaagtc

SEQ ID NO: 4280492 - DNA, 25 bp, Homo sapien
ttctgaagacagttcacatccaagt

SEQ ID NO: 4280493 - DNA, 25 bp, Homo sapien
ggacttgagaacctcctggattttg

SEQ ID NO: 4280494 - DNA, 25 bp, Homo sapien
caagtttgggcgacatggagttctg

SEQ ID NO: 4280495 - DNA, 25 bp, Homo sapien
tcaggcaggacttgagaacctcctg

SEQ ID NO: 4280496 - DNA, 25 bp, Homo sapien
ctttgccaccctcaagtttgggcga

SEQ ID NO: 4280497 - DNA, 25 bp, Homo sapien
cacgcgcggccagttgaatggtcaa

SEQ ID NO: 4280498 - DNA, 25 bp, Homo sapien
tgtgctgcctgctaccaagtttgac

SEQ ID NO: 4280499 - DNA, 25 bp, Homo sapien
cagaggcccagattaaggaggacaa

SEQ ID NO: 4280500 - DNA, 25 bp, Homo sapien
gatgccatgaaggtgggctcccaga

SEQ ID NO: 4280501 - DNA, 25 bp, Homo sapien
ggctgtgtagccaagccctccaaga

SEQ ID NO: 4280502 - DNA, 25 bp, Homo sapien
ctgtgtagccaagccctccaagagg

SEQ ID NO: 4280503 - DNA, 25 bp, Homo sapien
cggctgtgtagccaagccctccaag

SEQ ID NO: 4280504 - DNA, 25 bp, Homo sapien
tgtagccaagccctccaagaggagc

SEQ ID NO: 4280505 - DNA, 25 bp, Homo sapien
ctgacagataacgttatcatagtga

SEQ ID NO: 4280506 - DNA, 25 bp, Homo sapien
catagtgagccaaggcacgggcatg

SEQ ID NO: 4280507 - DNA, 25 bp, Homo sapien
taacgttatcatagtgagccaaggc

SEQ ID NO: 4280508 - DNA, 25 bp, Homo sapien
ttatcatagtgagccaaggcacggg

SEQ ID NO: 4280509 - DNA, 25 bp, Homo sapien
gagagccctcggcaatggtggagag

SEQ ID NO: 4280510 - DNA, 25 bp, Homo sapien
agggagaagttatcattgtggagct

SEQ ID NO: 4280511 - DNA, 25 bp, Homo sapien
gggtgagagccctcggcaatggtgg

SEQ ID NO: 4280512 - DNA, 25 bp, Homo sapien
agttatcattgtggagctcagatgg

SEQ ID NO: 4280513 - DNA, 25 bp, Homo sapien
tgccagaaaccctcacgacaaagtc

SEQ ID NO: 4280514 - DNA, 25 bp, Homo sapien
gtgccagaaaccctcacgacaaagt

SEQ ID NO: 4280515 - DNA, 25 bp, Homo sapien
gccagaaaccctcacgacaaagtcc

SEQ ID NO: 4280516 - DNA, 25 bp, Homo sapien
aggtgccagaaaccctcacgacaaa

SEQ ID NO: 4280517 - DNA, 25 bp, Homo sapien
ccagatgtagtcctgcgtgttgcac

SEQ ID NO: 4280518 - DNA, 25 bp, Homo sapien
ggtgatgatggactcgcagcgcatc

SEQ ID NO: 4280519 - DNA, 25 bp, Homo sapien
tcttgagcaggtagagcttcttggc

SEQ ID NO: 4280520 - DNA, 25 bp, Homo sapien
gcagcttggtattctccgtcttgag

SEQ ID NO: 4280521 - DNA, 25 bp, Homo sapien
cagcagcgacattgagaaaccgtgg

SEQ ID NO: 4280522 - DNA, 25 bp, Homo sapien
cattgagaaaccgtggcgatggagc

SEQ ID NO: 4280523 - DNA, 25 bp, Homo sapien
ctgcagcagcgacattgagaaaccg

SEQ ID NO: 4280524 - DNA, 25 bp, Homo sapien
gcgacattgagaaaccgtggcgatg

SEQ ID NO: 4280525 - DNA, 25 bp, Homo sapien
accccaacacctatctccacagcct

SEQ ID NO: 4280526 - DNA, 25 bp, Homo sapien
tgaccccaacacctatctccacagc

SEQ ID NO: 4280527 - DNA, 25 bp, Homo sapien
ccccaacacctatctccacagcctg

SEQ ID NO: 4280528 - DNA, 25 bp, Homo sapien
ctgaccccaacacctatctccacag

SEQ ID NO: 4280529 - DNA, 25 bp, Homo sapien
ttctctgactgctaagtgaccaagg

SEQ ID NO: 4280530 - DNA, 25 bp, Homo sapien
gaggaactgcaatgctccgaatctg

SEQ ID NO: 4280531 - DNA, 25 bp, Homo sapien
taaccgaggtgtagagaaactgagt

SEQ ID NO: 4280532 - DNA, 25 bp, Homo sapien
gcctcaatgaagacacctacaggat

SEQ ID NO: 4280533 - DNA, 25 bp, Homo sapien
tacagctctctagaggcagcaaggg

SEQ ID NO: 4280534 - DNA, 25 bp, Homo sapien
aaatagttttcaagccgtggccagg

SEQ ID NO: 4280535 - DNA, 25 bp, Homo sapien
tgaggagcaaaatcacagggtttcc

SEQ ID NO: 4280536 - DNA, 25 bp, Homo sapien
agtggacacgtggagaagcccttgt

SEQ ID NO: 4280537 - DNA, 25 bp, Homo sapien
aacttgggaagaggtcgcacactga

SEQ ID NO: 4280538 - DNA, 25 bp, Homo sapien
ggcaggagccgttatgccgcacaaa

SEQ ID NO: 4280539 - DNA, 25 bp, Homo sapien
tgcagaaggcccctatgttctccac

SEQ ID NO: 4280540 - DNA, 25 bp, Homo sapien
ccgccattgtgacagtaacttggga

SEQ ID NO: 4280541 - DNA, 25 bp, Homo sapien
tgccggggaccgaccccagagtgtg

SEQ ID NO: 4280542 - DNA, 25 bp, Homo sapien
agggacagcatgccaccgactggtg

SEQ ID NO: 4280543 - DNA, 25 bp, Homo sapien
ggacagcatgccaccgactggtggg

SEQ ID NO: 4280544 - DNA, 25 bp, Homo sapien
accgaccccagagtgtgctgtggag

SEQ ID NO: 4280545 - DNA, 25 bp, Homo sapien
tcccagtgggcactagaagctcatt

SEQ ID NO: 4280546 - DNA, 25 bp, Homo sapien
ttcccagtgggcactagaagctcat

SEQ ID NO: 4280547 - DNA, 25 bp, Homo sapien
ggtagaaatcagattcatcgaaggg

SEQ ID NO: 4280548 - DNA, 25 bp, Homo sapien
tcgtataagtcaagcaggctccagg

SEQ ID NO: 4280549 - DNA, 25 bp, Homo sapien
tgggaagctccccagatctgcgcca

SEQ ID NO: 4280550 - DNA, 25 bp, Homo sapien
tctccctcagtatcagggtggttct

SEQ ID NO: 4280551 - DNA, 25 bp, Homo sapien
tccagtccttcgaagtagtcgatgt

SEQ ID NO: 4280552 - DNA, 25 bp, Homo sapien
tcaatgatatctgatgccggttggg

SEQ ID NO: 4280553 - DNA, 25 bp, Homo sapien
tgaaatgggtaagtcagctctggcc

SEQ ID NO: 4280554 - DNA, 25 bp, Homo sapien
gcccttgagggtcgggtgtgctgcc

SEQ ID NO: 4280555 - DNA, 25 bp, Homo sapien
gattgactgcccgaggacctcgtgg

SEQ ID NO: 4280556 - DNA, 25 bp, Homo sapien
gaagggcctgggcatcgccgctgcc

SEQ ID NO: 4280557 - DNA, 25 bp, Homo sapien
cctggagcgtagctggaagggcctg

SEQ ID NO: 4280558 - DNA, 25 bp, Homo sapien
tcttcccgcgtgtcgttggcaggcg

SEQ ID NO: 4280559 - DNA, 25 bp, Homo sapien
tgaccccagccacccggtacctcta

SEQ ID NO: 4280560 - DNA, 25 bp, Homo sapien
ctagacctggtcaacccagacctcg

SEQ ID NO: 4280561 - DNA, 25 bp, Homo sapien
ggcgggacgtcagggcggcgcgctg

SEQ ID NO: 4280562 - DNA, 25 bp, Homo sapien
ggtcaggcccgctcgcctagacctg

SEQ ID NO: 4280563 - DNA, 25 bp, Homo sapien
tccccgccgccagcgggacccctgc

SEQ ID NO: 4280564 - DNA, 25 bp, Homo sapien
aggaccagcgcggcccccagaaaca

SEQ ID NO: 4280565 - DNA, 25 bp, Homo sapien
agaggccaggaccagcgcggccccc

SEQ ID NO: 4280566 - DNA, 25 bp, Homo sapien
aggccaggaccagcgcggcccccag

SEQ ID NO: 4280567 - DNA, 25 bp, Homo sapien
accagcgcggcccccagaaacagca

SEQ ID NO: 4280568 - DNA, 25 bp, Homo sapien
agacccctcgctggggactaggaga

SEQ ID NO: 4280569 - DNA, 25 bp, Homo sapien
ctcagcccacgatgggcagcgcgag

SEQ ID NO: 4280570 - DNA, 25 bp, Homo sapien
ttaggcggcaggtgcacgggcggga

SEQ ID NO: 4280571 - DNA, 25 bp, Homo sapien
tcccgccccaggtgaacaggcggca

SEQ ID NO: 4280572 - DNA, 25 bp, Homo sapien
ccgccacgcggcaagcacggaggcg

SEQ ID NO: 4280573 - DNA, 25 bp, Homo sapien
cgcagggggcggaagcacgagcccc

SEQ ID NO: 4280574 - DNA, 25 bp, Homo sapien
cgtcgcgggcccagttacccgcagg

SEQ ID NO: 4280575 - DNA, 25 bp, Homo sapien
ggcggggtccagaagagccgcaggg

SEQ ID NO: 4280576 - DNA, 25 bp, Homo sapien
cgcccaggctctaatcggatcagat

SEQ ID NO: 4280577 - DNA, 25 bp, Homo sapien
gtaagaccctccctgggactgcggc

SEQ ID NO: 4280578 - DNA, 25 bp, Homo sapien
gattctgcaccaatcccgtgttccg

SEQ ID NO: 4280579 - DNA, 25 bp, Homo sapien
gatctaatccgttcgcagccaaagc

SEQ ID NO: 4280580 - DNA, 25 bp, Homo sapien
ctggggagcggcctttaatcctggt

SEQ ID NO: 4280581 - DNA, 25 bp, Homo sapien
tccttctagtctccgggcagcctgg

SEQ ID NO: 4280582 - DNA, 25 bp, Homo sapien
ctggtcccttctccgggatacgtcg

SEQ ID NO: 4280583 - DNA, 25 bp, Homo sapien
taatcctggtcccttctccgggata

SEQ ID NO: 4280584 - DNA, 25 bp, Homo sapien
gaccatgtagggctttgcactcacc

SEQ ID NO: 4280585 - DNA, 25 bp, Homo sapien
gcttagtcggcaggaggaaccgcaa

SEQ ID NO: 4280586 - DNA, 25 bp, Homo sapien
aaatgacagttcagggtatcagccc

SEQ ID NO: 4280587 - DNA, 25 bp, Homo sapien
tcaactcgggttgtggctgtcagag

SEQ ID NO: 4280588 - DNA, 25 bp, Homo sapien
tattaattggcagaacagaggacct

SEQ ID NO: 4280589 - DNA, 25 bp, Homo sapien
tgaactaagaccctgattccaaacc

SEQ ID NO: 4280590 - DNA, 25 bp, Homo sapien
ccaagagtacgctagtgaagtggta

SEQ ID NO: 4280591 - DNA, 25 bp, Homo sapien
tcaggacacagaggtagactattaa

SEQ ID NO: 4280592 - DNA, 25 bp, Homo sapien
cagcaacaagaccagactcctggtt

SEQ ID NO: 4280593 - DNA, 25 bp, Homo sapien
caagaccagactcctggttctaggc

SEQ ID NO: 4280594 - DNA, 25 bp, Homo sapien
ccagactcctggttctaggctgcat

SEQ ID NO: 4280595 - DNA, 25 bp, Homo sapien
aacacagcaacaagaccagactcct

SEQ ID NO: 4280596 - DNA, 25 bp, Homo sapien
tacgcgatgtgcctctttacaccat

SEQ ID NO: 4280597 - DNA, 25 bp, Homo sapien
ccattttacgcgatgtgcctcttta

SEQ ID NO: 4280598 - DNA, 25 bp, Homo sapien
gtgaccattttacgcgatgtgcctc

SEQ ID NO: 4280599 - DNA, 25 bp, Homo sapien
tctgtgaccattttacgcgatgtgc

SEQ ID NO: 4280600 - DNA, 25 bp, Homo sapien
caccgcgcacggccaagcaactaag

SEQ ID NO: 4280601 - DNA, 25 bp, Homo sapien
gcgcacggccaagcaactaagtttg

SEQ ID NO: 4280602 - DNA, 25 bp, Homo sapien
ccgcgcacggccaagcaactaagtt

SEQ ID NO: 4280603 - DNA, 25 bp, Homo sapien
cccaccgcgcacggccaagcaacta

SEQ ID NO: 4280604 - DNA, 25 bp, Homo sapien
gagcaggaggcattttccttgtcac

SEQ ID NO: 4280605 - DNA, 25 bp, Homo sapien
gccccaagaaggcaccttagatggt

SEQ ID NO: 4280606 - DNA, 25 bp, Homo sapien
taaggcatggccattttccagaggg

SEQ ID NO: 4280607 - DNA, 25 bp, Homo sapien
tagattaccacagaaccagagcagg

SEQ ID NO: 4280608 - DNA, 25 bp, Homo sapien
acatccttgagaaagtataggaatc

SEQ ID NO: 4280609 - DNA, 25 bp, Homo sapien
catccttgagaaagtataggaatct

SEQ ID NO: 4280610 - DNA, 25 bp, Homo sapien
aagtataggaatctggtgagaccca

SEQ ID NO: 4280611 - DNA, 25 bp, Homo sapien
gtataggaatctggtgagacccagc

SEQ ID NO: 4280612 - DNA, 25 bp, Homo sapien
ccttcgtgaagagcagggcgttcat

SEQ ID NO: 4280613 - DNA, 25 bp, Homo sapien
tatctgtgagtacccaaaagctgtc

SEQ ID NO: 4280614 - DNA, 25 bp, Homo sapien
ctttattagaggcacaccttcgtga

SEQ ID NO: 4280615 - DNA, 25 bp, Homo sapien
caaatgaacagtgggtgaggtaccc

SEQ ID NO: 4280616 - DNA, 25 bp, Homo sapien
cctggccattgtcaaaaggcactgg

SEQ ID NO: 4280617 - DNA, 25 bp, Homo sapien
gacctgaggttacaagggaccacag

SEQ ID NO: 4280618 - DNA, 25 bp, Homo sapien
gggaccacagtatgaaccagaattc

SEQ ID NO: 4280619 - DNA, 25 bp, Homo sapien
ccattttccttctcggactccaggg

SEQ ID NO: 4280620 - DNA, 25 bp, Homo sapien
ttcccgtattccagtactctgatgg

SEQ ID NO: 4280621 - DNA, 25 bp, Homo sapien
tctcctcggttcccgtattccagta

SEQ ID NO: 4280622 - DNA, 25 bp, Homo sapien
tattccagtactctgatggtgacca

SEQ ID NO: 4280623 - DNA, 25 bp, Homo sapien
ctcggttcccgtattccagtactct

SEQ ID NO: 4280624 - DNA, 25 bp, Homo sapien
ggttgacgaaattccactccctggc

SEQ ID NO: 4280625 - DNA, 25 bp, Homo sapien
ctttgaaaaccctgtgatagatgga

SEQ ID NO: 4280626 - DNA, 25 bp, Homo sapien
ctcagaggcctcactagggaataaa

SEQ ID NO: 4280627 - DNA, 25 bp, Homo sapien
tggaatggcattctaccctcccagc

SEQ ID NO: 4280628 - DNA, 25 bp, Homo sapien
cttgagtgttggctgaggacccaac

SEQ ID NO: 4280629 - DNA, 25 bp, Homo sapien
tgtgtgtggcaaaagtctcaaactt

SEQ ID NO: 4280630 - DNA, 25 bp, Homo sapien
aatgccttaaggtttgtcccctgtg

SEQ ID NO: 4280631 - DNA, 25 bp, Homo sapien
cactccagctcatggtggtgggcgt

SEQ ID NO: 4280632 - DNA, 25 bp, Homo sapien
agcaggaggcggagggaccccatct

SEQ ID NO: 4280633 - DNA, 25 bp, Homo sapien
gggaccccatctgcaggtggtggtg

SEQ ID NO: 4280634 - DNA, 25 bp, Homo sapien
ggagggaccccatctgcaggtggtg

SEQ ID NO: 4280635 - DNA, 25 bp, Homo sapien
gcggagggaccccatctgcaggtgg

SEQ ID NO: 4280636 - DNA, 25 bp, Homo sapien
gcagtccttcgatttttggcccaaa

SEQ ID NO: 4280637 - DNA, 25 bp, Homo sapien
gcagttgctgacaaactggatagtc

SEQ ID NO: 4280638 - DNA, 25 bp, Homo sapien
tttttggcccaaactaggtcatgtc

SEQ ID NO: 4280639 - DNA, 25 bp, Homo sapien
cagctcctgaactgcagtccttcga

SEQ ID NO: 4280640 - DNA, 25 bp, Homo sapien
tggctgcatttcagcatcatcctca

SEQ ID NO: 4280641 - DNA, 25 bp, Homo sapien
acctactactggctgcatttcagca

SEQ ID NO: 4280642 - DNA, 25 bp, Homo sapien
ctgacctactactggctgcatttca

SEQ ID NO: 4280643 - DNA, 25 bp, Homo sapien
agcatcatcctcactgggaaggcct

SEQ ID NO: 4280644 - DNA, 25 bp, Homo sapien
cctgtatccacaaaaggctgctgta

SEQ ID NO: 4280645 - DNA, 25 bp, Homo sapien
gagagtcataacaagacaggcttaa

SEQ ID NO: 4280646 - DNA, 25 bp, Homo sapien
tggccccaatgctgacagtgcatgc

SEQ ID NO: 4280647 - DNA, 25 bp, Homo sapien
aaaccaccaccagtagctctacatg

SEQ ID NO: 4280648 - DNA, 25 bp, Homo sapien
caaatctcggggagagaacaaagcc

SEQ ID NO: 4280649 - DNA, 25 bp, Homo sapien
catccatggacctgccaaatctcgg

SEQ ID NO: 4280650 - DNA, 25 bp, Homo sapien
ttcccttatctacagccctccagaa

SEQ ID NO: 4280651 - DNA, 25 bp, Homo sapien
gaacggaccctgagataatgcatcc

SEQ ID NO: 4280652 - DNA, 25 bp, Homo sapien
gaatcatgcggcctggcatgtgctg

SEQ ID NO: 4280653 - DNA, 25 bp, Homo sapien
catgcggcctggcatgtgctgcccg

SEQ ID NO: 4280654 - DNA, 25 bp, Homo sapien
atggaacctgggcctggtatctgac

SEQ ID NO: 4280655 - DNA, 25 bp, Homo sapien
tgtgctgcccgggcatcatggaacc

SEQ ID NO: 4280656 - DNA, 25 bp, Homo sapien
caatactgagggacatgaacactaa

SEQ ID NO: 4280657 - DNA, 25 bp, Homo sapien
gttagaacacagtaccaagacagct

SEQ ID NO: 4280658 - DNA, 25 bp, Homo sapien
tgccagccatatggtctgtgtcaca

SEQ ID NO: 4280659 - DNA, 25 bp, Homo sapien
gatgggaccatttgatagctaactg

SEQ ID NO: 4280660 - DNA, 25 bp, Homo sapien
gtctttttgtgcttgtgccgtgtat

SEQ ID NO: 4280661 - DNA, 25 bp, Homo sapien
ttggctaggggcggtggctcctgcc

SEQ ID NO: 4280662 - DNA, 25 bp, Homo sapien
agatgaggtcttggctaggggcggt

SEQ ID NO: 4280663 - DNA, 25 bp, Homo sapien
tgaggtcttggctaggggcggtggc

SEQ ID NO: 4280664 - DNA, 25 bp, Homo sapien
ggcagatgacgaggtcaggcatttg

SEQ ID NO: 4280665 - DNA, 25 bp, Homo sapien
tatgaactctagtttgcggaactgc

SEQ ID NO: 4280666 - DNA, 25 bp, Homo sapien
tggcctcactttggaatcagatgga

SEQ ID NO: 4280667 - DNA, 25 bp, Homo sapien
tagtcttccgtcacgggaggcagca

SEQ ID NO: 4280668 - DNA, 25 bp, Homo sapien
taccatgcagcaaagctatgcggcc

SEQ ID NO: 4280669 - DNA, 25 bp, Homo sapien
cgtgctcgtaattcagcatacttca

SEQ ID NO: 4280670 - DNA, 25 bp, Homo sapien
ttgctgtcgtgctcgtaattcagca

SEQ ID NO: 4280671 - DNA, 25 bp, Homo sapien
taagcaactgctgcctctgttgttc

SEQ ID NO: 4280672 - DNA, 25 bp, Homo sapien
ccatgtggaagttttggcgttcagt

SEQ ID NO: 4280673 - DNA, 25 bp, Homo sapien
gcaagacagggttctaccatggtcc

SEQ ID NO: 4280674 - DNA, 25 bp, Homo sapien
ggttgagggttaccaggaacaagca

SEQ ID NO: 4280675 - DNA, 25 bp, Homo sapien
gagggtaaagcctagcctggttcag

SEQ ID NO: 4280676 - DNA, 25 bp, Homo sapien
catggtcctaatagtctagtgtggg

SEQ ID NO: 4280677 - DNA, 25 bp, Homo sapien
ttatacacaaaatgagcgggtggca

SEQ ID NO: 4280678 - DNA, 25 bp, Homo sapien
taagagaacaggtctccaagctggt

SEQ ID NO: 4280679 - DNA, 25 bp, Homo sapien
gagtccggagagtattttcccaaca

SEQ ID NO: 4280680 - DNA, 25 bp, Homo sapien
gctggttgccaacgatcctgctttc

SEQ ID NO: 4280681 - DNA, 25 bp, Homo sapien
tcaaccaagagagctaccagggact

SEQ ID NO: 4280682 - DNA, 25 bp, Homo sapien
ctctctgtccatgatagtttccagc

SEQ ID NO: 4280683 - DNA, 25 bp, Homo sapien
tcttcaaaatgtcgaagtttgatct

SEQ ID NO: 4280684 - DNA, 25 bp, Homo sapien
tgtcgaagtttgatctctagtttct

SEQ ID NO: 4280685 - DNA, 25 bp, Homo sapien
ccctgatgggccaaagatgaggaca

SEQ ID NO: 4280686 - DNA, 25 bp, Homo sapien
aaggagagggcaaaccaggaccctg

SEQ ID NO: 4280687 - DNA, 25 bp, Homo sapien
tgaggacaggaggtactttgccacc

SEQ ID NO: 4280688 - DNA, 25 bp, Homo sapien
ttcaaaagggctatcaagaaggaga

SEQ ID NO: 4280689 - DNA, 25 bp, Homo sapien
tatgacctttcaggaataactgcct

SEQ ID NO: 4280690 - DNA, 25 bp, Homo sapien
cactgtgctgggtctaaacatcttt

SEQ ID NO: 4280691 - DNA, 25 bp, Homo sapien
gaagccccatgtttggacacttact

SEQ ID NO: 4280692 - DNA, 25 bp, Homo sapien
taagatccttccaactagacaaaaa

SEQ ID NO: 4280693 - DNA, 25 bp, Homo sapien
ttcttcttcccagtatcactttctc

SEQ ID NO: 4280694 - DNA, 25 bp, Homo sapien
agccgctgaggcaagagcagctgct

SEQ ID NO: 4280695 - DNA, 25 bp, Homo sapien
ttctttacatgtatcagtgagttct

SEQ ID NO: 4280696 - DNA, 25 bp, Homo sapien
tggtagccgctgaggcaagagcagc

SEQ ID NO: 4280697 - DNA, 25 bp, Homo sapien
actcacttcactatcctgttccttt

SEQ ID NO: 4280698 - DNA, 25 bp, Homo sapien
tgatttggtatcctcactcacttca

SEQ ID NO: 4280699 - DNA, 25 bp, Homo sapien
tcttgtgctttatcaccttcatccg

SEQ ID NO: 4280700 - DNA, 25 bp, Homo sapien
gctttatcaccttcatccgtttcat

SEQ ID NO: 4280701 - DNA, 25 bp, Homo sapien
catcagggtcggcttccattttttc

SEQ ID NO: 4280702 - DNA, 25 bp, Homo sapien
gaccatcagggtcggcttccatttt

SEQ ID NO: 4280703 - DNA, 25 bp, Homo sapien
gctgaccatcagggtcggcttccat

SEQ ID NO: 4280704 - DNA, 25 bp, Homo sapien
ctgctgaccatcagggtcggcttcc

SEQ ID NO: 4280705 - DNA, 25 bp, Homo sapien
atgaaatgttagataggttaatgac

SEQ ID NO: 4280706 - DNA, 25 bp, Homo sapien
caatgaaatgttagataggttaatg

SEQ ID NO: 4280707 - DNA, 25 bp, Homo sapien
attcacaatgaaatgttagataggt

SEQ ID NO: 4280708 - DNA, 25 bp, Homo sapien
cacaatgaaatgttagataggttaa

SEQ ID NO: 4280709 - DNA, 25 bp, Homo sapien
gagacgtgacttcgcctgctaattt

SEQ ID NO: 4280710 - DNA, 25 bp, Homo sapien
tgttctgtgtcgcaacatggcagag

SEQ ID NO: 4280711 - DNA, 25 bp, Homo sapien
gaacaataatttgcgcagaggactg

SEQ ID NO: 4280712 - DNA, 25 bp, Homo sapien
catggccccgattcctagcaaagga

SEQ ID NO: 4280713 - DNA, 25 bp, Homo sapien
gcttctctggctcatcgggccctgt

SEQ ID NO: 4280714 - DNA, 25 bp, Homo sapien
tactttcttgacatgagcttcaacc

SEQ ID NO: 4280715 - DNA, 25 bp, Homo sapien
tccagaccgtaggtgggatccactt

SEQ ID NO: 4280716 - DNA, 25 bp, Homo sapien
ttcccagaggctcgtgctgcttctt

SEQ ID NO: 4280717 - DNA, 25 bp, Homo sapien
caacatgttccgacactttgttcca

SEQ ID NO: 4280718 - DNA, 25 bp, Homo sapien
tcctgagtacgacttccaacatgtt

SEQ ID NO: 4280719 - DNA, 25 bp, Homo sapien
gcagcagatgccacgcgagggtcca

SEQ ID NO: 4280720 - DNA, 25 bp, Homo sapien
ctgaattctcaaggtatgggtcctc

SEQ ID NO: 4280721 - DNA, 25 bp, Homo sapien
cccagggtttcacggtcacagccat

SEQ ID NO: 4280722 - DNA, 25 bp, Homo sapien
ctggatcgccgcccagggtttcacg

SEQ ID NO: 4280723 - DNA, 25 bp, Homo sapien
ccgcccagggtttcacggtcacagc

SEQ ID NO: 4280724 - DNA, 25 bp, Homo sapien
gatcgccgcccagggtttcacggtc

SEQ ID NO: 4280725 - DNA, 25 bp, Homo sapien
tccacgctgctagggtgaaatatgt

SEQ ID NO: 4280726 - DNA, 25 bp, Homo sapien
gcagtgtctgtcagtgtccaaaaca

SEQ ID NO: 4280727 - DNA, 25 bp, Homo sapien
catacctctaatcataaagctggga

SEQ ID NO: 4280728 - DNA, 25 bp, Homo sapien
tggcgctgaatgtggcccatacaaa

SEQ ID NO: 4280729 - DNA, 25 bp, Homo sapien
tttgcaggcatagcctttatgtcta

SEQ ID NO: 4280730 - DNA, 25 bp, Homo sapien
tctttgcaggcatagcctttatgtc

SEQ ID NO: 4280731 - DNA, 25 bp, Homo sapien
tgcaggcatagcctttatgtctatt

SEQ ID NO: 4280732 - DNA, 25 bp, Homo sapien
caggcatagcctttatgtctattaa

SEQ ID NO: 4280733 - DNA, 25 bp, Homo sapien
aataaaatgctagtcaaagaatctt

SEQ ID NO: 4280734 - DNA, 25 bp, Homo sapien
gactgaaggtaagaggatcgcctga

SEQ ID NO: 4280735 - DNA, 25 bp, Homo sapien
tagtcaaagaatcttagcacacatc

SEQ ID NO: 4280736 - DNA, 25 bp, Homo sapien
aggactgaaggtaagaggatcgcct

SEQ ID NO: 4280737 - DNA, 25 bp, Homo sapien
gagtagaagggtctcctgttcagtc

SEQ ID NO: 4280738 - DNA, 25 bp, Homo sapien
ctccaggagtagaagggtctcctgt

SEQ ID NO: 4280739 - DNA, 25 bp, Homo sapien
tcctgttcagtccattctcttccag

SEQ ID NO: 4280740 - DNA, 25 bp, Homo sapien
tgttcagtccattctcttccagcac

SEQ ID NO: 4280741 - DNA, 25 bp, Homo sapien
tcaagtatacttttcagttctaaaa

SEQ ID NO: 4280742 - DNA, 25 bp, Homo sapien
gctgtatgcagtcgttattaaacct

SEQ ID NO: 4280743 - DNA, 25 bp, Homo sapien
gcctgaactctatctcacatatctg

SEQ ID NO: 4280744 - DNA, 25 bp, Homo sapien
tctgagttcactaacctgtcttctg

SEQ ID NO: 4280745 - DNA, 25 bp, Homo sapien
taaatgtcagtacggagaccaaagt

SEQ ID NO: 4280746 - DNA, 25 bp, Homo sapien
tggagtaaatgtcagtacggagacc

SEQ ID NO: 4280747 - DNA, 25 bp, Homo sapien
gagtaaatgtcagtacggagaccaa

SEQ ID NO: 4280748 - DNA, 25 bp, Homo sapien
atgtcagtacggagaccaaagttct

SEQ ID NO: 4280749 - DNA, 25 bp, Homo sapien
cattgccatgggtctactttccggg

SEQ ID NO: 4280750 - DNA, 25 bp, Homo sapien
tgatcgaagatgcagaggcacaagc

SEQ ID NO: 4280751 - DNA, 25 bp, Homo sapien
tggtaattaacgagtccccactgct

SEQ ID NO: 4280752 - DNA, 25 bp, Homo sapien
gggtatcagctaatacattaaaatg

SEQ ID NO: 4280753 - DNA, 25 bp, Homo sapien
tctccagtcaagttcctccgacaag

SEQ ID NO: 4280754 - DNA, 25 bp, Homo sapien
gacaagcagtgctagttaaatactc

SEQ ID NO: 4280755 - DNA, 25 bp, Homo sapien
aatcataaaatttcgatatgccaag

SEQ ID NO: 4280756 - DNA, 25 bp, Homo sapien
gggtttagacgatacgtgtcaatca

SEQ ID NO: 4280757 - DNA, 25 bp, Homo sapien
aaagcaatggcaaaattcataaggt

SEQ ID NO: 4280758 - DNA, 25 bp, Homo sapien
agcaatggcaaaattcataaggtgg

SEQ ID NO: 4280759 - DNA, 25 bp, Homo sapien
aatggcaaaattcataaggtggaca

SEQ ID NO: 4280760 - DNA, 25 bp, Homo sapien
caatggcaaaattcataaggtggac

SEQ ID NO: 4280761 - DNA, 25 bp, Homo sapien
tagagaatatgtcctagccacaggg

SEQ ID NO: 4280762 - DNA, 25 bp, Homo sapien
catgtcatgtggatttggctctgca

SEQ ID NO: 4280763 - DNA, 25 bp, Homo sapien
tgcagaattggaaactaacacgtgg

SEQ ID NO: 4280764 - DNA, 25 bp, Homo sapien
cacagggttggtaactgatggagcc

SEQ ID NO: 4280765 - DNA, 25 bp, Homo sapien
agagcacgccgttcaatcacatgaa

SEQ ID NO: 4280766 - DNA, 25 bp, Homo sapien
aggaagagcacgccgttcaatcaca

SEQ ID NO: 4280767 - DNA, 25 bp, Homo sapien
gaagagcacgccgttcaatcacatg

SEQ ID NO: 4280768 - DNA, 25 bp, Homo sapien
aagagcacgccgttcaatcacatga

SEQ ID NO: 4280769 - DNA, 25 bp, Homo sapien
cagttataatcaaaccatgatgcat

SEQ ID NO: 4280770 - DNA, 25 bp, Homo sapien
aataatgtgattggtctgctctgtc

SEQ ID NO: 4280771 - DNA, 25 bp, Homo sapien
caaaccatgatgcataactaggaat

SEQ ID NO: 4280772 - DNA, 25 bp, Homo sapien
tgatcgactctgatcacctttggca

SEQ ID NO: 4280773 - DNA, 25 bp, Homo sapien
tacagcacatgagggacactagcag

SEQ ID NO: 4280774 - DNA, 25 bp, Homo sapien
gaagtagctcgcaataaggctcaag

SEQ ID NO: 4280775 - DNA, 25 bp, Homo sapien
tgattgaggtatcgctacagcagaa

SEQ ID NO: 4280776 - DNA, 25 bp, Homo sapien
tagcctgagtaaacaagacgccgtt

SEQ ID NO: 4280777 - DNA, 25 bp, Homo sapien
tgtgactgtttcttcatcctgctca

SEQ ID NO: 4280778 - DNA, 25 bp, Homo sapien
gtgactgtttcttcatcctgctcat

SEQ ID NO: 4280779 - DNA, 25 bp, Homo sapien
ctttcctcctgctgtgactgtttct

SEQ ID NO: 4280780 - DNA, 25 bp, Homo sapien
tgctgtgactgtttcttcatcctgc

SEQ ID NO: 4280781 - DNA, 25 bp, Homo sapien
taacaggtgtattttcactatcttt

SEQ ID NO: 4280782 - DNA, 25 bp, Homo sapien
taaccatgacagcaaaacctgatga

SEQ ID NO: 4280783 - DNA, 25 bp, Homo sapien
gctaagaacagaaagttaaagatca

SEQ ID NO: 4280784 - DNA, 25 bp, Homo sapien
cataaccatgacagcaaaacctgat

SEQ ID NO: 4280785 - DNA, 25 bp, Homo sapien
gatcaatatctggacgggcacagtg

SEQ ID NO: 4280786 - DNA, 25 bp, Homo sapien
gaagtactacttcttctatattggg

SEQ ID NO: 4280787 - DNA, 25 bp, Homo sapien
gacttctgcgcttcccataaaggct

SEQ ID NO: 4280788 - DNA, 25 bp, Homo sapien
catatccttggttagatcttcttgc

SEQ ID NO: 4280789 - DNA, 25 bp, Homo sapien
ctatattgggtacaggtgttgggtc

SEQ ID NO: 4280790 - DNA, 25 bp, Homo sapien
gtagaacatatgctcaagatcactt

SEQ ID NO: 4280791 - DNA, 25 bp, Homo sapien
aaagacaaacagtaggtcggtcgcg

SEQ ID NO: 4280792 - DNA, 25 bp, Homo sapien
tttctgaggttgtacaccttcatta

SEQ ID NO: 4280793 - DNA, 25 bp, Homo sapien
taaacaagactgattatagctactg

SEQ ID NO: 4280794 - DNA, 25 bp, Homo sapien
tgggattacaagggcgctcaatcac

SEQ ID NO: 4280795 - DNA, 25 bp, Homo sapien
ctggctcctggcccaaaaagttttg

SEQ ID NO: 4280796 - DNA, 25 bp, Homo sapien
gcctcaggtgatctcaaacttaagc

SEQ ID NO: 4280797 - DNA, 25 bp, Homo sapien
gctcaatcacgcaccggctaatttt

SEQ ID NO: 4280798 - DNA, 25 bp, Homo sapien
gttttaaggttacatgactgcacca

SEQ ID NO: 4280799 - DNA, 25 bp, Homo sapien
tttaaggttacatgactgcaccact

SEQ ID NO: 4280800 - DNA, 25 bp, Homo sapien
ctcagggttttaaggttacatgact

SEQ ID NO: 4280801 - DNA, 25 bp, Homo sapien
gggttttaaggttacatgactgcac

SEQ ID NO: 4280802 - DNA, 25 bp, Homo sapien
ggtagcaatctaaactgcactgtga

SEQ ID NO: 4280803 - DNA, 25 bp, Homo sapien
cagcctgagttctacagtgcagagc

SEQ ID NO: 4280804 - DNA, 25 bp, Homo sapien
aaagctgtctgaaacagcatgctgg

SEQ ID NO: 4280805 - DNA, 25 bp, Homo sapien
ccctttgagggatgacatattggct

SEQ ID NO: 4280806 - DNA, 25 bp, Homo sapien
ttcttccgtgattctgttggtgtcg

SEQ ID NO: 4280807 - DNA, 25 bp, Homo sapien
ggaggcgaaggcgaatgtttcctct

SEQ ID NO: 4280808 - DNA, 25 bp, Homo sapien
tcgagcattagctgatgcttttcta

SEQ ID NO: 4280809 - DNA, 25 bp, Homo sapien
tgtttcctctttcgagcattagctg

SEQ ID NO: 4280810 - DNA, 25 bp, Homo sapien
tcctaaaaattggcaaggcatagtg

SEQ ID NO: 4280811 - DNA, 25 bp, Homo sapien
agacattgcattcagccaagatcat

SEQ ID NO: 4280812 - DNA, 25 bp, Homo sapien
cctaaaaattggcaaggcatagtgg

SEQ ID NO: 4280813 - DNA, 25 bp, Homo sapien
ttaatgatgagaaactgtgccaaag

SEQ ID NO: 4280814 - DNA, 25 bp, Homo sapien
gatgagaaactgtgccaaagaaaat

SEQ ID NO: 4280815 - DNA, 25 bp, Homo sapien
atgatgagaaactgtgccaaagaaa

SEQ ID NO: 4280816 - DNA, 25 bp, Homo sapien
tgagaaactgtgccaaagaaaatac

SEQ ID NO: 4280817 - DNA, 25 bp, Homo sapien
cttcattcttggttgaaatccgctg

SEQ ID NO: 4280818 - DNA, 25 bp, Homo sapien
atccgctgacgaaaactcacaggct

SEQ ID NO: 4280819 - DNA, 25 bp, Homo sapien
gttgaaatccgctgacgaaaactca

SEQ ID NO: 4280820 - DNA, 25 bp, Homo sapien
tcttggttgaaatccgctgacgaaa

SEQ ID NO: 4280821 - DNA, 25 bp, Homo sapien
tcagcatcaacatcattactatgga

SEQ ID NO: 4280822 - DNA, 25 bp, Homo sapien
cattactatggacccaagtatcata

SEQ ID NO: 4280823 - DNA, 25 bp, Homo sapien
tcaacatcattactatggacccaag

SEQ ID NO: 4280824 - DNA, 25 bp, Homo sapien
catcattactatggacccaagtatc

SEQ ID NO: 4280825 - DNA, 25 bp, Homo sapien
tcacttgagctgtcttcatgccact

SEQ ID NO: 4280826 - DNA, 25 bp, Homo sapien
aaagccccaatgcactaacacttgc

SEQ ID NO: 4280827 - DNA, 25 bp, Homo sapien
tctcatcaccggtctcaaccattct

SEQ ID NO: 4280828 - DNA, 25 bp, Homo sapien
ttttctcatcaccggtctcaaccat

SEQ ID NO: 4280829 - DNA, 25 bp, Homo sapien
agccccaatgcactaacacttgctt

SEQ ID NO: 4280830 - DNA, 25 bp, Homo sapien
ggtacctcgccctggaatgatttag

SEQ ID NO: 4280831 - DNA, 25 bp, Homo sapien
tgcagaggcatcacaatagtcaaga

SEQ ID NO: 4280832 - DNA, 25 bp, Homo sapien
aataacataccatgcagagccactg

SEQ ID NO: 4280833 - DNA, 25 bp, Homo sapien
caaaaggtgtgagatgtaagctcgc

SEQ ID NO: 4280834 - DNA, 25 bp, Homo sapien
gaccactgatttctaacctttctcc

SEQ ID NO: 4280835 - DNA, 25 bp, Homo sapien
ttggaccactgatttctaacctttc

SEQ ID NO: 4280836 - DNA, 25 bp, Homo sapien
ttgagaaagatgtttggaccactga

SEQ ID NO: 4280837 - DNA, 25 bp, Homo sapien
tggaccactgatttctaacctttct

SEQ ID NO: 4280838 - DNA, 25 bp, Homo sapien
aatatgggtaaatgtggtgggaagc

SEQ ID NO: 4280839 - DNA, 25 bp, Homo sapien
ggtgggaagcttttgacttctcatc

SEQ ID NO: 4280840 - DNA, 25 bp, Homo sapien
catcgtcttgtgaggaagaatatgg

SEQ ID NO: 4280841 - DNA, 25 bp, Homo sapien
ttgacttctcatccgtaaatgttcc

SEQ ID NO: 4280842 - DNA, 25 bp, Homo sapien
caatgtctggaatgaggtagatgtt

SEQ ID NO: 4280843 - DNA, 25 bp, Homo sapien
tagatgttgggtctggtcaaacaat

SEQ ID NO: 4280844 - DNA, 25 bp, Homo sapien
ccaacttcagatcaatgtctggaat

SEQ ID NO: 4280845 - DNA, 25 bp, Homo sapien
gatgtcgtttgatgatatctttcaa

SEQ ID NO: 4280846 - DNA, 25 bp, Homo sapien
tgggttctgtaggtcaaacctccgc

SEQ ID NO: 4280847 - DNA, 25 bp, Homo sapien
cattcgagatgggttctgtaggtca

SEQ ID NO: 4280848 - DNA, 25 bp, Homo sapien
tacgatccattcgagatgggttctg

SEQ ID NO: 4280849 - DNA, 25 bp, Homo sapien
catttccacattacgatccattcga

SEQ ID NO: 4280850 - DNA, 25 bp, Homo sapien
gatccgtttggatttccatgaatag

SEQ ID NO: 4280851 - DNA, 25 bp, Homo sapien
cgtttggatttccatgaataggtca

SEQ ID NO: 4280852 - DNA, 25 bp, Homo sapien
ggagatccgtttggatttccatgaa

SEQ ID NO: 4280853 - DNA, 25 bp, Homo sapien
tttgggagatccgtttggatttcca

SEQ ID NO: 4280854 - DNA, 25 bp, Homo sapien
cactcattgattttacctatttaga

SEQ ID NO: 4280855 - DNA, 25 bp, Homo sapien
aaataagacactcattgattttacc

SEQ ID NO: 4280856 - DNA, 25 bp, Homo sapien
ccataaataagacactcattgattt

SEQ ID NO: 4280857 - DNA, 25 bp, Homo sapien
taagacactcattgattttacctat

SEQ ID NO: 4280858 - DNA, 25 bp, Homo sapien
tgtaagcagccccaagaatgtgaca

SEQ ID NO: 4280859 - DNA, 25 bp, Homo sapien
agaatgtgacataaggcgcctccag

SEQ ID NO: 4280860 - DNA, 25 bp, Homo sapien
cataaggcgcctccagctttgaaat

SEQ ID NO: 4280861 - DNA, 25 bp, Homo sapien
gtaagcagccccaagaatgtgacat

SEQ ID NO: 4280862 - DNA, 25 bp, Homo sapien
gggcaaggcctatccatacatcaag

SEQ ID NO: 4280863 - DNA, 25 bp, Homo sapien
gctggagataggaacaagaaacttc

SEQ ID NO: 4280864 - DNA, 25 bp, Homo sapien
gctcagtagcacaatcacccaaatg

SEQ ID NO: 4280865 - DNA, 25 bp, Homo sapien
gatagaaacggacttgggattggct

SEQ ID NO: 4280866 - DNA, 25 bp, Homo sapien
cctgccatgaggtcagtcatactta

SEQ ID NO: 4280867 - DNA, 25 bp, Homo sapien
atccagttggtgagaattcctgcca

SEQ ID NO: 4280868 - DNA, 25 bp, Homo sapien
gaattcctgccatgaggtcagtcat

SEQ ID NO: 4280869 - DNA, 25 bp, Homo sapien
ccagttggtgagaattcctgccatg

SEQ ID NO: 4280870 - DNA, 25 bp, Homo sapien
ctagagtgcagcagtagtactactg

SEQ ID NO: 4280871 - DNA, 25 bp, Homo sapien
gagaaagagatattgatgggatttc

SEQ ID NO: 4280872 - DNA, 25 bp, Homo sapien
ttgatgggatttcgctctatcactc

SEQ ID NO: 4280873 - DNA, 25 bp, Homo sapien
tactactgtaactcatggcagcctc

SEQ ID NO: 4280874 - DNA, 25 bp, Homo sapien
ctgcactgaagttgatcatatagct

SEQ ID NO: 4280875 - DNA, 25 bp, Homo sapien
tgaagttgatcatatagctttccag

SEQ ID NO: 4280876 - DNA, 25 bp, Homo sapien
gatcatatagctttccagagccttg

SEQ ID NO: 4280877 - DNA, 25 bp, Homo sapien
tatagctttccagagccttgcccac

SEQ ID NO: 4280878 - DNA, 25 bp, Homo sapien
ttatggcataagagctgcatcagga

SEQ ID NO: 4280879 - DNA, 25 bp, Homo sapien
ctcggtacggcgagaggatagggaa

SEQ ID NO: 4280880 - DNA, 25 bp, Homo sapien
ggcataagagctgcatcaggagaaa

SEQ ID NO: 4280881 - DNA, 25 bp, Homo sapien
aagcatggagaagactcggtacggc

SEQ ID NO: 4280882 - DNA, 25 bp, Homo sapien
tctacacgctagcagcagcaaagga

SEQ ID NO: 4280883 - DNA, 25 bp, Homo sapien
tgaggatgcccaaataacagtaagc

SEQ ID NO: 4280884 - DNA, 25 bp, Homo sapien
aaaagtatacagcaactgaggatgc

SEQ ID NO: 4280885 - DNA, 25 bp, Homo sapien
gaaaaaagctggatgctacacctaa

SEQ ID NO: 4280886 - DNA, 25 bp, Homo sapien
tggtaggagcatccgcatgaacata

SEQ ID NO: 4280887 - DNA, 25 bp, Homo sapien
ccgggttggtgacatgcttcccaaa

SEQ ID NO: 4280888 - DNA, 25 bp, Homo sapien
gtgttttattggtaggagcatccgc

SEQ ID NO: 4280889 - DNA, 25 bp, Homo sapien
aaggccgggttggtgacatgcttcc

SEQ ID NO: 4280890 - DNA, 25 bp, Homo sapien
gaaaatgttggcttacttcctagta

SEQ ID NO: 4280891 - DNA, 25 bp, Homo sapien
tttatagatgtctgagacacgctct

SEQ ID NO: 4280892 - DNA, 25 bp, Homo sapien
aaactagtacaatttttgcaggaga

SEQ ID NO: 4280893 - DNA, 25 bp, Homo sapien
cttacgttatgggaaatttatagat

SEQ ID NO: 4280894 - DNA, 25 bp, Homo sapien
tcaaggttaatgtggtatgtctcta

SEQ ID NO: 4280895 - DNA, 25 bp, Homo sapien
ttgccggagctaactttcgaactac

SEQ ID NO: 4280896 - DNA, 25 bp, Homo sapien
gaactaccatccaacatttcaaggt

SEQ ID NO: 4280897 - DNA, 25 bp, Homo sapien
ttatgcataggacaaagggcacaca

SEQ ID NO: 4280898 - DNA, 25 bp, Homo sapien
ctggcccaattaatcttttgatcaa

SEQ ID NO: 4280899 - DNA, 25 bp, Homo sapien
ggcccaattaatcttttgatcaaaa

SEQ ID NO: 4280900 - DNA, 25 bp, Homo sapien
aaaatatttcaagtaagagtcagtg

SEQ ID NO: 4280901 - DNA, 25 bp, Homo sapien
aatatttcaagtaagagtcagtgtg

SEQ ID NO: 4280902 - DNA, 25 bp, Homo sapien
cgtctccgggctctcccaaaacttg

SEQ ID NO: 4280903 - DNA, 25 bp, Homo sapien
gcaccgaatccagctgggacaccgt

SEQ ID NO: 4280904 - DNA, 25 bp, Homo sapien
tgggacaccgtctccgggctctccc

SEQ ID NO: 4280905 - DNA, 25 bp, Homo sapien
agccagacccgcaccgaatccagct

SEQ ID NO: 4280906 - DNA, 25 bp, Homo sapien
atccccgagcccgtggcgcctaccg

SEQ ID NO: 4280907 - DNA, 25 bp, Homo sapien
tgcggctgccgccgcaatccccgag

SEQ ID NO: 4280908 - DNA, 25 bp, Homo sapien
ccgtggcgcctaccgctgtccccgg

SEQ ID NO: 4280909 - DNA, 25 bp, Homo sapien
gccgcaatccccgagcccgtggcgc

SEQ ID NO: 4280910 - DNA, 25 bp, Homo sapien
tgtttcccggtcgttcccgcgcgca

SEQ ID NO: 4280911 - DNA, 25 bp, Homo sapien
gcagcccgtcgtccccacagcctgg

SEQ ID NO: 4280912 - DNA, 25 bp, Homo sapien
cccgcgcgcgtagccgccactgccg

SEQ ID NO: 4280913 - DNA, 25 bp, Homo sapien
cgtcgcagcccgtcgtccccacagc

SEQ ID NO: 4280914 - DNA, 25 bp, Homo sapien
ccactccctcaggggtccagccaca

SEQ ID NO: 4280915 - DNA, 25 bp, Homo sapien
cactccctcaggggtccagccacag

SEQ ID NO: 4280916 - DNA, 25 bp, Homo sapien
ttccactccctcaggggtccagcca

SEQ ID NO: 4280917 - DNA, 25 bp, Homo sapien
tccactccctcaggggtccagccac

SEQ ID NO: 4280918 - DNA, 25 bp, Homo sapien
gattcactgcttcaaaggacttcag

SEQ ID NO: 4280919 - DNA, 25 bp, Homo sapien
caatcttgaacaactgttcacaccc

SEQ ID NO: 4280920 - DNA, 25 bp, Homo sapien
tagttgtcagatcttaacaatcttg

SEQ ID NO: 4280921 - DNA, 25 bp, Homo sapien
aggacttcagaaagtagttgtcaga

SEQ ID NO: 4280922 - DNA, 25 bp, Homo sapien
cgtggttgggggagccgcggctcat

SEQ ID NO: 4280923 - DNA, 25 bp, Homo sapien
ggagccgcggctcatgcgcggtgca

SEQ ID NO: 4280924 - DNA, 25 bp, Homo sapien
ccgtggttgggggagccgcggctca

SEQ ID NO: 4280925 - DNA, 25 bp, Homo sapien
ggctcatgcgcggtgcacagaggct

SEQ ID NO: 4280926 - DNA, 25 bp, Homo sapien
tcccctttcgtgccctcttgaggag

SEQ ID NO: 4280927 - DNA, 25 bp, Homo sapien
tctcccctttcgtgccctcttgagg

SEQ ID NO: 4280928 - DNA, 25 bp, Homo sapien
ctcccctttcgtgccctcttgagga

SEQ ID NO: 4280929 - DNA, 25 bp, Homo sapien
cccctttcgtgccctcttgaggagc

SEQ ID NO: 4280930 - DNA, 25 bp, Homo sapien
ctggcggagagtggggcggagacgc

SEQ ID NO: 4280931 - DNA, 25 bp, Homo sapien
cagcctggcggagagtggggcggag

SEQ ID NO: 4280932 - DNA, 25 bp, Homo sapien
gccggcccggccgatccgtgggcag

SEQ ID NO: 4280933 - DNA, 25 bp, Homo sapien
atcctaggcctgcccgggaagccgg

SEQ ID NO: 4280934 - DNA, 25 bp, Homo sapien
ggtccatgtagaatttcgtttcttc

SEQ ID NO: 4280935 - DNA, 25 bp, Homo sapien
gtaaggcagtttgcccataaggcag

SEQ ID NO: 4280936 - DNA, 25 bp, Homo sapien
tagggtcttgactaggttttatgaa

SEQ ID NO: 4280937 - DNA, 25 bp, Homo sapien
ggttttatgaaagcccagtaaggca

SEQ ID NO: 4280938 - DNA, 25 bp, Homo sapien
tccagtcctcaagactggggagcag

SEQ ID NO: 4280939 - DNA, 25 bp, Homo sapien
aagtcttctttgtgggttgctggac

SEQ ID NO: 4280940 - DNA, 25 bp, Homo sapien
gtgctctccatgttactgaagtctt

SEQ ID NO: 4280941 - DNA, 25 bp, Homo sapien
cagttggggctcattagtgaagagt

SEQ ID NO: 4280942 - DNA, 25 bp, Homo sapien
tcacgatcctcagctgagcgcggtg

SEQ ID NO: 4280943 - DNA, 25 bp, Homo sapien
aacttgagattagtgtgggcagcac

SEQ ID NO: 4280944 - DNA, 25 bp, Homo sapien
gtgccctgtgtaacccattgaatgg

SEQ ID NO: 4280945 - DNA, 25 bp, Homo sapien
cacttgtaaaaggtcgatgaaagca

SEQ ID NO: 4280946 - DNA, 25 bp, Homo sapien
cctgctcccggcaagaataggtgag

SEQ ID NO: 4280947 - DNA, 25 bp, Homo sapien
cgaatggacccttagagtacctgct

SEQ ID NO: 4280948 - DNA, 25 bp, Homo sapien
tagggacaagcatgccctcaccagt

SEQ ID NO: 4280949 - DNA, 25 bp, Homo sapien
gtaaagcttagcgtggcacaggccc

SEQ ID NO: 4280950 - DNA, 25 bp, Homo sapien
ggtggtggtctcagtgcagctctat

SEQ ID NO: 4280951 - DNA, 25 bp, Homo sapien
tacaagttaccgcttagagggagac

SEQ ID NO: 4280952 - DNA, 25 bp, Homo sapien
taatgggctactcgaagttgggtcc

SEQ ID NO: 4280953 - DNA, 25 bp, Homo sapien
gcagagttacatcagaacgcttgga

SEQ ID NO: 4280954 - DNA, 25 bp, Homo sapien
agtcacggctcctggcataattatt

SEQ ID NO: 4280955 - DNA, 25 bp, Homo sapien
atgaaatgaatactatattcaagca

SEQ ID NO: 4280956 - DNA, 25 bp, Homo sapien
tgtacagtatggtgtttcatattca

SEQ ID NO: 4280957 - DNA, 25 bp, Homo sapien
agaatgaaatgaatactatattcaa

SEQ ID NO: 4280958 - DNA, 25 bp, Homo sapien
tcttccaggtttatccatgttttta

SEQ ID NO: 4280959 - DNA, 25 bp, Homo sapien
atgtcttccaggtttatccatgttt

SEQ ID NO: 4280960 - DNA, 25 bp, Homo sapien
tgtctggtttacttagcataatgtc

SEQ ID NO: 4280961 - DNA, 25 bp, Homo sapien
agactccacctccagggctcaagag

SEQ ID NO: 4280962 - DNA, 25 bp, Homo sapien
gggagtgcagacatccctatgagct

SEQ ID NO: 4280963 - DNA, 25 bp, Homo sapien
tccctatgagctgatgatttcattc

SEQ ID NO: 4280964 - DNA, 25 bp, Homo sapien
cagagcagatattgctggaccatat

SEQ ID NO: 4280965 - DNA, 25 bp, Homo sapien
tacccagagcagatattgctggacc

SEQ ID NO: 4280966 - DNA, 25 bp, Homo sapien
tctgtagggattttcgttggacaca

SEQ ID NO: 4280967 - DNA, 25 bp, Homo sapien
tcttgtctgcctgcactttctagta

SEQ ID NO: 4280968 - DNA, 25 bp, Homo sapien
aagatatgtcatttgtaagcaggga

SEQ ID NO: 4280969 - DNA, 25 bp, Homo sapien
ggaggagtgctactggcagctgtaa

SEQ ID NO: 4280970 - DNA, 25 bp, Homo sapien
ttagagaagttgcacggacagctcc

SEQ ID NO: 4280971 - DNA, 25 bp, Homo sapien
aaggtattagagaagttgcacggac

SEQ ID NO: 4280972 - DNA, 25 bp, Homo sapien
tattagagaagttgcacggacagct

SEQ ID NO: 4280973 - DNA, 25 bp, Homo sapien
caaaaaggtattagagaagttgcac

SEQ ID NO: 4280974 - DNA, 25 bp, Homo sapien
gagggaactctgaccactcctgttg

SEQ ID NO: 4280975 - DNA, 25 bp, Homo sapien
tgctctggagtggaggatcctttga

SEQ ID NO: 4280976 - DNA, 25 bp, Homo sapien
tgttgtctacctagagagcacgcca

SEQ ID NO: 4280977 - DNA, 25 bp, Homo sapien
aaacagctgcggagtacacatcaca

SEQ ID NO: 4280978 - DNA, 25 bp, Homo sapien
cctgtcgtcaacctcagcatcctca

SEQ ID NO: 4280979 - DNA, 25 bp, Homo sapien
ctgaggtgtctcctgactacgcaac

SEQ ID NO: 4280980 - DNA, 25 bp, Homo sapien
ggaggcagcaggtactctgggcctg

SEQ ID NO: 4280981 - DNA, 25 bp, Homo sapien
gcagcaggtactctgggcctgtgct

SEQ ID NO: 4280982 - DNA, 25 bp, Homo sapien
ggtgtcaaacctccacaaggcactg

SEQ ID NO: 4280983 - DNA, 25 bp, Homo sapien
tgctgacaaaacactggctccctca

SEQ ID NO: 4280984 - DNA, 25 bp, Homo sapien
cagcctccctgcacatggagatcaa

SEQ ID NO: 4280985 - DNA, 25 bp, Homo sapien
tgttctgcacatggtctctacggag

SEQ ID NO: 4280986 - DNA, 25 bp, Homo sapien
caataagaatctttgtgtcaataca

SEQ ID NO: 4280987 - DNA, 25 bp, Homo sapien
gatgccctctgtgggccttgcctct

SEQ ID NO: 4280988 - DNA, 25 bp, Homo sapien
cctctccagtcagggcataagggaa

SEQ ID NO: 4280989 - DNA, 25 bp, Homo sapien
tacagttcccgggatttctcctcac

SEQ ID NO: 4280990 - DNA, 25 bp, Homo sapien
gacctgatttcctactatctgcatg

SEQ ID NO: 4280991 - DNA, 25 bp, Homo sapien
aggctcccttggacatgagggctta

SEQ ID NO: 4280992 - DNA, 25 bp, Homo sapien
ttacatgtcctagggtgtgggtgcc

SEQ ID NO: 4280993 - DNA, 25 bp, Homo sapien
ttccagacctgatttcctactatct

SEQ ID NO: 4280994 - DNA, 25 bp, Homo sapien
gaatgggacagagatgccaaaacca

SEQ ID NO: 4280995 - DNA, 25 bp, Homo sapien
aatgggacagagatgccaaaaccag

SEQ ID NO: 4280996 - DNA, 25 bp, Homo sapien
ctagggctgaccaccagatcccagg

SEQ ID NO: 4280997 - DNA, 25 bp, Homo sapien
ggctttttatcctagggctgaccac

SEQ ID NO: 4280998 - DNA, 25 bp, Homo sapien
acctgcagaactattttgccagttt

SEQ ID NO: 4280999 - DNA, 25 bp, Homo sapien
gggtggcataaggatatctccgccc

SEQ ID NO: 4281000 - DNA, 25 bp, Homo sapien
tctaacacttactgaggactttcat

SEQ ID NO: 4281001 - DNA, 25 bp, Homo sapien
aaaatgtgacagcagctaggcgggt

SEQ ID NO: 4281002 - DNA, 25 bp, Homo sapien
gaagggagggcatgtcagtttcttt

SEQ ID NO: 4281003 - DNA, 25 bp, Homo sapien
tcagcgtcctgtcaccactcggaat

SEQ ID NO: 4281004 - DNA, 25 bp, Homo sapien
tggcttaagctccacggtcagcgtc

SEQ ID NO: 4281005 - DNA, 25 bp, Homo sapien
tcctccacggagcagtggcgcagtg

SEQ ID NO: 4281006 - DNA, 25 bp, Homo sapien
ggcatttgcccggaacgtcagcctg

SEQ ID NO: 4281007 - DNA, 25 bp, Homo sapien
tgcccggaacgtcagcctgtaggtc

SEQ ID NO: 4281008 - DNA, 25 bp, Homo sapien
ggcgggagacaatgtcggccccgtg

SEQ ID NO: 4281009 - DNA, 25 bp, Homo sapien
cccgtggtcggtgcgggccctggca

SEQ ID NO: 4281010 - DNA, 25 bp, Homo sapien
gagacggaagacgagaccagaatgt

SEQ ID NO: 4281011 - DNA, 25 bp, Homo sapien
ggaagacgagaccagaatgtcatca

SEQ ID NO: 4281012 - DNA, 25 bp, Homo sapien
gacggaagacgagaccagaatgtca

SEQ ID NO: 4281013 - DNA, 25 bp, Homo sapien
gggagacggaagacgagaccagaat

SEQ ID NO: 4281014 - DNA, 25 bp, Homo sapien
ttggtcaccaccccctgacagggtg

SEQ ID NO: 4281015 - DNA, 25 bp, Homo sapien
ggtggccattgaggccactggctga

SEQ ID NO: 4281016 - DNA, 25 bp, Homo sapien
agcttcaggcgctgcctcagagatg

SEQ ID NO: 4281017 - DNA, 25 bp, Homo sapien
gctgtccaaggtctgggcctccctt

SEQ ID NO: 4281018 - DNA, 25 bp, Homo sapien
gacccccccagatgttcctggaagc

SEQ ID NO: 4281019 - DNA, 25 bp, Homo sapien
cctggaagctgatcaaggcttcagt

SEQ ID NO: 4281020 - DNA, 25 bp, Homo sapien
gggcacgaactgagagcctgtggca

SEQ ID NO: 4281021 - DNA, 25 bp, Homo sapien
tatggggggcacgaactgagagcct

SEQ ID NO: 4281022 - DNA, 25 bp, Homo sapien
ggaccctgaccctaactgcatagtt

SEQ ID NO: 4281023 - DNA, 25 bp, Homo sapien
agactgaggggcggtgacaggtgcc

SEQ ID NO: 4281024 - DNA, 25 bp, Homo sapien
tccccagctgtgtctccccagtgac

SEQ ID NO: 4281025 - DNA, 25 bp, Homo sapien
ggtgcctacctgtgaggaccctgac

SEQ ID NO: 4281026 - DNA, 25 bp, Homo sapien
ggtggcccacattatcgagggatcc

SEQ ID NO: 4281027 - DNA, 25 bp, Homo sapien
ggcccacattatcgagggatcccac

SEQ ID NO: 4281028 - DNA, 25 bp, Homo sapien
taggtggcccacattatcgagggat

SEQ ID NO: 4281029 - DNA, 25 bp, Homo sapien
gtaggtggcccacattatcgaggga

SEQ ID NO: 4281030 - DNA, 25 bp, Homo sapien
gccttctccttgaagttcaacttct

SEQ ID NO: 4281031 - DNA, 25 bp, Homo sapien
gactttcaatcttgacatctcctcc

SEQ ID NO: 4281032 - DNA, 25 bp, Homo sapien
tgggccttctccttgaagttcaact

SEQ ID NO: 4281033 - DNA, 25 bp, Homo sapien
tctccttgaagttcaacttctgact

SEQ ID NO: 4281034 - DNA, 25 bp, Homo sapien
tgctgtagacccaggaactaggaca

SEQ ID NO: 4281035 - DNA, 25 bp, Homo sapien
gctgctacagcagtcctactcacaa

SEQ ID NO: 4281036 - DNA, 25 bp, Homo sapien
ccgccctgagggaagagagttttgc

SEQ ID NO: 4281037 - DNA, 25 bp, Homo sapien
caggaactaggacacgaggctgcta

SEQ ID NO: 4281038 - DNA, 25 bp, Homo sapien
ttagaggttagcacccgaactcctg

SEQ ID NO: 4281039 - DNA, 25 bp, Homo sapien
agagatgaaacccttgccagccagc

SEQ ID NO: 4281040 - DNA, 25 bp, Homo sapien
tggcaggacgacataccctggagac

SEQ ID NO: 4281041 - DNA, 25 bp, Homo sapien
actgtggtgtcctgggtagtcttca

SEQ ID NO: 4281042 - DNA, 25 bp, Homo sapien
caggcttgtgcttgatgttagcctt

SEQ ID NO: 4281043 - DNA, 25 bp, Homo sapien
gttagccttagacccacacttggag

SEQ ID NO: 4281044 - DNA, 25 bp, Homo sapien
ggagaccttagagatgtccactttc

SEQ ID NO: 4281045 - DNA, 25 bp, Homo sapien
gacccacacttggaggagaccttag

SEQ ID NO: 4281046 - DNA, 25 bp, Homo sapien
agagagaaggtatactgtcagagcc

SEQ ID NO: 4281047 - DNA, 25 bp, Homo sapien
catctccctaagtacttaaaagagc

SEQ ID NO: 4281048 - DNA, 25 bp, Homo sapien
gagccaaccccatgctaccttttaa

SEQ ID NO: 4281049 - DNA, 25 bp, Homo sapien
caaggtcatctccctaagtacttaa

SEQ ID NO: 4281050 - DNA, 25 bp, Homo sapien
tggtgtcaggaaatatagtcttcac

SEQ ID NO: 4281051 - DNA, 25 bp, Homo sapien
tttggtgtcaggaaatatagtcttc

SEQ ID NO: 4281052 - DNA, 25 bp, Homo sapien
tctttggtgtcaggaaatatagtct

SEQ ID NO: 4281053 - DNA, 25 bp, Homo sapien
ttggtgtcaggaaatatagtcttca

SEQ ID NO: 4281054 - DNA, 25 bp, Homo sapien
gagtctacaatctgcttccaaacga

SEQ ID NO: 4281055 - DNA, 25 bp, Homo sapien
tacattggcactggctcatcactcc

SEQ ID NO: 4281056 - DNA, 25 bp, Homo sapien
tggtcctaggagcaatcacggcatc

SEQ ID NO: 4281057 - DNA, 25 bp, Homo sapien
taactaggatcctgtttggagcctc

SEQ ID NO: 4281058 - DNA, 25 bp, Homo sapien
gctgtacatggcggcttctggtgcc

SEQ ID NO: 4281059 - DNA, 25 bp, Homo sapien
tacatggcggcttctggtgcctctg

SEQ ID NO: 4281060 - DNA, 25 bp, Homo sapien
tgtacatggcggcttctggtgcctc

SEQ ID NO: 4281061 - DNA, 25 bp, Homo sapien
tggcggcttctggtgcctctggcac

SEQ ID NO: 4281062 - DNA, 25 bp, Homo sapien
cacctccagggacatgcttaatatt

SEQ ID NO: 4281063 - DNA, 25 bp, Homo sapien
gactgaatatggctgtagctcactt

SEQ ID NO: 4281064 - DNA, 25 bp, Homo sapien
tccagggacatgcttaatattgtcc

SEQ ID NO: 4281065 - DNA, 25 bp, Homo sapien
cctccagggacatgcttaatattgt

SEQ ID NO: 4281066 - DNA, 25 bp, Homo sapien
tagattcaggctttcgggttgtagc

SEQ ID NO: 4281067 - DNA, 25 bp, Homo sapien
ttgggccggctgttttagtgactgc

SEQ ID NO: 4281068 - DNA, 25 bp, Homo sapien
tcaggctttcgggttgtagcagctg

SEQ ID NO: 4281069 - DNA, 25 bp, Homo sapien
tctgtgcacttgcaattgggccggc

SEQ ID NO: 4281070 - DNA, 25 bp, Homo sapien
gatgcttgatgttttccgtggagcc

SEQ ID NO: 4281071 - DNA, 25 bp, Homo sapien
ctgatgcttgatgttttccgtggag

SEQ ID NO: 4281072 - DNA, 25 bp, Homo sapien
gcttgatgttttccgtggagccaac

SEQ ID NO: 4281073 - DNA, 25 bp, Homo sapien
caggctgatgcttgatgttttccgt

SEQ ID NO: 4281074 - DNA, 25 bp, Homo sapien
gaggtgctctttgggcgactcaagt

SEQ ID NO: 4281075 - DNA, 25 bp, Homo sapien
gtggccttgactcggctgggaacca

SEQ ID NO: 4281076 - DNA, 25 bp, Homo sapien
ccactgagagtggtggttttcttca

SEQ ID NO: 4281077 - DNA, 25 bp, Homo sapien
gagcggacattcttcagatcaggag

SEQ ID NO: 4281078 - DNA, 25 bp, Homo sapien
ctggtacagactttgcagtcatctt

SEQ ID NO: 4281079 - DNA, 25 bp, Homo sapien
tctgcaggttttccctcagtcttaa

SEQ ID NO: 4281080 - DNA, 25 bp, Homo sapien
gcaggttttccctcagtcttaatgg

SEQ ID NO: 4281081 - DNA, 25 bp, Homo sapien
tttgcagtcatcttcttgacttctg

SEQ ID NO: 4281082 - DNA, 25 bp, Homo sapien
tgcaacagtctgagtgctcttggac

SEQ ID NO: 4281083 - DNA, 25 bp, Homo sapien
ggctcctactgcttgggccagttga

SEQ ID NO: 4281084 - DNA, 25 bp, Homo sapien
ttgggccagttgaggcaacagcagc

SEQ ID NO: 4281085 - DNA, 25 bp, Homo sapien
gcttggatggtgaggcccgcttctc

SEQ ID NO: 4281086 - DNA, 25 bp, Homo sapien
ggaacaattttcctcggcacagtag

SEQ ID NO: 4281087 - DNA, 25 bp, Homo sapien
cgcgtccagagtagccatgccaatt

SEQ ID NO: 4281088 - DNA, 25 bp, Homo sapien
ggcacagtagttaggtgaccactta

SEQ ID NO: 4281089 - DNA, 25 bp, Homo sapien
tctgttagcaacaaggatctgtcta

SEQ ID NO: 4281090 - DNA, 25 bp, Homo sapien
ctttggcttcacgtcttttgaaggt

SEQ ID NO: 4281091 - DNA, 25 bp, Homo sapien
cacgtcttttgaaggtaagatggaa

SEQ ID NO: 4281092 - DNA, 25 bp, Homo sapien
cagctggcactaagcctgaagcaag

SEQ ID NO: 4281093 - DNA, 25 bp, Homo sapien
ggcagctggcactaagcctgaagca

SEQ ID NO: 4281094 - DNA, 25 bp, Homo sapien
ttcaacccaccaatggtggtgggag

SEQ ID NO: 4281095 - DNA, 25 bp, Homo sapien
attcaacccaccaatggtggtggga

SEQ ID NO: 4281096 - DNA, 25 bp, Homo sapien
tgtgttttggctttcgatgttgaag

SEQ ID NO: 4281097 - DNA, 25 bp, Homo sapien
gctgtgttttggctttcgatgttga

SEQ ID NO: 4281098 - DNA, 25 bp, Homo sapien
tgggctgtgttttggctttcgatgt

SEQ ID NO: 4281099 - DNA, 25 bp, Homo sapien
agtgggctgtgttttggctttcgat

SEQ ID NO: 4281100 - DNA, 25 bp, Homo sapien
tttgcaggttgagtggtggccaaag

SEQ ID NO: 4281101 - DNA, 25 bp, Homo sapien
ctttgcaggttgagtggtggccaaa

SEQ ID NO: 4281102 - DNA, 25 bp, Homo sapien
ttgcaggttgagtggtggccaaagg

SEQ ID NO: 4281103 - DNA, 25 bp, Homo sapien
taagtactagttatgcatctgaagc

SEQ ID NO: 4281104 - DNA, 25 bp, Homo sapien
ggacaacatgctgaaactacctgta

SEQ ID NO: 4281105 - DNA, 25 bp, Homo sapien
caaattctggcagtttggcacctga

SEQ ID NO: 4281106 - DNA, 25 bp, Homo sapien
gtatcttgatgggacaatagcagcc

SEQ ID NO: 4281107 - DNA, 25 bp, Homo sapien
gaaatttcattcgtgattcaagcaa

SEQ ID NO: 4281108 - DNA, 25 bp, Homo sapien
gcagtagaagataaccaccattctg

SEQ ID NO: 4281109 - DNA, 25 bp, Homo sapien
tataagataatagggtcaaaggctg

SEQ ID NO: 4281110 - DNA, 25 bp, Homo sapien
ggaaggacaataacagctcagaaaa

SEQ ID NO: 4281111 - DNA, 25 bp, Homo sapien
gagctccttgttcggtggggtggtg

SEQ ID NO: 4281112 - DNA, 25 bp, Homo sapien
tcggtggggtggtgatgtcatttcc

SEQ ID NO: 4281113 - DNA, 25 bp, Homo sapien
catttcctgtcccactcaccacagg

SEQ ID NO: 4281114 - DNA, 25 bp, Homo sapien
tgttcggtggggtggtgatgtcatt

SEQ ID NO: 4281115 - DNA, 25 bp, Homo sapien
tgaaatgtggacaagcctcccaagt

SEQ ID NO: 4281116 - DNA, 25 bp, Homo sapien
gaagcagtctaagggacacatgcac

SEQ ID NO: 4281117 - DNA, 25 bp, Homo sapien
tagcaaagacagaccactaactagc

SEQ ID NO: 4281118 - DNA, 25 bp, Homo sapien
ccctagagaccaaagggactctgtc

SEQ ID NO: 4281119 - DNA, 25 bp, Homo sapien
cacacctggctgacaattacttttg

SEQ ID NO: 4281120 - DNA, 25 bp, Homo sapien
tgcactaaccttgtatacctgaaat

SEQ ID NO: 4281121 - DNA, 25 bp, Homo sapien
gattattgcactaaccttgtatacc

SEQ ID NO: 4281122 - DNA, 25 bp, Homo sapien
attacttttgattattgcactaacc

SEQ ID NO: 4281123 - DNA, 25 bp, Homo sapien
ttggttcctagagcccttgcaatgc

SEQ ID NO: 4281124 - DNA, 25 bp, Homo sapien
tagggacttacctgtgtcacccagt

SEQ ID NO: 4281125 - DNA, 25 bp, Homo sapien
aatcccttttggtactgcctgaaag

SEQ ID NO: 4281126 - DNA, 25 bp, Homo sapien
gctgagtgatgctggaaacatagaa

SEQ ID NO: 4281127 - DNA, 25 bp, Homo sapien
gaccaggcctatagcttctgctgag

SEQ ID NO: 4281128 - DNA, 25 bp, Homo sapien
tagaggattacaagacaccagggct

SEQ ID NO: 4281129 - DNA, 25 bp, Homo sapien
tctgaaacctacgaaagtctcctgc

SEQ ID NO: 4281130 - DNA, 25 bp, Homo sapien
gagtggacaacaggaaggcccttat

SEQ ID NO: 4281131 - DNA, 25 bp, Homo sapien
gatgggtagtgaaacagggctcacc

SEQ ID NO: 4281132 - DNA, 25 bp, Homo sapien
tgggtagtgaaacagggctcaccat

SEQ ID NO: 4281133 - DNA, 25 bp, Homo sapien
atgggtagtgaaacagggctcacca

SEQ ID NO: 4281134 - DNA, 25 bp, Homo sapien
ggatgggtagtgaaacagggctcac

SEQ ID NO: 4281135 - DNA, 25 bp, Homo sapien
aattccaggttacaggcctctccag

SEQ ID NO: 4281136 - DNA, 25 bp, Homo sapien
ggtaattccaggttacaggcctctc

SEQ ID NO: 4281137 - DNA, 25 bp, Homo sapien
ttggtaattccaggttacaggcctc

SEQ ID NO: 4281138 - DNA, 25 bp, Homo sapien
ttttggcaatagagaacagattttc

SEQ ID NO: 4281139 - DNA, 25 bp, Homo sapien
tacagcaagctcaaagaagatctta

SEQ ID NO: 4281140 - DNA, 25 bp, Homo sapien
tacttgtgtaactagctgccactgg

SEQ ID NO: 4281141 - DNA, 25 bp, Homo sapien
gaagatcttacttgtgtaactagct

SEQ ID NO: 4281142 - DNA, 25 bp, Homo sapien
ttgtgtaactagctgccactggccc

SEQ ID NO: 4281143 - DNA, 25 bp, Homo sapien
taactccttcaatgaactgtgctct

SEQ ID NO: 4281144 - DNA, 25 bp, Homo sapien
aactgtgctcttctgttgggtcttt

SEQ ID NO: 4281145 - DNA, 25 bp, Homo sapien
gtgctcttctgttgggtctttccat

SEQ ID NO: 4281146 - DNA, 25 bp, Homo sapien
actccttcaatgaactgtgctcttc

SEQ ID NO: 4281147 - DNA, 25 bp, Homo sapien
taaaaagctgcttagtgctctgccg

SEQ ID NO: 4281148 - DNA, 25 bp, Homo sapien
cagattgtgcaacttaatgagagga

SEQ ID NO: 4281149 - DNA, 25 bp, Homo sapien
cagcaagcttccaacacaagggaat

SEQ ID NO: 4281150 - DNA, 25 bp, Homo sapien
cacattatctgtcatgctagcaaga

SEQ ID NO: 4281151 - DNA, 25 bp, Homo sapien
ctgcttgttcccaatggaggcaaaa

SEQ ID NO: 4281152 - DNA, 25 bp, Homo sapien
tctgcttgttcccaatggaggcaaa

SEQ ID NO: 4281153 - DNA, 25 bp, Homo sapien
gtctgcttgttcccaatggaggcaa

SEQ ID NO: 4281154 - DNA, 25 bp, Homo sapien
tgcttgttcccaatggaggcaaaat

SEQ ID NO: 4281155 - DNA, 25 bp, Homo sapien
agtgccgagttccttcttcccagag

SEQ ID NO: 4281156 - DNA, 25 bp, Homo sapien
ttcaaacaggaacgatggagtgctc

SEQ ID NO: 4281157 - DNA, 25 bp, Homo sapien
gagatataatccagcagtgccgagt

SEQ ID NO: 4281158 - DNA, 25 bp, Homo sapien
tcatggagcgcttcatagcaggagc

SEQ ID NO: 4281159 - DNA, 25 bp, Homo sapien
gagttgcttcccttgagcccagaga

SEQ ID NO: 4281160 - DNA, 25 bp, Homo sapien
tcccagatggaactcggaggtcttc

SEQ ID NO: 4281161 - DNA, 25 bp, Homo sapien
taacatatctggtagggatgtcagc

SEQ ID NO: 4281162 - DNA, 25 bp, Homo sapien
tgggtgaacaccatagtgattggcg

SEQ ID NO: 4281163 - DNA, 25 bp, Homo sapien
tccattcggcactctgcaggcttgc

SEQ ID NO: 4281164 - DNA, 25 bp, Homo sapien
ttactgagctgaccgtacgcggcag

SEQ ID NO: 4281165 - DNA, 25 bp, Homo sapien
ttttggttgcccgtccatgctgaca

SEQ ID NO: 4281166 - DNA, 25 bp, Homo sapien
tgccattcgaatccggcttgactga

SEQ ID NO: 4281167 - DNA, 25 bp, Homo sapien
tgctctccctgctttcgctcctgga

SEQ ID NO: 4281168 - DNA, 25 bp, Homo sapien
ttcgctcctggagctctaataccac

SEQ ID NO: 4281169 - DNA, 25 bp, Homo sapien
tctaataccacctacgatcacacag

SEQ ID NO: 4281170 - DNA, 25 bp, Homo sapien
accacctacgatcacacagagcttg

SEQ ID NO: 4281171 - DNA, 25 bp, Homo sapien
aaaattatgaaagtctggagatggc

SEQ ID NO: 4281172 - DNA, 25 bp, Homo sapien
catggtgatcacaattgtggtccca

SEQ ID NO: 4281173 - DNA, 25 bp, Homo sapien
tataattaagtatgtacaatatgtg

SEQ ID NO: 4281174 - DNA, 25 bp, Homo sapien
tgggcatggtgatcacaattgtggt

SEQ ID NO: 4281175 - DNA, 25 bp, Homo sapien
ttctatccataaacagcagactgca

SEQ ID NO: 4281176 - DNA, 25 bp, Homo sapien
tttagttctggccagcctacccaga

SEQ ID NO: 4281177 - DNA, 25 bp, Homo sapien
tacaggtctctgctaccttcagata

SEQ ID NO: 4281178 - DNA, 25 bp, Homo sapien
aaatgtgaaccagccaaaagaccaa

SEQ ID NO: 4281179 - DNA, 25 bp, Homo sapien
gacctgatccgttccatcattaaag

SEQ ID NO: 4281180 - DNA, 25 bp, Homo sapien
caacccaagcggtggtgatctggaa

SEQ ID NO: 4281181 - DNA, 25 bp, Homo sapien
tccagattgaccaactgttcccagt

SEQ ID NO: 4281182 - DNA, 25 bp, Homo sapien
tgaagaaagcgcatggattcctgtg

SEQ ID NO: 4281183 - DNA, 25 bp, Homo sapien
ttctcaccataaactgacattccca

SEQ ID NO: 4281184 - DNA, 25 bp, Homo sapien
ccagctgctggtagacagttgatga

SEQ ID NO: 4281185 - DNA, 25 bp, Homo sapien
tagacagttgatgagctcaagcaaa

SEQ ID NO: 4281186 - DNA, 25 bp, Homo sapien
tttcacaccaagagagtttctcacc

SEQ ID NO: 4281187 - DNA, 25 bp, Homo sapien
aagcacacacatttccccatggcag

SEQ ID NO: 4281188 - DNA, 25 bp, Homo sapien
acatttccccatggcaggttcatac

SEQ ID NO: 4281189 - DNA, 25 bp, Homo sapien
cacacatttccccatggcaggttca

SEQ ID NO: 4281190 - DNA, 25 bp, Homo sapien
gcacacacatttccccatggcaggt

SEQ ID NO: 4281191 - DNA, 25 bp, Homo sapien
tgaatgcttagacgcaccactgtgc

SEQ ID NO: 4281192 - DNA, 25 bp, Homo sapien
gagtcgaacacccttggaagcagtc

SEQ ID NO: 4281193 - DNA, 25 bp, Homo sapien
ttttcatggaatcagcaagctcagc

SEQ ID NO: 4281194 - DNA, 25 bp, Homo sapien
aacgtatccgccacctctgaaggag

SEQ ID NO: 4281195 - DNA, 25 bp, Homo sapien
tagagactggctcactcggtatgag

SEQ ID NO: 4281196 - DNA, 25 bp, Homo sapien
tgcctccgtgagatcagccttagtg

SEQ ID NO: 4281197 - DNA, 25 bp, Homo sapien
tttcagaaatccagggagctgcctc

SEQ ID NO: 4281198 - DNA, 25 bp, Homo sapien
taacaccagaagtctgagtcatgcc

SEQ ID NO: 4281199 - DNA, 25 bp, Homo sapien
tctgtacccatagtggtaggctggc

SEQ ID NO: 4281200 - DNA, 25 bp, Homo sapien
cctttcagattgagagggcctactg

SEQ ID NO: 4281201 - DNA, 25 bp, Homo sapien
caaagttctcagctaccagtctggc

SEQ ID NO: 4281202 - DNA, 25 bp, Homo sapien
ccagcccgtggttgagaatatctct

SEQ ID NO: 4281203 - DNA, 25 bp, Homo sapien
ggcccaccacaggaggatgaaccag

SEQ ID NO: 4281204 - DNA, 25 bp, Homo sapien
ttctatatcccaggcctccctgcca

SEQ ID NO: 4281205 - DNA, 25 bp, Homo sapien
tattggtgtgctttctatatcccag

SEQ ID NO: 4281206 - DNA, 25 bp, Homo sapien
caggaggatgaaccagagacccaac

SEQ ID NO: 4281207 - DNA, 25 bp, Homo sapien
ggtctgcaaacttgtttggcttgtg

SEQ ID NO: 4281208 - DNA, 25 bp, Homo sapien
ggggtaccgcaatacatgaagttgg

SEQ ID NO: 4281209 - DNA, 25 bp, Homo sapien
tgacctgcggtcactgggtctgcaa

SEQ ID NO: 4281210 - DNA, 25 bp, Homo sapien
ggaggggtaccgcaatacatgaagt

SEQ ID NO: 4281211 - DNA, 25 bp, Homo sapien
tcaaagagttcattttgttttccta

SEQ ID NO: 4281212 - DNA, 25 bp, Homo sapien
atttgtttcaaagagttcattttgt

SEQ ID NO: 4281213 - DNA, 25 bp, Homo sapien
aatttgtttcaaagagttcattttg

SEQ ID NO: 4281214 - DNA, 25 bp, Homo sapien
ctaatttgtttcaaagagttcattt

SEQ ID NO: 4281215 - DNA, 25 bp, Homo sapien
agctcagaaggttgactgttgcatg

SEQ ID NO: 4281216 - DNA, 25 bp, Homo sapien
gaaggttgactgttgcatggtttcc

SEQ ID NO: 4281217 - DNA, 25 bp, Homo sapien
agaatcctcctcggccggcaagctg

SEQ ID NO: 4281218 - DNA, 25 bp, Homo sapien
gctgcactttttccccgttcctgtg

SEQ ID NO: 4281219 - DNA, 25 bp, Homo sapien
gatttaaattggtatgaggggcaaa

SEQ ID NO: 4281220 - DNA, 25 bp, Homo sapien
catggggcaatatatcgagtaggaa

SEQ ID NO: 4281221 - DNA, 25 bp, Homo sapien
aagatttaaattggtatgaggggca

SEQ ID NO: 4281222 - DNA, 25 bp, Homo sapien
aagggaagaatacatggggcaatat

SEQ ID NO: 4281223 - DNA, 25 bp, Homo sapien
catcctgcagagattctaaatggga

SEQ ID NO: 4281224 - DNA, 25 bp, Homo sapien
taaatgggaatcctcacttattcct

SEQ ID NO: 4281225 - DNA, 25 bp, Homo sapien
ttaattggaactggtgttgcctctg

SEQ ID NO: 4281226 - DNA, 25 bp, Homo sapien
tcatgaaagtaggtgcagctgactg

SEQ ID NO: 4281227 - DNA, 25 bp, Homo sapien
acctcggtttttgtagctagtgcca

SEQ ID NO: 4281228 - DNA, 25 bp, Homo sapien
gccatgtcagtagtcttcagtccca

SEQ ID NO: 4281229 - DNA, 25 bp, Homo sapien
gaggtggagtcacatccttgcccag

SEQ ID NO: 4281230 - DNA, 25 bp, Homo sapien
tctgtgggccatctgacatccttaa

SEQ ID NO: 4281231 - DNA, 25 bp, Homo sapien
ctgccgttggctgaggaggttctgc

SEQ ID NO: 4281232 - DNA, 25 bp, Homo sapien
tggctgaggaggttctgcaacagcc

SEQ ID NO: 4281233 - DNA, 25 bp, Homo sapien
cgttggctgaggaggttctgcaaca

SEQ ID NO: 4281234 - DNA, 25 bp, Homo sapien
gccgttggctgaggaggttctgcaa

SEQ ID NO: 4281235 - DNA, 25 bp, Homo sapien
acagctgtgttgcagggagacatac

SEQ ID NO: 4281236 - DNA, 25 bp, Homo sapien
tggagagtttaaggcttccacagac

SEQ ID NO: 4281237 - DNA, 25 bp, Homo sapien
caaaggactctgagtgtggagagtt

SEQ ID NO: 4281238 - DNA, 25 bp, Homo sapien
agaccacccctgaggtacaacagct

SEQ ID NO: 4281239 - DNA, 25 bp, Homo sapien
ctttcaagggatcattttgtcctgc

SEQ ID NO: 4281240 - DNA, 25 bp, Homo sapien
cattttgtcctgcaaatattgaagt

SEQ ID NO: 4281241 - DNA, 25 bp, Homo sapien
caaatctgccaggtcatcatcatgg

SEQ ID NO: 4281242 - DNA, 25 bp, Homo sapien
gaagtatcagctgtcgcactggagg

SEQ ID NO: 4281243 - DNA, 25 bp, Homo sapien
gcccacgctagagtacagaagcacg

SEQ ID NO: 4281244 - DNA, 25 bp, Homo sapien
cacgatcctaggtaactgcagcttt

SEQ ID NO: 4281245 - DNA, 25 bp, Homo sapien
tgtctgtctacacatctatcaggga

SEQ ID NO: 4281246 - DNA, 25 bp, Homo sapien
cacgcctggcctaagttactccatt

SEQ ID NO: 4281247 - DNA, 25 bp, Homo sapien
ctatttgggtattcctggtaggcca

SEQ ID NO: 4281248 - DNA, 25 bp, Homo sapien
aggatcgaccacttgctcaggttgg

SEQ ID NO: 4281249 - DNA, 25 bp, Homo sapien
gtatcttctggccagttctggctat

SEQ ID NO: 4281250 - DNA, 25 bp, Homo sapien
cagtctggataggatcgaccacttg

SEQ ID NO: 4281251 - DNA, 25 bp, Homo sapien
tctcttcaaggaattcagttggaga

SEQ ID NO: 4281252 - DNA, 25 bp, Homo sapien
tcttcaaggaattcagttggagacc

SEQ ID NO: 4281253 - DNA, 25 bp, Homo sapien
ctcttcaaggaattcagttggagac

SEQ ID NO: 4281254 - DNA, 25 bp, Homo sapien
agcagggaaagagtggaacgtggag

SEQ ID NO: 4281255 - DNA, 25 bp, Homo sapien
gcagggaaagagtggaacgtggagt

SEQ ID NO: 4281256 - DNA, 25 bp, Homo sapien
cagggaaagagtggaacgtggagtt

SEQ ID NO: 4281257 - DNA, 25 bp, Homo sapien
gagaaatgggtacattttcctcacc

SEQ ID NO: 4281258 - DNA, 25 bp, Homo sapien
tcctggagaaggagcatgaaagtct

SEQ ID NO: 4281259 - DNA, 25 bp, Homo sapien
aggagcatgaaagtctgttttttgt

SEQ ID NO: 4281260 - DNA, 25 bp, Homo sapien
ttttaatcagagaaatgggtacatt

SEQ ID NO: 4281261 - DNA, 25 bp, Homo sapien
gactaattctgtcacatatgatcca

SEQ ID NO: 4281262 - DNA, 25 bp, Homo sapien
tacatatcaaaactagactaattct

SEQ ID NO: 4281263 - DNA, 25 bp, Homo sapien
gcatatggctaaacacttaaagtac

SEQ ID NO: 4281264 - DNA, 25 bp, Homo sapien
taaacaagtagcatatctacatatc

SEQ ID NO: 4281265 - DNA, 25 bp, Homo sapien
tgctaaaatagttgtggtaaaatcg

SEQ ID NO: 4281266 - DNA, 25 bp, Homo sapien
cacatgtgagaacatcttagattat

SEQ ID NO: 4281267 - DNA, 25 bp, Homo sapien
gattattagatcaaacaaaggtgac

SEQ ID NO: 4281268 - DNA, 25 bp, Homo sapien
ggtgacaaggaaaatacgtgtatat

SEQ ID NO: 4281269 - DNA, 25 bp, Homo sapien
gattctaattctaacgagctagttt

SEQ ID NO: 4281270 - DNA, 25 bp, Homo sapien
aatatgcaaaatacacgtgattctc

SEQ ID NO: 4281271 - DNA, 25 bp, Homo sapien
tggctatgagcacagttaaatctct

SEQ ID NO: 4281272 - DNA, 25 bp, Homo sapien
gataactggtgaattgaatactgac

SEQ ID NO: 4281273 - DNA, 25 bp, Homo sapien
tcctcctgcctcaacatatggagta

SEQ ID NO: 4281274 - DNA, 25 bp, Homo sapien
agataggtagggtctcagctctgtt

SEQ ID NO: 4281275 - DNA, 25 bp, Homo sapien
ttgagataggtagggtctcagctct

SEQ ID NO: 4281276 - DNA, 25 bp, Homo sapien
gttgtgatcataattcactgcagtc

SEQ ID NO: 4281277 - DNA, 25 bp, Homo sapien
ggcagaaaaattgcttgaactttgg

SEQ ID NO: 4281278 - DNA, 25 bp, Homo sapien
gcagaaaaattgcttgaactttgga

SEQ ID NO: 4281279 - DNA, 25 bp, Homo sapien
ttgtttccttatcattaaggacaat

SEQ ID NO: 4281280 - DNA, 25 bp, Homo sapien
tttgtttccttatcattaaggacaa

SEQ ID NO: 4281281 - DNA, 25 bp, Homo sapien
ctttgtttccttatcattaaggaca

SEQ ID NO: 4281282 - DNA, 25 bp, Homo sapien
gaagttaccttatctgattcccaga

SEQ ID NO: 4281283 - DNA, 25 bp, Homo sapien
gcagcactggttcaataaaagtttc

SEQ ID NO: 4281284 - DNA, 25 bp, Homo sapien
tgacctgcagcaactcagcaaacat

SEQ ID NO: 4281285 - DNA, 25 bp, Homo sapien
tagcagctcacagacaccgattctg

SEQ ID NO: 4281286 - DNA, 25 bp, Homo sapien
tgttccccataactgcttagcattt

SEQ ID NO: 4281287 - DNA, 25 bp, Homo sapien
gaagagatctgtgatatgatggtta

SEQ ID NO: 4281288 - DNA, 25 bp, Homo sapien
caaatttccttagttctcactcaac

SEQ ID NO: 4281289 - DNA, 25 bp, Homo sapien
tctctctgcaactggacaaaccaga

SEQ ID NO: 4281290 - DNA, 25 bp, Homo sapien
ttttttgttgagctctagaagttat

SEQ ID NO: 4281291 - DNA, 25 bp, Homo sapien
ttttcatatagcctaatttatctgt

SEQ ID NO: 4281292 - DNA, 25 bp, Homo sapien
ttgttgagctctagaagttatttac

SEQ ID NO: 4281293 - DNA, 25 bp, Homo sapien
gttgagctctagaagttatttacat

SEQ ID NO: 4281294 - DNA, 25 bp, Homo sapien
agacttaagcccactttgcccacag

SEQ ID NO: 4281295 - DNA, 25 bp, Homo sapien
actgagaggcattctatacaggtcc

SEQ ID NO: 4281296 - DNA, 25 bp, Homo sapien
taaccaagatactcaggtagtgaac

SEQ ID NO: 4281297 - DNA, 25 bp, Homo sapien
tgcaaagcccttgcctcaatatgga

SEQ ID NO: 4281298 - DNA, 25 bp, Homo sapien
gaaactaacattctgtgcctgctgg

SEQ ID NO: 4281299 - DNA, 25 bp, Homo sapien
aaatctgtgctttaaacctgagaac

SEQ ID NO: 4281300 - DNA, 25 bp, Homo sapien
gaccagtcctgtgtctttgcctaga

SEQ ID NO: 4281301 - DNA, 25 bp, Homo sapien
gccaggtttcacttcgcatcaggga

SEQ ID NO: 4281302 - DNA, 25 bp, Homo sapien
cgtccaagtgaaacagatagagcta

SEQ ID NO: 4281303 - DNA, 25 bp, Homo sapien
gggtgtgaccactatggcaatacag

SEQ ID NO: 4281304 - DNA, 25 bp, Homo sapien
gatactggaccacttgggtgtgacc

SEQ ID NO: 4281305 - DNA, 25 bp, Homo sapien
caaagcagccctgaccagtctggct

SEQ ID NO: 4281306 - DNA, 25 bp, Homo sapien
tacagggactggttacgagcaatag

SEQ ID NO: 4281307 - DNA, 25 bp, Homo sapien
tttgtcagagaatccagcccttgtg

SEQ ID NO: 4281308 - DNA, 25 bp, Homo sapien
tacacaacggaaagtcatacccagg

SEQ ID NO: 4281309 - DNA, 25 bp, Homo sapien
taaattccggaagtcgctgcaagga

SEQ ID NO: 4281310 - DNA, 25 bp, Homo sapien
catcagcagaaataggccccgaaga

SEQ ID NO: 4281311 - DNA, 25 bp, Homo sapien
ataggccccgaagaactaccctcag

SEQ ID NO: 4281312 - DNA, 25 bp, Homo sapien
gcagaaataggccccgaagaactac

SEQ ID NO: 4281313 - DNA, 25 bp, Homo sapien
tttcttctacatcatgtccaggaat

SEQ ID NO: 4281314 - DNA, 25 bp, Homo sapien
tagaagtataacgatgcttaggaaa

SEQ ID NO: 4281315 - DNA, 25 bp, Homo sapien
tgaaggttttagaagtataacgatg

SEQ ID NO: 4281316 - DNA, 25 bp, Homo sapien
gaagtataacgatgcttaggaaaga

SEQ ID NO: 4281317 - DNA, 25 bp, Homo sapien
ggttttagaagtataacgatgctta

SEQ ID NO: 4281318 - DNA, 25 bp, Homo sapien
actggtctggtgttgcagcagcccc

SEQ ID NO: 4281319 - DNA, 25 bp, Homo sapien
cactggtctggtgttgcagcagccc

SEQ ID NO: 4281320 - DNA, 25 bp, Homo sapien
tcactggtctggtgttgcagcagcc

SEQ ID NO: 4281321 - DNA, 25 bp, Homo sapien
cctgctacacagagtttgagtctct

SEQ ID NO: 4281322 - DNA, 25 bp, Homo sapien
gcagcggtaagcacctgctacacag

SEQ ID NO: 4281323 - DNA, 25 bp, Homo sapien
actaaggcctggcagcggtaagcac

SEQ ID NO: 4281324 - DNA, 25 bp, Homo sapien
tctattctgtactactaaggcctgg

SEQ ID NO: 4281325 - DNA, 25 bp, Homo sapien
cattggctaggagtgttggtttaga

SEQ ID NO: 4281326 - DNA, 25 bp, Homo sapien
tactccatgaccaccattggctagg

SEQ ID NO: 4281327 - DNA, 25 bp, Homo sapien
gaccaccattggctaggagtgttgg

SEQ ID NO: 4281328 - DNA, 25 bp, Homo sapien
tgtagtatcgctcccttctactcca

SEQ ID NO: 4281329 - DNA, 25 bp, Homo sapien
aaataaggtaatatgagccctccaa

SEQ ID NO: 4281330 - DNA, 25 bp, Homo sapien
aggaagatgaaaagaaaggctggca

SEQ ID NO: 4281331 - DNA, 25 bp, Homo sapien
ctggcagggtgtgggggtagtggga

SEQ ID NO: 4281332 - DNA, 25 bp, Homo sapien
gaagatgaaaagaaaggctggcagg

SEQ ID NO: 4281333 - DNA, 25 bp, Homo sapien
agaggaagatgaaaagaaaggctgg

SEQ ID NO: 4281334 - DNA, 25 bp, Homo sapien
gctagtttctgagcacggtttcttc

SEQ ID NO: 4281335 - DNA, 25 bp, Homo sapien
tctagtgtggcaatgaagtcccgct

SEQ ID NO: 4281336 - DNA, 25 bp, Homo sapien
taatgcatctgcaagactgaggtca

SEQ ID NO: 4281337 - DNA, 25 bp, Homo sapien
tccaggagaggaatatagtctgttt

SEQ ID NO: 4281338 - DNA, 25 bp, Homo sapien
ttcagtcctgactaaatgcattttg

SEQ ID NO: 4281339 - DNA, 25 bp, Homo sapien
ccaggcagcttgtgttcagtcctga

SEQ ID NO: 4281340 - DNA, 25 bp, Homo sapien
gatcaggcacctgccttcaacattt

SEQ ID NO: 4281341 - DNA, 25 bp, Homo sapien
tgcattttggatcaggcacctgcct

SEQ ID NO: 4281342 - DNA, 25 bp, Homo sapien
caaaaagtaattccaggtggatggc

SEQ ID NO: 4281343 - DNA, 25 bp, Homo sapien
gatggcagccctaaatgtgaacggt

SEQ ID NO: 4281344 - DNA, 25 bp, Homo sapien
tgaaacggaaccacatgcatatgga

SEQ ID NO: 4281345 - DNA, 25 bp, Homo sapien
gaatttgaatacagcctcggcaagg

SEQ ID NO: 4281346 - DNA, 25 bp, Homo sapien
ttgactctcttcatgtcgacaaaat

SEQ ID NO: 4281347 - DNA, 25 bp, Homo sapien
ccagtcacctctgtttgcaaaaaga

SEQ ID NO: 4281348 - DNA, 25 bp, Homo sapien
tgacttaatagtaaatgacaagcac

SEQ ID NO: 4281349 - DNA, 25 bp, Homo sapien
aaaatgtgatttcatatggcttgac

SEQ ID NO: 4281350 - DNA, 25 bp, Homo sapien
cactgatacataactgttaactaga

SEQ ID NO: 4281351 - DNA, 25 bp, Homo sapien
gacactgatacataactgttaacta

SEQ ID NO: 4281352 - DNA, 25 bp, Homo sapien
tgatacataactgttaactagacta

SEQ ID NO: 4281353 - DNA, 25 bp, Homo sapien
gtctcatgtatagatttttataacc

SEQ ID NO: 4281354 - DNA, 25 bp, Homo sapien
tatactaagtgctctcacaaacaaa

SEQ ID NO: 4281355 - DNA, 25 bp, Homo sapien
aaaatatttgtgttacatgtactac

SEQ ID NO: 4281356 - DNA, 25 bp, Homo sapien
aatgagtccaggacacaaactcttc

SEQ ID NO: 4281357 - DNA, 25 bp, Homo sapien
caaaaggcaaataacggagtagaag

SEQ ID NO: 4281358 - DNA, 25 bp, Homo sapien
agactctatccatgctccgaaaatg

SEQ ID NO: 4281359 - DNA, 25 bp, Homo sapien
tactccatcaccagacagactgttt

SEQ ID NO: 4281360 - DNA, 25 bp, Homo sapien
ccatgctccgaaaatgtgcctctta

SEQ ID NO: 4281361 - DNA, 25 bp, Homo sapien
tccttaaataatgtctcaaatcatt

SEQ ID NO: 4281362 - DNA, 25 bp, Homo sapien
ttctccctcctcaggtgctacttaa

SEQ ID NO: 4281363 - DNA, 25 bp, Homo sapien
catccttggtatccgaagtgctggg

SEQ ID NO: 4281364 - DNA, 25 bp, Homo sapien
caggtgctacttaaccaggcttgtt

SEQ ID NO: 4281365 - DNA, 25 bp, Homo sapien
ctcccatccttggtatccgaagtgc

SEQ ID NO: 4281366 - DNA, 25 bp, Homo sapien
taaaatggtgagttttacgatatgt

SEQ ID NO: 4281367 - DNA, 25 bp, Homo sapien
ttttaaatgtggaatgacatatgcc

SEQ ID NO: 4281368 - DNA, 25 bp, Homo sapien
aatggtgagttttacgatatgtgaa

SEQ ID NO: 4281369 - DNA, 25 bp, Homo sapien
tggtgagttttacgatatgtgaatt

SEQ ID NO: 4281370 - DNA, 25 bp, Homo sapien
caaagttaacaaggcacaatggctc

SEQ ID NO: 4281371 - DNA, 25 bp, Homo sapien
tgactcatttctaggttctatcaag

SEQ ID NO: 4281372 - DNA, 25 bp, Homo sapien
gaatatggatatgacttggtgactc

SEQ ID NO: 4281373 - DNA, 25 bp, Homo sapien
gctgccgcaggcaagattcactaat

SEQ ID NO: 4281374 - DNA, 25 bp, Homo sapien
tgaggaggtaggagacgtcgggagg

SEQ ID NO: 4281375 - DNA, 25 bp, Homo sapien
gggaagagccgtgaggaggtaggag

SEQ ID NO: 4281376 - DNA, 25 bp, Homo sapien
ccaggagagcgccgggaagagccgt

SEQ ID NO: 4281377 - DNA, 25 bp, Homo sapien
aggtaggagacgtcgggaggagccg

SEQ ID NO: 4281378 - DNA, 25 bp, Homo sapien
cgctccggccaataagcgtggcgag

SEQ ID NO: 4281379 - DNA, 25 bp, Homo sapien
ccggcgcaagggagggacgccgcca

SEQ ID NO: 4281380 - DNA, 25 bp, Homo sapien
ctgccgccacgacgtctctgcagag

SEQ ID NO: 4281381 - DNA, 25 bp, Homo sapien
tcgtcgcctcttgagggccggcgca

SEQ ID NO: 4281382 - DNA, 25 bp, Homo sapien
ccttcgctgttctatgatggccgtc

SEQ ID NO: 4281383 - DNA, 25 bp, Homo sapien
gcaggccgatcgactgccttcgctg

SEQ ID NO: 4281384 - DNA, 25 bp, Homo sapien
ctgtgggctctgtgatgtaacttgg

SEQ ID NO: 4281385 - DNA, 25 bp, Homo sapien
gatggccgtcgctctctctcagagt

SEQ ID NO: 4281386 - DNA, 25 bp, Homo sapien
gaacctagtgtggatggacacctaa

SEQ ID NO: 4281387 - DNA, 25 bp, Homo sapien
tctttttcttctgggcaacctcctc

SEQ ID NO: 4281388 - DNA, 25 bp, Homo sapien
tctgttccttttcagtaaggaccat

SEQ ID NO: 4281389 - DNA, 25 bp, Homo sapien
cttctgggcaacctcctcttctggt

SEQ ID NO: 4281390 - DNA, 25 bp, Homo sapien
ttacttccatgccataagtttttgt

SEQ ID NO: 4281391 - DNA, 25 bp, Homo sapien
atgagctctgtaggtccggcagcgc

SEQ ID NO: 4281392 - DNA, 25 bp, Homo sapien
gctcatgtataggttaatccgacca

SEQ ID NO: 4281393 - DNA, 25 bp, Homo sapien
ccatgagctctgtaggtccggcagc

SEQ ID NO: 4281394 - DNA, 25 bp, Homo sapien
gagctctgtaggtccggcagcgcat

SEQ ID NO: 4281395 - DNA, 25 bp, Homo sapien
ttagatgctttgttcacttggatat

SEQ ID NO: 4281396 - DNA, 25 bp, Homo sapien
tagatgctttgttcacttggatatc

SEQ ID NO: 4281397 - DNA, 25 bp, Homo sapien
cttagatgctttgttcacttggata

SEQ ID NO: 4281398 - DNA, 25 bp, Homo sapien
gacaccaattttgtgtccagcccca

SEQ ID NO: 4281399 - DNA, 25 bp, Homo sapien
ttttgggacaccaattttgtgtcca

SEQ ID NO: 4281400 - DNA, 25 bp, Homo sapien
gggacaccaattttgtgtccagccc

SEQ ID NO: 4281401 - DNA, 25 bp, Homo sapien
ttgggacaccaattttgtgtccagc

SEQ ID NO: 4281402 - DNA, 25 bp, Homo sapien
cgcaccgggcctaaaatttgttgct

SEQ ID NO: 4281403 - DNA, 25 bp, Homo sapien
aaatcttcgcggcttactacaacaa

SEQ ID NO: 4281404 - DNA, 25 bp, Homo sapien
tcttagttattcattgcctcacaac

SEQ ID NO: 4281405 - DNA, 25 bp, Homo sapien
tttgttgctttggtcagtggttcag

SEQ ID NO: 4281406 - DNA, 25 bp, Homo sapien
taagtctgacccactttcaagggaa

SEQ ID NO: 4281407 - DNA, 25 bp, Homo sapien
tagtgccatgtatccaagggactgt

SEQ ID NO: 4281408 - DNA, 25 bp, Homo sapien
cattctgtgcactagaagcgagtca

SEQ ID NO: 4281409 - DNA, 25 bp, Homo sapien
gactccaagggatccagctttctgt

SEQ ID NO: 4281410 - DNA, 25 bp, Homo sapien
gctaagctggtataatctgaaggcc

SEQ ID NO: 4281411 - DNA, 25 bp, Homo sapien
aatctgtctcaatgcgcgtgtagga

SEQ ID NO: 4281412 - DNA, 25 bp, Homo sapien
taggtttaaggcatggaagtcccag

SEQ ID NO: 4281413 - DNA, 25 bp, Homo sapien
gagcacctagctttctgtccgataa

SEQ ID NO: 4281414 - DNA, 25 bp, Homo sapien
cagagcttcttcagacgactgtaca

SEQ ID NO: 4281415 - DNA, 25 bp, Homo sapien
tcttggtgcggaacttcttcaggtc

SEQ ID NO: 4281416 - DNA, 25 bp, Homo sapien
ggtgcggaacttcttcaggtcttct

SEQ ID NO: 4281417 - DNA, 25 bp, Homo sapien
ctttaaagtcctcgtggtgcatggg

SEQ ID NO: 4281418 - DNA, 25 bp, Homo sapien
tttggggtattcattacccaggcga

SEQ ID NO: 4281419 - DNA, 25 bp, Homo sapien
ttcataaagaactccttgtatcccc

SEQ ID NO: 4281420 - DNA, 25 bp, Homo sapien
ttacccaggcgatctctctctctca

SEQ ID NO: 4281421 - DNA, 25 bp, Homo sapien
ctggcatttcataaagaactccttg

SEQ ID NO: 4281422 - DNA, 25 bp, Homo sapien
tcttcaataagaagtcttcaacctc

SEQ ID NO: 4281423 - DNA, 25 bp, Homo sapien
ctcttcttccatgtgcaagttcact

SEQ ID NO: 4281424 - DNA, 25 bp, Homo sapien
caatgacacgcttgccatcagtagg

SEQ ID NO: 4281425 - DNA, 25 bp, Homo sapien
tctcagaagaaaactcgcagtgaaa

SEQ ID NO: 4281426 - DNA, 25 bp, Homo sapien
tttgcagttcttctagctgaatagc

SEQ ID NO: 4281427 - DNA, 25 bp, Homo sapien
caatggagctttgtgggtccgtaca

SEQ ID NO: 4281428 - DNA, 25 bp, Homo sapien
tttggcacctgtatctcaatggagc

SEQ ID NO: 4281429 - DNA, 25 bp, Homo sapien
gaatagcccagtagaccatttggca

SEQ ID NO: 4281430 - DNA, 25 bp, Homo sapien
cgacagtcgatgataacaaactctt

SEQ ID NO: 4281431 - DNA, 25 bp, Homo sapien
cttgatgtggcctccctcgtattca

SEQ ID NO: 4281432 - DNA, 25 bp, Homo sapien
tgtggcctccctcgtattcatatgg

SEQ ID NO: 4281433 - DNA, 25 bp, Homo sapien
tattcatatgggtatcgacagtcga

SEQ ID NO: 4281434 - DNA, 25 bp, Homo sapien
aatttctggagagatgtattttaaa

SEQ ID NO: 4281435 - DNA, 25 bp, Homo sapien
tcccagcaactgtatgaaagagata

SEQ ID NO: 4281436 - DNA, 25 bp, Homo sapien
ttcccagcaactgtatgaaagagat

SEQ ID NO: 4281437 - DNA, 25 bp, Homo sapien
cagcaactgtatgaaagagataacc

SEQ ID NO: 4281438 - DNA, 25 bp, Homo sapien
gtctcctataaggtcccttgggtca

SEQ ID NO: 4281439 - DNA, 25 bp, Homo sapien
ataaggtcccttgggtcattgtcca

SEQ ID NO: 4281440 - DNA, 25 bp, Homo sapien
gagaagtctcctataaggtcccttg

SEQ ID NO: 4281441 - DNA, 25 bp, Homo sapien
cctataaggtcccttgggtcattgt

SEQ ID NO: 4281442 - DNA, 25 bp, Homo sapien
tgaccgagtgctggagctacacagg

SEQ ID NO: 4281443 - DNA, 25 bp, Homo sapien
ctcttgagatcgttctggtctcttc

SEQ ID NO: 4281444 - DNA, 25 bp, Homo sapien
ctggtctcttcaacactgaccgagt

SEQ ID NO: 4281445 - DNA, 25 bp, Homo sapien
gggagtcaaacagcttgcatcggtt

SEQ ID NO: 4281446 - DNA, 25 bp, Homo sapien
atctagtcctagcaactctcacagg

SEQ ID NO: 4281447 - DNA, 25 bp, Homo sapien
ggtttcctgggatgatctaagatca

SEQ ID NO: 4281448 - DNA, 25 bp, Homo sapien
taaattagccaacagacactgccga

SEQ ID NO: 4281449 - DNA, 25 bp, Homo sapien
gctcaatgaatatatactcagctga

SEQ ID NO: 4281450 - DNA, 25 bp, Homo sapien
gtccagaggcttgccatgcacgagg

SEQ ID NO: 4281451 - DNA, 25 bp, Homo sapien
gtttgtagttctcatgacgagagga

SEQ ID NO: 4281452 - DNA, 25 bp, Homo sapien
ctgtccagaggcttgccatgcacga

SEQ ID NO: 4281453 - DNA, 25 bp, Homo sapien
tcatgacgagaggagctgtccagag

SEQ ID NO: 4281454 - DNA, 25 bp, Homo sapien
tcgagaaggtccacgaagccatcat

SEQ ID NO: 4281455 - DNA, 25 bp, Homo sapien
gaggaatgaaattccctggttcact

SEQ ID NO: 4281456 - DNA, 25 bp, Homo sapien
ttcagattctctccatcgagaaggt

SEQ ID NO: 4281457 - DNA, 25 bp, Homo sapien
catcagacaaagtggctgtcacagg

SEQ ID NO: 4281458 - DNA, 25 bp, Homo sapien
ggcagccacgagatacaggtcttac

SEQ ID NO: 4281459 - DNA, 25 bp, Homo sapien
agtgcaggcagccacgagatacagg

SEQ ID NO: 4281460 - DNA, 25 bp, Homo sapien
cctggagtccatgagagtgcaggca

SEQ ID NO: 4281461 - DNA, 25 bp, Homo sapien
tctgtgtgaagagatctttaccctc

SEQ ID NO: 4281462 - DNA, 25 bp, Homo sapien
gttgagacatctactgtccatgaaa

SEQ ID NO: 4281463 - DNA, 25 bp, Homo sapien
gacatagttgagacatctactgtcc

SEQ ID NO: 4281464 - DNA, 25 bp, Homo sapien
aagacatagttgagacatctactgt

SEQ ID NO: 4281465 - DNA, 25 bp, Homo sapien
tagttgagacatctactgtccatga

SEQ ID NO: 4281466 - DNA, 25 bp, Homo sapien
ctgggtcgatgagctgaaagatgtc

SEQ ID NO: 4281467 - DNA, 25 bp, Homo sapien
gagctggactacatcccaacagctt

SEQ ID NO: 4281468 - DNA, 25 bp, Homo sapien
ttcagagctggactacatcccaaca

SEQ ID NO: 4281469 - DNA, 25 bp, Homo sapien
tctcatctgggtcgatgagctgaaa

SEQ ID NO: 4281470 - DNA, 25 bp, Homo sapien
gcagtaggtaaccagtaaatgtggc

SEQ ID NO: 4281471 - DNA, 25 bp, Homo sapien
acactgcagtaggtaaccagtaaat

SEQ ID NO: 4281472 - DNA, 25 bp, Homo sapien
ctgcagtaggtaaccagtaaatgtg

SEQ ID NO: 4281473 - DNA, 25 bp, Homo sapien
cagtaggtaaccagtaaatgtggcc

SEQ ID NO: 4281474 - DNA, 25 bp, Homo sapien
gtagggaatgtattcttctcatagg

SEQ ID NO: 4281475 - DNA, 25 bp, Homo sapien
gtattcttctcataggattttcaag

SEQ ID NO: 4281476 - DNA, 25 bp, Homo sapien
aggtagggaatgtattcttctcata

SEQ ID NO: 4281477 - DNA, 25 bp, Homo sapien
atgtattcttctcataggattttca

SEQ ID NO: 4281478 - DNA, 25 bp, Homo sapien
tgtcagagcacagagtaagggtttg

SEQ ID NO: 4281479 - DNA, 25 bp, Homo sapien
gatgtcagagcacagagtaagggtt

SEQ ID NO: 4281480 - DNA, 25 bp, Homo sapien
ttgtaaggctatgatgtcagagcac

SEQ ID NO: 4281481 - DNA, 25 bp, Homo sapien
atgttcttgtaaggctatgatgtca

SEQ ID NO: 4281482 - DNA, 25 bp, Homo sapien
ggcccaggagaatctagacagaaac

SEQ ID NO: 4281483 - DNA, 25 bp, Homo sapien
ttttctttactgtccaatggcccag

SEQ ID NO: 4281484 - DNA, 25 bp, Homo sapien
tccaatggcccaggagaatctagac

SEQ ID NO: 4281485 - DNA, 25 bp, Homo sapien
tttctttactgtccaatggcccagg

SEQ ID NO: 4281486 - DNA, 25 bp, Homo sapien
tgaatctgttgactcggaggagccc

SEQ ID NO: 4281487 - DNA, 25 bp, Homo sapien
cggctgaagcgccaaatagcgcctt

SEQ ID NO: 4281488 - DNA, 25 bp, Homo sapien
caggttggtgacaggcgacagtccc

SEQ ID NO: 4281489 - DNA, 25 bp, Homo sapien
agcgccttcacgacgggctgcgacg

SEQ ID NO: 4281490 - DNA, 25 bp, Homo sapien
tccatagtgacggtcaggttggtga

SEQ ID NO: 4281491 - DNA, 25 bp, Homo sapien
ggtgcttccctctcacaccgcgagg

SEQ ID NO: 4281492 - DNA, 25 bp, Homo sapien
tgccgcgggcaagcggcgcggccgg

SEQ ID NO: 4281493 - DNA, 25 bp, Homo sapien
tcaaacacaaacacgactccgcggt

SEQ ID NO: 4281494 - DNA, 25 bp, Homo sapien
accagccacaggcacgggtgcttcc

SEQ ID NO: 4281495 - DNA, 25 bp, Homo sapien
gagcctcgaggcaacggcccaggct

SEQ ID NO: 4281496 - DNA, 25 bp, Homo sapien
ggctcacgctgtcttcgctgttctc

SEQ ID NO: 4281497 - DNA, 25 bp, Homo sapien
caaacaaacgtggcgggtcggcaag

SEQ ID NO: 4281498 - DNA, 25 bp, Homo sapien
gcagaaaaccaagccgacctacacc

SEQ ID NO: 4281499 - DNA, 25 bp, Homo sapien
attagcatgaagatggtaatgccca

SEQ ID NO: 4281500 - DNA, 25 bp, Homo sapien
tcagttttgtgctggtggactggct

SEQ ID NO: 4281501 - DNA, 25 bp, Homo sapien
tcaacaattggaggcatacttcttg

SEQ ID NO: 4281502 - DNA, 25 bp, Homo sapien
tggaggcatacttcttggaggaatt

SEQ ID NO: 4281503 - DNA, 25 bp, Homo sapien
gatgtagtgagacaggaccgcaaag

SEQ ID NO: 4281504 - DNA, 25 bp, Homo sapien
cttgatgtagtgagacaggaccgca

SEQ ID NO: 4281505 - DNA, 25 bp, Homo sapien
ttgatgtagtgagacaggaccgcaa

SEQ ID NO: 4281506 - DNA, 25 bp, Homo sapien
tgatgtagtgagacaggaccgcaaa

SEQ ID NO: 4281507 - DNA, 25 bp, Homo sapien
cctgtcctggttgagttagagcctc

SEQ ID NO: 4281508 - DNA, 25 bp, Homo sapien
ggtgaattgttcctggattccttcc

SEQ ID NO: 4281509 - DNA, 25 bp, Homo sapien
gtcctggttgagttagagcctcttg

SEQ ID NO: 4281510 - DNA, 25 bp, Homo sapien
caatccttgggcctctggtaggtga

SEQ ID NO: 4281511 - DNA, 25 bp, Homo sapien
cagctttgccaattgtgcaatccac

SEQ ID NO: 4281512 - DNA, 25 bp, Homo sapien
cccagctttgccaattgtgcaatcc

SEQ ID NO: 4281513 - DNA, 25 bp, Homo sapien
tgccaattgtgcaatccacttgtct

SEQ ID NO: 4281514 - DNA, 25 bp, Homo sapien
tttgccaattgtgcaatccacttgt

SEQ ID NO: 4281515 - DNA, 25 bp, Homo sapien
ttgcccagagtctccttggagtctt

SEQ ID NO: 4281516 - DNA, 25 bp, Homo sapien
agtctccttggagtctttgttcctg

SEQ ID NO: 4281517 - DNA, 25 bp, Homo sapien
ctccttggagtctttgttcctggtc

SEQ ID NO: 4281518 - DNA, 25 bp, Homo sapien
tgcccagagtctccttggagtcttt

SEQ ID NO: 4281519 - DNA, 25 bp, Homo sapien
taagcagccagaggagcaggggtac

SEQ ID NO: 4281520 - DNA, 25 bp, Homo sapien
ttaagcagccagaggagcaggggta

SEQ ID NO: 4281521 - DNA, 25 bp, Homo sapien
gcagccagaggagcaggggtacagc

SEQ ID NO: 4281522 - DNA, 25 bp, Homo sapien
aagcagccagaggagcaggggtaca

SEQ ID NO: 4281523 - DNA, 25 bp, Homo sapien
tgggcagagatgtccacagtggata

SEQ ID NO: 4281524 - DNA, 25 bp, Homo sapien
cacagtggatagtttggaaaaggct

SEQ ID NO: 4281525 - DNA, 25 bp, Homo sapien
gattctgagctggaatttttactgg

SEQ ID NO: 4281526 - DNA, 25 bp, Homo sapien
tctgagctggaatttttactgggct

SEQ ID NO: 4281527 - DNA, 25 bp, Homo sapien
tcccagcctgaagttctggcttctg

SEQ ID NO: 4281528 - DNA, 25 bp, Homo sapien
gcctgaagttctggcttctggaccc

SEQ ID NO: 4281529 - DNA, 25 bp, Homo sapien
cagcctgaagttctggcttctggac

SEQ ID NO: 4281530 - DNA, 25 bp, Homo sapien
ctgaagttctggcttctggacccac

SEQ ID NO: 4281531 - DNA, 25 bp, Homo sapien
ggattcacagatgggcaacttcttg

SEQ ID NO: 4281532 - DNA, 25 bp, Homo sapien
agtacccccggcagttcttcacttg

SEQ ID NO: 4281533 - DNA, 25 bp, Homo sapien
agcactgaagtacccccggcagttc

SEQ ID NO: 4281534 - DNA, 25 bp, Homo sapien
ttttgggattcacagatgggcaact

SEQ ID NO: 4281535 - DNA, 25 bp, Homo sapien
cccatatttccaccctcatggcagc

SEQ ID NO: 4281536 - DNA, 25 bp, Homo sapien
catatttccaccctcatggcagccc

SEQ ID NO: 4281537 - DNA, 25 bp, Homo sapien
tcccatatttccaccctcatggcag

SEQ ID NO: 4281538 - DNA, 25 bp, Homo sapien
tgtcccatatttccaccctcatggc

SEQ ID NO: 4281539 - DNA, 25 bp, Homo sapien
tctttggaggcattgtcaagcaggt

SEQ ID NO: 4281540 - DNA, 25 bp, Homo sapien
actgttgtctcccatacagcgagct

SEQ ID NO: 4281541 - DNA, 25 bp, Homo sapien
aggatggcccacttctcactgttgt

SEQ ID NO: 4281542 - DNA, 25 bp, Homo sapien
tgtctcccatacagcgagctttttc

SEQ ID NO: 4281543 - DNA, 25 bp, Homo sapien
ctgtctcaggggcaagcaggcctga

SEQ ID NO: 4281544 - DNA, 25 bp, Homo sapien
gagccagagagggaacgcagagtgg

SEQ ID NO: 4281545 - DNA, 25 bp, Homo sapien
aagctgggctttgttcgccaatggg

SEQ ID NO: 4281546 - DNA, 25 bp, Homo sapien
caggttccctgatcacattgtgtag

SEQ ID NO: 4281547 - DNA, 25 bp, Homo sapien
tcaggtagtggacaccgacctgcat

SEQ ID NO: 4281548 - DNA, 25 bp, Homo sapien
ctcaggtagtggacaccgacctgca

SEQ ID NO: 4281549 - DNA, 25 bp, Homo sapien
gaagcctggaccttgtgcgatggcc

SEQ ID NO: 4281550 - DNA, 25 bp, Homo sapien
gatttcatgtgagggcgtgtccagc

SEQ ID NO: 4281551 - DNA, 25 bp, Homo sapien
gggaaagcaagtgcccctgagtcca

SEQ ID NO: 4281552 - DNA, 25 bp, Homo sapien
tatcagagggcctatgcaagctgct

SEQ ID NO: 4281553 - DNA, 25 bp, Homo sapien
tgcttctccccggtttggcttcttg

SEQ ID NO: 4281554 - DNA, 25 bp, Homo sapien
ctgcttctccccggtttggcttctt

SEQ ID NO: 4281555 - DNA, 25 bp, Homo sapien
ccctgagaggtctgatatccctgga

SEQ ID NO: 4281556 - DNA, 25 bp, Homo sapien
gtctgatatccctggatggcccttt

SEQ ID NO: 4281557 - DNA, 25 bp, Homo sapien
aggagagccctgagaggtctgatat

SEQ ID NO: 4281558 - DNA, 25 bp, Homo sapien
gagaggtctgatatccctggatggc

SEQ ID NO: 4281559 - DNA, 25 bp, Homo sapien
gcagacaaagaccaggcttgagggt

SEQ ID NO: 4281560 - DNA, 25 bp, Homo sapien
cagacaaagaccaggcttgagggtg

SEQ ID NO: 4281561 - DNA, 25 bp, Homo sapien
tctcttcccgtcataggcctgtgat

SEQ ID NO: 4281562 - DNA, 25 bp, Homo sapien
ccagtgggtcaggtactggttgaat

SEQ ID NO: 4281563 - DNA, 25 bp, Homo sapien
gtaacagacctgctcggtaggccat

SEQ ID NO: 4281564 - DNA, 25 bp, Homo sapien
ctcaggagggttgaccccaaggcca

SEQ ID NO: 4281565 - DNA, 25 bp, Homo sapien
tctccttgggagtcgctgtgatacg

SEQ ID NO: 4281566 - DNA, 25 bp, Homo sapien
gttaggaggatttggactctccttg

SEQ ID NO: 4281567 - DNA, 25 bp, Homo sapien
tgggagtcgctgtgatacggccttc

SEQ ID NO: 4281568 - DNA, 25 bp, Homo sapien
tggactctccttgggagtcgctgtg

SEQ ID NO: 4281569 - DNA, 25 bp, Homo sapien
tgacagtttgccttactcccttggg

SEQ ID NO: 4281570 - DNA, 25 bp, Homo sapien
ggccccagtgcctctatttgctaag

SEQ ID NO: 4281571 - DNA, 25 bp, Homo sapien
taccttggagagctatccactcagg

SEQ ID NO: 4281572 - DNA, 25 bp, Homo sapien
ccatgctcgggtggctaaattacat

SEQ ID NO: 4281573 - DNA, 25 bp, Homo sapien
gtggttgatctccagggaatcccca

SEQ ID NO: 4281574 - DNA, 25 bp, Homo sapien
aagtggttgatctccagggaatccc

SEQ ID NO: 4281575 - DNA, 25 bp, Homo sapien
cctctcactggaagtggttgatctc

SEQ ID NO: 4281576 - DNA, 25 bp, Homo sapien
ggttgatctccagggaatccccaag

SEQ ID NO: 4281577 - DNA, 25 bp, Homo sapien
ttttattaggggatttgatgactca

SEQ ID NO: 4281578 - DNA, 25 bp, Homo sapien
tattaggggatttgatgactcaaag

SEQ ID NO: 4281579 - DNA, 25 bp, Homo sapien
gatttgatgactcaaagtctccctt

SEQ ID NO: 4281580 - DNA, 25 bp, Homo sapien
taggggatttgatgactcaaagtct

SEQ ID NO: 4281581 - DNA, 25 bp, Homo sapien
cttggacatgggacttggacctcca

SEQ ID NO: 4281582 - DNA, 25 bp, Homo sapien
tgttggacctagatgcaggccttga

SEQ ID NO: 4281583 - DNA, 25 bp, Homo sapien
caacacccgcgtctttggaactgca

SEQ ID NO: 4281584 - DNA, 25 bp, Homo sapien
ccatgtgtatcttggacttaggacc

SEQ ID NO: 4281585 - DNA, 25 bp, Homo sapien
atttaaacagggaggtgaccttcat

SEQ ID NO: 4281586 - DNA, 25 bp, Homo sapien
tgccagagtaatgccttgagtaggt

SEQ ID NO: 4281587 - DNA, 25 bp, Homo sapien
agcagagtacataagcacagatgga

SEQ ID NO: 4281588 - DNA, 25 bp, Homo sapien
gagataggtggctcaatgtggtctt

SEQ ID NO: 4281589 - DNA, 25 bp, Homo sapien
acttggaaggttcgcccattgttca

SEQ ID NO: 4281590 - DNA, 25 bp, Homo sapien
ggcatgtgccaccatttttatttta

SEQ ID NO: 4281591 - DNA, 25 bp, Homo sapien
tgtgatatcagagactaagcattcg

SEQ ID NO: 4281592 - DNA, 25 bp, Homo sapien
tcaaacaggacgtggtaaggtggac

SEQ ID NO: 4281593 - DNA, 25 bp, Homo sapien
taagccacttgatacttcgccccaa

SEQ ID NO: 4281594 - DNA, 25 bp, Homo sapien
ggttcgtggctacaacacttatgct

SEQ ID NO: 4281595 - DNA, 25 bp, Homo sapien
gatatctccaattcgacaccacagg

SEQ ID NO: 4281596 - DNA, 25 bp, Homo sapien
tcagattttgtacgctttgaccacc

SEQ ID NO: 4281597 - DNA, 25 bp, Homo sapien
cctttccatatttgtgggagccagg

SEQ ID NO: 4281598 - DNA, 25 bp, Homo sapien
gagtgtcattgctctcacatcagtg

SEQ ID NO: 4281599 - DNA, 25 bp, Homo sapien
cacaggtttcttaggtcacacatac

SEQ ID NO: 4281600 - DNA, 25 bp, Homo sapien
cagacccctgctatggataccctat

SEQ ID NO: 4281601 - DNA, 25 bp, Homo sapien
gactttatacctctgttagggcact

SEQ ID NO: 4281602 - DNA, 25 bp, Homo sapien
gaacagactgtctagtgccccagac

SEQ ID NO: 4281603 - DNA, 25 bp, Homo sapien
ccctggtcctaggagaatgttttag

SEQ ID NO: 4281604 - DNA, 25 bp, Homo sapien
gaagaaggatgaacagttctcagca

SEQ ID NO: 4281605 - DNA, 25 bp, Homo sapien
acactgacttttattgaggaagaca

SEQ ID NO: 4281606 - DNA, 25 bp, Homo sapien
ctgtggtgagctaggccctcaggca

SEQ ID NO: 4281607 - DNA, 25 bp, Homo sapien
cctgttccagctacatagtggacac

SEQ ID NO: 4281608 - DNA, 25 bp, Homo sapien
tcctgttccagctacatagtggaca

SEQ ID NO: 4281609 - DNA, 25 bp, Homo sapien
ctcctgttccagctacatagtggac

SEQ ID NO: 4281610 - DNA, 25 bp, Homo sapien
cctcctgttccagctacatagtgga

SEQ ID NO: 4281611 - DNA, 25 bp, Homo sapien
ggccacagcgcaactggggctcttc

SEQ ID NO: 4281612 - DNA, 25 bp, Homo sapien
cataccagcgctgttcactgaagtc

SEQ ID NO: 4281613 - DNA, 25 bp, Homo sapien
ctcataccagcgctgttcactgaag

SEQ ID NO: 4281614 - DNA, 25 bp, Homo sapien
cctcctcataccagcgctgttcact

SEQ ID NO: 4281615 - DNA, 25 bp, Homo sapien
atggcgtgctcggaacactctggtg

SEQ ID NO: 4281616 - DNA, 25 bp, Homo sapien
gaaactcccacggatagaatctggg

SEQ ID NO: 4281617 - DNA, 25 bp, Homo sapien
caaggatgtaggctcggattggccc

SEQ ID NO: 4281618 - DNA, 25 bp, Homo sapien
gtcagtgaggccgaaactcccacgg

SEQ ID NO: 4281619 - DNA, 25 bp, Homo sapien
accagcctctgatagaaaaaacgcc

SEQ ID NO: 4281620 - DNA, 25 bp, Homo sapien
tcctggtgcccaaggcaactttctg

SEQ ID NO: 4281621 - DNA, 25 bp, Homo sapien
caagataccttcatcctggtgccca

SEQ ID NO: 4281622 - DNA, 25 bp, Homo sapien
gagagaggaccttcatcaagatacc

SEQ ID NO: 4281623 - DNA, 25 bp, Homo sapien
ggcaactttctgtacttctacctcc

SEQ ID NO: 4281624 - DNA, 25 bp, Homo sapien
tctccacagtagttctctcattcgt

SEQ ID NO: 4281625 - DNA, 25 bp, Homo sapien
ttcatgctctcggtaaaacctctgg

SEQ ID NO: 4281626 - DNA, 25 bp, Homo sapien
tacaatcaggaacttgttgcttaga

SEQ ID NO: 4281627 - DNA, 25 bp, Homo sapien
tcggtaaaacctctggcaatcttcc

SEQ ID NO: 4281628 - DNA, 25 bp, Homo sapien
aagcagtagcaattcccagggcatg

SEQ ID NO: 4281629 - DNA, 25 bp, Homo sapien
tctccttaggtcagagttcatggct

SEQ ID NO: 4281630 - DNA, 25 bp, Homo sapien
gcatgcggtagagacttaggattca

SEQ ID NO: 4281631 - DNA, 25 bp, Homo sapien
tgttgtcagtcaccataaatggccc

SEQ ID NO: 4281632 - DNA, 25 bp, Homo sapien
gagcctgagggcttcgcaagattga

SEQ ID NO: 4281633 - DNA, 25 bp, Homo sapien
gagggcttcgcaagattgaggccat

SEQ ID NO: 4281634 - DNA, 25 bp, Homo sapien
tgcgtcaggcttgatcagggctaga

SEQ ID NO: 4281635 - DNA, 25 bp, Homo sapien
aatcagtggatgggcgactgcgtca

SEQ ID NO: 4281636 - DNA, 25 bp, Homo sapien
agtttctctagctccaacctcatgg

SEQ ID NO: 4281637 - DNA, 25 bp, Homo sapien
gaaagaatttctggcttgacagcct

SEQ ID NO: 4281638 - DNA, 25 bp, Homo sapien
ttcgcagtcctgaatgtgctttctc

SEQ ID NO: 4281639 - DNA, 25 bp, Homo sapien
cagcctttgtgtgagtagttttcgc

SEQ ID NO: 4281640 - DNA, 25 bp, Homo sapien
ttcagttccgtcttcaccaccagaa

SEQ ID NO: 4281641 - DNA, 25 bp, Homo sapien
caccaccagaaggtgtaagcagtac

SEQ ID NO: 4281642 - DNA, 25 bp, Homo sapien
ttctcacagctccttgcaagttccc

SEQ ID NO: 4281643 - DNA, 25 bp, Homo sapien
tcttagctcacttcccgttacactt

SEQ ID NO: 4281644 - DNA, 25 bp, Homo sapien
ggttctcgtggcaagaacacgcggc

SEQ ID NO: 4281645 - DNA, 25 bp, Homo sapien
tatctgaatgaaccaacgaatgcac

SEQ ID NO: 4281646 - DNA, 25 bp, Homo sapien
caaggccaggctgctaggggttctc

SEQ ID NO: 4281647 - DNA, 25 bp, Homo sapien
gcacacagctggctcttaacagtat

SEQ ID NO: 4281648 - DNA, 25 bp, Homo sapien
gtcttgactcttggtttacaacaaa

SEQ ID NO: 4281649 - DNA, 25 bp, Homo sapien
gctaagttgtggctgtcttgactct

SEQ ID NO: 4281650 - DNA, 25 bp, Homo sapien
ttcctttactaacgcagctaagttg

SEQ ID NO: 4281651 - DNA, 25 bp, Homo sapien
tagggaggacatggttcctttacta

SEQ ID NO: 4281652 - DNA, 25 bp, Homo sapien
tgcagcagaagtccggctgcgggtt

SEQ ID NO: 4281653 - DNA, 25 bp, Homo sapien
agcagaagtccggctgcgggttcac

SEQ ID NO: 4281654 - DNA, 25 bp, Homo sapien
cagcagaagtccggctgcgggttca

SEQ ID NO: 4281655 - DNA, 25 bp, Homo sapien
agtgcagcagaagtccggctgcggg

SEQ ID NO: 4281656 - DNA, 25 bp, Homo sapien
caggcgccacgctggatagcctgcg

SEQ ID NO: 4281657 - DNA, 25 bp, Homo sapien
ctgctcggggtcctagtccggttgc

SEQ ID NO: 4281658 - DNA, 25 bp, Homo sapien
gaggtgaggtgtgagttgccctgga

SEQ ID NO: 4281659 - DNA, 25 bp, Homo sapien
tcctagtccggttgcgccgcggcgt

SEQ ID NO: 4281660 - DNA, 25 bp, Homo sapien
tgtgtttcacttggcaatctggaga

SEQ ID NO: 4281661 - DNA, 25 bp, Homo sapien
aacgagtttgatccaaccattagta

SEQ ID NO: 4281662 - DNA, 25 bp, Homo sapien
taattctttgtcgtacgttcaagag

SEQ ID NO: 4281663 - DNA, 25 bp, Homo sapien
tgaagaggcaaccattgtgtttcac

SEQ ID NO: 4281664 - DNA, 25 bp, Homo sapien
tgtccatcatacagtttagttatgt

SEQ ID NO: 4281665 - DNA, 25 bp, Homo sapien
cattgtccatcatacagtttagtta

SEQ ID NO: 4281666 - DNA, 25 bp, Homo sapien
acattgtccatcatacagtttagtt

SEQ ID NO: 4281667 - DNA, 25 bp, Homo sapien
catcatacagtttagttatgttaag

SEQ ID NO: 4281668 - DNA, 25 bp, Homo sapien
ttctgcattgtctgaataggatcac

SEQ ID NO: 4281669 - DNA, 25 bp, Homo sapien
tgcattgtctgaataggatcacatg

SEQ ID NO: 4281670 - DNA, 25 bp, Homo sapien
tgtttctgcattgtctgaataggat

SEQ ID NO: 4281671 - DNA, 25 bp, Homo sapien
ctgtttctgcattgtctgaatagga

SEQ ID NO: 4281672 - DNA, 25 bp, Homo sapien
ctgtaggtaacctggtcactgccac

SEQ ID NO: 4281673 - DNA, 25 bp, Homo sapien
tcactactgtaggtaacctggtcac

SEQ ID NO: 4281674 - DNA, 25 bp, Homo sapien
ctggtcactgccacaaataggttca

SEQ ID NO: 4281675 - DNA, 25 bp, Homo sapien
tggcagtcactactgtaggtaacct

SEQ ID NO: 4281676 - DNA, 25 bp, Homo sapien
gggcttgatgtaggataaaaaccag

SEQ ID NO: 4281677 - DNA, 25 bp, Homo sapien
gcttgatgtaggataaaaaccagca

SEQ ID NO: 4281678 - DNA, 25 bp, Homo sapien
ttgatgtaggataaaaaccagcact

SEQ ID NO: 4281679 - DNA, 25 bp, Homo sapien
ctgggcttgatgtaggataaaaacc

SEQ ID NO: 4281680 - DNA, 25 bp, Homo sapien
tgttttgtctagctgacctctttca

SEQ ID NO: 4281681 - DNA, 25 bp, Homo sapien
cctctttcagaggccataggaaggg

SEQ ID NO: 4281682 - DNA, 25 bp, Homo sapien
tattgttttgtctagctgacctctt

SEQ ID NO: 4281683 - DNA, 25 bp, Homo sapien
tttgtctagctgacctctttcagag

SEQ ID NO: 4281684 - DNA, 25 bp, Homo sapien
cagaaaatgtgggcagagcaaggac

SEQ ID NO: 4281685 - DNA, 25 bp, Homo sapien
agaaaatgtgggcagagcaaggaca

SEQ ID NO: 4281686 - DNA, 25 bp, Homo sapien
tgcagaaaatgtgggcagagcaagg

SEQ ID NO: 4281687 - DNA, 25 bp, Homo sapien
gcagaaaatgtgggcagagcaagga

SEQ ID NO: 4281688 - DNA, 25 bp, Homo sapien
aattgcaaaggccatccacatggag

SEQ ID NO: 4281689 - DNA, 25 bp, Homo sapien
gctagaacaaggatggcgtctgagc

SEQ ID NO: 4281690 - DNA, 25 bp, Homo sapien
gagcagatccccttcatggtgacag

SEQ ID NO: 4281691 - DNA, 25 bp, Homo sapien
catccacatggaggtagctagaaca

SEQ ID NO: 4281692 - DNA, 25 bp, Homo sapien
aactggctgaacaggatggtttttg

SEQ ID NO: 4281693 - DNA, 25 bp, Homo sapien
actggctgaacaggatggtttttgt

SEQ ID NO: 4281694 - DNA, 25 bp, Homo sapien
ggctgaacaggatggtttttgttga

SEQ ID NO: 4281695 - DNA, 25 bp, Homo sapien
tgtgccagtggcagataaacttcat

SEQ ID NO: 4281696 - DNA, 25 bp, Homo sapien
gccacaaggaatggtggagccacat

SEQ ID NO: 4281697 - DNA, 25 bp, Homo sapien
cttttgaggacccactacccgtgag

SEQ ID NO: 4281698 - DNA, 25 bp, Homo sapien
caccaagtcctgtgggtgactgctg

SEQ ID NO: 4281699 - DNA, 25 bp, Homo sapien
ttttgctgccttggaatcttctgag

SEQ ID NO: 4281700 - DNA, 25 bp, Homo sapien
tgctcttttgctgccttggaatctt

SEQ ID NO: 4281701 - DNA, 25 bp, Homo sapien
ctgtgctcttttgctgccttggaat

SEQ ID NO: 4281702 - DNA, 25 bp, Homo sapien
cttttgctgccttggaatcttctga

SEQ ID NO: 4281703 - DNA, 25 bp, Homo sapien
catctgttctgctcatgctgtgctg

SEQ ID NO: 4281704 - DNA, 25 bp, Homo sapien
gtgctgctctctttagctcagccat

SEQ ID NO: 4281705 - DNA, 25 bp, Homo sapien
tgctgtgctgctctctttagctcag

SEQ ID NO: 4281706 - DNA, 25 bp, Homo sapien
tgttctgctcatgctgtgctgctct

SEQ ID NO: 4281707 - DNA, 25 bp, Homo sapien
tttactgcaattcagtagcttctcc

SEQ ID NO: 4281708 - DNA, 25 bp, Homo sapien
agtaaatactttatcccctcataga

SEQ ID NO: 4281709 - DNA, 25 bp, Homo sapien
aacacatctcattgtagcttcaacc

SEQ ID NO: 4281710 - DNA, 25 bp, Homo sapien
catagaagcacacggttttactgca

SEQ ID NO: 4281711 - DNA, 25 bp, Homo sapien
caaatataggatccaaaagttgaca

SEQ ID NO: 4281712 - DNA, 25 bp, Homo sapien
tatatgcatgccttgcttcaaatat

SEQ ID NO: 4281713 - DNA, 25 bp, Homo sapien
gaaatgggcacagccatgggaggtg

SEQ ID NO: 4281714 - DNA, 25 bp, Homo sapien
agcaaagaaggacctgggcttggct

SEQ ID NO: 4281715 - DNA, 25 bp, Homo sapien
tcacaaacgatgatgccaaagcagt

SEQ ID NO: 4281716 - DNA, 25 bp, Homo sapien
cagaacatcattccccagtgagcag

SEQ ID NO: 4281717 - DNA, 25 bp, Homo sapien
gactgttcctaggtggtcagtgcca

SEQ ID NO: 4281718 - DNA, 25 bp, Homo sapien
tagggactcgcaccttacagaagag

SEQ ID NO: 4281719 - DNA, 25 bp, Homo sapien
tctgggtggctatgaaaacctggcc

SEQ ID NO: 4281720 - DNA, 25 bp, Homo sapien
cccaaatgatggcacctggctgctg

SEQ ID NO: 4281721 - DNA, 25 bp, Homo sapien
acaatgttctgtggcggccgagcca

SEQ ID NO: 4281722 - DNA, 25 bp, Homo sapien
tctccaacgggaaaagtcaggacca

SEQ ID NO: 4281723 - DNA, 25 bp, Homo sapien
gatgatccctctgaaggcctcaagg

SEQ ID NO: 4281724 - DNA, 25 bp, Homo sapien
ctgtgccagacgagaggaaatgcta

SEQ ID NO: 4281725 - DNA, 25 bp, Homo sapien
gaaatgctaagggtcactgggttat

SEQ ID NO: 4281726 - DNA, 25 bp, Homo sapien
cctggaattctatcagtctgtctct

SEQ ID NO: 4281727 - DNA, 25 bp, Homo sapien
tcaggaagaaccatataaggcggcc

SEQ ID NO: 4281728 - DNA, 25 bp, Homo sapien
tctgctaaggccgagggtggtctca

SEQ ID NO: 4281729 - DNA, 25 bp, Homo sapien
gcagacagtttaggagccggcccta

SEQ ID NO: 4281730 - DNA, 25 bp, Homo sapien
tcaagtcaagaggagtatcaacccc

SEQ ID NO: 4281731 - DNA, 25 bp, Homo sapien
gaaaagctgggtcaatggagtcacc

SEQ ID NO: 4281732 - DNA, 25 bp, Homo sapien
tgtcagtcactacaggcacctaaga

SEQ ID NO: 4281733 - DNA, 25 bp, Homo sapien
tcttagacctaggatgtggcagcag

SEQ ID NO: 4281734 - DNA, 25 bp, Homo sapien
gggtactaccccatgagccttgagg

SEQ ID NO: 4281735 - DNA, 25 bp, Homo sapien
gagccgatagcccagctgcatcttc

SEQ ID NO: 4281736 - DNA, 25 bp, Homo sapien
gcatcttctgggccgtgccatcctc

SEQ ID NO: 4281737 - DNA, 25 bp, Homo sapien
ctatagatctgtgaccttgttttcc

SEQ ID NO: 4281738 - DNA, 25 bp, Homo sapien
agctgcaatctgctggagccgatag

SEQ ID NO: 4281739 - DNA, 25 bp, Homo sapien
accagcactgtgcctcgccgtcctg

SEQ ID NO: 4281740 - DNA, 25 bp, Homo sapien
ccagcactgtgcctcgccgtcctgc

SEQ ID NO: 4281741 - DNA, 25 bp, Homo sapien
agtacttgttgatgtacttgtagag

SEQ ID NO: 4281742 - DNA, 25 bp, Homo sapien
catagtacttgttgatgtacttgta

SEQ ID NO: 4281743 - DNA, 25 bp, Homo sapien
ctggtcatagtacttgttgatgtac

SEQ ID NO: 4281744 - DNA, 25 bp, Homo sapien
ttcatgcagggccactcgcgccccg

SEQ ID NO: 4281745 - DNA, 25 bp, Homo sapien
cctccttggtaggaagacagcccag

SEQ ID NO: 4281746 - DNA, 25 bp, Homo sapien
gatgggcactacagtgggaagcaga

SEQ ID NO: 4281747 - DNA, 25 bp, Homo sapien
tagagcaagggggcctccttggtag

SEQ ID NO: 4281748 - DNA, 25 bp, Homo sapien
ggatgggcactacagtgggaagcag

SEQ ID NO: 4281749 - DNA, 25 bp, Homo sapien
ggcaggaggcctatgcccaacccaa

SEQ ID NO: 4281750 - DNA, 25 bp, Homo sapien
tgtggcaggaggcctatgcccaacc

SEQ ID NO: 4281751 - DNA, 25 bp, Homo sapien
gaggcctatgcccaacccaagaagc

SEQ ID NO: 4281752 - DNA, 25 bp, Homo sapien
tgaagggggaaggaccgttgtggca

SEQ ID NO: 4281753 - DNA, 25 bp, Homo sapien
agagttcatctcttggtcgctggct

SEQ ID NO: 4281754 - DNA, 25 bp, Homo sapien
tcagccaggacagagttcatctctt

SEQ ID NO: 4281755 - DNA, 25 bp, Homo sapien
ctgggacagtctgtctgatgtctgc

SEQ ID NO: 4281756 - DNA, 25 bp, Homo sapien
tggctgggacagtctgtctgatgtc

SEQ ID NO: 4281757 - DNA, 25 bp, Homo sapien
acagaagtttgttgatcggggagtc

SEQ ID NO: 4281758 - DNA, 25 bp, Homo sapien
aatgtcccgtgcatacagaagtttg

SEQ ID NO: 4281759 - DNA, 25 bp, Homo sapien
tccaccatccgcttgtaccggggaa

SEQ ID NO: 4281760 - DNA, 25 bp, Homo sapien
tgtaccggggaatgtcccgtgcata

SEQ ID NO: 4281761 - DNA, 25 bp, Homo sapien
gaattaaacctaatcagcagcccag

SEQ ID NO: 4281762 - DNA, 25 bp, Homo sapien
cagagctgctctgggattgaacaat

SEQ ID NO: 4281763 - DNA, 25 bp, Homo sapien
gggactcccggctttgactgctatg

SEQ ID NO: 4281764 - DNA, 25 bp, Homo sapien
catggacctgcagagtcacacgagg

SEQ ID NO: 4281765 - DNA, 25 bp, Homo sapien
attatattgatccagaacctcagag

SEQ ID NO: 4281766 - DNA, 25 bp, Homo sapien
ttgcacgtcgaacacaaactgcggg

SEQ ID NO: 4281767 - DNA, 25 bp, Homo sapien
ggagcaccgcatccatgttatcaga

SEQ ID NO: 4281768 - DNA, 25 bp, Homo sapien
tctgtgcaatgacaaggagcaccgc

SEQ ID NO: 4281769 - DNA, 25 bp, Homo sapien
gtggggcaggcatggccgatgaatg

SEQ ID NO: 4281770 - DNA, 25 bp, Homo sapien
ggggcaggcatggccgatgaatgtg

SEQ ID NO: 4281771 - DNA, 25 bp, Homo sapien
tggggcaggcatggccgatgaatgt

SEQ ID NO: 4281772 - DNA, 25 bp, Homo sapien
ggtggggcaggcatggccgatgaat

SEQ ID NO: 4281773 - DNA, 25 bp, Homo sapien
aggcagaagagaagaccccccacac

SEQ ID NO: 4281774 - DNA, 25 bp, Homo sapien
ccccacacacacctagagcccaccc

SEQ ID NO: 4281775 - DNA, 25 bp, Homo sapien
ggcagaagagaagaccccccacaca

SEQ ID NO: 4281776 - DNA, 25 bp, Homo sapien
acacacacctagagcccacccagct

SEQ ID NO: 4281777 - DNA, 25 bp, Homo sapien
ctgctcatccagcaggtcaaagaag

SEQ ID NO: 4281778 - DNA, 25 bp, Homo sapien
aagaagtacttcacagcgagcggca

SEQ ID NO: 4281779 - DNA, 25 bp, Homo sapien
gggcctgctcatccagcaggtcaaa

SEQ ID NO: 4281780 - DNA, 25 bp, Homo sapien
tcctggtcggagatgccatgctgct

SEQ ID NO: 4281781 - DNA, 25 bp, Homo sapien
tcacttggcttcaccaggtgccagg

SEQ ID NO: 4281782 - DNA, 25 bp, Homo sapien
ccggatgcccccctcatctacatcc

SEQ ID NO: 4281783 - DNA, 25 bp, Homo sapien
gccccgaaggctgcccctccgaggc

SEQ ID NO: 4281784 - DNA, 25 bp, Homo sapien
gccttggcgcgctcacgctccccgc

SEQ ID NO: 4281785 - DNA, 25 bp, Homo sapien
cttccccatgactccgggctgggca

SEQ ID NO: 4281786 - DNA, 25 bp, Homo sapien
gcaggggcagaggaccgtgatggga

SEQ ID NO: 4281787 - DNA, 25 bp, Homo sapien
ggaccgtgatgggagcggtactcac

SEQ ID NO: 4281788 - DNA, 25 bp, Homo sapien
ttccccatgactccgggctgggcac

SEQ ID NO: 4281789 - DNA, 25 bp, Homo sapien
aatcctggttttcccggagcacatg

SEQ ID NO: 4281790 - DNA, 25 bp, Homo sapien
gctctccagggacataatcctggtt

SEQ ID NO: 4281791 - DNA, 25 bp, Homo sapien
gggacgagggccacagttgctccat

SEQ ID NO: 4281792 - DNA, 25 bp, Homo sapien
acatgcttggtgaggcaggggacga

SEQ ID NO: 4281793 - DNA, 25 bp, Homo sapien
gaaagaatgaggtgcccggccaccc

SEQ ID NO: 4281794 - DNA, 25 bp, Homo sapien
cagaaagaatgaggtgcccggccac

SEQ ID NO: 4281795 - DNA, 25 bp, Homo sapien
gtgacatcctcgtcagaaagaatga

SEQ ID NO: 4281796 - DNA, 25 bp, Homo sapien
gacatcctcgtcagaaagaatgagg

SEQ ID NO: 4281797 - DNA, 25 bp, Homo sapien
catggggcagccttactcaacctct

SEQ ID NO: 4281798 - DNA, 25 bp, Homo sapien
ccaccctgagtgatgagttgtccct

SEQ ID NO: 4281799 - DNA, 25 bp, Homo sapien
ccagatgagaggctgtccaagaaag

SEQ ID NO: 4281800 - DNA, 25 bp, Homo sapien
gaagatacccttcccatagtggagc

SEQ ID NO: 4281801 - DNA, 25 bp, Homo sapien
ccacagccaatagtgcattcaaggt

SEQ ID NO: 4281802 - DNA, 25 bp, Homo sapien
tataaagctggtccagcatcttctc

SEQ ID NO: 4281803 - DNA, 25 bp, Homo sapien
acagtctaggaccttcacgggcacg

SEQ ID NO: 4281804 - DNA, 25 bp, Homo sapien
caacatcaagggtgcgagggtctgg

SEQ ID NO: 4281805 - DNA, 25 bp, Homo sapien
agactgcaggccacacacttgcaca

SEQ ID NO: 4281806 - DNA, 25 bp, Homo sapien
cgcactcagactgcaggccacacac

SEQ ID NO: 4281807 - DNA, 25 bp, Homo sapien
actcagactgcaggccacacacttg

SEQ ID NO: 4281808 - DNA, 25 bp, Homo sapien
cagactgcaggccacacacttgcac

SEQ ID NO: 4281809 - DNA, 25 bp, Homo sapien
ttggtgcttaatccctcgaaagagc

SEQ ID NO: 4281810 - DNA, 25 bp, Homo sapien
tcctctctgagcaggcggttgtcgt

SEQ ID NO: 4281811 - DNA, 25 bp, Homo sapien
ttgtcgttcaaggtgtatttggcct

SEQ ID NO: 4281812 - DNA, 25 bp, Homo sapien
tgtacagaggctcccctacggagtc

SEQ ID NO: 4281813 - DNA, 25 bp, Homo sapien
ggcttagaagtttggagggcctgac

SEQ ID NO: 4281814 - DNA, 25 bp, Homo sapien
tgtatgggacatgacgcacactggg

SEQ ID NO: 4281815 - DNA, 25 bp, Homo sapien
aggtgtatgggacatgacgcacact

SEQ ID NO: 4281816 - DNA, 25 bp, Homo sapien
gacatgggcttaaggggactgagga

SEQ ID NO: 4281817 - DNA, 25 bp, Homo sapien
tcacgaaggtatacagacagatgga

SEQ ID NO: 4281818 - DNA, 25 bp, Homo sapien
cctcacgaaggtatacagacagatg

SEQ ID NO: 4281819 - DNA, 25 bp, Homo sapien
ctcacgaaggtatacagacagatgg

SEQ ID NO: 4281820 - DNA, 25 bp, Homo sapien
cagtgccacggtgagcagagatgcc

SEQ ID NO: 4281821 - DNA, 25 bp, Homo sapien
cagagatgccacgtaggcacggtcc

SEQ ID NO: 4281822 - DNA, 25 bp, Homo sapien
tgtcagtgaaatactcaagcttccc

SEQ ID NO: 4281823 - DNA, 25 bp, Homo sapien
acggtcccgagctgaaaaggtgcgc

SEQ ID NO: 4281824 - DNA, 25 bp, Homo sapien
agtgggccgtctgctctcaggcaca

SEQ ID NO: 4281825 - DNA, 25 bp, Homo sapien
gggaagaagatcctctccgcataca

SEQ ID NO: 4281826 - DNA, 25 bp, Homo sapien
catacaccttgtagtcgaggaaggg

SEQ ID NO: 4281827 - DNA, 25 bp, Homo sapien
ccaggtcccggtgcaagggcgactc

SEQ ID NO: 4281828 - DNA, 25 bp, Homo sapien
ccagctggatctgaaccttcttata

SEQ ID NO: 4281829 - DNA, 25 bp, Homo sapien
cggtcccgcacactgctctccagat

SEQ ID NO: 4281830 - DNA, 25 bp, Homo sapien
tgaattccttcttgcagcggtcccg

SEQ ID NO: 4281831 - DNA, 25 bp, Homo sapien
ccttcttatagtccctcagggcctg

SEQ ID NO: 4281832 - DNA, 25 bp, Homo sapien
gttgttgaacagagaccacttggcc

SEQ ID NO: 4281833 - DNA, 25 bp, Homo sapien
aagcctagcccagtacgattcagcc

SEQ ID NO: 4281834 - DNA, 25 bp, Homo sapien
ttagcctagagatcagccaaccaca

SEQ ID NO: 4281835 - DNA, 25 bp, Homo sapien
ggatggccagatgagtcctactcgc

SEQ ID NO: 4281836 - DNA, 25 bp, Homo sapien
agggctctcgccgtcatactgcacg

SEQ ID NO: 4281837 - DNA, 25 bp, Homo sapien
agaagcgcaagttccccatctgcac

SEQ ID NO: 4281838 - DNA, 25 bp, Homo sapien
gggagaagcgcaagttccccatctg

SEQ ID NO: 4281839 - DNA, 25 bp, Homo sapien
cgtcatactgcacgtgacccaggga

SEQ ID NO: 4281840 - DNA, 25 bp, Homo sapien
aggtggtgccgcgtcagcgtcttca

SEQ ID NO: 4281841 - DNA, 25 bp, Homo sapien
tcaggtgcctctcggagggcatggt

SEQ ID NO: 4281842 - DNA, 25 bp, Homo sapien
tcctccttggacattgcaaggtcca

SEQ ID NO: 4281843 - DNA, 25 bp, Homo sapien
gaactcaggcaaagagtcaggtgcc

SEQ ID NO: 4281844 - DNA, 25 bp, Homo sapien
tgtgcggcacgtgatgagctgggag

SEQ ID NO: 4281845 - DNA, 25 bp, Homo sapien
gagttgacatggcacggctcctcaa

SEQ ID NO: 4281846 - DNA, 25 bp, Homo sapien
tcggcctcataggagaaaggtgtgg

SEQ ID NO: 4281847 - DNA, 25 bp, Homo sapien
aaagtcaaagaccaggttgtcaagg

SEQ ID NO: 4281848 - DNA, 25 bp, Homo sapien
tgctggctactgcaggagggtccaa

SEQ ID NO: 4281849 - DNA, 25 bp, Homo sapien
ggtccaagggaacatgccgtctccg

SEQ ID NO: 4281850 - DNA, 25 bp, Homo sapien
ttgctggctactgcaggagggtcca

SEQ ID NO: 4281851 - DNA, 25 bp, Homo sapien
ccaagggaacatgccgtctccggga

SEQ ID NO: 4281852 - DNA, 25 bp, Homo sapien
ggctgcagcattctcgagaccacgg

SEQ ID NO: 4281853 - DNA, 25 bp, Homo sapien
tgcagcattctcgagaccacggtca

SEQ ID NO: 4281854 - DNA, 25 bp, Homo sapien
gacgcctccgtccaagcccctggct

SEQ ID NO: 4281855 - DNA, 25 bp, Homo sapien
ctgggctgcagcattctcgagacca

SEQ ID NO: 4281856 - DNA, 25 bp, Homo sapien
ttctggccacggacgcatatctcac

SEQ ID NO: 4281857 - DNA, 25 bp, Homo sapien
cggattcttggcgtctgtaccacgt

SEQ ID NO: 4281858 - DNA, 25 bp, Homo sapien
ccagattctggccacggacgcatat

SEQ ID NO: 4281859 - DNA, 25 bp, Homo sapien
ggcgtctgtaccacgtccagattct

SEQ ID NO: 4281860 - DNA, 25 bp, Homo sapien
tacgtaacgtaagatggcttatgtt

SEQ ID NO: 4281861 - DNA, 25 bp, Homo sapien
tacctggacctaaagcacagcccag

SEQ ID NO: 4281862 - DNA, 25 bp, Homo sapien
tgaaacagaccgtgagcttacgtaa

SEQ ID NO: 4281863 - DNA, 25 bp, Homo sapien
ttacctggacctaaagcacagccca

SEQ ID NO: 4281864 - DNA, 25 bp, Homo sapien
tgcagccacacccctggcccaacac

SEQ ID NO: 4281865 - DNA, 25 bp, Homo sapien
catgcagccacacccctggcccaac

SEQ ID NO: 4281866 - DNA, 25 bp, Homo sapien
gccatgcagccacacccctggccca

SEQ ID NO: 4281867 - DNA, 25 bp, Homo sapien
ctgccatgcagccacacccctggcc

SEQ ID NO: 4281868 - DNA, 25 bp, Homo sapien
cacagccacagggagcgtggcaggc

SEQ ID NO: 4281869 - DNA, 25 bp, Homo sapien
gggtccaaggtatacttgaactgtc

SEQ ID NO: 4281870 - DNA, 25 bp, Homo sapien
tacttgaactgtccgcgttgaagcc

SEQ ID NO: 4281871 - DNA, 25 bp, Homo sapien
aactgtccgcgttgaagcctccgct

SEQ ID NO: 4281872 - DNA, 25 bp, Homo sapien
cgggccgggaagatggaatggacct

SEQ ID NO: 4281873 - DNA, 25 bp, Homo sapien
gccgcgggccgggaagatggaatgg

SEQ ID NO: 4281874 - DNA, 25 bp, Homo sapien
gagccattcagggtgagacgggtgc

SEQ ID NO: 4281875 - DNA, 25 bp, Homo sapien
ccattcagggtgagacgggtgcccc

SEQ ID NO: 4281876 - DNA, 25 bp, Homo sapien
tggtaggcaaagtcgtgttctgaga

SEQ ID NO: 4281877 - DNA, 25 bp, Homo sapien
gtaggcaaagtcgtgttctgagaca

SEQ ID NO: 4281878 - DNA, 25 bp, Homo sapien
ctggtaggcaaagtcgtgttctgag

SEQ ID NO: 4281879 - DNA, 25 bp, Homo sapien
ggtaggcaaagtcgtgttctgagac

SEQ ID NO: 4281880 - DNA, 25 bp, Homo sapien
gatattcagccacgtttgggccctg

SEQ ID NO: 4281881 - DNA, 25 bp, Homo sapien
taaacttccagagtgttaagcctgc

SEQ ID NO: 4281882 - DNA, 25 bp, Homo sapien
tgcacagtacccactcaaagcatgg

SEQ ID NO: 4281883 - DNA, 25 bp, Homo sapien
gttctcggtcataacacattcaggg

SEQ ID NO: 4281884 - DNA, 25 bp, Homo sapien
cactccagccaccgtgaccatgccc

SEQ ID NO: 4281885 - DNA, 25 bp, Homo sapien
ctgcacatgctggcccaggttggag

SEQ ID NO: 4281886 - DNA, 25 bp, Homo sapien
actccagccaccgtgaccatgccca

SEQ ID NO: 4281887 - DNA, 25 bp, Homo sapien
ctccagccaccgtgaccatgcccag

SEQ ID NO: 4281888 - DNA, 25 bp, Homo sapien
ctgatggtgacacgggtgcctccgt

SEQ ID NO: 4281889 - DNA, 25 bp, Homo sapien
ctacaggcccagtcagtggctccac

SEQ ID NO: 4281890 - DNA, 25 bp, Homo sapien
cgagtggatgaggggcgctgggcac

SEQ ID NO: 4281891 - DNA, 25 bp, Homo sapien
tgggcactgggtggccacagcctca

SEQ ID NO: 4281892 - DNA, 25 bp, Homo sapien
gctgggcactgggtggccacagcct

SEQ ID NO: 4281893 - DNA, 25 bp, Homo sapien
gcgctgggcactgggtggccacagc

SEQ ID NO: 4281894 - DNA, 25 bp, Homo sapien
tcccgggtcacacaacgtggacgct

SEQ ID NO: 4281895 - DNA, 25 bp, Homo sapien
ctcccgggtcacacaacgtggacgc

SEQ ID NO: 4281896 - DNA, 25 bp, Homo sapien
cacaggcctcccgggtcacacaacg

SEQ ID NO: 4281897 - DNA, 25 bp, Homo sapien
ggcctcccgggtcacacaacgtgga

SEQ ID NO: 4281898 - DNA, 25 bp, Homo sapien
cccacggaacagtcatacagtacca

SEQ ID NO: 4281899 - DNA, 25 bp, Homo sapien
tgtcccacggaacagtcatacagta

SEQ ID NO: 4281900 - DNA, 25 bp, Homo sapien
ccatgtcccacggaacagtcataca

SEQ ID NO: 4281901 - DNA, 25 bp, Homo sapien
cacacagccatactggggcatggca

SEQ ID NO: 4281902 - DNA, 25 bp, Homo sapien
acgcagacggccggcccgacgcaga

SEQ ID NO: 4281903 - DNA, 25 bp, Homo sapien
cagccccacacggagctccggctgc

SEQ ID NO: 4281904 - DNA, 25 bp, Homo sapien
cagaaacagccccacacggagctcc

SEQ ID NO: 4281905 - DNA, 25 bp, Homo sapien
gaaacagccccacacggagctccgg

SEQ ID NO: 4281906 - DNA, 25 bp, Homo sapien
tggaggtggctcacactcgacccgg

SEQ ID NO: 4281907 - DNA, 25 bp, Homo sapien
acacactcattgtctcctgggccat

SEQ ID NO: 4281908 - DNA, 25 bp, Homo sapien
ccagctccatcacacactcattgtc

SEQ ID NO: 4281909 - DNA, 25 bp, Homo sapien
caggtgacatggcactgggtatctg

SEQ ID NO: 4281910 - DNA, 25 bp, Homo sapien
acatggaccggcatcaacgtggagc

SEQ ID NO: 4281911 - DNA, 25 bp, Homo sapien
ggcatcaacgtggagccctgaacgc

SEQ ID NO: 4281912 - DNA, 25 bp, Homo sapien
ggatttcccgctccacatggaccgg

SEQ ID NO: 4281913 - DNA, 25 bp, Homo sapien
ggttcctgcctagcagccggatttc

SEQ ID NO: 4281914 - DNA, 25 bp, Homo sapien
cgggagggccctcaagctctgctga

SEQ ID NO: 4281915 - DNA, 25 bp, Homo sapien
tcatactggtagtcgaggctggacg

SEQ ID NO: 4281916 - DNA, 25 bp, Homo sapien
ggcgggagggccctcaagctctgct

SEQ ID NO: 4281917 - DNA, 25 bp, Homo sapien
gggtgtcatactggtagtcgaggct

SEQ ID NO: 4281918 - DNA, 25 bp, Homo sapien
tcgccgccttctctcgtgagccagt

SEQ ID NO: 4281919 - DNA, 25 bp, Homo sapien
gccttctctcgtgagccagtccagg

SEQ ID NO: 4281920 - DNA, 25 bp, Homo sapien
tctctcgtgagccagtccagggcgg

SEQ ID NO: 4281921 - DNA, 25 bp, Homo sapien
cactgtgggatgaagagcctcgggg

SEQ ID NO: 4281922 - DNA, 25 bp, Homo sapien
ggtgacagcggggaggccaagaggt

SEQ ID NO: 4281923 - DNA, 25 bp, Homo sapien
ctgacggtgacagcggggaggccaa

SEQ ID NO: 4281924 - DNA, 25 bp, Homo sapien
cagcggggaggccaagaggtcctca

SEQ ID NO: 4281925 - DNA, 25 bp, Homo sapien
cggggaggccaagaggtcctcaggt

SEQ ID NO: 4281926 - DNA, 25 bp, Homo sapien
tcctcatggagaggcgaccctgtgg

SEQ ID NO: 4281927 - DNA, 25 bp, Homo sapien
cctcatggagaggcgaccctgtgga

SEQ ID NO: 4281928 - DNA, 25 bp, Homo sapien
tggagccaggggaagatatggagcc

SEQ ID NO: 4281929 - DNA, 25 bp, Homo sapien
gagccaggggaagatatggagccag

SEQ ID NO: 4281930 - DNA, 25 bp, Homo sapien
tccacgggaagggtgtcaggagcag

SEQ ID NO: 4281931 - DNA, 25 bp, Homo sapien
agcagggaaggactagccccaggtg

SEQ ID NO: 4281932 - DNA, 25 bp, Homo sapien
caggctccacgggaagggtgtcagg

SEQ ID NO: 4281933 - DNA, 25 bp, Homo sapien
caggtgagatgtccgaagctgtggc

SEQ ID NO: 4281934 - DNA, 25 bp, Homo sapien
ctcttgcaggagggtctggggagac

SEQ ID NO: 4281935 - DNA, 25 bp, Homo sapien
ttgcaggagggtctggggagacaag

SEQ ID NO: 4281936 - DNA, 25 bp, Homo sapien
gagggtctggggagacaagcgggct

SEQ ID NO: 4281937 - DNA, 25 bp, Homo sapien
ggagggtctggggagacaagcgggc

SEQ ID NO: 4281938 - DNA, 25 bp, Homo sapien
ctgatggcttgcaaccatgggccca

SEQ ID NO: 4281939 - DNA, 25 bp, Homo sapien
gaggccttgtgggtgcacaggtgct

SEQ ID NO: 4281940 - DNA, 25 bp, Homo sapien
gcttgcaaccatgggcccagcatca

SEQ ID NO: 4281941 - DNA, 25 bp, Homo sapien
gctgccagacacaccagttacaccc

SEQ ID NO: 4281942 - DNA, 25 bp, Homo sapien
gcgcagatgggcggagttcagtgac

SEQ ID NO: 4281943 - DNA, 25 bp, Homo sapien
tgcgcagatgggcggagttcagtga

SEQ ID NO: 4281944 - DNA, 25 bp, Homo sapien
gcgatcacaacagcgccaaatctga

SEQ ID NO: 4281945 - DNA, 25 bp, Homo sapien
gaagttttggcgatcacaacagcgc

SEQ ID NO: 4281946 - DNA, 25 bp, Homo sapien
aagagagggaagttttggcgatcac

SEQ ID NO: 4281947 - DNA, 25 bp, Homo sapien
aacagcgccaaatctgagctccacg

SEQ ID NO: 4281948 - DNA, 25 bp, Homo sapien
gggccagggttaagcagcaaggagg

SEQ ID NO: 4281949 - DNA, 25 bp, Homo sapien
cactcagacccagagccgatatcct

SEQ ID NO: 4281950 - DNA, 25 bp, Homo sapien
agacccagagccgatatcctgagcc

SEQ ID NO: 4281951 - DNA, 25 bp, Homo sapien
agagggccagggttaagcagcaagg

SEQ ID NO: 4281952 - DNA, 25 bp, Homo sapien
ggctcctctcggcagcactggggcc

SEQ ID NO: 4281953 - DNA, 25 bp, Homo sapien
ctcggcagcactggggcctcactag

SEQ ID NO: 4281954 - DNA, 25 bp, Homo sapien
cggctcctctcggcagcactggggc

SEQ ID NO: 4281955 - DNA, 25 bp, Homo sapien
ggcagcactggggcctcactagggt

SEQ ID NO: 4281956 - DNA, 25 bp, Homo sapien
actctgatgttccccaaagtggcag

SEQ ID NO: 4281957 - DNA, 25 bp, Homo sapien
aggaatatgactcccctggccacag

SEQ ID NO: 4281958 - DNA, 25 bp, Homo sapien
acatcacaccagaaccagtcagcag

SEQ ID NO: 4281959 - DNA, 25 bp, Homo sapien
gggcacatcacaccagaaccagtca

SEQ ID NO: 4281960 - DNA, 25 bp, Homo sapien
cctcgtctcctctcggctgatgttg

SEQ ID NO: 4281961 - DNA, 25 bp, Homo sapien
tcaggctggaagctccatagccact

SEQ ID NO: 4281962 - DNA, 25 bp, Homo sapien
ctggcccctcgagcactcagaacgg

SEQ ID NO: 4281963 - DNA, 25 bp, Homo sapien
gtctcctctcggctgatgttggcag

SEQ ID NO: 4281964 - DNA, 25 bp, Homo sapien
cccacagtatgggtccctgtgagca

SEQ ID NO: 4281965 - DNA, 25 bp, Homo sapien
cacagtatgggtccctgtgagcaag

SEQ ID NO: 4281966 - DNA, 25 bp, Homo sapien
cacccacagtatgggtccctgtgag

SEQ ID NO: 4281967 - DNA, 25 bp, Homo sapien
gagcaaggcaagatgcacagtccag

SEQ ID NO: 4281968 - DNA, 25 bp, Homo sapien
agtcatgccctggcttgtgcctggc

SEQ ID NO: 4281969 - DNA, 25 bp, Homo sapien
gtcatgccctggcttgtgcctggca

SEQ ID NO: 4281970 - DNA, 25 bp, Homo sapien
cagcagtcatgccctggcttgtgcc

SEQ ID NO: 4281971 - DNA, 25 bp, Homo sapien
caggtgctcaaaggtcccatcaaag

SEQ ID NO: 4281972 - DNA, 25 bp, Homo sapien
gacatacaggtgctcaaaggtccca

SEQ ID NO: 4281973 - DNA, 25 bp, Homo sapien
gtggagtatgggtggccatcgctcc

SEQ ID NO: 4281974 - DNA, 25 bp, Homo sapien
gtgctcaaaggtcccatcaaaggtg

SEQ ID NO: 4281975 - DNA, 25 bp, Homo sapien
acagctgttagctgaatccctggcc

SEQ ID NO: 4281976 - DNA, 25 bp, Homo sapien
ggtctgagccacagggataagcatc

SEQ ID NO: 4281977 - DNA, 25 bp, Homo sapien
tccagaattggtgtggcttccagcg

SEQ ID NO: 4281978 - DNA, 25 bp, Homo sapien
tgactatcacccaggaaagcgatgg

SEQ ID NO: 4281979 - DNA, 25 bp, Homo sapien
gtgcgattagcaagccggtccacct

SEQ ID NO: 4281980 - DNA, 25 bp, Homo sapien
agtagtagtgctggtcccggagaca

SEQ ID NO: 4281981 - DNA, 25 bp, Homo sapien
tgtagcaggcatctcgcgtgcgatt

SEQ ID NO: 4281982 - DNA, 25 bp, Homo sapien
catactcgatgtaggccacctcggt

SEQ ID NO: 4281983 - DNA, 25 bp, Homo sapien
ggctgtctcctcataggagaaggca

SEQ ID NO: 4281984 - DNA, 25 bp, Homo sapien
gaacaggaagtaggcgctggcccca

SEQ ID NO: 4281985 - DNA, 25 bp, Homo sapien
cgtgcaaaggcactcacgaagtggt

SEQ ID NO: 4281986 - DNA, 25 bp, Homo sapien
taggcacgaaaagctctagactgag

SEQ ID NO: 4281987 - DNA, 25 bp, Homo sapien
ccaggagcagctgattcgggttgtt

SEQ ID NO: 4281988 - DNA, 25 bp, Homo sapien
gcagatacgtgccattgggagtgaa

SEQ ID NO: 4281989 - DNA, 25 bp, Homo sapien
gcagccacatattgtgtgtccccag

SEQ ID NO: 4281990 - DNA, 25 bp, Homo sapien
cgtgctgaccgcaggatcattggca

SEQ ID NO: 4281991 - DNA, 25 bp, Homo sapien
acaacagcatgacccgtgtgggagt

SEQ ID NO: 4281992 - DNA, 25 bp, Homo sapien
gatcaggagacaacagcatgacccg

SEQ ID NO: 4281993 - DNA, 25 bp, Homo sapien
ggagacaacagcatgacccgtgtgg

SEQ ID NO: 4281994 - DNA, 25 bp, Homo sapien
acagcatgacccgtgtgggagtcac

SEQ ID NO: 4281995 - DNA, 25 bp, Homo sapien
tgcctgccagttagtgggaaaccgg

SEQ ID NO: 4281996 - DNA, 25 bp, Homo sapien
cgtggagctgtcctcgacaacaaaa

SEQ ID NO: 4281997 - DNA, 25 bp, Homo sapien
ccagggcagactgaaaaggctgatc

SEQ ID NO: 4281998 - DNA, 25 bp, Homo sapien
ctgtctgtagagcaagcacctcccg

SEQ ID NO: 4281999 - DNA, 25 bp, Homo sapien
cgaggcgggcgtcggccgctccggg

SEQ ID NO: 4282000 - DNA, 25 bp, Homo sapien
gggcggaaaactgcgcccgctgccc

SEQ ID NO: 4282001 - DNA, 25 bp, Homo sapien
gaggggcggaaaactgcgcccgctg

SEQ ID NO: 4282002 - DNA, 25 bp, Homo sapien
ccgcagctgttacccggagaccgag

SEQ ID NO: 4282003 - DNA, 25 bp, Homo sapien
aaggcgccttgtttctcccctgcgc

SEQ ID NO: 4282004 - DNA, 25 bp, Homo sapien
tccaaggcgccttgtttctcccctg

SEQ ID NO: 4282005 - DNA, 25 bp, Homo sapien
ctgaactccaaggcgccttgtttct

SEQ ID NO: 4282006 - DNA, 25 bp, Homo sapien
gaactccaaggcgccttgtttctcc

SEQ ID NO: 4282007 - DNA, 25 bp, Homo sapien
attttaattggacattagcacaaag

SEQ ID NO: 4282008 - DNA, 25 bp, Homo sapien
agatactgctccttcagattgaggt

SEQ ID NO: 4282009 - DNA, 25 bp, Homo sapien
tgcctgctggtgagccacacagata

SEQ ID NO: 4282010 - DNA, 25 bp, Homo sapien
tctacaaagcgaagcatgcctgctg

SEQ ID NO: 4282011 - DNA, 25 bp, Homo sapien
tccacattcacagctattgcctcag

SEQ ID NO: 4282012 - DNA, 25 bp, Homo sapien
gattctctacttaaatccacattca

SEQ ID NO: 4282013 - DNA, 25 bp, Homo sapien
gctattgcctcagaccctctggagg

SEQ ID NO: 4282014 - DNA, 25 bp, Homo sapien
aaaggctcgcttcattgctacgatt

SEQ ID NO: 4282015 - DNA, 25 bp, Homo sapien
ctggctttgaatagcatgtagagca

SEQ ID NO: 4282016 - DNA, 25 bp, Homo sapien
ggctttgaatagcatgtagagcaca

SEQ ID NO: 4282017 - DNA, 25 bp, Homo sapien
tggctttgaatagcatgtagagcac

SEQ ID NO: 4282018 - DNA, 25 bp, Homo sapien
gctggctttgaatagcatgtagagc

SEQ ID NO: 4282019 - DNA, 25 bp, Homo sapien
tagctagacgcctgttctcgaatgg

SEQ ID NO: 4282020 - DNA, 25 bp, Homo sapien
gcgcctccaggagtaaagccttcag

SEQ ID NO: 4282021 - DNA, 25 bp, Homo sapien
tcagctcctgtagtcgcacacggtt

SEQ ID NO: 4282022 - DNA, 25 bp, Homo sapien
cacacggttcacataggtggagcca

SEQ ID NO: 4282023 - DNA, 25 bp, Homo sapien
tcctgtgctcgagagtagccagttc

SEQ ID NO: 4282024 - DNA, 25 bp, Homo sapien
tagccagttccaagtactgactgtc

SEQ ID NO: 4282025 - DNA, 25 bp, Homo sapien
tccctggagacacggtccaagcggt

SEQ ID NO: 4282026 - DNA, 25 bp, Homo sapien
gcttggcctggtgaacttccaagtc

SEQ ID NO: 4282027 - DNA, 25 bp, Homo sapien
tgcattcccagcgaggcattcccag

SEQ ID NO: 4282028 - DNA, 25 bp, Homo sapien
gcattcccagcgaggcattcccaga

SEQ ID NO: 4282029 - DNA, 25 bp, Homo sapien
gaggtcgctcgttgctgaatgctgt

SEQ ID NO: 4282030 - DNA, 25 bp, Homo sapien
ggtcttttctctccgggctggcttg

SEQ ID NO: 4282031 - DNA, 25 bp, Homo sapien
tgggcctctcgaacctcgttgagtc

SEQ ID NO: 4282032 - DNA, 25 bp, Homo sapien
aactcttcatatctgtcccaccaag

SEQ ID NO: 4282033 - DNA, 25 bp, Homo sapien
tacgtggggcacacccacgatgtgc

SEQ ID NO: 4282034 - DNA, 25 bp, Homo sapien
ggcacacccacgatgtgctgcatgg

SEQ ID NO: 4282035 - DNA, 25 bp, Homo sapien
cacacccacgatgtgctgcatggca

SEQ ID NO: 4282036 - DNA, 25 bp, Homo sapien
tggggcacacccacgatgtgctgca

SEQ ID NO: 4282037 - DNA, 25 bp, Homo sapien
gctgagagccgcagaagggaacttc

SEQ ID NO: 4282038 - DNA, 25 bp, Homo sapien
tgcccatgagggtgcataccatcca

SEQ ID NO: 4282039 - DNA, 25 bp, Homo sapien
ccttcataaggctgggttccatgcc

SEQ ID NO: 4282040 - DNA, 25 bp, Homo sapien
gacagtgatcccaagctggtgccac

SEQ ID NO: 4282041 - DNA, 25 bp, Homo sapien
tggttccaggaaagcgacgagcttg

SEQ ID NO: 4282042 - DNA, 25 bp, Homo sapien
ccaaagctataggaccacgtgatat

SEQ ID NO: 4282043 - DNA, 25 bp, Homo sapien
aacagaattcgcaaactgctgcacc

SEQ ID NO: 4282044 - DNA, 25 bp, Homo sapien
gcttgaagctctttgcacatgcaca

SEQ ID NO: 4282045 - DNA, 25 bp, Homo sapien
gctcttcccgcgcacggccacaggc

SEQ ID NO: 4282046 - DNA, 25 bp, Homo sapien
tacggttccgattctaccctggcag

SEQ ID NO: 4282047 - DNA, 25 bp, Homo sapien
agtgctcttcccgcgcacggccaca

SEQ ID NO: 4282048 - DNA, 25 bp, Homo sapien
ctcctacggttccgattctaccctg

SEQ ID NO: 4282049 - DNA, 25 bp, Homo sapien
tgacctctgacctgttagtacccgc

SEQ ID NO: 4282050 - DNA, 25 bp, Homo sapien
aacttcctgactaggagccaatcag

SEQ ID NO: 4282051 - DNA, 25 bp, Homo sapien
tgtccggccgcgaaggtaagtgttc

SEQ ID NO: 4282052 - DNA, 25 bp, Homo sapien
catccggtagcgagagttcaacttc

SEQ ID NO: 4282053 - DNA, 25 bp, Homo sapien
ccagtctaggatttgcagcggcagt

SEQ ID NO: 4282054 - DNA, 25 bp, Homo sapien
tatgagcacctattgggatgagggc

SEQ ID NO: 4282055 - DNA, 25 bp, Homo sapien
caagctggccaaacgctatgagcac

SEQ ID NO: 4282056 - DNA, 25 bp, Homo sapien
gagctggaaacgaggtctcctgcct

SEQ ID NO: 4282057 - DNA, 25 bp, Homo sapien
tacttctgggtatgcctagactaaa

SEQ ID NO: 4282058 - DNA, 25 bp, Homo sapien
ataaagtccaggctcttcagtgtgc

SEQ ID NO: 4282059 - DNA, 25 bp, Homo sapien
tgtcatctagggcttcccaagacct

SEQ ID NO: 4282060 - DNA, 25 bp, Homo sapien
gatccattattgtttacctacccag

SEQ ID NO: 4282061 - DNA, 25 bp, Homo sapien
taaacccgaagatgtctgcacacga

SEQ ID NO: 4282062 - DNA, 25 bp, Homo sapien
gaccacatccctgaatgatgcctgg

SEQ ID NO: 4282063 - DNA, 25 bp, Homo sapien
gaaagcgaggtcacggagaccacat

SEQ ID NO: 4282064 - DNA, 25 bp, Homo sapien
tgcctggctcgactcaaacgcaaca

SEQ ID NO: 4282065 - DNA, 25 bp, Homo sapien
tgtcagtcagggcatcttctggttt

SEQ ID NO: 4282066 - DNA, 25 bp, Homo sapien
aatttgaacagtgtcagtcagggca

SEQ ID NO: 4282067 - DNA, 25 bp, Homo sapien
ggaaatttgaacagtgtcagtcagg

SEQ ID NO: 4282068 - DNA, 25 bp, Homo sapien
tcagtcagggcatcttctggttttg

SEQ ID NO: 4282069 - DNA, 25 bp, Homo sapien
tgcacggcctatcgcagaaggacaa

SEQ ID NO: 4282070 - DNA, 25 bp, Homo sapien
tctgtgccgcggaaaccgatgtgga

SEQ ID NO: 4282071 - DNA, 25 bp, Homo sapien
ttcatgatgcactgcgtggaggtcc

SEQ ID NO: 4282072 - DNA, 25 bp, Homo sapien
tgagcccgtccccatggtaactgat

SEQ ID NO: 4282073 - DNA, 25 bp, Homo sapien
ccaattccagcagccgaggccagga

SEQ ID NO: 4282074 - DNA, 25 bp, Homo sapien
agtacagcctgattccaattccagc

SEQ ID NO: 4282075 - DNA, 25 bp, Homo sapien
ggaaagagtacagcctgattccaat

SEQ ID NO: 4282076 - DNA, 25 bp, Homo sapien
atggatggaaagagtacagcctgat

SEQ ID NO: 4282077 - DNA, 25 bp, Homo sapien
catattccatgaggctggtgtcggg

SEQ ID NO: 4282078 - DNA, 25 bp, Homo sapien
cagttgccaggttgtccatctctga

SEQ ID NO: 4282079 - DNA, 25 bp, Homo sapien
caagtgtacagaccctagactcaga

SEQ ID NO: 4282080 - DNA, 25 bp, Homo sapien
ggaacacgaggtattcatgtctggg

SEQ ID NO: 4282081 - DNA, 25 bp, Homo sapien
actgagtgtgctggtggacaggagc

SEQ ID NO: 4282082 - DNA, 25 bp, Homo sapien
agaactgagtgtgctggtggacagg

SEQ ID NO: 4282083 - DNA, 25 bp, Homo sapien
tgagtgtgctggtggacaggagccc

SEQ ID NO: 4282084 - DNA, 25 bp, Homo sapien
gggaagagaactgagtgtgctggtg

SEQ ID NO: 4282085 - DNA, 25 bp, Homo sapien
gaagagaacaaagtctggtcccagc

SEQ ID NO: 4282086 - DNA, 25 bp, Homo sapien
ggagaagaactccagatgtgccctg

SEQ ID NO: 4282087 - DNA, 25 bp, Homo sapien
tgatccccaacaggcatgacaggct

SEQ ID NO: 4282088 - DNA, 25 bp, Homo sapien
tccaggcagacaggtacagctgagt

SEQ ID NO: 4282089 - DNA, 25 bp, Homo sapien
aaggaaccgcgcctgcacaccactc

SEQ ID NO: 4282090 - DNA, 25 bp, Homo sapien
gtaaggaaccgcgcctgcacaccac

SEQ ID NO: 4282091 - DNA, 25 bp, Homo sapien
ggaaccgcgcctgcacaccactcac

SEQ ID NO: 4282092 - DNA, 25 bp, Homo sapien
aggaaccgcgcctgcacaccactca

SEQ ID NO: 4282093 - DNA, 25 bp, Homo sapien
ggcatccatgtaggccgggttgtaa

SEQ ID NO: 4282094 - DNA, 25 bp, Homo sapien
cgggttgtaaggaggctggctggcg

SEQ ID NO: 4282095 - DNA, 25 bp, Homo sapien
ggccgggttgtaaggaggctggctg

SEQ ID NO: 4282096 - DNA, 25 bp, Homo sapien
gggcatccatgtaggccgggttgta

SEQ ID NO: 4282097 - DNA, 25 bp, Homo sapien
gttggctgtgagcatggtgggctgc

SEQ ID NO: 4282098 - DNA, 25 bp, Homo sapien
gggctgccgtgtgagtggcaggcaa

SEQ ID NO: 4282099 - DNA, 25 bp, Homo sapien
agggatgctggcagagactcgggaa

SEQ ID NO: 4282100 - DNA, 25 bp, Homo sapien
tttgggatgggtgcccgagggatgc

SEQ ID NO: 4282101 - DNA, 25 bp, Homo sapien
agccctggtagcttggtccagggta

SEQ ID NO: 4282102 - DNA, 25 bp, Homo sapien
gtgggtactgcattgggtagggtgc

SEQ ID NO: 4282103 - DNA, 25 bp, Homo sapien
tccagggtagctgggcggcacactt

SEQ ID NO: 4282104 - DNA, 25 bp, Homo sapien
ccagggtctcgtggtaggccggtgg

SEQ ID NO: 4282105 - DNA, 25 bp, Homo sapien
tgaggataaggggcatgcaccacag

SEQ ID NO: 4282106 - DNA, 25 bp, Homo sapien
ccaggcttgccacccatccctccag

SEQ ID NO: 4282107 - DNA, 25 bp, Homo sapien
tgcaaagagaattccagtcaggacc

SEQ ID NO: 4282108 - DNA, 25 bp, Homo sapien
agggcctggtcagcttcccttacca

SEQ ID NO: 4282109 - DNA, 25 bp, Homo sapien
tctccccaggtcttgagagccaggc

SEQ ID NO: 4282110 - DNA, 25 bp, Homo sapien
gtggtcggcggcacgtcttgtaaag

SEQ ID NO: 4282111 - DNA, 25 bp, Homo sapien
ggcggcacgtcttgtaaaggcagca

SEQ ID NO: 4282112 - DNA, 25 bp, Homo sapien
cggcggcacgtcttgtaaaggcagc

SEQ ID NO: 4282113 - DNA, 25 bp, Homo sapien
gcggcacgtcttgtaaaggcagcag

SEQ ID NO: 4282114 - DNA, 25 bp, Homo sapien
aggccaacggccaaggtcgctccga

SEQ ID NO: 4282115 - DNA, 25 bp, Homo sapien
gccaacggccaaggtcgctccgaac

SEQ ID NO: 4282116 - DNA, 25 bp, Homo sapien
ggccaacggccaaggtcgctccgaa

SEQ ID NO: 4282117 - DNA, 25 bp, Homo sapien
tcaggccaacggccaaggtcgctcc

SEQ ID NO: 4282118 - DNA, 25 bp, Homo sapien
tagacgtgacccggggcacctcgcc

SEQ ID NO: 4282119 - DNA, 25 bp, Homo sapien
ctagacgtgacccggggcacctcgc

SEQ ID NO: 4282120 - DNA, 25 bp, Homo sapien
cccatcgtgggccactcagtttcaa

SEQ ID NO: 4282121 - DNA, 25 bp, Homo sapien
aggaagcacagacgcgaagccccgt

SEQ ID NO: 4282122 - DNA, 25 bp, Homo sapien
aaatctcctccagatgacgtcagcc

SEQ ID NO: 4282123 - DNA, 25 bp, Homo sapien
agcagccggctagcagccaaggagc

SEQ ID NO: 4282124 - DNA, 25 bp, Homo sapien
ctgctcttctcgatgcatgggcaaa

SEQ ID NO: 4282125 - DNA, 25 bp, Homo sapien
cgatgcatgggcaaaatagcctggg

SEQ ID NO: 4282126 - DNA, 25 bp, Homo sapien
gcagggcacgccaagcacacggcac

SEQ ID NO: 4282127 - DNA, 25 bp, Homo sapien
cagtgctatgcacaccacggcggca

SEQ ID NO: 4282128 - DNA, 25 bp, Homo sapien
gggagcttgttccgcactgtctcct

SEQ ID NO: 4282129 - DNA, 25 bp, Homo sapien
ctctgggagcttgttccgcactgtc

SEQ ID NO: 4282130 - DNA, 25 bp, Homo sapien
ctgggagcttgttccgcactgtctc

SEQ ID NO: 4282131 - DNA, 25 bp, Homo sapien
tctgggagcttgttccgcactgtct

SEQ ID NO: 4282132 - DNA, 25 bp, Homo sapien
cctgacatggggtcgttgtagccag

SEQ ID NO: 4282133 - DNA, 25 bp, Homo sapien
gccagggcgaaacctcagcgccgag

SEQ ID NO: 4282134 - DNA, 25 bp, Homo sapien
gtcgttgtagccagggcgaaacctc

SEQ ID NO: 4282135 - DNA, 25 bp, Homo sapien
tccaccggctctacactggcaggca

SEQ ID NO: 4282136 - DNA, 25 bp, Homo sapien
ttagggcaccacaaaacgtgcacag

SEQ ID NO: 4282137 - DNA, 25 bp, Homo sapien
tgcaaacaggaaaccttgtgattag

SEQ ID NO: 4282138 - DNA, 25 bp, Homo sapien
gcgccagcacaaacactaccttagg

SEQ ID NO: 4282139 - DNA, 25 bp, Homo sapien
ttgtgattagcacaatgaagcccca

SEQ ID NO: 4282140 - DNA, 25 bp, Homo sapien
ccacacatcctctcaggtgtccacc

SEQ ID NO: 4282141 - DNA, 25 bp, Homo sapien
ggactctgcccacaccgggatctca

SEQ ID NO: 4282142 - DNA, 25 bp, Homo sapien
gatctcatagcacaaagccacacat

SEQ ID NO: 4282143 - DNA, 25 bp, Homo sapien
acacatcctctcaggtgtccaccag

SEQ ID NO: 4282144 - DNA, 25 bp, Homo sapien
catcaaaattcgtgaaacacagata

SEQ ID NO: 4282145 - DNA, 25 bp, Homo sapien
atttatcagaaaacaggaatggtta

SEQ ID NO: 4282146 - DNA, 25 bp, Homo sapien
aataaatgatatgggccaggggaag

SEQ ID NO: 4282147 - DNA, 25 bp, Homo sapien
aatagttcttagagggagatttgta

SEQ ID NO: 4282148 - DNA, 25 bp, Homo sapien
gcagcagtattggtcatcacaggta

SEQ ID NO: 4282149 - DNA, 25 bp, Homo sapien
aaatctggacaggactcggggaaga

SEQ ID NO: 4282150 - DNA, 25 bp, Homo sapien
aaatttcttcagcacgtcagagcag

SEQ ID NO: 4282151 - DNA, 25 bp, Homo sapien
cacgtcagagcagcagtattggtca

SEQ ID NO: 4282152 - DNA, 25 bp, Homo sapien
aaggtcttcacagcccaatctgagc

SEQ ID NO: 4282153 - DNA, 25 bp, Homo sapien
gaacccatatgcagcaaggtcttca

SEQ ID NO: 4282154 - DNA, 25 bp, Homo sapien
ctcaggtgaacccatatgcagcaag

SEQ ID NO: 4282155 - DNA, 25 bp, Homo sapien
ctggtggctcaggtgaacccatatg

SEQ ID NO: 4282156 - DNA, 25 bp, Homo sapien
tggtgtctaggcagggttgttcagg

SEQ ID NO: 4282157 - DNA, 25 bp, Homo sapien
cagggttgttcaggcaaggagggtg

SEQ ID NO: 4282158 - DNA, 25 bp, Homo sapien
cccaccgttccaggacagacaaagg

SEQ ID NO: 4282159 - DNA, 25 bp, Homo sapien
ccatcccctggaacatgggcgggag

SEQ ID NO: 4282160 - DNA, 25 bp, Homo sapien
agcaacggcaacaggatccgcggcg

SEQ ID NO: 4282161 - DNA, 25 bp, Homo sapien
gcaacagcaacggcaacaggatccg

SEQ ID NO: 4282162 - DNA, 25 bp, Homo sapien
aacagcaacggcaacaggatccgcg

SEQ ID NO: 4282163 - DNA, 25 bp, Homo sapien
caacggcaacaggatccgcggcgcg

SEQ ID NO: 4282164 - DNA, 25 bp, Homo sapien
cgggcggacggacgcgagcgccggg

SEQ ID NO: 4282165 - DNA, 25 bp, Homo sapien
cacagcctcagtgatccgcgcggcc

SEQ ID NO: 4282166 - DNA, 25 bp, Homo sapien
ggacggacgcgagcgccgggcgcag

SEQ ID NO: 4282167 - DNA, 25 bp, Homo sapien
gacgggcggacggacgcgagcgccg

SEQ ID NO: 4282168 - DNA, 25 bp, Homo sapien
ctaggtgaggcggtgcgaggacagt

SEQ ID NO: 4282169 - DNA, 25 bp, Homo sapien
ggaatatgcaccctgacactgagcg

SEQ ID NO: 4282170 - DNA, 25 bp, Homo sapien
ttgcccgagggctacgtgaggacta

SEQ ID NO: 4282171 - DNA, 25 bp, Homo sapien
cggcggatcctcacttgcccgaggg

SEQ ID NO: 4282172 - DNA, 25 bp, Homo sapien
agctcagaggacactcgatctcctg

SEQ ID NO: 4282173 - DNA, 25 bp, Homo sapien
tacaggcccagtcgccagctcagag

SEQ ID NO: 4282174 - DNA, 25 bp, Homo sapien
agtagacactccacaaatgccggtt

SEQ ID NO: 4282175 - DNA, 25 bp, Homo sapien
atcccaaggtgatccccagccccag

SEQ ID NO: 4282176 - DNA, 25 bp, Homo sapien
caacccctagcctcttctgcacctc

SEQ ID NO: 4282177 - DNA, 25 bp, Homo sapien
ccctagcctcttctgcacctccttt

SEQ ID NO: 4282178 - DNA, 25 bp, Homo sapien
acctcctttgcctgctgaagcaatg

SEQ ID NO: 4282179 - DNA, 25 bp, Homo sapien
gcctgctgaagcaatgtgtcctccc

SEQ ID NO: 4282180 - DNA, 25 bp, Homo sapien
tcctgcaaagttgcctctccctcag

SEQ ID NO: 4282181 - DNA, 25 bp, Homo sapien
gaaggcagaaacatagctgctggcc

SEQ ID NO: 4282182 - DNA, 25 bp, Homo sapien
gaatcctgcaaagttgcctctccct

SEQ ID NO: 4282183 - DNA, 25 bp, Homo sapien
agcccagcgacagccatcctctgcc

SEQ ID NO: 4282184 - DNA, 25 bp, Homo sapien
ctcttcagtgagagtgaacatgggg

SEQ ID NO: 4282185 - DNA, 25 bp, Homo sapien
ggtggaagctgaacgaaggatccca

SEQ ID NO: 4282186 - DNA, 25 bp, Homo sapien
gctgaacgaaggatcccaacacaga

SEQ ID NO: 4282187 - DNA, 25 bp, Homo sapien
gaagctgaacgaaggatcccaacac

SEQ ID NO: 4282188 - DNA, 25 bp, Homo sapien
gctggacacagtgttgcatgtggct

SEQ ID NO: 4282189 - DNA, 25 bp, Homo sapien
tgctggacacagtgttgcatgtggc

SEQ ID NO: 4282190 - DNA, 25 bp, Homo sapien
tggacacagtgttgcatgtggctga

SEQ ID NO: 4282191 - DNA, 25 bp, Homo sapien
atgctggacacagtgttgcatgtgg

SEQ ID NO: 4282192 - DNA, 25 bp, Homo sapien
gagagtgaacacctaagagctgcgc

SEQ ID NO: 4282193 - DNA, 25 bp, Homo sapien
tcaagaatatccctgcatggcatgg

SEQ ID NO: 4282194 - DNA, 25 bp, Homo sapien
tgcactgttgctgaccaagggaacc

SEQ ID NO: 4282195 - DNA, 25 bp, Homo sapien
taagggtgacatggatacaacggcc

SEQ ID NO: 4282196 - DNA, 25 bp, Homo sapien
cactggtgagcaggcaccgtgacaa

SEQ ID NO: 4282197 - DNA, 25 bp, Homo sapien
tcactggtgagcaggcaccgtgaca

SEQ ID NO: 4282198 - DNA, 25 bp, Homo sapien
aggcaccgtgacaagggcttcctct

SEQ ID NO: 4282199 - DNA, 25 bp, Homo sapien
gagcaggcaccgtgacaagggcttc

SEQ ID NO: 4282200 - DNA, 25 bp, Homo sapien
caagagcttcgtgccacatagcggg

SEQ ID NO: 4282201 - DNA, 25 bp, Homo sapien
catgacatgcccagatcttcaggga

SEQ ID NO: 4282202 - DNA, 25 bp, Homo sapien
tgagtcaattgaggaggaacccctg

SEQ ID NO: 4282203 - DNA, 25 bp, Homo sapien
tgaagccctcagctatagaaggacc

SEQ ID NO: 4282204 - DNA, 25 bp, Homo sapien
ccacgttcaggaatatggactccac

SEQ ID NO: 4282205 - DNA, 25 bp, Homo sapien
gttcacagcagccacgttcaggaat

SEQ ID NO: 4282206 - DNA, 25 bp, Homo sapien
aggcctgtcccggtgcgtgttcaca

SEQ ID NO: 4282207 - DNA, 25 bp, Homo sapien
cacagcagccacgttcaggaatatg

SEQ ID NO: 4282208 - DNA, 25 bp, Homo sapien
ggagtcagcttcaggactgtgtgca

SEQ ID NO: 4282209 - DNA, 25 bp, Homo sapien
ggactgtgtgcagcggacacttgag

SEQ ID NO: 4282210 - DNA, 25 bp, Homo sapien
ctgtgtgcagcggacacttgaggta

SEQ ID NO: 4282211 - DNA, 25 bp, Homo sapien
gcagcggacacttgaggtagggcag

SEQ ID NO: 4282212 - DNA, 25 bp, Homo sapien
tgccttgtcgaggaagtaggccagc

SEQ ID NO: 4282213 - DNA, 25 bp, Homo sapien
aggggaccgcacactgtctacaggg

SEQ ID NO: 4282214 - DNA, 25 bp, Homo sapien
ttgagcgccccggaaagggctgaca

SEQ ID NO: 4282215 - DNA, 25 bp, Homo sapien
acacctgaggaagggactaaggcct

SEQ ID NO: 4282216 - DNA, 25 bp, Homo sapien
gctgacaactcgctgggaaaggagc

SEQ ID NO: 4282217 - DNA, 25 bp, Homo sapien
acttgtcctggtcccgcagggcgaa

SEQ ID NO: 4282218 - DNA, 25 bp, Homo sapien
tatcctgaatttcctcgtaggtcat

SEQ ID NO: 4282219 - DNA, 25 bp, Homo sapien
actccagtggataattatcctgaat

SEQ ID NO: 4282220 - DNA, 25 bp, Homo sapien
taccggtacttgtcctggtcccgca

SEQ ID NO: 4282221 - DNA, 25 bp, Homo sapien
gatgttatttggcaatgtaaaggaa

SEQ ID NO: 4282222 - DNA, 25 bp, Homo sapien
catagcccaaaagtggcaacaactc

SEQ ID NO: 4282223 - DNA, 25 bp, Homo sapien
gatgggcacaggatttctatctggg

SEQ ID NO: 4282224 - DNA, 25 bp, Homo sapien
tagtggtagcttaaggcagaaggaa

SEQ ID NO: 4282225 - DNA, 25 bp, Homo sapien
agatgcaataccacacccattagga

SEQ ID NO: 4282226 - DNA, 25 bp, Homo sapien
aaaatatatggacagaaagcaggaa

SEQ ID NO: 4282227 - DNA, 25 bp, Homo sapien
gacagaaagcaggaataacaaatca

SEQ ID NO: 4282228 - DNA, 25 bp, Homo sapien
aaaaccaagatgcaataccacaccc

SEQ ID NO: 4282229 - DNA, 25 bp, Homo sapien
gataccaaacagtctaacacacaca

SEQ ID NO: 4282230 - DNA, 25 bp, Homo sapien
accagaagttcagtgacctgtggga

SEQ ID NO: 4282231 - DNA, 25 bp, Homo sapien
acccagaaatccgagaatctcaata

SEQ ID NO: 4282232 - DNA, 25 bp, Homo sapien
taaaccccaaggatgataaacataa

SEQ ID NO: 4282233 - DNA, 25 bp, Homo sapien
catcgatctcgttgaggaccttcca

SEQ ID NO: 4282234 - DNA, 25 bp, Homo sapien
tattttggtcactgatgaactgggc

SEQ ID NO: 4282235 - DNA, 25 bp, Homo sapien
tgaactgggctagactcttggcaaa

SEQ ID NO: 4282236 - DNA, 25 bp, Homo sapien
agtgcctcagccgtctggattgtcc

SEQ ID NO: 4282237 - DNA, 25 bp, Homo sapien
aatacatcataagcaaactcagacc

SEQ ID NO: 4282238 - DNA, 25 bp, Homo sapien
caaactcagacccacaggtcttggg

SEQ ID NO: 4282239 - DNA, 25 bp, Homo sapien
gcaaactcagacccacaggtcttgg

SEQ ID NO: 4282240 - DNA, 25 bp, Homo sapien
ttgaggttgagctcgctctccccgt

SEQ ID NO: 4282241 - DNA, 25 bp, Homo sapien
gaggtaatatacgatgcggctctgg

SEQ ID NO: 4282242 - DNA, 25 bp, Homo sapien
catgatcttgatataggacaggtcc

SEQ ID NO: 4282243 - DNA, 25 bp, Homo sapien
acacggttcaccacgtagctctggc

SEQ ID NO: 4282244 - DNA, 25 bp, Homo sapien
tgtccagagagaaagtagaaagagg

SEQ ID NO: 4282245 - DNA, 25 bp, Homo sapien
gtccagagagaaagtagaaagaggc

SEQ ID NO: 4282246 - DNA, 25 bp, Homo sapien
ctgtccagagagaaagtagaaagag

SEQ ID NO: 4282247 - DNA, 25 bp, Homo sapien
tgcccggcccgtattacacaatctt

SEQ ID NO: 4282248 - DNA, 25 bp, Homo sapien
tgtctctccacaatgacgagttgta

SEQ ID NO: 4282249 - DNA, 25 bp, Homo sapien
ggcccgtattacacaatcttataga

SEQ ID NO: 4282250 - DNA, 25 bp, Homo sapien
ctaagcacaagtttgtattccagcc

SEQ ID NO: 4282251 - DNA, 25 bp, Homo sapien
tctagcgactcgtaggagttctcat

SEQ ID NO: 4282252 - DNA, 25 bp, Homo sapien
tcgcggttgacatagtcagggctgc

SEQ ID NO: 4282253 - DNA, 25 bp, Homo sapien
cgtagcctcatcactgtcgcggttg

SEQ ID NO: 4282254 - DNA, 25 bp, Homo sapien
cactcaatgcgcctcatgaagtcct

SEQ ID NO: 4282255 - DNA, 25 bp, Homo sapien
cacagatggactcgacaaaaaaggt

SEQ ID NO: 4282256 - DNA, 25 bp, Homo sapien
gatccacacagatggactcgacaaa

SEQ ID NO: 4282257 - DNA, 25 bp, Homo sapien
tccacacagatggactcgacaaaaa

SEQ ID NO: 4282258 - DNA, 25 bp, Homo sapien
cacacagatggactcgacaaaaaag

SEQ ID NO: 4282259 - DNA, 25 bp, Homo sapien
aaattaaagatggtcgctctccgtt

SEQ ID NO: 4282260 - DNA, 25 bp, Homo sapien
gatggtcgctctccgttctcgggtg

SEQ ID NO: 4282261 - DNA, 25 bp, Homo sapien
cgttctcgggtggtgtttgtggcat

SEQ ID NO: 4282262 - DNA, 25 bp, Homo sapien
tcgctctccgttctcgggtggtgtt

SEQ ID NO: 4282263 - DNA, 25 bp, Homo sapien
ctcactaaggaaccgccggacgtca

SEQ ID NO: 4282264 - DNA, 25 bp, Homo sapien
tcactaaggaaccgccggacgtcac

SEQ ID NO: 4282265 - DNA, 25 bp, Homo sapien
ctcctcactaaggaaccgccggacg

SEQ ID NO: 4282266 - DNA, 25 bp, Homo sapien
cactaaggaaccgccggacgtcacg

SEQ ID NO: 4282267 - DNA, 25 bp, Homo sapien
tcaaagggctctcatcaggacgata

SEQ ID NO: 4282268 - DNA, 25 bp, Homo sapien
ctggcattggtagggacatttctcc

SEQ ID NO: 4282269 - DNA, 25 bp, Homo sapien
tacagcggcagaagctgatctgaga

SEQ ID NO: 4282270 - DNA, 25 bp, Homo sapien
caatgggtcttccagttaaagcctc

SEQ ID NO: 4282271 - DNA, 25 bp, Homo sapien
gctattttgtgcgagactcctggcc

SEQ ID NO: 4282272 - DNA, 25 bp, Homo sapien
gatggacactttttagcggtggatg

SEQ ID NO: 4282273 - DNA, 25 bp, Homo sapien
tctgggcgctgatgtaaacttgcta

SEQ ID NO: 4282274 - DNA, 25 bp, Homo sapien
tgaggaatattggaatgatggacac

SEQ ID NO: 4282275 - DNA, 25 bp, Homo sapien
aaattcaaaagatttgtaggtcttg

SEQ ID NO: 4282276 - DNA, 25 bp, Homo sapien
aaaagatttgtaggtcttgaccacg

SEQ ID NO: 4282277 - DNA, 25 bp, Homo sapien
tcattgtcggggagaaaaaattcaa

SEQ ID NO: 4282278 - DNA, 25 bp, Homo sapien
gccctcttcattgtcggggagaaaa

SEQ ID NO: 4282279 - DNA, 25 bp, Homo sapien
ggcccaccatgacaatgagagttgg

SEQ ID NO: 4282280 - DNA, 25 bp, Homo sapien
caccaatccagttcaggtatcgagt

SEQ ID NO: 4282281 - DNA, 25 bp, Homo sapien
cccgagtgggcacaccaatccagtt

SEQ ID NO: 4282282 - DNA, 25 bp, Homo sapien
ggcaggcccaccatgacaatgagag

SEQ ID NO: 4282283 - DNA, 25 bp, Homo sapien
ttctctctagactgatcacttacag

SEQ ID NO: 4282284 - DNA, 25 bp, Homo sapien
tctagactgatcacttacagcagaa

SEQ ID NO: 4282285 - DNA, 25 bp, Homo sapien
gaagccctgtggtatctgagccctt

SEQ ID NO: 4282286 - DNA, 25 bp, Homo sapien
gccctgtggtatctgagccctttag

SEQ ID NO: 4282287 - DNA, 25 bp, Homo sapien
ctcggcaccgactgcccttgggact

SEQ ID NO: 4282288 - DNA, 25 bp, Homo sapien
gtaattcacctagggccacacagct

SEQ ID NO: 4282289 - DNA, 25 bp, Homo sapien
ggtgagccccttaacaattccatga

SEQ ID NO: 4282290 - DNA, 25 bp, Homo sapien
tggatacttacatgtcccgggacac

SEQ ID NO: 4282291 - DNA, 25 bp, Homo sapien
gctcagctttaaggccaagaggcac

SEQ ID NO: 4282292 - DNA, 25 bp, Homo sapien
tcagggggttctgtgtcaattcccg

SEQ ID NO: 4282293 - DNA, 25 bp, Homo sapien
tgctgtatggcatccagatcttctt

SEQ ID NO: 4282294 - DNA, 25 bp, Homo sapien
caccgcgctggcaagcgtgcagagc

SEQ ID NO: 4282295 - DNA, 25 bp, Homo sapien
agcgggccgcccattgctgtatggc

SEQ ID NO: 4282296 - DNA, 25 bp, Homo sapien
ggccgggatgagtcggactgcgccg

SEQ ID NO: 4282297 - DNA, 25 bp, Homo sapien
atgagtcggactgcgccgcttccaa

SEQ ID NO: 4282298 - DNA, 25 bp, Homo sapien
ggatgagtcggactgcgccgcttcc

SEQ ID NO: 4282299 - DNA, 25 bp, Homo sapien
cgggatgagtcggactgcgccgctt

SEQ ID NO: 4282300 - DNA, 25 bp, Homo sapien
atacgttatggttgccttttactat

SEQ ID NO: 4282301 - DNA, 25 bp, Homo sapien
tacgttatggttgccttttactata

SEQ ID NO: 4282302 - DNA, 25 bp, Homo sapien
tgctgctccccggccccaggtcggt

SEQ ID NO: 4282303 - DNA, 25 bp, Homo sapien
ccggccccaggtcggtcagggagct

SEQ ID NO: 4282304 - DNA, 25 bp, Homo sapien
ccccaggtcggtcagggagctgcct

SEQ ID NO: 4282305 - DNA, 25 bp, Homo sapien
tgctccccggccccaggtcggtcag

SEQ ID NO: 4282306 - DNA, 25 bp, Homo sapien
gtgcacaccactgggattctcgcac

SEQ ID NO: 4282307 - DNA, 25 bp, Homo sapien
tgggattctcgcacatcccatcctt

SEQ ID NO: 4282308 - DNA, 25 bp, Homo sapien
tgtcgcggcctgggtgcacaccact

SEQ ID NO: 4282309 - DNA, 25 bp, Homo sapien
gattctcgcacatcccatccttcag

SEQ ID NO: 4282310 - DNA, 25 bp, Homo sapien
cacaatgctcacaggcttgctggtc

SEQ ID NO: 4282311 - DNA, 25 bp, Homo sapien
tacatacacaatgctcacaggcttg

SEQ ID NO: 4282312 - DNA, 25 bp, Homo sapien
ctgctacatacacaatgctcacagg

SEQ ID NO: 4282313 - DNA, 25 bp, Homo sapien
gacctccatgtctgctacatacaca

SEQ ID NO: 4282314 - DNA, 25 bp, Homo sapien
atccttcagtcgctttgtgtttatt

SEQ ID NO: 4282315 - DNA, 25 bp, Homo sapien
cttcagtcgctttgtgtttattgag

SEQ ID NO: 4282316 - DNA, 25 bp, Homo sapien
ccttcagtcgctttgtgtttattga

SEQ ID NO: 4282317 - DNA, 25 bp, Homo sapien
tccttcagtcgctttgtgtttattg

SEQ ID NO: 4282318 - DNA, 25 bp, Homo sapien
cagtgttgagctctcgtgttgaggc

SEQ ID NO: 4282319 - DNA, 25 bp, Homo sapien
acagagtttggttggagctccggca

SEQ ID NO: 4282320 - DNA, 25 bp, Homo sapien
catgtggcagtgacccaacttagca

SEQ ID NO: 4282321 - DNA, 25 bp, Homo sapien
acagcagtgaccttacgtggcagca

SEQ ID NO: 4282322 - DNA, 25 bp, Homo sapien
gcccgggcttgctccagtaagatct

SEQ ID NO: 4282323 - DNA, 25 bp, Homo sapien
gggacatccagcgataggacaatgc

SEQ ID NO: 4282324 - DNA, 25 bp, Homo sapien
tgcaagaggccgatggggacatcca

SEQ ID NO: 4282325 - DNA, 25 bp, Homo sapien
cagcgataggacaatgcgcgagcca

SEQ ID NO: 4282326 - DNA, 25 bp, Homo sapien
tggggagaattctgagggcggagct

SEQ ID NO: 4282327 - DNA, 25 bp, Homo sapien
tgaggccgcaggtcggggagtggtc

SEQ ID NO: 4282328 - DNA, 25 bp, Homo sapien
tgggataggggtcactgggacaacc

SEQ ID NO: 4282329 - DNA, 25 bp, Homo sapien
atcaggaccatcagcaacagcagag

SEQ ID NO: 4282330 - DNA, 25 bp, Homo sapien
cttctggggtaaggcagcctgctgt

SEQ ID NO: 4282331 - DNA, 25 bp, Homo sapien
tgcttctggggtaaggcagcctgct

SEQ ID NO: 4282332 - DNA, 25 bp, Homo sapien
gcttctggggtaaggcagcctgctg

SEQ ID NO: 4282333 - DNA, 25 bp, Homo sapien
ttctggggtaaggcagcctgctgtg

SEQ ID NO: 4282334 - DNA, 25 bp, Homo sapien
cagcagctttaatgccccccagaat

SEQ ID NO: 4282335 - DNA, 25 bp, Homo sapien
gcagctttaatgccccccagaatca

SEQ ID NO: 4282336 - DNA, 25 bp, Homo sapien
aaacagcagctttaatgccccccag

SEQ ID NO: 4282337 - DNA, 25 bp, Homo sapien
aacagcagctttaatgccccccaga

SEQ ID NO: 4282338 - DNA, 25 bp, Homo sapien
tgtcatcacaggcttgggtcaaggg

SEQ ID NO: 4282339 - DNA, 25 bp, Homo sapien
actgaaataacggacgtgcacacgc

SEQ ID NO: 4282340 - DNA, 25 bp, Homo sapien
tgaatctcagctcattatctgggcc

SEQ ID NO: 4282341 - DNA, 25 bp, Homo sapien
taacggacgtgcacacgcacgctca

SEQ ID NO: 4282342 - DNA, 25 bp, Homo sapien
gacaggttggaaacggtcgtcagcc

SEQ ID NO: 4282343 - DNA, 25 bp, Homo sapien
ccccggagacgctcaggcagaggca

SEQ ID NO: 4282344 - DNA, 25 bp, Homo sapien
gaaacggtcgtcagccatctgacct

SEQ ID NO: 4282345 - DNA, 25 bp, Homo sapien
cttccccggagacgctcaggcagag

SEQ ID NO: 4282346 - DNA, 25 bp, Homo sapien
tgcctgtcacagcccgatggtacca

SEQ ID NO: 4282347 - DNA, 25 bp, Homo sapien
taccagcgcagggtgtaggcagtgc

SEQ ID NO: 4282348 - DNA, 25 bp, Homo sapien
ccaccatagacaaaagggtgacagg

SEQ ID NO: 4282349 - DNA, 25 bp, Homo sapien
ccctcatccagtggcagggaacagg

SEQ ID NO: 4282350 - DNA, 25 bp, Homo sapien
aatggggtcaagtcagcagggtttg

SEQ ID NO: 4282351 - DNA, 25 bp, Homo sapien
gccaatggggtcaagtcagcagggt

SEQ ID NO: 4282352 - DNA, 25 bp, Homo sapien
ccaatggggtcaagtcagcagggtt

SEQ ID NO: 4282353 - DNA, 25 bp, Homo sapien
caatggggtcaagtcagcagggttt

SEQ ID NO: 4282354 - DNA, 25 bp, Homo sapien
ccgctgggggcagccccccattctc

SEQ ID NO: 4282355 - DNA, 25 bp, Homo sapien
gctgggggcagccccccattctcac

SEQ ID NO: 4282356 - DNA, 25 bp, Homo sapien
cgctgggggcagccccccattctca

SEQ ID NO: 4282357 - DNA, 25 bp, Homo sapien
cccgctgggggcagccccccattct

SEQ ID NO: 4282358 - DNA, 25 bp, Homo sapien
tcctccacagaatactcggagtatt

SEQ ID NO: 4282359 - DNA, 25 bp, Homo sapien
tggtactcctccacagaatactcgg

SEQ ID NO: 4282360 - DNA, 25 bp, Homo sapien
gaatactcggagtattcagagtact

SEQ ID NO: 4282361 - DNA, 25 bp, Homo sapien
actcggagtattcagagtactcatc

SEQ ID NO: 4282362 - DNA, 25 bp, Homo sapien
tcctctgcatgagagacgcggagca

SEQ ID NO: 4282363 - DNA, 25 bp, Homo sapien
tcctcctctgcatgagagacgcgga

SEQ ID NO: 4282364 - DNA, 25 bp, Homo sapien
ctctgcatgagagacgcggagcaca

SEQ ID NO: 4282365 - DNA, 25 bp, Homo sapien
tctgcatgagagacgcggagcacag

SEQ ID NO: 4282366 - DNA, 25 bp, Homo sapien
ggggcctcagggccctgaagtcacc

SEQ ID NO: 4282367 - DNA, 25 bp, Homo sapien
gcctcagggccctgaagtcaccatg

SEQ ID NO: 4282368 - DNA, 25 bp, Homo sapien
ggcctcagggccctgaagtcaccat

SEQ ID NO: 4282369 - DNA, 25 bp, Homo sapien
gggcctcagggccctgaagtcacca

SEQ ID NO: 4282370 - DNA, 25 bp, Homo sapien
gatccagatgcgatgaactggccct

SEQ ID NO: 4282371 - DNA, 25 bp, Homo sapien
tccagatgcgatgaactggccctgg

SEQ ID NO: 4282372 - DNA, 25 bp, Homo sapien
tgatccagatgcgatgaactggccc

SEQ ID NO: 4282373 - DNA, 25 bp, Homo sapien
cagatgcgatgaactggccctggca

SEQ ID NO: 4282374 - DNA, 25 bp, Homo sapien
gctgactcatctcttggcgcacaaa

SEQ ID NO: 4282375 - DNA, 25 bp, Homo sapien
cacagtgctgactcatctcttggcg

SEQ ID NO: 4282376 - DNA, 25 bp, Homo sapien
cagtgctgactcatctcttggcgca

SEQ ID NO: 4282377 - DNA, 25 bp, Homo sapien
gactcatctcttggcgcacaaagcc

SEQ ID NO: 4282378 - DNA, 25 bp, Homo sapien
agcagaagaccacagggaccataaa

SEQ ID NO: 4282379 - DNA, 25 bp, Homo sapien
aggaaggacatagggcacataatac

SEQ ID NO: 4282380 - DNA, 25 bp, Homo sapien
caggaaggacatagggcacataata

SEQ ID NO: 4282381 - DNA, 25 bp, Homo sapien
gaccataaagaacccatggcccaca

SEQ ID NO: 4282382 - DNA, 25 bp, Homo sapien
ccttctcgcctcgaggaccggcagg

SEQ ID NO: 4282383 - DNA, 25 bp, Homo sapien
tctcccttctcgcctcgaggaccgg

SEQ ID NO: 4282384 - DNA, 25 bp, Homo sapien
ttctcgcctcgaggaccggcaggcc

SEQ ID NO: 4282385 - DNA, 25 bp, Homo sapien
tcgcctcgaggaccggcaggccctg

SEQ ID NO: 4282386 - DNA, 25 bp, Homo sapien
ccctctctcgccaggagctccaggg

SEQ ID NO: 4282387 - DNA, 25 bp, Homo sapien
caccactctctctccggggggacct

SEQ ID NO: 4282388 - DNA, 25 bp, Homo sapien
gctcccctctctcgccaggagctcc

SEQ ID NO: 4282389 - DNA, 25 bp, Homo sapien
tcccctctctcgccaggagctccag

SEQ ID NO: 4282390 - DNA, 25 bp, Homo sapien
ctctgggaccaacactgccaggtgg

SEQ ID NO: 4282391 - DNA, 25 bp, Homo sapien
ggcctctgggaccaacactgccagg

SEQ ID NO: 4282392 - DNA, 25 bp, Homo sapien
tctggccctgaagtccttcggggcc

SEQ ID NO: 4282393 - DNA, 25 bp, Homo sapien
tctgggaccaacactgccaggtggc

SEQ ID NO: 4282394 - DNA, 25 bp, Homo sapien
tggctgcccgtcaaagcctcggtca

SEQ ID NO: 4282395 - DNA, 25 bp, Homo sapien
gcctggctgcccgtcaaagcctcgg

SEQ ID NO: 4282396 - DNA, 25 bp, Homo sapien
gctgcccgtcaaagcctcggtcacc

SEQ ID NO: 4282397 - DNA, 25 bp, Homo sapien
ctggctgcccgtcaaagcctcggtc

SEQ ID NO: 4282398 - DNA, 25 bp, Homo sapien
ccgactggcccggcacaccaggctc

SEQ ID NO: 4282399 - DNA, 25 bp, Homo sapien
cttgggaccgatcaggccctccttg

SEQ ID NO: 4282400 - DNA, 25 bp, Homo sapien
gactggcccggcacaccaggctccc

SEQ ID NO: 4282401 - DNA, 25 bp, Homo sapien
ccccgactggcccggcacaccaggc

SEQ ID NO: 4282402 - DNA, 25 bp, Homo sapien
ctctcctttgtgtcctgccagcccg

SEQ ID NO: 4282403 - DNA, 25 bp, Homo sapien
ggcggcctgggggaccagcttctcc

SEQ ID NO: 4282404 - DNA, 25 bp, Homo sapien
tcctttgtgtcctgccagcccgggg

SEQ ID NO: 4282405 - DNA, 25 bp, Homo sapien
catctctcctttgtgtcctgccagc

SEQ ID NO: 4282406 - DNA, 25 bp, Homo sapien
ccacaggctcccttcactccccgtt

SEQ ID NO: 4282407 - DNA, 25 bp, Homo sapien
acaggctcccttcactccccgttca

SEQ ID NO: 4282408 - DNA, 25 bp, Homo sapien
ccatcaaggccacaggctcccttca

SEQ ID NO: 4282409 - DNA, 25 bp, Homo sapien
caaggccacaggctcccttcactcc

SEQ ID NO: 4282410 - DNA, 25 bp, Homo sapien
gccccggggacccatgaagccaaca

SEQ ID NO: 4282411 - DNA, 25 bp, Homo sapien
cctcggataccaggcactccatcct

SEQ ID NO: 4282412 - DNA, 25 bp, Homo sapien
tttttctcctcggataccaggcact

SEQ ID NO: 4282413 - DNA, 25 bp, Homo sapien
ccccggggacccatgaagccaacat

SEQ ID NO: 4282414 - DNA, 25 bp, Homo sapien
cagtgagggaccaaagagaatcgcc

SEQ ID NO: 4282415 - DNA, 25 bp, Homo sapien
aggtcagaggaggtcagtgagggac

SEQ ID NO: 4282416 - DNA, 25 bp, Homo sapien
agggagagggtccatgtgaggtcag

SEQ ID NO: 4282417 - DNA, 25 bp, Homo sapien
gagagggtccatgtgaggtcagagg

SEQ ID NO: 4282418 - DNA, 25 bp, Homo sapien
ggatccctgctgcaccaggttgacc

SEQ ID NO: 4282419 - DNA, 25 bp, Homo sapien
cagggatccctgctgcaccaggttg

SEQ ID NO: 4282420 - DNA, 25 bp, Homo sapien
cgggtcaccagggatccctgctgca

SEQ ID NO: 4282421 - DNA, 25 bp, Homo sapien
gggtcaccagggatccctgctgcac

SEQ ID NO: 4282422 - DNA, 25 bp, Homo sapien
gcctgggcctgggcctggggcagaa

SEQ ID NO: 4282423 - DNA, 25 bp, Homo sapien
cctgggcctgggcctggggcagaac

SEQ ID NO: 4282424 - DNA, 25 bp, Homo sapien
ctgggcctgggcctgggcctggggc

SEQ ID NO: 4282425 - DNA, 25 bp, Homo sapien
gggcctgggcctgggcctggggcag

SEQ ID NO: 4282426 - DNA, 25 bp, Homo sapien
acgcagtcctggcaacccggctgag

SEQ ID NO: 4282427 - DNA, 25 bp, Homo sapien
tggcaacccggctgagcccttgtca

SEQ ID NO: 4282428 - DNA, 25 bp, Homo sapien
ctggcaacccggctgagcccttgtc

SEQ ID NO: 4282429 - DNA, 25 bp, Homo sapien
caggagtccacgcagtcctggcaac

SEQ ID NO: 4282430 - DNA, 25 bp, Homo sapien
tccaagccccgaggccctcgttcac

SEQ ID NO: 4282431 - DNA, 25 bp, Homo sapien
catccaagccccgaggccctcgttc

SEQ ID NO: 4282432 - DNA, 25 bp, Homo sapien
accatccaagccccgaggccctcgt

SEQ ID NO: 4282433 - DNA, 25 bp, Homo sapien
tcaccatccaagccccgaggccctc

SEQ ID NO: 4282434 - DNA, 25 bp, Homo sapien
ccttggcaccccgtgggcctggagg

SEQ ID NO: 4282435 - DNA, 25 bp, Homo sapien
cttggcaccccgtgggcctggaggc

SEQ ID NO: 4282436 - DNA, 25 bp, Homo sapien
ttggcaccccgtgggcctggaggcc

SEQ ID NO: 4282437 - DNA, 25 bp, Homo sapien
cttctccccacgctctcccctgctg

SEQ ID NO: 4282438 - DNA, 25 bp, Homo sapien
acgctctcccctgctgccagggggc

SEQ ID NO: 4282439 - DNA, 25 bp, Homo sapien
ccacgctctcccctgctgccagggg

SEQ ID NO: 4282440 - DNA, 25 bp, Homo sapien
gctctcccctgctgccagggggccc

SEQ ID NO: 4282441 - DNA, 25 bp, Homo sapien
cgtgagtcctcggggtccctcctgg

SEQ ID NO: 4282442 - DNA, 25 bp, Homo sapien
cctggccggggcggccatcttcacc

SEQ ID NO: 4282443 - DNA, 25 bp, Homo sapien
gtccctcctggccggggcggccatc

SEQ ID NO: 4282444 - DNA, 25 bp, Homo sapien
cctcctggccggggcggccatcttc

SEQ ID NO: 4282445 - DNA, 25 bp, Homo sapien
ctggatggtgacattaggttcattg

SEQ ID NO: 4282446 - DNA, 25 bp, Homo sapien
gggatgaagggagttcggctgtgga

SEQ ID NO: 4282447 - DNA, 25 bp, Homo sapien
ggagttcggctgtggagtaagacat

SEQ ID NO: 4282448 - DNA, 25 bp, Homo sapien
gacattaggttcattgactcagagg

SEQ ID NO: 4282449 - DNA, 25 bp, Homo sapien
caggcagccctactccagggtctcc

SEQ ID NO: 4282450 - DNA, 25 bp, Homo sapien
ctggctccccacgctcgcctcgggg

SEQ ID NO: 4282451 - DNA, 25 bp, Homo sapien
cctggctccccacgctcgcctcggg

SEQ ID NO: 4282452 - DNA, 25 bp, Homo sapien
tggctccccacgctcgcctcggggc

SEQ ID NO: 4282453 - DNA, 25 bp, Homo sapien
tcatgggaggtcagtggaggctgaa

SEQ ID NO: 4282454 - DNA, 25 bp, Homo sapien
aggggaatcagtgggggacgcaggg

SEQ ID NO: 4282455 - DNA, 25 bp, Homo sapien
gagaccaacaggacaccggggatca

SEQ ID NO: 4282456 - DNA, 25 bp, Homo sapien
caccggggatcagtgaggggaatca

SEQ ID NO: 4282457 - DNA, 25 bp, Homo sapien
ttgtctcctttgagtccagaggccc

SEQ ID NO: 4282458 - DNA, 25 bp, Homo sapien
ctttgagtccagaggccccaggtgg

SEQ ID NO: 4282459 - DNA, 25 bp, Homo sapien
tgagtccagaggccccaggtggtcc

SEQ ID NO: 4282460 - DNA, 25 bp, Homo sapien
cttgtctcctttgagtccagaggcc

SEQ ID NO: 4282461 - DNA, 25 bp, Homo sapien
ctgtaggtcagagtgaggtgagggt

SEQ ID NO: 4282462 - DNA, 25 bp, Homo sapien
tgtaggtcagagtgaggtgagggtc

SEQ ID NO: 4282463 - DNA, 25 bp, Homo sapien
cactgaccccggtggtccaggtggc

SEQ ID NO: 4282464 - DNA, 25 bp, Homo sapien
cccatctctcctcgagggcctgtct

SEQ ID NO: 4282465 - DNA, 25 bp, Homo sapien
ccatctctcctcgagggcctgtctg

SEQ ID NO: 4282466 - DNA, 25 bp, Homo sapien
gacccatctctcctcgagggcctgt

SEQ ID NO: 4282467 - DNA, 25 bp, Homo sapien
catctctcctcgagggcctgtctga

SEQ ID NO: 4282468 - DNA, 25 bp, Homo sapien
cgggaacccaacaacaccaggagca

SEQ ID NO: 4282469 - DNA, 25 bp, Homo sapien
caggagcaccgggcaggccagggag

SEQ ID NO: 4282470 - DNA, 25 bp, Homo sapien
gcaggccagggaggcccagatctcc

SEQ ID NO: 4282471 - DNA, 25 bp, Homo sapien
gggaacccaacaacaccaggagcac

SEQ ID NO: 4282472 - DNA, 25 bp, Homo sapien
acctggagggccaggaggcccaggg

SEQ ID NO: 4282473 - DNA, 25 bp, Homo sapien
ctggagggccaggaggcccagggga

SEQ ID NO: 4282474 - DNA, 25 bp, Homo sapien
gagggccaggaggcccaggggagcc

SEQ ID NO: 4282475 - DNA, 25 bp, Homo sapien
tggagggccaggaggcccaggggag

SEQ ID NO: 4282476 - DNA, 25 bp, Homo sapien
gaggaaaagaggcatcggatcaagc

SEQ ID NO: 4282477 - DNA, 25 bp, Homo sapien
agcagggacccttctgggtacacat

SEQ ID NO: 4282478 - DNA, 25 bp, Homo sapien
aaagaggcatcggatcaagctcagg

SEQ ID NO: 4282479 - DNA, 25 bp, Homo sapien
ctcagggagtctcacgaccaggacc

SEQ ID NO: 4282480 - DNA, 25 bp, Homo sapien
tttgggtcctggagcccctttctga

SEQ ID NO: 4282481 - DNA, 25 bp, Homo sapien
tgggtcctggagcccctttctgacc

SEQ ID NO: 4282482 - DNA, 25 bp, Homo sapien
ctttgggtcctggagcccctttctg

SEQ ID NO: 4282483 - DNA, 25 bp, Homo sapien
ttgggtcctggagcccctttctgac

SEQ ID NO: 4282484 - DNA, 25 bp, Homo sapien
aacagcatttgagagggtaggaaca

SEQ ID NO: 4282485 - DNA, 25 bp, Homo sapien
aaacagcatttgagagggtaggaac

SEQ ID NO: 4282486 - DNA, 25 bp, Homo sapien
atttgagagggtaggaacatgagca

SEQ ID NO: 4282487 - DNA, 25 bp, Homo sapien
tgagagggtaggaacatgagcacag

SEQ ID NO: 4282488 - DNA, 25 bp, Homo sapien
acagggagcccacacgcgagtgcag

SEQ ID NO: 4282489 - DNA, 25 bp, Homo sapien
cacagacgtgagtgcggacacacgg

SEQ ID NO: 4282490 - DNA, 25 bp, Homo sapien
gacatctggctccacagacgtgagt

SEQ ID NO: 4282491 - DNA, 25 bp, Homo sapien
cacacgcgagtgcagacatctggct

SEQ ID NO: 4282492 - DNA, 25 bp, Homo sapien
tccgggctcccctgcacggccagct

SEQ ID NO: 4282493 - DNA, 25 bp, Homo sapien
gggctcccctgcacggccagcttca

SEQ ID NO: 4282494 - DNA, 25 bp, Homo sapien
cagggtctccgggctcccctgcacg

SEQ ID NO: 4282495 - DNA, 25 bp, Homo sapien
gctcccctgcacggccagcttcacc

SEQ ID NO: 4282496 - DNA, 25 bp, Homo sapien
cttctcgcctcgcggccctggcagt

SEQ ID NO: 4282497 - DNA, 25 bp, Homo sapien
ccctggcagtcctcggtcacctttg

SEQ ID NO: 4282498 - DNA, 25 bp, Homo sapien
tcgcggccctggcagtcctcggtca

SEQ ID NO: 4282499 - DNA, 25 bp, Homo sapien
tggcagtcctcggtcacctttggct

SEQ ID NO: 4282500 - DNA, 25 bp, Homo sapien
gggccagagcttaaatatgcggtct

SEQ ID NO: 4282501 - DNA, 25 bp, Homo sapien
catgagggtgggtaaactatgggtc

SEQ ID NO: 4282502 - DNA, 25 bp, Homo sapien
cacagaaagatgagactccggaggg

SEQ ID NO: 4282503 - DNA, 25 bp, Homo sapien
ggaggcaacacaggcatcagtcaca

SEQ ID NO: 4282504 - DNA, 25 bp, Homo sapien
ctgctgtcagaagttccctacttac

SEQ ID NO: 4282505 - DNA, 25 bp, Homo sapien
acatctgctgtcagaagttccctac

SEQ ID NO: 4282506 - DNA, 25 bp, Homo sapien
catctgctgtcagaagttccctact

SEQ ID NO: 4282507 - DNA, 25 bp, Homo sapien
tctgctgtcagaagttccctactta

SEQ ID NO: 4282508 - DNA, 25 bp, Homo sapien
caggtctccagcaaggcctccaggg

SEQ ID NO: 4282509 - DNA, 25 bp, Homo sapien
accaggtctccagcaaggcctccag

SEQ ID NO: 4282510 - DNA, 25 bp, Homo sapien
acccaccaggtctccagcaaggcct

SEQ ID NO: 4282511 - DNA, 25 bp, Homo sapien
tcacccaccaggtctccagcaaggc

SEQ ID NO: 4282512 - DNA, 25 bp, Homo sapien
ctggtaagggggagaggtcagtggg

SEQ ID NO: 4282513 - DNA, 25 bp, Homo sapien
ggtcagtgggattccttggccccca

SEQ ID NO: 4282514 - DNA, 25 bp, Homo sapien
gtcagtgggattccttggcccccac

SEQ ID NO: 4282515 - DNA, 25 bp, Homo sapien
cagtgggattccttggcccccacca

SEQ ID NO: 4282516 - DNA, 25 bp, Homo sapien
ttgctccagggagcccgaccacagc

SEQ ID NO: 4282517 - DNA, 25 bp, Homo sapien
tttgctccagggagcccgaccacag

SEQ ID NO: 4282518 - DNA, 25 bp, Homo sapien
gtgaggcagaggagttgctgcaggg

SEQ ID NO: 4282519 - DNA, 25 bp, Homo sapien
aaacaggcttgtgggtgaggcagag

SEQ ID NO: 4282520 - DNA, 25 bp, Homo sapien
ctgccacccccatggcatttggaaa

SEQ ID NO: 4282521 - DNA, 25 bp, Homo sapien
gggtggaagtcagggtcaaagatca

SEQ ID NO: 4282522 - DNA, 25 bp, Homo sapien
ctttaggtccgacagggccaggcag

SEQ ID NO: 4282523 - DNA, 25 bp, Homo sapien
caggttctcctttaggtccgacagg

SEQ ID NO: 4282524 - DNA, 25 bp, Homo sapien
gccaggttctcctttaggtccgaca

SEQ ID NO: 4282525 - DNA, 25 bp, Homo sapien
ttaggtccgacagggccaggcagac

SEQ ID NO: 4282526 - DNA, 25 bp, Homo sapien
tggcaccatctcgacctggggctcc

SEQ ID NO: 4282527 - DNA, 25 bp, Homo sapien
actggcaccatctcgacctggggct

SEQ ID NO: 4282528 - DNA, 25 bp, Homo sapien
ctggcaccatctcgacctggggctc

SEQ ID NO: 4282529 - DNA, 25 bp, Homo sapien
ggctgcctgtcgacccttgacccct

SEQ ID NO: 4282530 - DNA, 25 bp, Homo sapien
gctgcctgtcgacccttgacccctg

SEQ ID NO: 4282531 - DNA, 25 bp, Homo sapien
ctgcctgtcgacccttgacccctgg

SEQ ID NO: 4282532 - DNA, 25 bp, Homo sapien
tgcctgtcgacccttgacccctgga

SEQ ID NO: 4282533 - DNA, 25 bp, Homo sapien
ttgtccaggcaaacctggagacccc

SEQ ID NO: 4282534 - DNA, 25 bp, Homo sapien
gtccaggcaaacctggagacccctg

SEQ ID NO: 4282535 - DNA, 25 bp, Homo sapien
acttgtccaggcaaacctggagacc

SEQ ID NO: 4282536 - DNA, 25 bp, Homo sapien
cacttgtccaggcaaacctggagac

SEQ ID NO: 4282537 - DNA, 25 bp, Homo sapien
ggaagtcccacagctccagtaggtc

SEQ ID NO: 4282538 - DNA, 25 bp, Homo sapien
ccacagctccagtaggtccagtcag

SEQ ID NO: 4282539 - DNA, 25 bp, Homo sapien
gtcccacagctccagtaggtccagt

SEQ ID NO: 4282540 - DNA, 25 bp, Homo sapien
acagctccagtaggtccagtcaggc

SEQ ID NO: 4282541 - DNA, 25 bp, Homo sapien
ggaggtcctgtctctccaggctccc

SEQ ID NO: 4282542 - DNA, 25 bp, Homo sapien
ccgtcctggaggtcctgtctctcca

SEQ ID NO: 4282543 - DNA, 25 bp, Homo sapien
cgtcctggaggtcctgtctctccag

SEQ ID NO: 4282544 - DNA, 25 bp, Homo sapien
cctggaggtcctgtctctccaggct

SEQ ID NO: 4282545 - DNA, 25 bp, Homo sapien
cttcaggccagaaggtccttggggt

SEQ ID NO: 4282546 - DNA, 25 bp, Homo sapien
ttcaggccagaaggtccttggggtc

SEQ ID NO: 4282547 - DNA, 25 bp, Homo sapien
ccttggggtcctgcagggccagcaa

SEQ ID NO: 4282548 - DNA, 25 bp, Homo sapien
tggggtcctgcagggccagcaagac

SEQ ID NO: 4282549 - DNA, 25 bp, Homo sapien
cggggcaccaggtggtccagggtct

SEQ ID NO: 4282550 - DNA, 25 bp, Homo sapien
gggcaccaggtggtccagggtctcc

SEQ ID NO: 4282551 - DNA, 25 bp, Homo sapien
gcaccaggtggtccagggtctccat

SEQ ID NO: 4282552 - DNA, 25 bp, Homo sapien
caccaggtggtccagggtctccatg

SEQ ID NO: 4282553 - DNA, 25 bp, Homo sapien
cactgggccaggggggcctcttgga

SEQ ID NO: 4282554 - DNA, 25 bp, Homo sapien
gcccagccataccacgctctcctgg

SEQ ID NO: 4282555 - DNA, 25 bp, Homo sapien
ctgacccctcggtccaggctctccc

SEQ ID NO: 4282556 - DNA, 25 bp, Homo sapien
ccgtcctgacccctcggtccaggct

SEQ ID NO: 4282557 - DNA, 25 bp, Homo sapien
gttgccgtcctgacccctcggtcca

SEQ ID NO: 4282558 - DNA, 25 bp, Homo sapien
gtcctgacccctcggtccaggctct

SEQ ID NO: 4282559 - DNA, 25 bp, Homo sapien
tgtctcctttgggaccttggtcacc

SEQ ID NO: 4282560 - DNA, 25 bp, Homo sapien
cctgtctcctttgggaccttggtca

SEQ ID NO: 4282561 - DNA, 25 bp, Homo sapien
tctcctttgggaccttggtcaccat

SEQ ID NO: 4282562 - DNA, 25 bp, Homo sapien
tcctttgggaccttggtcaccattg

SEQ ID NO: 4282563 - DNA, 25 bp, Homo sapien
gagtccagggggtccctgttctcca

SEQ ID NO: 4282564 - DNA, 25 bp, Homo sapien
ggttccagggagtccaggagggcca

SEQ ID NO: 4282565 - DNA, 25 bp, Homo sapien
ccaggggttccagggagtccaggag

SEQ ID NO: 4282566 - DNA, 25 bp, Homo sapien
ttccagggagtccaggagggccatc

SEQ ID NO: 4282567 - DNA, 25 bp, Homo sapien
ccagggagtccaggagggccatctc

SEQ ID NO: 4282568 - DNA, 25 bp, Homo sapien
ctgccccacgaagcccatcgcagcc

SEQ ID NO: 4282569 - DNA, 25 bp, Homo sapien
agcctgccccacgaagcccatcgca

SEQ ID NO: 4282570 - DNA, 25 bp, Homo sapien
gacagcctgccccacgaagcccatc

SEQ ID NO: 4282571 - DNA, 25 bp, Homo sapien
gcctgccccacgaagcccatcgcag

SEQ ID NO: 4282572 - DNA, 25 bp, Homo sapien
ctgttctccacgttctcctttctct

SEQ ID NO: 4282573 - DNA, 25 bp, Homo sapien
tgttctccacgttctcctttctctc

SEQ ID NO: 4282574 - DNA, 25 bp, Homo sapien
ctccacgttctcctttctctccccg

SEQ ID NO: 4282575 - DNA, 25 bp, Homo sapien
ttctccacgttctcctttctctccc

SEQ ID NO: 4282576 - DNA, 25 bp, Homo sapien
aaatgcaaatagcgggtgagggcca

SEQ ID NO: 4282577 - DNA, 25 bp, Homo sapien
tgaaatgcaaatagcgggtgagggc

SEQ ID NO: 4282578 - DNA, 25 bp, Homo sapien
gaaatgcaaatagcgggtgagggcc

SEQ ID NO: 4282579 - DNA, 25 bp, Homo sapien
aatgcaaatagcgggtgagggccaa

SEQ ID NO: 4282580 - DNA, 25 bp, Homo sapien
tctcctggccagcccccagcctcac

SEQ ID NO: 4282581 - DNA, 25 bp, Homo sapien
agggtctccacggtcgcccttcagc

SEQ ID NO: 4282582 - DNA, 25 bp, Homo sapien
acggtcgcccttcagcccgcgttct

SEQ ID NO: 4282583 - DNA, 25 bp, Homo sapien
caggctccccggcaaggccggaagg

SEQ ID NO: 4282584 - DNA, 25 bp, Homo sapien
ctgggagcccgggaataccaggctt

SEQ ID NO: 4282585 - DNA, 25 bp, Homo sapien
caggagtggaagagagaatgctggt

SEQ ID NO: 4282586 - DNA, 25 bp, Homo sapien
tgcaggagtggaagagagaatgctg

SEQ ID NO: 4282587 - DNA, 25 bp, Homo sapien
ggagtggaagagagaatgctggtgg

SEQ ID NO: 4282588 - DNA, 25 bp, Homo sapien
ctgcaggagtggaagagagaatgct

SEQ ID NO: 4282589 - DNA, 25 bp, Homo sapien
ctcgacgccgttcgggcacaggcag

SEQ ID NO: 4282590 - DNA, 25 bp, Homo sapien
ttggggcctcgacgccgttcgggca

SEQ ID NO: 4282591 - DNA, 25 bp, Homo sapien
tgttcgcctgagtcccccttggggc

SEQ ID NO: 4282592 - DNA, 25 bp, Homo sapien
ctggggggccctgttcgcctgagtc

SEQ ID NO: 4282593 - DNA, 25 bp, Homo sapien
agcagtttccagcaaccgatccaca

SEQ ID NO: 4282594 - DNA, 25 bp, Homo sapien
cttgatgccagcagtttccagcaac

SEQ ID NO: 4282595 - DNA, 25 bp, Homo sapien
cagtttccagcaaccgatccacatt

SEQ ID NO: 4282596 - DNA, 25 bp, Homo sapien
tgccagcagtttccagcaaccgatc

SEQ ID NO: 4282597 - DNA, 25 bp, Homo sapien
cggcacacttccaggctctcctcgc

SEQ ID NO: 4282598 - DNA, 25 bp, Homo sapien
ggcacacttccaggctctcctcgca

SEQ ID NO: 4282599 - DNA, 25 bp, Homo sapien
ggctctcctcgcaggccacgctctc

SEQ ID NO: 4282600 - DNA, 25 bp, Homo sapien
ccaggctctcctcgcaggccacgct

SEQ ID NO: 4282601 - DNA, 25 bp, Homo sapien
tcccctttggatccagtctccccac

SEQ ID NO: 4282602 - DNA, 25 bp, Homo sapien
cctttggatccagtctccccacggt

SEQ ID NO: 4282603 - DNA, 25 bp, Homo sapien
ctgctcccctttggatccagtctcc

SEQ ID NO: 4282604 - DNA, 25 bp, Homo sapien
tttggatccagtctccccacggtca

SEQ ID NO: 4282605 - DNA, 25 bp, Homo sapien
cttggggcccgtgcctcctgggaca

SEQ ID NO: 4282606 - DNA, 25 bp, Homo sapien
ttggggcccgtgcctcctgggacac

SEQ ID NO: 4282607 - DNA, 25 bp, Homo sapien
ggggcccgtgcctcctgggacacca

SEQ ID NO: 4282608 - DNA, 25 bp, Homo sapien
tggggcccgtgcctcctgggacacc

SEQ ID NO: 4282609 - DNA, 25 bp, Homo sapien
ctggggtccaaggataccaggagct

SEQ ID NO: 4282610 - DNA, 25 bp, Homo sapien
aaggataccaggagctccacgctca

SEQ ID NO: 4282611 - DNA, 25 bp, Homo sapien
aggataccaggagctccacgctcac

SEQ ID NO: 4282612 - DNA, 25 bp, Homo sapien
tccaaggataccaggagctccacgc

SEQ ID NO: 4282613 - DNA, 25 bp, Homo sapien
tctcccagaggcgcctgaatctcct

SEQ ID NO: 4282614 - DNA, 25 bp, Homo sapien
ttctctcccagaggcgcctgaatct

SEQ ID NO: 4282615 - DNA, 25 bp, Homo sapien
tcccagaggcgcctgaatctccttt

SEQ ID NO: 4282616 - DNA, 25 bp, Homo sapien
ctcccagaggcgcctgaatctcctt

SEQ ID NO: 4282617 - DNA, 25 bp, Homo sapien
tcttctccagggtccccaggttctc

SEQ ID NO: 4282618 - DNA, 25 bp, Homo sapien
ctcccgtcttctccagggtccccag

SEQ ID NO: 4282619 - DNA, 25 bp, Homo sapien
ggccaggtttgccatcctcgcctgg

SEQ ID NO: 4282620 - DNA, 25 bp, Homo sapien
ttttccattcaggccaggtttgcca

SEQ ID NO: 4282621 - DNA, 25 bp, Homo sapien
ccattcaggccaggtttgccatcct

SEQ ID NO: 4282622 - DNA, 25 bp, Homo sapien
ggtttgccatcctcgcctggctttc

SEQ ID NO: 4282623 - DNA, 25 bp, Homo sapien
taatccagggggaccagaggggcca

SEQ ID NO: 4282624 - DNA, 25 bp, Homo sapien
gggccagggaggccctgttctccac

SEQ ID NO: 4282625 - DNA, 25 bp, Homo sapien
cagggaggccctgttctccacggag

SEQ ID NO: 4282626 - DNA, 25 bp, Homo sapien
gccagggaggccctgttctccacgg

SEQ ID NO: 4282627 - DNA, 25 bp, Homo sapien
tctctccctgggtccccagctttgc

SEQ ID NO: 4282628 - DNA, 25 bp, Homo sapien
tgggtccccagctttgcctgcagca

SEQ ID NO: 4282629 - DNA, 25 bp, Homo sapien
cctgggtccccagctttgcctgcag

SEQ ID NO: 4282630 - DNA, 25 bp, Homo sapien
ctccctgggtccccagctttgcctg

SEQ ID NO: 4282631 - DNA, 25 bp, Homo sapien
acaaccaggcaggactaccaagact

SEQ ID NO: 4282632 - DNA, 25 bp, Homo sapien
aagacacagacaacaggtctcgccc

SEQ ID NO: 4282633 - DNA, 25 bp, Homo sapien
gggtctagggtcctcatgtgaaggg

SEQ ID NO: 4282634 - DNA, 25 bp, Homo sapien
cagagctcgtcaaggccaagaccaa

SEQ ID NO: 4282635 - DNA, 25 bp, Homo sapien
ccatccagtccgctccggccatcca

SEQ ID NO: 4282636 - DNA, 25 bp, Homo sapien
tcccatccagtccgctccggccatc

SEQ ID NO: 4282637 - DNA, 25 bp, Homo sapien
agtccgctccggccatccagcccag

SEQ ID NO: 4282638 - DNA, 25 bp, Homo sapien
atccagtccgctccggccatccagc

SEQ ID NO: 4282639 - DNA, 25 bp, Homo sapien
tgctgggcctcggacacctgggtcc

SEQ ID NO: 4282640 - DNA, 25 bp, Homo sapien
cctgctgggcctcggacacctgggt

SEQ ID NO: 4282641 - DNA, 25 bp, Homo sapien
tttctcctgctgggcctcggacacc

SEQ ID NO: 4282642 - DNA, 25 bp, Homo sapien
ctcctgctgggcctcggacacctgg

SEQ ID NO: 4282643 - DNA, 25 bp, Homo sapien
gaggataggggaggaagaaatcaga

SEQ ID NO: 4282644 - DNA, 25 bp, Homo sapien
acccccgaggaccaatcacactcac

SEQ ID NO: 4282645 - DNA, 25 bp, Homo sapien
ctgcacccccgaggaccaatcacac

SEQ ID NO: 4282646 - DNA, 25 bp, Homo sapien
ggaagaaatcagagcaggccctccc

SEQ ID NO: 4282647 - DNA, 25 bp, Homo sapien
tcgaggaccctcttgtccgcggtcc

SEQ ID NO: 4282648 - DNA, 25 bp, Homo sapien
cctcgaggaccctcttgtccgcggt

SEQ ID NO: 4282649 - DNA, 25 bp, Homo sapien
cagggaggccaggatcacccttggg

SEQ ID NO: 4282650 - DNA, 25 bp, Homo sapien
ccagggaggccaggatcacccttgg

SEQ ID NO: 4282651 - DNA, 25 bp, Homo sapien
tctctctggctccaggtcctgtgtc

SEQ ID NO: 4282652 - DNA, 25 bp, Homo sapien
tctctggctccaggtcctgtgtcta

SEQ ID NO: 4282653 - DNA, 25 bp, Homo sapien
cttctctctggctccaggtcctgtg

SEQ ID NO: 4282654 - DNA, 25 bp, Homo sapien
ctctggctccaggtcctgtgtctac

SEQ ID NO: 4282655 - DNA, 25 bp, Homo sapien
accccttgtgtgaaggcacactggc

SEQ ID NO: 4282656 - DNA, 25 bp, Homo sapien
gaccccttgtgtgaaggcacactgg

SEQ ID NO: 4282657 - DNA, 25 bp, Homo sapien
ccccttgtgtgaaggcacactggca

SEQ ID NO: 4282658 - DNA, 25 bp, Homo sapien
cacggtcacccttgggtccagatga

SEQ ID NO: 4282659 - DNA, 25 bp, Homo sapien
acggtcacccttgggtccagatgat

SEQ ID NO: 4282660 - DNA, 25 bp, Homo sapien
cccacggtcacccttgggtccagat

SEQ ID NO: 4282661 - DNA, 25 bp, Homo sapien
ggtcacccttgggtccagatgatcc

SEQ ID NO: 4282662 - DNA, 25 bp, Homo sapien
cacaggcccccgaactccaggtgcc

SEQ ID NO: 4282663 - DNA, 25 bp, Homo sapien
ccacaggcccccgaactccaggtgc

SEQ ID NO: 4282664 - DNA, 25 bp, Homo sapien
acgctcgcctgcttttccaggcaaa

SEQ ID NO: 4282665 - DNA, 25 bp, Homo sapien
ccgaaggccacgctcgcctgctttt

SEQ ID NO: 4282666 - DNA, 25 bp, Homo sapien
ggccacgctcgcctgcttttccagg

SEQ ID NO: 4282667 - DNA, 25 bp, Homo sapien
tgcttttccaggcaaacccgggtca

SEQ ID NO: 4282668 - DNA, 25 bp, Homo sapien
cggaggaccctcgtcacctttctct

SEQ ID NO: 4282669 - DNA, 25 bp, Homo sapien
gaggaccctcgtcacctttctctcc

SEQ ID NO: 4282670 - DNA, 25 bp, Homo sapien
gaccctcgtcacctttctctccaac

SEQ ID NO: 4282671 - DNA, 25 bp, Homo sapien
ggaccctcgtcacctttctctccaa

SEQ ID NO: 4282672 - DNA, 25 bp, Homo sapien
ccgccatgactcccccgactccagc

SEQ ID NO: 4282673 - DNA, 25 bp, Homo sapien
atgactcccccgactccagcctctt

SEQ ID NO: 4282674 - DNA, 25 bp, Homo sapien
gccatgactcccccgactccagcct

SEQ ID NO: 4282675 - DNA, 25 bp, Homo sapien
gactcccccgactccagcctcttac

SEQ ID NO: 4282676 - DNA, 25 bp, Homo sapien
cgtcctcgggggccaacaggtcctg

SEQ ID NO: 4282677 - DNA, 25 bp, Homo sapien
tgctctgccagtaaggccaatggga

SEQ ID NO: 4282678 - DNA, 25 bp, Homo sapien
ctctgccagtaaggccaatgggacc

SEQ ID NO: 4282679 - DNA, 25 bp, Homo sapien
gggtcctgctctgccagtaaggcca

SEQ ID NO: 4282680 - DNA, 25 bp, Homo sapien
tcctgctctgccagtaaggccaatg

SEQ ID NO: 4282681 - DNA, 25 bp, Homo sapien
tctccaggaagaaccaagccgggtg

SEQ ID NO: 4282682 - DNA, 25 bp, Homo sapien
ttggactccggtagctcctctgggc

SEQ ID NO: 4282683 - DNA, 25 bp, Homo sapien
actccggtagctcctctgggcccag

SEQ ID NO: 4282684 - DNA, 25 bp, Homo sapien
ccttggactccggtagctcctctgg

SEQ ID NO: 4282685 - DNA, 25 bp, Homo sapien
tggactccggtagctcctctgggcc

SEQ ID NO: 4282686 - DNA, 25 bp, Homo sapien
ctcctttgggtccagcaacagcagg

SEQ ID NO: 4282687 - DNA, 25 bp, Homo sapien
cctttgggtccagcaacagcaggtc

SEQ ID NO: 4282688 - DNA, 25 bp, Homo sapien
ctttgggtccagcaacagcaggtcc

SEQ ID NO: 4282689 - DNA, 25 bp, Homo sapien
tttctcctttgggtccagcaacagc

SEQ ID NO: 4282690 - DNA, 25 bp, Homo sapien
aggacagatacagcttggccctgcc

SEQ ID NO: 4282691 - DNA, 25 bp, Homo sapien
aacaaacaggacagatacagcttgg

SEQ ID NO: 4282692 - DNA, 25 bp, Homo sapien
caaacaggacagatacagcttggcc

SEQ ID NO: 4282693 - DNA, 25 bp, Homo sapien
aacaggacagatacagcttggccct

SEQ ID NO: 4282694 - DNA, 25 bp, Homo sapien
cactgcagggtccccagggcgacca

SEQ ID NO: 4282695 - DNA, 25 bp, Homo sapien
cagggtccccagggcgaccaggctc

SEQ ID NO: 4282696 - DNA, 25 bp, Homo sapien
tgcagggtccccagggcgaccaggc

SEQ ID NO: 4282697 - DNA, 25 bp, Homo sapien
actgcagggtccccagggcgaccag

SEQ ID NO: 4282698 - DNA, 25 bp, Homo sapien
ctctccttggcggccagtgggtcct

SEQ ID NO: 4282699 - DNA, 25 bp, Homo sapien
tccttggcggccagtgggtcctggt

SEQ ID NO: 4282700 - DNA, 25 bp, Homo sapien
tctccttggcggccagtgggtcctg

SEQ ID NO: 4282701 - DNA, 25 bp, Homo sapien
ccttggcggccagtgggtcctggtg

SEQ ID NO: 4282702 - DNA, 25 bp, Homo sapien
caggacgtccagcaacccctggcag

SEQ ID NO: 4282703 - DNA, 25 bp, Homo sapien
ggacgtccagcaacccctggcagcc

SEQ ID NO: 4282704 - DNA, 25 bp, Homo sapien
tccaggacgtccagcaacccctggc

SEQ ID NO: 4282705 - DNA, 25 bp, Homo sapien
ctccaggacgtccagcaacccctgg

SEQ ID NO: 4282706 - DNA, 25 bp, Homo sapien
cgctgggcctgggggtccacgttcg

SEQ ID NO: 4282707 - DNA, 25 bp, Homo sapien
atcccgctgggcctgggggtccacg

SEQ ID NO: 4282708 - DNA, 25 bp, Homo sapien
gctgggcctgggggtccacgttcgc

SEQ ID NO: 4282709 - DNA, 25 bp, Homo sapien
ggatcccgctgggcctgggggtcca

SEQ ID NO: 4282710 - DNA, 25 bp, Homo sapien
tctccagcctcacccaggggccctg

SEQ ID NO: 4282711 - DNA, 25 bp, Homo sapien
tccagcctcacccaggggccctgga

SEQ ID NO: 4282712 - DNA, 25 bp, Homo sapien
cttctctccagcctcacccaggggc

SEQ ID NO: 4282713 - DNA, 25 bp, Homo sapien
ttctctccagcctcacccaggggcc

SEQ ID NO: 4282714 - DNA, 25 bp, Homo sapien
atagctccaggaggtccccgtgggc

SEQ ID NO: 4282715 - DNA, 25 bp, Homo sapien
gggccaatagctccaggaggtcccc

SEQ ID NO: 4282716 - DNA, 25 bp, Homo sapien
tttggggccaatagctccaggaggt

SEQ ID NO: 4282717 - DNA, 25 bp, Homo sapien
caatagctccaggaggtccccgtgg

SEQ ID NO: 4282718 - DNA, 25 bp, Homo sapien
gcctggagctccatcctcagagtca

SEQ ID NO: 4282719 - DNA, 25 bp, Homo sapien
cggagacccaggttgtcctgggagg

SEQ ID NO: 4282720 - DNA, 25 bp, Homo sapien
gagacccaggttgtcctgggaggcc

SEQ ID NO: 4282721 - DNA, 25 bp, Homo sapien
ctgctcacccggagacccaggttgt

SEQ ID NO: 4282722 - DNA, 25 bp, Homo sapien
caatgccaccttcacctggtccagg

SEQ ID NO: 4282723 - DNA, 25 bp, Homo sapien
gcaatgccaccttcacctggtccag

SEQ ID NO: 4282724 - DNA, 25 bp, Homo sapien
ccgctccccacgatcgcctttgtca

SEQ ID NO: 4282725 - DNA, 25 bp, Homo sapien
cccccagtggtccacgaggtccagg

SEQ ID NO: 4282726 - DNA, 25 bp, Homo sapien
gtcccccagtggtccacgaggtcca

SEQ ID NO: 4282727 - DNA, 25 bp, Homo sapien
tcccccagtggtccacgaggtccag

SEQ ID NO: 4282728 - DNA, 25 bp, Homo sapien
tcacctccgatgacttgtccgggag

SEQ ID NO: 4282729 - DNA, 25 bp, Homo sapien
cttcacctccgatgacttgtccggg

SEQ ID NO: 4282730 - DNA, 25 bp, Homo sapien
acctccgatgacttgtccgggagcc

SEQ ID NO: 4282731 - DNA, 25 bp, Homo sapien
aggtccttcacctccgatgacttgt

SEQ ID NO: 4282732 - DNA, 25 bp, Homo sapien
ctttgggcctcgaggtcctcgctct

SEQ ID NO: 4282733 - DNA, 25 bp, Homo sapien
tttgggcctcgaggtcctcgctctc

SEQ ID NO: 4282734 - DNA, 25 bp, Homo sapien
ccctttgggcctcgaggtcctcgct

SEQ ID NO: 4282735 - DNA, 25 bp, Homo sapien
cctttgggcctcgaggtcctcgctc

SEQ ID NO: 4282736 - DNA, 25 bp, Homo sapien
tccccacgagggccaggcaaccctg

SEQ ID NO: 4282737 - DNA, 25 bp, Homo sapien
gagggccaggcaaccctggagagcc

SEQ ID NO: 4282738 - DNA, 25 bp, Homo sapien
acgagggccaggcaaccctggagag

SEQ ID NO: 4282739 - DNA, 25 bp, Homo sapien
cccacgagggccaggcaaccctgga

SEQ ID NO: 4282740 - DNA, 25 bp, Homo sapien
gcccaccctgacctgcaggacaagg

SEQ ID NO: 4282741 - DNA, 25 bp, Homo sapien
gcagcgcccaccctgacctgcagga

SEQ ID NO: 4282742 - DNA, 25 bp, Homo sapien
ccagaggcagaacagtcggagccac

SEQ ID NO: 4282743 - DNA, 25 bp, Homo sapien
aggcagaacagtcggagccacccca

SEQ ID NO: 4282744 - DNA, 25 bp, Homo sapien
ggacgcccatctgctccagggaagc

SEQ ID NO: 4282745 - DNA, 25 bp, Homo sapien
ccagggctgcctggacgcccatctg

SEQ ID NO: 4282746 - DNA, 25 bp, Homo sapien
ggtcccaggattcccggcgcggcca

SEQ ID NO: 4282747 - DNA, 25 bp, Homo sapien
tgcctggacgcccatctgctccagg

SEQ ID NO: 4282748 - DNA, 25 bp, Homo sapien
tcgcccttggcagtggcacttccag

SEQ ID NO: 4282749 - DNA, 25 bp, Homo sapien
cctctcgcccttggcagtggcactt

SEQ ID NO: 4282750 - DNA, 25 bp, Homo sapien
gcccttggcagtggcacttccaggg

SEQ ID NO: 4282751 - DNA, 25 bp, Homo sapien
tctcgcccttggcagtggcacttcc

SEQ ID NO: 4282752 - DNA, 25 bp, Homo sapien
caggaggcccaacttgtcctctcag

SEQ ID NO: 4282753 - DNA, 25 bp, Homo sapien
ggaggcccaacttgtcctctcaggc

SEQ ID NO: 4282754 - DNA, 25 bp, Homo sapien
aggaggcccaacttgtcctctcagg

SEQ ID NO: 4282755 - DNA, 25 bp, Homo sapien
atctctccaggttcccccttctggc

SEQ ID NO: 4282756 - DNA, 25 bp, Homo sapien
tctctccaggttcccccttctggcc

SEQ ID NO: 4282757 - DNA, 25 bp, Homo sapien
catctctccaggttcccccttctgg

SEQ ID NO: 4282758 - DNA, 25 bp, Homo sapien
tttggacaatacactgggcagggct

SEQ ID NO: 4282759 - DNA, 25 bp, Homo sapien
acactgggcagggctctggccgggg

SEQ ID NO: 4282760 - DNA, 25 bp, Homo sapien
aatacactgggcagggctctggccg

SEQ ID NO: 4282761 - DNA, 25 bp, Homo sapien
ctttggacaatacactgggcagggc

SEQ ID NO: 4282762 - DNA, 25 bp, Homo sapien
gagtagtgaaggatgcctgacacag

SEQ ID NO: 4282763 - DNA, 25 bp, Homo sapien
accactgactgcctggtccaggctt

SEQ ID NO: 4282764 - DNA, 25 bp, Homo sapien
tctggacagagtccatacccggcgc

SEQ ID NO: 4282765 - DNA, 25 bp, Homo sapien
atcatccacggcgaagaaggtctgg

SEQ ID NO: 4282766 - DNA, 25 bp, Homo sapien
gaatatgtcacctctcaagggttca

SEQ ID NO: 4282767 - DNA, 25 bp, Homo sapien
tagcagaaccatcacccctggtacg

SEQ ID NO: 4282768 - DNA, 25 bp, Homo sapien
ggcgcccaggagcatctggtgccaa

SEQ ID NO: 4282769 - DNA, 25 bp, Homo sapien
tgtatctgtgagctgtgaccacggc

SEQ ID NO: 4282770 - DNA, 25 bp, Homo sapien
caaggtcatgggagccattcagtgg

SEQ ID NO: 4282771 - DNA, 25 bp, Homo sapien
gtcacggatcctttgcaagataatg

SEQ ID NO: 4282772 - DNA, 25 bp, Homo sapien
gagggccgatgactgtaagacagca

SEQ ID NO: 4282773 - DNA, 25 bp, Homo sapien
caggttgttcccacttgggtccatg

SEQ ID NO: 4282774 - DNA, 25 bp, Homo sapien
tcgtagcctccgcacggtgagcatt

SEQ ID NO: 4282775 - DNA, 25 bp, Homo sapien
agcattgtcttgagtggcatgtggt

SEQ ID NO: 4282776 - DNA, 25 bp, Homo sapien
caagaggcccaagtgccaacaccag

SEQ ID NO: 4282777 - DNA, 25 bp, Homo sapien
tgaactgcctgtggcccaagaggcc

SEQ ID NO: 4282778 - DNA, 25 bp, Homo sapien
tgcccttcccactacgcccactata

SEQ ID NO: 4282779 - DNA, 25 bp, Homo sapien
ctgcccttcccactacgcccactat

SEQ ID NO: 4282780 - DNA, 25 bp, Homo sapien
gcccttcccactacgcccactatac

SEQ ID NO: 4282781 - DNA, 25 bp, Homo sapien
cacccgctgggagcttgagatccct

SEQ ID NO: 4282782 - DNA, 25 bp, Homo sapien
agaagatgtaagagacgccaggctc

SEQ ID NO: 4282783 - DNA, 25 bp, Homo sapien
aggctctagccctgtcacccgctgg

SEQ ID NO: 4282784 - DNA, 25 bp, Homo sapien
ccctgtcacccgctgggagcttgag

SEQ ID NO: 4282785 - DNA, 25 bp, Homo sapien
tgagtggccgccaggataggatgta

SEQ ID NO: 4282786 - DNA, 25 bp, Homo sapien
ccgccaggataggatgtagctggat

SEQ ID NO: 4282787 - DNA, 25 bp, Homo sapien
gatgtagctggatgccctggacact

SEQ ID NO: 4282788 - DNA, 25 bp, Homo sapien
caggataggatgtagctggatgccc

SEQ ID NO: 4282789 - DNA, 25 bp, Homo sapien
tcgaggtgtccaccacacgtagttc

SEQ ID NO: 4282790 - DNA, 25 bp, Homo sapien
tcaatgcttggaacacgaggtgact

SEQ ID NO: 4282791 - DNA, 25 bp, Homo sapien
cacacgtagttcaatgcttggaaca

SEQ ID NO: 4282792 - DNA, 25 bp, Homo sapien
tgtccaccacacgtagttcaatgct

SEQ ID NO: 4282793 - DNA, 25 bp, Homo sapien
gcggtactgtgtcgctggctccagc

SEQ ID NO: 4282794 - DNA, 25 bp, Homo sapien
aggacactcagcctcacgcggtact

SEQ ID NO: 4282795 - DNA, 25 bp, Homo sapien
cagtgcgcgcagtcacctctgcaga

SEQ ID NO: 4282796 - DNA, 25 bp, Homo sapien
agcccgtccaggtgatagctgctga

SEQ ID NO: 4282797 - DNA, 25 bp, Homo sapien
agcctcagcgagtgctccccgcgct

SEQ ID NO: 4282798 - DNA, 25 bp, Homo sapien
caggttgccagtgcagaaggaagcc

SEQ ID NO: 4282799 - DNA, 25 bp, Homo sapien
gcctcagcgagtgctccccgcgctg

SEQ ID NO: 4282800 - DNA, 25 bp, Homo sapien
cagcctcagcgagtgctccccgcgc

SEQ ID NO: 4282801 - DNA, 25 bp, Homo sapien
tcgcggtccccgacaagtgcagtca

SEQ ID NO: 4282802 - DNA, 25 bp, Homo sapien
gacaagtgcagtcactcgcactgag

SEQ ID NO: 4282803 - DNA, 25 bp, Homo sapien
gagtagctgactccaccttcgagac

SEQ ID NO: 4282804 - DNA, 25 bp, Homo sapien
tcctgggagtatctggtgcctcatg

SEQ ID NO: 4282805 - DNA, 25 bp, Homo sapien
gtgacccctacccaggtgatccgta

SEQ ID NO: 4282806 - DNA, 25 bp, Homo sapien
cgtagaacgtcgctggaagcattga

SEQ ID NO: 4282807 - DNA, 25 bp, Homo sapien
ttgaggatctgcagcctcgacacac

SEQ ID NO: 4282808 - DNA, 25 bp, Homo sapien
ggccagtctgtaagctgtggctcca

SEQ ID NO: 4282809 - DNA, 25 bp, Homo sapien
ctggggacagaggcaaggtaagggg

SEQ ID NO: 4282810 - DNA, 25 bp, Homo sapien
catgcaccgtatactcagtatctgg

SEQ ID NO: 4282811 - DNA, 25 bp, Homo sapien
gggggcccatccacgccagccacat

SEQ ID NO: 4282812 - DNA, 25 bp, Homo sapien
gccctcacatgcaccgtatactcag

SEQ ID NO: 4282813 - DNA, 25 bp, Homo sapien
ctcacatgcaccgtatactcagtat

SEQ ID NO: 4282814 - DNA, 25 bp, Homo sapien
tggcctccccagaaaccaactggga

SEQ ID NO: 4282815 - DNA, 25 bp, Homo sapien
gaaaccaactgggatttctctgggc

SEQ ID NO: 4282816 - DNA, 25 bp, Homo sapien
ccatccagctcagccaccgtggcct

SEQ ID NO: 4282817 - DNA, 25 bp, Homo sapien
atccagctcagccaccgtggcctcc

SEQ ID NO: 4282818 - DNA, 25 bp, Homo sapien
gagtcacatggaccgtcctcactgg

SEQ ID NO: 4282819 - DNA, 25 bp, Homo sapien
cctgtatcctgtggcgccaggaacc

SEQ ID NO: 4282820 - DNA, 25 bp, Homo sapien
tgagtgccaggaaaccctgtatcct

SEQ ID NO: 4282821 - DNA, 25 bp, Homo sapien
aggtaatggtgacagatgagctgct

SEQ ID NO: 4282822 - DNA, 25 bp, Homo sapien
gcagtagagtctgggggcagtgtct

SEQ ID NO: 4282823 - DNA, 25 bp, Homo sapien
tctctgcctcgcagtaccgacacag

SEQ ID NO: 4282824 - DNA, 25 bp, Homo sapien
gcagtaccgacacagccacctggta

SEQ ID NO: 4282825 - DNA, 25 bp, Homo sapien
taccgacacagccacctggtaggtg

SEQ ID NO: 4282826 - DNA, 25 bp, Homo sapien
tcagagggaaatgctggcatggctc

SEQ ID NO: 4282827 - DNA, 25 bp, Homo sapien
gtcagagggaaatgctggcatggct

SEQ ID NO: 4282828 - DNA, 25 bp, Homo sapien
cctctggcacccataccctcattgg

SEQ ID NO: 4282829 - DNA, 25 bp, Homo sapien
ataccctcattggtccctttggcag

SEQ ID NO: 4282830 - DNA, 25 bp, Homo sapien
aggccaccctcactcgcgttgcatc

SEQ ID NO: 4282831 - DNA, 25 bp, Homo sapien
ctcactcgcgttgcatctgacacca

SEQ ID NO: 4282832 - DNA, 25 bp, Homo sapien
ctgtgctccagctaatccgaaatcc

SEQ ID NO: 4282833 - DNA, 25 bp, Homo sapien
cagctaatccgaaatccactggctc

SEQ ID NO: 4282834 - DNA, 25 bp, Homo sapien
tggaacagcaagtggagtttccggc

SEQ ID NO: 4282835 - DNA, 25 bp, Homo sapien
ggaacagcaagtggagtttccggct

SEQ ID NO: 4282836 - DNA, 25 bp, Homo sapien
tagctaagcccagcctgaacgtcat

SEQ ID NO: 4282837 - DNA, 25 bp, Homo sapien
aagtcgaatgctgtctgactcccag

SEQ ID NO: 4282838 - DNA, 25 bp, Homo sapien
tgaacgtcatccaagtcgaatgctg

SEQ ID NO: 4282839 - DNA, 25 bp, Homo sapien
actcgagcagacacccgcacagtgt

SEQ ID NO: 4282840 - DNA, 25 bp, Homo sapien
cctgggtgctgcgcacaatgatgcg

SEQ ID NO: 4282841 - DNA, 25 bp, Homo sapien
ttgcaggtctgttacagggctcaca

SEQ ID NO: 4282842 - DNA, 25 bp, Homo sapien
ggcttgcaggtctgttacagggctc

SEQ ID NO: 4282843 - DNA, 25 bp, Homo sapien
ctgcgcacaatgatgcggtactggg

SEQ ID NO: 4282844 - DNA, 25 bp, Homo sapien
tccagcagagtgtagagtgtgaggc

SEQ ID NO: 4282845 - DNA, 25 bp, Homo sapien
aactggtagcgggtcacatcagagg

SEQ ID NO: 4282846 - DNA, 25 bp, Homo sapien
ggctgcagcccatccaactggtagc

SEQ ID NO: 4282847 - DNA, 25 bp, Homo sapien
gagggcagtaccaccttctgcggtg

SEQ ID NO: 4282848 - DNA, 25 bp, Homo sapien
gggcccaggatgaccgggcgcaggg

SEQ ID NO: 4282849 - DNA, 25 bp, Homo sapien
aaccggtagccacgggcctcaggca

SEQ ID NO: 4282850 - DNA, 25 bp, Homo sapien
ggcccaggatgaccgggcgcagggt

SEQ ID NO: 4282851 - DNA, 25 bp, Homo sapien
gtctcacgccgccattccaaccggt

SEQ ID NO: 4282852 - DNA, 25 bp, Homo sapien
agcctgaagaaagtgcccagccttc

SEQ ID NO: 4282853 - DNA, 25 bp, Homo sapien
gcccgtcccagcctgaagaaagtgc

SEQ ID NO: 4282854 - DNA, 25 bp, Homo sapien
ggcacatgggatgtcagtggcctcc

SEQ ID NO: 4282855 - DNA, 25 bp, Homo sapien
atgtcagtggcctccgggccttgcc

SEQ ID NO: 4282856 - DNA, 25 bp, Homo sapien
gtcacgcagcaacactgaaccctgc

SEQ ID NO: 4282857 - DNA, 25 bp, Homo sapien
tgcggccaaatagggtgctcacggt

SEQ ID NO: 4282858 - DNA, 25 bp, Homo sapien
atagggtgctcacggtcacctcata

SEQ ID NO: 4282859 - DNA, 25 bp, Homo sapien
cccacactgcggccaaatagggtgc

SEQ ID NO: 4282860 - DNA, 25 bp, Homo sapien
gaggacccgccatgtcacacggtag

SEQ ID NO: 4282861 - DNA, 25 bp, Homo sapien
gtggcacctggcacactccgccagg

SEQ ID NO: 4282862 - DNA, 25 bp, Homo sapien
ggatggtcagttccggcccttctag

SEQ ID NO: 4282863 - DNA, 25 bp, Homo sapien
ccatgtcacacggtagccagtggca

SEQ ID NO: 4282864 - DNA, 25 bp, Homo sapien
aggtgaatggggtcagaggctggca

SEQ ID NO: 4282865 - DNA, 25 bp, Homo sapien
gtcagaggctggcagaattgctcac

SEQ ID NO: 4282866 - DNA, 25 bp, Homo sapien
ttaggtgaatggggtcagaggctgg

SEQ ID NO: 4282867 - DNA, 25 bp, Homo sapien
aatggggtcagaggctggcagaatt

SEQ ID NO: 4282868 - DNA, 25 bp, Homo sapien
gtactcggtcagtggccggagaccc

SEQ ID NO: 4282869 - DNA, 25 bp, Homo sapien
cagcctccccgatgctgttggcgta

SEQ ID NO: 4282870 - DNA, 25 bp, Homo sapien
tcacagtcacttggtactcggtcag

SEQ ID NO: 4282871 - DNA, 25 bp, Homo sapien
gcgtagagggcaatcacagtcactt

SEQ ID NO: 4282872 - DNA, 25 bp, Homo sapien
cactgtactctcaaggattggctgc

SEQ ID NO: 4282873 - DNA, 25 bp, Homo sapien
tcgtggagcagaggtcgagtcatcc

SEQ ID NO: 4282874 - DNA, 25 bp, Homo sapien
aggagtgtactggaccttgtagcca

SEQ ID NO: 4282875 - DNA, 25 bp, Homo sapien
agacagcaccaggtctcgtggagca

SEQ ID NO: 4282876 - DNA, 25 bp, Homo sapien
gatgctgaagtcattgacgaagaag

SEQ ID NO: 4282877 - DNA, 25 bp, Homo sapien
tgggctgtgaggcaactcgcttcag

SEQ ID NO: 4282878 - DNA, 25 bp, Homo sapien
cagcagtcgtgcacactctccggga

SEQ ID NO: 4282879 - DNA, 25 bp, Homo sapien
ggcagtagtgtcctcaagatgctga

SEQ ID NO: 4282880 - DNA, 25 bp, Homo sapien
ccttcagcctttgggcagctgtgtc

SEQ ID NO: 4282881 - DNA, 25 bp, Homo sapien
cacagcaaatagcttgaccccctgc

SEQ ID NO: 4282882 - DNA, 25 bp, Homo sapien
cccttcagcctttgggcagctgtgt

SEQ ID NO: 4282883 - DNA, 25 bp, Homo sapien
catggtcagccacatggagaattgc

SEQ ID NO: 4282884 - DNA, 25 bp, Homo sapien
ttgtagctaagctcacggatggcgc

SEQ ID NO: 4282885 - DNA, 25 bp, Homo sapien
caagtgcatccaggccgaactctgt

SEQ ID NO: 4282886 - DNA, 25 bp, Homo sapien
attgcagcccctgtgcgagtgttgc

SEQ ID NO: 4282887 - DNA, 25 bp, Homo sapien
tgggtcatcgctgtactgcactgtg

SEQ ID NO: 4282888 - DNA, 25 bp, Homo sapien
gtgggtcatcgctgtactgcactgt

SEQ ID NO: 4282889 - DNA, 25 bp, Homo sapien
actgcactgtggcaaagcgcacacc

SEQ ID NO: 4282890 - DNA, 25 bp, Homo sapien
cgtgggtcatcgctgtactgcactg

SEQ ID NO: 4282891 - DNA, 25 bp, Homo sapien
ttcgagaaagctgcggacctcgcgg

SEQ ID NO: 4282892 - DNA, 25 bp, Homo sapien
cagtaagaacacaatgtcagcggcg

SEQ ID NO: 4282893 - DNA, 25 bp, Homo sapien
gcagcaccagcccttcgagaaagct

SEQ ID NO: 4282894 - DNA, 25 bp, Homo sapien
gacctcgcggaaattgctgcggcca

SEQ ID NO: 4282895 - DNA, 25 bp, Homo sapien
aggatcccggcgcagagcgcggcca

SEQ ID NO: 4282896 - DNA, 25 bp, Homo sapien
cctgtgctgggctcgcactcggggc

SEQ ID NO: 4282897 - DNA, 25 bp, Homo sapien
tgggctcgcactcggggcgcctctg

SEQ ID NO: 4282898 - DNA, 25 bp, Homo sapien
ctctgccaggatcccggcgcagagc

SEQ ID NO: 4282899 - DNA, 25 bp, Homo sapien
cagtaaaagccgtcagctaggaccc

SEQ ID NO: 4282900 - DNA, 25 bp, Homo sapien
cgtggccttggcaggtccgagccca

SEQ ID NO: 4282901 - DNA, 25 bp, Homo sapien
gccttggcaggtccgagcccagcgc

SEQ ID NO: 4282902 - DNA, 25 bp, Homo sapien
cctaggcagtaaaagccgtcagcta

SEQ ID NO: 4282903 - DNA, 25 bp, Homo sapien
ggattttattggtggtcacctgtgg

SEQ ID NO: 4282904 - DNA, 25 bp, Homo sapien
tttattggtggtcacctgtggcaca

SEQ ID NO: 4282905 - DNA, 25 bp, Homo sapien
gaggattttattggtggtcacctgt

SEQ ID NO: 4282906 - DNA, 25 bp, Homo sapien
attttattggtggtcacctgtggca

SEQ ID NO: 4282907 - DNA, 25 bp, Homo sapien
cctcttgcttacataggcttcccgc

SEQ ID NO: 4282908 - DNA, 25 bp, Homo sapien
tgccctcttgcttacataggcttcc

SEQ ID NO: 4282909 - DNA, 25 bp, Homo sapien
gccctgccctcttgcttacataggc

SEQ ID NO: 4282910 - DNA, 25 bp, Homo sapien
cctgccctcttgcttacataggctt

SEQ ID NO: 4282911 - DNA, 25 bp, Homo sapien
ctacggatccggttgtagtctggga

SEQ ID NO: 4282912 - DNA, 25 bp, Homo sapien
catgccgctacggatccggttgtag

SEQ ID NO: 4282913 - DNA, 25 bp, Homo sapien
gcagccagaacatgccgctacggat

SEQ ID NO: 4282914 - DNA, 25 bp, Homo sapien
tagaagcgcagccagaacatgccgc

SEQ ID NO: 4282915 - DNA, 25 bp, Homo sapien
cagcacaagacaggctttgagtgga

SEQ ID NO: 4282916 - DNA, 25 bp, Homo sapien
tcatgttctggcccttgaagcccca

SEQ ID NO: 4282917 - DNA, 25 bp, Homo sapien
tgccgcacccagctcggagatgctg

SEQ ID NO: 4282918 - DNA, 25 bp, Homo sapien
gtgctgagcctgtcccttcatgttc

SEQ ID NO: 4282919 - DNA, 25 bp, Homo sapien
ctgcttggggccttaactggctgct

SEQ ID NO: 4282920 - DNA, 25 bp, Homo sapien
tgctctgtaagctgagcagcagtgc

SEQ ID NO: 4282921 - DNA, 25 bp, Homo sapien
gtgcagggtattgatgaaggcacct

SEQ ID NO: 4282922 - DNA, 25 bp, Homo sapien
caggcagtcaaggaactgctgggac

SEQ ID NO: 4282923 - DNA, 25 bp, Homo sapien
aaagagcagaccccctaggccactt

SEQ ID NO: 4282924 - DNA, 25 bp, Homo sapien
agagcagaccccctaggccacttac

SEQ ID NO: 4282925 - DNA, 25 bp, Homo sapien
aacaaagagcagaccccctaggcca

SEQ ID NO: 4282926 - DNA, 25 bp, Homo sapien
ataaacaaagagcagaccccctagg

SEQ ID NO: 4282927 - DNA, 25 bp, Homo sapien
cagatctcacgtaccacactggcat

SEQ ID NO: 4282928 - DNA, 25 bp, Homo sapien
tacttggagcagatctcacgtacca

SEQ ID NO: 4282929 - DNA, 25 bp, Homo sapien
gtcatagatgtacttggagcagatc

SEQ ID NO: 4282930 - DNA, 25 bp, Homo sapien
gatgtacttggagcagatctcacgt

SEQ ID NO: 4282931 - DNA, 25 bp, Homo sapien
ggatgcggcggccataggtcaggag

SEQ ID NO: 4282932 - DNA, 25 bp, Homo sapien
tcaggaggctgcgtccgatgtcctc

SEQ ID NO: 4282933 - DNA, 25 bp, Homo sapien
gcgtccgatgtcctcacacacagga

SEQ ID NO: 4282934 - DNA, 25 bp, Homo sapien
ccataggtcaggaggctgcgtccga

SEQ ID NO: 4282935 - DNA, 25 bp, Homo sapien
agatgagataccagggcatttctga

SEQ ID NO: 4282936 - DNA, 25 bp, Homo sapien
tagatgagataccagggcatttctg

SEQ ID NO: 4282937 - DNA, 25 bp, Homo sapien
gaaggtctggaaactctggcatagc

SEQ ID NO: 4282938 - DNA, 25 bp, Homo sapien
gcatagcttgttggccacagcacct

SEQ ID NO: 4282939 - DNA, 25 bp, Homo sapien
tcattcggtcacagacaaagtgtgc

SEQ ID NO: 4282940 - DNA, 25 bp, Homo sapien
tgcccttgcaggacgaacatcatgt

SEQ ID NO: 4282941 - DNA, 25 bp, Homo sapien
accctcttgtcttcaacgcacactg

SEQ ID NO: 4282942 - DNA, 25 bp, Homo sapien
gaggtcccatgctcgcgctggcact

SEQ ID NO: 4282943 - DNA, 25 bp, Homo sapien
tgaaggcgaggtcccatgctcgcgc

SEQ ID NO: 4282944 - DNA, 25 bp, Homo sapien
ctcttccctgaaggcgaggtcccat

SEQ ID NO: 4282945 - DNA, 25 bp, Homo sapien
caccataagtgcagtcatagtggcc

SEQ ID NO: 4282946 - DNA, 25 bp, Homo sapien
aggaccctctactgcaatggccacg

SEQ ID NO: 4282947 - DNA, 25 bp, Homo sapien
ggcattggccacttgcaaggccaca

SEQ ID NO: 4282948 - DNA, 25 bp, Homo sapien
gtagagcatcatcacggtggcggat

SEQ ID NO: 4282949 - DNA, 25 bp, Homo sapien
agcgtcctctgcatatgtccatggg

SEQ ID NO: 4282950 - DNA, 25 bp, Homo sapien
gcggcatggagtaagagtgggcaca

SEQ ID NO: 4282951 - DNA, 25 bp, Homo sapien
tccatgggatgccaccgaggtgctt

SEQ ID NO: 4282952 - DNA, 25 bp, Homo sapien
accgaggtgcttctgggcgaggtct

SEQ ID NO: 4282953 - DNA, 25 bp, Homo sapien
gaccccaaccaggttccatctataa

SEQ ID NO: 4282954 - DNA, 25 bp, Homo sapien
ggcttctgttcaaactacaggtgct

SEQ ID NO: 4282955 - DNA, 25 bp, Homo sapien
ctcagttccttacccatgtccagac

SEQ ID NO: 4282956 - DNA, 25 bp, Homo sapien
gcagcagagcaaaccttagaccatg

SEQ ID NO: 4282957 - DNA, 25 bp, Homo sapien
ggtcaagtctgcacgagacagcttc

SEQ ID NO: 4282958 - DNA, 25 bp, Homo sapien
gaggtactcggtcaagtctgcacga

SEQ ID NO: 4282959 - DNA, 25 bp, Homo sapien
tgccagcaccattcgaggggccttg

SEQ ID NO: 4282960 - DNA, 25 bp, Homo sapien
ggccttgtaatgtgtgctgaggtac

SEQ ID NO: 4282961 - DNA, 25 bp, Homo sapien
taaaaaagactcactggaccacatg

SEQ ID NO: 4282962 - DNA, 25 bp, Homo sapien
aggccagaatggagcaagcatcccc

SEQ ID NO: 4282963 - DNA, 25 bp, Homo sapien
tcgcccttggactgtcaggacatgc

SEQ ID NO: 4282964 - DNA, 25 bp, Homo sapien
tgcataactcaggaaaataaccccg

SEQ ID NO: 4282965 - DNA, 25 bp, Homo sapien
tacagttctgcacaatgtcacccag

SEQ ID NO: 4282966 - DNA, 25 bp, Homo sapien
ctcgcatagatgcatcattctcctg

SEQ ID NO: 4282967 - DNA, 25 bp, Homo sapien
tggcatgcaggtagttaaagaccac

SEQ ID NO: 4282968 - DNA, 25 bp, Homo sapien
atctcccgcaggatcacatcacgtt

SEQ ID NO: 4282969 - DNA, 25 bp, Homo sapien
tgtgctcccgggtgctgtaggcatt

SEQ ID NO: 4282970 - DNA, 25 bp, Homo sapien
tggacagcgccttgatgtagtaagc

SEQ ID NO: 4282971 - DNA, 25 bp, Homo sapien
ctttcggcagatccttggacagcgc

SEQ ID NO: 4282972 - DNA, 25 bp, Homo sapien
tgtaggcattaagatgggcccccat

SEQ ID NO: 4282973 - DNA, 25 bp, Homo sapien
agatatcaaccagaacaatcaggag

SEQ ID NO: 4282974 - DNA, 25 bp, Homo sapien
aaacggctgccaacatcaatccaca

SEQ ID NO: 4282975 - DNA, 25 bp, Homo sapien
aaaaagtagcctgccccattattct

SEQ ID NO: 4282976 - DNA, 25 bp, Homo sapien
agccagatgctccaaaaagtagcct

SEQ ID NO: 4282977 - DNA, 25 bp, Homo sapien
ctcaaaacggctgccaacatcaatc

SEQ ID NO: 4282978 - DNA, 25 bp, Homo sapien
ctgagaggactgctcggaggccaca

SEQ ID NO: 4282979 - DNA, 25 bp, Homo sapien
aggccgttgtccagcaggctaacct

SEQ ID NO: 4282980 - DNA, 25 bp, Homo sapien
agcgcctgagcgaaggttgccgtac

SEQ ID NO: 4282981 - DNA, 25 bp, Homo sapien
tccggcacgaactggagcgcctgag

SEQ ID NO: 4282982 - DNA, 25 bp, Homo sapien
acagccgcgagtgaggactcggtca

SEQ ID NO: 4282983 - DNA, 25 bp, Homo sapien
ggaagggaacagccgcgagtgagga

SEQ ID NO: 4282984 - DNA, 25 bp, Homo sapien
gggaacagccgcgagtgaggactcg

SEQ ID NO: 4282985 - DNA, 25 bp, Homo sapien
gaacagccgcgagtgaggactcggt

SEQ ID NO: 4282986 - DNA, 25 bp, Homo sapien
tccgcttcccgaagccctgtcccga

SEQ ID NO: 4282987 - DNA, 25 bp, Homo sapien
tgtccgcttcccgaagccctgtccc

SEQ ID NO: 4282988 - DNA, 25 bp, Homo sapien
ctgtccgcttcccgaagccctgtcc

SEQ ID NO: 4282989 - DNA, 25 bp, Homo sapien
gcttcccgaagccctgtcccgaagc

SEQ ID NO: 4282990 - DNA, 25 bp, Homo sapien
gtagcggcccgacagaccacggacg

SEQ ID NO: 4282991 - DNA, 25 bp, Homo sapien
aatagcacttgtgccccggcggtag

SEQ ID NO: 4282992 - DNA, 25 bp, Homo sapien
gcgggcgcgcaatagcacttgtgcc

SEQ ID NO: 4282993 - DNA, 25 bp, Homo sapien
cggtagcggcccgacagaccacgga

SEQ ID NO: 4282994 - DNA, 25 bp, Homo sapien
tagactgggcgcgttggcggtcgcg

SEQ ID NO: 4282995 - DNA, 25 bp, Homo sapien
cttccagctgcagtcggccctgttg

SEQ ID NO: 4282996 - DNA, 25 bp, Homo sapien
tgttgcgccgcgcaagcgtagactg

SEQ ID NO: 4282997 - DNA, 25 bp, Homo sapien
taccgtacagttggtgctcggccgc

SEQ ID NO: 4282998 - DNA, 25 bp, Homo sapien
tggctgactggctctgaccgcgctg

SEQ ID NO: 4282999 - DNA, 25 bp, Homo sapien
accgggacagtctattgtgctggcc

SEQ ID NO: 4283000 - DNA, 25 bp, Homo sapien
ctggcgggaaccgggacagtctatt

SEQ ID NO: 4283001 - DNA, 25 bp, Homo sapien
tggctttggctgactggctctgacc

SEQ ID NO: 4283002 - DNA, 25 bp, Homo sapien
tccacgcgtggaagtcagagtgcat

SEQ ID NO: 4283003 - DNA, 25 bp, Homo sapien
cagggctaaagtaccagcgtggaaa

SEQ ID NO: 4283004 - DNA, 25 bp, Homo sapien
agccacagcgtgtccgcaggttcga

SEQ ID NO: 4283005 - DNA, 25 bp, Homo sapien
tgcattatgtttctcaccagccgcg

SEQ ID NO: 4283006 - DNA, 25 bp, Homo sapien
ctgggaccacaagttggtgctgaaa

SEQ ID NO: 4283007 - DNA, 25 bp, Homo sapien
cacaagttggtgctgaaagtcagta

SEQ ID NO: 4283008 - DNA, 25 bp, Homo sapien
ggaccacaagttggtgctgaaagtc

SEQ ID NO: 4283009 - DNA, 25 bp, Homo sapien
accacaagttggtgctgaaagtcag

SEQ ID NO: 4283010 - DNA, 25 bp, Homo sapien
ttcaaccatgttaggaggaagactg

SEQ ID NO: 4283011 - DNA, 25 bp, Homo sapien
gaatgtggctcgtaggaaaatcctg

SEQ ID NO: 4283012 - DNA, 25 bp, Homo sapien
tatggcaccgtcaacaacagattag

SEQ ID NO: 4283013 - DNA, 25 bp, Homo sapien
aacaaggtttgaaatgcgtggagcc

SEQ ID NO: 4283014 - DNA, 25 bp, Homo sapien
tcccctttatttggatttgccgctg

SEQ ID NO: 4283015 - DNA, 25 bp, Homo sapien
atttgccgctgggtggctagatgac

SEQ ID NO: 4283016 - DNA, 25 bp, Homo sapien
gctagatgacgtaggtggccttcga

SEQ ID NO: 4283017 - DNA, 25 bp, Homo sapien
caggagggcatccagcatgtgcagg

SEQ ID NO: 4283018 - DNA, 25 bp, Homo sapien
tgagattggggcccgccgtttccag

SEQ ID NO: 4283019 - DNA, 25 bp, Homo sapien
cgccgtttccagggtccgcagggct

SEQ ID NO: 4283020 - DNA, 25 bp, Homo sapien
ctgagattggggcccgccgtttcca

SEQ ID NO: 4283021 - DNA, 25 bp, Homo sapien
ccgtttccagggtccgcagggctca

SEQ ID NO: 4283022 - DNA, 25 bp, Homo sapien
acccttggtggcctgtgagcgccgc

SEQ ID NO: 4283023 - DNA, 25 bp, Homo sapien
tcagcatcgtggtggtgatcatgac

SEQ ID NO: 4283024 - DNA, 25 bp, Homo sapien
gcccctgcagtatcttgcggcagat

SEQ ID NO: 4283025 - DNA, 25 bp, Homo sapien
cacggggtagatgcggcttgctcca

SEQ ID NO: 4283026 - DNA, 25 bp, Homo sapien
gtgggtggaggcagacgtcaccagc

SEQ ID NO: 4283027 - DNA, 25 bp, Homo sapien
ggtggaggcagacgtcaccagcagg

SEQ ID NO: 4283028 - DNA, 25 bp, Homo sapien
tgggtggaggcagacgtcaccagca

SEQ ID NO: 4283029 - DNA, 25 bp, Homo sapien
tggaggcagacgtcaccagcaggag

SEQ ID NO: 4283030 - DNA, 25 bp, Homo sapien
acccacgctgccctgtaccttctcg

SEQ ID NO: 4283031 - DNA, 25 bp, Homo sapien
ccacgctgccctgtaccttctcggg

SEQ ID NO: 4283032 - DNA, 25 bp, Homo sapien
gagagcaaattattcctgagaagca

SEQ ID NO: 4283033 - DNA, 25 bp, Homo sapien
tgagagcaaattattcctgagaagc

SEQ ID NO: 4283034 - DNA, 25 bp, Homo sapien
gacctggagcgctgaacttggagtc

SEQ ID NO: 4283035 - DNA, 25 bp, Homo sapien
aggggcttctcaagggtgccctgca

SEQ ID NO: 4283036 - DNA, 25 bp, Homo sapien
agttccctccctgtaccgcgccact

SEQ ID NO: 4283037 - DNA, 25 bp, Homo sapien
gactcctgggtagcacctggaggcg

SEQ ID NO: 4283038 - DNA, 25 bp, Homo sapien
gaggctctagtcagtttccaaagga

SEQ ID NO: 4283039 - DNA, 25 bp, Homo sapien
gaggggaggctctagtcagtttcca

SEQ ID NO: 4283040 - DNA, 25 bp, Homo sapien
agaacagctttatccaaagacagcg

SEQ ID NO: 4283041 - DNA, 25 bp, Homo sapien
cagctttatccaaagacagcggaga

SEQ ID NO: 4283042 - DNA, 25 bp, Homo sapien
catcgaagaagtgcccagcctcaag

SEQ ID NO: 4283043 - DNA, 25 bp, Homo sapien
tgcttcttggtgatggatgcatcga

SEQ ID NO: 4283044 - DNA, 25 bp, Homo sapien
ctcgggtgttggagggcaaaggtga

SEQ ID NO: 4283045 - DNA, 25 bp, Homo sapien
cagcctcaagctggctgaccacagg

SEQ ID NO: 4283046 - DNA, 25 bp, Homo sapien
caatctcccggaagtcatggaaaat

SEQ ID NO: 4283047 - DNA, 25 bp, Homo sapien
ggcaggccgccatgtacacctccac

SEQ ID NO: 4283048 - DNA, 25 bp, Homo sapien
atgtacacctccacctcaatctccc

SEQ ID NO: 4283049 - DNA, 25 bp, Homo sapien
gccatgtacacctccacctcaatct

SEQ ID NO: 4283050 - DNA, 25 bp, Homo sapien
ggagtcttcttgaccattggctgtt

SEQ ID NO: 4283051 - DNA, 25 bp, Homo sapien
aggctgtggaagtctggctgaggca

SEQ ID NO: 4283052 - DNA, 25 bp, Homo sapien
ttcaggctcttgaggcacacagtgt

SEQ ID NO: 4283053 - DNA, 25 bp, Homo sapien
gaccattggctgttgcatcttccat

SEQ ID NO: 4283054 - DNA, 25 bp, Homo sapien
cataaggacacaaacatgcgggagt

SEQ ID NO: 4283055 - DNA, 25 bp, Homo sapien
agtgaaggcaggactggccgcacac

SEQ ID NO: 4283056 - DNA, 25 bp, Homo sapien
cacataggtgtgcaaagacaggaat

SEQ ID NO: 4283057 - DNA, 25 bp, Homo sapien
cgcgagaacacgcaaggtcagatgg

SEQ ID NO: 4283058 - DNA, 25 bp, Homo sapien
cagatgtgcatatactgctctgcta

SEQ ID NO: 4283059 - DNA, 25 bp, Homo sapien
agatgtgcatatactgctctgctac

SEQ ID NO: 4283060 - DNA, 25 bp, Homo sapien
ccagatgtgcatatactgctctgct

SEQ ID NO: 4283061 - DNA, 25 bp, Homo sapien
gagcaggccagaatagacacgggca

SEQ ID NO: 4283062 - DNA, 25 bp, Homo sapien
tagacacgggcatccacatgaaacg

SEQ ID NO: 4283063 - DNA, 25 bp, Homo sapien
atgaaacgcatgcagacacctcggc

SEQ ID NO: 4283064 - DNA, 25 bp, Homo sapien
ctcagtctctaattaagtttggcat

SEQ ID NO: 4283065 - DNA, 25 bp, Homo sapien
ttcctctacccatgagcagactctg

SEQ ID NO: 4283066 - DNA, 25 bp, Homo sapien
tagattctgtggcatatcacgacgc

SEQ ID NO: 4283067 - DNA, 25 bp, Homo sapien
tgggtccatggcattcctcatgaga

SEQ ID NO: 4283068 - DNA, 25 bp, Homo sapien
cctgaagaatatctgacccagcctc

SEQ ID NO: 4283069 - DNA, 25 bp, Homo sapien
atcatcttgcagtcctcaacgttgt

SEQ ID NO: 4283070 - DNA, 25 bp, Homo sapien
tgtcttcaaggctggtgttgacatt

SEQ ID NO: 4283071 - DNA, 25 bp, Homo sapien
ctcaacgttgttgctcctcatgtct

SEQ ID NO: 4283072 - DNA, 25 bp, Homo sapien
caaggctggtgttgacattaatgga

SEQ ID NO: 4283073 - DNA, 25 bp, Homo sapien
ctgaggcgcccttgggggaggcagc

SEQ ID NO: 4283074 - DNA, 25 bp, Homo sapien
gaagaggactgtgacggttctcact

SEQ ID NO: 4283075 - DNA, 25 bp, Homo sapien
agaaaatgctgcctagagcccggac

SEQ ID NO: 4283076 - DNA, 25 bp, Homo sapien
tcacataggcctggtgatgccccct

SEQ ID NO: 4283077 - DNA, 25 bp, Homo sapien
aacagccgtgaaagggaagaggact

SEQ ID NO: 4283078 - DNA, 25 bp, Homo sapien
ggagatgaggaagtcgacatccaca

SEQ ID NO: 4283079 - DNA, 25 bp, Homo sapien
gagatgaggaagtcgacatccacac

SEQ ID NO: 4283080 - DNA, 25 bp, Homo sapien
gatgaggaagtcgacatccacacca

SEQ ID NO: 4283081 - DNA, 25 bp, Homo sapien
tgaggaagtcgacatccacaccaca

SEQ ID NO: 4283082 - DNA, 25 bp, Homo sapien
cattggcaaagtacacggtggccga

SEQ ID NO: 4283083 - DNA, 25 bp, Homo sapien
gccgaggagcggaagaccttcaccc

SEQ ID NO: 4283084 - DNA, 25 bp, Homo sapien
cctctgcttcagcgcatcactgtag

SEQ ID NO: 4283085 - DNA, 25 bp, Homo sapien
tcagcattggcaaagtacacggtgg

SEQ ID NO: 4283086 - DNA, 25 bp, Homo sapien
tctgagtactctgccacatctctgt

SEQ ID NO: 4283087 - DNA, 25 bp, Homo sapien
tctctgtaaatatccgtgtctggca

SEQ ID NO: 4283088 - DNA, 25 bp, Homo sapien
gagtactctgccacatctctgtaaa

SEQ ID NO: 4283089 - DNA, 25 bp, Homo sapien
catctctgtaaatatccgtgtctgg

SEQ ID NO: 4283090 - DNA, 25 bp, Homo sapien
gaggggaccaacatggcggactcac

SEQ ID NO: 4283091 - DNA, 25 bp, Homo sapien
tgtggggaaagctgcggggagccct

SEQ ID NO: 4283092 - DNA, 25 bp, Homo sapien
gaatgcacgaagagggggcagaaaa

SEQ ID NO: 4283093 - DNA, 25 bp, Homo sapien
ggtccgaaggagcctgaagtcccca

SEQ ID NO: 4283094 - DNA, 25 bp, Homo sapien
cgcaaccaccaagccaaggtccagg

SEQ ID NO: 4283095 - DNA, 25 bp, Homo sapien
agggagaagatgaccgcaaccacca

SEQ ID NO: 4283096 - DNA, 25 bp, Homo sapien
ccgcaaccaccaagccaaggtccag

SEQ ID NO: 4283097 - DNA, 25 bp, Homo sapien
ggagaagatgaccgcaaccaccaag

SEQ ID NO: 4283098 - DNA, 25 bp, Homo sapien
ccagagggagcgcatgtcgctgagc

SEQ ID NO: 4283099 - DNA, 25 bp, Homo sapien
agagggagcgcatgtcgctgagctg

SEQ ID NO: 4283100 - DNA, 25 bp, Homo sapien
tgtcgctgagctgcctcagcatgcc

SEQ ID NO: 4283101 - DNA, 25 bp, Homo sapien
cttccagagggagcgcatgtcgctg

SEQ ID NO: 4283102 - DNA, 25 bp, Homo sapien
ttcacaatgatgatggctgccagga

SEQ ID NO: 4283103 - DNA, 25 bp, Homo sapien
cttcaggttcacaatgatgatggct

SEQ ID NO: 4283104 - DNA, 25 bp, Homo sapien
cacaatgatgatggctgccaggacc

SEQ ID NO: 4283105 - DNA, 25 bp, Homo sapien
caatgatgatggctgccaggaccgc

SEQ ID NO: 4283106 - DNA, 25 bp, Homo sapien
gttccccaagtttgacaatgatgag

SEQ ID NO: 4283107 - DNA, 25 bp, Homo sapien
gagttccccaagtttgacaatgatg

SEQ ID NO: 4283108 - DNA, 25 bp, Homo sapien
agttccccaagtttgacaatgatga

SEQ ID NO: 4283109 - DNA, 25 bp, Homo sapien
aagagttccccaagtttgacaatga

SEQ ID NO: 4283110 - DNA, 25 bp, Homo sapien
actcacggggaagcactggaagatg

SEQ ID NO: 4283111 - DNA, 25 bp, Homo sapien
agatgcctccgataaggttactgag

SEQ ID NO: 4283112 - DNA, 25 bp, Homo sapien
tcctgtaccaggctccgagacatag

SEQ ID NO: 4283113 - DNA, 25 bp, Homo sapien
tccgagacatagagcaactcacggg

SEQ ID NO: 4283114 - DNA, 25 bp, Homo sapien
cttggatgcctcctacacatcccgc

SEQ ID NO: 4283115 - DNA, 25 bp, Homo sapien
tggatgcctcctacacatcccgcat

SEQ ID NO: 4283116 - DNA, 25 bp, Homo sapien
gatgcctcctacacatcccgcatca

SEQ ID NO: 4283117 - DNA, 25 bp, Homo sapien
tgcctcctacacatcccgcatcacc

SEQ ID NO: 4283118 - DNA, 25 bp, Homo sapien
caaccacagcgatggtgaaggcgct

SEQ ID NO: 4283119 - DNA, 25 bp, Homo sapien
tgagatggcaatggcaaacccaacc

SEQ ID NO: 4283120 - DNA, 25 bp, Homo sapien
tagccgtgcctcagggcgaagatct

SEQ ID NO: 4283121 - DNA, 25 bp, Homo sapien
aaggcgctgcccacgagctttgaga

SEQ ID NO: 4283122 - DNA, 25 bp, Homo sapien
tgcagggatgttgcccacgacatct

SEQ ID NO: 4283123 - DNA, 25 bp, Homo sapien
cagggatgttgcccacgacatctac

SEQ ID NO: 4283124 - DNA, 25 bp, Homo sapien
ctgcagggatgttgcccacgacatc

SEQ ID NO: 4283125 - DNA, 25 bp, Homo sapien
cctgcagggatgttgcccacgacat

SEQ ID NO: 4283126 - DNA, 25 bp, Homo sapien
gtgctttagacccatgccataggag

SEQ ID NO: 4283127 - DNA, 25 bp, Homo sapien
agacccatgccataggagatgcctg

SEQ ID NO: 4283128 - DNA, 25 bp, Homo sapien
gctttagacccatgccataggagat

SEQ ID NO: 4283129 - DNA, 25 bp, Homo sapien
aatctgtgctttagacccatgccat

SEQ ID NO: 4283130 - DNA, 25 bp, Homo sapien
tgggaaaaagtcacgtagggtgaga

SEQ ID NO: 4283131 - DNA, 25 bp, Homo sapien
gcaccatggtcagggggacacataa

SEQ ID NO: 4283132 - DNA, 25 bp, Homo sapien
aaaagtcacgtagggtgagagacag

SEQ ID NO: 4283133 - DNA, 25 bp, Homo sapien
gatactgggcaaaaccttcttcgag

SEQ ID NO: 4283134 - DNA, 25 bp, Homo sapien
ccgggtatcggcatgggcagctgct

SEQ ID NO: 4283135 - DNA, 25 bp, Homo sapien
agctccccgggtatcggcatgggca

SEQ ID NO: 4283136 - DNA, 25 bp, Homo sapien
tgctgcagcttgtcattcaacagct

SEQ ID NO: 4283137 - DNA, 25 bp, Homo sapien
ctccccgggtatcggcatgggcagc

SEQ ID NO: 4283138 - DNA, 25 bp, Homo sapien
tctggggcagcttccagcagacctc

SEQ ID NO: 4283139 - DNA, 25 bp, Homo sapien
ttgctctggggcagcttccagcaga

SEQ ID NO: 4283140 - DNA, 25 bp, Homo sapien
tggggcagcttccagcagacctcca

SEQ ID NO: 4283141 - DNA, 25 bp, Homo sapien
gctctggggcagcttccagcagacc

SEQ ID NO: 4283142 - DNA, 25 bp, Homo sapien
tgtgagacgaagacctgcacagctg

SEQ ID NO: 4283143 - DNA, 25 bp, Homo sapien
gctgcagctgtggtatagcctcgga

SEQ ID NO: 4283144 - DNA, 25 bp, Homo sapien
gctgctcagatggaggccaaacaca

SEQ ID NO: 4283145 - DNA, 25 bp, Homo sapien
cacgaagccgaagtggatcaggccc

SEQ ID NO: 4283146 - DNA, 25 bp, Homo sapien
agcgcagggcaagtgggatgggagg

SEQ ID NO: 4283147 - DNA, 25 bp, Homo sapien
tgggagggggatgagtagacggcaa

SEQ ID NO: 4283148 - DNA, 25 bp, Homo sapien
gggttgctaatgaggagcgcagggc

SEQ ID NO: 4283149 - DNA, 25 bp, Homo sapien
gacgacgatggtcagacactcaggg

SEQ ID NO: 4283150 - DNA, 25 bp, Homo sapien
gaggccacctgtacccgggcagcat

SEQ ID NO: 4283151 - DNA, 25 bp, Homo sapien
ggctgtctcattgatcatggagtcg

SEQ ID NO: 4283152 - DNA, 25 bp, Homo sapien
tcatggagtcgttcaaggcctgcgg

SEQ ID NO: 4283153 - DNA, 25 bp, Homo sapien
gaagaggccaaccaggacactgagt

SEQ ID NO: 4283154 - DNA, 25 bp, Homo sapien
taaggacggcacggggcaggtctga

SEQ ID NO: 4283155 - DNA, 25 bp, Homo sapien
aggacggcacggggcaggtctgaag

SEQ ID NO: 4283156 - DNA, 25 bp, Homo sapien
ctgtaaggacggcacggggcaggtc

SEQ ID NO: 4283157 - DNA, 25 bp, Homo sapien
tgtaaggacggcacggggcaggtct

SEQ ID NO: 4283158 - DNA, 25 bp, Homo sapien
caggagtaaaccctgagctcacagg

SEQ ID NO: 4283159 - DNA, 25 bp, Homo sapien
gtctactggtcccgggacacagagg

SEQ ID NO: 4283160 - DNA, 25 bp, Homo sapien
tgtgtctactggtcccgggacacag

SEQ ID NO: 4283161 - DNA, 25 bp, Homo sapien
tactggtcccgggacacagaggctc

SEQ ID NO: 4283162 - DNA, 25 bp, Homo sapien
ctgtgtctactggtcccgggacaca

SEQ ID NO: 4283163 - DNA, 25 bp, Homo sapien
tgcctctgtggtcctacagtcaggg

SEQ ID NO: 4283164 - DNA, 25 bp, Homo sapien
tcctgcctggggatgactcgtgggc

SEQ ID NO: 4283165 - DNA, 25 bp, Homo sapien
ctgcctggggatgactcgtgggcta

SEQ ID NO: 4283166 - DNA, 25 bp, Homo sapien
cctctgtggtcctacagtcaggggt

SEQ ID NO: 4283167 - DNA, 25 bp, Homo sapien
tgccctcttccccagccgctcctgc

SEQ ID NO: 4283168 - DNA, 25 bp, Homo sapien
ccctcttccccagccgctcctgccc

SEQ ID NO: 4283169 - DNA, 25 bp, Homo sapien
ctcttccccagccgctcctgccctg

SEQ ID NO: 4283170 - DNA, 25 bp, Homo sapien
ctgccctcttccccagccgctcctg

SEQ ID NO: 4283171 - DNA, 25 bp, Homo sapien
gaaggctaggcctgcctccacttac

SEQ ID NO: 4283172 - DNA, 25 bp, Homo sapien
ggtagaaggagctatagaggccaaa

SEQ ID NO: 4283173 - DNA, 25 bp, Homo sapien
aggagctatagaggccaaacacggg

SEQ ID NO: 4283174 - DNA, 25 bp, Homo sapien
gagatgtgccgggaagtgccaaaca

SEQ ID NO: 4283175 - DNA, 25 bp, Homo sapien
aaacacggggggcaatccagccagg

SEQ ID NO: 4283176 - DNA, 25 bp, Homo sapien
aatggtagcagtgcaggcctggaga

SEQ ID NO: 4283177 - DNA, 25 bp, Homo sapien
agaatggtagcagtgcaggcctgga

SEQ ID NO: 4283178 - DNA, 25 bp, Homo sapien
ctaggggtagaatggtagcagtgca

SEQ ID NO: 4283179 - DNA, 25 bp, Homo sapien
gggtagaatggtagcagtgcaggcc

SEQ ID NO: 4283180 - DNA, 25 bp, Homo sapien
acactcaggccggataacaggtcac

SEQ ID NO: 4283181 - DNA, 25 bp, Homo sapien
ggaagctgcatgatggccacactca

SEQ ID NO: 4283182 - DNA, 25 bp, Homo sapien
agcagaagggcataggcccgagcac

SEQ ID NO: 4283183 - DNA, 25 bp, Homo sapien
aggagccagtcacgcacaggatacc

SEQ ID NO: 4283184 - DNA, 25 bp, Homo sapien
gttccatgtggtagtctcgcctccg

SEQ ID NO: 4283185 - DNA, 25 bp, Homo sapien
ccactggtgggtcctaggtgctgag

SEQ ID NO: 4283186 - DNA, 25 bp, Homo sapien
tgcaaccaggtccgccactggtggg

SEQ ID NO: 4283187 - DNA, 25 bp, Homo sapien
cagcagcggccgttccatgtggtag

SEQ ID NO: 4283188 - DNA, 25 bp, Homo sapien
tgcttgtgttgcagacagcagtgcc

SEQ ID NO: 4283189 - DNA, 25 bp, Homo sapien
gcttgtgttgcagacagcagtgcct

SEQ ID NO: 4283190 - DNA, 25 bp, Homo sapien
cagcagtgcctgtgtgtccctcggt

SEQ ID NO: 4283191 - DNA, 25 bp, Homo sapien
agacagcagtgcctgtgtgtccctc

SEQ ID NO: 4283192 - DNA, 25 bp, Homo sapien
ctacacctccacctaggaccagaga

SEQ ID NO: 4283193 - DNA, 25 bp, Homo sapien
acacctccacctaggaccagagagt

SEQ ID NO: 4283194 - DNA, 25 bp, Homo sapien
acctccacctaggaccagagagtta

SEQ ID NO: 4283195 - DNA, 25 bp, Homo sapien
tcccctacacctccacctaggacca

SEQ ID NO: 4283196 - DNA, 25 bp, Homo sapien
gaaagcctctttctaggacaaagtc

SEQ ID NO: 4283197 - DNA, 25 bp, Homo sapien
tccaggccctaagatcaaggtacag

SEQ ID NO: 4283198 - DNA, 25 bp, Homo sapien
actgcaggatgagcactagctatac

SEQ ID NO: 4283199 - DNA, 25 bp, Homo sapien
atacctccagccgagatgtggcagc

SEQ ID NO: 4283200 - DNA, 25 bp, Homo sapien
tatctcaaggagatcgtagagcccc

SEQ ID NO: 4283201 - DNA, 25 bp, Homo sapien
ccaccgggaatgtgcgctgaactca

SEQ ID NO: 4283202 - DNA, 25 bp, Homo sapien
tcagcagaggtaaaccgaggcgtcg

SEQ ID NO: 4283203 - DNA, 25 bp, Homo sapien
gagggatctctgacctaccagggaa

SEQ ID NO: 4283204 - DNA, 25 bp, Homo sapien
ctcctgctgctcgagctagaggccg

SEQ ID NO: 4283205 - DNA, 25 bp, Homo sapien
aagttgtccggtgcgggctgctcct

SEQ ID NO: 4283206 - DNA, 25 bp, Homo sapien
tagaggccgctacgctccggaaggc

SEQ ID NO: 4283207 - DNA, 25 bp, Homo sapien
gtgaggccagctgcgctctcccggg

SEQ ID NO: 4283208 - DNA, 25 bp, Homo sapien
tttattcccaaaacagagcgcggct

SEQ ID NO: 4283209 - DNA, 25 bp, Homo sapien
ggaatgtctgactagaggcccgagc

SEQ ID NO: 4283210 - DNA, 25 bp, Homo sapien
cctagggccacggaggatcctgtaa

SEQ ID NO: 4283211 - DNA, 25 bp, Homo sapien
tgttaaacgggactcaaggctgacc

SEQ ID NO: 4283212 - DNA, 25 bp, Homo sapien
ggagtgaccctcacttctgggaact

SEQ ID NO: 4283213 - DNA, 25 bp, Homo sapien
tcaggagtgaccctcacttctggga

SEQ ID NO: 4283214 - DNA, 25 bp, Homo sapien
aggagtgaccctcacttctgggaac

SEQ ID NO: 4283215 - DNA, 25 bp, Homo sapien
caggagtgaccctcacttctgggaa

SEQ ID NO: 4283216 - DNA, 25 bp, Homo sapien
caccagtgggtattgcaaccggttc

SEQ ID NO: 4283217 - DNA, 25 bp, Homo sapien
gagctcctagacagagagtccagcg

SEQ ID NO: 4283218 - DNA, 25 bp, Homo sapien
ctgagtctggcgacagctccgagat

SEQ ID NO: 4283219 - DNA, 25 bp, Homo sapien
cagcatagatgcgaccgtaagaggc

SEQ ID NO: 4283220 - DNA, 25 bp, Homo sapien
tcatccccactggtcagggccgggt

SEQ ID NO: 4283221 - DNA, 25 bp, Homo sapien
ggcccggcccagagaagtctcatcc

SEQ ID NO: 4283222 - DNA, 25 bp, Homo sapien
gacaggaggtcattgccatccacat

SEQ ID NO: 4283223 - DNA, 25 bp, Homo sapien
tgttagctgcatccttgctggtgtc

SEQ ID NO: 4283224 - DNA, 25 bp, Homo sapien
gtccggccattgtcctcgctttctg

SEQ ID NO: 4283225 - DNA, 25 bp, Homo sapien
ggcagagtggccgttggaagcgccc

SEQ ID NO: 4283226 - DNA, 25 bp, Homo sapien
tcactgtcagagtcggagtctgcgc

SEQ ID NO: 4283227 - DNA, 25 bp, Homo sapien
ctttctgaagatggaatggagagac

SEQ ID NO: 4283228 - DNA, 25 bp, Homo sapien
gatggggagagatcctctgcctccc

SEQ ID NO: 4283229 - DNA, 25 bp, Homo sapien
ggatggggagagatcctctgcctcc

SEQ ID NO: 4283230 - DNA, 25 bp, Homo sapien
ggggatggggagagatcctctgcct

SEQ ID NO: 4283231 - DNA, 25 bp, Homo sapien
tggggagagatcctctgcctccctc

SEQ ID NO: 4283232 - DNA, 25 bp, Homo sapien
tgagccatgtcgaaccaggacattg

SEQ ID NO: 4283233 - DNA, 25 bp, Homo sapien
agcggctgagccatgtcgaaccagg

SEQ ID NO: 4283234 - DNA, 25 bp, Homo sapien
tctcgatggaacatggccacgtcca

SEQ ID NO: 4283235 - DNA, 25 bp, Homo sapien
cagcatctcgatggaacatggccac

SEQ ID NO: 4283236 - DNA, 25 bp, Homo sapien
agagccgtgttgttgtaggccccag

SEQ ID NO: 4283237 - DNA, 25 bp, Homo sapien
ggccggagcgggcactgctcacaga

SEQ ID NO: 4283238 - DNA, 25 bp, Homo sapien
gagtgatgcggatgaggccactctc

SEQ ID NO: 4283239 - DNA, 25 bp, Homo sapien
ccactctcctcaaagagagccgtgt

SEQ ID NO: 4283240 - DNA, 25 bp, Homo sapien
aggctggcatccaggcagcccgagc

SEQ ID NO: 4283241 - DNA, 25 bp, Homo sapien
caggaggcactgaccagcagaagca

SEQ ID NO: 4283242 - DNA, 25 bp, Homo sapien
ctgccctgtggagcaggatgtgcgg

SEQ ID NO: 4283243 - DNA, 25 bp, Homo sapien
tgccctgtggagcaggatgtgcggg

SEQ ID NO: 4283244 - DNA, 25 bp, Homo sapien
ctgtggagcaggatgtgcgggcagc

SEQ ID NO: 4283245 - DNA, 25 bp, Homo sapien
ccctgtggagcaggatgtgcgggca

SEQ ID NO: 4283246 - DNA, 25 bp, Homo sapien
ccccaatgagggagggaagtacaga

SEQ ID NO: 4283247 - DNA, 25 bp, Homo sapien
tgcacctcctcccccaatgagggag

SEQ ID NO: 4283248 - DNA, 25 bp, Homo sapien
tgaccgccctcagctgagtccactg

SEQ ID NO: 4283249 - DNA, 25 bp, Homo sapien
cctcagctgagtccactgcacctcc

SEQ ID NO: 4283250 - DNA, 25 bp, Homo sapien
atgaggggctcgtggactgagatcc

SEQ ID NO: 4283251 - DNA, 25 bp, Homo sapien
actatgaccaggacaacagggccag

SEQ ID NO: 4283252 - DNA, 25 bp, Homo sapien
ccagcaaagctccagatgaggggct

SEQ ID NO: 4283253 - DNA, 25 bp, Homo sapien
agtcagggttcccatagccctcagg

SEQ ID NO: 4283254 - DNA, 25 bp, Homo sapien
agcccagggcatggtagaagcgcat

SEQ ID NO: 4283255 - DNA, 25 bp, Homo sapien
ggtgcagcccctgcacgaagagcca

SEQ ID NO: 4283256 - DNA, 25 bp, Homo sapien
gctcaacctgcatgcggtagaggtg

SEQ ID NO: 4283257 - DNA, 25 bp, Homo sapien
catggcgccgcggtccacgttgcgt

SEQ ID NO: 4283258 - DNA, 25 bp, Homo sapien
gaggaagaagtagtgcaggaggatg

SEQ ID NO: 4283259 - DNA, 25 bp, Homo sapien
ggaggatggcgactgcagtgcacac

SEQ ID NO: 4283260 - DNA, 25 bp, Homo sapien
gaagtagtgcaggaggatggcgact

SEQ ID NO: 4283261 - DNA, 25 bp, Homo sapien
tagtgcaggaggatggcgactgcag

SEQ ID NO: 4283262 - DNA, 25 bp, Homo sapien
catcctgctgaaaaccctggcccca

SEQ ID NO: 4283263 - DNA, 25 bp, Homo sapien
gcatcctgctgaaaaccctggcccc

SEQ ID NO: 4283264 - DNA, 25 bp, Homo sapien
ggtcatcaggacacaagttccctgg

SEQ ID NO: 4283265 - DNA, 25 bp, Homo sapien
ccagtagggtcatcaggacacaagt

SEQ ID NO: 4283266 - DNA, 25 bp, Homo sapien
ctcctgggccagtagggtcatcagg

SEQ ID NO: 4283267 - DNA, 25 bp, Homo sapien
tcaggacacaagttccctggccctg

SEQ ID NO: 4283268 - DNA, 25 bp, Homo sapien
tgccacattggcatggatcccacgc

SEQ ID NO: 4283269 - DNA, 25 bp, Homo sapien
ctgattgtgggtcctgtgaatcccc

SEQ ID NO: 4283270 - DNA, 25 bp, Homo sapien
cacattggacttgaggctgcgcagg

SEQ ID NO: 4283271 - DNA, 25 bp, Homo sapien
gacacagccacgaccacgtgggtga

SEQ ID NO: 4283272 - DNA, 25 bp, Homo sapien
caccgtgcgtgggacccattcctgt

SEQ ID NO: 4283273 - DNA, 25 bp, Homo sapien
aaaggtccctgtccggctgcagcga

SEQ ID NO: 4283274 - DNA, 25 bp, Homo sapien
ctcgcagtcccgtgctgtccacaca

SEQ ID NO: 4283275 - DNA, 25 bp, Homo sapien
tccggctgcagcgacaccgtgcgtg

SEQ ID NO: 4283276 - DNA, 25 bp, Homo sapien
tctgtagcaggcgaaactctaggct

SEQ ID NO: 4283277 - DNA, 25 bp, Homo sapien
gtgggtcccactgcacacagatcgc

SEQ ID NO: 4283278 - DNA, 25 bp, Homo sapien
tgctccgattcgctgtctgtagcag

SEQ ID NO: 4283279 - DNA, 25 bp, Homo sapien
taggaagttgcgtccgtggaacaca

SEQ ID NO: 4283280 - DNA, 25 bp, Homo sapien
gaccacacttgaggtggtggagttt

SEQ ID NO: 4283281 - DNA, 25 bp, Homo sapien
tggcacctcggcgttctgcctggaa

SEQ ID NO: 4283282 - DNA, 25 bp, Homo sapien
gagcagtccccctaaggtgcggtaa

SEQ ID NO: 4283283 - DNA, 25 bp, Homo sapien
gagaatgataatggagatcccaggc

SEQ ID NO: 4283284 - DNA, 25 bp, Homo sapien
tcctggcctcgaaagaggttgctat

SEQ ID NO: 4283285 - DNA, 25 bp, Homo sapien
ctcgaaagaggttgctatggtagcg

SEQ ID NO: 4283286 - DNA, 25 bp, Homo sapien
atggtagcgagggtagcgacgggcc

SEQ ID NO: 4283287 - DNA, 25 bp, Homo sapien
aggcatcctggcctcgaaagaggtt

SEQ ID NO: 4283288 - DNA, 25 bp, Homo sapien
cccatgggattcaggtatgtgagtt

SEQ ID NO: 4283289 - DNA, 25 bp, Homo sapien
tgatattaggcgtcaccagccccat

SEQ ID NO: 4283290 - DNA, 25 bp, Homo sapien
gtgtggctgcatactcctccaggtg

SEQ ID NO: 4283291 - DNA, 25 bp, Homo sapien
tccatattccttgcgagtgtggctg

SEQ ID NO: 4283292 - DNA, 25 bp, Homo sapien
tgatggctctcgaaggccagcaggt

SEQ ID NO: 4283293 - DNA, 25 bp, Homo sapien
tatccagtgccgtcttgttcagctc

SEQ ID NO: 4283294 - DNA, 25 bp, Homo sapien
agtgactcgaacatcttggctaaaa

SEQ ID NO: 4283295 - DNA, 25 bp, Homo sapien
tcttggcctccatggtatccagtgc

SEQ ID NO: 4283296 - DNA, 25 bp, Homo sapien
aggtacagttgaagaggtcgggctc

SEQ ID NO: 4283297 - DNA, 25 bp, Homo sapien
gtacagttgaagaggtcgggctcca

SEQ ID NO: 4283298 - DNA, 25 bp, Homo sapien
agttgaagaggtcgggctccagcca

SEQ ID NO: 4283299 - DNA, 25 bp, Homo sapien
gaagaggtcgggctccagccaaccc

SEQ ID NO: 4283300 - DNA, 25 bp, Homo sapien
gaggcaggcaacccctggtcaggcc

SEQ ID NO: 4283301 - DNA, 25 bp, Homo sapien
caggcaacccctggtcaggcctggg

SEQ ID NO: 4283302 - DNA, 25 bp, Homo sapien
ctggaggcaggcaacccctggtcag

SEQ ID NO: 4283303 - DNA, 25 bp, Homo sapien
gcaggcaacccctggtcaggcctgg

SEQ ID NO: 4283304 - DNA, 25 bp, Homo sapien
tcagtgatgtcctttccccccacat

SEQ ID NO: 4283305 - DNA, 25 bp, Homo sapien
gtgatgtcctttccccccacatact

SEQ ID NO: 4283306 - DNA, 25 bp, Homo sapien
cctcagtgatgtcctttccccccac

SEQ ID NO: 4283307 - DNA, 25 bp, Homo sapien
gatgtcctttccccccacatactca

SEQ ID NO: 4283308 - DNA, 25 bp, Homo sapien
ctgtggccaggacgccaaactttgt

SEQ ID NO: 4283309 - DNA, 25 bp, Homo sapien
gcactgtggccaggacgccaaactt

SEQ ID NO: 4283310 - DNA, 25 bp, Homo sapien
gccaggacgccaaactttgtctggg

SEQ ID NO: 4283311 - DNA, 25 bp, Homo sapien
gccaccacacaccagatctcaggga

SEQ ID NO: 4283312 - DNA, 25 bp, Homo sapien
ctgtcacagctgttgcactggcggc

SEQ ID NO: 4283313 - DNA, 25 bp, Homo sapien
ctgccccgcggtcggtagtggaact

SEQ ID NO: 4283314 - DNA, 25 bp, Homo sapien
ccacagggtagcagtcacatgggag

SEQ ID NO: 4283315 - DNA, 25 bp, Homo sapien
cacatgagcgcgaggtggagcccac

SEQ ID NO: 4283316 - DNA, 25 bp, Homo sapien
tgcagttgggatcaaaacctttgtg

SEQ ID NO: 4283317 - DNA, 25 bp, Homo sapien
cacaggttgggctcccccaccagcc

SEQ ID NO: 4283318 - DNA, 25 bp, Homo sapien
acagtggtgcccgaaatagccaccc

SEQ ID NO: 4283319 - DNA, 25 bp, Homo sapien
gcaggtgccggcatgatccctggtt

SEQ ID NO: 4283320 - DNA, 25 bp, Homo sapien
cacacagtcacaggtatagccatgg

SEQ ID NO: 4283321 - DNA, 25 bp, Homo sapien
ccggcatgatccctggttctgacag

SEQ ID NO: 4283322 - DNA, 25 bp, Homo sapien
ggctccgcattcactcggtggctgg

SEQ ID NO: 4283323 - DNA, 25 bp, Homo sapien
cagagggtgtggagccgagccacac

SEQ ID NO: 4283324 - DNA, 25 bp, Homo sapien
caggcgttggtcacaacacagccag

SEQ ID NO: 4283325 - DNA, 25 bp, Homo sapien
ccggcagtctgcgtgaggtgggcag

SEQ ID NO: 4283326 - DNA, 25 bp, Homo sapien
cgtggagctgctttaccttcaggcc

SEQ ID NO: 4283327 - DNA, 25 bp, Homo sapien
gctgctttaccttcaggccctgcag

SEQ ID NO: 4283328 - DNA, 25 bp, Homo sapien
cacgtggagctgctttaccttcagg

SEQ ID NO: 4283329 - DNA, 25 bp, Homo sapien
tggagctgctttaccttcaggccct

SEQ ID NO: 4283330 - DNA, 25 bp, Homo sapien
tcctgcaactccagccgcagatcgt

SEQ ID NO: 4283331 - DNA, 25 bp, Homo sapien
agatgggaagcacggcccgagcccc

SEQ ID NO: 4283332 - DNA, 25 bp, Homo sapien
ctaaagtccagtgagaccataagga

SEQ ID NO: 4283333 - DNA, 25 bp, Homo sapien
gtcacagacagtaacccccgatcta

SEQ ID NO: 4283334 - DNA, 25 bp, Homo sapien
gcgttgcccgtgtccgaaatgccag

SEQ ID NO: 4283335 - DNA, 25 bp, Homo sapien
tggcccagcctgcacttgcatcagg

SEQ ID NO: 4283336 - DNA, 25 bp, Homo sapien
cagtgtgccgttgccacggaaatgg

SEQ ID NO: 4283337 - DNA, 25 bp, Homo sapien
tccaaagttccagctcagtgtgccg

SEQ ID NO: 4283338 - DNA, 25 bp, Homo sapien
agctgacagtctttgccgccgaagc

SEQ ID NO: 4283339 - DNA, 25 bp, Homo sapien
aagccactgttcttgcaggggcctg

SEQ ID NO: 4283340 - DNA, 25 bp, Homo sapien
caaaagtgtagcttggcttggcagc

SEQ ID NO: 4283341 - DNA, 25 bp, Homo sapien
ccagcgctccgagcagaagccactg

SEQ ID NO: 4283342 - DNA, 25 bp, Homo sapien
cgatgaagtccttatgggatacggg

SEQ ID NO: 4283343 - DNA, 25 bp, Homo sapien
tatttgcgacaaaagccgccatgtc

SEQ ID NO: 4283344 - DNA, 25 bp, Homo sapien
cactcggcggccatcaatgtgcagg

SEQ ID NO: 4283345 - DNA, 25 bp, Homo sapien
ggtcccgcatacagccgatgaagtc

SEQ ID NO: 4283346 - DNA, 25 bp, Homo sapien
aagaagagggcccgtcaggtccagg

SEQ ID NO: 4283347 - DNA, 25 bp, Homo sapien
gaagaagagggcccgtcaggtccag

SEQ ID NO: 4283348 - DNA, 25 bp, Homo sapien
agaagaagagggcccgtcaggtcca

SEQ ID NO: 4283349 - DNA, 25 bp, Homo sapien
ccagcagccgcgcatgagtagttgc

SEQ ID NO: 4283350 - DNA, 25 bp, Homo sapien
tggagcttgtttgcacaccagcagc

SEQ ID NO: 4283351 - DNA, 25 bp, Homo sapien
ttcttggagcttgtttgcacaccag

SEQ ID NO: 4283352 - DNA, 25 bp, Homo sapien
gttgccaatctcagcaccaaactgc

SEQ ID NO: 4283353 - DNA, 25 bp, Homo sapien
tcagatgcactgtatgccattgccc

SEQ ID NO: 4283354 - DNA, 25 bp, Homo sapien
ctgtatgccattgcccgtcactcaa

SEQ ID NO: 4283355 - DNA, 25 bp, Homo sapien
cttgttgtagtatctcagatgcact

SEQ ID NO: 4283356 - DNA, 25 bp, Homo sapien
gggctgaccacggtgttggattcac

SEQ ID NO: 4283357 - DNA, 25 bp, Homo sapien
ttcaggcgcccgttgtagaagagca

SEQ ID NO: 4283358 - DNA, 25 bp, Homo sapien
gaagtcgtgcttctcgttcaggcgc

SEQ ID NO: 4283359 - DNA, 25 bp, Homo sapien
ccgtggaatatgtgagccgcacttg

SEQ ID NO: 4283360 - DNA, 25 bp, Homo sapien
ttggccagccacgagttccagggcc

SEQ ID NO: 4283361 - DNA, 25 bp, Homo sapien
ggcactggcagcgaaagccgccgtt

SEQ ID NO: 4283362 - DNA, 25 bp, Homo sapien
acatgacgaacgaactgggcgggaa

SEQ ID NO: 4283363 - DNA, 25 bp, Homo sapien
gaaggagcgcgcagccacctcgcag

SEQ ID NO: 4283364 - DNA, 25 bp, Homo sapien
agcgtaaggtggaatcgctgccgca

SEQ ID NO: 4283365 - DNA, 25 bp, Homo sapien
tcgcaaaagtctcccgtgaatccgg

SEQ ID NO: 4283366 - DNA, 25 bp, Homo sapien
tgaagatgaagacgtcctcagcggg

SEQ ID NO: 4283367 - DNA, 25 bp, Homo sapien
ggagcacggacacgcatttcatgta

SEQ ID NO: 4283368 - DNA, 25 bp, Homo sapien
acatgttctcaaggcgcacggtcag

SEQ ID NO: 4283369 - DNA, 25 bp, Homo sapien
tacggacaattccagaggtgggctc

SEQ ID NO: 4283370 - DNA, 25 bp, Homo sapien
tgtgacagtcaccaacatggaggcc

SEQ ID NO: 4283371 - DNA, 25 bp, Homo sapien
cattgtcccgagctgtgatagccag

SEQ ID NO: 4283372 - DNA, 25 bp, Homo sapien
tggaaagtgtactggacccggccat

SEQ ID NO: 4283373 - DNA, 25 bp, Homo sapien
tcaatgcggaactggggcaggttgt

SEQ ID NO: 4283374 - DNA, 25 bp, Homo sapien
caatgcggaactggggcaggttgtc

SEQ ID NO: 4283375 - DNA, 25 bp, Homo sapien
atcaatgcggaactggggcaggttg

SEQ ID NO: 4283376 - DNA, 25 bp, Homo sapien
catcaatgcggaactggggcaggtt

SEQ ID NO: 4283377 - DNA, 25 bp, Homo sapien
ctccaggagataggtgatacgagca

SEQ ID NO: 4283378 - DNA, 25 bp, Homo sapien
ccaggagataggtgatacgagcatt

SEQ ID NO: 4283379 - DNA, 25 bp, Homo sapien
tccaggagataggtgatacgagcat

SEQ ID NO: 4283380 - DNA, 25 bp, Homo sapien
ggccgatcttcattcacactcactg

SEQ ID NO: 4283381 - DNA, 25 bp, Homo sapien
ctgagtagtgggcactttgaaagac

SEQ ID NO: 4283382 - DNA, 25 bp, Homo sapien
ctcacccacgtcatcatcagaggca

SEQ ID NO: 4283383 - DNA, 25 bp, Homo sapien
actgatgaccactatggtgctaccc

SEQ ID NO: 4283384 - DNA, 25 bp, Homo sapien
tcattaacgtccagcacagtcacgg

SEQ ID NO: 4283385 - DNA, 25 bp, Homo sapien
gcactgttggcatcacggtctactg

SEQ ID NO: 4283386 - DNA, 25 bp, Homo sapien
cattgtgaactcaggccgattgtca

SEQ ID NO: 4283387 - DNA, 25 bp, Homo sapien
tgctgatggcaaagcgattccgggt

SEQ ID NO: 4283388 - DNA, 25 bp, Homo sapien
tatcacaaaaggagtatcaggtgcc

SEQ ID NO: 4283389 - DNA, 25 bp, Homo sapien
gcttgctcaaaaaccggcgagtggt

SEQ ID NO: 4283390 - DNA, 25 bp, Homo sapien
catgagtgccgccagcgagtagact

SEQ ID NO: 4283391 - DNA, 25 bp, Homo sapien
tgttgtagtgcaccaatccgttggc

SEQ ID NO: 4283392 - DNA, 25 bp, Homo sapien
gactccggacaaagagctaaggctc

SEQ ID NO: 4283393 - DNA, 25 bp, Homo sapien
tctgggcgccagtataacacagacc

SEQ ID NO: 4283394 - DNA, 25 bp, Homo sapien
tcgccgtgcgtggtgctgaatccag

SEQ ID NO: 4283395 - DNA, 25 bp, Homo sapien
ccgtggtgccgaatcaaaaagtctg

SEQ ID NO: 4283396 - DNA, 25 bp, Homo sapien
gccacggcggccgcctcgccatcat

SEQ ID NO: 4283397 - DNA, 25 bp, Homo sapien
cgaggccccgccacggcggccgcct

SEQ ID NO: 4283398 - DNA, 25 bp, Homo sapien
gaaggagcaggagtatgggggtcga

SEQ ID NO: 4283399 - DNA, 25 bp, Homo sapien
gagcaggagtatgggggtcgaccgt

SEQ ID NO: 4283400 - DNA, 25 bp, Homo sapien
ggcgtgcggccctggctttttccgc

SEQ ID NO: 4283401 - DNA, 25 bp, Homo sapien
ctccggcgtgcggccctggcttttt

SEQ ID NO: 4283402 - DNA, 25 bp, Homo sapien
gcccctccggcgtgcggccctggct

SEQ ID NO: 4283403 - DNA, 25 bp, Homo sapien
cgcccctccgcctgtctctccgcac

SEQ ID NO: 4283404 - DNA, 25 bp, Homo sapien
gccgctccaacatggctcccggccg

SEQ ID NO: 4283405 - DNA, 25 bp, Homo sapien
gcctcccgccgctccaacatggctc

SEQ ID NO: 4283406 - DNA, 25 bp, Homo sapien
ctcccggccgccccgatggttcgct

SEQ ID NO: 4283407 - DNA, 25 bp, Homo sapien
acagcatccccgacgctgctgccgc

SEQ ID NO: 4283408 - DNA, 25 bp, Homo sapien
tattgaggacgtgagcgttgctcct

SEQ ID NO: 4283409 - DNA, 25 bp, Homo sapien
cagagcgcgaaggttcgccgtcgtt

SEQ ID NO: 4283410 - DNA, 25 bp, Homo sapien
ccatctttattgaggacgtgagcgt

SEQ ID NO: 4283411 - DNA, 25 bp, Homo sapien
tcctggtgctgaacagagcgcgaag

SEQ ID NO: 4283412 - DNA, 25 bp, Homo sapien
accactagttctgaaccgtgtcccg

SEQ ID NO: 4283413 - DNA, 25 bp, Homo sapien
aattttggtgcccatgagcgttctc

SEQ ID NO: 4283414 - DNA, 25 bp, Homo sapien
actagttctgaaccgtgtcccggat

SEQ ID NO: 4283415 - DNA, 25 bp, Homo sapien
tgagcgttctcatagctctgggagg

SEQ ID NO: 4283416 - DNA, 25 bp, Homo sapien
tatgaaacatgtcgcgaccacctgc

SEQ ID NO: 4283417 - DNA, 25 bp, Homo sapien
tctattggcacaatgggaggccccg

SEQ ID NO: 4283418 - DNA, 25 bp, Homo sapien
gcttgtttggatcgcccctgcggag

SEQ ID NO: 4283419 - DNA, 25 bp, Homo sapien
tccaaaggcggaatcgataacgagc

SEQ ID NO: 4283420 - DNA, 25 bp, Homo sapien
aacctgggacgccttcttgcataag

SEQ ID NO: 4283421 - DNA, 25 bp, Homo sapien
cccagaagtggttttgacagcacca

SEQ ID NO: 4283422 - DNA, 25 bp, Homo sapien
gaggcgtctgagtcaccttcgcaac

SEQ ID NO: 4283423 - DNA, 25 bp, Homo sapien
gattgattgcggatcactctccatg

SEQ ID NO: 4283424 - DNA, 25 bp, Homo sapien
tatagagttcagtgccacggaaact

SEQ ID NO: 4283425 - DNA, 25 bp, Homo sapien
tgtgtttgtctactcccagccaggt

SEQ ID NO: 4283426 - DNA, 25 bp, Homo sapien
tatcagctcccaactagaggtccac

SEQ ID NO: 4283427 - DNA, 25 bp, Homo sapien
tggagcgatcagaagaccagggtaa

SEQ ID NO: 4283428 - DNA, 25 bp, Homo sapien
caggactgtctaacaggattgtcta

SEQ ID NO: 4283429 - DNA, 25 bp, Homo sapien
taaatactggctaggtgaggcgact

SEQ ID NO: 4283430 - DNA, 25 bp, Homo sapien
gattttttaacaggacaggactgtc

SEQ ID NO: 4283431 - DNA, 25 bp, Homo sapien
gaacatccatggactcatatcctga

SEQ ID NO: 4283432 - DNA, 25 bp, Homo sapien
catactttcctcccatgggtttcct

SEQ ID NO: 4283433 - DNA, 25 bp, Homo sapien
ctggccttctgacagtaagcggtga

SEQ ID NO: 4283434 - DNA, 25 bp, Homo sapien
acagtaagcggtgagcagggcatcc

SEQ ID NO: 4283435 - DNA, 25 bp, Homo sapien
tgggtttcctatggaatgttgctgc

SEQ ID NO: 4283436 - DNA, 25 bp, Homo sapien
tgctgatgtgtggaaacatctgatg

SEQ ID NO: 4283437 - DNA, 25 bp, Homo sapien
tgaccagaagtcagtgtcagtgatt

SEQ ID NO: 4283438 - DNA, 25 bp, Homo sapien
actgatgaaaaccacttgtgtgtga

SEQ ID NO: 4283439 - DNA, 25 bp, Homo sapien
gtgtgaagcctatatagtggtgtgt

SEQ ID NO: 4283440 - DNA, 25 bp, Homo sapien
tgtctccaagatcccgctttcaaag

SEQ ID NO: 4283441 - DNA, 25 bp, Homo sapien
aagatcccgctttcaaagcagcagc

SEQ ID NO: 4283442 - DNA, 25 bp, Homo sapien
gagaaaagagattcggtcattggct

SEQ ID NO: 4283443 - DNA, 25 bp, Homo sapien
agagattcggtcattggctttctca

SEQ ID NO: 4283444 - DNA, 25 bp, Homo sapien
ctaaggcaaagaatagagctggtgg

SEQ ID NO: 4283445 - DNA, 25 bp, Homo sapien
gtcagtgcaaaacattcttagggcc

SEQ ID NO: 4283446 - DNA, 25 bp, Homo sapien
gctgaagaggaagcctaccagggta

SEQ ID NO: 4283447 - DNA, 25 bp, Homo sapien
cacttggcccctctcttaagttcta

SEQ ID NO: 4283448 - DNA, 25 bp, Homo sapien
gcacatctctcggacaatcatgcgg

SEQ ID NO: 4283449 - DNA, 25 bp, Homo sapien
gactatagcatgcatcagggagagg

SEQ ID NO: 4283450 - DNA, 25 bp, Homo sapien
tgcgtcgcagtatggcctgcaggtc

SEQ ID NO: 4283451 - DNA, 25 bp, Homo sapien
tcctcattcaggatgcgtcgcagta

SEQ ID NO: 4283452 - DNA, 25 bp, Homo sapien
gcacatgtgacagacctcaaatcca

SEQ ID NO: 4283453 - DNA, 25 bp, Homo sapien
tgagctccagacaagaatattcaac

SEQ ID NO: 4283454 - DNA, 25 bp, Homo sapien
ttacctagaactcccctgtgagctc

SEQ ID NO: 4283455 - DNA, 25 bp, Homo sapien
ggaagacctcgtgcacattcacagc

SEQ ID NO: 4283456 - DNA, 25 bp, Homo sapien
caaacaccagcgtctaagctataga

SEQ ID NO: 4283457 - DNA, 25 bp, Homo sapien
caaatgcagagccatgtgcaggcct

SEQ ID NO: 4283458 - DNA, 25 bp, Homo sapien
ccggccagcccttatgacttgacag

SEQ ID NO: 4283459 - DNA, 25 bp, Homo sapien
gggagtcatactgaggtgcctgcac

SEQ ID NO: 4283460 - DNA, 25 bp, Homo sapien
ctgtggccgggctgccaaacacgtc

SEQ ID NO: 4283461 - DNA, 25 bp, Homo sapien
ttgtctcctggtgacaggtctgcga

SEQ ID NO: 4283462 - DNA, 25 bp, Homo sapien
aatgagagccatcatgtctgtgtgg

SEQ ID NO: 4283463 - DNA, 25 bp, Homo sapien
tgacaggtctgcgatgtgccgcaca

SEQ ID NO: 4283464 - DNA, 25 bp, Homo sapien
gagcaacaacagcttctcggagaag

SEQ ID NO: 4283465 - DNA, 25 bp, Homo sapien
gttcaggagcaacaacagcttctcg

SEQ ID NO: 4283466 - DNA, 25 bp, Homo sapien
tctcggagaagatcttgacattggc

SEQ ID NO: 4283467 - DNA, 25 bp, Homo sapien
cattggcgtgtttgctcagggcagc

SEQ ID NO: 4283468 - DNA, 25 bp, Homo sapien
catgggtatagacagggtgctgagc

SEQ ID NO: 4283469 - DNA, 25 bp, Homo sapien
tgagcctgagagccaccatgtgctc

SEQ ID NO: 4283470 - DNA, 25 bp, Homo sapien
ctaaggaaggacatgggtatagaca

SEQ ID NO: 4283471 - DNA, 25 bp, Homo sapien
agcctgagagccaccatgtgctcag

SEQ ID NO: 4283472 - DNA, 25 bp, Homo sapien
ccagaagcaggttcacgcagaggtc

SEQ ID NO: 4283473 - DNA, 25 bp, Homo sapien
catcctcgacgatgttcagtaggaa

SEQ ID NO: 4283474 - DNA, 25 bp, Homo sapien
tcagtaggaactgggcgaaaggcgt

SEQ ID NO: 4283475 - DNA, 25 bp, Homo sapien
tgggcgaaaggcgtgcccaggtgct

SEQ ID NO: 4283476 - DNA, 25 bp, Homo sapien
atagtgtgcatagggcactgcctct

SEQ ID NO: 4283477 - DNA, 25 bp, Homo sapien
catagtgtgcatagggcactgcctc

SEQ ID NO: 4283478 - DNA, 25 bp, Homo sapien
gccagctctacaggcagcacggatg

SEQ ID NO: 4283479 - DNA, 25 bp, Homo sapien
tgcacatggcgccaaagcacttgag

SEQ ID NO: 4283480 - DNA, 25 bp, Homo sapien
agcagcagccgcagtgatgctcggt

SEQ ID NO: 4283481 - DNA, 25 bp, Homo sapien
tgacacaagcgtggagatgatggct

SEQ ID NO: 4283482 - DNA, 25 bp, Homo sapien
ggccaggacagactcgaactcgttt

SEQ ID NO: 4283483 - DNA, 25 bp, Homo sapien
gccaggacagactcgaactcgtttc

SEQ ID NO: 4283484 - DNA, 25 bp, Homo sapien
ggacagactcgaactcgtttctctt

SEQ ID NO: 4283485 - DNA, 25 bp, Homo sapien
caggacagactcgaactcgtttctc

SEQ ID NO: 4283486 - DNA, 25 bp, Homo sapien
cagctcctctaggtagcagcggatg

SEQ ID NO: 4283487 - DNA, 25 bp, Homo sapien
gcgagccaggtctgcaaagatcacc

SEQ ID NO: 4283488 - DNA, 25 bp, Homo sapien
tatagtgcccaactgcgctgctggg

SEQ ID NO: 4283489 - DNA, 25 bp, Homo sapien
tcgtggcagacctgccctgagggca

SEQ ID NO: 4283490 - DNA, 25 bp, Homo sapien
gaaatcagctcaacgtccccagtgc

SEQ ID NO: 4283491 - DNA, 25 bp, Homo sapien
tgagaaatacctgtaatgtacaggc

SEQ ID NO: 4283492 - DNA, 25 bp, Homo sapien
tgggtagcagggtggccctgctgtg

SEQ ID NO: 4283493 - DNA, 25 bp, Homo sapien
gacaagtgtgtgacggtgggaacag

SEQ ID NO: 4283494 - DNA, 25 bp, Homo sapien
ccctctacgagtgagaggaggacct

SEQ ID NO: 4283495 - DNA, 25 bp, Homo sapien
ccacccggcataattcgtggctcag

SEQ ID NO: 4283496 - DNA, 25 bp, Homo sapien
agctcggccccaatggtcctgggca

SEQ ID NO: 4283497 - DNA, 25 bp, Homo sapien
tggatgtgacccactatgatgccga

SEQ ID NO: 4283498 - DNA, 25 bp, Homo sapien
gagcctggttcagatgggctggagc

SEQ ID NO: 4283499 - DNA, 25 bp, Homo sapien
gctggacttgggacacggtggtgtg

SEQ ID NO: 4283500 - DNA, 25 bp, Homo sapien
tggagctggtatagagcgtgtccag

SEQ ID NO: 4283501 - DNA, 25 bp, Homo sapien
ccccggagggcatggtgttgtggcc

SEQ ID NO: 4283502 - DNA, 25 bp, Homo sapien
gcggtctcggcgcttcactggtggg

SEQ ID NO: 4283503 - DNA, 25 bp, Homo sapien
ggtgctgctcggcgaggctgtggtg

SEQ ID NO: 4283504 - DNA, 25 bp, Homo sapien
gtgggtgctgctcggcgaggctgtg

SEQ ID NO: 4283505 - DNA, 25 bp, Homo sapien
aggccatcagggcctcgcggtctcg

SEQ ID NO: 4283506 - DNA, 25 bp, Homo sapien
ccttctccacgatgtcctccccaca

SEQ ID NO: 4283507 - DNA, 25 bp, Homo sapien
ttctccacgatgtcctccccacaca

SEQ ID NO: 4283508 - DNA, 25 bp, Homo sapien
tctccacgatgtcctccccacacac

SEQ ID NO: 4283509 - DNA, 25 bp, Homo sapien
ctcccttctccacgatgtcctcccc

SEQ ID NO: 4283510 - DNA, 25 bp, Homo sapien
aagggcctctgcgtgacagggtctc

SEQ ID NO: 4283511 - DNA, 25 bp, Homo sapien
ctctttccggtggtggatcagcttc

SEQ ID NO: 4283512 - DNA, 25 bp, Homo sapien
tcagaactgggtaggctgtgctgcc

SEQ ID NO: 4283513 - DNA, 25 bp, Homo sapien
gatgaggtcataactgcaacactgg

SEQ ID NO: 4283514 - DNA, 25 bp, Homo sapien
gccaccatcccgcatggctgtgttg

SEQ ID NO: 4283515 - DNA, 25 bp, Homo sapien
tcgatggcccggtcaatggcctgga

SEQ ID NO: 4283516 - DNA, 25 bp, Homo sapien
tgtgttgtgtacagcctcgatggcc

SEQ ID NO: 4283517 - DNA, 25 bp, Homo sapien
tccaggctgtacttgccaccatccc

SEQ ID NO: 4283518 - DNA, 25 bp, Homo sapien
ctggggggggcaggggacagcagtt

SEQ ID NO: 4283519 - DNA, 25 bp, Homo sapien
tggggggggcaggggacagcagtta

SEQ ID NO: 4283520 - DNA, 25 bp, Homo sapien
ggggggcaggggacagcagttagac

SEQ ID NO: 4283521 - DNA, 25 bp, Homo sapien
gggggggcaggggacagcagttaga

SEQ ID NO: 4283522 - DNA, 25 bp, Homo sapien
gcgcaggtaggctggcggcacgtag

SEQ ID NO: 4283523 - DNA, 25 bp, Homo sapien
ccaggaaggtctcgcccgcggcgaa

SEQ ID NO: 4283524 - DNA, 25 bp, Homo sapien
ggaacgcgtacagcgcgcggtacat

SEQ ID NO: 4283525 - DNA, 25 bp, Homo sapien
tgcttcgctctagcaccaggaaggt

SEQ ID NO: 4283526 - DNA, 25 bp, Homo sapien
gcaggtgcagggaaggtggcaaggg

SEQ ID NO: 4283527 - DNA, 25 bp, Homo sapien
cagggcaggtgcagggaaggtggca

SEQ ID NO: 4283528 - DNA, 25 bp, Homo sapien
ggcaggtgcagggaaggtggcaagg

SEQ ID NO: 4283529 - DNA, 25 bp, Homo sapien
gaggccgggcagggcaggtgcaggg

SEQ ID NO: 4283530 - DNA, 25 bp, Homo sapien
ctgcggcgccacaacgccaggccgg

SEQ ID NO: 4283531 - DNA, 25 bp, Homo sapien
ggcccctttacaacacagtccatgg

SEQ ID NO: 4283532 - DNA, 25 bp, Homo sapien
tagaggtgctgagacacttagccag

SEQ ID NO: 4283533 - DNA, 25 bp, Homo sapien
tagagaccctagtattgcttccagg

SEQ ID NO: 4283534 - DNA, 25 bp, Homo sapien
taattggcttaagctgcatacggcc

SEQ ID NO: 4283535 - DNA, 25 bp, Homo sapien
cactcagggaagaaagaggtatcat

SEQ ID NO: 4283536 - DNA, 25 bp, Homo sapien
ttgtattagaacatatacactcagg

SEQ ID NO: 4283537 - DNA, 25 bp, Homo sapien
cctgggacacagagtcgctctcaag

SEQ ID NO: 4283538 - DNA, 25 bp, Homo sapien
tcaagtactggagcagctagcaagc

SEQ ID NO: 4283539 - DNA, 25 bp, Homo sapien
tgtgacaatgtctatcaggctctgg

SEQ ID NO: 4283540 - DNA, 25 bp, Homo sapien
gctctggagcccgaagatatagcca

SEQ ID NO: 4283541 - DNA, 25 bp, Homo sapien
gtcctcgccatacagcctgcaggtg

SEQ ID NO: 4283542 - DNA, 25 bp, Homo sapien
catctacagagctggcgccgatggg

SEQ ID NO: 4283543 - DNA, 25 bp, Homo sapien
gatagcttccgtccatggtacttgt

SEQ ID NO: 4283544 - DNA, 25 bp, Homo sapien
gcttgagtagaagcggtaggactcc

SEQ ID NO: 4283545 - DNA, 25 bp, Homo sapien
gtaggactcctgtcgctccaacact

SEQ ID NO: 4283546 - DNA, 25 bp, Homo sapien
gcaggtaccgcccattgtggaagaa

SEQ ID NO: 4283547 - DNA, 25 bp, Homo sapien
gcaaacaggactataccagggtggg

SEQ ID NO: 4283548 - DNA, 25 bp, Homo sapien
ttgagcaaacaggactataccaggg

SEQ ID NO: 4283549 - DNA, 25 bp, Homo sapien
gaatcttttgagcaaacaggactat

SEQ ID NO: 4283550 - DNA, 25 bp, Homo sapien
tcttttgagcaaacaggactatacc

SEQ ID NO: 4283551 - DNA, 25 bp, Homo sapien
cacacgcacaccaatgactgcagat

SEQ ID NO: 4283552 - DNA, 25 bp, Homo sapien
tgaagcatcatcaccatgttgtcgt

SEQ ID NO: 4283553 - DNA, 25 bp, Homo sapien
tctgctgacattttcggatctggtt

SEQ ID NO: 4283554 - DNA, 25 bp, Homo sapien
catcaccatgttgtcgtgtgcccat

SEQ ID NO: 4283555 - DNA, 25 bp, Homo sapien
acaaggcacctcgtagcgggaagtc

SEQ ID NO: 4283556 - DNA, 25 bp, Homo sapien
gaagtcaggttttccagtaagataa

SEQ ID NO: 4283557 - DNA, 25 bp, Homo sapien
tcgtagcgggaagtcaggttttcca

SEQ ID NO: 4283558 - DNA, 25 bp, Homo sapien
gaggtcaaggacacaaggcacctcg

SEQ ID NO: 4283559 - DNA, 25 bp, Homo sapien
cagagatgcccgtgaacaaaggata

SEQ ID NO: 4283560 - DNA, 25 bp, Homo sapien
agagatgcccgtgaacaaaggatac

SEQ ID NO: 4283561 - DNA, 25 bp, Homo sapien
agctgggaacttatattccccttct

SEQ ID NO: 4283562 - DNA, 25 bp, Homo sapien
tgttgctggtgacatttcatgctcc

SEQ ID NO: 4283563 - DNA, 25 bp, Homo sapien
tctacagtgtagtacaagacttcag

SEQ ID NO: 4283564 - DNA, 25 bp, Homo sapien
gctccaagggttatagtgtttaagc

SEQ ID NO: 4283565 - DNA, 25 bp, Homo sapien
ttattgcccaggtgcaatggtgcga

SEQ ID NO: 4283566 - DNA, 25 bp, Homo sapien
tccgcccgccctggcgtcctgaagt

SEQ ID NO: 4283567 - DNA, 25 bp, Homo sapien
ctacgcctcccggttctagagattc

SEQ ID NO: 4283568 - DNA, 25 bp, Homo sapien
caacctacgcctcccggttctagag

SEQ ID NO: 4283569 - DNA, 25 bp, Homo sapien
aaaaagaacctaagatccaagatca

SEQ ID NO: 4283570 - DNA, 25 bp, Homo sapien
taagatccaagatcagcccctgctc

SEQ ID NO: 4283571 - DNA, 25 bp, Homo sapien
acctaagatccaagatcagcccctg

SEQ ID NO: 4283572 - DNA, 25 bp, Homo sapien
attaagggaccagtcaaccactatt

SEQ ID NO: 4283573 - DNA, 25 bp, Homo sapien
tacaatgtccacaattccatggtcc

SEQ ID NO: 4283574 - DNA, 25 bp, Homo sapien
catggtcccctttcaatggatatgc

SEQ ID NO: 4283575 - DNA, 25 bp, Homo sapien
cattttctcctctttacggtgctga

SEQ ID NO: 4283576 - DNA, 25 bp, Homo sapien
tgtttgttgtccaccttaggagctt

SEQ ID NO: 4283577 - DNA, 25 bp, Homo sapien
gaagcgttgtaagtaacatgattgt

SEQ ID NO: 4283578 - DNA, 25 bp, Homo sapien
gcgttgtaagtaacatgattgtaac

SEQ ID NO: 4283579 - DNA, 25 bp, Homo sapien
ttagcaggaagaagcgttgtaagta

SEQ ID NO: 4283580 - DNA, 25 bp, Homo sapien
ggaagaagcgttgtaagtaacatga

SEQ ID NO: 4283581 - DNA, 25 bp, Homo sapien
agtctctatgttgccagaggcccca

SEQ ID NO: 4283582 - DNA, 25 bp, Homo sapien
atctgcaaacttaacaaatatcaaa

SEQ ID NO: 4283583 - DNA, 25 bp, Homo sapien
cttagtctctatgttgccagaggcc

SEQ ID NO: 4283584 - DNA, 25 bp, Homo sapien
agttccttagtctctatgttgccag

SEQ ID NO: 4283585 - DNA, 25 bp, Homo sapien
gagtcttcctctctgatgtactcaa

SEQ ID NO: 4283586 - DNA, 25 bp, Homo sapien
gggagcaaacatggctgagagtctt

SEQ ID NO: 4283587 - DNA, 25 bp, Homo sapien
tcaacgaggcaagagccaaagaatt

SEQ ID NO: 4283588 - DNA, 25 bp, Homo sapien
caagacaagcaattagggagcaaac

SEQ ID NO: 4283589 - DNA, 25 bp, Homo sapien
atgtaattcttctaatcctaaaaga

SEQ ID NO: 4283590 - DNA, 25 bp, Homo sapien
tatgtaattcttctaatcctaaaag

SEQ ID NO: 4283591 - DNA, 25 bp, Homo sapien
tgtaattcttctaatcctaaaagac

SEQ ID NO: 4283592 - DNA, 25 bp, Homo sapien
aagacaccctagcaaaggcttccca

SEQ ID NO: 4283593 - DNA, 25 bp, Homo sapien
tttgcctgagggttaagaagcatcc

SEQ ID NO: 4283594 - DNA, 25 bp, Homo sapien
cagcctcatggcttgctttaaagca

SEQ ID NO: 4283595 - DNA, 25 bp, Homo sapien
catccaagagtaagggaagactggg

SEQ ID NO: 4283596 - DNA, 25 bp, Homo sapien
tgaaagcagcttttccccttaagtc

SEQ ID NO: 4283597 - DNA, 25 bp, Homo sapien
tggtctttgcagtctcacgtcacaa

SEQ ID NO: 4283598 - DNA, 25 bp, Homo sapien
gtttcagcaggtgccgacgagcgcc

SEQ ID NO: 4283599 - DNA, 25 bp, Homo sapien
tgccatgagtaattaagacagtctt

SEQ ID NO: 4283600 - DNA, 25 bp, Homo sapien
cgtgctcagagagagatgacacttc

SEQ ID NO: 4283601 - DNA, 25 bp, Homo sapien
aaacgactggctgaacacctttcct

SEQ ID NO: 4283602 - DNA, 25 bp, Homo sapien
cccagcatcactcaatctgctcagt

SEQ ID NO: 4283603 - DNA, 25 bp, Homo sapien
cagtcctcgactgctgcaggggaat

SEQ ID NO: 4283604 - DNA, 25 bp, Homo sapien
ggatggccagctaacaaggggcctt

SEQ ID NO: 4283605 - DNA, 25 bp, Homo sapien
tggccagctaacaaggggcctttgg

SEQ ID NO: 4283606 - DNA, 25 bp, Homo sapien
gcagggatggccagctaacaagggg

SEQ ID NO: 4283607 - DNA, 25 bp, Homo sapien
gccagctaacaaggggcctttggct

SEQ ID NO: 4283608 - DNA, 25 bp, Homo sapien
tccccaccgcaatacacatgcatat

SEQ ID NO: 4283609 - DNA, 25 bp, Homo sapien
ttctagagtcctttatgtaaccagg

SEQ ID NO: 4283610 - DNA, 25 bp, Homo sapien
catgcatattcagagtacagagaaa

SEQ ID NO: 4283611 - DNA, 25 bp, Homo sapien
caatgtttcaacagtcccaaaagaa

SEQ ID NO: 4283612 - DNA, 25 bp, Homo sapien
tgatttacaaaagactcccccactc

SEQ ID NO: 4283613 - DNA, 25 bp, Homo sapien
agaccccaccatgctggtggctgct

SEQ ID NO: 4283614 - DNA, 25 bp, Homo sapien
caacaaagaccccaccatgctggtg

SEQ ID NO: 4283615 - DNA, 25 bp, Homo sapien
cactccccaacaaagaccccaccat

SEQ ID NO: 4283616 - DNA, 25 bp, Homo sapien
gttgctttcatatagcaattttggg

SEQ ID NO: 4283617 - DNA, 25 bp, Homo sapien
tatgtgaatcgaagggttgctttca

SEQ ID NO: 4283618 - DNA, 25 bp, Homo sapien
tgcattccatctgactcaacgctgc

SEQ ID NO: 4283619 - DNA, 25 bp, Homo sapien
agcaaagggcttgggctaatcagca

SEQ ID NO: 4283620 - DNA, 25 bp, Homo sapien
tggaggacaaaaagcaggcggcaag

SEQ ID NO: 4283621 - DNA, 25 bp, Homo sapien
ggacaaaaagcaggcggcaagtatt

SEQ ID NO: 4283622 - DNA, 25 bp, Homo sapien
ctggaggacaaaaagcaggcggcaa

SEQ ID NO: 4283623 - DNA, 25 bp, Homo sapien
gaggacaaaaagcaggcggcaagta

SEQ ID NO: 4283624 - DNA, 25 bp, Homo sapien
cacttctaccaaaatcaaactcaaa

SEQ ID NO: 4283625 - DNA, 25 bp, Homo sapien
acttctaccaaaatcaaactcaaat

SEQ ID NO: 4283626 - DNA, 25 bp, Homo sapien
gattgaaaactgagggtgtgagatg

SEQ ID NO: 4283627 - DNA, 25 bp, Homo sapien
cagggattgaaaactgagggtgtga

SEQ ID NO: 4283628 - DNA, 25 bp, Homo sapien
attgaaaactgagggtgtgagatgc

SEQ ID NO: 4283629 - DNA, 25 bp, Homo sapien
gggattgaaaactgagggtgtgaga

SEQ ID NO: 4283630 - DNA, 25 bp, Homo sapien
tcctcgccagtgtggcaacccctcc

SEQ ID NO: 4283631 - DNA, 25 bp, Homo sapien
tctcctcgccagtgtggcaacccct

SEQ ID NO: 4283632 - DNA, 25 bp, Homo sapien
tcgccagtgtggcaacccctccagc

SEQ ID NO: 4283633 - DNA, 25 bp, Homo sapien
catctcctcgccagtgtggcaaccc

SEQ ID NO: 4283634 - DNA, 25 bp, Homo sapien
tgaagcggagcacgcatgagtgccc

SEQ ID NO: 4283635 - DNA, 25 bp, Homo sapien
cacagggttgtctcattgaagcgga

SEQ ID NO: 4283636 - DNA, 25 bp, Homo sapien
agtgaatttgcgcatctcagcaggg

SEQ ID NO: 4283637 - DNA, 25 bp, Homo sapien
ccgacctggtggacaaagggctcca

SEQ ID NO: 4283638 - DNA, 25 bp, Homo sapien
tgtttgtccgtgtgtccctctcgtc

SEQ ID NO: 4283639 - DNA, 25 bp, Homo sapien
cagcggagtccagcggccagtacgt

SEQ ID NO: 4283640 - DNA, 25 bp, Homo sapien
tccgtgtgtccctctcgtcttggct

SEQ ID NO: 4283641 - DNA, 25 bp, Homo sapien
ctgtctgttgtttgtccgtgtgtcc

SEQ ID NO: 4283642 - DNA, 25 bp, Homo sapien
tcgaagtagcgtgggaagtgcctta

SEQ ID NO: 4283643 - DNA, 25 bp, Homo sapien
acaaaatgatgacatgggggttcga

SEQ ID NO: 4283644 - DNA, 25 bp, Homo sapien
gggttcgaagtagcgtgggaagtgc

SEQ ID NO: 4283645 - DNA, 25 bp, Homo sapien
aaatgatgacatgggggttcgaagt

SEQ ID NO: 4283646 - DNA, 25 bp, Homo sapien
gagttgacaacatagtaagccccat

SEQ ID NO: 4283647 - DNA, 25 bp, Homo sapien
cctcatgggccaggctttagaaaca

SEQ ID NO: 4283648 - DNA, 25 bp, Homo sapien
aagctactgattcatggtccgccga

SEQ ID NO: 4283649 - DNA, 25 bp, Homo sapien
ggtccgccgaccagtactaaagcac

SEQ ID NO: 4283650 - DNA, 25 bp, Homo sapien
agatggaagggtcactggagcctgg

SEQ ID NO: 4283651 - DNA, 25 bp, Homo sapien
tgagatggaagggtcactggagcct

SEQ ID NO: 4283652 - DNA, 25 bp, Homo sapien
gccgtgatcacatgactgtactcca

SEQ ID NO: 4283653 - DNA, 25 bp, Homo sapien
gagccgtgatcacatgactgtactc

SEQ ID NO: 4283654 - DNA, 25 bp, Homo sapien
taatggttccatagggcccgtgtgg

SEQ ID NO: 4283655 - DNA, 25 bp, Homo sapien
tgagaacaatcctggcaaaatagtg

SEQ ID NO: 4283656 - DNA, 25 bp, Homo sapien
gcttacaggtctcaatctatgaggg

SEQ ID NO: 4283657 - DNA, 25 bp, Homo sapien
taactcaacaggaacacagagaagc

SEQ ID NO: 4283658 - DNA, 25 bp, Homo sapien
cctgggattaaatgatccgcctacc

SEQ ID NO: 4283659 - DNA, 25 bp, Homo sapien
taaacctgtcagctgccaactggca

SEQ ID NO: 4283660 - DNA, 25 bp, Homo sapien
tgaaccaggccacacatctattagt

SEQ ID NO: 4283661 - DNA, 25 bp, Homo sapien
ctgaagcgcagttggtgtaatcaca

SEQ ID NO: 4283662 - DNA, 25 bp, Homo sapien
tgagacaagctcacacggcccatgg

SEQ ID NO: 4283663 - DNA, 25 bp, Homo sapien
aatccccatgaaagctgagacaagc

SEQ ID NO: 4283664 - DNA, 25 bp, Homo sapien
cttcagttacgaaggcctgttggcc

SEQ ID NO: 4283665 - DNA, 25 bp, Homo sapien
agtgtgcagcttcagttacgaaggc

SEQ ID NO: 4283666 - DNA, 25 bp, Homo sapien
tgttgcctagataccagtgacatct

SEQ ID NO: 4283667 - DNA, 25 bp, Homo sapien
catccctgttgcctagataccagtg

SEQ ID NO: 4283668 - DNA, 25 bp, Homo sapien
aggctcatccctgttgcctagatac

SEQ ID NO: 4283669 - DNA, 25 bp, Homo sapien
tgcctagataccagtgacatctcag

SEQ ID NO: 4283670 - DNA, 25 bp, Homo sapien
ttctttcctggcacattccactgct

SEQ ID NO: 4283671 - DNA, 25 bp, Homo sapien
ttccactgctcagacagatacaggg

SEQ ID NO: 4283672 - DNA, 25 bp, Homo sapien
tggcaaaggttcatcagtcagtggt

SEQ ID NO: 4283673 - DNA, 25 bp, Homo sapien
gcatacagtgtacctgtctgtcacc

SEQ ID NO: 4283674 - DNA, 25 bp, Homo sapien
tgacccagggaaatcgaatccacag

SEQ ID NO: 4283675 - DNA, 25 bp, Homo sapien
aatgacaccgtagatcttgcgcttc

SEQ ID NO: 4283676 - DNA, 25 bp, Homo sapien
taacagtacctgaggcgctgagctg

SEQ ID NO: 4283677 - DNA, 25 bp, Homo sapien
tgacgggcccaaatggcattcaaca

SEQ ID NO: 4283678 - DNA, 25 bp, Homo sapien
cctcaaagctcctcgggcactaggg

SEQ ID NO: 4283679 - DNA, 25 bp, Homo sapien
gagactccaatgatcagagatcccg

SEQ ID NO: 4283680 - DNA, 25 bp, Homo sapien
tagggccataggacgcgagctttac

SEQ ID NO: 4283681 - DNA, 25 bp, Homo sapien
agagatcccgtttcccagtagcctg

SEQ ID NO: 4283682 - DNA, 25 bp, Homo sapien
tattggctcgtcctaggagctgcgc

SEQ ID NO: 4283683 - DNA, 25 bp, Homo sapien
tagggtgccaggattcgctgcagca

SEQ ID NO: 4283684 - DNA, 25 bp, Homo sapien
cgtcctattgtttctctcgcaccaa

SEQ ID NO: 4283685 - DNA, 25 bp, Homo sapien
gacagcctgaaaggcgctgttgcta

SEQ ID NO: 4283686 - DNA, 25 bp, Homo sapien
gcggttgggtggatagactagctgc

SEQ ID NO: 4283687 - DNA, 25 bp, Homo sapien
cggagcattgtcctccgtctgggag

SEQ ID NO: 4283688 - DNA, 25 bp, Homo sapien
tagactagctgcgggccgatggaca

SEQ ID NO: 4283689 - DNA, 25 bp, Homo sapien
ctgacgggcggttgggtggatagac

SEQ ID NO: 4283690 - DNA, 25 bp, Homo sapien
ttcactgagtccaaactgccaccat

SEQ ID NO: 4283691 - DNA, 25 bp, Homo sapien
cttcagtctgttctgcacacatcag

SEQ ID NO: 4283692 - DNA, 25 bp, Homo sapien
tgagtccaaactgccaccatttctc

SEQ ID NO: 4283693 - DNA, 25 bp, Homo sapien
caaactgccaccatttctcttgagt

SEQ ID NO: 4283694 - DNA, 25 bp, Homo sapien
ggctgaacaagaaagtacgtccata

SEQ ID NO: 4283695 - DNA, 25 bp, Homo sapien
gcaacaggtaaaaatactgtccagt

SEQ ID NO: 4283696 - DNA, 25 bp, Homo sapien
ggatgaatagacttaaaagaatgaa

SEQ ID NO: 4283697 - DNA, 25 bp, Homo sapien
ctggggctgaacaagaaagtacgtc

SEQ ID NO: 4283698 - DNA, 25 bp, Homo sapien
cttgggctggttggtttgaggactg

SEQ ID NO: 4283699 - DNA, 25 bp, Homo sapien
tgggctggttggtttgaggactgga

SEQ ID NO: 4283700 - DNA, 25 bp, Homo sapien
ttgggctggttggtttgaggactgg

SEQ ID NO: 4283701 - DNA, 25 bp, Homo sapien
ggctggttggtttgaggactggagg

SEQ ID NO: 4283702 - DNA, 25 bp, Homo sapien
caggatgtaggtcttcaggcccctg

SEQ ID NO: 4283703 - DNA, 25 bp, Homo sapien
ccaggatgtaggtcttcaggcccct

SEQ ID NO: 4283704 - DNA, 25 bp, Homo sapien
tccaggatgtaggtcttcaggcccc

SEQ ID NO: 4283705 - DNA, 25 bp, Homo sapien
ctccaaaggtggagggggcaagagt

SEQ ID NO: 4283706 - DNA, 25 bp, Homo sapien
gagtggacatcctcccataagcctg

SEQ ID NO: 4283707 - DNA, 25 bp, Homo sapien
cataagcctgccatcttcgtacaca

SEQ ID NO: 4283708 - DNA, 25 bp, Homo sapien
gcgagtggaccccagacaattgatt

SEQ ID NO: 4283709 - DNA, 25 bp, Homo sapien
ggtcagtgggagtggacatcctccc

SEQ ID NO: 4283710 - DNA, 25 bp, Homo sapien
tgcccacgccagcagtttcagaatg

SEQ ID NO: 4283711 - DNA, 25 bp, Homo sapien
cagacatgggagtgtgtactgcagc

SEQ ID NO: 4283712 - DNA, 25 bp, Homo sapien
ccatcactggatgttatactctaaa

SEQ ID NO: 4283713 - DNA, 25 bp, Homo sapien
gaaagtgaacagtttgaccatcact

SEQ ID NO: 4283714 - DNA, 25 bp, Homo sapien
gagtacacagtgacctttgtcccct

SEQ ID NO: 4283715 - DNA, 25 bp, Homo sapien
tcctggcttatagcagagtacacag

SEQ ID NO: 4283716 - DNA, 25 bp, Homo sapien
gaaagggtattgctggatcctggct

SEQ ID NO: 4283717 - DNA, 25 bp, Homo sapien
ttggaggacctagccagaaagggta

SEQ ID NO: 4283718 - DNA, 25 bp, Homo sapien
catctaccagttgcttgggtcctag

SEQ ID NO: 4283719 - DNA, 25 bp, Homo sapien
caagatcaaactgcaacaaggcgct

SEQ ID NO: 4283720 - DNA, 25 bp, Homo sapien
gccctagtgagtcccaagatttcca

SEQ ID NO: 4283721 - DNA, 25 bp, Homo sapien
cagctaccagtttattgggccctag

SEQ ID NO: 4283722 - DNA, 25 bp, Homo sapien
cctgagttgaacttggcatgccacc

SEQ ID NO: 4283723 - DNA, 25 bp, Homo sapien
ccctgcagtgtgtaaaaggaaacct

SEQ ID NO: 4283724 - DNA, 25 bp, Homo sapien
acaatgtggatacctcagccctgag

SEQ ID NO: 4283725 - DNA, 25 bp, Homo sapien
taatcaagagtaaagccgagcccta

SEQ ID NO: 4283726 - DNA, 25 bp, Homo sapien
tgtccgtggcaaaagcggaaagcct

SEQ ID NO: 4283727 - DNA, 25 bp, Homo sapien
caatgtaggctacagagggcagtct

SEQ ID NO: 4283728 - DNA, 25 bp, Homo sapien
aaagaattggaacgctgtcaggtcc

SEQ ID NO: 4283729 - DNA, 25 bp, Homo sapien
tcatggccagccctaactagtgtga

SEQ ID NO: 4283730 - DNA, 25 bp, Homo sapien
ttagaatcccaaataccccaacatc

SEQ ID NO: 4283731 - DNA, 25 bp, Homo sapien
gaaaggccttcacagtaattctatg

SEQ ID NO: 4283732 - DNA, 25 bp, Homo sapien
tataccttattaggatgatcactgg

SEQ ID NO: 4283733 - DNA, 25 bp, Homo sapien
tatctttacggaaatttcacactgc

SEQ ID NO: 4283734 - DNA, 25 bp, Homo sapien
tcacccggggtggaatacaatggtg

SEQ ID NO: 4283735 - DNA, 25 bp, Homo sapien
cactgtcacccggggtggaatacaa

SEQ ID NO: 4283736 - DNA, 25 bp, Homo sapien
actgtcacccggggtggaatacaat

SEQ ID NO: 4283737 - DNA, 25 bp, Homo sapien
ttgcactgtcacccggggtggaata

SEQ ID NO: 4283738 - DNA, 25 bp, Homo sapien
ggtgtcacactaagaaggctctggg

SEQ ID NO: 4283739 - DNA, 25 bp, Homo sapien
tgtaaaaccaaaggctgcaactgtg

SEQ ID NO: 4283740 - DNA, 25 bp, Homo sapien
gacaaagtgatagcaaccctccaga

SEQ ID NO: 4283741 - DNA, 25 bp, Homo sapien
ttctgctctaacatgggtcccacgg

SEQ ID NO: 4283742 - DNA, 25 bp, Homo sapien
gatccacgctggagccaaacatctt

SEQ ID NO: 4283743 - DNA, 25 bp, Homo sapien
cagatccacgctggagccaaacatc

SEQ ID NO: 4283744 - DNA, 25 bp, Homo sapien
cccagatccacgctggagccaaaca

SEQ ID NO: 4283745 - DNA, 25 bp, Homo sapien
tgcccagatccacgctggagccaaa

SEQ ID NO: 4283746 - DNA, 25 bp, Homo sapien
ctctcgaatgcttgtacatccataa

SEQ ID NO: 4283747 - DNA, 25 bp, Homo sapien
gaagcctctcgaatgcttgtacatc

SEQ ID NO: 4283748 - DNA, 25 bp, Homo sapien
tagtgtgagatgttcctcttcatga

SEQ ID NO: 4283749 - DNA, 25 bp, Homo sapien
ctgttcctcatagtgtgagatgttc

SEQ ID NO: 4283750 - DNA, 25 bp, Homo sapien
agcgggcaatctcgacctcctggtt

SEQ ID NO: 4283751 - DNA, 25 bp, Homo sapien
tctccaaagtactgccccttatggc

SEQ ID NO: 4283752 - DNA, 25 bp, Homo sapien
tgacatctccaactgcataagctga

SEQ ID NO: 4283753 - DNA, 25 bp, Homo sapien
ctggttcccaccatccttgtttgat

SEQ ID NO: 4283754 - DNA, 25 bp, Homo sapien
gctcacttcgccagactctatgatg

SEQ ID NO: 4283755 - DNA, 25 bp, Homo sapien
cttctaatcaagatgctcacttcgc

SEQ ID NO: 4283756 - DNA, 25 bp, Homo sapien
ctaatcaagatgctcacttcgccag

SEQ ID NO: 4283757 - DNA, 25 bp, Homo sapien
gactctatgatgtaaaagctatcag

SEQ ID NO: 4283758 - DNA, 25 bp, Homo sapien
tctccatccttatagatcttctctc

SEQ ID NO: 4283759 - DNA, 25 bp, Homo sapien
ctgagtgattatgcgttctccatcc

SEQ ID NO: 4283760 - DNA, 25 bp, Homo sapien
catccttatagatcttctctcctat

SEQ ID NO: 4283761 - DNA, 25 bp, Homo sapien
tccatccttatagatcttctctcct

SEQ ID NO: 4283762 - DNA, 25 bp, Homo sapien
ggaggggcacagactcaataaatga

SEQ ID NO: 4283763 - DNA, 25 bp, Homo sapien
gaggggcacagactcaataaatgat

SEQ ID NO: 4283764 - DNA, 25 bp, Homo sapien
ggcacagactcaataaatgattcaa

SEQ ID NO: 4283765 - DNA, 25 bp, Homo sapien
ggggcacagactcaataaatgattc

SEQ ID NO: 4283766 - DNA, 25 bp, Homo sapien
aactgccacggttgtcatattgacc

SEQ ID NO: 4283767 - DNA, 25 bp, Homo sapien
gagctagttctccaaaactgccacg

SEQ ID NO: 4283768 - DNA, 25 bp, Homo sapien
ccaacagagcgggtttgattatctt

SEQ ID NO: 4283769 - DNA, 25 bp, Homo sapien
gcagctctcggggtgttgtacatca

SEQ ID NO: 4283770 - DNA, 25 bp, Homo sapien
tgtggccacacaatttcaaagctcc

SEQ ID NO: 4283771 - DNA, 25 bp, Homo sapien
gcatctgccctgagtcatgaatccg

SEQ ID NO: 4283772 - DNA, 25 bp, Homo sapien
aagcttgttcacctggcccttagcc

SEQ ID NO: 4283773 - DNA, 25 bp, Homo sapien
catgaatccgattaagtgtggccac

SEQ ID NO: 4283774 - DNA, 25 bp, Homo sapien
catcgagaacttgagaaagctgttc

SEQ ID NO: 4283775 - DNA, 25 bp, Homo sapien
catctccttggtcaatgacatgctc

SEQ ID NO: 4283776 - DNA, 25 bp, Homo sapien
atcatctccttggtcaatgacatgc

SEQ ID NO: 4283777 - DNA, 25 bp, Homo sapien
tttgactatcctttcaaacatggca

SEQ ID NO: 4283778 - DNA, 25 bp, Homo sapien
gcccggctgatctggcagatttttt

SEQ ID NO: 4283779 - DNA, 25 bp, Homo sapien
aaaggagaatatctttgcaagcttc

SEQ ID NO: 4283780 - DNA, 25 bp, Homo sapien
aaggagaatatctttgcaagcttcc

SEQ ID NO: 4283781 - DNA, 25 bp, Homo sapien
cctcatcagggttataggtctcagc

SEQ ID NO: 4283782 - DNA, 25 bp, Homo sapien
tcagggttataggtctcagcacaga

SEQ ID NO: 4283783 - DNA, 25 bp, Homo sapien
ttcctcatcagggttataggtctca

SEQ ID NO: 4283784 - DNA, 25 bp, Homo sapien
catcagggttataggtctcagcaca

SEQ ID NO: 4283785 - DNA, 25 bp, Homo sapien
gcagtaatgccatcgataccaagtg

SEQ ID NO: 4283786 - DNA, 25 bp, Homo sapien
atcgataccaagtgcccaacaggga

SEQ ID NO: 4283787 - DNA, 25 bp, Homo sapien
tgtggcccatgccacttgtgcagta

SEQ ID NO: 4283788 - DNA, 25 bp, Homo sapien
caagtgcccaacagggaccctatat

SEQ ID NO: 4283789 - DNA, 25 bp, Homo sapien
tagctgaagactaaccaagagttcc

SEQ ID NO: 4283790 - DNA, 25 bp, Homo sapien
gatggccagccataatgcgaagttt

SEQ ID NO: 4283791 - DNA, 25 bp, Homo sapien
catggtatgggcctcactcaaagtg

SEQ ID NO: 4283792 - DNA, 25 bp, Homo sapien
cattgtttgagaagcctacagggca

SEQ ID NO: 4283793 - DNA, 25 bp, Homo sapien
tactcgtctattaaatctgctagga

SEQ ID NO: 4283794 - DNA, 25 bp, Homo sapien
gatactcgtctattaaatctgctag

SEQ ID NO: 4283795 - DNA, 25 bp, Homo sapien
tctattaaatctgctaggaactgga

SEQ ID NO: 4283796 - DNA, 25 bp, Homo sapien
cgtctattaaatctgctaggaactg

SEQ ID NO: 4283797 - DNA, 25 bp, Homo sapien
tcttcaactagagagctgccgtggg

SEQ ID NO: 4283798 - DNA, 25 bp, Homo sapien
cagaatagttaacccatagagccaa

SEQ ID NO: 4283799 - DNA, 25 bp, Homo sapien
ggtacaggttgttcttctgagggaa

SEQ ID NO: 4283800 - DNA, 25 bp, Homo sapien
ccaactgatggttgccaggagatga

SEQ ID NO: 4283801 - DNA, 25 bp, Homo sapien
cggcaaggtctgtaagggtcctgaa

SEQ ID NO: 4283802 - DNA, 25 bp, Homo sapien
aagactgcccttacttcagatggta

SEQ ID NO: 4283803 - DNA, 25 bp, Homo sapien
cactaggtggttaacatcagactct

SEQ ID NO: 4283804 - DNA, 25 bp, Homo sapien
tactggcgtttcctaacatagacac

SEQ ID NO: 4283805 - DNA, 25 bp, Homo sapien
gccactgatgcccactcattttagg

SEQ ID NO: 4283806 - DNA, 25 bp, Homo sapien
ctggagtaccgccaacaacataggg

SEQ ID NO: 4283807 - DNA, 25 bp, Homo sapien
cactctgaagtaagagcagtcttgc

SEQ ID NO: 4283808 - DNA, 25 bp, Homo sapien
tgagaaaccaaccaactagttgagc

SEQ ID NO: 4283809 - DNA, 25 bp, Homo sapien
gctgctgtgtgccaaagacaatgaa

SEQ ID NO: 4283810 - DNA, 25 bp, Homo sapien
aacaagttcctcatacagtctccag

SEQ ID NO: 4283811 - DNA, 25 bp, Homo sapien
cactttttgtattaacactggcgca

SEQ ID NO: 4283812 - DNA, 25 bp, Homo sapien
tgtgcaaatacatccaatctgacct

SEQ ID NO: 4283813 - DNA, 25 bp, Homo sapien
tcactggatgagaacgctgttgtct

SEQ ID NO: 4283814 - DNA, 25 bp, Homo sapien
tcttcgaagccaaaactggtgaagg

SEQ ID NO: 4283815 - DNA, 25 bp, Homo sapien
caagtcactggatgagaacgctgtt

SEQ ID NO: 4283816 - DNA, 25 bp, Homo sapien
gagaacgctgttgtcttcgaagcca

SEQ ID NO: 4283817 - DNA, 25 bp, Homo sapien
gctgtcccctttggcgtcggcgaca

SEQ ID NO: 4283818 - DNA, 25 bp, Homo sapien
tcctccgactcgctgtcccctttgg

SEQ ID NO: 4283819 - DNA, 25 bp, Homo sapien
ttggcgtcggcgacacggtccgggc

SEQ ID NO: 4283820 - DNA, 25 bp, Homo sapien
tcctcctccgactcgctgtcccctt

SEQ ID NO: 4283821 - DNA, 25 bp, Homo sapien
aattcgacgaggtcaggcggctgct

SEQ ID NO: 4283822 - DNA, 25 bp, Homo sapien
ggcggctgctgtcgcagcacctcca

SEQ ID NO: 4283823 - DNA, 25 bp, Homo sapien
cccggcgggatctggatgtggctca

SEQ ID NO: 4283824 - DNA, 25 bp, Homo sapien
gcagctccgtgagccccggcgggat

SEQ ID NO: 4283825 - DNA, 25 bp, Homo sapien
acgtcgcgccgctctttggccggct

SEQ ID NO: 4283826 - DNA, 25 bp, Homo sapien
tccgcgcccgcgaggtctcttcgcg

SEQ ID NO: 4283827 - DNA, 25 bp, Homo sapien
actcacgccggcctttcgctccgcg

SEQ ID NO: 4283828 - DNA, 25 bp, Homo sapien
ggcggccactgtctccgcgctcact

SEQ ID NO: 4283829 - DNA, 25 bp, Homo sapien
gccgacctggcaccgccgccgctgt

SEQ ID NO: 4283830 - DNA, 25 bp, Homo sapien
gccgcgcaaccctacgctaccacgg

SEQ ID NO: 4283831 - DNA, 25 bp, Homo sapien
cctacgctaccacggccgacctggc

SEQ ID NO: 4283832 - DNA, 25 bp, Homo sapien
tgcgtttccgggccgcgcaacccta

SEQ ID NO: 4283833 - DNA, 25 bp, Homo sapien
agagaaggcagagccagccaaaact

SEQ ID NO: 4283834 - DNA, 25 bp, Homo sapien
cagccggggctagggcagtcagaga

SEQ ID NO: 4283835 - DNA, 25 bp, Homo sapien
aaggcagagccagccaaaacttcct

SEQ ID NO: 4283836 - DNA, 25 bp, Homo sapien
cctccctagagcagccggggctagg

SEQ ID NO: 4283837 - DNA, 25 bp, Homo sapien
gaggtgggcctcaagtccatatcca

SEQ ID NO: 4283838 - DNA, 25 bp, Homo sapien
tactttgactgtggtaggaccagca

SEQ ID NO: 4283839 - DNA, 25 bp, Homo sapien
tagatggcaccctggaaatcaaatg

SEQ ID NO: 4283840 - DNA, 25 bp, Homo sapien
cctggctagggactgaagaagatct

SEQ ID NO: 4283841 - DNA, 25 bp, Homo sapien
aagttatacacggtgcaggatgtca

SEQ ID NO: 4283842 - DNA, 25 bp, Homo sapien
aaatgacacactaagttatacacgg

SEQ ID NO: 4283843 - DNA, 25 bp, Homo sapien
caggatgtcattaaggcaacagtct

SEQ ID NO: 4283844 - DNA, 25 bp, Homo sapien
acagtctcaccaagtccatgcacag

SEQ ID NO: 4283845 - DNA, 25 bp, Homo sapien
ccttctcctcaacgacagcttccag

SEQ ID NO: 4283846 - DNA, 25 bp, Homo sapien
ctccttctcctcaacgacagcttcc

SEQ ID NO: 4283847 - DNA, 25 bp, Homo sapien
tctcctcaacgacagcttccagcat

SEQ ID NO: 4283848 - DNA, 25 bp, Homo sapien
ttctcctcaacgacagcttccagca

SEQ ID NO: 4283849 - DNA, 25 bp, Homo sapien
caacttcaaagccaaggaaacaggc

SEQ ID NO: 4283850 - DNA, 25 bp, Homo sapien
ggaacttcatggcaacttcaaagcc

SEQ ID NO: 4283851 - DNA, 25 bp, Homo sapien
tcatggcaacttcaaagccaaggaa

SEQ ID NO: 4283852 - DNA, 25 bp, Homo sapien
ggtggcccaattaaggaacttcatg

SEQ ID NO: 4283853 - DNA, 25 bp, Homo sapien
ccaggaacaagcaaaagtcaaacca

SEQ ID NO: 4283854 - DNA, 25 bp, Homo sapien
tcaaggaagggagcaaataaggaat

SEQ ID NO: 4283855 - DNA, 25 bp, Homo sapien
tgagaccccagtcctatcccaggaa

SEQ ID NO: 4283856 - DNA, 25 bp, Homo sapien
tgcccacttctaatggccaggtcag

SEQ ID NO: 4283857 - DNA, 25 bp, Homo sapien
ccctttgtacaaggatgtgactcct

SEQ ID NO: 4283858 - DNA, 25 bp, Homo sapien
tctgaaaccattaggatatttccca

SEQ ID NO: 4283859 - DNA, 25 bp, Homo sapien
tcagcacatctctgaaaccattagg

SEQ ID NO: 4283860 - DNA, 25 bp, Homo sapien
atcactgcattgaaccctttgtaca

SEQ ID NO: 4283861 - DNA, 25 bp, Homo sapien
aagggtcaggactagcacagggaaa

SEQ ID NO: 4283862 - DNA, 25 bp, Homo sapien
cagggaaaggacaccttgcaggtca

SEQ ID NO: 4283863 - DNA, 25 bp, Homo sapien
catagacaacagttcaccttgggac

SEQ ID NO: 4283864 - DNA, 25 bp, Homo sapien
tacttgtgccaagggaatagaaacg

SEQ ID NO: 4283865 - DNA, 25 bp, Homo sapien
cctagggccttatgagctttgcacc

SEQ ID NO: 4283866 - DNA, 25 bp, Homo sapien
ttgcaccccaggattagccagtgct

SEQ ID NO: 4283867 - DNA, 25 bp, Homo sapien
gcaccccaggattagccagtgctgg

SEQ ID NO: 4283868 - DNA, 25 bp, Homo sapien
ccttatgagctttgcaccccaggat

SEQ ID NO: 4283869 - DNA, 25 bp, Homo sapien
tccgaggggcactgagctcactgac

SEQ ID NO: 4283870 - DNA, 25 bp, Homo sapien
ggaatcgagacttgagcacatctgg

SEQ ID NO: 4283871 - DNA, 25 bp, Homo sapien
tctggggggattgccacagcccagt

SEQ ID NO: 4283872 - DNA, 25 bp, Homo sapien
ccaccaagatccgaggggcactgag

SEQ ID NO: 4283873 - DNA, 25 bp, Homo sapien
cagacagggcagttacagacaggca

SEQ ID NO: 4283874 - DNA, 25 bp, Homo sapien
tgagagtggcattcagactatcctg

SEQ ID NO: 4283875 - DNA, 25 bp, Homo sapien
cagagtaagaagagctagctggacc

SEQ ID NO: 4283876 - DNA, 25 bp, Homo sapien
tccactggctgaggcacagagtaag

SEQ ID NO: 4283877 - DNA, 25 bp, Homo sapien
gaaatacattccactagctgggaca

SEQ ID NO: 4283878 - DNA, 25 bp, Homo sapien
aaatacattccactagctgggacat

SEQ ID NO: 4283879 - DNA, 25 bp, Homo sapien
ggtaccagtgtacttgctttctcct

SEQ ID NO: 4283880 - DNA, 25 bp, Homo sapien
ctcgcataagggtaagcacagtccc

SEQ ID NO: 4283881 - DNA, 25 bp, Homo sapien
tctttgcacagtccaaggtaccagt

SEQ ID NO: 4283882 - DNA, 25 bp, Homo sapien
ttgtagatgcctcggatcccaaact

SEQ ID NO: 4283883 - DNA, 25 bp, Homo sapien
gaaagccagcctaattgctcaacag

SEQ ID NO: 4283884 - DNA, 25 bp, Homo sapien
taagaggactcctgggctataatcc

SEQ ID NO: 4283885 - DNA, 25 bp, Homo sapien
tatgtacctggtatgtctgaggaac

SEQ ID NO: 4283886 - DNA, 25 bp, Homo sapien
cagatggaatctaaaccgtgggaga

SEQ ID NO: 4283887 - DNA, 25 bp, Homo sapien
tgcctggcctgcccaatgatttttt

SEQ ID NO: 4283888 - DNA, 25 bp, Homo sapien
gccagttcaagaccggactggcggc

SEQ ID NO: 4283889 - DNA, 25 bp, Homo sapien
cagttcaagaccggactggcggctg

SEQ ID NO: 4283890 - DNA, 25 bp, Homo sapien
ttcaagaccggactggcggctgggc

SEQ ID NO: 4283891 - DNA, 25 bp, Homo sapien
ggccagttcaagaccggactggcgg

SEQ ID NO: 4283892 - DNA, 25 bp, Homo sapien
gtaataagcacttgatccgttctcc

SEQ ID NO: 4283893 - DNA, 25 bp, Homo sapien
ggtgaatacgccagataacatccca

SEQ ID NO: 4283894 - DNA, 25 bp, Homo sapien
ctgtggtgaatacgccagataacat

SEQ ID NO: 4283895 - DNA, 25 bp, Homo sapien
cacttgatccgttctccaggagtca

SEQ ID NO: 4283896 - DNA, 25 bp, Homo sapien
cattccccgatatagccccgtgatg

SEQ ID NO: 4283897 - DNA, 25 bp, Homo sapien
agaagcacacggcaaacatgggagt

SEQ ID NO: 4283898 - DNA, 25 bp, Homo sapien
gcaaacatgggagtgaccccgatga

SEQ ID NO: 4283899 - DNA, 25 bp, Homo sapien
cacacggcaaacatgggagtgaccc

SEQ ID NO: 4283900 - DNA, 25 bp, Homo sapien
agagtcttccggaaacagtcaaagg

SEQ ID NO: 4283901 - DNA, 25 bp, Homo sapien
aagagtcttccggaaacagtcaaag

SEQ ID NO: 4283902 - DNA, 25 bp, Homo sapien
gtgtccagagggtgaccgacgaaca

SEQ ID NO: 4283903 - DNA, 25 bp, Homo sapien
gtgaccgacgaacaccaggcacacg

SEQ ID NO: 4283904 - DNA, 25 bp, Homo sapien
cttgaccgtgtccagagggtgaccg

SEQ ID NO: 4283905 - DNA, 25 bp, Homo sapien
agagggtgaccgacgaacaccaggc

SEQ ID NO: 4283906 - DNA, 25 bp, Homo sapien
agtccgtctgtcactccgtctgtca

SEQ ID NO: 4283907 - DNA, 25 bp, Homo sapien
ggtcagtccgtctgtcactccgtct

SEQ ID NO: 4283908 - DNA, 25 bp, Homo sapien
tctgtcagttctcgggccgtcctgg

SEQ ID NO: 4283909 - DNA, 25 bp, Homo sapien
tgtcactccgtctgtcagttctcgg

SEQ ID NO: 4283910 - DNA, 25 bp, Homo sapien
gatagcggccgagaaacaatggtta

SEQ ID NO: 4283911 - DNA, 25 bp, Homo sapien
tatggaattgcacaacctggagcct

SEQ ID NO: 4283912 - DNA, 25 bp, Homo sapien
ctaagtttcaaggaggcggcgctaa

SEQ ID NO: 4283913 - DNA, 25 bp, Homo sapien
cccgatcccggagtacaaacagtga

SEQ ID NO: 4283914 - DNA, 25 bp, Homo sapien
gaggaagcagcgcgggcttgaccgg

SEQ ID NO: 4283915 - DNA, 25 bp, Homo sapien
agcgcgggcttgaccggcgtcggcc

SEQ ID NO: 4283916 - DNA, 25 bp, Homo sapien
cttgaccggcgtcggcccgccgcct

SEQ ID NO: 4283917 - DNA, 25 bp, Homo sapien
aagcagcgcgggcttgaccggcgtc

SEQ ID NO: 4283918 - DNA, 25 bp, Homo sapien
cttcgccccaatccggtccctctgg

SEQ ID NO: 4283919 - DNA, 25 bp, Homo sapien
ttcgccccaatccggtccctctggc

SEQ ID NO: 4283920 - DNA, 25 bp, Homo sapien
tcgccccaatccggtccctctggcc

SEQ ID NO: 4283921 - DNA, 25 bp, Homo sapien
gtctggcttgttcgggctcagcggc

SEQ ID NO: 4283922 - DNA, 25 bp, Homo sapien
ccgcagctcccggtaagtgcgcggc

SEQ ID NO: 4283923 - DNA, 25 bp, Homo sapien
cggtctggcttgttcgggctcagcg

SEQ ID NO: 4283924 - DNA, 25 bp, Homo sapien
ctcccggtaagtgcgcggcgcacgt

SEQ ID NO: 4283925 - DNA, 25 bp, Homo sapien
tctttgggagctctcgcagcgctgc

SEQ ID NO: 4283926 - DNA, 25 bp, Homo sapien
acgttgtccgagcattacccgccgt

SEQ ID NO: 4283927 - DNA, 25 bp, Homo sapien
tcagctctcggaaaggtcagaggcc

SEQ ID NO: 4283928 - DNA, 25 bp, Homo sapien
gctcaccactcgagtcatctttggg

SEQ ID NO: 4283929 - DNA, 25 bp, Homo sapien
ttttcagacagattacctacttcaa

SEQ ID NO: 4283930 - DNA, 25 bp, Homo sapien
agccacaccctcagtctttgtttta

SEQ ID NO: 4283931 - DNA, 25 bp, Homo sapien
cagacagattacctacttcaagtag

SEQ ID NO: 4283932 - DNA, 25 bp, Homo sapien
gattacctacttcaagtagacttta

SEQ ID NO: 4283933 - DNA, 25 bp, Homo sapien
taagtaacatttcgctgtttgcggg

SEQ ID NO: 4283934 - DNA, 25 bp, Homo sapien
tcagctcatcagttgaaatggtagt

SEQ ID NO: 4283935 - DNA, 25 bp, Homo sapien
ttaaatcgctagttgatattgttcc

SEQ ID NO: 4283936 - DNA, 25 bp, Homo sapien
tagaaaagttaatgggtgtttgcca

SEQ ID NO: 4283937 - DNA, 25 bp, Homo sapien
tgtcttgagagtatacagatccctc

SEQ ID NO: 4283938 - DNA, 25 bp, Homo sapien
aaaagggcaccttggcatgatgtca

SEQ ID NO: 4283939 - DNA, 25 bp, Homo sapien
gaatggccttgtagcttgaaaccaa

SEQ ID NO: 4283940 - DNA, 25 bp, Homo sapien
catcttctgtacgactgtgagtgac

SEQ ID NO: 4283941 - DNA, 25 bp, Homo sapien
tgaagggccatcagacagtcttttc

SEQ ID NO: 4283942 - DNA, 25 bp, Homo sapien
tcttttccatctagtaccatctttt

SEQ ID NO: 4283943 - DNA, 25 bp, Homo sapien
gggccatcagacagtcttttccatc

SEQ ID NO: 4283944 - DNA, 25 bp, Homo sapien
cagtcttttccatctagtaccatct

SEQ ID NO: 4283945 - DNA, 25 bp, Homo sapien
ggtgtctatcctgaactcctgtgta

SEQ ID NO: 4283946 - DNA, 25 bp, Homo sapien
ggatggactgaagaagacctgctct

SEQ ID NO: 4283947 - DNA, 25 bp, Homo sapien
tcgagtcctgttgccccagaagggt

SEQ ID NO: 4283948 - DNA, 25 bp, Homo sapien
ggaaggcagtttctcccagggagcc

SEQ ID NO: 4283949 - DNA, 25 bp, Homo sapien
tagctgttatgatttacctgcctgg

SEQ ID NO: 4283950 - DNA, 25 bp, Homo sapien
aagcatttacattgtccagagagaa

SEQ ID NO: 4283951 - DNA, 25 bp, Homo sapien
catgattgtaccatcacttgggaca

SEQ ID NO: 4283952 - DNA, 25 bp, Homo sapien
ctgctataaataggacattgaggaa

SEQ ID NO: 4283953 - DNA, 25 bp, Homo sapien
aattggcattggagtgttttaccct

SEQ ID NO: 4283954 - DNA, 25 bp, Homo sapien
ccctctagctgttttacttagaatg

SEQ ID NO: 4283955 - DNA, 25 bp, Homo sapien
gaatgtaacatatgctgcctaccca

SEQ ID NO: 4283956 - DNA, 25 bp, Homo sapien
tggagtgttttaccctctagctgtt

SEQ ID NO: 4283957 - DNA, 25 bp, Homo sapien
atattcacgtttggccagagttgta

SEQ ID NO: 4283958 - DNA, 25 bp, Homo sapien
tagggaattgaactggcctgtgcaa

SEQ ID NO: 4283959 - DNA, 25 bp, Homo sapien
ccagagttgtagtcccaaagaagag

SEQ ID NO: 4283960 - DNA, 25 bp, Homo sapien
catgggtggcagatggtagggaatt

SEQ ID NO: 4283961 - DNA, 25 bp, Homo sapien
gcagtacggagacagtccagaacat

SEQ ID NO: 4283962 - DNA, 25 bp, Homo sapien
cggagacagtccagaacatggtctt

SEQ ID NO: 4283963 - DNA, 25 bp, Homo sapien
aacatggtcttcttgccacggggtg

SEQ ID NO: 4283964 - DNA, 25 bp, Homo sapien
tcttgccacggggtgttgttgtctc

SEQ ID NO: 4283965 - DNA, 25 bp, Homo sapien
cagaatttttctgccctacaaaggg

SEQ ID NO: 4283966 - DNA, 25 bp, Homo sapien
gggaataaatatcctggcgtctgga

SEQ ID NO: 4283967 - DNA, 25 bp, Homo sapien
gattaggagtatagcaaatgaaccc

SEQ ID NO: 4283968 - DNA, 25 bp, Homo sapien
tccatggctggttgcaggttccctt

SEQ ID NO: 4283969 - DNA, 25 bp, Homo sapien
gcacctgtaagtgatccctgtggaa

SEQ ID NO: 4283970 - DNA, 25 bp, Homo sapien
cagtgaacaccagaggagtgccttc

SEQ ID NO: 4283971 - DNA, 25 bp, Homo sapien
ggaggctccatagctgtgggcaaca

SEQ ID NO: 4283972 - DNA, 25 bp, Homo sapien
gtctaggtagtcttctgagcccaca

SEQ ID NO: 4283973 - DNA, 25 bp, Homo sapien
tgtgtgccttcctcgaaaaagattg

SEQ ID NO: 4283974 - DNA, 25 bp, Homo sapien
gaagtactgttggtcctggagaacc

SEQ ID NO: 4283975 - DNA, 25 bp, Homo sapien
gcgcacagccagtcgaaaattttgg

SEQ ID NO: 4283976 - DNA, 25 bp, Homo sapien
caggcataggccgtggttaccaaca

SEQ ID NO: 4283977 - DNA, 25 bp, Homo sapien
catcctgcaactcgcagtccctgca

SEQ ID NO: 4283978 - DNA, 25 bp, Homo sapien
ctgcatcctgcaactcgcagtccct

SEQ ID NO: 4283979 - DNA, 25 bp, Homo sapien
agagagtgtccagaacctccttgga

SEQ ID NO: 4283980 - DNA, 25 bp, Homo sapien
gtcactggtgcagagagtgtccaga

SEQ ID NO: 4283981 - DNA, 25 bp, Homo sapien
tgagtacagtttacctgatccctgt

SEQ ID NO: 4283982 - DNA, 25 bp, Homo sapien
ttacctgatccctgtatgatttgaa

SEQ ID NO: 4283983 - DNA, 25 bp, Homo sapien
gacattgagtacagtttacctgatc

SEQ ID NO: 4283984 - DNA, 25 bp, Homo sapien
gcctgctgtaggtgacattgagtac

SEQ ID NO: 4283985 - DNA, 25 bp, Homo sapien
tgatgggctcgcagctggcctgcat

SEQ ID NO: 4283986 - DNA, 25 bp, Homo sapien
atgggcggtccaggcgggagccgtt

SEQ ID NO: 4283987 - DNA, 25 bp, Homo sapien
ggcccaaggggaagcgtccacaatg

SEQ ID NO: 4283988 - DNA, 25 bp, Homo sapien
gcgtccacaatgcaggatggctggc

SEQ ID NO: 4283989 - DNA, 25 bp, Homo sapien
acccagatcagctggaacctctcca

SEQ ID NO: 4283990 - DNA, 25 bp, Homo sapien
cccagatcagctggaacctctccat

SEQ ID NO: 4283991 - DNA, 25 bp, Homo sapien
cacccagatcagctggaacctctcc

SEQ ID NO: 4283992 - DNA, 25 bp, Homo sapien
ttgccagctttccagtgcacctctc

SEQ ID NO: 4283993 - DNA, 25 bp, Homo sapien
cgccctcccactcaggtgccttgcc

SEQ ID NO: 4283994 - DNA, 25 bp, Homo sapien
gcaacgacactggtcgcctagcaac

SEQ ID NO: 4283995 - DNA, 25 bp, Homo sapien
agcaacagccccgtagcctggcttt

SEQ ID NO: 4283996 - DNA, 25 bp, Homo sapien
acatccattgtctgcaagaggtggc

SEQ ID NO: 4283997 - DNA, 25 bp, Homo sapien
tggcctgcaccttgggcctttactc

SEQ ID NO: 4283998 - DNA, 25 bp, Homo sapien
ggacatccattgtctgcaagaggtg

SEQ ID NO: 4283999 - DNA, 25 bp, Homo sapien
tgaggaaacagggccctccctcttg

SEQ ID NO: 4284000 - DNA, 25 bp, Homo sapien
atgtggtccagcaagttgggcagac

SEQ ID NO: 4284001 - DNA, 25 bp, Homo sapien
tgtcaaggcatacaggggtaaatag

SEQ ID NO: 4284002 - DNA, 25 bp, Homo sapien
ccaatgtcgtggcatagggccatgg

SEQ ID NO: 4284003 - DNA, 25 bp, Homo sapien
ttgggcagacgcatctgtgtagcca

SEQ ID NO: 4284004 - DNA, 25 bp, Homo sapien
tgtcatcccacagcatcaccagtgt

SEQ ID NO: 4284005 - DNA, 25 bp, Homo sapien
gtcatcccacagcatcaccagtgtc

SEQ ID NO: 4284006 - DNA, 25 bp, Homo sapien
aaatggtaagggtcaactgggctat

SEQ ID NO: 4284007 - DNA, 25 bp, Homo sapien
tgcaactcacagtaagagactgggt

SEQ ID NO: 4284008 - DNA, 25 bp, Homo sapien
gataacagaacctacgatgaaatgg

SEQ ID NO: 4284009 - DNA, 25 bp, Homo sapien
ttatttgaacaacgtcactggtggg

SEQ ID NO: 4284010 - DNA, 25 bp, Homo sapien
gcctaccgcgatgcgcgcgtggaac

SEQ ID NO: 4284011 - DNA, 25 bp, Homo sapien
ccgcgggtcgccagttgcccaagat

SEQ ID NO: 4284012 - DNA, 25 bp, Homo sapien
gtcacgcgcggcaccaagtggattg

SEQ ID NO: 4284013 - DNA, 25 bp, Homo sapien
ggcaagcgctgttccaacaggagat

SEQ ID NO: 4284014 - DNA, 25 bp, Homo sapien
tatccatggcttccgggtacggcca

SEQ ID NO: 4284015 - DNA, 25 bp, Homo sapien
tctgactggatttgggatgcacgct

SEQ ID NO: 4284016 - DNA, 25 bp, Homo sapien
tcagcctgcctgattggagacgcct

SEQ ID NO: 4284017 - DNA, 25 bp, Homo sapien
taatggagaccttgacttggaggcc

SEQ ID NO: 4284018 - DNA, 25 bp, Homo sapien
gagtggagtgctgccaagaatatgc

SEQ ID NO: 4284019 - DNA, 25 bp, Homo sapien
atatgcccgactccccatgacaaga

SEQ ID NO: 4284020 - DNA, 25 bp, Homo sapien
aagaatatgcccgactccccatgac

SEQ ID NO: 4284021 - DNA, 25 bp, Homo sapien
tcctgatgtcggtgcaggagctgaa

SEQ ID NO: 4284022 - DNA, 25 bp, Homo sapien
tgtgaacattcccaggtattggagc

SEQ ID NO: 4284023 - DNA, 25 bp, Homo sapien
aacattcccaggtattggagcctct

SEQ ID NO: 4284024 - DNA, 25 bp, Homo sapien
gactttgtgaacattcccaggtatt

SEQ ID NO: 4284025 - DNA, 25 bp, Homo sapien
ctttgtgaacattcccaggtattgg

SEQ ID NO: 4284026 - DNA, 25 bp, Homo sapien
gcatagccaggccagtatggagcac

SEQ ID NO: 4284027 - DNA, 25 bp, Homo sapien
cagcatagccaggccagtatggagc

SEQ ID NO: 4284028 - DNA, 25 bp, Homo sapien
catagccaggccagtatggagcacc

SEQ ID NO: 4284029 - DNA, 25 bp, Homo sapien
agcatagccaggccagtatggagca

SEQ ID NO: 4284030 - DNA, 25 bp, Homo sapien
aagctgcaggcggacgaacatctga

SEQ ID NO: 4284031 - DNA, 25 bp, Homo sapien
ggcggacgaacatctgaccaaagag

SEQ ID NO: 4284032 - DNA, 25 bp, Homo sapien
tcagaagctgcaggcggacgaacat

SEQ ID NO: 4284033 - DNA, 25 bp, Homo sapien
gaacatctgaccaaagaggtgtggt

SEQ ID NO: 4284034 - DNA, 25 bp, Homo sapien
accctatacctctctgcacgtccca

SEQ ID NO: 4284035 - DNA, 25 bp, Homo sapien
tttgcctttaccctatacctctctg

SEQ ID NO: 4284036 - DNA, 25 bp, Homo sapien
cctttaccctatacctctctgcacg

SEQ ID NO: 4284037 - DNA, 25 bp, Homo sapien
tttaccctatacctctctgcacgtc

SEQ ID NO: 4284038 - DNA, 25 bp, Homo sapien
catgctgagctgtaccaggaacttg

SEQ ID NO: 4284039 - DNA, 25 bp, Homo sapien
gctgagctgtaccaggaacttgcat

SEQ ID NO: 4284040 - DNA, 25 bp, Homo sapien
tgagctgtaccaggaacttgcatat

SEQ ID NO: 4284041 - DNA, 25 bp, Homo sapien
tgctgagctgtaccaggaacttgca

SEQ ID NO: 4284042 - DNA, 25 bp, Homo sapien
taaagaatagagtgtagagtgtcct

SEQ ID NO: 4284043 - DNA, 25 bp, Homo sapien
ccaggccagaataaagaatagagtg

SEQ ID NO: 4284044 - DNA, 25 bp, Homo sapien
tagagtgtagagtgtcctggttgtc

SEQ ID NO: 4284045 - DNA, 25 bp, Homo sapien
gccagaataaagaatagagtgtaga

SEQ ID NO: 4284046 - DNA, 25 bp, Homo sapien
catctctgtgcgtacagcaatgtgg

SEQ ID NO: 4284047 - DNA, 25 bp, Homo sapien
tccggctcagcagatccggaaaggg

SEQ ID NO: 4284048 - DNA, 25 bp, Homo sapien
tgcgtacagcaatgtggagccccgg

SEQ ID NO: 4284049 - DNA, 25 bp, Homo sapien
tgtgcagtccagcactgctgtccgg

SEQ ID NO: 4284050 - DNA, 25 bp, Homo sapien
ttgtgccagctaccaggagggacac

SEQ ID NO: 4284051 - DNA, 25 bp, Homo sapien
gtgccagctaccaggagggacactc

SEQ ID NO: 4284052 - DNA, 25 bp, Homo sapien
aggcctccttgtgccagctaccagg

SEQ ID NO: 4284053 - DNA, 25 bp, Homo sapien
tccttgtgccagctaccaggaggga

SEQ ID NO: 4284054 - DNA, 25 bp, Homo sapien
atcatgtagcagtgagaagtccaga

SEQ ID NO: 4284055 - DNA, 25 bp, Homo sapien
tcatgtagcagtgagaagtccagac

SEQ ID NO: 4284056 - DNA, 25 bp, Homo sapien
gtagcagtgagaagtccagactgct

SEQ ID NO: 4284057 - DNA, 25 bp, Homo sapien
catgtagcagtgagaagtccagact

SEQ ID NO: 4284058 - DNA, 25 bp, Homo sapien
caagacgggcacaattatacatgac

SEQ ID NO: 4284059 - DNA, 25 bp, Homo sapien
caaaggtgccactctttgtgccctt

SEQ ID NO: 4284060 - DNA, 25 bp, Homo sapien
ctcaaagagtgtggcaagacgggca

SEQ ID NO: 4284061 - DNA, 25 bp, Homo sapien
catactacacttgtaactctcaaag

SEQ ID NO: 4284062 - DNA, 25 bp, Homo sapien
gagagagaaggcagccaccacaccc

SEQ ID NO: 4284063 - DNA, 25 bp, Homo sapien
tgtgccccaacactggccctgtcag

SEQ ID NO: 4284064 - DNA, 25 bp, Homo sapien
gggaatagaagcacagctgcagaga

SEQ ID NO: 4284065 - DNA, 25 bp, Homo sapien
accacaccctgtgccccaacactgg

SEQ ID NO: 4284066 - DNA, 25 bp, Homo sapien
tctcaaacttgatggtggccacaga

SEQ ID NO: 4284067 - DNA, 25 bp, Homo sapien
gagaacaccaaagatctctgtccag

SEQ ID NO: 4284068 - DNA, 25 bp, Homo sapien
cacagagagaacaccaaagatctct

SEQ ID NO: 4284069 - DNA, 25 bp, Homo sapien
gctgtgctcagcatctcaaacttga

SEQ ID NO: 4284070 - DNA, 25 bp, Homo sapien
gggagtatagggttggtcagtcagt

SEQ ID NO: 4284071 - DNA, 25 bp, Homo sapien
cagggatgcaaaaaacctgccccta

SEQ ID NO: 4284072 - DNA, 25 bp, Homo sapien
gggcagggatgcaaaaaacctgccc

SEQ ID NO: 4284073 - DNA, 25 bp, Homo sapien
cccagaacatagccagggtttccca

SEQ ID NO: 4284074 - DNA, 25 bp, Homo sapien
gcagggatgcaaaaaacctgcccct

SEQ ID NO: 4284075 - DNA, 25 bp, Homo sapien
gatccccaccatgcttcagtgctga

SEQ ID NO: 4284076 - DNA, 25 bp, Homo sapien
ccttgcacacctgggtatgccggaa

SEQ ID NO: 4284077 - DNA, 25 bp, Homo sapien
gtgccagatccccaccatgcttcag

SEQ ID NO: 4284078 - DNA, 25 bp, Homo sapien
cagatccccaccatgcttcagtgct

SEQ ID NO: 4284079 - DNA, 25 bp, Homo sapien
ctggcttaggttggtgttcctccca

SEQ ID NO: 4284080 - DNA, 25 bp, Homo sapien
cattaccctggcttaggttggtgtt

SEQ ID NO: 4284081 - DNA, 25 bp, Homo sapien
ttaggttggtgttcctcccagcctc

SEQ ID NO: 4284082 - DNA, 25 bp, Homo sapien
cctcattaccctggcttaggttggt

SEQ ID NO: 4284083 - DNA, 25 bp, Homo sapien
gtactcaggggcagtcatcagagtg

SEQ ID NO: 4284084 - DNA, 25 bp, Homo sapien
gctactttcacagggccacagatga

SEQ ID NO: 4284085 - DNA, 25 bp, Homo sapien
cagagtgccaggtgcaccagctact

SEQ ID NO: 4284086 - DNA, 25 bp, Homo sapien
tcgtagtactcaggggcagtcatca

SEQ ID NO: 4284087 - DNA, 25 bp, Homo sapien
ttctgtcagctaacaagcccctcgg

SEQ ID NO: 4284088 - DNA, 25 bp, Homo sapien
gctgtacatgccctctcaagtccag

SEQ ID NO: 4284089 - DNA, 25 bp, Homo sapien
gactccctcaaattggaactgccag

SEQ ID NO: 4284090 - DNA, 25 bp, Homo sapien
aggttgagtgcctccgtctacccag

SEQ ID NO: 4284091 - DNA, 25 bp, Homo sapien
tgagtggagccttgtcaaccaactt

SEQ ID NO: 4284092 - DNA, 25 bp, Homo sapien
tgccaaagcaggtccaacttctgtt

SEQ ID NO: 4284093 - DNA, 25 bp, Homo sapien
cacagctaacaacatgtacaaccag

SEQ ID NO: 4284094 - DNA, 25 bp, Homo sapien
tcctcctcacagctaacaacatgta

SEQ ID NO: 4284095 - DNA, 25 bp, Homo sapien
ctgtaccagtatctgaggccccagc

SEQ ID NO: 4284096 - DNA, 25 bp, Homo sapien
tggtttgggagaacctacagggctg

SEQ ID NO: 4284097 - DNA, 25 bp, Homo sapien
tcagccagcacagagaggagatcct

SEQ ID NO: 4284098 - DNA, 25 bp, Homo sapien
agccagcacagagaggagatcctca

SEQ ID NO: 4284099 - DNA, 25 bp, Homo sapien
cgggccaatgccatagagcctcttg

SEQ ID NO: 4284100 - DNA, 25 bp, Homo sapien
ctgtcctcgggccaatgccatagag

SEQ ID NO: 4284101 - DNA, 25 bp, Homo sapien
cgtggctcctcagggtgtgggagga

SEQ ID NO: 4284102 - DNA, 25 bp, Homo sapien
gctctctccgaggcagcgggccagt

SEQ ID NO: 4284103 - DNA, 25 bp, Homo sapien
taagttcttcaagggcgtggctcct

SEQ ID NO: 4284104 - DNA, 25 bp, Homo sapien
cccgtcattagcagaggtaagttct

SEQ ID NO: 4284105 - DNA, 25 bp, Homo sapien
agctggcactaggcgcacgcacacc

SEQ ID NO: 4284106 - DNA, 25 bp, Homo sapien
cagctggcactaggcgcacgcacac

SEQ ID NO: 4284107 - DNA, 25 bp, Homo sapien
acagctggcactaggcgcacgcaca

SEQ ID NO: 4284108 - DNA, 25 bp, Homo sapien
agggagggcggccgcctcagtctga

SEQ ID NO: 4284109 - DNA, 25 bp, Homo sapien
gctttctaggtacccggcagtccca

SEQ ID NO: 4284110 - DNA, 25 bp, Homo sapien
ggtccagctcgccacgacttcccac

SEQ ID NO: 4284111 - DNA, 25 bp, Homo sapien
gcgccgctcgctttctaggtacccg

SEQ ID NO: 4284112 - DNA, 25 bp, Homo sapien
acgagcaccgtacgcagctggctca

SEQ ID NO: 4284113 - DNA, 25 bp, Homo sapien
aggtgatcggccacgagcaccgtac

SEQ ID NO: 4284114 - DNA, 25 bp, Homo sapien
ctcgcgccaggtgatcggccacgag

SEQ ID NO: 4284115 - DNA, 25 bp, Homo sapien
tacgcagctggctcaagcggagtgc

SEQ ID NO: 4284116 - DNA, 25 bp, Homo sapien
cagtgctgggcagtgtagtaagacg

SEQ ID NO: 4284117 - DNA, 25 bp, Homo sapien
agtgctgggcagtgtagtaagacgc

SEQ ID NO: 4284118 - DNA, 25 bp, Homo sapien
gtgctgggcagtgtagtaagacgcg

SEQ ID NO: 4284119 - DNA, 25 bp, Homo sapien
ggcgaggcgggcgtggcataggcgg

SEQ ID NO: 4284120 - DNA, 25 bp, Homo sapien
aggcgggcgtggcataggcggccac

SEQ ID NO: 4284121 - DNA, 25 bp, Homo sapien
gcaggcgaggcgggcgtggcatagg

SEQ ID NO: 4284122 - DNA, 25 bp, Homo sapien
cgggcgtggcataggcggccacggc

SEQ ID NO: 4284123 - DNA, 25 bp, Homo sapien
ctgaggacgcgctcgaagacggcgg

SEQ ID NO: 4284124 - DNA, 25 bp, Homo sapien
tgaggacgcgctcgaagacggcgga

SEQ ID NO: 4284125 - DNA, 25 bp, Homo sapien
ggacgcgctcgaagacggcggaccg

SEQ ID NO: 4284126 - DNA, 25 bp, Homo sapien
gaggacgcgctcgaagacggcggac

SEQ ID NO: 4284127 - DNA, 25 bp, Homo sapien
agacccgcgggggtcggcgcgcagc

SEQ ID NO: 4284128 - DNA, 25 bp, Homo sapien
aggcgagggcatggagcaaatgctc

SEQ ID NO: 4284129 - DNA, 25 bp, Homo sapien
gggcatggagcaaatgctccggaac

SEQ ID NO: 4284130 - DNA, 25 bp, Homo sapien
ctgcagttggagagacagacccgcg

SEQ ID NO: 4284131 - DNA, 25 bp, Homo sapien
gagaacgggcgtgtaaaagagccac

SEQ ID NO: 4284132 - DNA, 25 bp, Homo sapien
aagagccacggcacggggcccatct

SEQ ID NO: 4284133 - DNA, 25 bp, Homo sapien
ctgcgggagaacgggcgtgtaaaag

SEQ ID NO: 4284134 - DNA, 25 bp, Homo sapien
cgggcgtgtaaaagagccacggcac

SEQ ID NO: 4284135 - DNA, 25 bp, Homo sapien
cgcgcggtgcggtgccagaaagtct

SEQ ID NO: 4284136 - DNA, 25 bp, Homo sapien
gggtgcgcgtctccttgatccacac

SEQ ID NO: 4284137 - DNA, 25 bp, Homo sapien
tggccgtcatcgaagcgcgcctgca

SEQ ID NO: 4284138 - DNA, 25 bp, Homo sapien
gggaacgcaggtggcgggtgcgcgt

SEQ ID NO: 4284139 - DNA, 25 bp, Homo sapien
aaagaatagtgttccgcggtttcag

SEQ ID NO: 4284140 - DNA, 25 bp, Homo sapien
tgtgacccaggccttaaccaggaaa

SEQ ID NO: 4284141 - DNA, 25 bp, Homo sapien
cgggtaccgtctcttctcatcgaag

SEQ ID NO: 4284142 - DNA, 25 bp, Homo sapien
cctgggcctagggttctttcgctgt

SEQ ID NO: 4284143 - DNA, 25 bp, Homo sapien
gagtgatcgtgtcattccaaagcgc

SEQ ID NO: 4284144 - DNA, 25 bp, Homo sapien
ggttgggaaccctcagtcaaactga

SEQ ID NO: 4284145 - DNA, 25 bp, Homo sapien
catgacctggagacaactgcttagc

SEQ ID NO: 4284146 - DNA, 25 bp, Homo sapien
tactctcatccacgaagacggttgg

SEQ ID NO: 4284147 - DNA, 25 bp, Homo sapien
gagcaggggacgaaatccaagcgca

SEQ ID NO: 4284148 - DNA, 25 bp, Homo sapien
caacagctgcttttgggattccgtt

SEQ ID NO: 4284149 - DNA, 25 bp, Homo sapien
tgggattccgttgcccgctgtccag

SEQ ID NO: 4284150 - DNA, 25 bp, Homo sapien
aaatccaagcgcagctggaatgctc

SEQ ID NO: 4284151 - DNA, 25 bp, Homo sapien
agtaggttgtgaaacggagtctaga

SEQ ID NO: 4284152 - DNA, 25 bp, Homo sapien
agtctagagggaacaagacgctcac

SEQ ID NO: 4284153 - DNA, 25 bp, Homo sapien
gggccacatcagaacccgcccatcc

SEQ ID NO: 4284154 - DNA, 25 bp, Homo sapien
tgaaacggagtctagagggaacaag

SEQ ID NO: 4284155 - DNA, 25 bp, Homo sapien
gcctgcagacttggagccattttaa

SEQ ID NO: 4284156 - DNA, 25 bp, Homo sapien
tacttcaagtctggtccggttcggc

SEQ ID NO: 4284157 - DNA, 25 bp, Homo sapien
gaaagcgacaatgttcccctgaggc

SEQ ID NO: 4284158 - DNA, 25 bp, Homo sapien
gcgtctagccggagaaacttgagcc

SEQ ID NO: 4284159 - DNA, 25 bp, Homo sapien
taacggcgccggtgacgacttcgcc

SEQ ID NO: 4284160 - DNA, 25 bp, Homo sapien
ttcgccgcgcgttggtcagccatgg

SEQ ID NO: 4284161 - DNA, 25 bp, Homo sapien
tgtccgcccgttgagcttccctggt

SEQ ID NO: 4284162 - DNA, 25 bp, Homo sapien
ctacgtagcttgtaccgagcgcgac

SEQ ID NO: 4284163 - DNA, 25 bp, Homo sapien
tgtggtagtggcagctacagagccc

SEQ ID NO: 4284164 - DNA, 25 bp, Homo sapien
gtgtgagactgaaaccccaagagcc

SEQ ID NO: 4284165 - DNA, 25 bp, Homo sapien
tatggccaagctatgggctagcagg

SEQ ID NO: 4284166 - DNA, 25 bp, Homo sapien
gcctggccgagagagattcaagtta

SEQ ID NO: 4284167 - DNA, 25 bp, Homo sapien
aaaaccgaggaggtgtgctggatcc

SEQ ID NO: 4284168 - DNA, 25 bp, Homo sapien
aaaaaaccgaggaggtgtgctggat

SEQ ID NO: 4284169 - DNA, 25 bp, Homo sapien
ccgaggaggtgtgctggatcccttt

SEQ ID NO: 4284170 - DNA, 25 bp, Homo sapien
aaccgaggaggtgtgctggatccct

SEQ ID NO: 4284171 - DNA, 25 bp, Homo sapien
aggcatgaggtatggcagaggcccc

SEQ ID NO: 4284172 - DNA, 25 bp, Homo sapien
gccccaccaaggacagggtgactta

SEQ ID NO: 4284173 - DNA, 25 bp, Homo sapien
gaggccccaccaaggacagggtgac

SEQ ID NO: 4284174 - DNA, 25 bp, Homo sapien
aaggaggcatgaggtatggcagagg

SEQ ID NO: 4284175 - DNA, 25 bp, Homo sapien
aggacgttctcttctcaaacttaag

SEQ ID NO: 4284176 - DNA, 25 bp, Homo sapien
ggacgttctcttctcaaacttaagc

SEQ ID NO: 4284177 - DNA, 25 bp, Homo sapien
agaggtcaaatgtgggtagctggcc

SEQ ID NO: 4284178 - DNA, 25 bp, Homo sapien
gaggtcaaatgtgggtagctggccc

SEQ ID NO: 4284179 - DNA, 25 bp, Homo sapien
ggtcaaatgtgggtagctggccctg

SEQ ID NO: 4284180 - DNA, 25 bp, Homo sapien
gtcaaatgtgggtagctggccctgg

SEQ ID NO: 4284181 - DNA, 25 bp, Homo sapien
aatgtcctggcatgagtgttggatg

SEQ ID NO: 4284182 - DNA, 25 bp, Homo sapien
gcatgagtgttggatgccagcaatc

SEQ ID NO: 4284183 - DNA, 25 bp, Homo sapien
gattgaccctttgtcctgcacagca

SEQ ID NO: 4284184 - DNA, 25 bp, Homo sapien
gccagcaatcaggtaagggacaaat

SEQ ID NO: 4284185 - DNA, 25 bp, Homo sapien
gagaggcagagacacgggcaaggtc

SEQ ID NO: 4284186 - DNA, 25 bp, Homo sapien
acgggcaaggtcacagcagagatga

SEQ ID NO: 4284187 - DNA, 25 bp, Homo sapien
gatgagactgtcagtgcaggattag

SEQ ID NO: 4284188 - DNA, 25 bp, Homo sapien
ggggtaactggcttgcctgtcccac

SEQ ID NO: 4284189 - DNA, 25 bp, Homo sapien
gtccatggcatcgagagaacccata

SEQ ID NO: 4284190 - DNA, 25 bp, Homo sapien
ggatcccatcggaaaagaagtattc

SEQ ID NO: 4284191 - DNA, 25 bp, Homo sapien
cgagagaacccataccgcgatattt

SEQ ID NO: 4284192 - DNA, 25 bp, Homo sapien
gcgatatttctttagccggatccca

SEQ ID NO: 4284193 - DNA, 25 bp, Homo sapien
cccaagggccaaggctttcgcaata

SEQ ID NO: 4284194 - DNA, 25 bp, Homo sapien
caaagcgccgtgcatactctgacac

SEQ ID NO: 4284195 - DNA, 25 bp, Homo sapien
cacattttggattcctccatcagca

SEQ ID NO: 4284196 - DNA, 25 bp, Homo sapien
atgaccggaacaccaaagcgccgtg

SEQ ID NO: 4284197 - DNA, 25 bp, Homo sapien
aggagcttttggctacatctgcatc

SEQ ID NO: 4284198 - DNA, 25 bp, Homo sapien
ttttggctacatctgcatcaggact

SEQ ID NO: 4284199 - DNA, 25 bp, Homo sapien
aatggggacgggcagtggaccctgt

SEQ ID NO: 4284200 - DNA, 25 bp, Homo sapien
gaacacatgggtggatagggttaat

SEQ ID NO: 4284201 - DNA, 25 bp, Homo sapien
cccgtgacagtagaagggcatttgg

SEQ ID NO: 4284202 - DNA, 25 bp, Homo sapien
gactttatgtctggagggatcttgg

SEQ ID NO: 4284203 - DNA, 25 bp, Homo sapien
tatagcaacccgtgacagtagaagg

SEQ ID NO: 4284204 - DNA, 25 bp, Homo sapien
tgggactttatgtctggagggatct

SEQ ID NO: 4284205 - DNA, 25 bp, Homo sapien
ggcatccacacctgcatcaatgagg

SEQ ID NO: 4284206 - DNA, 25 bp, Homo sapien
gcagggcatccacacctgcatcaat

SEQ ID NO: 4284207 - DNA, 25 bp, Homo sapien
acccgcagggcatccacacctgcat

SEQ ID NO: 4284208 - DNA, 25 bp, Homo sapien
catccacacctgcatcaatgaggtt

SEQ ID NO: 4284209 - DNA, 25 bp, Homo sapien
tgatcatattgatctggaagatgga

SEQ ID NO: 4284210 - DNA, 25 bp, Homo sapien
ctttgatgtacttgatcatattgat

SEQ ID NO: 4284211 - DNA, 25 bp, Homo sapien
gattagggtatttgtctttgatgta

SEQ ID NO: 4284212 - DNA, 25 bp, Homo sapien
ccaatgacttggagattagggtatt

SEQ ID NO: 4284213 - DNA, 25 bp, Homo sapien
gctagtgggtagtcccgattcttct

SEQ ID NO: 4284214 - DNA, 25 bp, Homo sapien
ctatacttgtcatcctcatgagtgc

SEQ ID NO: 4284215 - DNA, 25 bp, Homo sapien
agcctgggcgagcaagtccagccta

SEQ ID NO: 4284216 - DNA, 25 bp, Homo sapien
catctttggaggctagtgggtagtc

SEQ ID NO: 4284217 - DNA, 25 bp, Homo sapien
taggcattagttccaggccctttcc

SEQ ID NO: 4284218 - DNA, 25 bp, Homo sapien
gggcaggacatgaatcaggacccta

SEQ ID NO: 4284219 - DNA, 25 bp, Homo sapien
aatcaggaccctaggcattagttcc

SEQ ID NO: 4284220 - DNA, 25 bp, Homo sapien
ggccctttcccagctctaggactta

SEQ ID NO: 4284221 - DNA, 25 bp, Homo sapien
tgtgatgcctgcaggggctaccacc

SEQ ID NO: 4284222 - DNA, 25 bp, Homo sapien
ttgctgcgctgcagaatttcatttg

SEQ ID NO: 4284223 - DNA, 25 bp, Homo sapien
cttgctgcgctgcagaatttcattt

SEQ ID NO: 4284224 - DNA, 25 bp, Homo sapien
ataccgcagaaaccatgccgggcct

SEQ ID NO: 4284225 - DNA, 25 bp, Homo sapien
cctgtgtctgtgattgggataccgc

SEQ ID NO: 4284226 - DNA, 25 bp, Homo sapien
tctttgagaaaatcaatgtccctgg

SEQ ID NO: 4284227 - DNA, 25 bp, Homo sapien
gaaacagtcatgttcctcctctttg

SEQ ID NO: 4284228 - DNA, 25 bp, Homo sapien
cacatcttagagacatgggtaggct

SEQ ID NO: 4284229 - DNA, 25 bp, Homo sapien
gtaggctggaggcactgtacacctg

SEQ ID NO: 4284230 - DNA, 25 bp, Homo sapien
gcttatcgatccctttggcagtgcc

SEQ ID NO: 4284231 - DNA, 25 bp, Homo sapien
tgtacacctggtctattgctgctgc

SEQ ID NO: 4284232 - DNA, 25 bp, Homo sapien
cagtgcaattcccaggagcgcttgc

SEQ ID NO: 4284233 - DNA, 25 bp, Homo sapien
caattcccaggagcgcttgctaatg

SEQ ID NO: 4284234 - DNA, 25 bp, Homo sapien
tgctaatgatcgttgcccttctgac

SEQ ID NO: 4284235 - DNA, 25 bp, Homo sapien
gagcgcttgctaatgatcgttgccc

SEQ ID NO: 4284236 - DNA, 25 bp, Homo sapien
tggaattcaggtgtacagttgtggt

SEQ ID NO: 4284237 - DNA, 25 bp, Homo sapien
acttcattggcctggaattcaggtg

SEQ ID NO: 4284238 - DNA, 25 bp, Homo sapien
cattggcctggaattcaggtgtaca

SEQ ID NO: 4284239 - DNA, 25 bp, Homo sapien
tggcctggaattcaggtgtacagtt

SEQ ID NO: 4284240 - DNA, 25 bp, Homo sapien
acaggataaaaagagactactacta

SEQ ID NO: 4284241 - DNA, 25 bp, Homo sapien
agaagcaggactgaatgcctttggg

SEQ ID NO: 4284242 - DNA, 25 bp, Homo sapien
actaagtgacaagaagcaggactga

SEQ ID NO: 4284243 - DNA, 25 bp, Homo sapien
gataaaaagagactactactaagtg

SEQ ID NO: 4284244 - DNA, 25 bp, Homo sapien
gactgtgtccatgggagaggaaacc

SEQ ID NO: 4284245 - DNA, 25 bp, Homo sapien
accagtggggtcttaagagtgattt

SEQ ID NO: 4284246 - DNA, 25 bp, Homo sapien
cgccattgctatggccatcccagcc

SEQ ID NO: 4284247 - DNA, 25 bp, Homo sapien
aaaccagtggggtcttaagagtgat

SEQ ID NO: 4284248 - DNA, 25 bp, Homo sapien
gagacaaacgtcaaccagtgtggga

SEQ ID NO: 4284249 - DNA, 25 bp, Homo sapien
aaggcacttttgtatgacctgcatg

SEQ ID NO: 4284250 - DNA, 25 bp, Homo sapien
tgagttagcccagagaccaggtgat

SEQ ID NO: 4284251 - DNA, 25 bp, Homo sapien
ggaaagcatcccttacacctcaagg

SEQ ID NO: 4284252 - DNA, 25 bp, Homo sapien
ttcaggacccaattcctgatcatac

SEQ ID NO: 4284253 - DNA, 25 bp, Homo sapien
tcaggacccaattcctgatcatact

SEQ ID NO: 4284254 - DNA, 25 bp, Homo sapien
cagtgaagtcgatgtacccagggag

SEQ ID NO: 4284255 - DNA, 25 bp, Homo sapien
gcagtgaagtcgatgtacccaggga

SEQ ID NO: 4284256 - DNA, 25 bp, Homo sapien
ctgcagtgaagtcgatgtacccagg

SEQ ID NO: 4284257 - DNA, 25 bp, Homo sapien
tgaagtcgatgtacccagggagaat

SEQ ID NO: 4284258 - DNA, 25 bp, Homo sapien
aagcaccgctccagatgtctcaaag

SEQ ID NO: 4284259 - DNA, 25 bp, Homo sapien
tgagattccaagcactactgagatg

SEQ ID NO: 4284260 - DNA, 25 bp, Homo sapien
caacccgtaacgcatgtgagcagag

SEQ ID NO: 4284261 - DNA, 25 bp, Homo sapien
tctggagcatggaatctccggcctg

SEQ ID NO: 4284262 - DNA, 25 bp, Homo sapien
tgtgctgtgagtccgtcgtctggca

SEQ ID NO: 4284263 - DNA, 25 bp, Homo sapien
aggtgaggccgtctccgcagttgaa

SEQ ID NO: 4284264 - DNA, 25 bp, Homo sapien
tcgtctggcacgtaggacgtgcccc

SEQ ID NO: 4284265 - DNA, 25 bp, Homo sapien
ccccactaatcaggtagtcggccat

SEQ ID NO: 4284266 - DNA, 25 bp, Homo sapien
gtgtctccgaggaccgcgccgcaga

SEQ ID NO: 4284267 - DNA, 25 bp, Homo sapien
gccgcagagacctctgccgtctggg

SEQ ID NO: 4284268 - DNA, 25 bp, Homo sapien
gcgccgcagagacctctgccgtctg

SEQ ID NO: 4284269 - DNA, 25 bp, Homo sapien
ggccaacacaggacaccgccgcgtg

SEQ ID NO: 4284270 - DNA, 25 bp, Homo sapien
caactagagtaagaatacataagag

SEQ ID NO: 4284271 - DNA, 25 bp, Homo sapien
gcctcaatgttaggccaacaaaaaa

SEQ ID NO: 4284272 - DNA, 25 bp, Homo sapien
ggtatctttatatgatacacaagtg

SEQ ID NO: 4284273 - DNA, 25 bp, Homo sapien
cacaagtgtatgttacaagaattcc

SEQ ID NO: 4284274 - DNA, 25 bp, Homo sapien
gacatatgacactcaaggaaaccca

SEQ ID NO: 4284275 - DNA, 25 bp, Homo sapien
tctgccgcagcaggtttatgaagat

SEQ ID NO: 4284276 - DNA, 25 bp, Homo sapien
ggtcagcaaagtctgtcagcccagt

SEQ ID NO: 4284277 - DNA, 25 bp, Homo sapien
gacaaaaaagagtcagccagcaact

SEQ ID NO: 4284278 - DNA, 25 bp, Homo sapien
tcaggtaaaaggtgtcattccggcc

SEQ ID NO: 4284279 - DNA, 25 bp, Homo sapien
tctgctgataggctggactgagtac

SEQ ID NO: 4284280 - DNA, 25 bp, Homo sapien
cagtgcatagtgcttgcattggcca

SEQ ID NO: 4284281 - DNA, 25 bp, Homo sapien
ttatcaccaggatccgcgtcagcat

SEQ ID NO: 4284282 - DNA, 25 bp, Homo sapien
cattcaagatttattcaagggttac

SEQ ID NO: 4284283 - DNA, 25 bp, Homo sapien
cccgaactgtgctgtacctctatta

SEQ ID NO: 4284284 - DNA, 25 bp, Homo sapien
taagtacttggcatgctgtatcctc

SEQ ID NO: 4284285 - DNA, 25 bp, Homo sapien
tgttttctacccaataatgatggcc

SEQ ID NO: 4284286 - DNA, 25 bp, Homo sapien
tgtggctagggaactaagagctcca

SEQ ID NO: 4284287 - DNA, 25 bp, Homo sapien
gaagcagggccatgctcaatatgtg

SEQ ID NO: 4284288 - DNA, 25 bp, Homo sapien
tggtttgggactagagaatgcctct

SEQ ID NO: 4284289 - DNA, 25 bp, Homo sapien
tgctaccgaggaaacagtcacaggg

SEQ ID NO: 4284290 - DNA, 25 bp, Homo sapien
tgaagaggtagaaatcatagagctt

SEQ ID NO: 4284291 - DNA, 25 bp, Homo sapien
tctcaatggattctctggattttcc

SEQ ID NO: 4284292 - DNA, 25 bp, Homo sapien
gaaatcatagagcttgatgggacat

SEQ ID NO: 4284293 - DNA, 25 bp, Homo sapien
ttccgtctgttctgcatacatgtca

SEQ ID NO: 4284294 - DNA, 25 bp, Homo sapien
cccagatcaggaaacttaggctttc

SEQ ID NO: 4284295 - DNA, 25 bp, Homo sapien
cagtgactactaagggaagaggcag

SEQ ID NO: 4284296 - DNA, 25 bp, Homo sapien
taggctttcagccagcccaactagg

SEQ ID NO: 4284297 - DNA, 25 bp, Homo sapien
tacacttatcactagcctcacaggc

SEQ ID NO: 4284298 - DNA, 25 bp, Homo sapien
tctgtcgcaagaccttggagaaggc

SEQ ID NO: 4284299 - DNA, 25 bp, Homo sapien
caagtaccggatactcgtgctttta

SEQ ID NO: 4284300 - DNA, 25 bp, Homo sapien
cagcttcatgtgctggtccactgtc

SEQ ID NO: 4284301 - DNA, 25 bp, Homo sapien
ccagtctggtgtattccaagggcct

SEQ ID NO: 4284302 - DNA, 25 bp, Homo sapien
ggaggggtgccgggaggataccatg

SEQ ID NO: 4284303 - DNA, 25 bp, Homo sapien
gcccacattcccaagatctgggcag

SEQ ID NO: 4284304 - DNA, 25 bp, Homo sapien
aggataccatgactcatcctctgcc

SEQ ID NO: 4284305 - DNA, 25 bp, Homo sapien
aggggtgccgggaggataccatgac

SEQ ID NO: 4284306 - DNA, 25 bp, Homo sapien
tgcaggaaccacatcaagatggatg

SEQ ID NO: 4284307 - DNA, 25 bp, Homo sapien
tctggcaagggtgtttgcctcactg

SEQ ID NO: 4284308 - DNA, 25 bp, Homo sapien
agaggaattcagaaggcctcttgga

SEQ ID NO: 4284309 - DNA, 25 bp, Homo sapien
taaaatgcagccaagtggggttagg

SEQ ID NO: 4284310 - DNA, 25 bp, Homo sapien
tcagtcacgtggctgggcaagacat

SEQ ID NO: 4284311 - DNA, 25 bp, Homo sapien
ggtattaaagaacatgagggtggtc

SEQ ID NO: 4284312 - DNA, 25 bp, Homo sapien
ttgcactcccatagcatctcctcag

SEQ ID NO: 4284313 - DNA, 25 bp, Homo sapien
gctgcttgcactcccatagcatctc

SEQ ID NO: 4284314 - DNA, 25 bp, Homo sapien
gtactgtcacaacaagaggatggca

SEQ ID NO: 4284315 - DNA, 25 bp, Homo sapien
tggcaggtggtctctcaaaggtaca

SEQ ID NO: 4284316 - DNA, 25 bp, Homo sapien
tctaatccaaggctaacacagggca

SEQ ID NO: 4284317 - DNA, 25 bp, Homo sapien
gcataaggaccacacaggagtataa

SEQ ID NO: 4284318 - DNA, 25 bp, Homo sapien
gggtagattttaattacattatgga

SEQ ID NO: 4284319 - DNA, 25 bp, Homo sapien
cgcccagcctaataaagggtagatt

SEQ ID NO: 4284320 - DNA, 25 bp, Homo sapien
tgcgcccagcctaataaagggtaga

SEQ ID NO: 4284321 - DNA, 25 bp, Homo sapien
cattatggatttaccttttttgttg

SEQ ID NO: 4284322 - DNA, 25 bp, Homo sapien
gaacatccttcagaacttcatgtag

SEQ ID NO: 4284323 - DNA, 25 bp, Homo sapien
ccgtgaaccgaacataataaagatc

SEQ ID NO: 4284324 - DNA, 25 bp, Homo sapien
tcatgtagccactccgtgaaccgaa

SEQ ID NO: 4284325 - DNA, 25 bp, Homo sapien
aataaagatcggagaaaatgtcatc

SEQ ID NO: 4284326 - DNA, 25 bp, Homo sapien
gagatcttcctggaatcgcagcagt

SEQ ID NO: 4284327 - DNA, 25 bp, Homo sapien
cagagcccataattcaactctgcca

SEQ ID NO: 4284328 - DNA, 25 bp, Homo sapien
tcctggaatcgcagcagttggcgcc

SEQ ID NO: 4284329 - DNA, 25 bp, Homo sapien
cgtgtcattagacagagcccataat

SEQ ID NO: 4284330 - DNA, 25 bp, Homo sapien
aacccgtatgtctaaaaatgcctgg

SEQ ID NO: 4284331 - DNA, 25 bp, Homo sapien
taccattgcattttagacacagccc

SEQ ID NO: 4284332 - DNA, 25 bp, Homo sapien
tgggcaaaccccacatatcctgctt

SEQ ID NO: 4284333 - DNA, 25 bp, Homo sapien
tatgtacacaaggtcagtactgctt

SEQ ID NO: 4284334 - DNA, 25 bp, Homo sapien
agcattcttggtctgggcccagttt

SEQ ID NO: 4284335 - DNA, 25 bp, Homo sapien
acttcagcaacctggacagtttgag

SEQ ID NO: 4284336 - DNA, 25 bp, Homo sapien
cttcagcaacctggacagtttgagc

SEQ ID NO: 4284337 - DNA, 25 bp, Homo sapien
ccagtttttccatacttcaagccct

SEQ ID NO: 4284338 - DNA, 25 bp, Homo sapien
gtattctggtacgtgcctgccacag

SEQ ID NO: 4284339 - DNA, 25 bp, Homo sapien
gttgggggtcccatatatggacagt

SEQ ID NO: 4284340 - DNA, 25 bp, Homo sapien
catatatggacagtttgagccgtat

SEQ ID NO: 4284341 - DNA, 25 bp, Homo sapien
tttgagccgtattctggtacgtgcc

SEQ ID NO: 4284342 - DNA, 25 bp, Homo sapien
agagagagtttgcaagggtctgcac

SEQ ID NO: 4284343 - DNA, 25 bp, Homo sapien
aaagagagagtttgcaagggtctgc

SEQ ID NO: 4284344 - DNA, 25 bp, Homo sapien
aagagagagtttgcaagggtctgca

SEQ ID NO: 4284345 - DNA, 25 bp, Homo sapien
gagagagtttgcaagggtctgcact

SEQ ID NO: 4284346 - DNA, 25 bp, Homo sapien
agtttttcactacagatgtggtgcc

SEQ ID NO: 4284347 - DNA, 25 bp, Homo sapien
gtttttcactacagatgtggtgccc

SEQ ID NO: 4284348 - DNA, 25 bp, Homo sapien
tctcctgtagggctagtaatggtcc

SEQ ID NO: 4284349 - DNA, 25 bp, Homo sapien
tcctccgggatttctgcagcctgga

SEQ ID NO: 4284350 - DNA, 25 bp, Homo sapien
tgagccactgacgtgaactgcgttg

SEQ ID NO: 4284351 - DNA, 25 bp, Homo sapien
tactgtcagtaagtctggcctcaaa

SEQ ID NO: 4284352 - DNA, 25 bp, Homo sapien
gtggtgcctggccttggatctgcac

SEQ ID NO: 4284353 - DNA, 25 bp, Homo sapien
gcagagacggggtctgaatggaggg

SEQ ID NO: 4284354 - DNA, 25 bp, Homo sapien
agacggggtctgaatggagggggct

SEQ ID NO: 4284355 - DNA, 25 bp, Homo sapien
gggctgctgactgtggtgcctggcc

SEQ ID NO: 4284356 - DNA, 25 bp, Homo sapien
agagctgagccgagacctgttgcgg

SEQ ID NO: 4284357 - DNA, 25 bp, Homo sapien
ctggtgaacggtgagttgtggggag

SEQ ID NO: 4284358 - DNA, 25 bp, Homo sapien
acctgttgcggagactgctgtacct

SEQ ID NO: 4284359 - DNA, 25 bp, Homo sapien
tgaacggtgagttgtggggagagct

SEQ ID NO: 4284360 - DNA, 25 bp, Homo sapien
tctgcttccgcactcaatctgttgt

SEQ ID NO: 4284361 - DNA, 25 bp, Homo sapien
gacttaatataaggtagctgaattc

SEQ ID NO: 4284362 - DNA, 25 bp, Homo sapien
tttgcaaacctatttaatggctgac

SEQ ID NO: 4284363 - DNA, 25 bp, Homo sapien
gctattatacatcacacatggcctc

SEQ ID NO: 4284364 - DNA, 25 bp, Homo sapien
gcacttttggataaggaggcaggtg

SEQ ID NO: 4284365 - DNA, 25 bp, Homo sapien
gtacattaaacaggctgcacctcag

SEQ ID NO: 4284366 - DNA, 25 bp, Homo sapien
caaataaagtacattaaacaggctg

SEQ ID NO: 4284367 - DNA, 25 bp, Homo sapien
ccacatagatgtgatgagcccacta

SEQ ID NO: 4284368 - DNA, 25 bp, Homo sapien
tgatgagcccactaactaaaacact

SEQ ID NO: 4284369 - DNA, 25 bp, Homo sapien
aacactggtggtgactggacaggca

SEQ ID NO: 4284370 - DNA, 25 bp, Homo sapien
tgttgcgggacagaccgtgccttta

SEQ ID NO: 4284371 - DNA, 25 bp, Homo sapien
caccctgttggtacaccatggtagt

SEQ ID NO: 4284372 - DNA, 25 bp, Homo sapien
gacaggcaagttcaagcaaagaccc

SEQ ID NO: 4284373 - DNA, 25 bp, Homo sapien
ctcggatgtactcttcaaaggagat

SEQ ID NO: 4284374 - DNA, 25 bp, Homo sapien
atatccatagctccacggactcaag

SEQ ID NO: 4284375 - DNA, 25 bp, Homo sapien
acgtgagccacccaattggtttctg

SEQ ID NO: 4284376 - DNA, 25 bp, Homo sapien
cacccaattggtttctgtaatatcc

SEQ ID NO: 4284377 - DNA, 25 bp, Homo sapien
ttctgtaatatccatagctccacgg

SEQ ID NO: 4284378 - DNA, 25 bp, Homo sapien
caagggaagatcttattgcaatcac

SEQ ID NO: 4284379 - DNA, 25 bp, Homo sapien
ggttcacatctactccaacaatggc

SEQ ID NO: 4284380 - DNA, 25 bp, Homo sapien
agtgagtcttcaatccgtgatggac

SEQ ID NO: 4284381 - DNA, 25 bp, Homo sapien
tggtaccatggacaaaggttactcc

SEQ ID NO: 4284382 - DNA, 25 bp, Homo sapien
cgcattggcctcctaaagtaatggg

SEQ ID NO: 4284383 - DNA, 25 bp, Homo sapien
cccgcattggcctcctaaagtaatg

SEQ ID NO: 4284384 - DNA, 25 bp, Homo sapien
cgcccgcattggcctcctaaagtaa

SEQ ID NO: 4284385 - DNA, 25 bp, Homo sapien
gtgcaatggtgccctctcagttcac

SEQ ID NO: 4284386 - DNA, 25 bp, Homo sapien
tctgctgcttgtcctgagttcttaa

SEQ ID NO: 4284387 - DNA, 25 bp, Homo sapien
tgctgcttgtcctgagttcttaaga

SEQ ID NO: 4284388 - DNA, 25 bp, Homo sapien
ttctgctgcttgtcctgagttctta

SEQ ID NO: 4284389 - DNA, 25 bp, Homo sapien
gctgcttgtcctgagttcttaagac

SEQ ID NO: 4284390 - DNA, 25 bp, Homo sapien
gggaacgtcaccagaccagaaagga

SEQ ID NO: 4284391 - DNA, 25 bp, Homo sapien
gggcctcaagtaacggcattcttcg

SEQ ID NO: 4284392 - DNA, 25 bp, Homo sapien
cattcttcgaggagaacgggcaatc

SEQ ID NO: 4284393 - DNA, 25 bp, Homo sapien
cagcaaagctggttggtttctctcc

SEQ ID NO: 4284394 - DNA, 25 bp, Homo sapien
gctccaagaccgacagggttttctc

SEQ ID NO: 4284395 - DNA, 25 bp, Homo sapien
ccagggaccctggttctgccgtcgt

SEQ ID NO: 4284396 - DNA, 25 bp, Homo sapien
tggttctgccgtcgtcgctccaaga

SEQ ID NO: 4284397 - DNA, 25 bp, Homo sapien
gtcgtcgctccaagaccgacagggt

SEQ ID NO: 4284398 - DNA, 25 bp, Homo sapien
tttggggtggcgagggtagccacac

SEQ ID NO: 4284399 - DNA, 25 bp, Homo sapien
agctgttctttattgacatggaatt

SEQ ID NO: 4284400 - DNA, 25 bp, Homo sapien
gttctttattgacatggaatttggg

SEQ ID NO: 4284401 - DNA, 25 bp, Homo sapien
ggtggcgagggtagccacaccctcc

SEQ ID NO: 4284402 - DNA, 25 bp, Homo sapien
gatgaggtaggttcagtgcttccag

SEQ ID NO: 4284403 - DNA, 25 bp, Homo sapien
aggatgaggtaggttcagtgcttcc

SEQ ID NO: 4284404 - DNA, 25 bp, Homo sapien
atgaggtaggttcagtgcttccagc

SEQ ID NO: 4284405 - DNA, 25 bp, Homo sapien
aggaggatgaggtaggttcagtgct

SEQ ID NO: 4284406 - DNA, 25 bp, Homo sapien
cagtgtgacagttcggttaaagaca

SEQ ID NO: 4284407 - DNA, 25 bp, Homo sapien
tcagtgtgacagttcggttaaagac

SEQ ID NO: 4284408 - DNA, 25 bp, Homo sapien
ttcagtgtgacagttcggttaaaga

SEQ ID NO: 4284409 - DNA, 25 bp, Homo sapien
gtgtgacagttcggttaaagacaag

SEQ ID NO: 4284410 - DNA, 25 bp, Homo sapien
tttatatggattataacaaccacca

SEQ ID NO: 4284411 - DNA, 25 bp, Homo sapien
tatggaccataacaaccaccgtggg

SEQ ID NO: 4284412 - DNA, 25 bp, Homo sapien
cttaagccaaagaagccgagggact

SEQ ID NO: 4284413 - DNA, 25 bp, Homo sapien
ctgggcaggtttcaccacagacacc

SEQ ID NO: 4284414 - DNA, 25 bp, Homo sapien
tgtgcacatgtagtctcagctaagg

SEQ ID NO: 4284415 - DNA, 25 bp, Homo sapien
catgtagtctcagctaaggcaggag

SEQ ID NO: 4284416 - DNA, 25 bp, Homo sapien
atgtagtctcagctaaggcaggaga

SEQ ID NO: 4284417 - DNA, 25 bp, Homo sapien
gcacatgtagtctcagctaaggcag

SEQ ID NO: 4284418 - DNA, 25 bp, Homo sapien
agtttcctcactagtagaatatgaa

SEQ ID NO: 4284419 - DNA, 25 bp, Homo sapien
ctcaggtggtgaggattaactaagg

SEQ ID NO: 4284420 - DNA, 25 bp, Homo sapien
aaggcagccttcatacaaaattttg

SEQ ID NO: 4284421 - DNA, 25 bp, Homo sapien
taactaagggaatgtatgcagagca

SEQ ID NO: 4284422 - DNA, 25 bp, Homo sapien
gatccacggagaaatatccaagacg

SEQ ID NO: 4284423 - DNA, 25 bp, Homo sapien
tgctgcatccaccacgtgtagtgat

SEQ ID NO: 4284424 - DNA, 25 bp, Homo sapien
tggaacttgtcgaagggttttgcca

SEQ ID NO: 4284425 - DNA, 25 bp, Homo sapien
tcgaagggttttgccagggccacag

SEQ ID NO: 4284426 - DNA, 25 bp, Homo sapien
agggaactcaggcaaccatccaacc

SEQ ID NO: 4284427 - DNA, 25 bp, Homo sapien
gcaaccatccaaccagggaggccta

SEQ ID NO: 4284428 - DNA, 25 bp, Homo sapien
caggcagggaactcaggcaaccatc

SEQ ID NO: 4284429 - DNA, 25 bp, Homo sapien
tcaggcaaccatccaaccagggagg

SEQ ID NO: 4284430 - DNA, 25 bp, Homo sapien
taaaaatccaccaggcacctcagta

SEQ ID NO: 4284431 - DNA, 25 bp, Homo sapien
ttaaaaatccaccaggcacctcagt

SEQ ID NO: 4284432 - DNA, 25 bp, Homo sapien
cttaaaaatccaccaggcacctcag

SEQ ID NO: 4284433 - DNA, 25 bp, Homo sapien
atcttcagggttcttgtgctggaat

SEQ ID NO: 4284434 - DNA, 25 bp, Homo sapien
gatcttcagggttcttgtgctggaa

SEQ ID NO: 4284435 - DNA, 25 bp, Homo sapien
ctgcagccaaagtgaaggtcatacc

SEQ ID NO: 4284436 - DNA, 25 bp, Homo sapien
caaagtgaaggtcatacccccagct

SEQ ID NO: 4284437 - DNA, 25 bp, Homo sapien
gtgaaggtcatacccccagctgggc

SEQ ID NO: 4284438 - DNA, 25 bp, Homo sapien
gcagccaaagtgaaggtcatacccc

SEQ ID NO: 4284439 - DNA, 25 bp, Homo sapien
gcgaacctcacacatcaaaggctgt

SEQ ID NO: 4284440 - DNA, 25 bp, Homo sapien
gcatctgcccgtctgcaggtcacct

SEQ ID NO: 4284441 - DNA, 25 bp, Homo sapien
cagactctctacacaaccactgggg

SEQ ID NO: 4284442 - DNA, 25 bp, Homo sapien
gacacccagtgaataaaggcctttg

SEQ ID NO: 4284443 - DNA, 25 bp, Homo sapien
cccgggaaccacaaccaggactgca

SEQ ID NO: 4284444 - DNA, 25 bp, Homo sapien
gggagcagcaattagacccgggaac

SEQ ID NO: 4284445 - DNA, 25 bp, Homo sapien
agcagcaattagacccgggaaccac

SEQ ID NO: 4284446 - DNA, 25 bp, Homo sapien
gggaggggagcagcaattagacccg

SEQ ID NO: 4284447 - DNA, 25 bp, Homo sapien
cagcaggcactgcagtaggaaggct

SEQ ID NO: 4284448 - DNA, 25 bp, Homo sapien
cccagcaggcactgcagtaggaagg

SEQ ID NO: 4284449 - DNA, 25 bp, Homo sapien
aggcactgcagtaggaaggctgcag

SEQ ID NO: 4284450 - DNA, 25 bp, Homo sapien
atcttggccccagcaggcactgcag

SEQ ID NO: 4284451 - DNA, 25 bp, Homo sapien
ctcaatgacgtagcctgtatgcctc

SEQ ID NO: 4284452 - DNA, 25 bp, Homo sapien
catgctgcagctcaatgacgtagcc

SEQ ID NO: 4284453 - DNA, 25 bp, Homo sapien
cttgacaacatgctgcagctcaatg

SEQ ID NO: 4284454 - DNA, 25 bp, Homo sapien
ccaagccaggcgcttaaatcctggc

SEQ ID NO: 4284455 - DNA, 25 bp, Homo sapien
gaggctgcaagggtcaaacaagtgg

SEQ ID NO: 4284456 - DNA, 25 bp, Homo sapien
ggttcccagtaccagactcagcagc

SEQ ID NO: 4284457 - DNA, 25 bp, Homo sapien
tgtctggcaaagattggttcatctg

SEQ ID NO: 4284458 - DNA, 25 bp, Homo sapien
tggttcatctgaagcaggaagtaga

SEQ ID NO: 4284459 - DNA, 25 bp, Homo sapien
aacctgatggaagcctttggtctca

SEQ ID NO: 4284460 - DNA, 25 bp, Homo sapien
ggtctcatcagctgggaagttgggc

SEQ ID NO: 4284461 - DNA, 25 bp, Homo sapien
tctcaatgaagacaatgggtgcaaa

SEQ ID NO: 4284462 - DNA, 25 bp, Homo sapien
gtcagtcctctcaatgaagacaatg

SEQ ID NO: 4284463 - DNA, 25 bp, Homo sapien
tgtgtcattcagcacatcacgcaca

SEQ ID NO: 4284464 - DNA, 25 bp, Homo sapien
gatgacccgtagtgactccagcaca

SEQ ID NO: 4284465 - DNA, 25 bp, Homo sapien
agcacatcacgcacacaggcttcta

SEQ ID NO: 4284466 - DNA, 25 bp, Homo sapien
gtggtttgtgccacagtcactccca

SEQ ID NO: 4284467 - DNA, 25 bp, Homo sapien
tcgcagggccgtgagtgtaaagagc

SEQ ID NO: 4284468 - DNA, 25 bp, Homo sapien
cccgccgtcgcagggccgtgagtgt

SEQ ID NO: 4284469 - DNA, 25 bp, Homo sapien
cgtgagtgtaaagagccgtgggtca

SEQ ID NO: 4284470 - DNA, 25 bp, Homo sapien
aagccccgccgtcgcagggccgtga

SEQ ID NO: 4284471 - DNA, 25 bp, Homo sapien
tccagtgcattgcaaagccagaagt

SEQ ID NO: 4284472 - DNA, 25 bp, Homo sapien
ctcttagagacaacagcatagtgca

SEQ ID NO: 4284473 - DNA, 25 bp, Homo sapien
cacagggcaatagacgtccagtgca

SEQ ID NO: 4284474 - DNA, 25 bp, Homo sapien
tagtgcaggttgaggcggccatact

SEQ ID NO: 4284475 - DNA, 25 bp, Homo sapien
tgctcgatggagtcacagaggcagt

SEQ ID NO: 4284476 - DNA, 25 bp, Homo sapien
cagtgtgtgtagtcgtaggtgggat

SEQ ID NO: 4284477 - DNA, 25 bp, Homo sapien
agaggcagtgtgtgtagtcgtaggt

SEQ ID NO: 4284478 - DNA, 25 bp, Homo sapien
gtagtcgtaggtgggatagatgcac

SEQ ID NO: 4284479 - DNA, 25 bp, Homo sapien
agcttcatccgtagtgtggcctcgc

SEQ ID NO: 4284480 - DNA, 25 bp, Homo sapien
catttgtcccctgtgcggtggtgtg

SEQ ID NO: 4284481 - DNA, 25 bp, Homo sapien
cgataggctacagggtccatcttgc

SEQ ID NO: 4284482 - DNA, 25 bp, Homo sapien
cggtggtgtggtgtatacttgactc

SEQ ID NO: 4284483 - DNA, 25 bp, Homo sapien
ctgaggggaacaaggactcaggctg

SEQ ID NO: 4284484 - DNA, 25 bp, Homo sapien
tgaggggaacaaggactcaggctgt

SEQ ID NO: 4284485 - DNA, 25 bp, Homo sapien
aggggaacaaggactcaggctgtct

SEQ ID NO: 4284486 - DNA, 25 bp, Homo sapien
gaggggaacaaggactcaggctgtc

SEQ ID NO: 4284487 - DNA, 25 bp, Homo sapien
agcacaggagcatctcattctcagc

SEQ ID NO: 4284488 - DNA, 25 bp, Homo sapien
taagcacaggagcatctcattctca

SEQ ID NO: 4284489 - DNA, 25 bp, Homo sapien
aagcacaggagcatctcattctcag

SEQ ID NO: 4284490 - DNA, 25 bp, Homo sapien
ctaagcacaggagcatctcattctc

SEQ ID NO: 4284491 - DNA, 25 bp, Homo sapien
tctcctcgctggtggcacacataag

SEQ ID NO: 4284492 - DNA, 25 bp, Homo sapien
gcagagtattatggcctttgagctc

SEQ ID NO: 4284493 - DNA, 25 bp, Homo sapien
gctggtggcacacataagccagacc

SEQ ID NO: 4284494 - DNA, 25 bp, Homo sapien
gcagtgactcctccatgggacggtc

SEQ ID NO: 4284495 - DNA, 25 bp, Homo sapien
cgcatatagctggtcaaaatagtca

SEQ ID NO: 4284496 - DNA, 25 bp, Homo sapien
tcagacgcatatgtgactttgtaag

SEQ ID NO: 4284497 - DNA, 25 bp, Homo sapien
ctccacagcccacgcatatagctgg

SEQ ID NO: 4284498 - DNA, 25 bp, Homo sapien
gctggtcaaaatagtcagacgcata

SEQ ID NO: 4284499 - DNA, 25 bp, Homo sapien
aggctaccatgtcacagatggccgt

SEQ ID NO: 4284500 - DNA, 25 bp, Homo sapien
ctccttctcagggttggtgtcatca

SEQ ID NO: 4284501 - DNA, 25 bp, Homo sapien
ggtgtcatcaaaacgcagaaaacag

SEQ ID NO: 4284502 - DNA, 25 bp, Homo sapien
acagatggccgtgaagaactttgct

SEQ ID NO: 4284503 - DNA, 25 bp, Homo sapien
gtttatcaaactaggatattcacag

SEQ ID NO: 4284504 - DNA, 25 bp, Homo sapien
gatggagtcttgattatcttgcacc

SEQ ID NO: 4284505 - DNA, 25 bp, Homo sapien
gccccacaatcctgtttatcaaact

SEQ ID NO: 4284506 - DNA, 25 bp, Homo sapien
attcacagagcactctcatgtcaga

SEQ ID NO: 4284507 - DNA, 25 bp, Homo sapien
gatggctttggcatgtccaatatgc

SEQ ID NO: 4284508 - DNA, 25 bp, Homo sapien
gattccattgggttctggcgggaac

SEQ ID NO: 4284509 - DNA, 25 bp, Homo sapien
catagccaaagttgaaattgatggc

SEQ ID NO: 4284510 - DNA, 25 bp, Homo sapien
cttggcatagccaaagttgaaattg

SEQ ID NO: 4284511 - DNA, 25 bp, Homo sapien
tccaggtgctgctttagtagattca

SEQ ID NO: 4284512 - DNA, 25 bp, Homo sapien
gctgctttagtagattcatggtgtg

SEQ ID NO: 4284513 - DNA, 25 bp, Homo sapien
ctttagtagattcatggtgtgtgga

SEQ ID NO: 4284514 - DNA, 25 bp, Homo sapien
tgtgtggagtgaccacatagcctgg

SEQ ID NO: 4284515 - DNA, 25 bp, Homo sapien
agacagggtctggtcagcagtctcg

SEQ ID NO: 4284516 - DNA, 25 bp, Homo sapien
gacagggtctggtcagcagtctcgc

SEQ ID NO: 4284517 - DNA, 25 bp, Homo sapien
cccggagctgctccatcagagacag

SEQ ID NO: 4284518 - DNA, 25 bp, Homo sapien
ccggagctgctccatcagagacagg

SEQ ID NO: 4284519 - DNA, 25 bp, Homo sapien
tccaccacatcctttgccgtcctcc

SEQ ID NO: 4284520 - DNA, 25 bp, Homo sapien
tgtttcttctagccgagcttttgcc

SEQ ID NO: 4284521 - DNA, 25 bp, Homo sapien
gtttcttctagccgagcttttgcca

SEQ ID NO: 4284522 - DNA, 25 bp, Homo sapien
tttcttctagccgagcttttgccac

SEQ ID NO: 4284523 - DNA, 25 bp, Homo sapien
ttctccagatcagcctccaacttgg

SEQ ID NO: 4284524 - DNA, 25 bp, Homo sapien
tccagatcagcctccaacttggggc

SEQ ID NO: 4284525 - DNA, 25 bp, Homo sapien
cttctccagatcagcctccaacttg

SEQ ID NO: 4284526 - DNA, 25 bp, Homo sapien
ttcttctccagatcagcctccaact

SEQ ID NO: 4284527 - DNA, 25 bp, Homo sapien
cttcagcttagtgaagcacgctcac

SEQ ID NO: 4284528 - DNA, 25 bp, Homo sapien
agcttcagcttagtgaagcacgctc

SEQ ID NO: 4284529 - DNA, 25 bp, Homo sapien
gcttcagcttagtgaagcacgctca

SEQ ID NO: 4284530 - DNA, 25 bp, Homo sapien
tgcatgtccacttcattcttgatca

SEQ ID NO: 4284531 - DNA, 25 bp, Homo sapien
ctgcatgtccacttcattcttgatc

SEQ ID NO: 4284532 - DNA, 25 bp, Homo sapien
gcatgtccacttcattcttgatcat

SEQ ID NO: 4284533 - DNA, 25 bp, Homo sapien
ctgcccacttcagcacagcccgagc

SEQ ID NO: 4284534 - DNA, 25 bp, Homo sapien
cagaccactttaagtcactcctgtt

SEQ ID NO: 4284535 - DNA, 25 bp, Homo sapien
ctcactcgtgcccagaagaaaaggc

SEQ ID NO: 4284536 - DNA, 25 bp, Homo sapien
cactcgtgcccagaagaaaaggcat

SEQ ID NO: 4284537 - DNA, 25 bp, Homo sapien
gaacaatatagccccgttccaggcc

SEQ ID NO: 4284538 - DNA, 25 bp, Homo sapien
tgttgaaatggtaacgttccaccag

SEQ ID NO: 4284539 - DNA, 25 bp, Homo sapien
ttgaaatggtaacgttccaccagga

SEQ ID NO: 4284540 - DNA, 25 bp, Homo sapien
tgaaatggtaacgttccaccaggag

SEQ ID NO: 4284541 - DNA, 25 bp, Homo sapien
cggtgcctgttaatagcagcctcca

SEQ ID NO: 4284542 - DNA, 25 bp, Homo sapien
gggccggtgcctgttaatagcagcc

SEQ ID NO: 4284543 - DNA, 25 bp, Homo sapien
tggggccggtgcctgttaatagcag

SEQ ID NO: 4284544 - DNA, 25 bp, Homo sapien
gccggtgcctgttaatagcagcctc

SEQ ID NO: 4284545 - DNA, 25 bp, Homo sapien
gatattctgggaacccacaccctca

SEQ ID NO: 4284546 - DNA, 25 bp, Homo sapien
gcagaaagccaaaccatgtggttca

SEQ ID NO: 4284547 - DNA, 25 bp, Homo sapien
ggagggaaactgagccactcctttc

SEQ ID NO: 4284548 - DNA, 25 bp, Homo sapien
tggttcaggaaagccacctttagag

SEQ ID NO: 4284549 - DNA, 25 bp, Homo sapien
cctcctcaatctgctctggggtcac

SEQ ID NO: 4284550 - DNA, 25 bp, Homo sapien
tgactccgcacatactcaagggcag

SEQ ID NO: 4284551 - DNA, 25 bp, Homo sapien
tccacagtgtcgatggggtccaagg

SEQ ID NO: 4284552 - DNA, 25 bp, Homo sapien
acacccacgccacattcccgctcga

SEQ ID NO: 4284553 - DNA, 25 bp, Homo sapien
agaaagagcccgtgagtttgtggca

SEQ ID NO: 4284554 - DNA, 25 bp, Homo sapien
aaactccaaggatagtctggcctcc

SEQ ID NO: 4284555 - DNA, 25 bp, Homo sapien
gacagacagggtcctaatctcatga

SEQ ID NO: 4284556 - DNA, 25 bp, Homo sapien
cctgaaaagttaagccctggcacca

SEQ ID NO: 4284557 - DNA, 25 bp, Homo sapien
agctggggctcagtgtggatcttct

SEQ ID NO: 4284558 - DNA, 25 bp, Homo sapien
cgcttagctggggctcagtgtggat

SEQ ID NO: 4284559 - DNA, 25 bp, Homo sapien
gcttagctggggctcagtgtggatc

SEQ ID NO: 4284560 - DNA, 25 bp, Homo sapien
ttagctggggctcagtgtggatctt

SEQ ID NO: 4284561 - DNA, 25 bp, Homo sapien
gtcaatggtggaacccagggtctgc

SEQ ID NO: 4284562 - DNA, 25 bp, Homo sapien
aggatcccggtagctttgtcaatgg

SEQ ID NO: 4284563 - DNA, 25 bp, Homo sapien
agagacgccgggtatccctgagtcg

SEQ ID NO: 4284564 - DNA, 25 bp, Homo sapien
gagtcgggaggccaagccatataac

SEQ ID NO: 4284565 - DNA, 25 bp, Homo sapien
tcagaggggtcaagagagaagcccc

SEQ ID NO: 4284566 - DNA, 25 bp, Homo sapien
ctgaggtcagaggggtcaagagaga

SEQ ID NO: 4284567 - DNA, 25 bp, Homo sapien
ggtcagaggggtcaagagagaagcc

SEQ ID NO: 4284568 - DNA, 25 bp, Homo sapien
gaggtcagaggggtcaagagagaag

SEQ ID NO: 4284569 - DNA, 25 bp, Homo sapien
ttcttgagcgtctcgcgggccttct

SEQ ID NO: 4284570 - DNA, 25 bp, Homo sapien
tcagagccgagttcttgagcgtctc

SEQ ID NO: 4284571 - DNA, 25 bp, Homo sapien
gctgcgcgctcagagccgagttctt

SEQ ID NO: 4284572 - DNA, 25 bp, Homo sapien
ctgagtagcggcctcgcgcagctgc

SEQ ID NO: 4284573 - DNA, 25 bp, Homo sapien
gtgaagagcgacagggagtctagag

SEQ ID NO: 4284574 - DNA, 25 bp, Homo sapien
agagcgacagggagtctagagccgc

SEQ ID NO: 4284575 - DNA, 25 bp, Homo sapien
tgaagagcgacagggagtctagagc

SEQ ID NO: 4284576 - DNA, 25 bp, Homo sapien
gcgacagggagtctagagccgccat

SEQ ID NO: 4284577 - DNA, 25 bp, Homo sapien
cgtctatcccctttaaacaacacag

SEQ ID NO: 4284578 - DNA, 25 bp, Homo sapien
cagtctgcaggtcggcattcactcg

SEQ ID NO: 4284579 - DNA, 25 bp, Homo sapien
tcgctgaccaatgagagtgaagcct

SEQ ID NO: 4284580 - DNA, 25 bp, Homo sapien
gctccaaggtcgtctatccccttta

SEQ ID NO: 4284581 - DNA, 25 bp, Homo sapien
gcttccgcctccgtggaactgggaa

SEQ ID NO: 4284582 - DNA, 25 bp, Homo sapien
tgcttccgcctccgtggaactggga

SEQ ID NO: 4284583 - DNA, 25 bp, Homo sapien
tgggaacttgaaggggtgttggcag

SEQ ID NO: 4284584 - DNA, 25 bp, Homo sapien
ctgggaacttgaaggggtgttggca

SEQ ID NO: 4284585 - DNA, 25 bp, Homo sapien
agccctggtaactccatctcaatat

SEQ ID NO: 4284586 - DNA, 25 bp, Homo sapien
tgctctgacttttctacttcagccc

SEQ ID NO: 4284587 - DNA, 25 bp, Homo sapien
tacttcagccctggtaactccatct

SEQ ID NO: 4284588 - DNA, 25 bp, Homo sapien
ttcagccctggtaactccatctcaa

SEQ ID NO: 4284589 - DNA, 25 bp, Homo sapien
cagactccatcgtagagaatgtgtg

SEQ ID NO: 4284590 - DNA, 25 bp, Homo sapien
gcttttgacgccacagctttggagt

SEQ ID NO: 4284591 - DNA, 25 bp, Homo sapien
cgccggttttcaggtgcccacttgg

SEQ ID NO: 4284592 - DNA, 25 bp, Homo sapien
aatgtgtggaatgaccgatccaggg

SEQ ID NO: 4284593 - DNA, 25 bp, Homo sapien
gaccttcaaggaataggcaggatcc

SEQ ID NO: 4284594 - DNA, 25 bp, Homo sapien
ttggtgatgctcatacttctggacc

SEQ ID NO: 4284595 - DNA, 25 bp, Homo sapien
ggacaaatgagatggttatagcttc

SEQ ID NO: 4284596 - DNA, 25 bp, Homo sapien
catttgagattggagctcttgcagg

SEQ ID NO: 4284597 - DNA, 25 bp, Homo sapien
gagatcaagatctgcactcccttcc

SEQ ID NO: 4284598 - DNA, 25 bp, Homo sapien
catcaccaagtcctacaggtctagt

SEQ ID NO: 4284599 - DNA, 25 bp, Homo sapien
gatgctgccaatagattcactgtag

SEQ ID NO: 4284600 - DNA, 25 bp, Homo sapien
tctagtgatggctccctcaatgaga

SEQ ID NO: 4284601 - DNA, 25 bp, Homo sapien
tgcctggccaaagaaggaaggcttc

SEQ ID NO: 4284602 - DNA, 25 bp, Homo sapien
gaactcttaagggaagactcttcag

SEQ ID NO: 4284603 - DNA, 25 bp, Homo sapien
taagggaagactcttcaggctggca

SEQ ID NO: 4284604 - DNA, 25 bp, Homo sapien
gcttcaggaactcttaagggaagac

SEQ ID NO: 4284605 - DNA, 25 bp, Homo sapien
ctgcagggatgcagttagtgttcaa

SEQ ID NO: 4284606 - DNA, 25 bp, Homo sapien
gtcagaagaattgaaggtacaacag

SEQ ID NO: 4284607 - DNA, 25 bp, Homo sapien
taatgtttataatgcgggtcagaag

SEQ ID NO: 4284608 - DNA, 25 bp, Homo sapien
tcaaatcacgcagcactggaggcgg

SEQ ID NO: 4284609 - DNA, 25 bp, Homo sapien
caggggtccaagctgacaagaagtc

SEQ ID NO: 4284610 - DNA, 25 bp, Homo sapien
cacagggggggcgaagcgttcaggg

SEQ ID NO: 4284611 - DNA, 25 bp, Homo sapien
ggtgggggctggccgatccacaggg

SEQ ID NO: 4284612 - DNA, 25 bp, Homo sapien
ttcaggggctgtccgcgtgggggcc

SEQ ID NO: 4284613 - DNA, 25 bp, Homo sapien
ctccatgttgctgtaggtgggggct

SEQ ID NO: 4284614 - DNA, 25 bp, Homo sapien
aacagaatacgaggacaggggttgg

SEQ ID NO: 4284615 - DNA, 25 bp, Homo sapien
ggcatcccgggggtgctggcttgga

SEQ ID NO: 4284616 - DNA, 25 bp, Homo sapien
acagcagcggcgttgagacagagag

SEQ ID NO: 4284617 - DNA, 25 bp, Homo sapien
ccagcatgccgcctggcatcccggg

SEQ ID NO: 4284618 - DNA, 25 bp, Homo sapien
tggacagacagccagatggatacac

SEQ ID NO: 4284619 - DNA, 25 bp, Homo sapien
gatacacaccctaggatactctgcc

SEQ ID NO: 4284620 - DNA, 25 bp, Homo sapien
tgggcctgaatagtctggttttatt

SEQ ID NO: 4284621 - DNA, 25 bp, Homo sapien
caggaagtagcttgggcagggccaa

SEQ ID NO: 4284622 - DNA, 25 bp, Homo sapien
acaaagtaccggaggcagccctcat

SEQ ID NO: 4284623 - DNA, 25 bp, Homo sapien
gagggccaccaaagccgccacggtg

SEQ ID NO: 4284624 - DNA, 25 bp, Homo sapien
tagaacacgttgagcacgagggcca

SEQ ID NO: 4284625 - DNA, 25 bp, Homo sapien
tcatctggtgtggtagggccacgtg

SEQ ID NO: 4284626 - DNA, 25 bp, Homo sapien
tcagggctgtccagagtaagagcac

SEQ ID NO: 4284627 - DNA, 25 bp, Homo sapien
cgattcatagagaacaggactgcca

SEQ ID NO: 4284628 - DNA, 25 bp, Homo sapien
caaataggccttgtcttgagtgcac

SEQ ID NO: 4284629 - DNA, 25 bp, Homo sapien
cagaaaagagatgtgcctacgccca

SEQ ID NO: 4284630 - DNA, 25 bp, Homo sapien
taggcataacgcgtcacaacctggc

SEQ ID NO: 4284631 - DNA, 25 bp, Homo sapien
ttccgccggcggtagaagagtacat

SEQ ID NO: 4284632 - DNA, 25 bp, Homo sapien
tgtgctgtcatcaaacaagcgccag

SEQ ID NO: 4284633 - DNA, 25 bp, Homo sapien
tggctctcgtctaccgttgtcactg

SEQ ID NO: 4284634 - DNA, 25 bp, Homo sapien
tatcctgctggctgtgtgtgccctc

SEQ ID NO: 4284635 - DNA, 25 bp, Homo sapien
tcctgctggctgtgtgtgccctcac

SEQ ID NO: 4284636 - DNA, 25 bp, Homo sapien
cctatcctgctggctgtgtgtgccc

SEQ ID NO: 4284637 - DNA, 25 bp, Homo sapien
cacctatcctgctggctgtgtgtgc

SEQ ID NO: 4284638 - DNA, 25 bp, Homo sapien
gctacgatcattgggcaggcgtgca

SEQ ID NO: 4284639 - DNA, 25 bp, Homo sapien
ctccatagtggttgatgacagcata

SEQ ID NO: 4284640 - DNA, 25 bp, Homo sapien
agcatatagatcgtagctgggcagc

SEQ ID NO: 4284641 - DNA, 25 bp, Homo sapien
cacgtcactgcgctgactgctacga

SEQ ID NO: 4284642 - DNA, 25 bp, Homo sapien
aaaactacgaaaggagaagcgcttg

SEQ ID NO: 4284643 - DNA, 25 bp, Homo sapien
tgcttggaggcctcacggtgctgtt

SEQ ID NO: 4284644 - DNA, 25 bp, Homo sapien
tcttgtcacgccagataaaactacg

SEQ ID NO: 4284645 - DNA, 25 bp, Homo sapien
cacgatgagaacatttggcaggcgc

SEQ ID NO: 4284646 - DNA, 25 bp, Homo sapien
cacaaactcctgcaagcgctcattg

SEQ ID NO: 4284647 - DNA, 25 bp, Homo sapien
ccttggaggctaccaacacaaactc

SEQ ID NO: 4284648 - DNA, 25 bp, Homo sapien
gcgctcattgttccgccagacgaga

SEQ ID NO: 4284649 - DNA, 25 bp, Homo sapien
gagccaggctacagtcgtcacccag

SEQ ID NO: 4284650 - DNA, 25 bp, Homo sapien
ggatgctggtacccaggcacagcag

SEQ ID NO: 4284651 - DNA, 25 bp, Homo sapien
ggtgtgtgggcattcatagcttcac

SEQ ID NO: 4284652 - DNA, 25 bp, Homo sapien
ttggatgctggtacccaggcacagc

SEQ ID NO: 4284653 - DNA, 25 bp, Homo sapien
ctttgtcctctagccgctgctctcg

SEQ ID NO: 4284654 - DNA, 25 bp, Homo sapien
aagggtggctggaatacactcacag

SEQ ID NO: 4284655 - DNA, 25 bp, Homo sapien
ctccagggaacctgtggagagcagt

SEQ ID NO: 4284656 - DNA, 25 bp, Homo sapien
tggcaaggagccaacctcaatgggc

SEQ ID NO: 4284657 - DNA, 25 bp, Homo sapien
atgcggcctggctgaaagggtggct

SEQ ID NO: 4284658 - DNA, 25 bp, Homo sapien
gggcatagccctctagcaactgagc

SEQ ID NO: 4284659 - DNA, 25 bp, Homo sapien
tagcaactgagcgaggcgggcataa

SEQ ID NO: 4284660 - DNA, 25 bp, Homo sapien
cataagtgaggcgtgaggcaggtac

SEQ ID NO: 4284661 - DNA, 25 bp, Homo sapien
tagccctctagcaactgagcgaggc

SEQ ID NO: 4284662 - DNA, 25 bp, Homo sapien
actgaccaggaaggggtagccaatg

SEQ ID NO: 4284663 - DNA, 25 bp, Homo sapien
gggtagccaatgttctcaggtcggc

SEQ ID NO: 4284664 - DNA, 25 bp, Homo sapien
caggaaggggtagccaatgttctca

SEQ ID NO: 4284665 - DNA, 25 bp, Homo sapien
tagccaatgttctcaggtcggcaga

SEQ ID NO: 4284666 - DNA, 25 bp, Homo sapien
tcagcttttcatcctccgactgttg

SEQ ID NO: 4284667 - DNA, 25 bp, Homo sapien
ctgttgcttccgctggcaggctgca

SEQ ID NO: 4284668 - DNA, 25 bp, Homo sapien
agcaccgggtacagcgcttcagctt

SEQ ID NO: 4284669 - DNA, 25 bp, Homo sapien
gttgcagtagcccacacggtagcac

SEQ ID NO: 4284670 - DNA, 25 bp, Homo sapien
cacgatgaaaacgattcttaattac

SEQ ID NO: 4284671 - DNA, 25 bp, Homo sapien
ggagggtaggaacacacgatgaaaa

SEQ ID NO: 4284672 - DNA, 25 bp, Homo sapien
ctctgaggatagcagctcaaagcag

SEQ ID NO: 4284673 - DNA, 25 bp, Homo sapien
acagtgtccagtgagtgggagggta

SEQ ID NO: 4284674 - DNA, 25 bp, Homo sapien
tgagagagggagtccaatacttcgc

SEQ ID NO: 4284675 - DNA, 25 bp, Homo sapien
ttcacatgaacactctgagagaggg

SEQ ID NO: 4284676 - DNA, 25 bp, Homo sapien
tccgccaaacgcaggttctcaggct

SEQ ID NO: 4284677 - DNA, 25 bp, Homo sapien
agtggagttctccttgctgacgctc

SEQ ID NO: 4284678 - DNA, 25 bp, Homo sapien
caccggcagataaagaaacgggtca

SEQ ID NO: 4284679 - DNA, 25 bp, Homo sapien
gggctctcgggcaaaataaaagaca

SEQ ID NO: 4284680 - DNA, 25 bp, Homo sapien
tgcttttgtggcaagggcaccggca

SEQ ID NO: 4284681 - DNA, 25 bp, Homo sapien
aagaaacgggtcaaaagtgatggag

SEQ ID NO: 4284682 - DNA, 25 bp, Homo sapien
gtactgcccctgaaataggtccacg

SEQ ID NO: 4284683 - DNA, 25 bp, Homo sapien
atcttgtgccgctgccatgcttcct

SEQ ID NO: 4284684 - DNA, 25 bp, Homo sapien
cagggcacaccagcttcgacttgta

SEQ ID NO: 4284685 - DNA, 25 bp, Homo sapien
tccacgatgaaagagtcattcctca

SEQ ID NO: 4284686 - DNA, 25 bp, Homo sapien
aatgcgattcaggtcctcgtgcagc

SEQ ID NO: 4284687 - DNA, 25 bp, Homo sapien
cttgttctgaatgcgattcaggtcc

SEQ ID NO: 4284688 - DNA, 25 bp, Homo sapien
aactggctggccttactcgccacaa

SEQ ID NO: 4284689 - DNA, 25 bp, Homo sapien
gaatccacggtctctgtgtagggct

SEQ ID NO: 4284690 - DNA, 25 bp, Homo sapien
gaagcagcacggcaaagccaatggc

SEQ ID NO: 4284691 - DNA, 25 bp, Homo sapien
agacgcccaccagtccctagtgggt

SEQ ID NO: 4284692 - DNA, 25 bp, Homo sapien
acagcgcccgaagcagcacggcaaa

SEQ ID NO: 4284693 - DNA, 25 bp, Homo sapien
ggttgttgtagttgatctcagcctc

SEQ ID NO: 4284694 - DNA, 25 bp, Homo sapien
cccggagttcccgagtgttggacag

SEQ ID NO: 4284695 - DNA, 25 bp, Homo sapien
catggaagaagtcccggagttcccg

SEQ ID NO: 4284696 - DNA, 25 bp, Homo sapien
gagttcccgagtgttggacagagac

SEQ ID NO: 4284697 - DNA, 25 bp, Homo sapien
agtgttggacagagactgaatgacg

SEQ ID NO: 4284698 - DNA, 25 bp, Homo sapien
tggcagacacaccttcttctcttcc

SEQ ID NO: 4284699 - DNA, 25 bp, Homo sapien
tcttcctcctcctccacgctgtctc

SEQ ID NO: 4284700 - DNA, 25 bp, Homo sapien
tcctcctcctccacgctgtctccac

SEQ ID NO: 4284701 - DNA, 25 bp, Homo sapien
ctggcagacacaccttcttctcttc

SEQ ID NO: 4284702 - DNA, 25 bp, Homo sapien
gggcatgggaggcaccatgcatgta

SEQ ID NO: 4284703 - DNA, 25 bp, Homo sapien
catgggaggcaccatgcatgtaggc

SEQ ID NO: 4284704 - DNA, 25 bp, Homo sapien
gcatgggaggcaccatgcatgtagg

SEQ ID NO: 4284705 - DNA, 25 bp, Homo sapien
tgggaggcaccatgcatgtaggctt

SEQ ID NO: 4284706 - DNA, 25 bp, Homo sapien
cctgtgtcctcagatcgtgccttgg

SEQ ID NO: 4284707 - DNA, 25 bp, Homo sapien
tacatgctccatgggtgtgcgggtt

SEQ ID NO: 4284708 - DNA, 25 bp, Homo sapien
gcacctcctggtggggttgaatcca

SEQ ID NO: 4284709 - DNA, 25 bp, Homo sapien
ggttgccacactgtctagccctgtg

SEQ ID NO: 4284710 - DNA, 25 bp, Homo sapien
ctgtcggcacggcaacctttgcacc

SEQ ID NO: 4284711 - DNA, 25 bp, Homo sapien
tcggcacggcaacctttgcaccacc

SEQ ID NO: 4284712 - DNA, 25 bp, Homo sapien
ggcacggcaacctttgcaccaccca

SEQ ID NO: 4284713 - DNA, 25 bp, Homo sapien
tgtcggcacggcaacctttgcacca

SEQ ID NO: 4284714 - DNA, 25 bp, Homo sapien
ccccagcgctgactctgcctcttac

SEQ ID NO: 4284715 - DNA, 25 bp, Homo sapien
ctcgtgcagccggggcctccaggcc

SEQ ID NO: 4284716 - DNA, 25 bp, Homo sapien
tcgtgcagccggggcctccaggccc

SEQ ID NO: 4284717 - DNA, 25 bp, Homo sapien
tccaggcccccccagcgctgactct

SEQ ID NO: 4284718 - DNA, 25 bp, Homo sapien
tgtcgatgcgagaagccgtgaaaca

SEQ ID NO: 4284719 - DNA, 25 bp, Homo sapien
aaggcagatgtcgatgcgagaagcc

SEQ ID NO: 4284720 - DNA, 25 bp, Homo sapien
agatgtcgatgcgagaagccgtgaa

SEQ ID NO: 4284721 - DNA, 25 bp, Homo sapien
tcgatgcgagaagccgtgaaacaga

SEQ ID NO: 4284722 - DNA, 25 bp, Homo sapien
agcttcacctgccaacggaaggtgg

SEQ ID NO: 4284723 - DNA, 25 bp, Homo sapien
ttcacctgccaacggaaggtggtgt

SEQ ID NO: 4284724 - DNA, 25 bp, Homo sapien
tgagcttcacctgccaacggaaggt

SEQ ID NO: 4284725 - DNA, 25 bp, Homo sapien
gcttcacctgccaacggaaggtggt

SEQ ID NO: 4284726 - DNA, 25 bp, Homo sapien
catacgagtcattcttgacaaacgc

SEQ ID NO: 4284727 - DNA, 25 bp, Homo sapien
tgcagatctccttcacgtacacgtg

SEQ ID NO: 4284728 - DNA, 25 bp, Homo sapien
gaatccgggcccttctcatacgagt

SEQ ID NO: 4284729 - DNA, 25 bp, Homo sapien
tgagcgtgaagtcctgctcacggaa

SEQ ID NO: 4284730 - DNA, 25 bp, Homo sapien
gtttctgctccggaccatggctgga

SEQ ID NO: 4284731 - DNA, 25 bp, Homo sapien
gagttcagcggtggtatgcaaagct

SEQ ID NO: 4284732 - DNA, 25 bp, Homo sapien
tccaccaaggttgcagcatctgctg

SEQ ID NO: 4284733 - DNA, 25 bp, Homo sapien
agactgggtcattcccgggaggcac

SEQ ID NO: 4284734 - DNA, 25 bp, Homo sapien
ggtggctgggtcagccacgaagggt

SEQ ID NO: 4284735 - DNA, 25 bp, Homo sapien
tgcagagatgcacagccctcttggc

SEQ ID NO: 4284736 - DNA, 25 bp, Homo sapien
tcagccacgaagggtggggcatcac

SEQ ID NO: 4284737 - DNA, 25 bp, Homo sapien
tcatccctggacccgtccccctctg

SEQ ID NO: 4284738 - DNA, 25 bp, Homo sapien
cagggcaatgggagacagttcctgc

SEQ ID NO: 4284739 - DNA, 25 bp, Homo sapien
gcctcctgcttagcccggtggggct

SEQ ID NO: 4284740 - DNA, 25 bp, Homo sapien
ggcaatgggagacagttcctgccca

SEQ ID NO: 4284741 - DNA, 25 bp, Homo sapien
atgggagacagttcctgcccattct

SEQ ID NO: 4284742 - DNA, 25 bp, Homo sapien
gggagggccacgtgagcataggcac

SEQ ID NO: 4284743 - DNA, 25 bp, Homo sapien
gagggagggccacgtgagcataggc

SEQ ID NO: 4284744 - DNA, 25 bp, Homo sapien
agggagggccacgtgagcataggca

SEQ ID NO: 4284745 - DNA, 25 bp, Homo sapien
caagagctttttatctcagcataga

SEQ ID NO: 4284746 - DNA, 25 bp, Homo sapien
gcatagaagacaccaccccactgct

SEQ ID NO: 4284747 - DNA, 25 bp, Homo sapien
cgggtttgcactttagcacaagagc

SEQ ID NO: 4284748 - DNA, 25 bp, Homo sapien
caggagactgcccttgcgggtttgc

SEQ ID NO: 4284749 - DNA, 25 bp, Homo sapien
gcaaaccgcaccacacagtctgtat

SEQ ID NO: 4284750 - DNA, 25 bp, Homo sapien
accgcaccacacagtctgtatctgt

SEQ ID NO: 4284751 - DNA, 25 bp, Homo sapien
ctgcaaaccgcaccacacagtctgt

SEQ ID NO: 4284752 - DNA, 25 bp, Homo sapien
aaaccgcaccacacagtctgtatct

SEQ ID NO: 4284753 - DNA, 25 bp, Homo sapien
ctactcccacacgaagcttgacaat

SEQ ID NO: 4284754 - DNA, 25 bp, Homo sapien
ctctgcctccaatcgagcaacaact

SEQ ID NO: 4284755 - DNA, 25 bp, Homo sapien
actcccacacgaagcttgacaatca

SEQ ID NO: 4284756 - DNA, 25 bp, Homo sapien
gcactctgcctccaatcgagcaaca

SEQ ID NO: 4284757 - DNA, 25 bp, Homo sapien
gagtgggagtagccaagagatcatg

SEQ ID NO: 4284758 - DNA, 25 bp, Homo sapien
ggagtagccaagagatcatgagggt

SEQ ID NO: 4284759 - DNA, 25 bp, Homo sapien
agtgggagtagccaagagatcatga

SEQ ID NO: 4284760 - DNA, 25 bp, Homo sapien
tgggagtagccaagagatcatgagg

SEQ ID NO: 4284761 - DNA, 25 bp, Homo sapien
tggatgctgaccctgacgatgaagg

SEQ ID NO: 4284762 - DNA, 25 bp, Homo sapien
ggatgctgaccctgacgatgaagga

SEQ ID NO: 4284763 - DNA, 25 bp, Homo sapien
ccgccagacatcttgagccgcttgg

SEQ ID NO: 4284764 - DNA, 25 bp, Homo sapien
tcctggcccagctatcttggcaact

SEQ ID NO: 4284765 - DNA, 25 bp, Homo sapien
agccgcttggtcgacagccagagtg

SEQ ID NO: 4284766 - DNA, 25 bp, Homo sapien
tcctggtttgctcgatccttctgct

SEQ ID NO: 4284767 - DNA, 25 bp, Homo sapien
caaattctccagcaaggaacggaca

SEQ ID NO: 4284768 - DNA, 25 bp, Homo sapien
aattctccagcaaggaacggacagc

SEQ ID NO: 4284769 - DNA, 25 bp, Homo sapien
aaattctccagcaaggaacggacag

SEQ ID NO: 4284770 - DNA, 25 bp, Homo sapien
tccttcactctcactggctgcttag

SEQ ID NO: 4284771 - DNA, 25 bp, Homo sapien
actctcactggctgcttagtcacca

SEQ ID NO: 4284772 - DNA, 25 bp, Homo sapien
tttccttcactctcactggctgctt

SEQ ID NO: 4284773 - DNA, 25 bp, Homo sapien
ttcactctcactggctgcttagtca

SEQ ID NO: 4284774 - DNA, 25 bp, Homo sapien
acctcttcagcagcaaccctgctcc

SEQ ID NO: 4284775 - DNA, 25 bp, Homo sapien
tgaaccagtagcaggacagataatg

SEQ ID NO: 4284776 - DNA, 25 bp, Homo sapien
tgagccacaaggaccactacagttt

SEQ ID NO: 4284777 - DNA, 25 bp, Homo sapien
ggatctttaatgacacctgccaccg

SEQ ID NO: 4284778 - DNA, 25 bp, Homo sapien
gatggcaggatacccttctacaggt

SEQ ID NO: 4284779 - DNA, 25 bp, Homo sapien
gctggccacaggcatagcgtaacgg

SEQ ID NO: 4284780 - DNA, 25 bp, Homo sapien
tctcccacgaagttgccctcgctgg

SEQ ID NO: 4284781 - DNA, 25 bp, Homo sapien
ggtcgagctgcgacccagcttcagc

SEQ ID NO: 4284782 - DNA, 25 bp, Homo sapien
acagatcagcgccccggtcgagctg

SEQ ID NO: 4284783 - DNA, 25 bp, Homo sapien
tagggactggcacggcccgtgacct

SEQ ID NO: 4284784 - DNA, 25 bp, Homo sapien
caagccagcgagttgcagcctgctc

SEQ ID NO: 4284785 - DNA, 25 bp, Homo sapien
gcggccaagccagcgagttgcagcc

SEQ ID NO: 4284786 - DNA, 25 bp, Homo sapien
gcacggcccgtgaccttgaacaggc

SEQ ID NO: 4284787 - DNA, 25 bp, Homo sapien
tcgacttctagctaaggccgaggga

SEQ ID NO: 4284788 - DNA, 25 bp, Homo sapien
ggcaacctcgaggttcccctggaga

SEQ ID NO: 4284789 - DNA, 25 bp, Homo sapien
ggagcgccaagctggtgacgcactt

SEQ ID NO: 4284790 - DNA, 25 bp, Homo sapien
gccttagcggcttgttttgtttcga

SEQ ID NO: 4284791 - DNA, 25 bp, Homo sapien
catgtggggcagtgctaggaactgg

SEQ ID NO: 4284792 - DNA, 25 bp, Homo sapien
tattgggggccctgccgggccaaga

SEQ ID NO: 4284793 - DNA, 25 bp, Homo sapien
tcagtgcataggcagacatgcatgt

SEQ ID NO: 4284794 - DNA, 25 bp, Homo sapien
atgcatgtggggcagtgctaggaac

SEQ ID NO: 4284795 - DNA, 25 bp, Homo sapien
tggcttgaagcacgctgcgcatcct

SEQ ID NO: 4284796 - DNA, 25 bp, Homo sapien
gcctccaacccgtccaactgggctg

SEQ ID NO: 4284797 - DNA, 25 bp, Homo sapien
gggctgccttactctccagtgcccg

SEQ ID NO: 4284798 - DNA, 25 bp, Homo sapien
gtgcccgctcattttcctcataggt

SEQ ID NO: 4284799 - DNA, 25 bp, Homo sapien
gtttcccgcagtcttgtgtctctgg

SEQ ID NO: 4284800 - DNA, 25 bp, Homo sapien
gcagcttgtcctgagcggcttgcaa

SEQ ID NO: 4284801 - DNA, 25 bp, Homo sapien
accttgggccttgcgctcagctagg

SEQ ID NO: 4284802 - DNA, 25 bp, Homo sapien
tcatcccgcagttgttctgcccttg

SEQ ID NO: 4284803 - DNA, 25 bp, Homo sapien
tggtactgatcacccagaggaccgc

SEQ ID NO: 4284804 - DNA, 25 bp, Homo sapien
agccctttcacctgcagagctcagt

SEQ ID NO: 4284805 - DNA, 25 bp, Homo sapien
agagcatccaactgccgagcccttt

SEQ ID NO: 4284806 - DNA, 25 bp, Homo sapien
gcagagctcagtgcccgctctgcac

SEQ ID NO: 4284807 - DNA, 25 bp, Homo sapien
tcctgcccgtttcaatttcagagcc

SEQ ID NO: 4284808 - DNA, 25 bp, Homo sapien
cactgccccccggatggcaccctgg

SEQ ID NO: 4284809 - DNA, 25 bp, Homo sapien
ctgtgtcccgtgtgtcagccactgc

SEQ ID NO: 4284810 - DNA, 25 bp, Homo sapien
actgccccccggatggcaccctggg

SEQ ID NO: 4284811 - DNA, 25 bp, Homo sapien
cagggtctgctctgtgtcccgtgtg

SEQ ID NO: 4284812 - DNA, 25 bp, Homo sapien
gccttctgtttctcatcctcagccc

SEQ ID NO: 4284813 - DNA, 25 bp, Homo sapien
ctccagtgctgcctgtactgtctct

SEQ ID NO: 4284814 - DNA, 25 bp, Homo sapien
gcctgtactgtctctgccttctgtt

SEQ ID NO: 4284815 - DNA, 25 bp, Homo sapien
tgccttctgtttctcatcctcagcc

SEQ ID NO: 4284816 - DNA, 25 bp, Homo sapien
ctggaggtatcaaaaccaggtgtca

SEQ ID NO: 4284817 - DNA, 25 bp, Homo sapien
tggaggtatcaaaaccaggtgtcag

SEQ ID NO: 4284818 - DNA, 25 bp, Homo sapien
aacctggaggtatcaaaaccaggtg

SEQ ID NO: 4284819 - DNA, 25 bp, Homo sapien
cctggaggtatcaaaaccaggtgtc

SEQ ID NO: 4284820 - DNA, 25 bp, Homo sapien
gctgctcggcacgacgcacatctcc

SEQ ID NO: 4284821 - DNA, 25 bp, Homo sapien
tgctcggcacgacgcacatctccta

SEQ ID NO: 4284822 - DNA, 25 bp, Homo sapien
agtagctgctcggcacgacgcacat

SEQ ID NO: 4284823 - DNA, 25 bp, Homo sapien
tagctgctcggcacgacgcacatct

SEQ ID NO: 4284824 - DNA, 25 bp, Homo sapien
tggagagctctagcacccgtgtggc

SEQ ID NO: 4284825 - DNA, 25 bp, Homo sapien
tttcaatgctatcaggatcagcccc

SEQ ID NO: 4284826 - DNA, 25 bp, Homo sapien
gccaggatcgcatccacatctgcca

SEQ ID NO: 4284827 - DNA, 25 bp, Homo sapien
ctctgcaatcgcacccgccaggtgc

SEQ ID NO: 4284828 - DNA, 25 bp, Homo sapien
catatgggcaataactcaggagcca

SEQ ID NO: 4284829 - DNA, 25 bp, Homo sapien
catggacctgggaccacatatgggc

SEQ ID NO: 4284830 - DNA, 25 bp, Homo sapien
cacaaggacagggactatacaaggg

SEQ ID NO: 4284831 - DNA, 25 bp, Homo sapien
gagatacagacaccgggagttgcca

SEQ ID NO: 4284832 - DNA, 25 bp, Homo sapien
cctgtcccctggaagcattagcctt

SEQ ID NO: 4284833 - DNA, 25 bp, Homo sapien
tgctgtagccgctgccccattgcag

SEQ ID NO: 4284834 - DNA, 25 bp, Homo sapien
ccggcccagtgctaggtctgctgta

SEQ ID NO: 4284835 - DNA, 25 bp, Homo sapien
ttgtagcacagggtgcatcccctgg

SEQ ID NO: 4284836 - DNA, 25 bp, Homo sapien
gccaggcacagaacaagtcagggcc

SEQ ID NO: 4284837 - DNA, 25 bp, Homo sapien
tgccaggcacagaacaagtcagggc

SEQ ID NO: 4284838 - DNA, 25 bp, Homo sapien
ctgccaggcacagaacaagtcaggg

SEQ ID NO: 4284839 - DNA, 25 bp, Homo sapien
caggcacagaacaagtcagggccct

SEQ ID NO: 4284840 - DNA, 25 bp, Homo sapien
tcacagggctaggtactgccagggc

SEQ ID NO: 4284841 - DNA, 25 bp, Homo sapien
tctgcagactggctatgggcatgcc

SEQ ID NO: 4284842 - DNA, 25 bp, Homo sapien
ggctgaggtattggcacgacgttct

SEQ ID NO: 4284843 - DNA, 25 bp, Homo sapien
cacttgccgagttgctcacagggct

SEQ ID NO: 4284844 - DNA, 25 bp, Homo sapien
agctgaagactgaccctggtccacc

SEQ ID NO: 4284845 - DNA, 25 bp, Homo sapien
tggtccacctgcctagttggctaac

SEQ ID NO: 4284846 - DNA, 25 bp, Homo sapien
tccacctgcctagttggctaacaac

SEQ ID NO: 4284847 - DNA, 25 bp, Homo sapien
gcagaggcagacagtcagctgaaga

SEQ ID NO: 4284848 - DNA, 25 bp, Homo sapien
taagtgcaagcctatctcgctccag

SEQ ID NO: 4284849 - DNA, 25 bp, Homo sapien
aagtcaagatgctggtcgagctgcc

SEQ ID NO: 4284850 - DNA, 25 bp, Homo sapien
gagctgccgcagtgtgagattaagt

SEQ ID NO: 4284851 - DNA, 25 bp, Homo sapien
cagaccacttagtgcatggttggca

SEQ ID NO: 4284852 - DNA, 25 bp, Homo sapien
tgcagtgacctgtgaagcggtgaca

SEQ ID NO: 4284853 - DNA, 25 bp, Homo sapien
gacactgaggtgtatctattccacg

SEQ ID NO: 4284854 - DNA, 25 bp, Homo sapien
tattccacgagagtcacaatcacag

SEQ ID NO: 4284855 - DNA, 25 bp, Homo sapien
tctaggcgctgtgtacgggctgcca

SEQ ID NO: 4284856 - DNA, 25 bp, Homo sapien
ctccaaagccggcacggcagtggca

SEQ ID NO: 4284857 - DNA, 25 bp, Homo sapien
cagtggagctcttggcactcagaac

SEQ ID NO: 4284858 - DNA, 25 bp, Homo sapien
cggcacggcagtggcactgccctgt

SEQ ID NO: 4284859 - DNA, 25 bp, Homo sapien
gctcttggcactcagaacaagtccg

SEQ ID NO: 4284860 - DNA, 25 bp, Homo sapien
gggtcagagcctctataagaggcta

SEQ ID NO: 4284861 - DNA, 25 bp, Homo sapien
ggtcagagcctctataagaggctaa

SEQ ID NO: 4284862 - DNA, 25 bp, Homo sapien
tcagagcctctataagaggctaagc

SEQ ID NO: 4284863 - DNA, 25 bp, Homo sapien
cagagcctctataagaggctaagcc

SEQ ID NO: 4284864 - DNA, 25 bp, Homo sapien
gcccggcttgggtggcaggcacaag

SEQ ID NO: 4284865 - DNA, 25 bp, Homo sapien
cggcttgggtggcaggcacaaggct

SEQ ID NO: 4284866 - DNA, 25 bp, Homo sapien
ccggcttgggtggcaggcacaaggc

SEQ ID NO: 4284867 - DNA, 25 bp, Homo sapien
cccggcttgggtggcaggcacaagg

SEQ ID NO: 4284868 - DNA, 25 bp, Homo sapien
gggccctggacattggggaggcatg

SEQ ID NO: 4284869 - DNA, 25 bp, Homo sapien
ggccctggacattggggaggcatgg

SEQ ID NO: 4284870 - DNA, 25 bp, Homo sapien
gccctggacattggggaggcatggg

SEQ ID NO: 4284871 - DNA, 25 bp, Homo sapien
tcaggagatgggcactgctgcggat

SEQ ID NO: 4284872 - DNA, 25 bp, Homo sapien
tgctgcggatttgtgcccagcaggt

SEQ ID NO: 4284873 - DNA, 25 bp, Homo sapien
cactgctgcggatttgtgcccagca

SEQ ID NO: 4284874 - DNA, 25 bp, Homo sapien
atgggcactgctgcggatttgtgcc

SEQ ID NO: 4284875 - DNA, 25 bp, Homo sapien
caggcatcaggatccattgggtcaa

SEQ ID NO: 4284876 - DNA, 25 bp, Homo sapien
cttgcagtgggcacagtgtggaccc

SEQ ID NO: 4284877 - DNA, 25 bp, Homo sapien
gtgacagctctgtcgggcagcctgc

SEQ ID NO: 4284878 - DNA, 25 bp, Homo sapien
cctctgtgtggtgtaaacagcgcag

SEQ ID NO: 4284879 - DNA, 25 bp, Homo sapien
attcatcctggtggcaagaagtagc

SEQ ID NO: 4284880 - DNA, 25 bp, Homo sapien
ccgtatagcctgcccggcagtggca

SEQ ID NO: 4284881 - DNA, 25 bp, Homo sapien
aagtagcaaagtgccgttggctccc

SEQ ID NO: 4284882 - DNA, 25 bp, Homo sapien
gtggcacacaatctgctgggaatat

SEQ ID NO: 4284883 - DNA, 25 bp, Homo sapien
acacatggccggcagctagggaatc

SEQ ID NO: 4284884 - DNA, 25 bp, Homo sapien
aaaggcaccagttcgacagagacat

SEQ ID NO: 4284885 - DNA, 25 bp, Homo sapien
cattgcccactggtcttttcacaga

SEQ ID NO: 4284886 - DNA, 25 bp, Homo sapien
caagcgcctgtgtgggtgttgcact

SEQ ID NO: 4284887 - DNA, 25 bp, Homo sapien
gagagaacagtaatgggaaggagag

SEQ ID NO: 4284888 - DNA, 25 bp, Homo sapien
gagagagaagcataggagggaacaa

SEQ ID NO: 4284889 - DNA, 25 bp, Homo sapien
aatggaagagaactacaactgaccc

SEQ ID NO: 4284890 - DNA, 25 bp, Homo sapien
cccaggttgagagtagagggtccaa

SEQ ID NO: 4284891 - DNA, 25 bp, Homo sapien
gaaccttgagggttgcactgacatg

SEQ ID NO: 4284892 - DNA, 25 bp, Homo sapien
gcccaaccactccaggcttgcacag

SEQ ID NO: 4284893 - DNA, 25 bp, Homo sapien
ctcagtgaaccttgagggttgcact

SEQ ID NO: 4284894 - DNA, 25 bp, Homo sapien
accaccatgagggttgcactcagaa

SEQ ID NO: 4284895 - DNA, 25 bp, Homo sapien
aacatctctagcaccaggacacggg

SEQ ID NO: 4284896 - DNA, 25 bp, Homo sapien
cgcaggcctcagagggagaagtctt

SEQ ID NO: 4284897 - DNA, 25 bp, Homo sapien
cattggtagcgttcaaaggtggcct

SEQ ID NO: 4284898 - DNA, 25 bp, Homo sapien
gcagggcaccattgtagatgagggt

SEQ ID NO: 4284899 - DNA, 25 bp, Homo sapien
tggtgtgggcaagaggagattattc

SEQ ID NO: 4284900 - DNA, 25 bp, Homo sapien
ggttggtgtgggcaagaggagatta

SEQ ID NO: 4284901 - DNA, 25 bp, Homo sapien
gtgtgggcaagaggagattattcac

SEQ ID NO: 4284902 - DNA, 25 bp, Homo sapien
ttggttggtgtgggcaagaggagat

SEQ ID NO: 4284903 - DNA, 25 bp, Homo sapien
agagtagggagtctcaggctgggca

SEQ ID NO: 4284904 - DNA, 25 bp, Homo sapien
cagagtagggagtctcaggctgggc

SEQ ID NO: 4284905 - DNA, 25 bp, Homo sapien
gcaggccaggtccagagtagggagt

SEQ ID NO: 4284906 - DNA, 25 bp, Homo sapien
gccaggtccagagtagggagtctca

SEQ ID NO: 4284907 - DNA, 25 bp, Homo sapien
agataccaggctcaaggcagacagg

SEQ ID NO: 4284908 - DNA, 25 bp, Homo sapien
gagataccaggctcaaggcagacag

SEQ ID NO: 4284909 - DNA, 25 bp, Homo sapien
agcttcagatgcagcttgtaggaga

SEQ ID NO: 4284910 - DNA, 25 bp, Homo sapien
gcagcttgtaggagataccaggctc

SEQ ID NO: 4284911 - DNA, 25 bp, Homo sapien
ctggcatgtggttgcagagtccctt

SEQ ID NO: 4284912 - DNA, 25 bp, Homo sapien
gctgcacaatcagttccaactctgc

SEQ ID NO: 4284913 - DNA, 25 bp, Homo sapien
ccttggatgcgatcatccttgggca

SEQ ID NO: 4284914 - DNA, 25 bp, Homo sapien
cctggacgctgcacaatcagttcca

SEQ ID NO: 4284915 - DNA, 25 bp, Homo sapien
gttcagccccagattagataacagg

SEQ ID NO: 4284916 - DNA, 25 bp, Homo sapien
cagccccagattagataacagggtc

SEQ ID NO: 4284917 - DNA, 25 bp, Homo sapien
gaggagatgctcccacacccagagg

SEQ ID NO: 4284918 - DNA, 25 bp, Homo sapien
gaggttcagccccagattagataac

SEQ ID NO: 4284919 - DNA, 25 bp, Homo sapien
agcagcaggtcatagtccatagcct

SEQ ID NO: 4284920 - DNA, 25 bp, Homo sapien
tgtagccgcacgaagcctgagccag

SEQ ID NO: 4284921 - DNA, 25 bp, Homo sapien
ggtcatagtccatagccttcggcac

SEQ ID NO: 4284922 - DNA, 25 bp, Homo sapien
ctgaccttcctgtagccgcacgaag

SEQ ID NO: 4284923 - DNA, 25 bp, Homo sapien
aggttgcacctgctcacagcgtcgc

SEQ ID NO: 4284924 - DNA, 25 bp, Homo sapien
gaagggccggaagtagccaggttgc

SEQ ID NO: 4284925 - DNA, 25 bp, Homo sapien
tgctggcggcagtggcattgacctg

SEQ ID NO: 4284926 - DNA, 25 bp, Homo sapien
gaagtagccaggttgcacctgctca

SEQ ID NO: 4284927 - DNA, 25 bp, Homo sapien
cggcagccgagcaggtcgtggctca

SEQ ID NO: 4284928 - DNA, 25 bp, Homo sapien
caccacccacgtcgcagtcacaggg

SEQ ID NO: 4284929 - DNA, 25 bp, Homo sapien
ggatccaaagcaccacccacgtcgc

SEQ ID NO: 4284930 - DNA, 25 bp, Homo sapien
aaagcaccacccacgtcgcagtcac

SEQ ID NO: 4284931 - DNA, 25 bp, Homo sapien
tgcagtaacaggatccactgttggg

SEQ ID NO: 4284932 - DNA, 25 bp, Homo sapien
acatccacgtccagtcactagacgt

SEQ ID NO: 4284933 - DNA, 25 bp, Homo sapien
tcacaaggagtgctcccaggcactg

SEQ ID NO: 4284934 - DNA, 25 bp, Homo sapien
tgtgccccgtgcattacattgacat

SEQ ID NO: 4284935 - DNA, 25 bp, Homo sapien
gagtgcccaccacatgttctttgca

SEQ ID NO: 4284936 - DNA, 25 bp, Homo sapien
cagtgcagggtcatcatgggaatca

SEQ ID NO: 4284937 - DNA, 25 bp, Homo sapien
tcactgatgctgagcccaaagaagc

SEQ ID NO: 4284938 - DNA, 25 bp, Homo sapien
gaccaccgtcttgagaacccatggg

SEQ ID NO: 4284939 - DNA, 25 bp, Homo sapien
tggcgcccagctgtgttatgctgac

SEQ ID NO: 4284940 - DNA, 25 bp, Homo sapien
cccgcaggtccttggttgggtcacg

SEQ ID NO: 4284941 - DNA, 25 bp, Homo sapien
tcacggtagaagaagggccgacaga

SEQ ID NO: 4284942 - DNA, 25 bp, Homo sapien
gccgacagagctcacagtggcgccc

SEQ ID NO: 4284943 - DNA, 25 bp, Homo sapien
tacggccatgtcgaagtggcagctg

SEQ ID NO: 4284944 - DNA, 25 bp, Homo sapien
caggtatacggccatgtcgaagtgg

SEQ ID NO: 4284945 - DNA, 25 bp, Homo sapien
gatgccaggtatacggccatgtcga

SEQ ID NO: 4284946 - DNA, 25 bp, Homo sapien
cagatgccaggtatacggccatgtc

SEQ ID NO: 4284947 - DNA, 25 bp, Homo sapien
actgctcgcagttgaggccacgtgt

SEQ ID NO: 4284948 - DNA, 25 bp, Homo sapien
gatagaaatcctgacactgctcgca

SEQ ID NO: 4284949 - DNA, 25 bp, Homo sapien
tgtttgcagatgcaagctccgtgca

SEQ ID NO: 4284950 - DNA, 25 bp, Homo sapien
atgactatggccgtcctcagccgga

SEQ ID NO: 4284951 - DNA, 25 bp, Homo sapien
cgtgtccgtagcagaagcagttgcc

SEQ ID NO: 4284952 - DNA, 25 bp, Homo sapien
gatctccctccgtgggtcgagtagg

SEQ ID NO: 4284953 - DNA, 25 bp, Homo sapien
tagacgagtcaggttcacccgtagg

SEQ ID NO: 4284954 - DNA, 25 bp, Homo sapien
cacgtacaaccagctcatagagggc

SEQ ID NO: 4284955 - DNA, 25 bp, Homo sapien
ggatggcagggtccagcacacgata

SEQ ID NO: 4284956 - DNA, 25 bp, Homo sapien
gcagggtccagcacacgatagatga

SEQ ID NO: 4284957 - DNA, 25 bp, Homo sapien
tgggatagggatggcagggtccagc

SEQ ID NO: 4284958 - DNA, 25 bp, Homo sapien
ctgaatccgtgagctgtaggggtct

SEQ ID NO: 4284959 - DNA, 25 bp, Homo sapien
tagcgggactcacagactacatcat

SEQ ID NO: 4284960 - DNA, 25 bp, Homo sapien
gctgagcgttccaccagcatggcag

SEQ ID NO: 4284961 - DNA, 25 bp, Homo sapien
gagaaatatcggtacacatgccagg

SEQ ID NO: 4284962 - DNA, 25 bp, Homo sapien
acatgccaggtgcggccaaagtctg

SEQ ID NO: 4284963 - DNA, 25 bp, Homo sapien
cagctggatggtgaccgcagggata

SEQ ID NO: 4284964 - DNA, 25 bp, Homo sapien
ccagctggatggtgaccgcagggat

SEQ ID NO: 4284965 - DNA, 25 bp, Homo sapien
agctggatggtgaccgcagggatac

SEQ ID NO: 4284966 - DNA, 25 bp, Homo sapien
ggtgactacattctggatgcgatgg

SEQ ID NO: 4284967 - DNA, 25 bp, Homo sapien
ggtgcaaagctggtgactacattct

SEQ ID NO: 4284968 - DNA, 25 bp, Homo sapien
gctgcccgccgctgtggtgcaaagc

SEQ ID NO: 4284969 - DNA, 25 bp, Homo sapien
tgcccgccgctgtggtgcaaagctg

SEQ ID NO: 4284970 - DNA, 25 bp, Homo sapien
gggcgccgggagtcacaaaggaagc

SEQ ID NO: 4284971 - DNA, 25 bp, Homo sapien
ctgtgtgggttgtctctagcagaga

SEQ ID NO: 4284972 - DNA, 25 bp, Homo sapien
ggcgccgggagtcacaaaggaagca

SEQ ID NO: 4284973 - DNA, 25 bp, Homo sapien
ttgtctctagcagagaaggggcgcc

SEQ ID NO: 4284974 - DNA, 25 bp, Homo sapien
caggccacaagtggatgaggcagtc

SEQ ID NO: 4284975 - DNA, 25 bp, Homo sapien
tggatgaggcagtcagtctgtcagc

SEQ ID NO: 4284976 - DNA, 25 bp, Homo sapien
caggtgactgacgatgcagtagggc

SEQ ID NO: 4284977 - DNA, 25 bp, Homo sapien
ggcagtcagtctgtcagctcggccc

SEQ ID NO: 4284978 - DNA, 25 bp, Homo sapien
ctggaacagccaggcacatccgggg

SEQ ID NO: 4284979 - DNA, 25 bp, Homo sapien
ggaacagccaggcacatccggggca

SEQ ID NO: 4284980 - DNA, 25 bp, Homo sapien
gcctgtgccagtgtggcagccagca

SEQ ID NO: 4284981 - DNA, 25 bp, Homo sapien
gggcaggggcctgtgccagtgtggc

SEQ ID NO: 4284982 - DNA, 25 bp, Homo sapien
ttagcagtaggcccagtcgaagttc

SEQ ID NO: 4284983 - DNA, 25 bp, Homo sapien
cgcttagcagtaggcccagtcgaag

SEQ ID NO: 4284984 - DNA, 25 bp, Homo sapien
cagtaggcccagtcgaagttcccag

SEQ ID NO: 4284985 - DNA, 25 bp, Homo sapien
agcagtaggcccagtcgaagttccc

SEQ ID NO: 4284986 - DNA, 25 bp, Homo sapien
ctttggggttccgtgtcaactctgc

SEQ ID NO: 4284987 - DNA, 25 bp, Homo sapien
cttgctttggggttccgtgtcaact

SEQ ID NO: 4284988 - DNA, 25 bp, Homo sapien
gaggtgaacggtctcgggcccgagc

SEQ ID NO: 4284989 - DNA, 25 bp, Homo sapien
ctccttgctttggggttccgtgtca

SEQ ID NO: 4284990 - DNA, 25 bp, Homo sapien
agagtccagcgactttgagcaaagt

SEQ ID NO: 4284991 - DNA, 25 bp, Homo sapien
ggaaaggccggagcggattctggga

SEQ ID NO: 4284992 - DNA, 25 bp, Homo sapien
agcggtccctccgacagcttagagt

SEQ ID NO: 4284993 - DNA, 25 bp, Homo sapien
attctgggaaggagcgcaacaccgg

SEQ ID NO: 4284994 - DNA, 25 bp, Homo sapien
tcaccctgaggatcatgtagtcaac

SEQ ID NO: 4284995 - DNA, 25 bp, Homo sapien
ttattctggatatccggagtagagg

SEQ ID NO: 4284996 - DNA, 25 bp, Homo sapien
cggagtagaggtctccagtcaccct

SEQ ID NO: 4284997 - DNA, 25 bp, Homo sapien
tctggatatccggagtagaggtctc

SEQ ID NO: 4284998 - DNA, 25 bp, Homo sapien
ggcactgacagccagctccacactt

SEQ ID NO: 4284999 - DNA, 25 bp, Homo sapien
gggaaggggcactgacagccagctc

SEQ ID NO: 4285000 - DNA, 25 bp, Homo sapien
agctccacacttgtggtgtccacac

SEQ ID NO: 4285001 - DNA, 25 bp, Homo sapien
tccacacttgtggtgtccacacctt

SEQ ID NO: 4285002 - DNA, 25 bp, Homo sapien
cctgtggagcttgctatggcctgga

SEQ ID NO: 4285003 - DNA, 25 bp, Homo sapien
catgaggaagcgctggatgatctgc

SEQ ID NO: 4285004 - DNA, 25 bp, Homo sapien
tgatctgcacggctgcttgcatgtg

SEQ ID NO: 4285005 - DNA, 25 bp, Homo sapien
catgtgggtcatggcagtcatgccc

SEQ ID NO: 4285006 - DNA, 25 bp, Homo sapien
ctcagccctaagatgccctctctga

SEQ ID NO: 4285007 - DNA, 25 bp, Homo sapien
gccctaagatgccctctctgaagaa

SEQ ID NO: 4285008 - DNA, 25 bp, Homo sapien
cagccctaagatgccctctctgaag

SEQ ID NO: 4285009 - DNA, 25 bp, Homo sapien
gtgtgaatcacagctgggcaagatg

SEQ ID NO: 4285010 - DNA, 25 bp, Homo sapien
agggtcaccccaatacccattctgc

SEQ ID NO: 4285011 - DNA, 25 bp, Homo sapien
tcagggtcaccccaatacccattct

SEQ ID NO: 4285012 - DNA, 25 bp, Homo sapien
tctgcaactgggagcatttgcagct

SEQ ID NO: 4285013 - DNA, 25 bp, Homo sapien
gctcagggtcaccccaatacccatt

SEQ ID NO: 4285014 - DNA, 25 bp, Homo sapien
gatatgcccactcatgctgtccaca

SEQ ID NO: 4285015 - DNA, 25 bp, Homo sapien
ggtaaacagaagactaggatatgcc

SEQ ID NO: 4285016 - DNA, 25 bp, Homo sapien
ggaactcccatgatagaggctggaa

SEQ ID NO: 4285017 - DNA, 25 bp, Homo sapien
accgctggcccaagcctagagtggg

SEQ ID NO: 4285018 - DNA, 25 bp, Homo sapien
agttatctggacgttcacttcttcc

SEQ ID NO: 4285019 - DNA, 25 bp, Homo sapien
ttcctccaaatagttatctggacgt

SEQ ID NO: 4285020 - DNA, 25 bp, Homo sapien
gcttctgaccctcctgatacttata

SEQ ID NO: 4285021 - DNA, 25 bp, Homo sapien
tgctggagaacctggccaagtttgg

SEQ ID NO: 4285022 - DNA, 25 bp, Homo sapien
ttgtaacattcgaggcaaagagagg

SEQ ID NO: 4285023 - DNA, 25 bp, Homo sapien
ttccttggactaagtcttcctctaa

SEQ ID NO: 4285024 - DNA, 25 bp, Homo sapien
cttggactaagtcttcctctaaaca

SEQ ID NO: 4285025 - DNA, 25 bp, Homo sapien
gcaaagagtttgtaacattcgaggc

SEQ ID NO: 4285026 - DNA, 25 bp, Homo sapien
tcaaggttaaatcagaaggtgggcc

SEQ ID NO: 4285027 - DNA, 25 bp, Homo sapien
tatacaggttcagctagccaaagtg

SEQ ID NO: 4285028 - DNA, 25 bp, Homo sapien
caaagtgatgctgaccctggtgacc

SEQ ID NO: 4285029 - DNA, 25 bp, Homo sapien
aaagcatttgcagtgacaggtacca

SEQ ID NO: 4285030 - DNA, 25 bp, Homo sapien
aggactcatgtctgcaggaccgagg

SEQ ID NO: 4285031 - DNA, 25 bp, Homo sapien
gagctgaaggataagagtcagtgtt

SEQ ID NO: 4285032 - DNA, 25 bp, Homo sapien
agggccagcagaactcacagtggcg

SEQ ID NO: 4285033 - DNA, 25 bp, Homo sapien
ggttgaaggactcatgtctgcagga

SEQ ID NO: 4285034 - DNA, 25 bp, Homo sapien
gacaactgtagacatgcccatggca

SEQ ID NO: 4285035 - DNA, 25 bp, Homo sapien
cacagctgtgtcaaagtgacaactg

SEQ ID NO: 4285036 - DNA, 25 bp, Homo sapien
agacacacagctgtgtcaaagtgac

SEQ ID NO: 4285037 - DNA, 25 bp, Homo sapien
aactgtagacatgcccatggcactc

SEQ ID NO: 4285038 - DNA, 25 bp, Homo sapien
gaggcagaaccagaaaggtagatat

SEQ ID NO: 4285039 - DNA, 25 bp, Homo sapien
gcagaaccagaaaggtagatatggg

SEQ ID NO: 4285040 - DNA, 25 bp, Homo sapien
ggcagaaccagaaaggtagatatgg

SEQ ID NO: 4285041 - DNA, 25 bp, Homo sapien
ctgaggcagaaccagaaaggtagat

SEQ ID NO: 4285042 - DNA, 25 bp, Homo sapien
caggctctgctgcatgtcatggatg

SEQ ID NO: 4285043 - DNA, 25 bp, Homo sapien
ggtcttggcagcactcacagtgtgc

SEQ ID NO: 4285044 - DNA, 25 bp, Homo sapien
cagagtagagcatggcattcatccc

SEQ ID NO: 4285045 - DNA, 25 bp, Homo sapien
caggtatggccaggcagagtagagc

SEQ ID NO: 4285046 - DNA, 25 bp, Homo sapien
agaatgcccctcccattgtcctcac

SEQ ID NO: 4285047 - DNA, 25 bp, Homo sapien
aggcaggcctgctctggagtcccag

SEQ ID NO: 4285048 - DNA, 25 bp, Homo sapien
ggagtcccagcttgcccaccccacc

SEQ ID NO: 4285049 - DNA, 25 bp, Homo sapien
accccaccagcaacagaatgcccct

SEQ ID NO: 4285050 - DNA, 25 bp, Homo sapien
tacacagaggttagtcacatgcagg

SEQ ID NO: 4285051 - DNA, 25 bp, Homo sapien
cacccagggtgtgcagtttggagaa

SEQ ID NO: 4285052 - DNA, 25 bp, Homo sapien
agacctgcacttagaggtgtgccca

SEQ ID NO: 4285053 - DNA, 25 bp, Homo sapien
ggctacaagctcatagaaggcatag

SEQ ID NO: 4285054 - DNA, 25 bp, Homo sapien
atccttgtatccactcctcctgccc

SEQ ID NO: 4285055 - DNA, 25 bp, Homo sapien
agatggtcagaccttgggtgccttg

SEQ ID NO: 4285056 - DNA, 25 bp, Homo sapien
tcactttctatgacgagggaggagg

SEQ ID NO: 4285057 - DNA, 25 bp, Homo sapien
catgctatggggttctgtcatccct

SEQ ID NO: 4285058 - DNA, 25 bp, Homo sapien
tgtggtaggctatacaagtacactc

SEQ ID NO: 4285059 - DNA, 25 bp, Homo sapien
cagatagtctagaagtgtggtaggc

SEQ ID NO: 4285060 - DNA, 25 bp, Homo sapien
taaacaatgcatggtcacagatggg

SEQ ID NO: 4285061 - DNA, 25 bp, Homo sapien
tgtttccacaacgatgaaactgcgt

SEQ ID NO: 4285062 - DNA, 25 bp, Homo sapien
gagatgccctggtgccacctagagg

SEQ ID NO: 4285063 - DNA, 25 bp, Homo sapien
tcctactaggagtctttaacaaaga

SEQ ID NO: 4285064 - DNA, 25 bp, Homo sapien
ttacaaggaaggtgttacatccaga

SEQ ID NO: 4285065 - DNA, 25 bp, Homo sapien
gaaggtgttacatccagagatgccc

SEQ ID NO: 4285066 - DNA, 25 bp, Homo sapien
cagggttgtttggatcctctactgg

SEQ ID NO: 4285067 - DNA, 25 bp, Homo sapien
gtaatgctggtcacagacgaggtca

SEQ ID NO: 4285068 - DNA, 25 bp, Homo sapien
cttgggcagttgtgaacaaagtatc

SEQ ID NO: 4285069 - DNA, 25 bp, Homo sapien
gtaggagggatcccaagaaagaggc

SEQ ID NO: 4285070 - DNA, 25 bp, Homo sapien
ggcttgggcagttgtgaacaaagta

SEQ ID NO: 4285071 - DNA, 25 bp, Homo sapien
aggagggatcccaagaaagaggctt

SEQ ID NO: 4285072 - DNA, 25 bp, Homo sapien
cactctgggagatcacgttcttaat

SEQ ID NO: 4285073 - DNA, 25 bp, Homo sapien
ctgggagatcacgttcttaatgtca

SEQ ID NO: 4285074 - DNA, 25 bp, Homo sapien
ggccactctgggagatcacgttctt

SEQ ID NO: 4285075 - DNA, 25 bp, Homo sapien
aggtcttgttgccaccacggccact

SEQ ID NO: 4285076 - DNA, 25 bp, Homo sapien
tgccaatgaagtagggctcagggcc

SEQ ID NO: 4285077 - DNA, 25 bp, Homo sapien
tgggaaactgttctaggagcctgga

SEQ ID NO: 4285078 - DNA, 25 bp, Homo sapien
gatgaagttcgaaggctctggctct

SEQ ID NO: 4285079 - DNA, 25 bp, Homo sapien
gatcgggaagggatatctggcactc

SEQ ID NO: 4285080 - DNA, 25 bp, Homo sapien
actagctgcaaggttccccatggaa

SEQ ID NO: 4285081 - DNA, 25 bp, Homo sapien
aagtcacagtgcatcgcgccatgaa

SEQ ID NO: 4285082 - DNA, 25 bp, Homo sapien
gagtccacggacatagcacactgtg

SEQ ID NO: 4285083 - DNA, 25 bp, Homo sapien
ggcaagctctgtggtcctgactcaa

SEQ ID NO: 4285084 - DNA, 25 bp, Homo sapien
tggcagcaatggctggagccgtatt

SEQ ID NO: 4285085 - DNA, 25 bp, Homo sapien
gcagcaatggctggagccgtattac

SEQ ID NO: 4285086 - DNA, 25 bp, Homo sapien
ggcagcaatggctggagccgtatta

SEQ ID NO: 4285087 - DNA, 25 bp, Homo sapien
tatggcacggaacttcagcagcttt

SEQ ID NO: 4285088 - DNA, 25 bp, Homo sapien
cctagccatgccttaggagatcggg

SEQ ID NO: 4285089 - DNA, 25 bp, Homo sapien
aagccgtgttctcttcttgggagga

SEQ ID NO: 4285090 - DNA, 25 bp, Homo sapien
gaggaccgcctatctacctttatgg

SEQ ID NO: 4285091 - DNA, 25 bp, Homo sapien
gcccgggccttagcagccttggcct

SEQ ID NO: 4285092 - DNA, 25 bp, Homo sapien
gtactgccttggctttagccttggc

SEQ ID NO: 4285093 - DNA, 25 bp, Homo sapien
ggccttgacctgtgctgccttagct

SEQ ID NO: 4285094 - DNA, 25 bp, Homo sapien
tagctttggccttagccttgacctg

SEQ ID NO: 4285095 - DNA, 25 bp, Homo sapien
tggcttgggcacgagcagctttggc

SEQ ID NO: 4285096 - DNA, 25 bp, Homo sapien
ttgggcacgagcagctttggccagt

SEQ ID NO: 4285097 - DNA, 25 bp, Homo sapien
cttggcttgggcacgagcagctttg

SEQ ID NO: 4285098 - DNA, 25 bp, Homo sapien
gcttgggcacgagcagctttggcca

SEQ ID NO: 4285099 - DNA, 25 bp, Homo sapien
gcatggctggcacttgattgcttca

SEQ ID NO: 4285100 - DNA, 25 bp, Homo sapien
agtcttaagtggaaccagggcctca

SEQ ID NO: 4285101 - DNA, 25 bp, Homo sapien
cagggcctttgcgagtcagacactt

SEQ ID NO: 4285102 - DNA, 25 bp, Homo sapien
cccaagcagggcatgggagtcttaa

SEQ ID NO: 4285103 - DNA, 25 bp, Homo sapien
tgcaggcaaccgcatggcagttcgg

SEQ ID NO: 4285104 - DNA, 25 bp, Homo sapien
ctggtgtggatgctttggccagtct

SEQ ID NO: 4285105 - DNA, 25 bp, Homo sapien
gcagtgtggcccgacctgcaggcaa

SEQ ID NO: 4285106 - DNA, 25 bp, Homo sapien
cagtctgccagatagcggcatggga

SEQ ID NO: 4285107 - DNA, 25 bp, Homo sapien
gatcctggctcattgggttaaagac

SEQ ID NO: 4285108 - DNA, 25 bp, Homo sapien
taggttggaagccatcatctcgcag

SEQ ID NO: 4285109 - DNA, 25 bp, Homo sapien
cctctgtggcactgagatcctggct

SEQ ID NO: 4285110 - DNA, 25 bp, Homo sapien
cgcgaccaggagtgcacagcttttt

SEQ ID NO: 4285111 - DNA, 25 bp, Homo sapien
gatctgcctgggtatccgcaaacca

SEQ ID NO: 4285112 - DNA, 25 bp, Homo sapien
ctgcagatctgcctgggtatccgca

SEQ ID NO: 4285113 - DNA, 25 bp, Homo sapien
ggtatccgcaaaccagcgcttggca

SEQ ID NO: 4285114 - DNA, 25 bp, Homo sapien
cctgggtatccgcaaaccagcgctt

SEQ ID NO: 4285115 - DNA, 25 bp, Homo sapien
gagaagcttcggaaacagaggctcc

SEQ ID NO: 4285116 - DNA, 25 bp, Homo sapien
cactgaggcagcgaaatgtacaggg

SEQ ID NO: 4285117 - DNA, 25 bp, Homo sapien
gaagagagagggacctatttcccac

SEQ ID NO: 4285118 - DNA, 25 bp, Homo sapien
ggaatgcacgtccttagggcccaag

SEQ ID NO: 4285119 - DNA, 25 bp, Homo sapien
gcgcgccggaagtgcactgcgcttc

SEQ ID NO: 4285120 - DNA, 25 bp, Homo sapien
ctgctccaacatggccgcccgctgc

SEQ ID NO: 4285121 - DNA, 25 bp, Homo sapien
ccgctgcgcgccggaagtgcactgc

SEQ ID NO: 4285122 - DNA, 25 bp, Homo sapien
ggacccaagacgcgcctctgcgccg

SEQ ID NO: 4285123 - DNA, 25 bp, Homo sapien
ggctttgagccctctacactgctgg

SEQ ID NO: 4285124 - DNA, 25 bp, Homo sapien
acactgctggttgtatgaccttgga

SEQ ID NO: 4285125 - DNA, 25 bp, Homo sapien
tatctggagttgaccaggcctaccc

SEQ ID NO: 4285126 - DNA, 25 bp, Homo sapien
tgaatcatgcctagctccatccttg

SEQ ID NO: 4285127 - DNA, 25 bp, Homo sapien
cagctgtccttgtttaatgctctgg

SEQ ID NO: 4285128 - DNA, 25 bp, Homo sapien
tcagctgtccttgtttaatgctctg

SEQ ID NO: 4285129 - DNA, 25 bp, Homo sapien
tcaggcagtacgtcagtgaccggcg

SEQ ID NO: 4285130 - DNA, 25 bp, Homo sapien
gaaggctggacctgcacaaagtgga

SEQ ID NO: 4285131 - DNA, 25 bp, Homo sapien
aatcagcctggtaagaagattccag

SEQ ID NO: 4285132 - DNA, 25 bp, Homo sapien
tgctggcgcaactctatctcacagg

SEQ ID NO: 4285133 - DNA, 25 bp, Homo sapien
gaagtacggttgtcgtgcttggaga

SEQ ID NO: 4285134 - DNA, 25 bp, Homo sapien
aaaggaagtacggttgtcgtgcttg

SEQ ID NO: 4285135 - DNA, 25 bp, Homo sapien
aagtacggttgtcgtgcttggagaa

SEQ ID NO: 4285136 - DNA, 25 bp, Homo sapien
tgtcaaaggaagtacggttgtcgtg

SEQ ID NO: 4285137 - DNA, 25 bp, Homo sapien
gatgatgcttttgggttctgggaga

SEQ ID NO: 4285138 - DNA, 25 bp, Homo sapien
gaggcaagaactggtctagtcaccc

SEQ ID NO: 4285139 - DNA, 25 bp, Homo sapien
taggtgtcagtacagccatggaagg

SEQ ID NO: 4285140 - DNA, 25 bp, Homo sapien
agaagaaaggtaaagcctgtcccag

SEQ ID NO: 4285141 - DNA, 25 bp, Homo sapien
tgtagtgcccatagaagccattgtt

SEQ ID NO: 4285142 - DNA, 25 bp, Homo sapien
tcttgaattggcttctgtagtgccc

SEQ ID NO: 4285143 - DNA, 25 bp, Homo sapien
gcttggctgcaaggtggtattctct

SEQ ID NO: 4285144 - DNA, 25 bp, Homo sapien
ctagcactttcactcttgaattggc

SEQ ID NO: 4285145 - DNA, 25 bp, Homo sapien
gacctttattgtcttccaggcgtgg

SEQ ID NO: 4285146 - DNA, 25 bp, Homo sapien
acttcaccggcatgactcagtcaga

SEQ ID NO: 4285147 - DNA, 25 bp, Homo sapien
gctttcaggagaccatgatgcatgg

SEQ ID NO: 4285148 - DNA, 25 bp, Homo sapien
tcagtcagatttcaggtacaaccag

SEQ ID NO: 4285149 - DNA, 25 bp, Homo sapien
caagaagggagcagaaaaggcaaac

SEQ ID NO: 4285150 - DNA, 25 bp, Homo sapien
caggagcctactaaagcactttgca

SEQ ID NO: 4285151 - DNA, 25 bp, Homo sapien
gagcctactaaagcactttgcatct

SEQ ID NO: 4285152 - DNA, 25 bp, Homo sapien
ccaggagcctactaaagcactttgc

SEQ ID NO: 4285153 - DNA, 25 bp, Homo sapien
taggtcgagcgacaagtgagtagat

SEQ ID NO: 4285154 - DNA, 25 bp, Homo sapien
cttgttctggtcatacacagtggag

SEQ ID NO: 4285155 - DNA, 25 bp, Homo sapien
tctggtcatacacagtggagtgtag

SEQ ID NO: 4285156 - DNA, 25 bp, Homo sapien
catacacagtggagtgtaggtcgag

SEQ ID NO: 4285157 - DNA, 25 bp, Homo sapien
tgctgacctcgagtgctgcgattac

SEQ ID NO: 4285158 - DNA, 25 bp, Homo sapien
ggcgcgtaccaacacgcctggtgaa

SEQ ID NO: 4285159 - DNA, 25 bp, Homo sapien
cgaattgctgacctcgagtgctgcg

SEQ ID NO: 4285160 - DNA, 25 bp, Homo sapien
cgcgtaccaacacgcctggtgaatt

SEQ ID NO: 4285161 - DNA, 25 bp, Homo sapien
gagaatgcagctcaggtcccagctt

SEQ ID NO: 4285162 - DNA, 25 bp, Homo sapien
cctgagaatgcagctcaggtcccag

SEQ ID NO: 4285163 - DNA, 25 bp, Homo sapien
gatttggcgggttttgaacagctac

SEQ ID NO: 4285164 - DNA, 25 bp, Homo sapien
gatgagcagggcctttgtgacctgt

SEQ ID NO: 4285165 - DNA, 25 bp, Homo sapien
ttgtaggacatctttcttctggttg

SEQ ID NO: 4285166 - DNA, 25 bp, Homo sapien
ttcttctggttgaattctgggaaga

SEQ ID NO: 4285167 - DNA, 25 bp, Homo sapien
tttgtaggacatctttcttctggtt

SEQ ID NO: 4285168 - DNA, 25 bp, Homo sapien
tggttgaattctgggaagatggaca

SEQ ID NO: 4285169 - DNA, 25 bp, Homo sapien
tgtggccttcttattgagaactctg

SEQ ID NO: 4285170 - DNA, 25 bp, Homo sapien
gactcagtgttccatgagttaagtg

SEQ ID NO: 4285171 - DNA, 25 bp, Homo sapien
gaagtcaagggttagagtgactcag

SEQ ID NO: 4285172 - DNA, 25 bp, Homo sapien
cctgccgtgagttaagaaattctgt

SEQ ID NO: 4285173 - DNA, 25 bp, Homo sapien
aacttctgatctcatgatccacccg

SEQ ID NO: 4285174 - DNA, 25 bp, Homo sapien
ggtgcctgtcaccgcgcccggctag

SEQ ID NO: 4285175 - DNA, 25 bp, Homo sapien
tgcctgtcaccgcgcccggctagtt

SEQ ID NO: 4285176 - DNA, 25 bp, Homo sapien
ctcccgggttgaagaaattctctgc

SEQ ID NO: 4285177 - DNA, 25 bp, Homo sapien
catgcaatcaagtggccagggtcta

SEQ ID NO: 4285178 - DNA, 25 bp, Homo sapien
gggaagtgatgcacccctctcatga

SEQ ID NO: 4285179 - DNA, 25 bp, Homo sapien
taagctccacctcgtctatagaaga

SEQ ID NO: 4285180 - DNA, 25 bp, Homo sapien
ttgtagaatgtaccccacgtctgga

SEQ ID NO: 4285181 - DNA, 25 bp, Homo sapien
taaaagacgtcatcacattgtagtc

SEQ ID NO: 4285182 - DNA, 25 bp, Homo sapien
cacatgtggttcaattcgttttcaa

SEQ ID NO: 4285183 - DNA, 25 bp, Homo sapien
cctctttgaagggtgaatcttggca

SEQ ID NO: 4285184 - DNA, 25 bp, Homo sapien
gggtcagcatctgtggccttctgag

SEQ ID NO: 4285185 - DNA, 25 bp, Homo sapien
aagcagatcctttgtgacctcttgg

SEQ ID NO: 4285186 - DNA, 25 bp, Homo sapien
ttggctagaattgttgagtggcatg

SEQ ID NO: 4285187 - DNA, 25 bp, Homo sapien
gtggcatgtttgagtcagccttcaa

SEQ ID NO: 4285188 - DNA, 25 bp, Homo sapien
agtggcatgtttgagtcagccttca

SEQ ID NO: 4285189 - DNA, 25 bp, Homo sapien
taaaggacaattggaaactgctaca

SEQ ID NO: 4285190 - DNA, 25 bp, Homo sapien
ggaaactcagttttagataatctca

SEQ ID NO: 4285191 - DNA, 25 bp, Homo sapien
gactaacagctttaccataatgact

SEQ ID NO: 4285192 - DNA, 25 bp, Homo sapien
aaaacttactggtgaccttgtcatt

SEQ ID NO: 4285193 - DNA, 25 bp, Homo sapien
gaagtagggcccagccttcaattaa

SEQ ID NO: 4285194 - DNA, 25 bp, Homo sapien
gattgacaactagcccctcaactgg

SEQ ID NO: 4285195 - DNA, 25 bp, Homo sapien
gaagaatgtctgtcaactccccaaa

SEQ ID NO: 4285196 - DNA, 25 bp, Homo sapien
cctgggaccaggcaatttcaagtta

SEQ ID NO: 4285197 - DNA, 25 bp, Homo sapien
tctctttcaggtgccaaaatggagg

SEQ ID NO: 4285198 - DNA, 25 bp, Homo sapien
caaaggcagggttctcattctcagg

SEQ ID NO: 4285199 - DNA, 25 bp, Homo sapien
ttcaaaggcccggtcaatggctgca

SEQ ID NO: 4285200 - DNA, 25 bp, Homo sapien
caggctgccagaggatgtcttctgc

SEQ ID NO: 4285201 - DNA, 25 bp, Homo sapien
aaagcgaccatgtctttatgtaatg

SEQ ID NO: 4285202 - DNA, 25 bp, Homo sapien
tctcctaaaagcgaccatgtcttta

SEQ ID NO: 4285203 - DNA, 25 bp, Homo sapien
tcctaaaagcgaccatgtctttatg

SEQ ID NO: 4285204 - DNA, 25 bp, Homo sapien
gcgaccatgtctttatgtaatgcat

SEQ ID NO: 4285205 - DNA, 25 bp, Homo sapien
gaggctgcaaactacccctgaatgg

SEQ ID NO: 4285206 - DNA, 25 bp, Homo sapien
cctgaatggccacgatttcctggag

SEQ ID NO: 4285207 - DNA, 25 bp, Homo sapien
ttcctcctggagtaggcggttctcg

SEQ ID NO: 4285208 - DNA, 25 bp, Homo sapien
gagcttggccctggctatagcagga

SEQ ID NO: 4285209 - DNA, 25 bp, Homo sapien
taaatcgccatgaactggagccctt

SEQ ID NO: 4285210 - DNA, 25 bp, Homo sapien
ttacactggcgctacagggtggcag

SEQ ID NO: 4285211 - DNA, 25 bp, Homo sapien
tggaaacaactagacgggacacagc

SEQ ID NO: 4285212 - DNA, 25 bp, Homo sapien
cccacggattaggttgaaggtcaga

SEQ ID NO: 4285213 - DNA, 25 bp, Homo sapien
ccagaactgctaagtgaaggtgtct

SEQ ID NO: 4285214 - DNA, 25 bp, Homo sapien
ttagttggtgtccatgctgcaagcc

SEQ ID NO: 4285215 - DNA, 25 bp, Homo sapien
taagtgaaggtgtcttataaaattc

SEQ ID NO: 4285216 - DNA, 25 bp, Homo sapien
ggtgtccatgctgcaagcctcatca

SEQ ID NO: 4285217 - DNA, 25 bp, Homo sapien
gttggtaaaatagcacataagctgc

SEQ ID NO: 4285218 - DNA, 25 bp, Homo sapien
taaaatagcacataagctgctttag

SEQ ID NO: 4285219 - DNA, 25 bp, Homo sapien
ggtaaaatagcacataagctgcttt

SEQ ID NO: 4285220 - DNA, 25 bp, Homo sapien
tggtaaaatagcacataagctgctt

SEQ ID NO: 4285221 - DNA, 25 bp, Homo sapien
ggccagggacacgttgctatcatca

SEQ ID NO: 4285222 - DNA, 25 bp, Homo sapien
cagtttgttcttcgcatatgcagtg

SEQ ID NO: 4285223 - DNA, 25 bp, Homo sapien
tatcatcaaagtaataccatttacc

SEQ ID NO: 4285224 - DNA, 25 bp, Homo sapien
tttaccattcagtttgttcttcgca

SEQ ID NO: 4285225 - DNA, 25 bp, Homo sapien
tattcagtgccaatcttcaggatgg

SEQ ID NO: 4285226 - DNA, 25 bp, Homo sapien
gctagcttattaggcttgcactaaa

SEQ ID NO: 4285227 - DNA, 25 bp, Homo sapien
gctgtcagggaccaagattttaaac

SEQ ID NO: 4285228 - DNA, 25 bp, Homo sapien
aaggctaaaaatggagctgtcaggg

SEQ ID NO: 4285229 - DNA, 25 bp, Homo sapien
ttgacacaatagcagcaacggtggc

SEQ ID NO: 4285230 - DNA, 25 bp, Homo sapien
tagcattgactgcacaaagtggtgg

SEQ ID NO: 4285231 - DNA, 25 bp, Homo sapien
gactttacactattcccaagcagga

SEQ ID NO: 4285232 - DNA, 25 bp, Homo sapien
gtttattacagcaatcccagcccag

SEQ ID NO: 4285233 - DNA, 25 bp, Homo sapien
gaagcctgtgaaactgcataagcaa

SEQ ID NO: 4285234 - DNA, 25 bp, Homo sapien
gaaagcgtgcagcatgaagcctgtg

SEQ ID NO: 4285235 - DNA, 25 bp, Homo sapien
gggaatcagtatgaagaaagcgtgc

SEQ ID NO: 4285236 - DNA, 25 bp, Homo sapien
catttagggcaatgcctggtccact

SEQ ID NO: 4285237 - DNA, 25 bp, Homo sapien
acaggttacagacaaactcggacat

SEQ ID NO: 4285238 - DNA, 25 bp, Homo sapien
ccatggctccataatgattggacac

SEQ ID NO: 4285239 - DNA, 25 bp, Homo sapien
cataaggccttgctgacaggttaca

SEQ ID NO: 4285240 - DNA, 25 bp, Homo sapien
caatgaggtcgtacacataaggcct

SEQ ID NO: 4285241 - DNA, 25 bp, Homo sapien
gagaaacgtttgaggtggaccacca

SEQ ID NO: 4285242 - DNA, 25 bp, Homo sapien
gattgggaattctacgactgtgtcg

SEQ ID NO: 4285243 - DNA, 25 bp, Homo sapien
gatgcttcttacagttgggacagta

SEQ ID NO: 4285244 - DNA, 25 bp, Homo sapien
gactgtgtcgagcttatccctccag

SEQ ID NO: 4285245 - DNA, 25 bp, Homo sapien
caggggtcatgctccccaagggtct

SEQ ID NO: 4285246 - DNA, 25 bp, Homo sapien
tccccaagggtctccatggtggtga

SEQ ID NO: 4285247 - DNA, 25 bp, Homo sapien
tcttcttcttctgaggctgcaacat

SEQ ID NO: 4285248 - DNA, 25 bp, Homo sapien
gtgaagagctcgatgcagtctctca

SEQ ID NO: 4285249 - DNA, 25 bp, Homo sapien
aagtctccgagtttcactgtcccaa

SEQ ID NO: 4285250 - DNA, 25 bp, Homo sapien
tttcactgtcccaatccatggccag

SEQ ID NO: 4285251 - DNA, 25 bp, Homo sapien
catcatagtaaagtctccgagtttc

SEQ ID NO: 4285252 - DNA, 25 bp, Homo sapien
agtaaagtctccgagtttcactgtc

SEQ ID NO: 4285253 - DNA, 25 bp, Homo sapien
tgttccataggagttcacaagactg

SEQ ID NO: 4285254 - DNA, 25 bp, Homo sapien
ccataggagttcacaagactgaagg

SEQ ID NO: 4285255 - DNA, 25 bp, Homo sapien
cagctgcaagtgaatttatgtcagc

SEQ ID NO: 4285256 - DNA, 25 bp, Homo sapien
ttccatcagctgcaagtgaatttat

SEQ ID NO: 4285257 - DNA, 25 bp, Homo sapien
agggtgagctgccaaactcatcagg

SEQ ID NO: 4285258 - DNA, 25 bp, Homo sapien
gtgagctgccaaactcatcaggtaa

SEQ ID NO: 4285259 - DNA, 25 bp, Homo sapien
caagggtgagctgccaaactcatca

SEQ ID NO: 4285260 - DNA, 25 bp, Homo sapien
ccaagggtgagctgccaaactcatc

SEQ ID NO: 4285261 - DNA, 25 bp, Homo sapien
tggctgcccatatagcgctgatgcg

SEQ ID NO: 4285262 - DNA, 25 bp, Homo sapien
tggaagcgtgacacattccgagcca

SEQ ID NO: 4285263 - DNA, 25 bp, Homo sapien
caaacagcctggtacaaagactcaa

SEQ ID NO: 4285264 - DNA, 25 bp, Homo sapien
tctccctgaagtagactggaagcgt

SEQ ID NO: 4285265 - DNA, 25 bp, Homo sapien
gattatacacatctgcgaccaccat

SEQ ID NO: 4285266 - DNA, 25 bp, Homo sapien
gaaaattttgtggaatcggtgatta

SEQ ID NO: 4285267 - DNA, 25 bp, Homo sapien
tggtttaaaccttcatccatttgga

SEQ ID NO: 4285268 - DNA, 25 bp, Homo sapien
acgaaaatgtcatcccgaggcatga

SEQ ID NO: 4285269 - DNA, 25 bp, Homo sapien
agagagcctcgcacaggtcggacac

SEQ ID NO: 4285270 - DNA, 25 bp, Homo sapien
gagagagcctcgcacaggtcggaca

SEQ ID NO: 4285271 - DNA, 25 bp, Homo sapien
cctggagagagcctcgcacaggtcg

SEQ ID NO: 4285272 - DNA, 25 bp, Homo sapien
gagcctcgcacaggtcggacacagc

SEQ ID NO: 4285273 - DNA, 25 bp, Homo sapien
actcgatctttcttcaagggcagtg

SEQ ID NO: 4285274 - DNA, 25 bp, Homo sapien
gcagtggcagcgttagatagcaaaa

SEQ ID NO: 4285275 - DNA, 25 bp, Homo sapien
gaaagtatccacaatcacagaatca

SEQ ID NO: 4285276 - DNA, 25 bp, Homo sapien
ggtcacagaaaccttagcacattct

SEQ ID NO: 4285277 - DNA, 25 bp, Homo sapien
gcatccagaatgactcacagcaaac

SEQ ID NO: 4285278 - DNA, 25 bp, Homo sapien
cagcaaacctggagatgaatcaggt

SEQ ID NO: 4285279 - DNA, 25 bp, Homo sapien
tcaaagggataaacaggacattctc

SEQ ID NO: 4285280 - DNA, 25 bp, Homo sapien
caaacaaggccaggactactcttag

SEQ ID NO: 4285281 - DNA, 25 bp, Homo sapien
cctgagaatcttgttgctggtagcc

SEQ ID NO: 4285282 - DNA, 25 bp, Homo sapien
tggcatccttcagctccaagtaggg

SEQ ID NO: 4285283 - DNA, 25 bp, Homo sapien
catgcaatccatctagaagaaaggc

SEQ ID NO: 4285284 - DNA, 25 bp, Homo sapien
tttacccggttcagatcttcatgca

SEQ ID NO: 4285285 - DNA, 25 bp, Homo sapien
tgaacatgcgaggtgccacatgggc

SEQ ID NO: 4285286 - DNA, 25 bp, Homo sapien
gtctctgttgatttcggcttcatac

SEQ ID NO: 4285287 - DNA, 25 bp, Homo sapien
gaccacatctgcttaatgagttcag

SEQ ID NO: 4285288 - DNA, 25 bp, Homo sapien
catccccagagggttgtctctgttg

SEQ ID NO: 4285289 - DNA, 25 bp, Homo sapien
tagtcagtcagtggtgcagtgttgc

SEQ ID NO: 4285290 - DNA, 25 bp, Homo sapien
gaaagtagtcagtcagtggtgcagt

SEQ ID NO: 4285291 - DNA, 25 bp, Homo sapien
ctttgagaaagtagtcagtcagtgg

SEQ ID NO: 4285292 - DNA, 25 bp, Homo sapien
tcagtggtgcagtgttgctcaaaca

SEQ ID NO: 4285293 - DNA, 25 bp, Homo sapien
cacagagcccaggttgtatatgaga

SEQ ID NO: 4285294 - DNA, 25 bp, Homo sapien
aaagcaagtgcataacacatgccct

SEQ ID NO: 4285295 - DNA, 25 bp, Homo sapien
ataaaagcaagtgcataacacatgc

SEQ ID NO: 4285296 - DNA, 25 bp, Homo sapien
taaaagcaagtgcataacacatgcc

SEQ ID NO: 4285297 - DNA, 25 bp, Homo sapien
aagcaagtgcataacacatgccctc

SEQ ID NO: 4285298 - DNA, 25 bp, Homo sapien
cctccgagactacctgtgatgtagg

SEQ ID NO: 4285299 - DNA, 25 bp, Homo sapien
atagggacttgctgatgattttgga

SEQ ID NO: 4285300 - DNA, 25 bp, Homo sapien
ctgctgacaccggaactgtgcatcc

SEQ ID NO: 4285301 - DNA, 25 bp, Homo sapien
cagacactgaggaatagggacttgc

SEQ ID NO: 4285302 - DNA, 25 bp, Homo sapien
catcccacaggtgctagtgctatca

SEQ ID NO: 4285303 - DNA, 25 bp, Homo sapien
gagcaagccctatttaatgccttag

SEQ ID NO: 4285304 - DNA, 25 bp, Homo sapien
atcatgaggtcacgatcacaaggtc

SEQ ID NO: 4285305 - DNA, 25 bp, Homo sapien
gtgagagtccacaaattaactggtc

SEQ ID NO: 4285306 - DNA, 25 bp, Homo sapien
tgaacccgggagtaagccgagactg

SEQ ID NO: 4285307 - DNA, 25 bp, Homo sapien
cataaggaaatgtacccttctctaa

SEQ ID NO: 4285308 - DNA, 25 bp, Homo sapien
ccataaggaaatgtacccttctcta

SEQ ID NO: 4285309 - DNA, 25 bp, Homo sapien
taaggaaatgtacccttctctaatc

SEQ ID NO: 4285310 - DNA, 25 bp, Homo sapien
tcccataaggaaatgtacccttctc

SEQ ID NO: 4285311 - DNA, 25 bp, Homo sapien
agctgcccctcttagcacctgagac

SEQ ID NO: 4285312 - DNA, 25 bp, Homo sapien
atggtgctcagactacaaccaggac

SEQ ID NO: 4285313 - DNA, 25 bp, Homo sapien
agataatctttattgacagtcacag

SEQ ID NO: 4285314 - DNA, 25 bp, Homo sapien
gaagaagacgctctgtggacagact

SEQ ID NO: 4285315 - DNA, 25 bp, Homo sapien
tcttcaggacactgagcaaagtctg

SEQ ID NO: 4285316 - DNA, 25 bp, Homo sapien
ctggtagaacttactgcaagaggca

SEQ ID NO: 4285317 - DNA, 25 bp, Homo sapien
tggtctggtagaacttactgcaaga

SEQ ID NO: 4285318 - DNA, 25 bp, Homo sapien
tctggtagaacttactgcaagaggc

SEQ ID NO: 4285319 - DNA, 25 bp, Homo sapien
tggcatagctcctctatgcatttga

SEQ ID NO: 4285320 - DNA, 25 bp, Homo sapien
catttgaccagcttgttgtcgtagt

SEQ ID NO: 4285321 - DNA, 25 bp, Homo sapien
cctctatgcatttgaccagcttgtt

SEQ ID NO: 4285322 - DNA, 25 bp, Homo sapien
catagctcctctatgcatttgacca

SEQ ID NO: 4285323 - DNA, 25 bp, Homo sapien
ctgggtcaacatctcctggggcccc

SEQ ID NO: 4285324 - DNA, 25 bp, Homo sapien
tgctgggtcaacatctcctggggcc

SEQ ID NO: 4285325 - DNA, 25 bp, Homo sapien
ctgctgggtcaacatctcctggggc

SEQ ID NO: 4285326 - DNA, 25 bp, Homo sapien
gctgggtcaacatctcctggggccc

SEQ ID NO: 4285327 - DNA, 25 bp, Homo sapien
cccagaatttacaaggtggtcctca

SEQ ID NO: 4285328 - DNA, 25 bp, Homo sapien
aaatataaacaaccggccaggtgtg

SEQ ID NO: 4285329 - DNA, 25 bp, Homo sapien
ccttatagacctcaggcaagtgacg

SEQ ID NO: 4285330 - DNA, 25 bp, Homo sapien
tctgggctggcaaccttaaagggcc

SEQ ID NO: 4285331 - DNA, 25 bp, Homo sapien
tgtgtctttgacacacaatgtatta

SEQ ID NO: 4285332 - DNA, 25 bp, Homo sapien
tcgtggctcacggtaacttcgaact

SEQ ID NO: 4285333 - DNA, 25 bp, Homo sapien
gcaagcctttcctaactgacgtagt

SEQ ID NO: 4285334 - DNA, 25 bp, Homo sapien
tattgccatggagctgctacgtcag

SEQ ID NO: 4285335 - DNA, 25 bp, Homo sapien
caatggattgactgcctacgtcaga

SEQ ID NO: 4285336 - DNA, 25 bp, Homo sapien
gcatgttggccagccaccgcacctg

SEQ ID NO: 4285337 - DNA, 25 bp, Homo sapien
agcatgttggccagccaccgcacct

SEQ ID NO: 4285338 - DNA, 25 bp, Homo sapien
cagcatgttggccagccaccgcacc

SEQ ID NO: 4285339 - DNA, 25 bp, Homo sapien
caaactctcaacctcaggtgagccg

SEQ ID NO: 4285340 - DNA, 25 bp, Homo sapien
ctgaaattacagatatgcaccacca

SEQ ID NO: 4285341 - DNA, 25 bp, Homo sapien
tagctgaaattacagatatgcacca

SEQ ID NO: 4285342 - DNA, 25 bp, Homo sapien
caagtagctgaaattacagatatgc

SEQ ID NO: 4285343 - DNA, 25 bp, Homo sapien
tgtgcttaatcccatctgcaaagtc

SEQ ID NO: 4285344 - DNA, 25 bp, Homo sapien
cccttttgccatgtcacctgacata

SEQ ID NO: 4285345 - DNA, 25 bp, Homo sapien
cattgtgcttaatcccatctgcaaa

SEQ ID NO: 4285346 - DNA, 25 bp, Homo sapien
catgtcacctgacataatgacagat

SEQ ID NO: 4285347 - DNA, 25 bp, Homo sapien
tatgtaatggtcacagtccaaggcc

SEQ ID NO: 4285348 - DNA, 25 bp, Homo sapien
tctcaaatgacctaggagcccacta

SEQ ID NO: 4285349 - DNA, 25 bp, Homo sapien
aacaatgagtaacaggccactgggc

SEQ ID NO: 4285350 - DNA, 25 bp, Homo sapien
gaaacagatgtgtccttagtccaag

SEQ ID NO: 4285351 - DNA, 25 bp, Homo sapien
tacaaaataggcattgttcatctga

SEQ ID NO: 4285352 - DNA, 25 bp, Homo sapien
ctggatatacaaaataggcattgtt

SEQ ID NO: 4285353 - DNA, 25 bp, Homo sapien
gtacaagtactgccttaggaaagac

SEQ ID NO: 4285354 - DNA, 25 bp, Homo sapien
cttaggaaagactgtctcttttgca

SEQ ID NO: 4285355 - DNA, 25 bp, Homo sapien
ttcattttgaggctcaattactagc

SEQ ID NO: 4285356 - DNA, 25 bp, Homo sapien
cattttgaggctcaattactagcac

SEQ ID NO: 4285357 - DNA, 25 bp, Homo sapien
tgcctgggccatgtgccatcttcat

SEQ ID NO: 4285358 - DNA, 25 bp, Homo sapien
tttgactgcaaggtctgcctgggcc

SEQ ID NO: 4285359 - DNA, 25 bp, Homo sapien
agagttcaaaccaccgcacttccaa

SEQ ID NO: 4285360 - DNA, 25 bp, Homo sapien
catgcttagaagcaaaaagtatctg

SEQ ID NO: 4285361 - DNA, 25 bp, Homo sapien
accgcacttccaacatgcttagaag

SEQ ID NO: 4285362 - DNA, 25 bp, Homo sapien
aaccaaatgaggagagttcaaacca

SEQ ID NO: 4285363 - DNA, 25 bp, Homo sapien
gcagggatgttgaatagcttccgca

SEQ ID NO: 4285364 - DNA, 25 bp, Homo sapien
gcatcctggacagtgttgtctagct

SEQ ID NO: 4285365 - DNA, 25 bp, Homo sapien
atttgttccagagccgtgtttcacg

SEQ ID NO: 4285366 - DNA, 25 bp, Homo sapien
tagcttgctcaactgctcgtaggtg

SEQ ID NO: 4285367 - DNA, 25 bp, Homo sapien
tcctctttcttgtcagatgctcaca

SEQ ID NO: 4285368 - DNA, 25 bp, Homo sapien
ggcaaactaatgctcatcctctttc

SEQ ID NO: 4285369 - DNA, 25 bp, Homo sapien
tgcaaggctaaagacagccatggca

SEQ ID NO: 4285370 - DNA, 25 bp, Homo sapien
ggaacaggcagaaatatcacttggg

SEQ ID NO: 4285371 - DNA, 25 bp, Homo sapien
tcagttccagcaaatacacctcgac

SEQ ID NO: 4285372 - DNA, 25 bp, Homo sapien
aatggcaactcagcacattggtggg

SEQ ID NO: 4285373 - DNA, 25 bp, Homo sapien
tgccttgctgaaatggcaactcagc

SEQ ID NO: 4285374 - DNA, 25 bp, Homo sapien
gtgcttgacaaacaggccatgctcc

SEQ ID NO: 4285375 - DNA, 25 bp, Homo sapien
tacacagccgtaccagtttagtagt

SEQ ID NO: 4285376 - DNA, 25 bp, Homo sapien
agtagtttattccacgcctcggtag

SEQ ID NO: 4285377 - DNA, 25 bp, Homo sapien
gcctcggtagggaccaatacatagt

SEQ ID NO: 4285378 - DNA, 25 bp, Homo sapien
ttttctgacgatgggttgctggcct

SEQ ID NO: 4285379 - DNA, 25 bp, Homo sapien
taaaaatatccaagttaggccaggc

SEQ ID NO: 4285380 - DNA, 25 bp, Homo sapien
gcctgggaaaagctgactctgtcat

SEQ ID NO: 4285381 - DNA, 25 bp, Homo sapien
ccttagggcaacttcgtggcatagt

SEQ ID NO: 4285382 - DNA, 25 bp, Homo sapien
gcatgtacaagtgcaagcaagctct

SEQ ID NO: 4285383 - DNA, 25 bp, Homo sapien
cagagttgtctattgggccaggaaa

SEQ ID NO: 4285384 - DNA, 25 bp, Homo sapien
cccacattgtacatgtcccagctgt

SEQ ID NO: 4285385 - DNA, 25 bp, Homo sapien
caggaaataggttatgttcacccac

SEQ ID NO: 4285386 - DNA, 25 bp, Homo sapien
gaaccaccggctgtcaataagatac

SEQ ID NO: 4285387 - DNA, 25 bp, Homo sapien
gagtgtggtcctcattaagggtcca

SEQ ID NO: 4285388 - DNA, 25 bp, Homo sapien
actgcgccccgcgttggagtgtggt

SEQ ID NO: 4285389 - DNA, 25 bp, Homo sapien
acttctgagtctccgcatccggtcg

SEQ ID NO: 4285390 - DNA, 25 bp, Homo sapien
taagggtccaagctcggacttctga

SEQ ID NO: 4285391 - DNA, 25 bp, Homo sapien
cggcccggacatccgccccgcgcgc

SEQ ID NO: 4285392 - DNA, 25 bp, Homo sapien
cccgcgcgcggcgtgctatagaccg

SEQ ID NO: 4285393 - DNA, 25 bp, Homo sapien
ccccgcgcgcggcgtgctatagacc

SEQ ID NO: 4285394 - DNA, 25 bp, Homo sapien
ggcccagccggcccggacatccgcc

SEQ ID NO: 4285395 - DNA, 25 bp, Homo sapien
tcagctgcccaaacgtgggatcggg

SEQ ID NO: 4285396 - DNA, 25 bp, Homo sapien
tccagcggccctacagggatttcgg

SEQ ID NO: 4285397 - DNA, 25 bp, Homo sapien
cctgcaattccgctttcagctggag

SEQ ID NO: 4285398 - DNA, 25 bp, Homo sapien
tcagctggaggccttaggcgagtca

SEQ ID NO: 4285399 - DNA, 25 bp, Homo sapien
cactatgacaatgaggttagaaaaa

SEQ ID NO: 4285400 - DNA, 25 bp, Homo sapien
caccactatgacaatgaggttagaa

SEQ ID NO: 4285401 - DNA, 25 bp, Homo sapien
accactatgacaatgaggttagaaa

SEQ ID NO: 4285402 - DNA, 25 bp, Homo sapien
ccactatgacaatgaggttagaaaa

SEQ ID NO: 4285403 - DNA, 25 bp, Homo sapien
aaatgacaatgacacaggacataca

SEQ ID NO: 4285404 - DNA, 25 bp, Homo sapien
actcgccttggtctggcagagactg

SEQ ID NO: 4285405 - DNA, 25 bp, Homo sapien
aactcgccttggtctggcagagact

SEQ ID NO: 4285406 - DNA, 25 bp, Homo sapien
ctcgccttggtctggcagagactgg

SEQ ID NO: 4285407 - DNA, 25 bp, Homo sapien
ctaggcacagctgggcccttgagac

SEQ ID NO: 4285408 - DNA, 25 bp, Homo sapien
cacaccggagaccaggtgatgagct

SEQ ID NO: 4285409 - DNA, 25 bp, Homo sapien
agcagggcttcgatgtcaggctcga

SEQ ID NO: 4285410 - DNA, 25 bp, Homo sapien
tgtcaggctcgatgtcaatggtctg

SEQ ID NO: 4285411 - DNA, 25 bp, Homo sapien
aggcaacatcgttgcgacacaccgg

SEQ ID NO: 4285412 - DNA, 25 bp, Homo sapien
ttctatgagtcaccgggattttgcc

SEQ ID NO: 4285413 - DNA, 25 bp, Homo sapien
cgttctaaccacaaacaagggagat

SEQ ID NO: 4285414 - DNA, 25 bp, Homo sapien
gaatttcagcagctacgagcaacag

SEQ ID NO: 4285415 - DNA, 25 bp, Homo sapien
cccaagggcggagaggaatttcagc

SEQ ID NO: 4285416 - DNA, 25 bp, Homo sapien
gccccgccccgctccgcccggcgca

SEQ ID NO: 4285417 - DNA, 25 bp, Homo sapien
ctactgcacgtccgcccccgccccg

SEQ ID NO: 4285418 - DNA, 25 bp, Homo sapien
tactgcacgtccgcccccgccccgc

SEQ ID NO: 4285419 - DNA, 25 bp, Homo sapien
ctggttgcacgggaagccgagcacc

SEQ ID NO: 4285420 - DNA, 25 bp, Homo sapien
cccaaactggttgcacgggaagccg

SEQ ID NO: 4285421 - DNA, 25 bp, Homo sapien
ctgatgcccaaactggttgcacggg

SEQ ID NO: 4285422 - DNA, 25 bp, Homo sapien
gatgcccaaactggttgcacgggaa

SEQ ID NO: 4285423 - DNA, 25 bp, Homo sapien
ctgggtgtagtcccggaccgtggtg

SEQ ID NO: 4285424 - DNA, 25 bp, Homo sapien
tgggtgtagtcccggaccgtggtgc

SEQ ID NO: 4285425 - DNA, 25 bp, Homo sapien
tcagagggacgccacattctcgata

SEQ ID NO: 4285426 - DNA, 25 bp, Homo sapien
agagggacgccacattctcgataag

SEQ ID NO: 4285427 - DNA, 25 bp, Homo sapien
gggacgccacattctcgataagtag

SEQ ID NO: 4285428 - DNA, 25 bp, Homo sapien
acgccacattctcgataagtagtac

SEQ ID NO: 4285429 - DNA, 25 bp, Homo sapien
gcgccgagaaggcatacaccgactg

SEQ ID NO: 4285430 - DNA, 25 bp, Homo sapien
cgagaaggcatacaccgactgggcc

SEQ ID NO: 4285431 - DNA, 25 bp, Homo sapien
agaaggcatacaccgactgggccgc

SEQ ID NO: 4285432 - DNA, 25 bp, Homo sapien
cgggcgcgccgagaaggcatacacc

SEQ ID NO: 4285433 - DNA, 25 bp, Homo sapien
agcgccccgaacaagcactgtaagg

SEQ ID NO: 4285434 - DNA, 25 bp, Homo sapien
tcacgtggcacaggcagttttccgg

SEQ ID NO: 4285435 - DNA, 25 bp, Homo sapien
caattgtccaagaagccagcggagc

SEQ ID NO: 4285436 - DNA, 25 bp, Homo sapien
gcgtgctcctcctaagccggaagga

SEQ ID NO: 4285437 - DNA, 25 bp, Homo sapien
tccaactactaatagaataaaggca

SEQ ID NO: 4285438 - DNA, 25 bp, Homo sapien
caactactaatagaataaaggcagt

SEQ ID NO: 4285439 - DNA, 25 bp, Homo sapien
ctactaatagaataaaggcagtttt

SEQ ID NO: 4285440 - DNA, 25 bp, Homo sapien
ttccaactactaatagaataaaggc

SEQ ID NO: 4285441 - DNA, 25 bp, Homo sapien
aactactaatagaataaaggcagtt

SEQ ID NO: 4285442 - DNA, 25 bp, Homo sapien
ccaactactaatagaataaaggcag

SEQ ID NO: 4285443 - DNA, 25 bp, Homo sapien
tgcctttattctattagtagttgga

SEQ ID NO: 4285444 - DNA, 25 bp, Homo sapien
aactgcctttattctattagtagtt

SEQ ID NO: 4285445 - DNA, 25 bp, Homo sapien
aaaactgcctttattctattagtag

SEQ ID NO: 4285446 - DNA, 25 bp, Homo sapien
ctgcctttattctattagtagttgg

SEQ ID NO: 4285447 - DNA, 25 bp, Homo sapien
gcctttattctattagtagttggaa

SEQ ID NO: 4285448 - DNA, 25 bp, Homo sapien
actgcctttattctattagtagttg

SEQ ID NO: 4285449 - DNA, 25 bp, Homo sapien
gatggcataacctgtctcacctgga

SEQ ID NO: 4285450 - DNA, 25 bp, Homo sapien
taggaattggtttcacgcctgaggc

SEQ ID NO: 4285451 - DNA, 25 bp, Homo sapien
agatggccatattaccccttttcgg

SEQ ID NO: 4285452 - DNA, 25 bp, Homo sapien
tcacctggacttaagcatctggctc

SEQ ID NO: 4285453 - DNA, 25 bp, Homo sapien
cgcctgaggcaattagacactttgg

SEQ ID NO: 4285454 - DNA, 25 bp, Homo sapien
ttttcggccccatgtatctcagtac

SEQ ID NO: 4285455 - DNA, 25 bp, Homo sapien
caaagtgtctaattgcctcaggcgt

SEQ ID NO: 4285456 - DNA, 25 bp, Homo sapien
tgcctcaggcgtgaaaccaattcct

SEQ ID NO: 4285457 - DNA, 25 bp, Homo sapien
gagccagatgcttaagtccaggtga

SEQ ID NO: 4285458 - DNA, 25 bp, Homo sapien
aaaaaagtttagtcagctggagaga

SEQ ID NO: 4285459 - DNA, 25 bp, Homo sapien
caattcctatttacttagcccagct

SEQ ID NO: 4285460 - DNA, 25 bp, Homo sapien
tccaggtgagacaggttatgccatc

SEQ ID NO: 4285461 - DNA, 25 bp, Homo sapien
aagtgtatttggaaataaagtcaga

SEQ ID NO: 4285462 - DNA, 25 bp, Homo sapien
tttggaaataaagtcagatggaaaa

SEQ ID NO: 4285463 - DNA, 25 bp, Homo sapien
atttggaaataaagtcagatggaaa

SEQ ID NO: 4285464 - DNA, 25 bp, Homo sapien
gaaagtgtatttggaaataaagtca

SEQ ID NO: 4285465 - DNA, 25 bp, Homo sapien
agtgtatttggaaataaagtcagat

SEQ ID NO: 4285466 - DNA, 25 bp, Homo sapien
aaagtgtatttggaaataaagtcag

SEQ ID NO: 4285467 - DNA, 25 bp, Homo sapien
ttttccatctgactttatttccaaa

SEQ ID NO: 4285468 - DNA, 25 bp, Homo sapien
tttccatctgactttatttccaaat

SEQ ID NO: 4285469 - DNA, 25 bp, Homo sapien
tgactttatttccaaatacactttc

SEQ ID NO: 4285470 - DNA, 25 bp, Homo sapien
catctgactttatttccaaatacac

SEQ ID NO: 4285471 - DNA, 25 bp, Homo sapien
atctgactttatttccaaatacact

SEQ ID NO: 4285472 - DNA, 25 bp, Homo sapien
tctgactttatttccaaatacactt

SEQ ID NO: 4285473 - DNA, 25 bp, Homo sapien
atactgtcatcctcaaagaaagtgt

SEQ ID NO: 4285474 - DNA, 25 bp, Homo sapien
acactttctttgaggatgacagtat

SEQ ID NO: 4285475 - DNA, 25 bp, Homo sapien
ttcctaatactgtcatcctcaaaga

SEQ ID NO: 4285476 - DNA, 25 bp, Homo sapien
atactgtcatcctcaaagaaagtgt

SEQ ID NO: 4285477 - DNA, 25 bp, Homo sapien
aattggatttcctaatactgtcatc

SEQ ID NO: 4285478 - DNA, 25 bp, Homo sapien
gatttcctaatactgtcatcctcaa

SEQ ID NO: 4285479 - DNA, 25 bp, Homo sapien
gatgtagtattttttgtataattgg

SEQ ID NO: 4285480 - DNA, 25 bp, Homo sapien
cctaatactgtcatcctcaaagaaa

SEQ ID NO: 4285481 - DNA, 25 bp, Homo sapien
tccaattatacaaaaaatactacat

SEQ ID NO: 4285482 - DNA, 25 bp, Homo sapien
gatgacagtattaggaaatccaatt

SEQ ID NO: 4285483 - DNA, 25 bp, Homo sapien
acactttctttgaggatgacagtat

SEQ ID NO: 4285484 - DNA, 25 bp, Homo sapien
tttctttgaggatgacagtattagg

SEQ ID NO: 4285485 - DNA, 25 bp, Homo sapien
tgaggatgacagtattaggaaatcc

SEQ ID NO: 4285486 - DNA, 25 bp, Homo sapien
tctttgaggatgacagtattaggaa

SEQ ID NO: 4285487 - DNA, 25 bp, Homo sapien
gcaagcacagcccttatgcggttaa

SEQ ID NO: 4285488 - DNA, 25 bp, Homo sapien
agtgccacttaatgtatgttaccaa

SEQ ID NO: 4285489 - DNA, 25 bp, Homo sapien
gtctggcccaccagggtccttttga

SEQ ID NO: 4285490 - DNA, 25 bp, Homo sapien
caccaggcgctaattcaaggaattt

SEQ ID NO: 4285491 - DNA, 25 bp, Homo sapien
tattaacgatgtccaacccgtctgg

SEQ ID NO: 4285492 - DNA, 25 bp, Homo sapien
tcagggctttactccgtaacagatt

SEQ ID NO: 4285493 - DNA, 25 bp, Homo sapien
aatctgttacggagtaaagccctga

SEQ ID NO: 4285494 - DNA, 25 bp, Homo sapien
gccagacgggttggacatcgttaat

SEQ ID NO: 4285495 - DNA, 25 bp, Homo sapien
caaaattaaccgcataagggctgtg

SEQ ID NO: 4285496 - DNA, 25 bp, Homo sapien
aaattccttgaattagcgcctggtg

SEQ ID NO: 4285497 - DNA, 25 bp, Homo sapien
tcaaaaggaccctggtgggccagac

SEQ ID NO: 4285498 - DNA, 25 bp, Homo sapien
gttagagcagtgtcaaaaggaccct

SEQ ID NO: 4285499 - DNA, 25 bp, Homo sapien
aaaatctgggtgccttgtcttgtga

SEQ ID NO: 4285500 - DNA, 25 bp, Homo sapien
aaaaatctgggtgccttgtcttgtg

SEQ ID NO: 4285501 - DNA, 25 bp, Homo sapien
aaaaaatctgggtgccttgtcttgt

SEQ ID NO: 4285502 - DNA, 25 bp, Homo sapien
gaaaaaatctgggtgccttgtcttg

SEQ ID NO: 4285503 - DNA, 25 bp, Homo sapien
gaagaaaaaatctgggtgccttgtc

SEQ ID NO: 4285504 - DNA, 25 bp, Homo sapien
aagaaaaaatctgggtgccttgtct

SEQ ID NO: 4285505 - DNA, 25 bp, Homo sapien
caagacaaggcacccagattttttc

SEQ ID NO: 4285506 - DNA, 25 bp, Homo sapien
acaagacaaggcacccagatttttt

SEQ ID NO: 4285507 - DNA, 25 bp, Homo sapien
cacaagacaaggcacccagattttt

SEQ ID NO: 4285508 - DNA, 25 bp, Homo sapien
gacaaggcacccagattttttcttc

SEQ ID NO: 4285509 - DNA, 25 bp, Homo sapien
agacaaggcacccagattttttctt

SEQ ID NO: 4285510 - DNA, 25 bp, Homo sapien
tcacaagacaaggcacccagatttt

SEQ ID NO: 4285511 - DNA, 25 bp, Homo sapien
gaaatggctacgagagctgctctgc

SEQ ID NO: 4285512 - DNA, 25 bp, Homo sapien
ttgaaatggctacgagagctgctct

SEQ ID NO: 4285513 - DNA, 25 bp, Homo sapien
aggtttttgaaatggctacgagagc

SEQ ID NO: 4285514 - DNA, 25 bp, Homo sapien
caggattggcgcttttgggtacatg

SEQ ID NO: 4285515 - DNA, 25 bp, Homo sapien
gagccggtgaaacctgaagaaggca

SEQ ID NO: 4285516 - DNA, 25 bp, Homo sapien
tggcaaacaggattggcgcttttgg

SEQ ID NO: 4285517 - DNA, 25 bp, Homo sapien
tgccttcttcaggtttcaccggctc

SEQ ID NO: 4285518 - DNA, 25 bp, Homo sapien
agagcagctctcgtagccatttcaa

SEQ ID NO: 4285519 - DNA, 25 bp, Homo sapien
ccaaaagcgccaatcctgtttgcca

SEQ ID NO: 4285520 - DNA, 25 bp, Homo sapien
atgtacccaaaagcgccaatcctgt

SEQ ID NO: 4285521 - DNA, 25 bp, Homo sapien
gctctcgtagccatttcaaaaacct

SEQ ID NO: 4285522 - DNA, 25 bp, Homo sapien
gcagagcagctctcgtagccatttc

SEQ ID NO: 4285523 - DNA, 25 bp, Homo sapien
tactatatgtatgccacactattag

SEQ ID NO: 4285524 - DNA, 25 bp, Homo sapien
cttactatatgtatgccacactatt

SEQ ID NO: 4285525 - DNA, 25 bp, Homo sapien
atatgtatgccacactattagctaa

SEQ ID NO: 4285526 - DNA, 25 bp, Homo sapien
tatatgtatgccacactattagcta

SEQ ID NO: 4285527 - DNA, 25 bp, Homo sapien
ctatatgtatgccacactattagct

SEQ ID NO: 4285528 - DNA, 25 bp, Homo sapien
acttactatatgtatgccacactat

SEQ ID NO: 4285529 - DNA, 25 bp, Homo sapien
atagtgtggcatacatatagtaagt

SEQ ID NO: 4285530 - DNA, 25 bp, Homo sapien
aatagtgtggcatacatatagtaag

SEQ ID NO: 4285531 - DNA, 25 bp, Homo sapien
agctaatagtgtggcatacatatag

SEQ ID NO: 4285532 - DNA, 25 bp, Homo sapien
ttagctaatagtgtggcatacatat

SEQ ID NO: 4285533 - DNA, 25 bp, Homo sapien
ctaatagtgtggcatacatatagta

SEQ ID NO: 4285534 - DNA, 25 bp, Homo sapien
tagctaatagtgtggcatacatata

SEQ ID NO: 4285535 - DNA, 25 bp, Homo sapien
tactatatgtatgccacactattag

SEQ ID NO: 4285536 - DNA, 25 bp, Homo sapien
tatgccacactattagctaaaagga

SEQ ID NO: 4285537 - DNA, 25 bp, Homo sapien
atatgtatgccacactattagctaa

SEQ ID NO: 4285538 - DNA, 25 bp, Homo sapien
cactattagctaaaaggactatttt

SEQ ID NO: 4285539 - DNA, 25 bp, Homo sapien
tatatgtatgccacactattagcta

SEQ ID NO: 4285540 - DNA, 25 bp, Homo sapien
acttactatatgtatgccacactat

SEQ ID NO: 4285541 - DNA, 25 bp, Homo sapien
ccttttagctaatagtgtggcatac

SEQ ID NO: 4285542 - DNA, 25 bp, Homo sapien
tagtccttttagctaatagtgtggc

SEQ ID NO: 4285543 - DNA, 25 bp, Homo sapien
aaaatagtccttttagctaatagtg

SEQ ID NO: 4285544 - DNA, 25 bp, Homo sapien
atagtgtggcatacatatagtaagt

SEQ ID NO: 4285545 - DNA, 25 bp, Homo sapien
ttagctaatagtgtggcatacatat

SEQ ID NO: 4285546 - DNA, 25 bp, Homo sapien
ctaatagtgtggcatacatatagta

SEQ ID NO: 4285547 - DNA, 25 bp, Homo sapien
gagcctcactgtgtcgccaggctgg

SEQ ID NO: 4285548 - DNA, 25 bp, Homo sapien
ctcccagatttaagcgattcccctg

SEQ ID NO: 4285549 - DNA, 25 bp, Homo sapien
tcccagatttaagcgattcccctgc

SEQ ID NO: 4285550 - DNA, 25 bp, Homo sapien
ccagatttaagcgattcccctgcct

SEQ ID NO: 4285551 - DNA, 25 bp, Homo sapien
agatttaagcgattcccctgcctca

SEQ ID NO: 4285552 - DNA, 25 bp, Homo sapien
agcctcactgtgtcgccaggctgga

SEQ ID NO: 4285553 - DNA, 25 bp, Homo sapien
tgtggtagtgggcgcctgtaacccc

SEQ ID NO: 4285554 - DNA, 25 bp, Homo sapien
ctccagcctggcgacacagtgaggc

SEQ ID NO: 4285555 - DNA, 25 bp, Homo sapien
tccagcctggcgacacagtgaggct

SEQ ID NO: 4285556 - DNA, 25 bp, Homo sapien
caggggaatcgcttaaatctgggag

SEQ ID NO: 4285557 - DNA, 25 bp, Homo sapien
gcaggggaatcgcttaaatctggga

SEQ ID NO: 4285558 - DNA, 25 bp, Homo sapien
ccagcctggcgacacagtgaggctc

SEQ ID NO: 4285559 - DNA, 25 bp, Homo sapien
atgagcacacaaggcgggagctagc

SEQ ID NO: 4285560 - DNA, 25 bp, Homo sapien
aatgatgagcacacaaggcgggagc

SEQ ID NO: 4285561 - DNA, 25 bp, Homo sapien
caaggcgggagctagccaagatgaa

SEQ ID NO: 4285562 - DNA, 25 bp, Homo sapien
gaaggatcttcggaatgatgagcac

SEQ ID NO: 4285563 - DNA, 25 bp, Homo sapien
acacaaggcgggagctagccaagat

SEQ ID NO: 4285564 - DNA, 25 bp, Homo sapien
gttgggaataagaaggatcttcgga

SEQ ID NO: 4285565 - DNA, 25 bp, Homo sapien
tagctcccgccttgtgtgctcatca

SEQ ID NO: 4285566 - DNA, 25 bp, Homo sapien
gtgtgctcatcattccgaagatcct

SEQ ID NO: 4285567 - DNA, 25 bp, Homo sapien
tcttggctagctcccgccttgtgtg

SEQ ID NO: 4285568 - DNA, 25 bp, Homo sapien
ttcatcttggctagctcccgccttg

SEQ ID NO: 4285569 - DNA, 25 bp, Homo sapien
tccgaagatccttcttattcccaac

SEQ ID NO: 4285570 - DNA, 25 bp, Homo sapien
cgccttgtgtgctcatcattccgaa

SEQ ID NO: 4285571 - DNA, 25 bp, Homo sapien
cagaaaagtggaccccagaagtcaa

SEQ ID NO: 4285572 - DNA, 25 bp, Homo sapien
gtcaagcatttctgtcccaacgtgc

SEQ ID NO: 4285573 - DNA, 25 bp, Homo sapien
caagcatttctgtcccaacgtgccc

SEQ ID NO: 4285574 - DNA, 25 bp, Homo sapien
tcaagcatttctgtcccaacgtgcc

SEQ ID NO: 4285575 - DNA, 25 bp, Homo sapien
agtcaagcatttctgtcccaacgtg

SEQ ID NO: 4285576 - DNA, 25 bp, Homo sapien
gggcacgttgggacagaaatgcttg

SEQ ID NO: 4285577 - DNA, 25 bp, Homo sapien
gcacgttgggacagaaatgcttgac

SEQ ID NO: 4285578 - DNA, 25 bp, Homo sapien
ggcacgttgggacagaaatgcttga

SEQ ID NO: 4285579 - DNA, 25 bp, Homo sapien
cacgttgggacagaaatgcttgact

SEQ ID NO: 4285580 - DNA, 25 bp, Homo sapien
ttgacttctggggtccacttttctg

SEQ ID NO: 4285581 - DNA, 25 bp, Homo sapien
agtggaccccagaagtcaagcattt

SEQ ID NO: 4285582 - DNA, 25 bp, Homo sapien
cagaaaagtggaccccagaagtcaa

SEQ ID NO: 4285583 - DNA, 25 bp, Homo sapien
agtcaagcatttctgtcccaacgtg

SEQ ID NO: 4285584 - DNA, 25 bp, Homo sapien
aaaagtggaccccagaagtcaagca

SEQ ID NO: 4285585 - DNA, 25 bp, Homo sapien
atttctgtcccaacgtgcccatcat

SEQ ID NO: 4285586 - DNA, 25 bp, Homo sapien
aacatcccagaaaagtggaccccag

SEQ ID NO: 4285587 - DNA, 25 bp, Homo sapien
tgtatgtatccccaaattctctaca

SEQ ID NO: 4285588 - DNA, 25 bp, Homo sapien
gaaagtgtctctgcaatttcactga

SEQ ID NO: 4285589 - DNA, 25 bp, Homo sapien
actgagaaaaagctgttggttctct

SEQ ID NO: 4285590 - DNA, 25 bp, Homo sapien
tatggttttgaaactagtgagtttc

SEQ ID NO: 4285591 - DNA, 25 bp, Homo sapien
ccttgtgttgtggatcttttgctcc

SEQ ID NO: 4285592 - DNA, 25 bp, Homo sapien
cttcaagatagaattgtatgtatcc

SEQ ID NO: 4285593 - DNA, 25 bp, Homo sapien
cccgagtaagggctctggaggagca

SEQ ID NO: 4285594 - DNA, 25 bp, Homo sapien
gcaaaagatccacaacacaaggtag

SEQ ID NO: 4285595 - DNA, 25 bp, Homo sapien
gaaactcactagtttcaaaaccata

SEQ ID NO: 4285596 - DNA, 25 bp, Homo sapien
cctcagtgaaattgcagagacactt

SEQ ID NO: 4285597 - DNA, 25 bp, Homo sapien
ggatacatacaattctatcttgaag

SEQ ID NO: 4285598 - DNA, 25 bp, Homo sapien
agagaaccaacagctttttctcagt

SEQ ID NO: 4285599 - DNA, 25 bp, Homo sapien
acagaacatctattctaggccaggc

SEQ ID NO: 4285600 - DNA, 25 bp, Homo sapien
aacagaacatctattctaggccagg

SEQ ID NO: 4285601 - DNA, 25 bp, Homo sapien
gcctggcctagaatagatgttctgt

SEQ ID NO: 4285602 - DNA, 25 bp, Homo sapien
cctggcctagaatagatgttctgtt

SEQ ID NO: 4285603 - DNA, 25 bp, Homo sapien
acagaacatctattctaggccaggc

SEQ ID NO: 4285604 - DNA, 25 bp, Homo sapien
gaacatctattctaggccaggcact

SEQ ID NO: 4285605 - DNA, 25 bp, Homo sapien
aacagaacatctattctaggccagg

SEQ ID NO: 4285606 - DNA, 25 bp, Homo sapien
aacatctattctaggccaggcactg

SEQ ID NO: 4285607 - DNA, 25 bp, Homo sapien
cagaacatctattctaggccaggca

SEQ ID NO: 4285608 - DNA, 25 bp, Homo sapien
acatctattctaggccaggcactgt

SEQ ID NO: 4285609 - DNA, 25 bp, Homo sapien
acagtgcctggcctagaatagatgt

SEQ ID NO: 4285610 - DNA, 25 bp, Homo sapien
gcctggcctagaatagatgttctgt

SEQ ID NO: 4285611 - DNA, 25 bp, Homo sapien
agtgcctggcctagaatagatgttc

SEQ ID NO: 4285612 - DNA, 25 bp, Homo sapien
cagtgcctggcctagaatagatgtt

SEQ ID NO: 4285613 - DNA, 25 bp, Homo sapien
cctggcctagaatagatgttctgtt

SEQ ID NO: 4285614 - DNA, 25 bp, Homo sapien
tgcctggcctagaatagatgttctg

SEQ ID NO: 4285615 - DNA, 25 bp, Homo sapien
ccatgccgttggttcacttagatca

SEQ ID NO: 4285616 - DNA, 25 bp, Homo sapien
gctccaagatattgagccacttgtt

SEQ ID NO: 4285617 - DNA, 25 bp, Homo sapien
tggcctcgggttgcctggatagtta

SEQ ID NO: 4285618 - DNA, 25 bp, Homo sapien
caaggatgttgtcgtcattaccaca

SEQ ID NO: 4285619 - DNA, 25 bp, Homo sapien
gagctaagattgagtcctctgtgca

SEQ ID NO: 4285620 - DNA, 25 bp, Homo sapien
gagaaagagcacgtattccatgccg

SEQ ID NO: 4285621 - DNA, 25 bp, Homo sapien
ggagcaaccccagttatcatcatta

SEQ ID NO: 4285622 - DNA, 25 bp, Homo sapien
tactgcacagaggactcaatcttag

SEQ ID NO: 4285623 - DNA, 25 bp, Homo sapien
tgatctaagtgaaccaacggcatgg

SEQ ID NO: 4285624 - DNA, 25 bp, Homo sapien
taacactaactatccaggcaacccg

SEQ ID NO: 4285625 - DNA, 25 bp, Homo sapien
aacaagtggctcaatatcttggagc

SEQ ID NO: 4285626 - DNA, 25 bp, Homo sapien
tgtggtaatgacgacaacatccttg

SEQ ID NO: 4285627 - DNA, 25 bp, Homo sapien
cagataccgatgttatactgatgtg

SEQ ID NO: 4285628 - DNA, 25 bp, Homo sapien
gataccgatgttatactgatgtgtt

SEQ ID NO: 4285629 - DNA, 25 bp, Homo sapien
cccagataccgatgttatactgatg

SEQ ID NO: 4285630 - DNA, 25 bp, Homo sapien
tacccagataccgatgttatactga

SEQ ID NO: 4285631 - DNA, 25 bp, Homo sapien
ctctcctacccagataccgatgtta

SEQ ID NO: 4285632 - DNA, 25 bp, Homo sapien
tcctacccagataccgatgttatac

SEQ ID NO: 4285633 - DNA, 25 bp, Homo sapien
cacatcagtataacatcggtatctg

SEQ ID NO: 4285634 - DNA, 25 bp, Homo sapien
catcagtataacatcggtatctggg

SEQ ID NO: 4285635 - DNA, 25 bp, Homo sapien
aacacatcagtataacatcggtatc

SEQ ID NO: 4285636 - DNA, 25 bp, Homo sapien
tataacatcggtatctgggtaggag

SEQ ID NO: 4285637 - DNA, 25 bp, Homo sapien
taacatcggtatctgggtaggagag

SEQ ID NO: 4285638 - DNA, 25 bp, Homo sapien
agtataacatcggtatctgggtagg

SEQ ID NO: 4285639 - DNA, 25 bp, Homo sapien
tctgccatttcaatggtctgccatt

SEQ ID NO: 4285640 - DNA, 25 bp, Homo sapien
aatggcagaccattgaaatggcaga

SEQ ID NO: 4285641 - DNA, 25 bp, Homo sapien
tggtctgccatttcaatgtactatg

SEQ ID NO: 4285642 - DNA, 25 bp, Homo sapien
tctgccatttcaatggtctgccatt

SEQ ID NO: 4285643 - DNA, 25 bp, Homo sapien
gccatttcaatggtctgccatttca

SEQ ID NO: 4285644 - DNA, 25 bp, Homo sapien
tgccatttcaatggtctgccatttc

SEQ ID NO: 4285645 - DNA, 25 bp, Homo sapien
ccatttcaatggtctgccatttcaa

SEQ ID NO: 4285646 - DNA, 25 bp, Homo sapien
aatggtctgccatttcaatgtacta

SEQ ID NO: 4285647 - DNA, 25 bp, Homo sapien
tgaaatggcagaccattgaaatggc

SEQ ID NO: 4285648 - DNA, 25 bp, Homo sapien
catagtacattgaaatggcagacca

SEQ ID NO: 4285649 - DNA, 25 bp, Homo sapien
ttgaaatggcagaccattgaaatgg

SEQ ID NO: 4285650 - DNA, 25 bp, Homo sapien
gaaatggcagaccattgaaatggca

SEQ ID NO: 4285651 - DNA, 25 bp, Homo sapien
aatggcagaccattgaaatggcaga

SEQ ID NO: 4285652 - DNA, 25 bp, Homo sapien
tagtacattgaaatggcagaccatt

SEQ ID NO: 4285653 - DNA, 25 bp, Homo sapien
caccttacgtgatgcattatttcag

SEQ ID NO: 4285654 - DNA, 25 bp, Homo sapien
cggatgtgaaaggagtactctctca

SEQ ID NO: 4285655 - DNA, 25 bp, Homo sapien
tgaatgggacttgtattcagagccc

SEQ ID NO: 4285656 - DNA, 25 bp, Homo sapien
gagggagacctcttgggcctcaaag

SEQ ID NO: 4285657 - DNA, 25 bp, Homo sapien
ttcttgagtagtaaaggcacagcca

SEQ ID NO: 4285658 - DNA, 25 bp, Homo sapien
cagagcccaggcatcagtttaccct

SEQ ID NO: 4285659 - DNA, 25 bp, Homo sapien
ggatgcatcacaaataacctccaca

SEQ ID NO: 4285660 - DNA, 25 bp, Homo sapien
tcacgtaaggtgagagagtactcct

SEQ ID NO: 4285661 - DNA, 25 bp, Homo sapien
cctttgaggcccaagaggtctccct

SEQ ID NO: 4285662 - DNA, 25 bp, Homo sapien
tagaagggtaaactgatgcctgggc

SEQ ID NO: 4285663 - DNA, 25 bp, Homo sapien
tggctgtgcctttactactcaagaa

SEQ ID NO: 4285664 - DNA, 25 bp, Homo sapien
gcctgggctctgaatacaagtccca

SEQ ID NO: 4285665 - DNA, 25 bp, Homo sapien
agaggtgtatgtgcccacagtgttt

SEQ ID NO: 4285666 - DNA, 25 bp, Homo sapien
ggtgattgttggtgatggagcctgt

SEQ ID NO: 4285667 - DNA, 25 bp, Homo sapien
tgccatccggaagaaactggtgatt

SEQ ID NO: 4285668 - DNA, 25 bp, Homo sapien
ccatccggaagaaactggtgattgt

SEQ ID NO: 4285669 - DNA, 25 bp, Homo sapien
gtatgtgcccacagtgtttgagaac

SEQ ID NO: 4285670 - DNA, 25 bp, Homo sapien
ggctgccatccggaagaaactggtg

SEQ ID NO: 4285671 - DNA, 25 bp, Homo sapien
aaacactgtgggcacatacacctct

SEQ ID NO: 4285672 - DNA, 25 bp, Homo sapien
acaatcaccagtttcttccggatgg

SEQ ID NO: 4285673 - DNA, 25 bp, Homo sapien
gttctcaaacactgtgggcacatac

SEQ ID NO: 4285674 - DNA, 25 bp, Homo sapien
caccagtttcttccggatggcagcc

SEQ ID NO: 4285675 - DNA, 25 bp, Homo sapien
aatcaccagtttcttccggatggca

SEQ ID NO: 4285676 - DNA, 25 bp, Homo sapien
acaggctccatcaccaacaatcacc

SEQ ID NO: 4285677 - DNA, 25 bp, Homo sapien
tgggtacatgccactacgtccaact

SEQ ID NO: 4285678 - DNA, 25 bp, Homo sapien
catgagccattactcctagccttga

SEQ ID NO: 4285679 - DNA, 25 bp, Homo sapien
ttgtttgaagatatgcattgagcac

SEQ ID NO: 4285680 - DNA, 25 bp, Homo sapien
tcctagccttgactgcatgctcttg

SEQ ID NO: 4285681 - DNA, 25 bp, Homo sapien
gatatgcttcttattgtgctttcat

SEQ ID NO: 4285682 - DNA, 25 bp, Homo sapien
catttccctatcatcgatatgcttc

SEQ ID NO: 4285683 - DNA, 25 bp, Homo sapien
tcaaggctaggagtaatggctcatg

SEQ ID NO: 4285684 - DNA, 25 bp, Homo sapien
caagagcatgcagtcaaggctagga

SEQ ID NO: 4285685 - DNA, 25 bp, Homo sapien
tgctcaatgcatatcttcaaacaag

SEQ ID NO: 4285686 - DNA, 25 bp, Homo sapien
taaaaataagttggacgtagtggca

SEQ ID NO: 4285687 - DNA, 25 bp, Homo sapien
gttggacgtagtggcatgtacccat

SEQ ID NO: 4285688 - DNA, 25 bp, Homo sapien
taagaagcatatcgatgatagggaa

SEQ ID NO: 4285689 - DNA, 25 bp, Homo sapien
gaccccttacctcatatcatgtatg

SEQ ID NO: 4285690 - DNA, 25 bp, Homo sapien
taaaccctcagttgctaattagttg

SEQ ID NO: 4285691 - DNA, 25 bp, Homo sapien
tggtactagtataaaggtggacaat

SEQ ID NO: 4285692 - DNA, 25 bp, Homo sapien
gctgaggtgactagatttccaaatg

SEQ ID NO: 4285693 - DNA, 25 bp, Homo sapien
gctaattagttgatttctcaagtgt

SEQ ID NO: 4285694 - DNA, 25 bp, Homo sapien
taatccaaagtaaaccctcagttgc

SEQ ID NO: 4285695 - DNA, 25 bp, Homo sapien
tttcatacatgatatgaggtaaggg

SEQ ID NO: 4285696 - DNA, 25 bp, Homo sapien
gcaactgagggtttactttggatta

SEQ ID NO: 4285697 - DNA, 25 bp, Homo sapien
gaaatcaactaattagcaactgagg

SEQ ID NO: 4285698 - DNA, 25 bp, Homo sapien
tattgtccacctttatactagtacc

SEQ ID NO: 4285699 - DNA, 25 bp, Homo sapien
cacttgagaaatcaactaattagca

SEQ ID NO: 4285700 - DNA, 25 bp, Homo sapien
catttggaaatctagtcacctcagc

SEQ ID NO: 4285701 - DNA, 25 bp, Homo sapien
tagacatagacagagttaatcaaat

SEQ ID NO: 4285702 - DNA, 25 bp, Homo sapien
cacgcccggtcatgtaacagtttta

SEQ ID NO: 4285703 - DNA, 25 bp, Homo sapien
ttaaaaagcccatacggtcatactg

SEQ ID NO: 4285704 - DNA, 25 bp, Homo sapien
tgccacgcccggtcatgtaacagtt

SEQ ID NO: 4285705 - DNA, 25 bp, Homo sapien
acggtcatactgaatatagacatag

SEQ ID NO: 4285706 - DNA, 25 bp, Homo sapien
gcccatacggtcatactgaatatag

SEQ ID NO: 4285707 - DNA, 25 bp, Homo sapien
ctatgtctatattcagtatgaccgt

SEQ ID NO: 4285708 - DNA, 25 bp, Homo sapien
tatttgattaactctgtctatgtct

SEQ ID NO: 4285709 - DNA, 25 bp, Homo sapien
aaactgttacatgaccgggcgtggc

SEQ ID NO: 4285710 - DNA, 25 bp, Homo sapien
cagtatgaccgtatgggctttttaa

SEQ ID NO: 4285711 - DNA, 25 bp, Homo sapien
taaaactgttacatgaccgggcgtg

SEQ ID NO: 4285712 - DNA, 25 bp, Homo sapien
tatattcagtatgaccgtatgggct

SEQ ID NO: 4285713 - DNA, 25 bp, Homo sapien
cttctcaggttcaagcaattttcct

SEQ ID NO: 4285714 - DNA, 25 bp, Homo sapien
ttctcaggttcaagcaattttcctg

SEQ ID NO: 4285715 - DNA, 25 bp, Homo sapien
gcttctcaggttcaagcaattttcc

SEQ ID NO: 4285716 - DNA, 25 bp, Homo sapien
cattgcaacctctgcttctcaggtt

SEQ ID NO: 4285717 - DNA, 25 bp, Homo sapien
tgcttctcaggttcaagcaattttc

SEQ ID NO: 4285718 - DNA, 25 bp, Homo sapien
attgcaacctctgcttctcaggttc

SEQ ID NO: 4285719 - DNA, 25 bp, Homo sapien
aaaattgcttgaacctgagaagcag

SEQ ID NO: 4285720 - DNA, 25 bp, Homo sapien
ggaaaattgcttgaacctgagaagc

SEQ ID NO: 4285721 - DNA, 25 bp, Homo sapien
caggaaaattgcttgaacctgagaa

SEQ ID NO: 4285722 - DNA, 25 bp, Homo sapien
gaaaattgcttgaacctgagaagca

SEQ ID NO: 4285723 - DNA, 25 bp, Homo sapien
aggaaaattgcttgaacctgagaag

SEQ ID NO: 4285724 - DNA, 25 bp, Homo sapien
aacctgagaagcagaggttgcaatg

SEQ ID NO: 4285725 - DNA, 25 bp, Homo sapien
tgagctatagttatcccaggaaatc

SEQ ID NO: 4285726 - DNA, 25 bp, Homo sapien
tagcagagctccctaaagctcagaa

SEQ ID NO: 4285727 - DNA, 25 bp, Homo sapien
tctttctatagcagagctccctaaa

SEQ ID NO: 4285728 - DNA, 25 bp, Homo sapien
taaagtgtgaaaaggactggccttc

SEQ ID NO: 4285729 - DNA, 25 bp, Homo sapien
cccaggaaatcactttgacttgtaa

SEQ ID NO: 4285730 - DNA, 25 bp, Homo sapien
caatgcagatgagctatagttatcc

SEQ ID NO: 4285731 - DNA, 25 bp, Homo sapien
gaaggccagtccttttcacacttta

SEQ ID NO: 4285732 - DNA, 25 bp, Homo sapien
ggataactatagctcatctgcattg

SEQ ID NO: 4285733 - DNA, 25 bp, Homo sapien
gatttcctgggataactatagctca

SEQ ID NO: 4285734 - DNA, 25 bp, Homo sapien
tacaagtcaaagtgatttcctggga

SEQ ID NO: 4285735 - DNA, 25 bp, Homo sapien
ttctgagctttagggagctctgcta

SEQ ID NO: 4285736 - DNA, 25 bp, Homo sapien
ttagggagctctgctatagaaagaa

SEQ ID NO: 4285737 - DNA, 25 bp, Homo sapien
ggaaatagacctgccgctcagaacc

SEQ ID NO: 4285738 - DNA, 25 bp, Homo sapien
cctgttctggagttaagtccttcca

SEQ ID NO: 4285739 - DNA, 25 bp, Homo sapien
agtgctgctgaaccccaaactaagc

SEQ ID NO: 4285740 - DNA, 25 bp, Homo sapien
tgggcctagggaatctgagaagcac

SEQ ID NO: 4285741 - DNA, 25 bp, Homo sapien
tgggttctgcctggagagtccctat

SEQ ID NO: 4285742 - DNA, 25 bp, Homo sapien
agtccttccaagatgggcctaggga

SEQ ID NO: 4285743 - DNA, 25 bp, Homo sapien
gtgcttctcagattccctaggccca

SEQ ID NO: 4285744 - DNA, 25 bp, Homo sapien
tggaaggacttaactccagaacagg

SEQ ID NO: 4285745 - DNA, 25 bp, Homo sapien
gaacaggttctgagcggcaggtcta

SEQ ID NO: 4285746 - DNA, 25 bp, Homo sapien
atagggactctccaggcagaaccca

SEQ ID NO: 4285747 - DNA, 25 bp, Homo sapien
tccctaggcccatcttggaaggact

SEQ ID NO: 4285748 - DNA, 25 bp, Homo sapien
ttagggatgaggctaatagggactc

SEQ ID NO: 4285749 - DNA, 25 bp, Homo sapien
cagatcttgtactcctgggctcaag

SEQ ID NO: 4285750 - DNA, 25 bp, Homo sapien
gctatgttgcccagacagatcttgt

SEQ ID NO: 4285751 - DNA, 25 bp, Homo sapien
tgcccagacagatcttgtactcctg

SEQ ID NO: 4285752 - DNA, 25 bp, Homo sapien
tgttgcccagacagatcttgtactc

SEQ ID NO: 4285753 - DNA, 25 bp, Homo sapien
cagacagatcttgtactcctgggct

SEQ ID NO: 4285754 - DNA, 25 bp, Homo sapien
tatgttgcccagacagatcttgtac

SEQ ID NO: 4285755 - DNA, 25 bp, Homo sapien
ttgagcccaggagtacaagatctgt

SEQ ID NO: 4285756 - DNA, 25 bp, Homo sapien
cttgagcccaggagtacaagatctg

SEQ ID NO: 4285757 - DNA, 25 bp, Homo sapien
acaagatctgtctgggcaacatagc

SEQ ID NO: 4285758 - DNA, 25 bp, Homo sapien
caggagtacaagatctgtctgggca

SEQ ID NO: 4285759 - DNA, 25 bp, Homo sapien
gagtacaagatctgtctgggcaaca

SEQ ID NO: 4285760 - DNA, 25 bp, Homo sapien
gagcccaggagtacaagatctgtct

SEQ ID NO: 4285761 - DNA, 25 bp, Homo sapien
tatgataatttggacaaatataaaa

SEQ ID NO: 4285762 - DNA, 25 bp, Homo sapien
aaaggaattcctggctgggagcagt

SEQ ID NO: 4285763 - DNA, 25 bp, Homo sapien
ccattctgactaaatagtaaactaa

SEQ ID NO: 4285764 - DNA, 25 bp, Homo sapien
caaatataaaaaggaattcctggct

SEQ ID NO: 4285765 - DNA, 25 bp, Homo sapien
taaactaatatgataatttggacaa

SEQ ID NO: 4285766 - DNA, 25 bp, Homo sapien
tgctgtgagcagagatcgagccatt

SEQ ID NO: 4285767 - DNA, 25 bp, Homo sapien
cactttggaagtgctgggcaggtgg

SEQ ID NO: 4285768 - DNA, 25 bp, Homo sapien
gccgggattataggcgcctgctgcc

SEQ ID NO: 4285769 - DNA, 25 bp, Homo sapien
actgctcccagccaggaattccttt

SEQ ID NO: 4285770 - DNA, 25 bp, Homo sapien
ttagtttactatttagtcagaatgg

SEQ ID NO: 4285771 - DNA, 25 bp, Homo sapien
aatggctcgatctctgctcacagca

SEQ ID NO: 4285772 - DNA, 25 bp, Homo sapien
cccagccaggaattcctttttatat

SEQ ID NO: 4285773 - DNA, 25 bp, Homo sapien
tgtccaaattatcatattagtttac

SEQ ID NO: 4285774 - DNA, 25 bp, Homo sapien
gtgtatgtgtgtgtgtatatatata

SEQ ID NO: 4285775 - DNA, 25 bp, Homo sapien
gtacatatacgtgtgtgtatgtgtg

SEQ ID NO: 4285776 - DNA, 25 bp, Homo sapien
tgtacatatacgtgtgtgtatgtgt

SEQ ID NO: 4285777 - DNA, 25 bp, Homo sapien
gtgtacatatacgtgtgtgtatgtg

SEQ ID NO: 4285778 - DNA, 25 bp, Homo sapien
atgtgtacatatacgtgtgtgtatg

SEQ ID NO: 4285779 - DNA, 25 bp, Homo sapien
tgtgtacatatacgtgtgtgtatgt

SEQ ID NO: 4285780 - DNA, 25 bp, Homo sapien
cacacatacacacacgtatatgtac

SEQ ID NO: 4285781 - DNA, 25 bp, Homo sapien
catacacacacgtatatgtacacat

SEQ ID NO: 4285782 - DNA, 25 bp, Homo sapien
tatatatatacacacacacatacac

SEQ ID NO: 4285783 - DNA, 25 bp, Homo sapien
cacatacacacacgtatatgtacac

SEQ ID NO: 4285784 - DNA, 25 bp, Homo sapien
acatacacacacgtatatgtacaca

SEQ ID NO: 4285785 - DNA, 25 bp, Homo sapien
acacatacacacacgtatatgtaca

SEQ ID NO: 4285786 - DNA, 25 bp, Homo sapien
gcattgtggttactagtgattatga

SEQ ID NO: 4285787 - DNA, 25 bp, Homo sapien
gagctgagagatatatgttaactct

SEQ ID NO: 4285788 - DNA, 25 bp, Homo sapien
cgtctttttaattgtcttagagagc

SEQ ID NO: 4285789 - DNA, 25 bp, Homo sapien
tggccttctgtagacagcaccttgg

SEQ ID NO: 4285790 - DNA, 25 bp, Homo sapien
cagcaccttgggtttaattgcattg

SEQ ID NO: 4285791 - DNA, 25 bp, Homo sapien
ctggagaaggtgctagtttgcgtct

SEQ ID NO: 4285792 - DNA, 25 bp, Homo sapien
gctctctaagacaattaaaaagacg

SEQ ID NO: 4285793 - DNA, 25 bp, Homo sapien
caaggtgctgtctacagaaggccag

SEQ ID NO: 4285794 - DNA, 25 bp, Homo sapien
gacgcaaactagcaccttctccagt

SEQ ID NO: 4285795 - DNA, 25 bp, Homo sapien
taaaactacaactatatggccaatt

SEQ ID NO: 4285796 - DNA, 25 bp, Homo sapien
tcataatcactagtaaccacaatgc

SEQ ID NO: 4285797 - DNA, 25 bp, Homo sapien
caatgcaattaaacccaaggtgctg

SEQ ID NO: 4285798 - DNA, 25 bp, Homo sapien
gccttcgtctccgagtttgcgactc

SEQ ID NO: 4285799 - DNA, 25 bp, Homo sapien
gttagtccacggtctggtcttcagc

SEQ ID NO: 4285800 - DNA, 25 bp, Homo sapien
tctctcgttagtccacggtctggtc

SEQ ID NO: 4285801 - DNA, 25 bp, Homo sapien
tccgagtttgcgactcgcggaccgg

SEQ ID NO: 4285802 - DNA, 25 bp, Homo sapien
tcggttctctcgttagtccacggtc

SEQ ID NO: 4285803 - DNA, 25 bp, Homo sapien
ggtcttcagctacccgccttcgtct

SEQ ID NO: 4285804 - DNA, 25 bp, Homo sapien
gaccagaccgtggactaacgagaga

SEQ ID NO: 4285805 - DNA, 25 bp, Homo sapien
cggtccgcgagtcgcaaactcggag

SEQ ID NO: 4285806 - DNA, 25 bp, Homo sapien
gaccgtggactaacgagagaaccga

SEQ ID NO: 4285807 - DNA, 25 bp, Homo sapien
agacgaaggcgggtagctgaagacc

SEQ ID NO: 4285808 - DNA, 25 bp, Homo sapien
gagtcgcaaactcggagacgaaggc

SEQ ID NO: 4285809 - DNA, 25 bp, Homo sapien
gctgaagaccagaccgtggactaac

SEQ ID NO: 4285810 - DNA, 25 bp, Homo sapien
gacctgtgccggctcgagcccgctg

SEQ ID NO: 4285811 - DNA, 25 bp, Homo sapien
tcggaggcgcgcacgtcgttccccg

SEQ ID NO: 4285812 - DNA, 25 bp, Homo sapien
gctctctcgcgctaccctcccgccg

SEQ ID NO: 4285813 - DNA, 25 bp, Homo sapien
gcactcggaggcgcgcacgtcgttc

SEQ ID NO: 4285814 - DNA, 25 bp, Homo sapien
aggcgcgcacgtcgttccccgccct

SEQ ID NO: 4285815 - DNA, 25 bp, Homo sapien
tgtgccggctcgagcccgctgggca

SEQ ID NO: 4285816 - DNA, 25 bp, Homo sapien
agggcggggaacgacgtgcgcgcct

SEQ ID NO: 4285817 - DNA, 25 bp, Homo sapien
ggcgggagggtagcgcgagagagcg

SEQ ID NO: 4285818 - DNA, 25 bp, Homo sapien
tgcccagcgggctcgagccggcaca

SEQ ID NO: 4285819 - DNA, 25 bp, Homo sapien
cagcgggctcgagccggcacaggtc

SEQ ID NO: 4285820 - DNA, 25 bp, Homo sapien
gaacgacgtgcgcgcctccgagtgc

SEQ ID NO: 4285821 - DNA, 25 bp, Homo sapien
ggcggcgggagggtagcgcgagaga

SEQ ID NO: 4285822 - DNA, 25 bp, Homo sapien
ggaggcgcgcacgtcgttccccgcc

SEQ ID NO: 4285823 - DNA, 25 bp, Homo sapien
gctctctcgcgctaccctcccgccg

SEQ ID NO: 4285824 - DNA, 25 bp, Homo sapien
gcactcggaggcgcgcacgtcgttc

SEQ ID NO: 4285825 - DNA, 25 bp, Homo sapien
ctcgagcccgctgggcactcggagg

SEQ ID NO: 4285826 - DNA, 25 bp, Homo sapien
tgtgccggctcgagcccgctgggca

SEQ ID NO: 4285827 - DNA, 25 bp, Homo sapien
gggccgcgacctgtgccggctcgag

SEQ ID NO: 4285828 - DNA, 25 bp, Homo sapien
cggcgggagggtagcgcgagagagc

SEQ ID NO: 4285829 - DNA, 25 bp, Homo sapien
gtagcgcgagagagcgagggcgggc

SEQ ID NO: 4285830 - DNA, 25 bp, Homo sapien
ctccgagtgcccagcgggctcgagc

SEQ ID NO: 4285831 - DNA, 25 bp, Homo sapien
cgcgggcggcgggagggtagcgcga

SEQ ID NO: 4285832 - DNA, 25 bp, Homo sapien
cagcgggctcgagccggcacaggtc

SEQ ID NO: 4285833 - DNA, 25 bp, Homo sapien
gaacgacgtgcgcgcctccgagtgc

SEQ ID NO: 4285834 - DNA, 25 bp, Homo sapien
tatccagatggaggcaccaaacacc

SEQ ID NO: 4285835 - DNA, 25 bp, Homo sapien
ggtgtacctgctggcactatccaga

SEQ ID NO: 4285836 - DNA, 25 bp, Homo sapien
caaggagccagggaatcctgacctg

SEQ ID NO: 4285837 - DNA, 25 bp, Homo sapien
ggttatttagctggccattcaggta

SEQ ID NO: 4285838 - DNA, 25 bp, Homo sapien
caagacattgtgtgagctggtccgt

SEQ ID NO: 4285839 - DNA, 25 bp, Homo sapien
gagtgagtctatgttccctcagcca

SEQ ID NO: 4285840 - DNA, 25 bp, Homo sapien
gcagcacactagaccaacttgggaa

SEQ ID NO: 4285841 - DNA, 25 bp, Homo sapien
catggtttgctactgggcagcacac

SEQ ID NO: 4285842 - DNA, 25 bp, Homo sapien
gtggtgtggcccctcaaccagacaa

SEQ ID NO: 4285843 - DNA, 25 bp, Homo sapien
agcttcttgactaaccccttgtagg

SEQ ID NO: 4285844 - DNA, 25 bp, Homo sapien
tcagcttcttgactaaccccttgta

SEQ ID NO: 4285845 - DNA, 25 bp, Homo sapien
tggcccctcaaccagacaattagaa

SEQ ID NO: 4285846 - DNA, 25 bp, Homo sapien
tgagggtatagtagtttgtgggcac

SEQ ID NO: 4285847 - DNA, 25 bp, Homo sapien
gtagtttgtgggcacaaagggcatc

SEQ ID NO: 4285848 - DNA, 25 bp, Homo sapien
ggcatcttgctgactacagccatct

SEQ ID NO: 4285849 - DNA, 25 bp, Homo sapien
gcatcttgctgactacagccatctg

SEQ ID NO: 4285850 - DNA, 25 bp, Homo sapien
gggcacataacccatcgccacattc

SEQ ID NO: 4285851 - DNA, 25 bp, Homo sapien
gtccctggacgactgtactcgcagg

SEQ ID NO: 4285852 - DNA, 25 bp, Homo sapien
gaggggcagccactagtcacagtac

SEQ ID NO: 4285853 - DNA, 25 bp, Homo sapien
accagcagcattgtccctggacgac

SEQ ID NO: 4285854 - DNA, 25 bp, Homo sapien
gaagtccatagcagctcggcggcgc

SEQ ID NO: 4285855 - DNA, 25 bp, Homo sapien
ccttcagctggggaacaatgacctt

SEQ ID NO: 4285856 - DNA, 25 bp, Homo sapien
tcagctggggaacaatgaccttggc

SEQ ID NO: 4285857 - DNA, 25 bp, Homo sapien
ggctccagggaagtccatagcagct

SEQ ID NO: 4285858 - DNA, 25 bp, Homo sapien
tgtcattcccatacaggcagaggcc

SEQ ID NO: 4285859 - DNA, 25 bp, Homo sapien
tccacaggtgtagtgtgttcatcaa

SEQ ID NO: 4285860 - DNA, 25 bp, Homo sapien
catcaatgtcattcccatacaggca

SEQ ID NO: 4285861 - DNA, 25 bp, Homo sapien
tagctgttgccaggtgaactgcccc

SEQ ID NO: 4285862 - DNA, 25 bp, Homo sapien
tgtatgaaacaccagagggcagatg

SEQ ID NO: 4285863 - DNA, 25 bp, Homo sapien
acatgcatcctgtgccctgtactgc

SEQ ID NO: 4285864 - DNA, 25 bp, Homo sapien
tgggaagctccctgtaccacatacc

SEQ ID NO: 4285865 - DNA, 25 bp, Homo sapien
agggcagatgggaagctccctgtac

SEQ ID NO: 4285866 - DNA, 25 bp, Homo sapien
tctcctgtgtagccacagcgggtca

SEQ ID NO: 4285867 - DNA, 25 bp, Homo sapien
cacagcgggtcacgcggcagccaga

SEQ ID NO: 4285868 - DNA, 25 bp, Homo sapien
ctcctgtgtagccacagcgggtcac

SEQ ID NO: 4285869 - DNA, 25 bp, Homo sapien
ggtcacgcggcagccagacacgcca

SEQ ID NO: 4285870 - DNA, 25 bp, Homo sapien
gccacgccggcctgtagtacctggg

SEQ ID NO: 4285871 - DNA, 25 bp, Homo sapien
tgccacgccggcctgtagtacctgg

SEQ ID NO: 4285872 - DNA, 25 bp, Homo sapien
ctgccacgccggcctgtagtacctg

SEQ ID NO: 4285873 - DNA, 25 bp, Homo sapien
tgtccctagcccatggagccttgtg

SEQ ID NO: 4285874 - DNA, 25 bp, Homo sapien
cagggagccagtgaccaagtatcca

SEQ ID NO: 4285875 - DNA, 25 bp, Homo sapien
agcatgtcttactctgcaagtggga

SEQ ID NO: 4285876 - DNA, 25 bp, Homo sapien
taagcagtcaatgaagccaggaagg

SEQ ID NO: 4285877 - DNA, 25 bp, Homo sapien
agcagggcattatccaacacctcca

SEQ ID NO: 4285878 - DNA, 25 bp, Homo sapien
gcagggcattatccaacacctccag

SEQ ID NO: 4285879 - DNA, 25 bp, Homo sapien
taagtgatagagatgacccaagccc

SEQ ID NO: 4285880 - DNA, 25 bp, Homo sapien
agctaccatgggctggacgctgcag

SEQ ID NO: 4285881 - DNA, 25 bp, Homo sapien
aaaggtagtaggctggttcccatct

SEQ ID NO: 4285882 - DNA, 25 bp, Homo sapien
ctgcagagctggacagtagtaggac

SEQ ID NO: 4285883 - DNA, 25 bp, Homo sapien
gcagccagcgttggacaccacatac

SEQ ID NO: 4285884 - DNA, 25 bp, Homo sapien
agcgttggacaccacatacaggtgg

SEQ ID NO: 4285885 - DNA, 25 bp, Homo sapien
agccagcgttggacaccacatacag

SEQ ID NO: 4285886 - DNA, 25 bp, Homo sapien
ccagcgttggacaccacatacaggt

SEQ ID NO: 4285887 - DNA, 25 bp, Homo sapien
tgcctccagcctcgttggtaaacag

SEQ ID NO: 4285888 - DNA, 25 bp, Homo sapien
tcgttggtaaacagcgacagtgtcc

SEQ ID NO: 4285889 - DNA, 25 bp, Homo sapien
ctaagatgcctccagcctcgttggt

SEQ ID NO: 4285890 - DNA, 25 bp, Homo sapien
ccagcctcgttggtaaacagcgaca

SEQ ID NO: 4285891 - DNA, 25 bp, Homo sapien
tcatcttgatgatcgcaggctctcc

SEQ ID NO: 4285892 - DNA, 25 bp, Homo sapien
tgggacgacttagcccatgtggcaa

SEQ ID NO: 4285893 - DNA, 25 bp, Homo sapien
aatctatgacacctaggacctgctg

SEQ ID NO: 4285894 - DNA, 25 bp, Homo sapien
gcaaggtacaagtctgggcccaagt

SEQ ID NO: 4285895 - DNA, 25 bp, Homo sapien
ctggtttggtcttagctctgcaatg

SEQ ID NO: 4285896 - DNA, 25 bp, Homo sapien
cacccggtcactaccaagtatcttg

SEQ ID NO: 4285897 - DNA, 25 bp, Homo sapien
cccggtcactaccaagtatcttggt

SEQ ID NO: 4285898 - DNA, 25 bp, Homo sapien
agcttcacccggtcactaccaagta

SEQ ID NO: 4285899 - DNA, 25 bp, Homo sapien
ttcacccggtcactaccaagtatct

SEQ ID NO: 4285900 - DNA, 25 bp, Homo sapien
gatgagatgatgagaccctctgagc

SEQ ID NO: 4285901 - DNA, 25 bp, Homo sapien
cagtcttttggttctacacgtggca

SEQ ID NO: 4285902 - DNA, 25 bp, Homo sapien
gctactaagcaaggatgcatcctcc

SEQ ID NO: 4285903 - DNA, 25 bp, Homo sapien
aatacatgagagtgggtgtcagccc

SEQ ID NO: 4285904 - DNA, 25 bp, Homo sapien
cggtactgcactggcagactccaac

SEQ ID NO: 4285905 - DNA, 25 bp, Homo sapien
agcgagcagtgctggcgtgtgtgca

SEQ ID NO: 4285906 - DNA, 25 bp, Homo sapien
caggtgcgagtcagtgtgactgtcc

SEQ ID NO: 4285907 - DNA, 25 bp, Homo sapien
cagtgtgactgtcccggtactgcac

SEQ ID NO: 4285908 - DNA, 25 bp, Homo sapien
cccgccgtgggccaggtggaagtca

SEQ ID NO: 4285909 - DNA, 25 bp, Homo sapien
tgggccaggtggaagtcatagagcg

SEQ ID NO: 4285910 - DNA, 25 bp, Homo sapien
caggtggaagtcatagagcggtgtc

SEQ ID NO: 4285911 - DNA, 25 bp, Homo sapien
ccgtgggccaggtggaagtcataga

SEQ ID NO: 4285912 - DNA, 25 bp, Homo sapien
ctgtgcgcaactaagtggacgacac

SEQ ID NO: 4285913 - DNA, 25 bp, Homo sapien
aggcgaaagcccagacgggccacca

SEQ ID NO: 4285914 - DNA, 25 bp, Homo sapien
gggaatgcctgcaggcgaaagccca

SEQ ID NO: 4285915 - DNA, 25 bp, Homo sapien
aactaagtggacgacacaaggccgg

SEQ ID NO: 4285916 - DNA, 25 bp, Homo sapien
cgtcgcctgcaacgagtgcagacgg

SEQ ID NO: 4285917 - DNA, 25 bp, Homo sapien
acaggtctctctccggagcaaagga

SEQ ID NO: 4285918 - DNA, 25 bp, Homo sapien
ctgcaacgagtgcagacggcgcaca

SEQ ID NO: 4285919 - DNA, 25 bp, Homo sapien
caggcctctgctcggacaggtctct

SEQ ID NO: 4285920 - DNA, 25 bp, Homo sapien
ccagagctgattgggctgcccagaa

SEQ ID NO: 4285921 - DNA, 25 bp, Homo sapien
tctccagagggtcaaagttctggaa

SEQ ID NO: 4285922 - DNA, 25 bp, Homo sapien
gactcttcagggcagctcgggcaat

SEQ ID NO: 4285923 - DNA, 25 bp, Homo sapien
gctgggatttagagcagagaatgca

SEQ ID NO: 4285924 - DNA, 25 bp, Homo sapien
gaagcatggtccctgctaccacaag

SEQ ID NO: 4285925 - DNA, 25 bp, Homo sapien
gggacacagccacgaatgaagcatg

SEQ ID NO: 4285926 - DNA, 25 bp, Homo sapien
caatgagaacccttacttggaccca

SEQ ID NO: 4285927 - DNA, 25 bp, Homo sapien
gatgaagtcgccacctgcaagaact

SEQ ID NO: 4285928 - DNA, 25 bp, Homo sapien
aggttgcagttagccaagattgcac

SEQ ID NO: 4285929 - DNA, 25 bp, Homo sapien
gcagttagccaagattgcactattg

SEQ ID NO: 4285930 - DNA, 25 bp, Homo sapien
ttgcagttagccaagattgcactat

SEQ ID NO: 4285931 - DNA, 25 bp, Homo sapien
ggttgcagttagccaagattgcact

SEQ ID NO: 4285932 - DNA, 25 bp, Homo sapien
tctcaggtccgcaacctccacttcc

SEQ ID NO: 4285933 - DNA, 25 bp, Homo sapien
atctcaggtccgcaacctccacttc

SEQ ID NO: 4285934 - DNA, 25 bp, Homo sapien
ccactgcaccctgcctagaagggtc

SEQ ID NO: 4285935 - DNA, 25 bp, Homo sapien
gccactgcaccctgcctagaagggt

SEQ ID NO: 4285936 - DNA, 25 bp, Homo sapien
ggccctggttttgctagagacacgt

SEQ ID NO: 4285937 - DNA, 25 bp, Homo sapien
ttttgctagagacacgtgcccaggc

SEQ ID NO: 4285938 - DNA, 25 bp, Homo sapien
ccctatgggcacacccacttgaaca

SEQ ID NO: 4285939 - DNA, 25 bp, Homo sapien
aacatatattcaggagccagctcag

SEQ ID NO: 4285940 - DNA, 25 bp, Homo sapien
aagtgtcccaagtgccatggcagca

SEQ ID NO: 4285941 - DNA, 25 bp, Homo sapien
caactgcactgacatgagggagcag

SEQ ID NO: 4285942 - DNA, 25 bp, Homo sapien
tccaggtccatacatggagcaggtt

SEQ ID NO: 4285943 - DNA, 25 bp, Homo sapien
gagttcagacaggaaatttctctct

SEQ ID NO: 4285944 - DNA, 25 bp, Homo sapien
catgctgaagtaacacggtaagccc

SEQ ID NO: 4285945 - DNA, 25 bp, Homo sapien
catgcaggcaacacttggaatgcac

SEQ ID NO: 4285946 - DNA, 25 bp, Homo sapien
ggtaagcccctgagaatcctgaatc

SEQ ID NO: 4285947 - DNA, 25 bp, Homo sapien
ggaatgcacaggaaatacacttcag

SEQ ID NO: 4285948 - DNA, 25 bp, Homo sapien
agtgtaggagagcaagttcaggtca

SEQ ID NO: 4285949 - DNA, 25 bp, Homo sapien
aagttcaggtcataacagccatcca

SEQ ID NO: 4285950 - DNA, 25 bp, Homo sapien
agcaagttcaggtcataacagccat

SEQ ID NO: 4285951 - DNA, 25 bp, Homo sapien
tcaagtgtaggagagcaagttcagg

SEQ ID NO: 4285952 - DNA, 25 bp, Homo sapien
caaagcggccgatccttgcggaggt

SEQ ID NO: 4285953 - DNA, 25 bp, Homo sapien
cggccgatccttgcggaggtgtgac

SEQ ID NO: 4285954 - DNA, 25 bp, Homo sapien
agcggccgatccttgcggaggtgtg

SEQ ID NO: 4285955 - DNA, 25 bp, Homo sapien
atcaaagcggccgatccttgcggag

SEQ ID NO: 4285956 - DNA, 25 bp, Homo sapien
tccagagaggccaacctgggctagg

SEQ ID NO: 4285957 - DNA, 25 bp, Homo sapien
cagcagtgcccttcaggctccagag

SEQ ID NO: 4285958 - DNA, 25 bp, Homo sapien
ggaggggtcagtggccatgggtctc

SEQ ID NO: 4285959 - DNA, 25 bp, Homo sapien
tcagtggccatgggtctctccccag

SEQ ID NO: 4285960 - DNA, 25 bp, Homo sapien
tacccaggaggaagataacacccaa

SEQ ID NO: 4285961 - DNA, 25 bp, Homo sapien
ctgatgtagccccacaacagagatg

SEQ ID NO: 4285962 - DNA, 25 bp, Homo sapien
gagatgcctcaaatcccacagaata

SEQ ID NO: 4285963 - DNA, 25 bp, Homo sapien
tctacctggcctgtgttggacacta

SEQ ID NO: 4285964 - DNA, 25 bp, Homo sapien
ctcacggaggagtgcaggttgctca

SEQ ID NO: 4285965 - DNA, 25 bp, Homo sapien
cacggaggagtgcaggttgctcaca

SEQ ID NO: 4285966 - DNA, 25 bp, Homo sapien
agagccacttgggaaaggtcacgga

SEQ ID NO: 4285967 - DNA, 25 bp, Homo sapien
ggagagccacttgggaaaggtcacg

SEQ ID NO: 4285968 - DNA, 25 bp, Homo sapien
actgtgaaagacagccacagtggtg

SEQ ID NO: 4285969 - DNA, 25 bp, Homo sapien
ctgatgcttgaacagcgatacatac

SEQ ID NO: 4285970 - DNA, 25 bp, Homo sapien
tgtgctgaggtgtactgacggacac

SEQ ID NO: 4285971 - DNA, 25 bp, Homo sapien
tcaggcattaggcagtagtcccgca

SEQ ID NO: 4285972 - DNA, 25 bp, Homo sapien
gacggacacggatgctcaaaaaagc

SEQ ID NO: 4285973 - DNA, 25 bp, Homo sapien
ctcaaaaaagctgtgtagtaattct

SEQ ID NO: 4285974 - DNA, 25 bp, Homo sapien
gggagcgacgctggggaaggtgaca

SEQ ID NO: 4285975 - DNA, 25 bp, Homo sapien
atcgatgaccagcacgccaggccgg

SEQ ID NO: 4285976 - DNA, 25 bp, Homo sapien
ccacctggagggctacggagccttt

SEQ ID NO: 4285977 - DNA, 25 bp, Homo sapien
gccggccttgggaggtccgcacgtc

SEQ ID NO: 4285978 - DNA, 25 bp, Homo sapien
tgacagcagccgcaactaagtgcaa

SEQ ID NO: 4285979 - DNA, 25 bp, Homo sapien
agcccttcccggcatcctcagccga

SEQ ID NO: 4285980 - DNA, 25 bp, Homo sapien
ggcatcctcagccgagcctcaagaa

SEQ ID NO: 4285981 - DNA, 25 bp, Homo sapien
aactaagtgcaaccgccgctctagg

SEQ ID NO: 4285982 - DNA, 25 bp, Homo sapien
gagatcagacgagcttgggtgcatt

SEQ ID NO: 4285983 - DNA, 25 bp, Homo sapien
cattcagggtggtatggccatggac

SEQ ID NO: 4285984 - DNA, 25 bp, Homo sapien
gcattcagggtggtatggccatgga

SEQ ID NO: 4285985 - DNA, 25 bp, Homo sapien
cttctgagatcagacgagcttgggt

SEQ ID NO: 4285986 - DNA, 25 bp, Homo sapien
agcttcgcgccgaatccccggggag

SEQ ID NO: 4285987 - DNA, 25 bp, Homo sapien
cccggtacgtgctcgcgcgaaggct

SEQ ID NO: 4285988 - DNA, 25 bp, Homo sapien
cctcttaggcttggcggtggcggcg

SEQ ID NO: 4285989 - DNA, 25 bp, Homo sapien
cggcgctcgcgcctcttaggcttgg

SEQ ID NO: 4285990 - DNA, 25 bp, Homo sapien
cacaggcgcacgccatcactcctgg

SEQ ID NO: 4285991 - DNA, 25 bp, Homo sapien
gccatcactcctggctaatatatgt

SEQ ID NO: 4285992 - DNA, 25 bp, Homo sapien
tcactcctggctaatatatgtatat

SEQ ID NO: 4285993 - DNA, 25 bp, Homo sapien
cacgccatcactcctggctaatata

SEQ ID NO: 4285994 - DNA, 25 bp, Homo sapien
tgggcactggtgattaaagtactgg

SEQ ID NO: 4285995 - DNA, 25 bp, Homo sapien
ctgggcactggtgattaaagtactg

SEQ ID NO: 4285996 - DNA, 25 bp, Homo sapien
gggcactggtgattaaagtactgga

SEQ ID NO: 4285997 - DNA, 25 bp, Homo sapien
ggtttgttcatagagaattcttcgc

SEQ ID NO: 4285998 - DNA, 25 bp, Homo sapien
catgaatgaactcgcaggcagtgcc

SEQ ID NO: 4285999 - DNA, 25 bp, Homo sapien
ggctctgaaagcaccatgtggagtg

SEQ ID NO: 4286000 - DNA, 25 bp, Homo sapien
ggctctctgcgttttgcctttaaca

SEQ ID NO: 4286001 - DNA, 25 bp, Homo sapien
caaacttagagaagaccaagggaca

SEQ ID NO: 4286002 - DNA, 25 bp, Homo sapien
acttccagcccatgtacactagtgg

SEQ ID NO: 4286003 - DNA, 25 bp, Homo sapien
caacttggttgctctgataccccag

SEQ ID NO: 4286004 - DNA, 25 bp, Homo sapien
gctcccagggtgtttcaaacttaga

SEQ ID NO: 4286005 - DNA, 25 bp, Homo sapien
tgccagcaatagttcataataaaaa

SEQ ID NO: 4286006 - DNA, 25 bp, Homo sapien
agtttttatacagcctcaaattgtt

SEQ ID NO: 4286007 - DNA, 25 bp, Homo sapien
gaccttggccgctttgtcctaacag

SEQ ID NO: 4286008 - DNA, 25 bp, Homo sapien
aactactggaaaaggtctggcggct

SEQ ID NO: 4286009 - DNA, 25 bp, Homo sapien
tgtaaatgcgggctcagtggaccac

SEQ ID NO: 4286010 - DNA, 25 bp, Homo sapien
tccatggaactgacggctttgcttg

SEQ ID NO: 4286011 - DNA, 25 bp, Homo sapien
ggtactctggagtgagcagtgcccc

SEQ ID NO: 4286012 - DNA, 25 bp, Homo sapien
cttttttagcagaacatccgtccgt

SEQ ID NO: 4286013 - DNA, 25 bp, Homo sapien
tgaaaggccttccaaacagctccgt

SEQ ID NO: 4286014 - DNA, 25 bp, Homo sapien
gctccgtcgcccctagcaactccac

SEQ ID NO: 4286015 - DNA, 25 bp, Homo sapien
tttgaaaggccttccaaacagctcc

SEQ ID NO: 4286016 - DNA, 25 bp, Homo sapien
aaaggccttccaaacagctccgtcg

SEQ ID NO: 4286017 - DNA, 25 bp, Homo sapien
aactggaggcgatggggcagtgaac

SEQ ID NO: 4286018 - DNA, 25 bp, Homo sapien
aacagcaacaatgcctttgcaggca

SEQ ID NO: 4286019 - DNA, 25 bp, Homo sapien
tcccctgagcgctgggctggtgatg

SEQ ID NO: 4286020 - DNA, 25 bp, Homo sapien
aacaatgcctttgcaggcagcctgc

SEQ ID NO: 4286021 - DNA, 25 bp, Homo sapien
tacggcacaactacacctctgggtg

SEQ ID NO: 4286022 - DNA, 25 bp, Homo sapien
ggccatggccagcttaagacctcag

SEQ ID NO: 4286023 - DNA, 25 bp, Homo sapien
ctttcttgggagcaatgcatgggca

SEQ ID NO: 4286024 - DNA, 25 bp, Homo sapien
catgcatgagataggcaaagccagc

SEQ ID NO: 4286025 - DNA, 25 bp, Homo sapien
taaagccaaagatctctctgagtgc

SEQ ID NO: 4286026 - DNA, 25 bp, Homo sapien
tgaggagaaaccagatgcaatccca

SEQ ID NO: 4286027 - DNA, 25 bp, Homo sapien
tagtcaagcctagtgaattttcctg

SEQ ID NO: 4286028 - DNA, 25 bp, Homo sapien
attggtgggccctttagaagcgcag

SEQ ID NO: 4286029 - DNA, 25 bp, Homo sapien
aaaatatctacatcagccactctac

SEQ ID NO: 4286030 - DNA, 25 bp, Homo sapien
tcgaggagctactaagattctaact

SEQ ID NO: 4286031 - DNA, 25 bp, Homo sapien
ttacaatcccccatattcgaggagc

SEQ ID NO: 4286032 - DNA, 25 bp, Homo sapien
ccccatattcgaggagctactaaga

SEQ ID NO: 4286033 - DNA, 25 bp, Homo sapien
tacaggcttgtgtgagaagccacca

SEQ ID NO: 4286034 - DNA, 25 bp, Homo sapien
tatgacgtcagagatgaactggaat

SEQ ID NO: 4286035 - DNA, 25 bp, Homo sapien
cagacaatcctgagtagcgggcaga

SEQ ID NO: 4286036 - DNA, 25 bp, Homo sapien
gaactggaatataggctcctaggaa

SEQ ID NO: 4286037 - DNA, 25 bp, Homo sapien
cttgcgtctctgaatacacttgttc

SEQ ID NO: 4286038 - DNA, 25 bp, Homo sapien
gcgtctctgaatacacttgttcctc

SEQ ID NO: 4286039 - DNA, 25 bp, Homo sapien
tgcgtctctgaatacacttgttcct

SEQ ID NO: 4286040 - DNA, 25 bp, Homo sapien
ttgcgtctctgaatacacttgttcc

SEQ ID NO: 4286041 - DNA, 25 bp, Homo sapien
ttttgaggccattctcgggtagccc

SEQ ID NO: 4286042 - DNA, 25 bp, Homo sapien
tgaggccattctcgggtagcccctc

SEQ ID NO: 4286043 - DNA, 25 bp, Homo sapien
gcccgctgtggcactccggttaccc

SEQ ID NO: 4286044 - DNA, 25 bp, Homo sapien
gaggcctgtccttatgacgcctgcc

SEQ ID NO: 4286045 - DNA, 25 bp, Homo sapien
ctcgagttcaccgaggcggaaagcc

SEQ ID NO: 4286046 - DNA, 25 bp, Homo sapien
tgctactctcgagttcaccgaggcg

SEQ ID NO: 4286047 - DNA, 25 bp, Homo sapien
ggagagttgctactctcgagttcac

SEQ ID NO: 4286048 - DNA, 25 bp, Homo sapien
accgaggcggaaagcccctctgact

SEQ ID NO: 4286049 - DNA, 25 bp, Homo sapien
aggccgcttctagtggcaggtgccc

SEQ ID NO: 4286050 - DNA, 25 bp, Homo sapien
agcatgatacaaccgcgtcggccct

SEQ ID NO: 4286051 - DNA, 25 bp, Homo sapien
tccttctcagcatgatacaaccgcg

SEQ ID NO: 4286052 - DNA, 25 bp, Homo sapien
gccgcttctagtggcaggtgcccct

SEQ ID NO: 4286053 - DNA, 25 bp, Homo sapien
tgtccattgtgctgggccgagaaaa

SEQ ID NO: 4286054 - DNA, 25 bp, Homo sapien
tggtgtctgcatgtgtccattgtgc

SEQ ID NO: 4286055 - DNA, 25 bp, Homo sapien
ggaaaacgtcctccctgtctgctgg

SEQ ID NO: 4286056 - DNA, 25 bp, Homo sapien
gagagcaatgggatggaaaacgtcc

SEQ ID NO: 4286057 - DNA, 25 bp, Homo sapien
gaatcccatgagtagcagtgctgcc

SEQ ID NO: 4286058 - DNA, 25 bp, Homo sapien
tcccatgagtagcagtgctgccaca

SEQ ID NO: 4286059 - DNA, 25 bp, Homo sapien
tgagctgagttggactctgtgaggg

SEQ ID NO: 4286060 - DNA, 25 bp, Homo sapien
gacttgaatcccatgagtagcagtg

SEQ ID NO: 4286061 - DNA, 25 bp, Homo sapien
taacattcacgtattctgttgggaa

SEQ ID NO: 4286062 - DNA, 25 bp, Homo sapien
ttcataacattcacgtattctgttg

SEQ ID NO: 4286063 - DNA, 25 bp, Homo sapien
cattcacgtattctgttgggaagct

SEQ ID NO: 4286064 - DNA, 25 bp, Homo sapien
cacgtattctgttgggaagctccaa

SEQ ID NO: 4286065 - DNA, 25 bp, Homo sapien
atctcctgagtgttgttccacctac

SEQ ID NO: 4286066 - DNA, 25 bp, Homo sapien
agcaaggctcctacccagacctgca

SEQ ID NO: 4286067 - DNA, 25 bp, Homo sapien
gggctctcggaaaactgatggcctc

SEQ ID NO: 4286068 - DNA, 25 bp, Homo sapien
ctacttcctacaggtgctctggcag

SEQ ID NO: 4286069 - DNA, 25 bp, Homo sapien
tcatactcatctgagcagaagactg

SEQ ID NO: 4286070 - DNA, 25 bp, Homo sapien
catctgagcagaagactgctttcag

SEQ ID NO: 4286071 - DNA, 25 bp, Homo sapien
gcagggccattgcagcatgagtagt

SEQ ID NO: 4286072 - DNA, 25 bp, Homo sapien
cagcatgagtagtcatttgcagcca

SEQ ID NO: 4286073 - DNA, 25 bp, Homo sapien
ggaatttaggccacagtagctgaat

SEQ ID NO: 4286074 - DNA, 25 bp, Homo sapien
gtcaggtaggaacatgggcatccct

SEQ ID NO: 4286075 - DNA, 25 bp, Homo sapien
aatgctctcaatgtgtgaacacacg

SEQ ID NO: 4286076 - DNA, 25 bp, Homo sapien
tgaatctgtgctccctagacgctga

SEQ ID NO: 4286077 - DNA, 25 bp, Homo sapien
cctaagtacactttccatggagcct

SEQ ID NO: 4286078 - DNA, 25 bp, Homo sapien
tgtgctattgccgtcagcactgcaa

SEQ ID NO: 4286079 - DNA, 25 bp, Homo sapien
ctggtggagggtaggactgaatctg

SEQ ID NO: 4286080 - DNA, 25 bp, Homo sapien
tttttggcccctaggacaatcagga

SEQ ID NO: 4286081 - DNA, 25 bp, Homo sapien
gggaaccaagcattcaccaaggatg

SEQ ID NO: 4286082 - DNA, 25 bp, Homo sapien
acagcagctggagccgtttggacca

SEQ ID NO: 4286083 - DNA, 25 bp, Homo sapien
gaataattgttcacaggtcagggtc

SEQ ID NO: 4286084 - DNA, 25 bp, Homo sapien
ctttttcgcccaagaggacaagagg

SEQ ID NO: 4286085 - DNA, 25 bp, Homo sapien
ggttccagctcccttgagatgcagc

SEQ ID NO: 4286086 - DNA, 25 bp, Homo sapien
gcttggcaggtggactgtaccgcta

SEQ ID NO: 4286087 - DNA, 25 bp, Homo sapien
gctatgggacatcccctcctcatgc

SEQ ID NO: 4286088 - DNA, 25 bp, Homo sapien
cagaagcccctcacaggaacaggga

SEQ ID NO: 4286089 - DNA, 25 bp, Homo sapien
tttcacagaacatcttaggagctgc

SEQ ID NO: 4286090 - DNA, 25 bp, Homo sapien
caaatacttcaaacaaatgctgggc

SEQ ID NO: 4286091 - DNA, 25 bp, Homo sapien
gctgttccatggcacccagtttggg

SEQ ID NO: 4286092 - DNA, 25 bp, Homo sapien
gaaccttcgcttctctagagttggc

SEQ ID NO: 4286093 - DNA, 25 bp, Homo sapien
ttgcagaaaacagagtggctctgtc

SEQ ID NO: 4286094 - DNA, 25 bp, Homo sapien
aggggcccctcaccgtgcatctgga

SEQ ID NO: 4286095 - DNA, 25 bp, Homo sapien
aaggccagccctctatccaccaagg

SEQ ID NO: 4286096 - DNA, 25 bp, Homo sapien
gcggctactggagggcagcctagga

SEQ ID NO: 4286097 - DNA, 25 bp, Homo sapien
gattgggttcccaccacgagctttg

SEQ ID NO: 4286098 - DNA, 25 bp, Homo sapien
cagagaccctagctttcagacagga

SEQ ID NO: 4286099 - DNA, 25 bp, Homo sapien
gacagtctatggaaaggcttgcctc

SEQ ID NO: 4286100 - DNA, 25 bp, Homo sapien
tactctcaggatgcgtctcggagcc

SEQ ID NO: 4286101 - DNA, 25 bp, Homo sapien
gtcctggacgagactcggctatgga

SEQ ID NO: 4286102 - DNA, 25 bp, Homo sapien
ctggacgagactcggctatggacct

SEQ ID NO: 4286103 - DNA, 25 bp, Homo sapien
gacgagactcggctatggacctcag

SEQ ID NO: 4286104 - DNA, 25 bp, Homo sapien
ccagggtcctggacgagactcggct

SEQ ID NO: 4286105 - DNA, 25 bp, Homo sapien
ttctcacggtgcacaagcatgtatg

SEQ ID NO: 4286106 - DNA, 25 bp, Homo sapien
caaatgtttgtcaagccccaggtat

SEQ ID NO: 4286107 - DNA, 25 bp, Homo sapien
gaaggagctaggtgtgatacctcac

SEQ ID NO: 4286108 - DNA, 25 bp, Homo sapien
gagcaggtcacttcaagggagccct

SEQ ID NO: 4286109 - DNA, 25 bp, Homo sapien
tatacacagagtttgggcacacact

SEQ ID NO: 4286110 - DNA, 25 bp, Homo sapien
catcggagcagacctccatgtggcc

SEQ ID NO: 4286111 - DNA, 25 bp, Homo sapien
tgcccgtcacatgccctctgggtga

SEQ ID NO: 4286112 - DNA, 25 bp, Homo sapien
ctgtctcatcgctgaaataagaggc

SEQ ID NO: 4286113 - DNA, 25 bp, Homo sapien
ccttgtgactgatggtttggtttcc

SEQ ID NO: 4286114 - DNA, 25 bp, Homo sapien
caccagtgggtgtactcagagcaga

SEQ ID NO: 4286115 - DNA, 25 bp, Homo sapien
tctatccatccggtggactgggcag

SEQ ID NO: 4286116 - DNA, 25 bp, Homo sapien
tcgttcttaagccatcaccagtggg

SEQ ID NO: 4286117 - DNA, 25 bp, Homo sapien
atagtcctttccactacaggccagg

SEQ ID NO: 4286118 - DNA, 25 bp, Homo sapien
gaaatgttaggaggtcagcctccag

SEQ ID NO: 4286119 - DNA, 25 bp, Homo sapien
gcctcatcccaaagatcaggtatgg

SEQ ID NO: 4286120 - DNA, 25 bp, Homo sapien
ggaagccatcacctaacacctctgg

SEQ ID NO: 4286121 - DNA, 25 bp, Homo sapien
cttaaatgttcgtcttccagtgctc

SEQ ID NO: 4286122 - DNA, 25 bp, Homo sapien
gatacaccattagttcatagccagt

SEQ ID NO: 4286123 - DNA, 25 bp, Homo sapien
cagtctaccacacacaatctaagga

SEQ ID NO: 4286124 - DNA, 25 bp, Homo sapien
gccagaaggtgcaatatatcctgtt

SEQ ID NO: 4286125 - DNA, 25 bp, Homo sapien
tcttgagtaagtaatgatgcggctg

SEQ ID NO: 4286126 - DNA, 25 bp, Homo sapien
tccccaacaaggtgccactgagaag

SEQ ID NO: 4286127 - DNA, 25 bp, Homo sapien
gaccagccagactcaggtatatgga

SEQ ID NO: 4286128 - DNA, 25 bp, Homo sapien
ccagggccctgaatgtggaagacca

SEQ ID NO: 4286129 - DNA, 25 bp, Homo sapien
gtctgacaagaagttttgtcctccc

SEQ ID NO: 4286130 - DNA, 25 bp, Homo sapien
tcctccccaaggcatatggcatcaa

SEQ ID NO: 4286131 - DNA, 25 bp, Homo sapien
aaagaggaaacatggctttatgtct

SEQ ID NO: 4286132 - DNA, 25 bp, Homo sapien
aaggcatatggcatcaaggctgggc

SEQ ID NO: 4286133 - DNA, 25 bp, Homo sapien
cgggaccttgcgcatactcggttgg

SEQ ID NO: 4286134 - DNA, 25 bp, Homo sapien
agacagctggccagcgggaccttgc

SEQ ID NO: 4286135 - DNA, 25 bp, Homo sapien
cttccaggacccagcagttgtgggt

SEQ ID NO: 4286136 - DNA, 25 bp, Homo sapien
acagagacacgcgtgaagacagctg

SEQ ID NO: 4286137 - DNA, 25 bp, Homo sapien
agccccccatacccttccagggctg

SEQ ID NO: 4286138 - DNA, 25 bp, Homo sapien
cacaggggccaacagtccctcagtg

SEQ ID NO: 4286139 - DNA, 25 bp, Homo sapien
acatttaggactgtgtcattacccg

SEQ ID NO: 4286140 - DNA, 25 bp, Homo sapien
tcggtgcttgatgttacactcctgg

SEQ ID NO: 4286141 - DNA, 25 bp, Homo sapien
tgttacactcctggttggagatgac

SEQ ID NO: 4286142 - DNA, 25 bp, Homo sapien
agggccacacgctggttcagggtca

SEQ ID NO: 4286143 - DNA, 25 bp, Homo sapien
ttggctactgggacccgctgtaggc

SEQ ID NO: 4286144 - DNA, 25 bp, Homo sapien
atcttggctactgggacccgctgta

SEQ ID NO: 4286145 - DNA, 25 bp, Homo sapien
catcttggctactgggacccgctgt

SEQ ID NO: 4286146 - DNA, 25 bp, Homo sapien
cttggctactgggacccgctgtagg

SEQ ID NO: 4286147 - DNA, 25 bp, Homo sapien
ctcatagcccgtgagaggcatatgg

SEQ ID NO: 4286148 - DNA, 25 bp, Homo sapien
ctggaacagggtgcccaaccatacc

SEQ ID NO: 4286149 - DNA, 25 bp, Homo sapien
aacagggtgcccaaccatacctcat

SEQ ID NO: 4286150 - DNA, 25 bp, Homo sapien
caaccatacctcatagcccgtgaga

SEQ ID NO: 4286151 - DNA, 25 bp, Homo sapien
ggagagaagctctgctaggtcattt

SEQ ID NO: 4286152 - DNA, 25 bp, Homo sapien
agaagctctgctaggtcatttgtga

SEQ ID NO: 4286153 - DNA, 25 bp, Homo sapien
gagagaagctctgctaggtcatttg

SEQ ID NO: 4286154 - DNA, 25 bp, Homo sapien
tgggagagaagctctgctaggtcat

SEQ ID NO: 4286155 - DNA, 25 bp, Homo sapien
gagaagcactgccgggcagtcagta

SEQ ID NO: 4286156 - DNA, 25 bp, Homo sapien
ggaggagaagcactgccgggcagtc

SEQ ID NO: 4286157 - DNA, 25 bp, Homo sapien
agcactgccgggcagtcagtatcca

SEQ ID NO: 4286158 - DNA, 25 bp, Homo sapien
actgccgggcagtcagtatccactg

SEQ ID NO: 4286159 - DNA, 25 bp, Homo sapien
ataaccacagaggacacaacctcag

SEQ ID NO: 4286160 - DNA, 25 bp, Homo sapien
ccatcttctggctaggacctctggg

SEQ ID NO: 4286161 - DNA, 25 bp, Homo sapien
tgggagacaggcagttgtgcctcac

SEQ ID NO: 4286162 - DNA, 25 bp, Homo sapien
aaccacagaggacacaacctcagct

SEQ ID NO: 4286163 - DNA, 25 bp, Homo sapien
gctgactgtccagggtgagttgccc

SEQ ID NO: 4286164 - DNA, 25 bp, Homo sapien
gctgatccagccgatccaccctctt

SEQ ID NO: 4286165 - DNA, 25 bp, Homo sapien
tgatccagccgatccaccctcttgc

SEQ ID NO: 4286166 - DNA, 25 bp, Homo sapien
aagctgactgtccagggtgagttgc

SEQ ID NO: 4286167 - DNA, 25 bp, Homo sapien
taaagggcctgacccataactggcc

SEQ ID NO: 4286168 - DNA, 25 bp, Homo sapien
tcgtgggctaaagggcctgacccat

SEQ ID NO: 4286169 - DNA, 25 bp, Homo sapien
tgggctaaagggcctgacccataac

SEQ ID NO: 4286170 - DNA, 25 bp, Homo sapien
gctaaagggcctgacccataactgg

SEQ ID NO: 4286171 - DNA, 25 bp, Homo sapien
gtccaggattgatggcggctggtca

SEQ ID NO: 4286172 - DNA, 25 bp, Homo sapien
gggtccaggattgatggcggctggt

SEQ ID NO: 4286173 - DNA, 25 bp, Homo sapien
tccaggattgatggcggctggtcat

SEQ ID NO: 4286174 - DNA, 25 bp, Homo sapien
ggggggtccaggattgatggcggct

SEQ ID NO: 4286175 - DNA, 25 bp, Homo sapien
gggtccttgggtccatcgtgtagca

SEQ ID NO: 4286176 - DNA, 25 bp, Homo sapien
gaagttctcctccagttgtgcatgc

SEQ ID NO: 4286177 - DNA, 25 bp, Homo sapien
ggcccatggctatccccatctgggt

SEQ ID NO: 4286178 - DNA, 25 bp, Homo sapien
gcgtcgcagggcacagtagtcgaat

SEQ ID NO: 4286179 - DNA, 25 bp, Homo sapien
gaagcgggagcaaaatcgtggcagg

SEQ ID NO: 4286180 - DNA, 25 bp, Homo sapien
aggcggaagcgggagcaaaatcgtg

SEQ ID NO: 4286181 - DNA, 25 bp, Homo sapien
tggtcccagacaccaaagcatgccg

SEQ ID NO: 4286182 - DNA, 25 bp, Homo sapien
gcaaaatcgtggcagggtagtctca

SEQ ID NO: 4286183 - DNA, 25 bp, Homo sapien
actggacacccttgcgggtcttgct

SEQ ID NO: 4286184 - DNA, 25 bp, Homo sapien
cccttgcgggtcttgctgaccgtgc

SEQ ID NO: 4286185 - DNA, 25 bp, Homo sapien
cttgctgaccgtgccgcggtactgc

SEQ ID NO: 4286186 - DNA, 25 bp, Homo sapien
gcgctggcactggacacccttgcgg

SEQ ID NO: 4286187 - DNA, 25 bp, Homo sapien
ggctctgtagcccccaagcttgggc

SEQ ID NO: 4286188 - DNA, 25 bp, Homo sapien
cggctctgtagcccccaagcttggg

SEQ ID NO: 4286189 - DNA, 25 bp, Homo sapien
cccggctctgtagcccccaagcttg

SEQ ID NO: 4286190 - DNA, 25 bp, Homo sapien
ctctgtagcccccaagcttgggcct

SEQ ID NO: 4286191 - DNA, 25 bp, Homo sapien
gtacaacgccggatctggtagcaaa

SEQ ID NO: 4286192 - DNA, 25 bp, Homo sapien
cgcacgtcgtctgtacaacgccgga

SEQ ID NO: 4286193 - DNA, 25 bp, Homo sapien
tgtacaacgccggatctggtagcaa

SEQ ID NO: 4286194 - DNA, 25 bp, Homo sapien
tcgtctgtacaacgccggatctggt

SEQ ID NO: 4286195 - DNA, 25 bp, Homo sapien
tccggcagaagttctcccgaaggtc

SEQ ID NO: 4286196 - DNA, 25 bp, Homo sapien
ccggcagaagttctcccgaaggtct

SEQ ID NO: 4286197 - DNA, 25 bp, Homo sapien
ctgagccgtcggggttccggcagaa

SEQ ID NO: 4286198 - DNA, 25 bp, Homo sapien
tgagccgtcggggttccggcagaag

SEQ ID NO: 4286199 - DNA, 25 bp, Homo sapien
agccttgagcccgtgactaccttcc

SEQ ID NO: 4286200 - DNA, 25 bp, Homo sapien
ttgagcccgtgactaccttcctccc

SEQ ID NO: 4286201 - DNA, 25 bp, Homo sapien
tccagccttgagcccgtgactacct

SEQ ID NO: 4286202 - DNA, 25 bp, Homo sapien
gccttgagcccgtgactaccttcct

SEQ ID NO: 4286203 - DNA, 25 bp, Homo sapien
gggatttgcgcgtcccaacgctggc

SEQ ID NO: 4286204 - DNA, 25 bp, Homo sapien
tttctggcgtaaatcggtgctgatg

SEQ ID NO: 4286205 - DNA, 25 bp, Homo sapien
tatttttctggcgtaaatcggtgct

SEQ ID NO: 4286206 - DNA, 25 bp, Homo sapien
gcgtcccaacgctggcaaggtacgc

SEQ ID NO: 4286207 - DNA, 25 bp, Homo sapien
agcagctgacagttgtggcctcttg

SEQ ID NO: 4286208 - DNA, 25 bp, Homo sapien
ccttcccgcggaagcagctgacagt

SEQ ID NO: 4286209 - DNA, 25 bp, Homo sapien
cttcccgcggaagcagctgacagtt

SEQ ID NO: 4286210 - DNA, 25 bp, Homo sapien
agctgacagttgtggcctcttggcg

SEQ ID NO: 4286211 - DNA, 25 bp, Homo sapien
accgagataggtcgggccccgagcg

SEQ ID NO: 4286212 - DNA, 25 bp, Homo sapien
cttagatggaccgagataggtcggg

SEQ ID NO: 4286213 - DNA, 25 bp, Homo sapien
tagatggaccgagataggtcgggcc

SEQ ID NO: 4286214 - DNA, 25 bp, Homo sapien
atggaccgagataggtcgggccccg

SEQ ID NO: 4286215 - DNA, 25 bp, Homo sapien
ggatccgtagtgtagcaccatggcc

SEQ ID NO: 4286216 - DNA, 25 bp, Homo sapien
tctcgctcgatctgcggatccgtag

SEQ ID NO: 4286217 - DNA, 25 bp, Homo sapien
tagttgtcgtccagaccttggtcga

SEQ ID NO: 4286218 - DNA, 25 bp, Homo sapien
tcggagccgtcaggattccggcaat

SEQ ID NO: 4286219 - DNA, 25 bp, Homo sapien
gtattcctcgccattgcaccagaca

SEQ ID NO: 4286220 - DNA, 25 bp, Homo sapien
gtgcggtctaccgcgccgcggtatt

SEQ ID NO: 4286221 - DNA, 25 bp, Homo sapien
agcgctggcactcgcgccctgactc

SEQ ID NO: 4286222 - DNA, 25 bp, Homo sapien
cgccgcggtattcctcgccattgca

SEQ ID NO: 4286223 - DNA, 25 bp, Homo sapien
aagagccagtgggttcgtggatgga

SEQ ID NO: 4286224 - DNA, 25 bp, Homo sapien
ggacgtgggcttgtccctccactct

SEQ ID NO: 4286225 - DNA, 25 bp, Homo sapien
ggatggacgtgggcttgtccctcca

SEQ ID NO: 4286226 - DNA, 25 bp, Homo sapien
ggttcgtggatggacgtgggcttgt

SEQ ID NO: 4286227 - DNA, 25 bp, Homo sapien
atgccgcagctctggaagcgcacag

SEQ ID NO: 4286228 - DNA, 25 bp, Homo sapien
ttccaggccattccggagagtgggc

SEQ ID NO: 4286229 - DNA, 25 bp, Homo sapien
tcccggcaggatttgatgccgcagc

SEQ ID NO: 4286230 - DNA, 25 bp, Homo sapien
tgttgtgtagcaccaaggacctccg

SEQ ID NO: 4286231 - DNA, 25 bp, Homo sapien
ccattgttcatgatgcaggtccgta

SEQ ID NO: 4286232 - DNA, 25 bp, Homo sapien
aggccacccacggtcgtggccatgg

SEQ ID NO: 4286233 - DNA, 25 bp, Homo sapien
ccccattgttcatgatgcaggtccg

SEQ ID NO: 4286234 - DNA, 25 bp, Homo sapien
gtcgtggccatggtgccccggtacc

SEQ ID NO: 4286235 - DNA, 25 bp, Homo sapien
gaagatcaacttgggctgaggtccc

SEQ ID NO: 4286236 - DNA, 25 bp, Homo sapien
agagacagaagatcaacttgggctg

SEQ ID NO: 4286237 - DNA, 25 bp, Homo sapien
aagagacagaagatcaacttgggct

SEQ ID NO: 4286238 - DNA, 25 bp, Homo sapien
cagaagatcaacttgggctgaggtc

SEQ ID NO: 4286239 - DNA, 25 bp, Homo sapien
cgagtgttgagtccatggcagcagt

SEQ ID NO: 4286240 - DNA, 25 bp, Homo sapien
gcgcccagaacgccgcagcctcgtg

SEQ ID NO: 4286241 - DNA, 25 bp, Homo sapien
tcgtgtggggcgagtgttgagtcca

SEQ ID NO: 4286242 - DNA, 25 bp, Homo sapien
ccagaacgccgcagcctcgtgtggg

SEQ ID NO: 4286243 - DNA, 25 bp, Homo sapien
catggctgctcacgttgtagtggaa

SEQ ID NO: 4286244 - DNA, 25 bp, Homo sapien
atggctgctcacgttgtagtggaag

SEQ ID NO: 4286245 - DNA, 25 bp, Homo sapien
ggctgctcacgttgtagtggaaggc

SEQ ID NO: 4286246 - DNA, 25 bp, Homo sapien
gctgctcacgttgtagtggaaggcc

SEQ ID NO: 4286247 - DNA, 25 bp, Homo sapien
gggcaccaccgcatgtagcaggtgc

SEQ ID NO: 4286248 - DNA, 25 bp, Homo sapien
cgggcaccaccgcatgtagcaggtg

SEQ ID NO: 4286249 - DNA, 25 bp, Homo sapien
ggacccctaagcattgagtcagaag

SEQ ID NO: 4286250 - DNA, 25 bp, Homo sapien
agggacccctaagcattgagtcaga

SEQ ID NO: 4286251 - DNA, 25 bp, Homo sapien
cagggacccctaagcattgagtcag

SEQ ID NO: 4286252 - DNA, 25 bp, Homo sapien
gggacccctaagcattgagtcagaa

SEQ ID NO: 4286253 - DNA, 25 bp, Homo sapien
tacagcttagtggacaggtgttagg

SEQ ID NO: 4286254 - DNA, 25 bp, Homo sapien
gttgcaagggcctagtacagcttag

SEQ ID NO: 4286255 - DNA, 25 bp, Homo sapien
caagggcctagtacagcttagtgga

SEQ ID NO: 4286256 - DNA, 25 bp, Homo sapien
cctagtacagcttagtggacaggtg

SEQ ID NO: 4286257 - DNA, 25 bp, Homo sapien
ccgccagaagtgtcatcccagggaa

SEQ ID NO: 4286258 - DNA, 25 bp, Homo sapien
agtatgggtaggagacaggcggcct

SEQ ID NO: 4286259 - DNA, 25 bp, Homo sapien
cgaagctgaggcctggaacaacccg

SEQ ID NO: 4286260 - DNA, 25 bp, Homo sapien
ggcggcctagggattccggttagca

SEQ ID NO: 4286261 - DNA, 25 bp, Homo sapien
cagggatctgggtgcgaaactccga

SEQ ID NO: 4286262 - DNA, 25 bp, Homo sapien
cggatgttgtgagccgggtcgctgc

SEQ ID NO: 4286263 - DNA, 25 bp, Homo sapien
ctagtccagtgcgagggcacctgca

SEQ ID NO: 4286264 - DNA, 25 bp, Homo sapien
gctattcccttcgcggtccgggcta

SEQ ID NO: 4286265 - DNA, 25 bp, Homo sapien
tggtgcagacccacaagggtttgtg

SEQ ID NO: 4286266 - DNA, 25 bp, Homo sapien
ttaatcagatcttcaactactctgg

SEQ ID NO: 4286267 - DNA, 25 bp, Homo sapien
ccgggtgtctggaaggtctgctcat

SEQ ID NO: 4286268 - DNA, 25 bp, Homo sapien
accgatcatggacgcccaccgaggg

SEQ ID NO: 4286269 - DNA, 25 bp, Homo sapien
caggggccaggagctgcactgatca

SEQ ID NO: 4286270 - DNA, 25 bp, Homo sapien
tggctggcctaggaccagaagtctc

SEQ ID NO: 4286271 - DNA, 25 bp, Homo sapien
ctgtggctggcctaggaccagaagt

SEQ ID NO: 4286272 - DNA, 25 bp, Homo sapien
aggggccaggagctgcactgatcat

SEQ ID NO: 4286273 - DNA, 25 bp, Homo sapien
ctcgatagtgattgcactattataa

SEQ ID NO: 4286274 - DNA, 25 bp, Homo sapien
ccactaacagcatacaggggttcca

SEQ ID NO: 4286275 - DNA, 25 bp, Homo sapien
actaacagcatacaggggttccaca

SEQ ID NO: 4286276 - DNA, 25 bp, Homo sapien
ccaaactgttctcgatagtgattgc

SEQ ID NO: 4286277 - DNA, 25 bp, Homo sapien
tgatgaccagtgacgttgaatgcct

SEQ ID NO: 4286278 - DNA, 25 bp, Homo sapien
gtgacgttgaatgcctttccatatg

SEQ ID NO: 4286279 - DNA, 25 bp, Homo sapien
cagtgacgttgaatgcctttccata

SEQ ID NO: 4286280 - DNA, 25 bp, Homo sapien
gaccagtgacgttgaatgcctttcc

SEQ ID NO: 4286281 - DNA, 25 bp, Homo sapien
taagaggctcctgctctcgagggac

SEQ ID NO: 4286282 - DNA, 25 bp, Homo sapien
catttgggcactaggaagtccgcgg

SEQ ID NO: 4286283 - DNA, 25 bp, Homo sapien
ccatttcaccagagggcgggcttgt

SEQ ID NO: 4286284 - DNA, 25 bp, Homo sapien
tgcatatgaagccagggtaccgcct

SEQ ID NO: 4286285 - DNA, 25 bp, Homo sapien
tccagggttgtagagatcgaattcc

SEQ ID NO: 4286286 - DNA, 25 bp, Homo sapien
tgtcatgggaccctcggagcctatg

SEQ ID NO: 4286287 - DNA, 25 bp, Homo sapien
tacgtgcttgtggacgctggccttg

SEQ ID NO: 4286288 - DNA, 25 bp, Homo sapien
agcctatggagctggcggactcaga

SEQ ID NO: 4286289 - DNA, 25 bp, Homo sapien
ggtgtttggggccagcggcggcagc

SEQ ID NO: 4286290 - DNA, 25 bp, Homo sapien
gtgtttggggccagcggcggcagcg

SEQ ID NO: 4286291 - DNA, 25 bp, Homo sapien
ctgggtgtttggggccagcggcggc

SEQ ID NO: 4286292 - DNA, 25 bp, Homo sapien
gcagcagcggcagggtggggcgaac

SEQ ID NO: 4286293 - DNA, 25 bp, Homo sapien
agtgtggtgaagcctgtgttgaaag

SEQ ID NO: 4286294 - DNA, 25 bp, Homo sapien
tgttgaaagcctcgggctctgggcg

SEQ ID NO: 4286295 - DNA, 25 bp, Homo sapien
ctctgggcgcggaaagtgcacgctc

SEQ ID NO: 4286296 - DNA, 25 bp, Homo sapien
agcacgagcacaaggcccacggcac

SEQ ID NO: 4286297 - DNA, 25 bp, Homo sapien
tgttgcagtaaagcctcagggaccg

SEQ ID NO: 4286298 - DNA, 25 bp, Homo sapien
caagcgcccgcaacgtgttagatga

SEQ ID NO: 4286299 - DNA, 25 bp, Homo sapien
gatgatagatcgagcagcctcaggc

SEQ ID NO: 4286300 - DNA, 25 bp, Homo sapien
tgaaggccaagcatacgtactcgcg

SEQ ID NO: 4286301 - DNA, 25 bp, Homo sapien
ttctgctctagtgcgacatgggtgg

SEQ ID NO: 4286302 - DNA, 25 bp, Homo sapien
aaagtccccgtcagcctttggctgg

SEQ ID NO: 4286303 - DNA, 25 bp, Homo sapien
tctccaagcgagttcctgatcggct

SEQ ID NO: 4286304 - DNA, 25 bp, Homo sapien
tactctccggttcccaggttgtgag

SEQ ID NO: 4286305 - DNA, 25 bp, Homo sapien
caagtggaacagatgctggcgcacc

SEQ ID NO: 4286306 - DNA, 25 bp, Homo sapien
tatatcagtgccgatgagctggccc

SEQ ID NO: 4286307 - DNA, 25 bp, Homo sapien
cacaagtcctgcaagtaagtgggcc

SEQ ID NO: 4286308 - DNA, 25 bp, Homo sapien
gactttcagtcagggccacagtgag

SEQ ID NO: 4286309 - DNA, 25 bp, Homo sapien
cacatgatgatacgaggctctggca

SEQ ID NO: 4286310 - DNA, 25 bp, Homo sapien
ttaactatgacgtcctcacccagca

SEQ ID NO: 4286311 - DNA, 25 bp, Homo sapien
actgactcgccaatagacttgtggg

SEQ ID NO: 4286312 - DNA, 25 bp, Homo sapien
gcagcacgctggctccgttgaggta

SEQ ID NO: 4286313 - DNA, 25 bp, Homo sapien
cagggaggcaggcacactccccgcc

SEQ ID NO: 4286314 - DNA, 25 bp, Homo sapien
cttgtcagggaggcaggcacactcc

SEQ ID NO: 4286315 - DNA, 25 bp, Homo sapien
gtcagggaggcaggcacactccccg

SEQ ID NO: 4286316 - DNA, 25 bp, Homo sapien
ccgcccctctccccacccagcccag

SEQ ID NO: 4286317 - DNA, 25 bp, Homo sapien
tcaagccaggaatgggaacggatcc

SEQ ID NO: 4286318 - DNA, 25 bp, Homo sapien
tcccaggctcacattggggccaatg

SEQ ID NO: 4286319 - DNA, 25 bp, Homo sapien
gccagcccacaatgcaggactcaag

SEQ ID NO: 4286320 - DNA, 25 bp, Homo sapien
gtgcaccgccggatacacacaccat

SEQ ID NO: 4286321 - DNA, 25 bp, Homo sapien
ggcctgagcacagccgctcaggctg

SEQ ID NO: 4286322 - DNA, 25 bp, Homo sapien
gtgactgcaggaagaggcacatgcc

SEQ ID NO: 4286323 - DNA, 25 bp, Homo sapien
cagcacgttgcccacaatgccaggg

SEQ ID NO: 4286324 - DNA, 25 bp, Homo sapien
atgccagtgaggaagtccttgggct

SEQ ID NO: 4286325 - DNA, 25 bp, Homo sapien
agcccagccacagaccacccccacc

SEQ ID NO: 4286326 - DNA, 25 bp, Homo sapien
ccaccctgtggcctccctgcctcac

SEQ ID NO: 4286327 - DNA, 25 bp, Homo sapien
tcagcccagccacagaccaccccca

SEQ ID NO: 4286328 - DNA, 25 bp, Homo sapien
cacccccaccctgtggcctccctgc

SEQ ID NO: 4286329 - DNA, 25 bp, Homo sapien
cctccttggccataatggggaagac

SEQ ID NO: 4286330 - DNA, 25 bp, Homo sapien
cctgtaactccatggcatatagctg

SEQ ID NO: 4286331 - DNA, 25 bp, Homo sapien
cataatggggaagacctccttctca

SEQ ID NO: 4286332 - DNA, 25 bp, Homo sapien
tggcatatagctgcccctccttggc

SEQ ID NO: 4286333 - DNA, 25 bp, Homo sapien
gtgaatgcggcctgtgtcagcctca

SEQ ID NO: 4286334 - DNA, 25 bp, Homo sapien
tgtggcttctccacgaaccggtgaa

SEQ ID NO: 4286335 - DNA, 25 bp, Homo sapien
gatgcgctgcagcactgcagggctc

SEQ ID NO: 4286336 - DNA, 25 bp, Homo sapien
catgcctgcgttgatcttattggac

SEQ ID NO: 4286337 - DNA, 25 bp, Homo sapien
taaagatacatactgcacagctctg

SEQ ID NO: 4286338 - DNA, 25 bp, Homo sapien
acagctctgtatccataacatccga

SEQ ID NO: 4286339 - DNA, 25 bp, Homo sapien
cccaagtgcttaaagatacatactg

SEQ ID NO: 4286340 - DNA, 25 bp, Homo sapien
tccataacatccgaaggcagatgaa

SEQ ID NO: 4286341 - DNA, 25 bp, Homo sapien
gaagaaagggtctgcagtctcagag

SEQ ID NO: 4286342 - DNA, 25 bp, Homo sapien
acgtcactgttgaggacgaagaaag

SEQ ID NO: 4286343 - DNA, 25 bp, Homo sapien
tggaactgcaccatggcttggaagg

SEQ ID NO: 4286344 - DNA, 25 bp, Homo sapien
gggaaatcgcagatcacgtcactgt

SEQ ID NO: 4286345 - DNA, 25 bp, Homo sapien
tcctcttcatgggacatggagattc

SEQ ID NO: 4286346 - DNA, 25 bp, Homo sapien
ttcatgggacatggagattcggatt

SEQ ID NO: 4286347 - DNA, 25 bp, Homo sapien
tcatgggacatggagattcggattc

SEQ ID NO: 4286348 - DNA, 25 bp, Homo sapien
tcttcatgggacatggagattcgga

SEQ ID NO: 4286349 - DNA, 25 bp, Homo sapien
gaccgagaataagggccaagagtct

SEQ ID NO: 4286350 - DNA, 25 bp, Homo sapien
ccccagtcaggttctaccaggatgg

SEQ ID NO: 4286351 - DNA, 25 bp, Homo sapien
caggttctaccaggatgggaagttg

SEQ ID NO: 4286352 - DNA, 25 bp, Homo sapien
ggaccgagaataagggccaagagtc

SEQ ID NO: 4286353 - DNA, 25 bp, Homo sapien
tgcgacatgtagctcacggccagga

SEQ ID NO: 4286354 - DNA, 25 bp, Homo sapien
tctccagcacctgcgacatgtagct

SEQ ID NO: 4286355 - DNA, 25 bp, Homo sapien
agcacctgcgacatgtagctcacgg

SEQ ID NO: 4286356 - DNA, 25 bp, Homo sapien
acctgcgacatgtagctcacggcca

SEQ ID NO: 4286357 - DNA, 25 bp, Homo sapien
gcggctagcgcctccacttggtgca

SEQ ID NO: 4286358 - DNA, 25 bp, Homo sapien
ttattgcagaagtccaccagtggct

SEQ ID NO: 4286359 - DNA, 25 bp, Homo sapien
gtgctcagcgtcagcggccgtagcc

SEQ ID NO: 4286360 - DNA, 25 bp, Homo sapien
tccacttggtgcagcaagatgggct

SEQ ID NO: 4286361 - DNA, 25 bp, Homo sapien
ttgagggggtgtcccgggctctgag

SEQ ID NO: 4286362 - DNA, 25 bp, Homo sapien
ctgcggacgttgagggggtgtcccg

SEQ ID NO: 4286363 - DNA, 25 bp, Homo sapien
gtccctgccgcgcactcccaacgcc

SEQ ID NO: 4286364 - DNA, 25 bp, Homo sapien
gcgcactcccaacgccgtgcccggc

SEQ ID NO: 4286365 - DNA, 25 bp, Homo sapien
agggccgccacaacacagaacgcga

SEQ ID NO: 4286366 - DNA, 25 bp, Homo sapien
cggtcgccctgacgccggatccagg

SEQ ID NO: 4286367 - DNA, 25 bp, Homo sapien
cagaacgcgacaccgggtagacggc

SEQ ID NO: 4286368 - DNA, 25 bp, Homo sapien
cacaacacagaacgcgacaccgggt

SEQ ID NO: 4286369 - DNA, 25 bp, Homo sapien
ccggcgcgggcagtgacgcgaccac

SEQ ID NO: 4286370 - DNA, 25 bp, Homo sapien
cgcgggccaatcggctgccgcgtac

SEQ ID NO: 4286371 - DNA, 25 bp, Homo sapien
ggcgcgggcagtgacgcgaccaccg

SEQ ID NO: 4286372 - DNA, 25 bp, Homo sapien
gcgggcagtgacgcgaccaccgcgg

SEQ ID NO: 4286373 - DNA, 25 bp, Homo sapien
gcgcagcgctgcgacagacgtagcc

SEQ ID NO: 4286374 - DNA, 25 bp, Homo sapien
cgtagccaatgagcgcccgagtacg

SEQ ID NO: 4286375 - DNA, 25 bp, Homo sapien
gccggcgtcggaacgttggagcgca

SEQ ID NO: 4286376 - DNA, 25 bp, Homo sapien
tgcgacagacgtagccaatgagcgc

SEQ ID NO: 4286377 - DNA, 25 bp, Homo sapien
cagctggccattggcggatccaaag

SEQ ID NO: 4286378 - DNA, 25 bp, Homo sapien
gccattggcggatccaaaggcggaa

SEQ ID NO: 4286379 - DNA, 25 bp, Homo sapien
gctggccattggcggatccaaaggc

SEQ ID NO: 4286380 - DNA, 25 bp, Homo sapien
tggccattggcggatccaaaggcgg

SEQ ID NO: 4286381 - DNA, 25 bp, Homo sapien
catctagggaacgtgcatgtggtca

SEQ ID NO: 4286382 - DNA, 25 bp, Homo sapien
gcgattcccagaacgcgagggctta

SEQ ID NO: 4286383 - DNA, 25 bp, Homo sapien
tctacactaatgaagggctactgcc

SEQ ID NO: 4286384 - DNA, 25 bp, Homo sapien
ggtctccaggtgtccaaagtgctga

SEQ ID NO: 4286385 - DNA, 25 bp, Homo sapien
aatggctgaaatcggtgtcacctcc

SEQ ID NO: 4286386 - DNA, 25 bp, Homo sapien
aacagtgtggccctaggctcaaagg

SEQ ID NO: 4286387 - DNA, 25 bp, Homo sapien
gctcaaaggagagggtgctaacctt

SEQ ID NO: 4286388 - DNA, 25 bp, Homo sapien
cttgcctaaagtgacaatgaacagt

SEQ ID NO: 4286389 - DNA, 25 bp, Homo sapien
cactgccccactctaagggttgagg

SEQ ID NO: 4286390 - DNA, 25 bp, Homo sapien
ggttgagggccatattctaggccca

SEQ ID NO: 4286391 - DNA, 25 bp, Homo sapien
actgccccactctaagggttgaggg

SEQ ID NO: 4286392 - DNA, 25 bp, Homo sapien
tatatactaatgaacaaggctacac

SEQ ID NO: 4286393 - DNA, 25 bp, Homo sapien
agccggacacatggacaaactgatg

SEQ ID NO: 4286394 - DNA, 25 bp, Homo sapien
caaactgatggacccaggactgatc

SEQ ID NO: 4286395 - DNA, 25 bp, Homo sapien
ggactgatcagacaaagctctcatt

SEQ ID NO: 4286396 - DNA, 25 bp, Homo sapien
gcacagctgccgaaacttgaggaag

SEQ ID NO: 4286397 - DNA, 25 bp, Homo sapien
gggctttaccttacaatcagcaggg

SEQ ID NO: 4286398 - DNA, 25 bp, Homo sapien
taaggtcagaccgaaggatgggtcc

SEQ ID NO: 4286399 - DNA, 25 bp, Homo sapien
gatgggtccagctttgtgcagtcag

SEQ ID NO: 4286400 - DNA, 25 bp, Homo sapien
agagcccacggccatagtacttgtt

SEQ ID NO: 4286401 - DNA, 25 bp, Homo sapien
tcatagatgacaagcagggaactgg

SEQ ID NO: 4286402 - DNA, 25 bp, Homo sapien
aatcatgcggacatccaccttgggc

SEQ ID NO: 4286403 - DNA, 25 bp, Homo sapien
gataggctcaaacaggtcacgtcgc

SEQ ID NO: 4286404 - DNA, 25 bp, Homo sapien
tgccagggaagtctgaagagctcac

SEQ ID NO: 4286405 - DNA, 25 bp, Homo sapien
gccagggaagtctgaagagctcaca

SEQ ID NO: 4286406 - DNA, 25 bp, Homo sapien
gacagggtgagtgccagggaagtct

SEQ ID NO: 4286407 - DNA, 25 bp, Homo sapien
tgacgcccagcgtggctgatgtgct

SEQ ID NO: 4286408 - DNA, 25 bp, Homo sapien
tgccttctcagctgacgcgtcatcg

SEQ ID NO: 4286409 - DNA, 25 bp, Homo sapien
tggtgcaccacgttctcaagcagga

SEQ ID NO: 4286410 - DNA, 25 bp, Homo sapien
tgatgtgctctgctcgcatttccgc

SEQ ID NO: 4286411 - DNA, 25 bp, Homo sapien
gccacggtcaaggagaatgacaacc

SEQ ID NO: 4286412 - DNA, 25 bp, Homo sapien
ctgggccacggtcaaggagaatgac

SEQ ID NO: 4286413 - DNA, 25 bp, Homo sapien
gggccacggtcaaggagaatgacaa

SEQ ID NO: 4286414 - DNA, 25 bp, Homo sapien
ggagaatgacaaccacactcaccat

SEQ ID NO: 4286415 - DNA, 25 bp, Homo sapien
acctttcctgggtatctcataagtg

SEQ ID NO: 4286416 - DNA, 25 bp, Homo sapien
ctttcctgggtatctcataagtgga

SEQ ID NO: 4286417 - DNA, 25 bp, Homo sapien
ttacctttcctgggtatctcataag

SEQ ID NO: 4286418 - DNA, 25 bp, Homo sapien
tagcactgaacagtgactcctcatt

SEQ ID NO: 4286419 - DNA, 25 bp, Homo sapien
taactgccttagtcacagtagccac

SEQ ID NO: 4286420 - DNA, 25 bp, Homo sapien
cacacaagcgcatatgggcacatac

SEQ ID NO: 4286421 - DNA, 25 bp, Homo sapien
catacgcagatctgtgattgtggac

SEQ ID NO: 4286422 - DNA, 25 bp, Homo sapien
gtagccacattttagccactcagtg

SEQ ID NO: 4286423 - DNA, 25 bp, Homo sapien
cataggcagaatggtgccccaacac

SEQ ID NO: 4286424 - DNA, 25 bp, Homo sapien
ccataggcagaatggtgccccaaca

SEQ ID NO: 4286425 - DNA, 25 bp, Homo sapien
cagccataggcagaatggtgcccca

SEQ ID NO: 4286426 - DNA, 25 bp, Homo sapien
taggcagaatggtgccccaacacac

SEQ ID NO: 4286427 - DNA, 25 bp, Homo sapien
cctgaaggaggggcaacgaggatac

SEQ ID NO: 4286428 - DNA, 25 bp, Homo sapien
ctatggacccagtagacactcctga

SEQ ID NO: 4286429 - DNA, 25 bp, Homo sapien
gacctatggacccagtagacactcc

SEQ ID NO: 4286430 - DNA, 25 bp, Homo sapien
cctatggacccagtagacactcctg

SEQ ID NO: 4286431 - DNA, 25 bp, Homo sapien
tttcggtccttggactcggagcgca

SEQ ID NO: 4286432 - DNA, 25 bp, Homo sapien
tgtgcagctccaccttcggactctt

SEQ ID NO: 4286433 - DNA, 25 bp, Homo sapien
tgcttgtgacaacgcaggctccagg

SEQ ID NO: 4286434 - DNA, 25 bp, Homo sapien
cactgttgccatctagcatctggaa

SEQ ID NO: 4286435 - DNA, 25 bp, Homo sapien
gttgcattaaggtcccatgagccaa

SEQ ID NO: 4286436 - DNA, 25 bp, Homo sapien
aatgacaaggatccaaacagacact

SEQ ID NO: 4286437 - DNA, 25 bp, Homo sapien
gagcaagtgtccagtatgtgaagaa

SEQ ID NO: 4286438 - DNA, 25 bp, Homo sapien
taaatgttatgagtagtgttcttcc

SEQ ID NO: 4286439 - DNA, 25 bp, Homo sapien
gaatgacggtctctctgctaacagg

SEQ ID NO: 4286440 - DNA, 25 bp, Homo sapien
gattcaagctaacaccagggctggt

SEQ ID NO: 4286441 - DNA, 25 bp, Homo sapien
gaagcaacctctgtacctttggagg

SEQ ID NO: 4286442 - DNA, 25 bp, Homo sapien
cagtcattagtcaagaagcagcctc

SEQ ID NO: 4286443 - DNA, 25 bp, Homo sapien
tctccttgcatgaaagatgcagact

SEQ ID NO: 4286444 - DNA, 25 bp, Homo sapien
aagctctctccttgcatgaaagatg

SEQ ID NO: 4286445 - DNA, 25 bp, Homo sapien
gctctctccttgcatgaaagatgca

SEQ ID NO: 4286446 - DNA, 25 bp, Homo sapien
tccttgcatgaaagatgcagactgg

SEQ ID NO: 4286447 - DNA, 25 bp, Homo sapien
gacatgggcatgtccttgttcacca

SEQ ID NO: 4286448 - DNA, 25 bp, Homo sapien
tactgtctcatctaaggaaattccc

SEQ ID NO: 4286449 - DNA, 25 bp, Homo sapien
tcaccaaactgagtgaggagaactg

SEQ ID NO: 4286450 - DNA, 25 bp, Homo sapien
tagcatgtattggtgaactgatctg

SEQ ID NO: 4286451 - DNA, 25 bp, Homo sapien
ctatagatttgcctgatgtgaacac

SEQ ID NO: 4286452 - DNA, 25 bp, Homo sapien
gaacatttcatgaccccaaaatcaa

SEQ ID NO: 4286453 - DNA, 25 bp, Homo sapien
cacaagattgtaaaacatcaccact

SEQ ID NO: 4286454 - DNA, 25 bp, Homo sapien
tactaacagaaagcaaccactaacc

SEQ ID NO: 4286455 - DNA, 25 bp, Homo sapien
tctcagaggtctcaagggacaggct

SEQ ID NO: 4286456 - DNA, 25 bp, Homo sapien
ggttgctcccgttctgttgtgtcat

SEQ ID NO: 4286457 - DNA, 25 bp, Homo sapien
tctcactttccacataaggataggc

SEQ ID NO: 4286458 - DNA, 25 bp, Homo sapien
agttgatgtaaccatcactgtcccc

SEQ ID NO: 4286459 - DNA, 25 bp, Homo sapien
tctgtttgccgtgctgtatccgtaa

SEQ ID NO: 4286460 - DNA, 25 bp, Homo sapien
tccacccctggcatctcgaagataa

SEQ ID NO: 4286461 - DNA, 25 bp, Homo sapien
tatatccagaaacttgaggaggagg

SEQ ID NO: 4286462 - DNA, 25 bp, Homo sapien
cctgacagtgtcagccaaagggaca

SEQ ID NO: 4286463 - DNA, 25 bp, Homo sapien
aaatgtagcttcagccacctatcca

SEQ ID NO: 4286464 - DNA, 25 bp, Homo sapien
aatgtagcttcagccacctatccat

SEQ ID NO: 4286465 - DNA, 25 bp, Homo sapien
tgcacacagtgtgatcgtcgtaacg

SEQ ID NO: 4286466 - DNA, 25 bp, Homo sapien
gagggactcgtaaaagcgctgttcc

SEQ ID NO: 4286467 - DNA, 25 bp, Homo sapien
taacgcatcatgctgctgtgtccgc

SEQ ID NO: 4286468 - DNA, 25 bp, Homo sapien
tgtgtccgcctacttggtggatgaa

SEQ ID NO: 4286469 - DNA, 25 bp, Homo sapien
gcagaggatgcagcacatgggccac

SEQ ID NO: 4286470 - DNA, 25 bp, Homo sapien
gatgcagcacatgggccacaaaagg

SEQ ID NO: 4286471 - DNA, 25 bp, Homo sapien
cagcacatgggccacaaaaggagag

SEQ ID NO: 4286472 - DNA, 25 bp, Homo sapien
agaggatgcagcacatgggccacaa

SEQ ID NO: 4286473 - DNA, 25 bp, Homo sapien
gtgaaagccaatggtcagattctat

SEQ ID NO: 4286474 - DNA, 25 bp, Homo sapien
caatggtcagattctattcagctta

SEQ ID NO: 4286475 - DNA, 25 bp, Homo sapien
aagccaatggtcagattctattcag

SEQ ID NO: 4286476 - DNA, 25 bp, Homo sapien
gccaatggtcagattctattcagct

SEQ ID NO: 4286477 - DNA, 25 bp, Homo sapien
ttgggagctctaagattgttttcct

SEQ ID NO: 4286478 - DNA, 25 bp, Homo sapien
taatgtagaatccttgggagctcta

SEQ ID NO: 4286479 - DNA, 25 bp, Homo sapien
aatgtagaatccttgggagctctaa

SEQ ID NO: 4286480 - DNA, 25 bp, Homo sapien
atgtagaatccttgggagctctaag

SEQ ID NO: 4286481 - DNA, 25 bp, Homo sapien
ttgaattccaaaaggaattatgtct

SEQ ID NO: 4286482 - DNA, 25 bp, Homo sapien
aaagaagtttctcatgttaatgaaa

SEQ ID NO: 4286483 - DNA, 25 bp, Homo sapien
aagaagtttctcatgttaatgaaat

SEQ ID NO: 4286484 - DNA, 25 bp, Homo sapien
taaatgcacccaaatgagaatagcc

SEQ ID NO: 4286485 - DNA, 25 bp, Homo sapien
tatatgagtatcctaagtgccctga

SEQ ID NO: 4286486 - DNA, 25 bp, Homo sapien
aaccagaacaaacgggtcatgtggc

SEQ ID NO: 4286487 - DNA, 25 bp, Homo sapien
cacatgacagaattcgaagtcagca

SEQ ID NO: 4286488 - DNA, 25 bp, Homo sapien
caagctactagggactggcacatcc

SEQ ID NO: 4286489 - DNA, 25 bp, Homo sapien
gaaatgtgtatagatgtctagagta

SEQ ID NO: 4286490 - DNA, 25 bp, Homo sapien
gctactagggactggcacatccctc

SEQ ID NO: 4286491 - DNA, 25 bp, Homo sapien
tagggactggcacatccctcagaaa

SEQ ID NO: 4286492 - DNA, 25 bp, Homo sapien
gcccggccaaggtcaattatttcta

SEQ ID NO: 4286493 - DNA, 25 bp, Homo sapien
cgcgcccggccaaggtcaattattt

SEQ ID NO: 4286494 - DNA, 25 bp, Homo sapien
cggccaaggtcaattatttctaata

SEQ ID NO: 4286495 - DNA, 25 bp, Homo sapien
ggccaaggtcaattatttctaataa

SEQ ID NO: 4286496 - DNA, 25 bp, Homo sapien
ctcataccagtagtctcggctactt

SEQ ID NO: 4286497 - DNA, 25 bp, Homo sapien
gcaggcaggcagtcactcaagccca

SEQ ID NO: 4286498 - DNA, 25 bp, Homo sapien
gctcataccagtagtctcggctact

SEQ ID NO: 4286499 - DNA, 25 bp, Homo sapien
ggctcataccagtagtctcggctac

SEQ ID NO: 4286500 - DNA, 25 bp, Homo sapien
gaaattgtaacacttgtgcactgct

SEQ ID NO: 4286501 - DNA, 25 bp, Homo sapien
gaaactacttcacatccaagttata

SEQ ID NO: 4286502 - DNA, 25 bp, Homo sapien
cataaatgggcaaaggccttagaca

SEQ ID NO: 4286503 - DNA, 25 bp, Homo sapien
tataaagtacttgtataactcgaca

SEQ ID NO: 4286504 - DNA, 25 bp, Homo sapien
taaatggataaagatatgcggtata

SEQ ID NO: 4286505 - DNA, 25 bp, Homo sapien
gaaattctgatgcatgtcacaacat

SEQ ID NO: 4286506 - DNA, 25 bp, Homo sapien
atggataaagatatgcggtatatac

SEQ ID NO: 4286507 - DNA, 25 bp, Homo sapien
ggataaagatatgcggtatatacat

SEQ ID NO: 4286508 - DNA, 25 bp, Homo sapien
agttctcaaaacatcattgtgaatg

SEQ ID NO: 4286509 - DNA, 25 bp, Homo sapien
taaaataggcgaattcattgagaca

SEQ ID NO: 4286510 - DNA, 25 bp, Homo sapien
cactgcatcatacccttcaaaatag

SEQ ID NO: 4286511 - DNA, 25 bp, Homo sapien
tgggatgatgaaagtagttctcaaa

SEQ ID NO: 4286512 - DNA, 25 bp, Homo sapien
tacacattccttgtaaggtaatcaa

SEQ ID NO: 4286513 - DNA, 25 bp, Homo sapien
aaaataggcttctagcggccggctt

SEQ ID NO: 4286514 - DNA, 25 bp, Homo sapien
tacaaccttccagatctacatacat

SEQ ID NO: 4286515 - DNA, 25 bp, Homo sapien
cagtggctaacaacctgtaagcagt

SEQ ID NO: 4286516 - DNA, 25 bp, Homo sapien
gagtgcaccatctaggagaaggata

SEQ ID NO: 4286517 - DNA, 25 bp, Homo sapien
gagtgtaactacgtatcttagcagg

SEQ ID NO: 4286518 - DNA, 25 bp, Homo sapien
tggctgcccaaagattgtcaatttg

SEQ ID NO: 4286519 - DNA, 25 bp, Homo sapien
tctctggtgcctattactgtaagga

SEQ ID NO: 4286520 - DNA, 25 bp, Homo sapien
tgcagcggctagaaaagatgcctgc

SEQ ID NO: 4286521 - DNA, 25 bp, Homo sapien
tgctactcccggcagaaagggagca

SEQ ID NO: 4286522 - DNA, 25 bp, Homo sapien
ctggcacactgtattggagaaaaat

SEQ ID NO: 4286523 - DNA, 25 bp, Homo sapien
ccttcacccagacatgtggtaggga

SEQ ID NO: 4286524 - DNA, 25 bp, Homo sapien
gatctcatcccataagcctgtagca

SEQ ID NO: 4286525 - DNA, 25 bp, Homo sapien
taaaccctgaggaggtagcctggag

SEQ ID NO: 4286526 - DNA, 25 bp, Homo sapien
ggtatgaaatatatccccaggagca

SEQ ID NO: 4286527 - DNA, 25 bp, Homo sapien
gagccagctggactatatcacctta

SEQ ID NO: 4286528 - DNA, 25 bp, Homo sapien
tctagtcttagcatccagcgtcctg

SEQ ID NO: 4286529 - DNA, 25 bp, Homo sapien
ggtggcaccggacacactttagcgc

SEQ ID NO: 4286530 - DNA, 25 bp, Homo sapien
ctttgcgaggaaaacggtgagcttc

SEQ ID NO: 4286531 - DNA, 25 bp, Homo sapien
gcttcgaggtacacgtgaggttccg

SEQ ID NO: 4286532 - DNA, 25 bp, Homo sapien
gcgcccacggctccctacgggagct

SEQ ID NO: 4286533 - DNA, 25 bp, Homo sapien
cacggctccctacgggagctgggcc

SEQ ID NO: 4286534 - DNA, 25 bp, Homo sapien
ccgggcaccgagcgcccacggctcc

SEQ ID NO: 4286535 - DNA, 25 bp, Homo sapien
gcccacggctccctacgggagctgg

SEQ ID NO: 4286536 - DNA, 25 bp, Homo sapien
tctcaccggccgcttggtccagctc

SEQ ID NO: 4286537 - DNA, 25 bp, Homo sapien
cggcgctgcccactgggtacggatc

SEQ ID NO: 4286538 - DNA, 25 bp, Homo sapien
aggtggctgagcaccgctacagcgg

SEQ ID NO: 4286539 - DNA, 25 bp, Homo sapien
ccactgggtacggatcaacaacaag

SEQ ID NO: 4286540 - DNA, 25 bp, Homo sapien
cacacatagtaagacagctacttgg

SEQ ID NO: 4286541 - DNA, 25 bp, Homo sapien
ttattatgaatcaacttgaaaatac

SEQ ID NO: 4286542 - DNA, 25 bp, Homo sapien
ttccacacatagtaagacagctact

SEQ ID NO: 4286543 - DNA, 25 bp, Homo sapien
cacatagtaagacagctacttggcc

SEQ ID NO: 4286544 - DNA, 25 bp, Homo sapien
tgtgtgtgttaaacaggtagtctct

SEQ ID NO: 4286545 - DNA, 25 bp, Homo sapien
gtgtgtgtgttaaacaggtagtctc

SEQ ID NO: 4286546 - DNA, 25 bp, Homo sapien
tgtgttaaacaggtagtctcttccg

SEQ ID NO: 4286547 - DNA, 25 bp, Homo sapien
tgtgtgttaaacaggtagtctcttc

SEQ ID NO: 4286548 - DNA, 25 bp, Homo sapien
gacattggactatctggaggcctct

SEQ ID NO: 4286549 - DNA, 25 bp, Homo sapien
ggagattattcctccaggaccctca

SEQ ID NO: 4286550 - DNA, 25 bp, Homo sapien
ggcagagaccagaccagatatgagt

SEQ ID NO: 4286551 - DNA, 25 bp, Homo sapien
gtgtgacatcccaccttcgctggaa

SEQ ID NO: 4286552 - DNA, 25 bp, Homo sapien
gggagtcctgtgctctgccatcaaa

SEQ ID NO: 4286553 - DNA, 25 bp, Homo sapien
cctgtgctctgccatcaaaatgctg

SEQ ID NO: 4286554 - DNA, 25 bp, Homo sapien
gagtcctgtgctctgccatcaaaat

SEQ ID NO: 4286555 - DNA, 25 bp, Homo sapien
gtcctgtgctctgccatcaaaatgc

SEQ ID NO: 4286556 - DNA, 25 bp, Homo sapien
tccatcttcggtgcctccaggaaac

SEQ ID NO: 4286557 - DNA, 25 bp, Homo sapien
gggacatctccatcttcggtgcctc

SEQ ID NO: 4286558 - DNA, 25 bp, Homo sapien
ctgggacatctccatcttcggtgcc

SEQ ID NO: 4286559 - DNA, 25 bp, Homo sapien
tctccatcttcggtgcctccaggaa

SEQ ID NO: 4286560 - DNA, 25 bp, Homo sapien
gcagcaaagcctgggctggtttgct

SEQ ID NO: 4286561 - DNA, 25 bp, Homo sapien
ctggtttgctgggtgcttgcagcag

SEQ ID NO: 4286562 - DNA, 25 bp, Homo sapien
gtttgctgggtgcttgcagcagctg

SEQ ID NO: 4286563 - DNA, 25 bp, Homo sapien
gtttagcagcaaagcctgggctggt

SEQ ID NO: 4286564 - DNA, 25 bp, Homo sapien
ggctgccagaaagcctctgtgtctg

SEQ ID NO: 4286565 - DNA, 25 bp, Homo sapien
cacgagcatgggtgtcatcgttgag

SEQ ID NO: 4286566 - DNA, 25 bp, Homo sapien
tgtggctgccagaaagcctctgtgt

SEQ ID NO: 4286567 - DNA, 25 bp, Homo sapien
tctgtgtctgtcacgagcatgggtg

SEQ ID NO: 4286568 - DNA, 25 bp, Homo sapien
ctgctgagggcccaaggagcctcct

SEQ ID NO: 4286569 - DNA, 25 bp, Homo sapien
tgctgagggcccaaggagcctcctc

SEQ ID NO: 4286570 - DNA, 25 bp, Homo sapien
cctgctgagggcccaaggagcctcc

SEQ ID NO: 4286571 - DNA, 25 bp, Homo sapien
ctgagggcccaaggagcctcctcac

SEQ ID NO: 4286572 - DNA, 25 bp, Homo sapien
gggaactagatgcacaataatggtg

SEQ ID NO: 4286573 - DNA, 25 bp, Homo sapien
cactgtgcaccaggatggccccttg

SEQ ID NO: 4286574 - DNA, 25 bp, Homo sapien
tgcatcggccacacagatcagtagc

SEQ ID NO: 4286575 - DNA, 25 bp, Homo sapien
gccccttgcaggatgaatcggttct

SEQ ID NO: 4286576 - DNA, 25 bp, Homo sapien
ggagcatagatggtgagttcctgaa

SEQ ID NO: 4286577 - DNA, 25 bp, Homo sapien
tgctataggagtagatcaggcgctg

SEQ ID NO: 4286578 - DNA, 25 bp, Homo sapien
acgctacggcccagaggagcataga

SEQ ID NO: 4286579 - DNA, 25 bp, Homo sapien
tcctgagggatctggcatgacatct

SEQ ID NO: 4286580 - DNA, 25 bp, Homo sapien
tgctcatagtccaaaggtcccagga

SEQ ID NO: 4286581 - DNA, 25 bp, Homo sapien
ggacagtgagcctgtacagcctctg

SEQ ID NO: 4286582 - DNA, 25 bp, Homo sapien
ggccatggtcaatcacaaggacagt

SEQ ID NO: 4286583 - DNA, 25 bp, Homo sapien
tcaacctcgatggtaatggtacagg

SEQ ID NO: 4286584 - DNA, 25 bp, Homo sapien
taggaccaccagaggtgtagtactc

SEQ ID NO: 4286585 - DNA, 25 bp, Homo sapien
gagacggtccacagcaaaggtggta

SEQ ID NO: 4286586 - DNA, 25 bp, Homo sapien
gagaactcgttgatgggtgtcacca

SEQ ID NO: 4286587 - DNA, 25 bp, Homo sapien
catgagggtaatccatatccgtgcc

SEQ ID NO: 4286588 - DNA, 25 bp, Homo sapien
caccatcgagcaccaggatggaggc

SEQ ID NO: 4286589 - DNA, 25 bp, Homo sapien
ggctgcatgctggaagcaggctcca

SEQ ID NO: 4286590 - DNA, 25 bp, Homo sapien
ggaagcaggctccaggagtgtcaca

SEQ ID NO: 4286591 - DNA, 25 bp, Homo sapien
tgtcacagtccagtgtggcattcac

SEQ ID NO: 4286592 - DNA, 25 bp, Homo sapien
ctgcaagcaccctgcaagtgggtct

SEQ ID NO: 4286593 - DNA, 25 bp, Homo sapien
tgcaagcaccctgcaagtgggtctg

SEQ ID NO: 4286594 - DNA, 25 bp, Homo sapien
ggtggcaccaacagagtccggatct

SEQ ID NO: 4286595 - DNA, 25 bp, Homo sapien
tgagagtattcagcacggtgcccac

SEQ ID NO: 4286596 - DNA, 25 bp, Homo sapien
tccggatcttcgcaagtgagagtat

SEQ ID NO: 4286597 - DNA, 25 bp, Homo sapien
tcaaggactctgtcataaaggcaga

SEQ ID NO: 4286598 - DNA, 25 bp, Homo sapien
agcagcccaagtatggttcccgggt

SEQ ID NO: 4286599 - DNA, 25 bp, Homo sapien
tctggcagtaccctgagtcatggct

SEQ ID NO: 4286600 - DNA, 25 bp, Homo sapien
gtgagattgagcttggcactggccc

SEQ ID NO: 4286601 - DNA, 25 bp, Homo sapien
gtggtggtccggaccacaccgtctg

SEQ ID NO: 4286602 - DNA, 25 bp, Homo sapien
cctgaggtgcgagctaactctaggg

SEQ ID NO: 4286603 - DNA, 25 bp, Homo sapien
gaccagctgcacattcatggtgaga

SEQ ID NO: 4286604 - DNA, 25 bp, Homo sapien
caccggagacaggatttcatagcgc

SEQ ID NO: 4286605 - DNA, 25 bp, Homo sapien
gctgggcaccggagacaggatttca

SEQ ID NO: 4286606 - DNA, 25 bp, Homo sapien
tttcatagcgcaggtcgacaccccg

SEQ ID NO: 4286607 - DNA, 25 bp, Homo sapien
cacgaccaatggagaagagtgggct

SEQ ID NO: 4286608 - DNA, 25 bp, Homo sapien
gtccaaaggacactgagatttgcag

SEQ ID NO: 4286609 - DNA, 25 bp, Homo sapien
tttgtccaaaggacactgagatttg

SEQ ID NO: 4286610 - DNA, 25 bp, Homo sapien
tgtccaaaggacactgagatttgca

SEQ ID NO: 4286611 - DNA, 25 bp, Homo sapien
tggagggaacaggcaaaaccttcac

SEQ ID NO: 4286612 - DNA, 25 bp, Homo sapien
cacctctttgtctatgcccagtcct

SEQ ID NO: 4286613 - DNA, 25 bp, Homo sapien
gcccagtcctccccttaaataggca

SEQ ID NO: 4286614 - DNA, 25 bp, Homo sapien
aacctcacttaggatctccaaaagg

SEQ ID NO: 4286615 - DNA, 25 bp, Homo sapien
ctcacttaggatctccaaaaggatc

SEQ ID NO: 4286616 - DNA, 25 bp, Homo sapien
tgctgacaagtattcctttgagccc

SEQ ID NO: 4286617 - DNA, 25 bp, Homo sapien
gagccccatacctttgggccataaa

SEQ ID NO: 4286618 - DNA, 25 bp, Homo sapien
ctgacaagtattcctttgagcccca

SEQ ID NO: 4286619 - DNA, 25 bp, Homo sapien
tcctttgagccccatacctttgggc

SEQ ID NO: 4286620 - DNA, 25 bp, Homo sapien
ttatcatcttagaattgctgaaagc

SEQ ID NO: 4286621 - DNA, 25 bp, Homo sapien
caatgtgaattatcatcttagaatt

SEQ ID NO: 4286622 - DNA, 25 bp, Homo sapien
gaattatcatcttagaattgctgaa

SEQ ID NO: 4286623 - DNA, 25 bp, Homo sapien
tctgaatcattgacaatgtgaatta

SEQ ID NO: 4286624 - DNA, 25 bp, Homo sapien
cagcacagaaccaagctaaggtggg

SEQ ID NO: 4286625 - DNA, 25 bp, Homo sapien
tcagtattagtcaaggaggccaagg

SEQ ID NO: 4286626 - DNA, 25 bp, Homo sapien
tcttactgtgtgattgccctaaaca

SEQ ID NO: 4286627 - DNA, 25 bp, Homo sapien
tattagagggcttgtgaattcccag

SEQ ID NO: 4286628 - DNA, 25 bp, Homo sapien
tacccaatccataaacaccctcaga

SEQ ID NO: 4286629 - DNA, 25 bp, Homo sapien
tctacccaatccataaacaccctca

SEQ ID NO: 4286630 - DNA, 25 bp, Homo sapien
ccctcagattccaggtcatgctcac

SEQ ID NO: 4286631 - DNA, 25 bp, Homo sapien
caatccataaacaccctcagattcc

SEQ ID NO: 4286632 - DNA, 25 bp, Homo sapien
ctgcagccaaccttgctcattgatg

SEQ ID NO: 4286633 - DNA, 25 bp, Homo sapien
gagaaaggtccagggaagtgtggca

SEQ ID NO: 4286634 - DNA, 25 bp, Homo sapien
caaccttgctcattgatggagaaag

SEQ ID NO: 4286635 - DNA, 25 bp, Homo sapien
cagccaaccttgctcattgatggag

SEQ ID NO: 4286636 - DNA, 25 bp, Homo sapien
tccctgtgggaacagccatggtcac

SEQ ID NO: 4286637 - DNA, 25 bp, Homo sapien
catctatgcctctgctgcaaggttc

SEQ ID NO: 4286638 - DNA, 25 bp, Homo sapien
acatcatgtagaggctcatctatgc

SEQ ID NO: 4286639 - DNA, 25 bp, Homo sapien
aacacatagcagatcttgaaagaac

SEQ ID NO: 4286640 - DNA, 25 bp, Homo sapien
ccaccgtcccatgttctgggcttac

SEQ ID NO: 4286641 - DNA, 25 bp, Homo sapien
cccaccgtcccatgttctgggctta

SEQ ID NO: 4286642 - DNA, 25 bp, Homo sapien
cacccaccgtcccatgttctgggct

SEQ ID NO: 4286643 - DNA, 25 bp, Homo sapien
tcacccaccgtcccatgttctgggc

SEQ ID NO: 4286644 - DNA, 25 bp, Homo sapien
ggagcagagtgtacagccgagcccc

SEQ ID NO: 4286645 - DNA, 25 bp, Homo sapien
gagcagagtgtacagccgagcccca

SEQ ID NO: 4286646 - DNA, 25 bp, Homo sapien
agcagagtgtacagccgagccccag

SEQ ID NO: 4286647 - DNA, 25 bp, Homo sapien
cagagtgtacagccgagccccaggt

SEQ ID NO: 4286648 - DNA, 25 bp, Homo sapien
gaggatctgctcaggccatgcctgc

SEQ ID NO: 4286649 - DNA, 25 bp, Homo sapien
tcagggaggatctgctcaggccatg

SEQ ID NO: 4286650 - DNA, 25 bp, Homo sapien
agggaggatctgctcaggccatgcc

SEQ ID NO: 4286651 - DNA, 25 bp, Homo sapien
gggaggatctgctcaggccatgcct

SEQ ID NO: 4286652 - DNA, 25 bp, Homo sapien
gagagtgagccctccatcacatggt

SEQ ID NO: 4286653 - DNA, 25 bp, Homo sapien
ggttgccacatgtgaacttcagctg

SEQ ID NO: 4286654 - DNA, 25 bp, Homo sapien
tcagctgcaccttgtagtggttcac

SEQ ID NO: 4286655 - DNA, 25 bp, Homo sapien
gatatggctaaggtcccgctgcaca

SEQ ID NO: 4286656 - DNA, 25 bp, Homo sapien
ccacataggtcccttgccacctggc

SEQ ID NO: 4286657 - DNA, 25 bp, Homo sapien
taaaaactgaaggactgtgccaggg

SEQ ID NO: 4286658 - DNA, 25 bp, Homo sapien
tggacattgagcaactccagggtgg

SEQ ID NO: 4286659 - DNA, 25 bp, Homo sapien
gtgtgggcgtgtaggaggagcagtt

SEQ ID NO: 4286660 - DNA, 25 bp, Homo sapien
accggagcaaagaggaacacgagga

SEQ ID NO: 4286661 - DNA, 25 bp, Homo sapien
accaccggagcaaagaggaacacga

SEQ ID NO: 4286662 - DNA, 25 bp, Homo sapien
cagagaccaccggagcaaagaggaa

SEQ ID NO: 4286663 - DNA, 25 bp, Homo sapien
agaccaccggagcaaagaggaacac

SEQ ID NO: 4286664 - DNA, 25 bp, Homo sapien
tgttgccaggtcagttgctcaaaca

SEQ ID NO: 4286665 - DNA, 25 bp, Homo sapien
gttgccaggtcagttgctcaaacat

SEQ ID NO: 4286666 - DNA, 25 bp, Homo sapien
cctgttgccaggtcagttgctcaaa

SEQ ID NO: 4286667 - DNA, 25 bp, Homo sapien
ctgttgccaggtcagttgctcaaac

SEQ ID NO: 4286668 - DNA, 25 bp, Homo sapien
cctggtgactgagttctagacctct

SEQ ID NO: 4286669 - DNA, 25 bp, Homo sapien
agaatatcccattttccattgcccc

SEQ ID NO: 4286670 - DNA, 25 bp, Homo sapien
gaggctcagaatatcccattttcca

SEQ ID NO: 4286671 - DNA, 25 bp, Homo sapien
ccctggtgactgagttctagacctc

SEQ ID NO: 4286672 - DNA, 25 bp, Homo sapien
gagggaccgctatttcaccattgaa

SEQ ID NO: 4286673 - DNA, 25 bp, Homo sapien
cctgtgttgatagagcagcctcagc

SEQ ID NO: 4286674 - DNA, 25 bp, Homo sapien
agtctgcacctggtaccggcaaagg

SEQ ID NO: 4286675 - DNA, 25 bp, Homo sapien
ggtgctctgcctatgtgcggacgca

SEQ ID NO: 4286676 - DNA, 25 bp, Homo sapien
tgggatccggggctccattgagcta

SEQ ID NO: 4286677 - DNA, 25 bp, Homo sapien
ctccattgagctaggtgacagggtg

SEQ ID NO: 4286678 - DNA, 25 bp, Homo sapien
cggggctccattgagctaggtgaca

SEQ ID NO: 4286679 - DNA, 25 bp, Homo sapien
cagggcttgggatccggggctccat

SEQ ID NO: 4286680 - DNA, 25 bp, Homo sapien
cagctctagcaccaacacccgctgc

SEQ ID NO: 4286681 - DNA, 25 bp, Homo sapien
agctctagcaccaacacccgctgcc

SEQ ID NO: 4286682 - DNA, 25 bp, Homo sapien
gggaaggcagtgtcctcgtcgtcac

SEQ ID NO: 4286683 - DNA, 25 bp, Homo sapien
ggagaggtgagccatggcaagcaga

SEQ ID NO: 4286684 - DNA, 25 bp, Homo sapien
caggaggcaggaagctatgggtccc

SEQ ID NO: 4286685 - DNA, 25 bp, Homo sapien
cctggcatggactagagagggtgct

SEQ ID NO: 4286686 - DNA, 25 bp, Homo sapien
tggtggggcctgtctaaagccccaa

SEQ ID NO: 4286687 - DNA, 25 bp, Homo sapien
ttttcaggtgaccatccggccgcat

SEQ ID NO: 4286688 - DNA, 25 bp, Homo sapien
catccggccgcatagagcagggctg

SEQ ID NO: 4286689 - DNA, 25 bp, Homo sapien
caggtgctgggcctgcttttcaggt

SEQ ID NO: 4286690 - DNA, 25 bp, Homo sapien
ggcctgcttttcaggtgaccatccg

SEQ ID NO: 4286691 - DNA, 25 bp, Homo sapien
gggttggggtagcaacagggcacac

SEQ ID NO: 4286692 - DNA, 25 bp, Homo sapien
tgggggttggggtagcaacagggca

SEQ ID NO: 4286693 - DNA, 25 bp, Homo sapien
ctagaggagaaaggtcagacaccag

SEQ ID NO: 4286694 - DNA, 25 bp, Homo sapien
agaggagaaaggtcagacaccagct

SEQ ID NO: 4286695 - DNA, 25 bp, Homo sapien
ggtcccaagaggtccacttcaggtg

SEQ ID NO: 4286696 - DNA, 25 bp, Homo sapien
gcccagctggtaccttcagacggtc

SEQ ID NO: 4286697 - DNA, 25 bp, Homo sapien
ttcagacggtcccaagaggtccact

SEQ ID NO: 4286698 - DNA, 25 bp, Homo sapien
ctgaagatgagccagcagcgactcc

SEQ ID NO: 4286699 - DNA, 25 bp, Homo sapien
aaacagacgatccatcacatgggcc

SEQ ID NO: 4286700 - DNA, 25 bp, Homo sapien
ggaagagctggactagcaggaaaca

SEQ ID NO: 4286701 - DNA, 25 bp, Homo sapien
agagctggactagcaggaaacagga

SEQ ID NO: 4286702 - DNA, 25 bp, Homo sapien
ggcccgcacagggaaacagacgatc

SEQ ID NO: 4286703 - DNA, 25 bp, Homo sapien
cacacctctagtggcaagcctatta

SEQ ID NO: 4286704 - DNA, 25 bp, Homo sapien
cttcaggacttctgcacagtctgag

SEQ ID NO: 4286705 - DNA, 25 bp, Homo sapien
taccttttaactcagcttgtaggag

SEQ ID NO: 4286706 - DNA, 25 bp, Homo sapien
gacacaaatacactcagggctgcag

SEQ ID NO: 4286707 - DNA, 25 bp, Homo sapien
tagttttcagccagatgtaggtagc

SEQ ID NO: 4286708 - DNA, 25 bp, Homo sapien
gcaaaaggcatatagcggatgaggt

SEQ ID NO: 4286709 - DNA, 25 bp, Homo sapien
taatctggcccacaattcgcttgct

SEQ ID NO: 4286710 - DNA, 25 bp, Homo sapien
tagctgtggcgaaaggcactacgag

SEQ ID NO: 4286711 - DNA, 25 bp, Homo sapien
gaatcccgtagttctgacatctcag

SEQ ID NO: 4286712 - DNA, 25 bp, Homo sapien
ggctagctgccgctaccacaaagtc

SEQ ID NO: 4286713 - DNA, 25 bp, Homo sapien
ttctgacatctcaggctagctgccg

SEQ ID NO: 4286714 - DNA, 25 bp, Homo sapien
ctgggcacggttgaccggtggaatc

SEQ ID NO: 4286715 - DNA, 25 bp, Homo sapien
ttctcaaacatcagaggcttcaggg

SEQ ID NO: 4286716 - DNA, 25 bp, Homo sapien
acactccagacttccagggctttgt

SEQ ID NO: 4286717 - DNA, 25 bp, Homo sapien
gggctttgttcagttccttctgctg

SEQ ID NO: 4286718 - DNA, 25 bp, Homo sapien
ggcttcaggggagggcccacactcc

SEQ ID NO: 4286719 - DNA, 25 bp, Homo sapien
gctgtagatcccctaggccctatct

SEQ ID NO: 4286720 - DNA, 25 bp, Homo sapien
gagaggtagcaaattggctgtagat

SEQ ID NO: 4286721 - DNA, 25 bp, Homo sapien
cctgaaactatggaggagtgaggtt

SEQ ID NO: 4286722 - DNA, 25 bp, Homo sapien
cagggagaagacctactgagggacc

SEQ ID NO: 4286723 - DNA, 25 bp, Homo sapien
ttggcagctgccagtacgtagagga

SEQ ID NO: 4286724 - DNA, 25 bp, Homo sapien
gctccctgagtgcagtccagtcctg

SEQ ID NO: 4286725 - DNA, 25 bp, Homo sapien
catgcatctgggcatacaggttggc

SEQ ID NO: 4286726 - DNA, 25 bp, Homo sapien
gcagaagccgaagccagctctagat

SEQ ID NO: 4286727 - DNA, 25 bp, Homo sapien
tatgcacaagcatggctctctctgg

SEQ ID NO: 4286728 - DNA, 25 bp, Homo sapien
tcttggagctccctacagaatccca

SEQ ID NO: 4286729 - DNA, 25 bp, Homo sapien
gatctgtttgagtgcctgcctttgc

SEQ ID NO: 4286730 - DNA, 25 bp, Homo sapien
gaaatgcctacctctgctctgaggg

SEQ ID NO: 4286731 - DNA, 25 bp, Homo sapien
ccagaagggagttccatcctcaagc

SEQ ID NO: 4286732 - DNA, 25 bp, Homo sapien
ctggggacactgtttgggacctgac

SEQ ID NO: 4286733 - DNA, 25 bp, Homo sapien
actgtttgggacctgaccagaaggg

SEQ ID NO: 4286734 - DNA, 25 bp, Homo sapien
agaagggagttccatcctcaagcac

SEQ ID NO: 4286735 - DNA, 25 bp, Homo sapien
ctaggtaggtaagtagaagctgctg

SEQ ID NO: 4286736 - DNA, 25 bp, Homo sapien
ccagcgtcccaacccctagccacac

SEQ ID NO: 4286737 - DNA, 25 bp, Homo sapien
gtaggtaagtagaagctgctgggct

SEQ ID NO: 4286738 - DNA, 25 bp, Homo sapien
ggtaggtaagtagaagctgctgggc

SEQ ID NO: 4286739 - DNA, 25 bp, Homo sapien
tgcctcagcagctgtttgatgccat

SEQ ID NO: 4286740 - DNA, 25 bp, Homo sapien
tgatgccataatgaaagcagagttt

SEQ ID NO: 4286741 - DNA, 25 bp, Homo sapien
ttattaggtgggaagtgcctcagca

SEQ ID NO: 4286742 - DNA, 25 bp, Homo sapien
tttattaggtgggaagtgcctcagc

SEQ ID NO: 4286743 - DNA, 25 bp, Homo sapien
cagtggccaagagcccacgccacac

SEQ ID NO: 4286744 - DNA, 25 bp, Homo sapien
ccagtggccaagagcccacgccaca

SEQ ID NO: 4286745 - DNA, 25 bp, Homo sapien
ttctgtggacgcactctcaggaccc

SEQ ID NO: 4286746 - DNA, 25 bp, Homo sapien
ttgccagttctgtggacgcactctc

SEQ ID NO: 4286747 - DNA, 25 bp, Homo sapien
cagttctgtggacgcactctcagga

SEQ ID NO: 4286748 - DNA, 25 bp, Homo sapien
gccagttctgtggacgcactctcag

SEQ ID NO: 4286749 - DNA, 25 bp, Homo sapien
taaggtgagtgtctgtggctcatcc

SEQ ID NO: 4286750 - DNA, 25 bp, Homo sapien
cagtaaggtgagtgtctgtggctca

SEQ ID NO: 4286751 - DNA, 25 bp, Homo sapien
gtgagtgtctgtggctcatccatgt

SEQ ID NO: 4286752 - DNA, 25 bp, Homo sapien
cttcagtaaggtgagtgtctgtggc

SEQ ID NO: 4286753 - DNA, 25 bp, Homo sapien
cccatctgcctctgttggtggcctt

SEQ ID NO: 4286754 - DNA, 25 bp, Homo sapien
aggaagtgtgagactgagtcctgca

SEQ ID NO: 4286755 - DNA, 25 bp, Homo sapien
agtgtgagactgagtcctgcagact

SEQ ID NO: 4286756 - DNA, 25 bp, Homo sapien
aggaggaagtgtgagactgagtcct

SEQ ID NO: 4286757 - DNA, 25 bp, Homo sapien
tctctgcagacagtcggaagagttc

SEQ ID NO: 4286758 - DNA, 25 bp, Homo sapien
cagacagtcggaagagttcttcaaa

SEQ ID NO: 4286759 - DNA, 25 bp, Homo sapien
tgcagacagtcggaagagttcttca

SEQ ID NO: 4286760 - DNA, 25 bp, Homo sapien
gatggtctctgcagacagtcggaag

SEQ ID NO: 4286761 - DNA, 25 bp, Homo sapien
gtgcaacgagcagccacatagcgcc

SEQ ID NO: 4286762 - DNA, 25 bp, Homo sapien
taccgcacggtacagacagggtagg

SEQ ID NO: 4286763 - DNA, 25 bp, Homo sapien
cagtggcttcagatagtgggtgcaa

SEQ ID NO: 4286764 - DNA, 25 bp, Homo sapien
tgtgctagggaagtaccgcacggta

SEQ ID NO: 4286765 - DNA, 25 bp, Homo sapien
tgtgggcaagggactgacctccgaa

SEQ ID NO: 4286766 - DNA, 25 bp, Homo sapien
actgacctccgaagtcaagcactca

SEQ ID NO: 4286767 - DNA, 25 bp, Homo sapien
ggcaagggactgacctccgaagtca

SEQ ID NO: 4286768 - DNA, 25 bp, Homo sapien
caagggactgacctccgaagtcaag

SEQ ID NO: 4286769 - DNA, 25 bp, Homo sapien
agcagccacaccatccacacgggag

SEQ ID NO: 4286770 - DNA, 25 bp, Homo sapien
ggtgagcgggatcacctgtaagtct

SEQ ID NO: 4286771 - DNA, 25 bp, Homo sapien
ttatccccatagatgtgctctgtgg

SEQ ID NO: 4286772 - DNA, 25 bp, Homo sapien
ccagtgggtaggtgagcgggatcac

SEQ ID NO: 4286773 - DNA, 25 bp, Homo sapien
gcaggaagatgttgggtgggaagct

SEQ ID NO: 4286774 - DNA, 25 bp, Homo sapien
aaggcaggaagatgttgggtgggaa

SEQ ID NO: 4286775 - DNA, 25 bp, Homo sapien
gaagatgttgggtgggaagctgtat

SEQ ID NO: 4286776 - DNA, 25 bp, Homo sapien
ggtgggaagctgtatgggaggacgg

SEQ ID NO: 4286777 - DNA, 25 bp, Homo sapien
agtgtggagaggggtcagcactcac

SEQ ID NO: 4286778 - DNA, 25 bp, Homo sapien
gagtgtggagaggggtcagcactca

SEQ ID NO: 4286779 - DNA, 25 bp, Homo sapien
tatgtggtccatgtcaacaacagtc

SEQ ID NO: 4286780 - DNA, 25 bp, Homo sapien
aactgacggctgagattggagcgct

SEQ ID NO: 4286781 - DNA, 25 bp, Homo sapien
cccactagggcaaagactttgagca

SEQ ID NO: 4286782 - DNA, 25 bp, Homo sapien
gattggagcgctctatgtggtccat

SEQ ID NO: 4286783 - DNA, 25 bp, Homo sapien
gtgctggcgtctcagtttctcctga

SEQ ID NO: 4286784 - DNA, 25 bp, Homo sapien
aatttgcccatcatagcggctgcct

SEQ ID NO: 4286785 - DNA, 25 bp, Homo sapien
aggaggtagtgctggcgtctcagtt

SEQ ID NO: 4286786 - DNA, 25 bp, Homo sapien
cccaaacactgcaatttgcccatca

SEQ ID NO: 4286787 - DNA, 25 bp, Homo sapien
gagctccccatcttccggaagacaa

SEQ ID NO: 4286788 - DNA, 25 bp, Homo sapien
gaagacaatcgagggcatcaaagta

SEQ ID NO: 4286789 - DNA, 25 bp, Homo sapien
catcttccggaagacaatcgagggc

SEQ ID NO: 4286790 - DNA, 25 bp, Homo sapien
aggagctccccatcttccggaagac

SEQ ID NO: 4286791 - DNA, 25 bp, Homo sapien
cacccaggttggtgaaggctccagg

SEQ ID NO: 4286792 - DNA, 25 bp, Homo sapien
tctagcgctgggtgccctctgacac

SEQ ID NO: 4286793 - DNA, 25 bp, Homo sapien
ccagggctgctctctagcgctgggt

SEQ ID NO: 4286794 - DNA, 25 bp, Homo sapien
gatcctggctggaggcttcacccag

SEQ ID NO: 4286795 - DNA, 25 bp, Homo sapien
cctctgtccgcttcagtggttccag

SEQ ID NO: 4286796 - DNA, 25 bp, Homo sapien
gcgactgtccgcactagggcctcat

SEQ ID NO: 4286797 - DNA, 25 bp, Homo sapien
cagcatggccaccatagggctcaag

SEQ ID NO: 4286798 - DNA, 25 bp, Homo sapien
gacacctgcactgcttagggcgact

SEQ ID NO: 4286799 - DNA, 25 bp, Homo sapien
ctgttggtaggactctgtgggcata

SEQ ID NO: 4286800 - DNA, 25 bp, Homo sapien
ctgtgggcatagtagccccagcctg

SEQ ID NO: 4286801 - DNA, 25 bp, Homo sapien
ggactctgtgggcatagtagcccca

SEQ ID NO: 4286802 - DNA, 25 bp, Homo sapien
actctgtgggcatagtagccccagc

SEQ ID NO: 4286803 - DNA, 25 bp, Homo sapien
ttgtgcagtgcacagaaggcctgat

SEQ ID NO: 4286804 - DNA, 25 bp, Homo sapien
tgcagtgcacagaaggcctgatgca

SEQ ID NO: 4286805 - DNA, 25 bp, Homo sapien
tgtgcagtgcacagaaggcctgatg

SEQ ID NO: 4286806 - DNA, 25 bp, Homo sapien
ctggggtggccggccatggaggtgc

SEQ ID NO: 4286807 - DNA, 25 bp, Homo sapien
cacgcaagtaccgagagaaagttgt

SEQ ID NO: 4286808 - DNA, 25 bp, Homo sapien
taccgagagaaagttgttgtgtctc

SEQ ID NO: 4286809 - DNA, 25 bp, Homo sapien
agtgatagccccaccacgcaagtac

SEQ ID NO: 4286810 - DNA, 25 bp, Homo sapien
cccaccacgcaagtaccgagagaaa

SEQ ID NO: 4286811 - DNA, 25 bp, Homo sapien
gggatcacagtcgttgagctcaacc

SEQ ID NO: 4286812 - DNA, 25 bp, Homo sapien
tcacggaagtagtgggtattggccc

SEQ ID NO: 4286813 - DNA, 25 bp, Homo sapien
ctcaattcccgagaaagtcaccaag

SEQ ID NO: 4286814 - DNA, 25 bp, Homo sapien
gttgagctcaaccattccctcaatt

SEQ ID NO: 4286815 - DNA, 25 bp, Homo sapien
aagtcctcaccaaagtcacagaaca

SEQ ID NO: 4286816 - DNA, 25 bp, Homo sapien
tgaagtcctcaccaaagtcacagaa

SEQ ID NO: 4286817 - DNA, 25 bp, Homo sapien
gaagtcctcaccaaagtcacagaac

SEQ ID NO: 4286818 - DNA, 25 bp, Homo sapien
ggcttacagattgtacttaaggata

SEQ ID NO: 4286819 - DNA, 25 bp, Homo sapien
ttacagattgtacttaaggataggg

SEQ ID NO: 4286820 - DNA, 25 bp, Homo sapien
gaggtggcttacagattgtacttaa

SEQ ID NO: 4286821 - DNA, 25 bp, Homo sapien
taggggtcactgaggtggcttacag

SEQ ID NO: 4286822 - DNA, 25 bp, Homo sapien
ctccatgcttatgacacaaggtgcc

SEQ ID NO: 4286823 - DNA, 25 bp, Homo sapien
ggtgtcagccgccagaaagcaaact

SEQ ID NO: 4286824 - DNA, 25 bp, Homo sapien
tgcttatgacacaaggtgcccacct

SEQ ID NO: 4286825 - DNA, 25 bp, Homo sapien
tatgacacaaggtgcccaccttcag

SEQ ID NO: 4286826 - DNA, 25 bp, Homo sapien
cgacgacctggacagctctgttgag

SEQ ID NO: 4286827 - DNA, 25 bp, Homo sapien
tcctcagtgatgtcacccgtgtgca

SEQ ID NO: 4286828 - DNA, 25 bp, Homo sapien
ctggaagtccaacagcaggtcctca

SEQ ID NO: 4286829 - DNA, 25 bp, Homo sapien
gagctgagccaagagctcttgagag

SEQ ID NO: 4286830 - DNA, 25 bp, Homo sapien
aaagacactcctcttgggccgtgcc

SEQ ID NO: 4286831 - DNA, 25 bp, Homo sapien
agcccatagccccccaggacactta

SEQ ID NO: 4286832 - DNA, 25 bp, Homo sapien
gagccagtgcagcctgagcaaagac

SEQ ID NO: 4286833 - DNA, 25 bp, Homo sapien
tgggccgtgcccccaccttggtctg

SEQ ID NO: 4286834 - DNA, 25 bp, Homo sapien
gggatcatgcagagtgaggctgccc

SEQ ID NO: 4286835 - DNA, 25 bp, Homo sapien
ggatcatgcagagtgaggctgccca

SEQ ID NO: 4286836 - DNA, 25 bp, Homo sapien
tggggatcatgcagagtgaggctgc

SEQ ID NO: 4286837 - DNA, 25 bp, Homo sapien
cagccaggtcggaccagcaggtggg

SEQ ID NO: 4286838 - DNA, 25 bp, Homo sapien
tcctcatccagtagcttcgaagcgt

SEQ ID NO: 4286839 - DNA, 25 bp, Homo sapien
gcttcgaagcgtccagggcatccat

SEQ ID NO: 4286840 - DNA, 25 bp, Homo sapien
cagtagcttcgaagcgtccagggca

SEQ ID NO: 4286841 - DNA, 25 bp, Homo sapien
tcatccagtagcttcgaagcgtcca

SEQ ID NO: 4286842 - DNA, 25 bp, Homo sapien
gagatagggtctttgtgtaggtggc

SEQ ID NO: 4286843 - DNA, 25 bp, Homo sapien
ctttgtgtaggtggcggtgacagta

SEQ ID NO: 4286844 - DNA, 25 bp, Homo sapien
ggtctttgtgtaggtggcggtgaca

SEQ ID NO: 4286845 - DNA, 25 bp, Homo sapien
tagggtctttgtgtaggtggcggtg

SEQ ID NO: 4286846 - DNA, 25 bp, Homo sapien
gctgtagccagtgcaaacaggaacc

SEQ ID NO: 4286847 - DNA, 25 bp, Homo sapien
aaacaggaaccaaggccaagcgaat

SEQ ID NO: 4286848 - DNA, 25 bp, Homo sapien
gaataagggacgctgctggtcacag

SEQ ID NO: 4286849 - DNA, 25 bp, Homo sapien
gccaagcgaataagggacgctgctg

SEQ ID NO: 4286850 - DNA, 25 bp, Homo sapien
caggctatgcctagaagcaagtcaa

SEQ ID NO: 4286851 - DNA, 25 bp, Homo sapien
taaacaggagcctggcaacaggagc

SEQ ID NO: 4286852 - DNA, 25 bp, Homo sapien
cagtcaacaagtgaccgtggtctcc

SEQ ID NO: 4286853 - DNA, 25 bp, Homo sapien
gagatgcctcaagcactctggtcca

SEQ ID NO: 4286854 - DNA, 25 bp, Homo sapien
caatgggcggatcatgactgtgtca

SEQ ID NO: 4286855 - DNA, 25 bp, Homo sapien
ggcaatgggcggatcatgactgtgt

SEQ ID NO: 4286856 - DNA, 25 bp, Homo sapien
ttaacaggcaatgggcggatcatga

SEQ ID NO: 4286857 - DNA, 25 bp, Homo sapien
atgggcggatcatgactgtgtcagt

SEQ ID NO: 4286858 - DNA, 25 bp, Homo sapien
catggagaaaggactgcaatgcagg

SEQ ID NO: 4286859 - DNA, 25 bp, Homo sapien
ctgtcaaggaagaggcatggagaaa

SEQ ID NO: 4286860 - DNA, 25 bp, Homo sapien
agaggcatggagaaaggactgcaat

SEQ ID NO: 4286861 - DNA, 25 bp, Homo sapien
aaggactgcaatgcagggcgagaaa

SEQ ID NO: 4286862 - DNA, 25 bp, Homo sapien
tcagctcaacatcacaggaaaagga

SEQ ID NO: 4286863 - DNA, 25 bp, Homo sapien
gcaggctgggggtataggtgaggca

SEQ ID NO: 4286864 - DNA, 25 bp, Homo sapien
tagtatgggctccacagttcagctc

SEQ ID NO: 4286865 - DNA, 25 bp, Homo sapien
ccagcactgcacacctgaggctgtt

SEQ ID NO: 4286866 - DNA, 25 bp, Homo sapien
accgagcccatcgaagcctgtcctt

SEQ ID NO: 4286867 - DNA, 25 bp, Homo sapien
gctggatgaattttgtccggccacc

SEQ ID NO: 4286868 - DNA, 25 bp, Homo sapien
ggatgaattttgtccggccaccgag

SEQ ID NO: 4286869 - DNA, 25 bp, Homo sapien
aggctggatgaattttgtccggcca

SEQ ID NO: 4286870 - DNA, 25 bp, Homo sapien
atctttgctgcaagaggactctgac

SEQ ID NO: 4286871 - DNA, 25 bp, Homo sapien
acatctttgctgcaagaggactctg

SEQ ID NO: 4286872 - DNA, 25 bp, Homo sapien
catctttgctgcaagaggactctga

SEQ ID NO: 4286873 - DNA, 25 bp, Homo sapien
cacatctttgctgcaagaggactct

SEQ ID NO: 4286874 - DNA, 25 bp, Homo sapien
ggcctaggatggcattccggacaaa

SEQ ID NO: 4286875 - DNA, 25 bp, Homo sapien
tttctggcctaggatggcattccgg

SEQ ID NO: 4286876 - DNA, 25 bp, Homo sapien
tctggcctaggatggcattccggac

SEQ ID NO: 4286877 - DNA, 25 bp, Homo sapien
gctgtttctggcctaggatggcatt

SEQ ID NO: 4286878 - DNA, 25 bp, Homo sapien
ttgcatatcttcttggggacatcct

SEQ ID NO: 4286879 - DNA, 25 bp, Homo sapien
gctgaagagcccaatcaactcacca

SEQ ID NO: 4286880 - DNA, 25 bp, Homo sapien
cccaggctctatatggggctgaaga

SEQ ID NO: 4286881 - DNA, 25 bp, Homo sapien
tgtcccaggctctatatggggctga

SEQ ID NO: 4286882 - DNA, 25 bp, Homo sapien
catgtcccaggctctatatggggct

SEQ ID NO: 4286883 - DNA, 25 bp, Homo sapien
gatcaatatcatcacggaaggatgg

SEQ ID NO: 4286884 - DNA, 25 bp, Homo sapien
agtttttcgtagtaaccatgctggg

SEQ ID NO: 4286885 - DNA, 25 bp, Homo sapien
catcaaaggtagcattgagatcaat

SEQ ID NO: 4286886 - DNA, 25 bp, Homo sapien
cgggctgggggagtatccacatcaa

SEQ ID NO: 4286887 - DNA, 25 bp, Homo sapien
agatgacctggttacttggggccac

SEQ ID NO: 4286888 - DNA, 25 bp, Homo sapien
atgacctggttacttggggccacag

SEQ ID NO: 4286889 - DNA, 25 bp, Homo sapien
gatgacctggttacttggggccaca

SEQ ID NO: 4286890 - DNA, 25 bp, Homo sapien
tcccaccttgtgacccctgtaccgc

SEQ ID NO: 4286891 - DNA, 25 bp, Homo sapien
ccttgtgacccctgtaccgcccaag

SEQ ID NO: 4286892 - DNA, 25 bp, Homo sapien
cttgtgacccctgtaccgcccaagg

SEQ ID NO: 4286893 - DNA, 25 bp, Homo sapien
agctctcccaccttgtgacccctgt

SEQ ID NO: 4286894 - DNA, 25 bp, Homo sapien
cggtcgacagtctcactggccactg

SEQ ID NO: 4286895 - DNA, 25 bp, Homo sapien
caaggtttcctgcagcatcgttagc

SEQ ID NO: 4286896 - DNA, 25 bp, Homo sapien
gccactggtggcaggttcaaggttt

SEQ ID NO: 4286897 - DNA, 25 bp, Homo sapien
taaaaccaggcggtcgacagtctca

SEQ ID NO: 4286898 - DNA, 25 bp, Homo sapien
caggacagactatgagggaagactc

SEQ ID NO: 4286899 - DNA, 25 bp, Homo sapien
tgcatgaaaggccagcccactggga

SEQ ID NO: 4286900 - DNA, 25 bp, Homo sapien
gctgaggcatcaagtccggagataa

SEQ ID NO: 4286901 - DNA, 25 bp, Homo sapien
cagagcaaggcctgatacctcatca

SEQ ID NO: 4286902 - DNA, 25 bp, Homo sapien
tgggctgacttcagttctaacttgg

SEQ ID NO: 4286903 - DNA, 25 bp, Homo sapien
cttggcctgatccaattcagagtag

SEQ ID NO: 4286904 - DNA, 25 bp, Homo sapien
catgatttccttgtcagcactctgt

SEQ ID NO: 4286905 - DNA, 25 bp, Homo sapien
tcagcactctgtaagtccttctggg

SEQ ID NO: 4286906 - DNA, 25 bp, Homo sapien
caaaaataggcctctgatgctgtca

SEQ ID NO: 4286907 - DNA, 25 bp, Homo sapien
gagtgatcaaggtagcccagaagag

SEQ ID NO: 4286908 - DNA, 25 bp, Homo sapien
tcagtctggcaatgcacatccggag

SEQ ID NO: 4286909 - DNA, 25 bp, Homo sapien
gactagagatatgggcagagatccc

SEQ ID NO: 4286910 - DNA, 25 bp, Homo sapien
ctcccctgaggccttccgtgcctct

SEQ ID NO: 4286911 - DNA, 25 bp, Homo sapien
ccttccgtgcctcttttagattctc

SEQ ID NO: 4286912 - DNA, 25 bp, Homo sapien
tccgtgcctcttttagattctcgta

SEQ ID NO: 4286913 - DNA, 25 bp, Homo sapien
tgcctcttttagattctcgtactct

SEQ ID NO: 4286914 - DNA, 25 bp, Homo sapien
actctcattcctactttgacacctg

SEQ ID NO: 4286915 - DNA, 25 bp, Homo sapien
actgagccacagcactaatctaaca

SEQ ID NO: 4286916 - DNA, 25 bp, Homo sapien
gccacagcactaatctaacacaaag

SEQ ID NO: 4286917 - DNA, 25 bp, Homo sapien
ctctcattcctactttgacacctga

SEQ ID NO: 4286918 - DNA, 25 bp, Homo sapien
gagagctaggtcaactcccttagaa

SEQ ID NO: 4286919 - DNA, 25 bp, Homo sapien
gaatcagggttcaaacaaaggcagc

SEQ ID NO: 4286920 - DNA, 25 bp, Homo sapien
gacttgagagggcatgcagaaagcc

SEQ ID NO: 4286921 - DNA, 25 bp, Homo sapien
gagtagagtttgatcccagccaggc

SEQ ID NO: 4286922 - DNA, 25 bp, Homo sapien
tgtcccacacccatgtctcggatca

SEQ ID NO: 4286923 - DNA, 25 bp, Homo sapien
ttgagagacacacagtacacagcca

SEQ ID NO: 4286924 - DNA, 25 bp, Homo sapien
gagagacacacagtacacagccagc

SEQ ID NO: 4286925 - DNA, 25 bp, Homo sapien
gctgttccaccgctgactgtcccac

SEQ ID NO: 4286926 - DNA, 25 bp, Homo sapien
cgctggctctggagtagaagctcaa

SEQ ID NO: 4286927 - DNA, 25 bp, Homo sapien
gctggctctggagtagaagctcaat

SEQ ID NO: 4286928 - DNA, 25 bp, Homo sapien
ctggctctggagtagaagctcaatc

SEQ ID NO: 4286929 - DNA, 25 bp, Homo sapien
acccagcccacggcatttgcaatct

SEQ ID NO: 4286930 - DNA, 25 bp, Homo sapien
gcccacggcatttgcaatctggagg

SEQ ID NO: 4286931 - DNA, 25 bp, Homo sapien
ccagcccacggcatttgcaatctgg

SEQ ID NO: 4286932 - DNA, 25 bp, Homo sapien
cagcccacggcatttgcaatctgga

SEQ ID NO: 4286933 - DNA, 25 bp, Homo sapien
tgctaaggtaacaggctaggctgcc

SEQ ID NO: 4286934 - DNA, 25 bp, Homo sapien
gcagagatgagcatagctccaagga

SEQ ID NO: 4286935 - DNA, 25 bp, Homo sapien
tgccttcctttgctgccgttgctaa

SEQ ID NO: 4286936 - DNA, 25 bp, Homo sapien
tgctttagtaggtgggtgtgcccaa

SEQ ID NO: 4286937 - DNA, 25 bp, Homo sapien
ctgagccggcgggcctcctcttgtg

SEQ ID NO: 4286938 - DNA, 25 bp, Homo sapien
cctcttgtgcttgtttggtctcatc

SEQ ID NO: 4286939 - DNA, 25 bp, Homo sapien
gagccggcgggcctcctcttgtgct

SEQ ID NO: 4286940 - DNA, 25 bp, Homo sapien
cttgtgcttgtttggtctcatcctg

SEQ ID NO: 4286941 - DNA, 25 bp, Homo sapien
cgcagagtgtcgatgatgacctggc

SEQ ID NO: 4286942 - DNA, 25 bp, Homo sapien
cttccagcgtatcccgcagagtgtc

SEQ ID NO: 4286943 - DNA, 25 bp, Homo sapien
cagtagcattgcgttcttccagcgt

SEQ ID NO: 4286944 - DNA, 25 bp, Homo sapien
gacctggctgtctcgtttctccttg

SEQ ID NO: 4286945 - DNA, 25 bp, Homo sapien
cagcagaagaacttgggcccttgga

SEQ ID NO: 4286946 - DNA, 25 bp, Homo sapien
ctgggctctgacattgtccagttca

SEQ ID NO: 4286947 - DNA, 25 bp, Homo sapien
ttctgggaaagctgggctctgacat

SEQ ID NO: 4286948 - DNA, 25 bp, Homo sapien
gaaagctgggctctgacattgtcca

SEQ ID NO: 4286949 - DNA, 25 bp, Homo sapien
gggaaagctgggctctgacattgtc

SEQ ID NO: 4286950 - DNA, 25 bp, Homo sapien
tacccacaataagcagcaggaaagc

SEQ ID NO: 4286951 - DNA, 25 bp, Homo sapien
tcatagctgacctccacgtggtctc

SEQ ID NO: 4286952 - DNA, 25 bp, Homo sapien
aagcatcatagctgacctccacgtg

SEQ ID NO: 4286953 - DNA, 25 bp, Homo sapien
ctgaaaggcaatacccacaataagc

SEQ ID NO: 4286954 - DNA, 25 bp, Homo sapien
gccaaggaccttgggcgactactcc

SEQ ID NO: 4286955 - DNA, 25 bp, Homo sapien
tctgaactggctctgtgtaccacaa

SEQ ID NO: 4286956 - DNA, 25 bp, Homo sapien
gattcatagtcgactttcctccaag

SEQ ID NO: 4286957 - DNA, 25 bp, Homo sapien
cacacaataggaatggccaaggacc

SEQ ID NO: 4286958 - DNA, 25 bp, Homo sapien
gcttattgataatggttcttttgcc

SEQ ID NO: 4286959 - DNA, 25 bp, Homo sapien
aagaagagcttattgataatggttc

SEQ ID NO: 4286960 - DNA, 25 bp, Homo sapien
gaattctgcatccaagacattctcc

SEQ ID NO: 4286961 - DNA, 25 bp, Homo sapien
tcctcctgggcaagatcaaagaaga

SEQ ID NO: 4286962 - DNA, 25 bp, Homo sapien
acttggtgctgtctcaaaccactga

SEQ ID NO: 4286963 - DNA, 25 bp, Homo sapien
attcggcactgtgggcaggtccgac

SEQ ID NO: 4286964 - DNA, 25 bp, Homo sapien
ctgtgggcaggtccgacttggtgct

SEQ ID NO: 4286965 - DNA, 25 bp, Homo sapien
tgctgtctcaaaccactgaattagg

SEQ ID NO: 4286966 - DNA, 25 bp, Homo sapien
ccacgtcgcgggagtgatcgaagaa

SEQ ID NO: 4286967 - DNA, 25 bp, Homo sapien
tagtgcacagagcacggataggcat

SEQ ID NO: 4286968 - DNA, 25 bp, Homo sapien
aagaagtcggagcagatagtgcaca

SEQ ID NO: 4286969 - DNA, 25 bp, Homo sapien
aaggtgtggccgcagtggatggcgg

SEQ ID NO: 4286970 - DNA, 25 bp, Homo sapien
gcttgcttcaaatttggctccgcag

SEQ ID NO: 4286971 - DNA, 25 bp, Homo sapien
ccaggcagccaaagaaactgctaca

SEQ ID NO: 4286972 - DNA, 25 bp, Homo sapien
ctacaggtccggcttcgtagacgcg

SEQ ID NO: 4286973 - DNA, 25 bp, Homo sapien
tcaaatttggctccgcagcacgact

SEQ ID NO: 4286974 - DNA, 25 bp, Homo sapien
ttgagactgtagtagggttggaatt

SEQ ID NO: 4286975 - DNA, 25 bp, Homo sapien
ttttggaggcccagatgcttcaaag

SEQ ID NO: 4286976 - DNA, 25 bp, Homo sapien
ttggaggcccagatgcttcaaagac

SEQ ID NO: 4286977 - DNA, 25 bp, Homo sapien
ctgtagtagggttggaattttggag

SEQ ID NO: 4286978 - DNA, 25 bp, Homo sapien
caagagtaaggctcctcggtcaaca

SEQ ID NO: 4286979 - DNA, 25 bp, Homo sapien
gaagaaaccctgtgcatagtcccat

SEQ ID NO: 4286980 - DNA, 25 bp, Homo sapien
cctgggctggagtaagtcaactttt

SEQ ID NO: 4286981 - DNA, 25 bp, Homo sapien
gaagctatctttggctatgagcagg

SEQ ID NO: 4286982 - DNA, 25 bp, Homo sapien
acagaggaagcaaaggcgagagggt

SEQ ID NO: 4286983 - DNA, 25 bp, Homo sapien
agaggaagcaaaggcgagagggtgg

SEQ ID NO: 4286984 - DNA, 25 bp, Homo sapien
ggggctcctccccagtaggacagag

SEQ ID NO: 4286985 - DNA, 25 bp, Homo sapien
gctcctccccagtaggacagaggaa

SEQ ID NO: 4286986 - DNA, 25 bp, Homo sapien
atgtttatttgccaggttcagtagg

SEQ ID NO: 4286987 - DNA, 25 bp, Homo sapien
tatttgccaggttcagtaggcacac

SEQ ID NO: 4286988 - DNA, 25 bp, Homo sapien
ccaggttcagtaggcacacagttaa

SEQ ID NO: 4286989 - DNA, 25 bp, Homo sapien
tgccaggttcagtaggcacacagtt

SEQ ID NO: 4286990 - DNA, 25 bp, Homo sapien
tgtaaagggcaaacctccaaatcag

SEQ ID NO: 4286991 - DNA, 25 bp, Homo sapien
tgacaaagggcacctgtcaggagcc

SEQ ID NO: 4286992 - DNA, 25 bp, Homo sapien
gagttattgccatgcagcaagcccc

SEQ ID NO: 4286993 - DNA, 25 bp, Homo sapien
gaaaaagcaactcaatgtggctctg

SEQ ID NO: 4286994 - DNA, 25 bp, Homo sapien
aaaaatggaagcttctgccctccta

SEQ ID NO: 4286995 - DNA, 25 bp, Homo sapien
tcatgtgcaggagcctaagaccgct

SEQ ID NO: 4286996 - DNA, 25 bp, Homo sapien
tagtgagcagtatccctagccatgt

SEQ ID NO: 4286997 - DNA, 25 bp, Homo sapien
tgcaggactcggaaaggcaggaaat

SEQ ID NO: 4286998 - DNA, 25 bp, Homo sapien
gccagtgactctatgtacagtgaga

SEQ ID NO: 4286999 - DNA, 25 bp, Homo sapien
aaagccacaaggaatccatgcaggg

SEQ ID NO: 4287000 - DNA, 25 bp, Homo sapien
tacacacaggagacgagactgctct

SEQ ID NO: 4287001 - DNA, 25 bp, Homo sapien
ctagttatgccccactgggatgtgg

SEQ ID NO: 4287002 - DNA, 25 bp, Homo sapien
tggagtgatgcttccatcggtggct

SEQ ID NO: 4287003 - DNA, 25 bp, Homo sapien
gctggagtagcgctcctgtcagtgg

SEQ ID NO: 4287004 - DNA, 25 bp, Homo sapien
tgtgctgtccggctgggccatagcc

SEQ ID NO: 4287005 - DNA, 25 bp, Homo sapien
tttgagactcctgggcataaccagc

SEQ ID NO: 4287006 - DNA, 25 bp, Homo sapien
tttgcagcacgagcagcatcaccct

SEQ ID NO: 4287007 - DNA, 25 bp, Homo sapien
attatcactctttgcagcacgagca

SEQ ID NO: 4287008 - DNA, 25 bp, Homo sapien
tgcgggggccacattatcactcttt

SEQ ID NO: 4287009 - DNA, 25 bp, Homo sapien
tcaggggctgaggtagctccactcg

SEQ ID NO: 4287010 - DNA, 25 bp, Homo sapien
gagccgtttcatgagggtggtcact

SEQ ID NO: 4287011 - DNA, 25 bp, Homo sapien
tctggtgcccggagccgtttcatga

SEQ ID NO: 4287012 - DNA, 25 bp, Homo sapien
ccgtgctggactgctctggtgcccg

SEQ ID NO: 4287013 - DNA, 25 bp, Homo sapien
tgagggtggtcactcggacagcctt

SEQ ID NO: 4287014 - DNA, 25 bp, Homo sapien
caccatccttgatgttcttatcaga

SEQ ID NO: 4287015 - DNA, 25 bp, Homo sapien
cagacaccatccttgatgttcttat

SEQ ID NO: 4287016 - DNA, 25 bp, Homo sapien
acaccatccttgatgttcttatcag

SEQ ID NO: 4287017 - DNA, 25 bp, Homo sapien
gacaccatccttgatgttcttatca

SEQ ID NO: 4287018 - DNA, 25 bp, Homo sapien
catcagccttgtgaccaggtctttg

SEQ ID NO: 4287019 - DNA, 25 bp, Homo sapien
gtgatccgctggtcttgctccacct

SEQ ID NO: 4287020 - DNA, 25 bp, Homo sapien
acctccatcagccttgtgaccaggt

SEQ ID NO: 4287021 - DNA, 25 bp, Homo sapien
gcctcttctgcagtgatccgctggt

SEQ ID NO: 4287022 - DNA, 25 bp, Homo sapien
acctcctcatagaaaggtggattgc

SEQ ID NO: 4287023 - DNA, 25 bp, Homo sapien
tatcatcccaatatggagagtcaaa

SEQ ID NO: 4287024 - DNA, 25 bp, Homo sapien
aggatcttgcggaagagattcttat

SEQ ID NO: 4287025 - DNA, 25 bp, Homo sapien
ctcatagtcaccagccaggatcttg

SEQ ID NO: 4287026 - DNA, 25 bp, Homo sapien
agtccacagggcgtccataccgctg

SEQ ID NO: 4287027 - DNA, 25 bp, Homo sapien
gtacatgatgactccaatggcccag

SEQ ID NO: 4287028 - DNA, 25 bp, Homo sapien
gatgtacatgatgactccaatggcc

SEQ ID NO: 4287029 - DNA, 25 bp, Homo sapien
ggcccagcagtccacagggcgtcca

SEQ ID NO: 4287030 - DNA, 25 bp, Homo sapien
tagccaggtccagtaccatccacac

SEQ ID NO: 4287031 - DNA, 25 bp, Homo sapien
tcagtatcaggcctagccaggtcca

SEQ ID NO: 4287032 - DNA, 25 bp, Homo sapien
ctgctggtcagtatcaggcctagcc

SEQ ID NO: 4287033 - DNA, 25 bp, Homo sapien
tggtcagtatcaggcctagccaggt

SEQ ID NO: 4287034 - DNA, 25 bp, Homo sapien
tccctgaaggctgccccccattatc

SEQ ID NO: 4287035 - DNA, 25 bp, Homo sapien
cagcttcctgagatgagcacatttt

SEQ ID NO: 4287036 - DNA, 25 bp, Homo sapien
gagatgagcacattttccccctgcc

SEQ ID NO: 4287037 - DNA, 25 bp, Homo sapien
ttcctgagatgagcacattttcccc

SEQ ID NO: 4287038 - DNA, 25 bp, Homo sapien
cactgatgacaatcttcgagttctt

SEQ ID NO: 4287039 - DNA, 25 bp, Homo sapien
gacaatcttcgagttcttcagccgg

SEQ ID NO: 4287040 - DNA, 25 bp, Homo sapien
ggccattttctagcttagccagatg

SEQ ID NO: 4287041 - DNA, 25 bp, Homo sapien
tcttcagccggttgtagtaaaccag

SEQ ID NO: 4287042 - DNA, 25 bp, Homo sapien
ccaggacttgccgtaccacgttgct

SEQ ID NO: 4287043 - DNA, 25 bp, Homo sapien
ttgtgtctcgctccgagtagtagcc

SEQ ID NO: 4287044 - DNA, 25 bp, Homo sapien
cacgatcttgagtgagtgcaaatag

SEQ ID NO: 4287045 - DNA, 25 bp, Homo sapien
tgagattcctgtgcacgatcttgag

SEQ ID NO: 4287046 - DNA, 25 bp, Homo sapien
gtccaggatccagtcaaacacctcc

SEQ ID NO: 4287047 - DNA, 25 bp, Homo sapien
aggatccagtcaaacacctccctcc

SEQ ID NO: 4287048 - DNA, 25 bp, Homo sapien
cagtcaaacacctccctccccgtgg

SEQ ID NO: 4287049 - DNA, 25 bp, Homo sapien
ctggtccaggatccagtcaaacacc

SEQ ID NO: 4287050 - DNA, 25 bp, Homo sapien
cttgggtgagctgcctacgccaggc

SEQ ID NO: 4287051 - DNA, 25 bp, Homo sapien
gcctggcgtgggcagaatcaggggt

SEQ ID NO: 4287052 - DNA, 25 bp, Homo sapien
gacctgggacgccaagggtccagaa

SEQ ID NO: 4287053 - DNA, 25 bp, Homo sapien
gggtagggcaggagcacttgggtga

SEQ ID NO: 4287054 - DNA, 25 bp, Homo sapien
cagctgtaggatgttgggatgcttc

SEQ ID NO: 4287055 - DNA, 25 bp, Homo sapien
tactccttgcgggtcacaaacacat

SEQ ID NO: 4287056 - DNA, 25 bp, Homo sapien
ccaccagctgtaggatgttgggatg

SEQ ID NO: 4287057 - DNA, 25 bp, Homo sapien
ccaggaagataaagtactccttgcg

SEQ ID NO: 4287058 - DNA, 25 bp, Homo sapien
tgaggatgcctatctcgttcttggc

SEQ ID NO: 4287059 - DNA, 25 bp, Homo sapien
tgcggccgtcccgcttctggaactt

SEQ ID NO: 4287060 - DNA, 25 bp, Homo sapien
tcttggcagctttccgcaccttgcg

SEQ ID NO: 4287061 - DNA, 25 bp, Homo sapien
tgtgcagcttgcctgtcgtcttgtc

SEQ ID NO: 4287062 - DNA, 25 bp, Homo sapien
tctgtcagtcacctccgatggctgg

SEQ ID NO: 4287063 - DNA, 25 bp, Homo sapien
gacctgtcccaaatcatatctgtca

SEQ ID NO: 4287064 - DNA, 25 bp, Homo sapien
ccagagtcacacacccaaacggcat

SEQ ID NO: 4287065 - DNA, 25 bp, Homo sapien
ttatagttcttcttgtcgcccagag

SEQ ID NO: 4287066 - DNA, 25 bp, Homo sapien
gacctgcttcgtctctgaccttggt

SEQ ID NO: 4287067 - DNA, 25 bp, Homo sapien
ttaggcaacctgatgagctctagct

SEQ ID NO: 4287068 - DNA, 25 bp, Homo sapien
ggcaacctgatgagctctagctccc

SEQ ID NO: 4287069 - DNA, 25 bp, Homo sapien
tgacctgcttcgtctctgaccttgg

SEQ ID NO: 4287070 - DNA, 25 bp, Homo sapien
agtttcctgctaccttggtcccctg

SEQ ID NO: 4287071 - DNA, 25 bp, Homo sapien
tggggctccagagcttgcagtaaat

SEQ ID NO: 4287072 - DNA, 25 bp, Homo sapien
tttcatagacataaacagagtttcc

SEQ ID NO: 4287073 - DNA, 25 bp, Homo sapien
taaacagagtttcctgctaccttgg

SEQ ID NO: 4287074 - DNA, 25 bp, Homo sapien
accagttccccagttgaggaaactg

SEQ ID NO: 4287075 - DNA, 25 bp, Homo sapien
ctgactctgagtggagacaccagtt

SEQ ID NO: 4287076 - DNA, 25 bp, Homo sapien
gtcgctggagctgccaggaatcaac

SEQ ID NO: 4287077 - DNA, 25 bp, Homo sapien
aggctcagaagtcgctggagctgcc

SEQ ID NO: 4287078 - DNA, 25 bp, Homo sapien
agacgcggcgccagatgcagccgct

SEQ ID NO: 4287079 - DNA, 25 bp, Homo sapien
ctgcagcgccggttggtcacaggga

SEQ ID NO: 4287080 - DNA, 25 bp, Homo sapien
ggcagaatccgctccgagcacgcgg

SEQ ID NO: 4287081 - DNA, 25 bp, Homo sapien
gggaggaagtgatcgcgggctcagc

SEQ ID NO: 4287082 - DNA, 25 bp, Homo sapien
tctgcaaggcagaacccgtttctca

SEQ ID NO: 4287083 - DNA, 25 bp, Homo sapien
ccactgggtaggaatctcctggcag

SEQ ID NO: 4287084 - DNA, 25 bp, Homo sapien
gaaatgaccgcctcaaacaaggttc

SEQ ID NO: 4287085 - DNA, 25 bp, Homo sapien
gctcagactgaaggctagcttagga

SEQ ID NO: 4287086 - DNA, 25 bp, Homo sapien
tctctggtgtatgtgaagatagaca

SEQ ID NO: 4287087 - DNA, 25 bp, Homo sapien
cagagcagccccttgatctctggtg

SEQ ID NO: 4287088 - DNA, 25 bp, Homo sapien
tggtgtatgtgaagatagacaagtc

SEQ ID NO: 4287089 - DNA, 25 bp, Homo sapien
ttgatctctggtgtatgtgaagata

SEQ ID NO: 4287090 - DNA, 25 bp, Homo sapien
gatcagagccaatgccagtcaaggg

SEQ ID NO: 4287091 - DNA, 25 bp, Homo sapien
cagtaaaggtcaggccagatcagag

SEQ ID NO: 4287092 - DNA, 25 bp, Homo sapien
ggtaattgcacttgtcgtcagggca

SEQ ID NO: 4287093 - DNA, 25 bp, Homo sapien
cagggcatgcctttggagagagcca

SEQ ID NO: 4287094 - DNA, 25 bp, Homo sapien
tacgtccataagcatagagcgccag

SEQ ID NO: 4287095 - DNA, 25 bp, Homo sapien
gtacttatagatagcccatgggccc

SEQ ID NO: 4287096 - DNA, 25 bp, Homo sapien
caaccggctgatgcttaggagggcc

SEQ ID NO: 4287097 - DNA, 25 bp, Homo sapien
caagtagtcagtaaggtcagcacca

SEQ ID NO: 4287098 - DNA, 25 bp, Homo sapien
ctacgagcacagacagcttctcggg

SEQ ID NO: 4287099 - DNA, 25 bp, Homo sapien
tgcacacccagccttcaatagaaca

SEQ ID NO: 4287100 - DNA, 25 bp, Homo sapien
ccagccttcaatagaacaggtgctg

SEQ ID NO: 4287101 - DNA, 25 bp, Homo sapien
cacccagccttcaatagaacaggtg

SEQ ID NO: 4287102 - DNA, 25 bp, Homo sapien
cacacccagccttcaatagaacagg

SEQ ID NO: 4287103 - DNA, 25 bp, Homo sapien
agtgcatcccagtcatagaccacac

SEQ ID NO: 4287104 - DNA, 25 bp, Homo sapien
ctctagtgcatcccagtcatagacc

SEQ ID NO: 4287105 - DNA, 25 bp, Homo sapien
tagtgcatcccagtcatagaccaca

SEQ ID NO: 4287106 - DNA, 25 bp, Homo sapien
tctagtgcatcccagtcatagacca

SEQ ID NO: 4287107 - DNA, 25 bp, Homo sapien
tgaggacatggtcctctcccgccag

SEQ ID NO: 4287108 - DNA, 25 bp, Homo sapien
tcaggcactgcatatcgtggctggc

SEQ ID NO: 4287109 - DNA, 25 bp, Homo sapien
tgcagcagctgaactcgtgagggta

SEQ ID NO: 4287110 - DNA, 25 bp, Homo sapien
ccacatttggtgaatcctgtgcctg

SEQ ID NO: 4287111 - DNA, 25 bp, Homo sapien
actggcgaccgaactggcagagcat

SEQ ID NO: 4287112 - DNA, 25 bp, Homo sapien
cagcagagcactggcgaccgaactg

SEQ ID NO: 4287113 - DNA, 25 bp, Homo sapien
tggggcagtccaaggtgtgcaacta

SEQ ID NO: 4287114 - DNA, 25 bp, Homo sapien
ggtggacaccagttcatagcaggcc

SEQ ID NO: 4287115 - DNA, 25 bp, Homo sapien
caagaccttgcgtccagtgccaggt

SEQ ID NO: 4287116 - DNA, 25 bp, Homo sapien
gagtattactgatgccaaccttgtc

SEQ ID NO: 4287117 - DNA, 25 bp, Homo sapien
ccaggtgtggtaaatgtgatcaagg

SEQ ID NO: 4287118 - DNA, 25 bp, Homo sapien
taagtgtgtaagatcctcagctgtc

SEQ ID NO: 4287119 - DNA, 25 bp, Homo sapien
tgccatggaagggtctagcatccag

SEQ ID NO: 4287120 - DNA, 25 bp, Homo sapien
catccagatggtatgactaggttca

SEQ ID NO: 4287121 - DNA, 25 bp, Homo sapien
tacatgagtaggcaggcctaagggc

SEQ ID NO: 4287122 - DNA, 25 bp, Homo sapien
cacttcctgggtatcggctggtgca

SEQ ID NO: 4287123 - DNA, 25 bp, Homo sapien
cagctagtattagggacatgggtca

SEQ ID NO: 4287124 - DNA, 25 bp, Homo sapien
gtcccatgactccaggttgagcctg

SEQ ID NO: 4287125 - DNA, 25 bp, Homo sapien
tggcctccttgggaatcagggctac

SEQ ID NO: 4287126 - DNA, 25 bp, Homo sapien
aaccctgatgggtgtctcagtacca

SEQ ID NO: 4287127 - DNA, 25 bp, Homo sapien
cactgggctggacagcatgggtgtg

SEQ ID NO: 4287128 - DNA, 25 bp, Homo sapien
ctcggtagctgccagatgagaggct

SEQ ID NO: 4287129 - DNA, 25 bp, Homo sapien
catgggtgtgatagaccaaaagctg

SEQ ID NO: 4287130 - DNA, 25 bp, Homo sapien
ctctcggtagctgccagatgagagg

SEQ ID NO: 4287131 - DNA, 25 bp, Homo sapien
gggtggacagcatattttcagggac

SEQ ID NO: 4287132 - DNA, 25 bp, Homo sapien
gtggacagcatattttcagggacat

SEQ ID NO: 4287133 - DNA, 25 bp, Homo sapien
ggatgggtggctgggcatgaggccc

SEQ ID NO: 4287134 - DNA, 25 bp, Homo sapien
ctgggtggacagcatattttcaggg

SEQ ID NO: 4287135 - DNA, 25 bp, Homo sapien
cagggtcatggcacagcagccccat

SEQ ID NO: 4287136 - DNA, 25 bp, Homo sapien
acagggtcatggcacagcagcccca

SEQ ID NO: 4287137 - DNA, 25 bp, Homo sapien
cacagggtcatggcacagcagcccc

SEQ ID NO: 4287138 - DNA, 25 bp, Homo sapien
aggttggggcactggagagggggat

SEQ ID NO: 4287139 - DNA, 25 bp, Homo sapien
ctggcaggttggggcactggagagg

SEQ ID NO: 4287140 - DNA, 25 bp, Homo sapien
cacaacttcctgaagctggcaggtt

SEQ ID NO: 4287141 - DNA, 25 bp, Homo sapien
ggtcctccacaacttcctgaagctg

SEQ ID NO: 4287142 - DNA, 25 bp, Homo sapien
gaagactccaagacagttgaccact

SEQ ID NO: 4287143 - DNA, 25 bp, Homo sapien
agatctcctggctactcctctggga

SEQ ID NO: 4287144 - DNA, 25 bp, Homo sapien
catccagagctggagtcgtagccca

SEQ ID NO: 4287145 - DNA, 25 bp, Homo sapien
tggcaggttacttggtaggcagaca

SEQ ID NO: 4287146 - DNA, 25 bp, Homo sapien
attggaggagtcagtgacagaaaag

SEQ ID NO: 4287147 - DNA, 25 bp, Homo sapien
aggagtcagtgacagaaaagaaggt

SEQ ID NO: 4287148 - DNA, 25 bp, Homo sapien
ctggaattggaggagtcagtgacag

SEQ ID NO: 4287149 - DNA, 25 bp, Homo sapien
tggaattggaggagtcagtgacaga

SEQ ID NO: 4287150 - DNA, 25 bp, Homo sapien
gggcagcagcctgagctggacactt

SEQ ID NO: 4287151 - DNA, 25 bp, Homo sapien
ctagggcagcagcctgagctggaca

SEQ ID NO: 4287152 - DNA, 25 bp, Homo sapien
tagggcagcagcctgagctggacac

SEQ ID NO: 4287153 - DNA, 25 bp, Homo sapien
gcagcagcctgagctggacacttac

SEQ ID NO: 4287154 - DNA, 25 bp, Homo sapien
cctggtcctgatcttgggctagatc

SEQ ID NO: 4287155 - DNA, 25 bp, Homo sapien
ctggtcctgatcttgggctagatcc

SEQ ID NO: 4287156 - DNA, 25 bp, Homo sapien
ccaaggaggctatctggtcggagct

SEQ ID NO: 4287157 - DNA, 25 bp, Homo sapien
gctgcccaaggaggctatctggtcg

SEQ ID NO: 4287158 - DNA, 25 bp, Homo sapien
ggaagggcagccaccgactcttcct

SEQ ID NO: 4287159 - DNA, 25 bp, Homo sapien
gaagggcagccaccgactcttcctg

SEQ ID NO: 4287160 - DNA, 25 bp, Homo sapien
gcttgccttcccccaaattctgcac

SEQ ID NO: 4287161 - DNA, 25 bp, Homo sapien
tggacgcttgccttcccccaaattc

SEQ ID NO: 4287162 - DNA, 25 bp, Homo sapien
ctggacgcttgccttcccccaaatt

SEQ ID NO: 4287163 - DNA, 25 bp, Homo sapien
gacgcttgccttcccccaaattctg

SEQ ID NO: 4287164 - DNA, 25 bp, Homo sapien
tccacactgggctatgtcactggtg

SEQ ID NO: 4287165 - DNA, 25 bp, Homo sapien
ggctcccacaatgggacttgaagat

SEQ ID NO: 4287166 - DNA, 25 bp, Homo sapien
tgcatgcactctggtaaggtcaggg

SEQ ID NO: 4287167 - DNA, 25 bp, Homo sapien
cagggtgacatcctccatgatgaga

SEQ ID NO: 4287168 - DNA, 25 bp, Homo sapien
tgagcttatccgtggtccctgagac

SEQ ID NO: 4287169 - DNA, 25 bp, Homo sapien
ctggcaaatggacccagggatgcag

SEQ ID NO: 4287170 - DNA, 25 bp, Homo sapien
ggagctaacccaagcaggatcctgg

SEQ ID NO: 4287171 - DNA, 25 bp, Homo sapien
tcttggtagacaatgacaacccctg

SEQ ID NO: 4287172 - DNA, 25 bp, Homo sapien
tgtggtcctttgtaaacaactggcc

SEQ ID NO: 4287173 - DNA, 25 bp, Homo sapien
agaggtggggcataacactcctttc

SEQ ID NO: 4287174 - DNA, 25 bp, Homo sapien
cactgagccatcgtccacctcctgc

SEQ ID NO: 4287175 - DNA, 25 bp, Homo sapien
tccagaactgtggtcctttgtaaac

SEQ ID NO: 4287176 - DNA, 25 bp, Homo sapien
tctgagccccaattgactcgagctt

SEQ ID NO: 4287177 - DNA, 25 bp, Homo sapien
gtgttgcagcttaaaaatagcccac

SEQ ID NO: 4287178 - DNA, 25 bp, Homo sapien
ttaaacaatcttccctgcaagccgg

SEQ ID NO: 4287179 - DNA, 25 bp, Homo sapien
cgagcttacgtaactctgcgtgaaa

SEQ ID NO: 4287180 - DNA, 25 bp, Homo sapien
caaaggtggtactgccaaaagcaca

SEQ ID NO: 4287181 - DNA, 25 bp, Homo sapien
tgagcagagctgacctctagtcaca

SEQ ID NO: 4287182 - DNA, 25 bp, Homo sapien
ggtactgccaaaagcacacatggct

SEQ ID NO: 4287183 - DNA, 25 bp, Homo sapien
tggaggcaaaggtggtactgccaaa

SEQ ID NO: 4287184 - DNA, 25 bp, Homo sapien
cagcctccggggtaacacaagtgtc

SEQ ID NO: 4287185 - DNA, 25 bp, Homo sapien
gcctccggggtaacacaagtgtctc

SEQ ID NO: 4287186 - DNA, 25 bp, Homo sapien
gcagcctccggggtaacacaagtgt

SEQ ID NO: 4287187 - DNA, 25 bp, Homo sapien
tcgcagcctccggggtaacacaagt

SEQ ID NO: 4287188 - DNA, 25 bp, Homo sapien
agagtccttagagtccccaggactg

SEQ ID NO: 4287189 - DNA, 25 bp, Homo sapien
tgttcctttattggttcaagggtca

SEQ ID NO: 4287190 - DNA, 25 bp, Homo sapien
agtcatttgttcctttattggttca

SEQ ID NO: 4287191 - DNA, 25 bp, Homo sapien
taatagtcatttgttcctttattgg

SEQ ID NO: 4287192 - DNA, 25 bp, Homo sapien
catttgttcctttattggttcaagg

SEQ ID NO: 4287193 - DNA, 25 bp, Homo sapien
gggttagctcaaggcagctaagcag

SEQ ID NO: 4287194 - DNA, 25 bp, Homo sapien
taaatacatgttgcaggactgccct

SEQ ID NO: 4287195 - DNA, 25 bp, Homo sapien
cataaatacatgttgcaggactgcc

SEQ ID NO: 4287196 - DNA, 25 bp, Homo sapien
agctaagcaggtccagcccaagaac

SEQ ID NO: 4287197 - DNA, 25 bp, Homo sapien
ctgagagtggccggggccggcgtac

SEQ ID NO: 4287198 - DNA, 25 bp, Homo sapien
caagtgggccgaggaggctctgaga

SEQ ID NO: 4287199 - DNA, 25 bp, Homo sapien
tcaagtgggccgaggaggctctgag

SEQ ID NO: 4287200 - DNA, 25 bp, Homo sapien
ggctctgagagtggccggggccggc

SEQ ID NO: 4287201 - DNA, 25 bp, Homo sapien
agaactgcggctgttctggacgcac

SEQ ID NO: 4287202 - DNA, 25 bp, Homo sapien
ggcatgggtgagaactgcggctgtt

SEQ ID NO: 4287203 - DNA, 25 bp, Homo sapien
catgggtgagaactgcggctgttct

SEQ ID NO: 4287204 - DNA, 25 bp, Homo sapien
tgagaactgcggctgttctggacgc

SEQ ID NO: 4287205 - DNA, 25 bp, Homo sapien
ccccactagtactctgaaggtgggt

SEQ ID NO: 4287206 - DNA, 25 bp, Homo sapien
ccagcattgctgcatcacttggtac

SEQ ID NO: 4287207 - DNA, 25 bp, Homo sapien
tactctgaaggtgggtcgcactgct

SEQ ID NO: 4287208 - DNA, 25 bp, Homo sapien
caagttcatgtaggttgctggcagc

SEQ ID NO: 4287209 - DNA, 25 bp, Homo sapien
tggcggtatggtggggcaccccgtg

SEQ ID NO: 4287210 - DNA, 25 bp, Homo sapien
tcagggcaatactcaggctggggca

SEQ ID NO: 4287211 - DNA, 25 bp, Homo sapien
aggtcaaaagggtcaatgtggcggt

SEQ ID NO: 4287212 - DNA, 25 bp, Homo sapien
tcaaaagggtcaatgtggcggtatg

SEQ ID NO: 4287213 - DNA, 25 bp, Homo sapien
cacttcacaggtaggcgagcgtggc

SEQ ID NO: 4287214 - DNA, 25 bp, Homo sapien
ctgtccaggatgtcgcgggccaaac

SEQ ID NO: 4287215 - DNA, 25 bp, Homo sapien
tggtaaatctataggtctgcaggct

SEQ ID NO: 4287216 - DNA, 25 bp, Homo sapien
caccttgactgtgaatgactcgtcc

SEQ ID NO: 4287217 - DNA, 25 bp, Homo sapien
actccatgctgcgggctacctgcag

SEQ ID NO: 4287218 - DNA, 25 bp, Homo sapien
ggtccctgtgcacaaacttctgctc

SEQ ID NO: 4287219 - DNA, 25 bp, Homo sapien
ggctacctgcaggccaaagctgatg

SEQ ID NO: 4287220 - DNA, 25 bp, Homo sapien
tcaccgtggcacatatagggcagca

SEQ ID NO: 4287221 - DNA, 25 bp, Homo sapien
gcaacatgataccaatgagagccag

SEQ ID NO: 4287222 - DNA, 25 bp, Homo sapien
cacattcgggtggttcaggccacgc

SEQ ID NO: 4287223 - DNA, 25 bp, Homo sapien
gcaggccctcaggtggcaacatgat

SEQ ID NO: 4287224 - DNA, 25 bp, Homo sapien
cgattctgggcctggtctatgtatt

SEQ ID NO: 4287225 - DNA, 25 bp, Homo sapien
ccgtggtagacaactccaaagtggc

SEQ ID NO: 4287226 - DNA, 25 bp, Homo sapien
cctggtctatgtattctccgtggta

SEQ ID NO: 4287227 - DNA, 25 bp, Homo sapien
gacttagtgacttgatggcacattg

SEQ ID NO: 4287228 - DNA, 25 bp, Homo sapien
tcattggcaaccagacctcagagca

SEQ ID NO: 4287229 - DNA, 25 bp, Homo sapien
agagcactaaactggccaatctgac

SEQ ID NO: 4287230 - DNA, 25 bp, Homo sapien
tgtgaggtgcataatgagtcgatga

SEQ ID NO: 4287231 - DNA, 25 bp, Homo sapien
tgaggtgcataatgagtcgatgaga

SEQ ID NO: 4287232 - DNA, 25 bp, Homo sapien
tccatcttgaaaaaataaaataggc

SEQ ID NO: 4287233 - DNA, 25 bp, Homo sapien
catcttgaaaaaataaaataggccg

SEQ ID NO: 4287234 - DNA, 25 bp, Homo sapien
tggcctagcctatgtcatcttgaga

SEQ ID NO: 4287235 - DNA, 25 bp, Homo sapien
cctggcctagcctatgtcatcttga

SEQ ID NO: 4287236 - DNA, 25 bp, Homo sapien
gcctggcctagcctatgtcatcttg

SEQ ID NO: 4287237 - DNA, 25 bp, Homo sapien
gcctagcctatgtcatcttgagact

SEQ ID NO: 4287238 - DNA, 25 bp, Homo sapien
gatggactctttccgcagcagtggc

SEQ ID NO: 4287239 - DNA, 25 bp, Homo sapien
ggaatcagcacatccttgacctcag

SEQ ID NO: 4287240 - DNA, 25 bp, Homo sapien
ccaatgactcggtcactgtgggtga

SEQ ID NO: 4287241 - DNA, 25 bp, Homo sapien
aagagcgcagagtccaggtccctta

SEQ ID NO: 4287242 - DNA, 25 bp, Homo sapien
gaatccagaccatcaatggcaggga

SEQ ID NO: 4287243 - DNA, 25 bp, Homo sapien
ggaatccagaccatcaatggcaggg

SEQ ID NO: 4287244 - DNA, 25 bp, Homo sapien
tccagaccatcaatggcagggagtg

SEQ ID NO: 4287245 - DNA, 25 bp, Homo sapien
aatccagaccatcaatggcagggag

SEQ ID NO: 4287246 - DNA, 25 bp, Homo sapien
agggaatgaggagcttgtagggaca

SEQ ID NO: 4287247 - DNA, 25 bp, Homo sapien
gggaatgaggagcttgtagggacag

SEQ ID NO: 4287248 - DNA, 25 bp, Homo sapien
cttctgtagtcagagcccgagtaca

SEQ ID NO: 4287249 - DNA, 25 bp, Homo sapien
tagtcagagcccgagtacagaatag

SEQ ID NO: 4287250 - DNA, 25 bp, Homo sapien
agagcccgagtacagaataggcagg

SEQ ID NO: 4287251 - DNA, 25 bp, Homo sapien
caaggccacttctgtagtcagagcc

SEQ ID NO: 4287252 - DNA, 25 bp, Homo sapien
cttagatccctaagtcctgggcaga

SEQ ID NO: 4287253 - DNA, 25 bp, Homo sapien
ggaggacttagatccctaagtcctg

SEQ ID NO: 4287254 - DNA, 25 bp, Homo sapien
agatccctaagtcctgggcagagag

SEQ ID NO: 4287255 - DNA, 25 bp, Homo sapien
gacttagatccctaagtcctgggca

SEQ ID NO: 4287256 - DNA, 25 bp, Homo sapien
tcctccgccaccagtagctgaagac

SEQ ID NO: 4287257 - DNA, 25 bp, Homo sapien
agtgcagtcgccagtgcagccacaa

SEQ ID NO: 4287258 - DNA, 25 bp, Homo sapien
aaggcagcaggataccaaggagcgt

SEQ ID NO: 4287259 - DNA, 25 bp, Homo sapien
cactctacccaggatatgacattca

SEQ ID NO: 4287260 - DNA, 25 bp, Homo sapien
gtaggccctctgcccgtgtttccca

SEQ ID NO: 4287261 - DNA, 25 bp, Homo sapien
gccctctgcccgtgtttcccaggga

SEQ ID NO: 4287262 - DNA, 25 bp, Homo sapien
aggccctctgcccgtgtttcccagg

SEQ ID NO: 4287263 - DNA, 25 bp, Homo sapien
ctctgcccgtgtttcccagggaggt

SEQ ID NO: 4287264 - DNA, 25 bp, Homo sapien
ggcagggggcagacaaccatgtccc

SEQ ID NO: 4287265 - DNA, 25 bp, Homo sapien
ccccggaactcgtgctggcagctct

SEQ ID NO: 4287266 - DNA, 25 bp, Homo sapien
gcaatggggcaccatcctggccaag

SEQ ID NO: 4287267 - DNA, 25 bp, Homo sapien
tctcaccacccacggtcacgttgat

SEQ ID NO: 4287268 - DNA, 25 bp, Homo sapien
aggcttcagtggaactaggttggca

SEQ ID NO: 4287269 - DNA, 25 bp, Homo sapien
caggcttcagtggaactaggttggc

SEQ ID NO: 4287270 - DNA, 25 bp, Homo sapien
tcaggcttcagtggaactaggttgg

SEQ ID NO: 4287271 - DNA, 25 bp, Homo sapien
cctcaggcttcagtggaactaggtt

SEQ ID NO: 4287272 - DNA, 25 bp, Homo sapien
tgggggtaggaagcgaaagccaggc

SEQ ID NO: 4287273 - DNA, 25 bp, Homo sapien
ccctcgggcactcagattccctgcc

SEQ ID NO: 4287274 - DNA, 25 bp, Homo sapien
gtaggaagcgaaagccaggcagtgt

SEQ ID NO: 4287275 - DNA, 25 bp, Homo sapien
gaagcgaaagccaggcagtgtaaag

SEQ ID NO: 4287276 - DNA, 25 bp, Homo sapien
gggtctcggaccacatattcaggaa

SEQ ID NO: 4287277 - DNA, 25 bp, Homo sapien
ctgggggtctcggaccacatattca

SEQ ID NO: 4287278 - DNA, 25 bp, Homo sapien
cacatattcaggaaggcggcacagc

SEQ ID NO: 4287279 - DNA, 25 bp, Homo sapien
gctgctctggaagctgcctctcaca

SEQ ID NO: 4287280 - DNA, 25 bp, Homo sapien
taagtgccatgctgaagttagatgc

SEQ ID NO: 4287281 - DNA, 25 bp, Homo sapien
gacagcactaagtgccatgctgaag

SEQ ID NO: 4287282 - DNA, 25 bp, Homo sapien
tgccctaagcccgtcatggaatgac

SEQ ID NO: 4287283 - DNA, 25 bp, Homo sapien
tcatggaatgacagcactaagtgcc

SEQ ID NO: 4287284 - DNA, 25 bp, Homo sapien
tctctgtactggaaggtccaggaac

SEQ ID NO: 4287285 - DNA, 25 bp, Homo sapien
ttggggctgatgcttagcacgacag

SEQ ID NO: 4287286 - DNA, 25 bp, Homo sapien
tgtactggaaggtccaggaaccagg

SEQ ID NO: 4287287 - DNA, 25 bp, Homo sapien
tgatgcttagcacgacagggtcttc

SEQ ID NO: 4287288 - DNA, 25 bp, Homo sapien
ggttgcactgctatcagcactggct

SEQ ID NO: 4287289 - DNA, 25 bp, Homo sapien
gctggtgcctacagacagactctgg

SEQ ID NO: 4287290 - DNA, 25 bp, Homo sapien
agcacagcccggctggtgcctacag

SEQ ID NO: 4287291 - DNA, 25 bp, Homo sapien
gcagacactcagtcccattgaccag

SEQ ID NO: 4287292 - DNA, 25 bp, Homo sapien
gaggtgccgtctacccggaagtgct

SEQ ID NO: 4287293 - DNA, 25 bp, Homo sapien
ctgacgttggtaggccccactgcct

SEQ ID NO: 4287294 - DNA, 25 bp, Homo sapien
gaaagagaagcctctcagcacggag

SEQ ID NO: 4287295 - DNA, 25 bp, Homo sapien
ttgcccggtggcatgttagtcacgg

SEQ ID NO: 4287296 - DNA, 25 bp, Homo sapien
ggcagtggccggcagggactttggc

SEQ ID NO: 4287297 - DNA, 25 bp, Homo sapien
ctgatgggttccctcaggcaccaga

SEQ ID NO: 4287298 - DNA, 25 bp, Homo sapien
tgaaggtagaagttggagccacaca

SEQ ID NO: 4287299 - DNA, 25 bp, Homo sapien
ttgagctgtccttgggcagtggccg

SEQ ID NO: 4287300 - DNA, 25 bp, Homo sapien
ttctgctggccgcacatgttcccac

SEQ ID NO: 4287301 - DNA, 25 bp, Homo sapien
atgcccttaggcaacgcccacaggt

SEQ ID NO: 4287302 - DNA, 25 bp, Homo sapien
cagccacagcccatgaaatgccatg

SEQ ID NO: 4287303 - DNA, 25 bp, Homo sapien
cagtaagcttaggtgggcagtggtc

SEQ ID NO: 4287304 - DNA, 25 bp, Homo sapien
cacatacagcaagtagtttagtgac

SEQ ID NO: 4287305 - DNA, 25 bp, Homo sapien
ggtggtccccaagacgactgacatc

SEQ ID NO: 4287306 - DNA, 25 bp, Homo sapien
gtaggtggtccccaagacgactgac

SEQ ID NO: 4287307 - DNA, 25 bp, Homo sapien
ccagtgagaagttggacacatacag

SEQ ID NO: 4287308 - DNA, 25 bp, Homo sapien
tgtactggtcccaacagcccattga

SEQ ID NO: 4287309 - DNA, 25 bp, Homo sapien
gatacgcccatccattgtgcccatg

SEQ ID NO: 4287310 - DNA, 25 bp, Homo sapien
tcaaggcgtgtcacatacaatgcag

SEQ ID NO: 4287311 - DNA, 25 bp, Homo sapien
gcccattgaataggtccacacgtga

SEQ ID NO: 4287312 - DNA, 25 bp, Homo sapien
ctgctactgaccagcagagggaagt

SEQ ID NO: 4287313 - DNA, 25 bp, Homo sapien
ctgaccagcagagggaagtggcggc

SEQ ID NO: 4287314 - DNA, 25 bp, Homo sapien
accagcagagggaagtggcggcagc

SEQ ID NO: 4287315 - DNA, 25 bp, Homo sapien
ggtgttggggctgagggcttccagg

SEQ ID NO: 4287316 - DNA, 25 bp, Homo sapien
ggcctcgccggaggcctggatggac

SEQ ID NO: 4287317 - DNA, 25 bp, Homo sapien
aaactgggcgactggaagaagtcga

SEQ ID NO: 4287318 - DNA, 25 bp, Homo sapien
actggaagaagtcgaggcctcgccg

SEQ ID NO: 4287319 - DNA, 25 bp, Homo sapien
gcgactggaagaagtcgaggcctcg

SEQ ID NO: 4287320 - DNA, 25 bp, Homo sapien
ttgagacgcctgatagacactgagc

SEQ ID NO: 4287321 - DNA, 25 bp, Homo sapien
tcaattagtgtgtccagcaggtcaa

SEQ ID NO: 4287322 - DNA, 25 bp, Homo sapien
ttcacgtcaaagtcgcgagaggccg

SEQ ID NO: 4287323 - DNA, 25 bp, Homo sapien
cacgtagaaataggaggcctggcct

SEQ ID NO: 4287324 - DNA, 25 bp, Homo sapien
tgacgcctgcggacgcacgacagca

SEQ ID NO: 4287325 - DNA, 25 bp, Homo sapien
gagctgggaccctagaggatcccta

SEQ ID NO: 4287326 - DNA, 25 bp, Homo sapien
ctcgggtctgagcacctgacgcctg

SEQ ID NO: 4287327 - DNA, 25 bp, Homo sapien
caaatttaagcagcggtcccgacag

SEQ ID NO: 4287328 - DNA, 25 bp, Homo sapien
gacgccttgaaggaatactagccac

SEQ ID NO: 4287329 - DNA, 25 bp, Homo sapien
gccatctgccgcctctataggaggg

SEQ ID NO: 4287330 - DNA, 25 bp, Homo sapien
catagctggctaagaacctgctcga

SEQ ID NO: 4287331 - DNA, 25 bp, Homo sapien
gcagccttggttctcaacagcaggg

SEQ ID NO: 4287332 - DNA, 25 bp, Homo sapien
aagcactttaatgcattcaccaacc

SEQ ID NO: 4287333 - DNA, 25 bp, Homo sapien
cattcaccaacccacagtccctgcc

SEQ ID NO: 4287334 - DNA, 25 bp, Homo sapien
aggctcctatggcttcccacaccta

SEQ ID NO: 4287335 - DNA, 25 bp, Homo sapien
caggaaggctgagcccgcacacatt

SEQ ID NO: 4287336 - DNA, 25 bp, Homo sapien
tgtagagctcaaaggcgcctgtcac

SEQ ID NO: 4287337 - DNA, 25 bp, Homo sapien
gcggatccagcgcatcagcttatgg

SEQ ID NO: 4287338 - DNA, 25 bp, Homo sapien
tgagaatgaagaggcggtcttcctc

SEQ ID NO: 4287339 - DNA, 25 bp, Homo sapien
tggcactgacggctgacgccttggt

SEQ ID NO: 4287340 - DNA, 25 bp, Homo sapien
tggagaaggggcaaagggtcgtcat

SEQ ID NO: 4287341 - DNA, 25 bp, Homo sapien
ctggagaaggggcaaagggtcgtca

SEQ ID NO: 4287342 - DNA, 25 bp, Homo sapien
tacctaggacctccataaagcccag

SEQ ID NO: 4287343 - DNA, 25 bp, Homo sapien
tcatggcccatacctaggacctcca

SEQ ID NO: 4287344 - DNA, 25 bp, Homo sapien
gcccatacctaggacctccataaag

SEQ ID NO: 4287345 - DNA, 25 bp, Homo sapien
tggcccatacctaggacctccataa

SEQ ID NO: 4287346 - DNA, 25 bp, Homo sapien
tcttcactggtgtatggggcctcaa

SEQ ID NO: 4287347 - DNA, 25 bp, Homo sapien
gggcccgtgtagtaaatggtcttga

SEQ ID NO: 4287348 - DNA, 25 bp, Homo sapien
gcattgtgggcacgactgtgcaagt

SEQ ID NO: 4287349 - DNA, 25 bp, Homo sapien
tcttgagtgggcgagaggcattgtg

SEQ ID NO: 4287350 - DNA, 25 bp, Homo sapien
tctggtgccagagtaaaacaggccc

SEQ ID NO: 4287351 - DNA, 25 bp, Homo sapien
tgggcccactgagactagagctatg

SEQ ID NO: 4287352 - DNA, 25 bp, Homo sapien
tctgcttccaaaggtagggacagct

SEQ ID NO: 4287353 - DNA, 25 bp, Homo sapien
cctaaagtagagttgctccagggca

SEQ ID NO: 4287354 - DNA, 25 bp, Homo sapien
ccacttgggcaacgctgtagtaggg

SEQ ID NO: 4287355 - DNA, 25 bp, Homo sapien
gctgcgcaccggtaagaaggcttag

SEQ ID NO: 4287356 - DNA, 25 bp, Homo sapien
gaagtcctcacggtcagtggagaca

SEQ ID NO: 4287357 - DNA, 25 bp, Homo sapien
gtaggcgccgcaaatcatagttctg

SEQ ID NO: 4287358 - DNA, 25 bp, Homo sapien
agaaggatgtcagcctcagcggcag

SEQ ID NO: 4287359 - DNA, 25 bp, Homo sapien
gaaagaaggatgtcagcctcagcgg

SEQ ID NO: 4287360 - DNA, 25 bp, Homo sapien
gacaggaaagaaggatgtcagcctc

SEQ ID NO: 4287361 - DNA, 25 bp, Homo sapien
ctcagcggcagctccctccgaaaac

SEQ ID NO: 4287362 - DNA, 25 bp, Homo sapien
gaaacacacattcttatgctaagtg

SEQ ID NO: 4287363 - DNA, 25 bp, Homo sapien
atgtcagaggcaactttggtcctcg

SEQ ID NO: 4287364 - DNA, 25 bp, Homo sapien
tgcttcaaagactagctccctctga

SEQ ID NO: 4287365 - DNA, 25 bp, Homo sapien
gaggcaactttggtcctcgccgcag

SEQ ID NO: 4287366 - DNA, 25 bp, Homo sapien
tcagtcaggtcctcgtaggaacggg

SEQ ID NO: 4287367 - DNA, 25 bp, Homo sapien
ccatagcgggagtacacaggcttcc

SEQ ID NO: 4287368 - DNA, 25 bp, Homo sapien
taacacccatagtgctggaaagtgc

SEQ ID NO: 4287369 - DNA, 25 bp, Homo sapien
aagtcctggctgatctggcgcatgt

SEQ ID NO: 4287370 - DNA, 25 bp, Homo sapien
ggccaaaagcactggtgcttagagg

SEQ ID NO: 4287371 - DNA, 25 bp, Homo sapien
ctgcaggccaaaagcactggtgctt

SEQ ID NO: 4287372 - DNA, 25 bp, Homo sapien
gtgcttagaggggtagctagtggca

SEQ ID NO: 4287373 - DNA, 25 bp, Homo sapien
caggccaaaagcactggtgcttaga

SEQ ID NO: 4287374 - DNA, 25 bp, Homo sapien
tctgtccatcagaaggagtcaatgt

SEQ ID NO: 4287375 - DNA, 25 bp, Homo sapien
caaggcattcgctgcttctcttcct

SEQ ID NO: 4287376 - DNA, 25 bp, Homo sapien
catactctgtccatcagaaggagtc

SEQ ID NO: 4287377 - DNA, 25 bp, Homo sapien
ctccatactctgtccatcagaagga

SEQ ID NO: 4287378 - DNA, 25 bp, Homo sapien
tagggtccttcaatggcaggctgaa

SEQ ID NO: 4287379 - DNA, 25 bp, Homo sapien
gctgaaggatcctcacttgtcaggc

SEQ ID NO: 4287380 - DNA, 25 bp, Homo sapien
caaggcttatttggcctctagggtc

SEQ ID NO: 4287381 - DNA, 25 bp, Homo sapien
tacagttcacccaagaggggatcca

SEQ ID NO: 4287382 - DNA, 25 bp, Homo sapien
gggactagccggctgagggaccgca

SEQ ID NO: 4287383 - DNA, 25 bp, Homo sapien
cgccctcccagccaaaggatgggtt

SEQ ID NO: 4287384 - DNA, 25 bp, Homo sapien
agatctcgccttttgtattccccag

SEQ ID NO: 4287385 - DNA, 25 bp, Homo sapien
agggaccgcagggagacacagtctt

SEQ ID NO: 4287386 - DNA, 25 bp, Homo sapien
gccgccggtgcaggaagatagcttt

SEQ ID NO: 4287387 - DNA, 25 bp, Homo sapien
aatgtagtccttagcgtttggccgc

SEQ ID NO: 4287388 - DNA, 25 bp, Homo sapien
gagccagctagcagttcatttcaag

SEQ ID NO: 4287389 - DNA, 25 bp, Homo sapien
tccgagtctagagtcccacacagaa

SEQ ID NO: 4287390 - DNA, 25 bp, Homo sapien
tattacttaaatgcaacagatgttc

SEQ ID NO: 4287391 - DNA, 25 bp, Homo sapien
gctgaatgacagagattggtcttta

SEQ ID NO: 4287392 - DNA, 25 bp, Homo sapien
tgttctgaagcttggagttccaatg

SEQ ID NO: 4287393 - DNA, 25 bp, Homo sapien
gcaaactacagctgatagcctgttt

SEQ ID NO: 4287394 - DNA, 25 bp, Homo sapien
ccatgttggatgtgttctggtcaga

SEQ ID NO: 4287395 - DNA, 25 bp, Homo sapien
catcccatgagtgtctgatgaagct

SEQ ID NO: 4287396 - DNA, 25 bp, Homo sapien
taagaagaacatctagggcgggcgt

SEQ ID NO: 4287397 - DNA, 25 bp, Homo sapien
taagataatctttaggccatgttgg

SEQ ID NO: 4287398 - DNA, 25 bp, Homo sapien
ctagtgtttaggttaatgctgttaa

SEQ ID NO: 4287399 - DNA, 25 bp, Homo sapien
tagtgtttaggttaatgctgttaaa

SEQ ID NO: 4287400 - DNA, 25 bp, Homo sapien
agtgtttaggttaatgctgttaaat

SEQ ID NO: 4287401 - DNA, 25 bp, Homo sapien
tctagtgtttaggttaatgctgtta

SEQ ID NO: 4287402 - DNA, 25 bp, Homo sapien
gatgcagcgtgagaaagatacctcc

SEQ ID NO: 4287403 - DNA, 25 bp, Homo sapien
cctggatgctgttgcgtggcttaga

SEQ ID NO: 4287404 - DNA, 25 bp, Homo sapien
tctatctcagcattgagcccctgga

SEQ ID NO: 4287405 - DNA, 25 bp, Homo sapien
ttttgaatgttaccgctggatgcag

SEQ ID NO: 4287406 - DNA, 25 bp, Homo sapien
tgcttttcctatgtacctgagaatt

SEQ ID NO: 4287407 - DNA, 25 bp, Homo sapien
cttttcctatgtacctgagaatttt

SEQ ID NO: 4287408 - DNA, 25 bp, Homo sapien
tgagacagggtactccagactggag

SEQ ID NO: 4287409 - DNA, 25 bp, Homo sapien
gcagtgcagcttaggtcttacatat

SEQ ID NO: 4287410 - DNA, 25 bp, Homo sapien
ctcaggtgaggaacataaaagggta

SEQ ID NO: 4287411 - DNA, 25 bp, Homo sapien
atcatatgtggtagtcaggcatggt

SEQ ID NO: 4287412 - DNA, 25 bp, Homo sapien
tagtgtaggtttcacagcagtgcag

SEQ ID NO: 4287413 - DNA, 25 bp, Homo sapien
gtacagtggtacgatgagagctcat

SEQ ID NO: 4287414 - DNA, 25 bp, Homo sapien
aataacaaactctgttcgtaaagat

SEQ ID NO: 4287415 - DNA, 25 bp, Homo sapien
taacaaactctgttcgtaaagatgg

SEQ ID NO: 4287416 - DNA, 25 bp, Homo sapien
acaaactctgttcgtaaagatgggg

SEQ ID NO: 4287417 - DNA, 25 bp, Homo sapien
cagcctgttgtttctgcaggtagca

SEQ ID NO: 4287418 - DNA, 25 bp, Homo sapien
gaagaccatgaccatacctgccttc

SEQ ID NO: 4287419 - DNA, 25 bp, Homo sapien
cacaagcattcaggcatgtgagggc

SEQ ID NO: 4287420 - DNA, 25 bp, Homo sapien
cctctagtgcatagattatgtgtgc

SEQ ID NO: 4287421 - DNA, 25 bp, Homo sapien
cttccatgagacagcgggcatttgg

SEQ ID NO: 4287422 - DNA, 25 bp, Homo sapien
cagctttagactgagaagcagcagc

SEQ ID NO: 4287423 - DNA, 25 bp, Homo sapien
aatgttattcgtcaggcagtggctc

SEQ ID NO: 4287424 - DNA, 25 bp, Homo sapien
aaaggatgacctggcttgccgtgga

SEQ ID NO: 4287425 - DNA, 25 bp, Homo sapien
gtcatgtcattcatgaataaagaca

SEQ ID NO: 4287426 - DNA, 25 bp, Homo sapien
gacagtcatgtcattcatgaataaa

SEQ ID NO: 4287427 - DNA, 25 bp, Homo sapien
tctaatccatataccttttatgtcc

SEQ ID NO: 4287428 - DNA, 25 bp, Homo sapien
ctttctaatccatataccttttatg

SEQ ID NO: 4287429 - DNA, 25 bp, Homo sapien
cagagctccacaggttttttcattg

SEQ ID NO: 4287430 - DNA, 25 bp, Homo sapien
ggatacattaagtgtcaagtgacag

SEQ ID NO: 4287431 - DNA, 25 bp, Homo sapien
cagtaggacctctagaaatacacaa

SEQ ID NO: 4287432 - DNA, 25 bp, Homo sapien
cagatacaaagcatgtagaagagga

SEQ ID NO: 4287433 - DNA, 25 bp, Homo sapien
gttcagtgcagggattcaggtagcc

SEQ ID NO: 4287434 - DNA, 25 bp, Homo sapien
tcaggtaggcaacttcgaagagtca

SEQ ID NO: 4287435 - DNA, 25 bp, Homo sapien
tagagtttaatgtgcctacaaggag

SEQ ID NO: 4287436 - DNA, 25 bp, Homo sapien
tgtagtcatcccttaaggaaagcca

SEQ ID NO: 4287437 - DNA, 25 bp, Homo sapien
caactttccgaagagaccgagagag

SEQ ID NO: 4287438 - DNA, 25 bp, Homo sapien
catggtctggagagacacgccagga

SEQ ID NO: 4287439 - DNA, 25 bp, Homo sapien
taagtagtttgtcagggcacatacc

SEQ ID NO: 4287440 - DNA, 25 bp, Homo sapien
tccactagtgacagaggccaagcaa

SEQ ID NO: 4287441 - DNA, 25 bp, Homo sapien
caatacaggtaagaacagtgttgct

SEQ ID NO: 4287442 - DNA, 25 bp, Homo sapien
gcaagaagtctatgtgccccaggat

SEQ ID NO: 4287443 - DNA, 25 bp, Homo sapien
ggaactgtgcgccttagacctggaa

SEQ ID NO: 4287444 - DNA, 25 bp, Homo sapien
tttccaactgtatcgcagcaagaag

SEQ ID NO: 4287445 - DNA, 25 bp, Homo sapien
aagaggaagcgcaaaggctgatgcc

SEQ ID NO: 4287446 - DNA, 25 bp, Homo sapien
cccctgcagaagacgtctttaagaa

SEQ ID NO: 4287447 - DNA, 25 bp, Homo sapien
tatgtctcccgaataaggattccca

SEQ ID NO: 4287448 - DNA, 25 bp, Homo sapien
aacattgatcccctggacctagggc

SEQ ID NO: 4287449 - DNA, 25 bp, Homo sapien
taccgagatgctgttcgaagagtca

SEQ ID NO: 4287450 - DNA, 25 bp, Homo sapien
taagaaaggagacaagttccatggg

SEQ ID NO: 4287451 - DNA, 25 bp, Homo sapien
cagcaaaagacagtccaacgagact

SEQ ID NO: 4287452 - DNA, 25 bp, Homo sapien
gagtcatgtttgctcgatataaaga

SEQ ID NO: 4287453 - DNA, 25 bp, Homo sapien
taagtgcggcggctgtctgtaacga

SEQ ID NO: 4287454 - DNA, 25 bp, Homo sapien
tgcaaaagccgatcgacaactctgt

SEQ ID NO: 4287455 - DNA, 25 bp, Homo sapien
taagtgacaggatggtctggcgacc

SEQ ID NO: 4287456 - DNA, 25 bp, Homo sapien
tgtgtagccgccgaaccttgttgga

SEQ ID NO: 4287457 - DNA, 25 bp, Homo sapien
cagctccagccggttctgtagaggg

SEQ ID NO: 4287458 - DNA, 25 bp, Homo sapien
tgaatcgccctctccgaaaagctgt

SEQ ID NO: 4287459 - DNA, 25 bp, Homo sapien
tgactttgccccttgtggatacacg

SEQ ID NO: 4287460 - DNA, 25 bp, Homo sapien
aaaagctgttcggtgatcgcccatc

SEQ ID NO: 4287461 - DNA, 25 bp, Homo sapien
aatggtgtggtagatgggcccttca

SEQ ID NO: 4287462 - DNA, 25 bp, Homo sapien
agataaggcctagcaatcggcttga

SEQ ID NO: 4287463 - DNA, 25 bp, Homo sapien
aaagaatattactgagggttggcca

SEQ ID NO: 4287464 - DNA, 25 bp, Homo sapien
catgagcagggaatagaaaggtact

SEQ ID NO: 4287465 - DNA, 25 bp, Homo sapien
aaagaaactgctacaagtattgatt

SEQ ID NO: 4287466 - DNA, 25 bp, Homo sapien
aaactgctacaagtattgatttgag

SEQ ID NO: 4287467 - DNA, 25 bp, Homo sapien
agaaactgctacaagtattgatttg

SEQ ID NO: 4287468 - DNA, 25 bp, Homo sapien
gctacaagtattgatttgagtgtta

SEQ ID NO: 4287469 - DNA, 25 bp, Homo sapien
tggaggcgtaactgctcagaccggt

SEQ ID NO: 4287470 - DNA, 25 bp, Homo sapien
ggtgtcctgcagctgtctaatctag

SEQ ID NO: 4287471 - DNA, 25 bp, Homo sapien
tcagaccggtcttcagggaatattt

SEQ ID NO: 4287472 - DNA, 25 bp, Homo sapien
taagtctgatgagattagcctggga

SEQ ID NO: 4287473 - DNA, 25 bp, Homo sapien
tatacaaggttcatgtgagtctgct

SEQ ID NO: 4287474 - DNA, 25 bp, Homo sapien
tgtcagaatgactaacctaggagtt

SEQ ID NO: 4287475 - DNA, 25 bp, Homo sapien
gcctttaaccaagtgcattctggga

SEQ ID NO: 4287476 - DNA, 25 bp, Homo sapien
cattctgggaagtttgcttgactca

SEQ ID NO: 4287477 - DNA, 25 bp, Homo sapien
aaagactaaaatgcttccgatgtgg

SEQ ID NO: 4287478 - DNA, 25 bp, Homo sapien
tccgatgtggagcagacaagtttgg

SEQ ID NO: 4287479 - DNA, 25 bp, Homo sapien
taagactggattcagctgtttgcaa

SEQ ID NO: 4287480 - DNA, 25 bp, Homo sapien
tatgcattaaaacctactaactggg

SEQ ID NO: 4287481 - DNA, 25 bp, Homo sapien
tgacgtgcctaagcaggccaagcct

SEQ ID NO: 4287482 - DNA, 25 bp, Homo sapien
tcatcactcgaagaagaaaccctgt

SEQ ID NO: 4287483 - DNA, 25 bp, Homo sapien
aatagattaccttttgtgtccagca

SEQ ID NO: 4287484 - DNA, 25 bp, Homo sapien
tgaccgggagctgtatatatagaac

SEQ ID NO: 4287485 - DNA, 25 bp, Homo sapien
gtaagcgaatgtcgcgccactgcac

SEQ ID NO: 4287486 - DNA, 25 bp, Homo sapien
caagcgtggtgtcgaatgcctgtag

SEQ ID NO: 4287487 - DNA, 25 bp, Homo sapien
tagccaagcgtggtgtcgaatgcct

SEQ ID NO: 4287488 - DNA, 25 bp, Homo sapien
agctggcagtaagcgaatgtcgcgc

SEQ ID NO: 4287489 - DNA, 25 bp, Homo sapien
tggattctatgtggatgggcccaat

SEQ ID NO: 4287490 - DNA, 25 bp, Homo sapien
tgggcccaatgatgagctgttgtca

SEQ ID NO: 4287491 - DNA, 25 bp, Homo sapien
tgttgagcagatagagtgagcgact

SEQ ID NO: 4287492 - DNA, 25 bp, Homo sapien
aatagaggagaggatatgtgacacc

SEQ ID NO: 4287493 - DNA, 25 bp, Homo sapien
ttacttataccaaggtgtgcccagg

SEQ ID NO: 4287494 - DNA, 25 bp, Homo sapien
ggttcatcacctttacttataccaa

SEQ ID NO: 4287495 - DNA, 25 bp, Homo sapien
tgtcacacctctttgctaggtggtt

SEQ ID NO: 4287496 - DNA, 25 bp, Homo sapien
ggaaatatcactagtccacaacata

SEQ ID NO: 4287497 - DNA, 25 bp, Homo sapien
cattgaggtattgggctgaactctt

SEQ ID NO: 4287498 - DNA, 25 bp, Homo sapien
ggattcttaaaaattgggcttcaca

SEQ ID NO: 4287499 - DNA, 25 bp, Homo sapien
ttgttaccatatcttgactgtcagc

SEQ ID NO: 4287500 - DNA, 25 bp, Homo sapien
acagcccagcaggttagaacatgac

SEQ ID NO: 4287501 - DNA, 25 bp, Homo sapien
aaagctgttcccgatgacagtggac

SEQ ID NO: 4287502 - DNA, 25 bp, Homo sapien
ctaatgatggccttacagaaagctg

SEQ ID NO: 4287503 - DNA, 25 bp, Homo sapien
ttgagtgccctaacagtcctgacgg

SEQ ID NO: 4287504 - DNA, 25 bp, Homo sapien
cagttcccgaacaaagatgccctag

SEQ ID NO: 4287505 - DNA, 25 bp, Homo sapien
aaagtgtcaaggcattacggctccc

SEQ ID NO: 4287506 - DNA, 25 bp, Homo sapien
caagaagcagtttgatgccggcact

SEQ ID NO: 4287507 - DNA, 25 bp, Homo sapien
gatgaaataccgagaccgagctgca

SEQ ID NO: 4287508 - DNA, 25 bp, Homo sapien
gaattacgagcaacccaccaaagat

SEQ ID NO: 4287509 - DNA, 25 bp, Homo sapien
tagcctatgttgtggtccatcagcc

SEQ ID NO: 4287510 - DNA, 25 bp, Homo sapien
gcttgtgaacagaccggagaggaca

SEQ ID NO: 4287511 - DNA, 25 bp, Homo sapien
tttcagtctagttgccaaatctggc

SEQ ID NO: 4287512 - DNA, 25 bp, Homo sapien
ccttcccgccagagggcttgtgaac

SEQ ID NO: 4287513 - DNA, 25 bp, Homo sapien
cactccagtgcagtagaattgggtc

SEQ ID NO: 4287514 - DNA, 25 bp, Homo sapien
ccagtgcagtagaattgggtctcac

SEQ ID NO: 4287515 - DNA, 25 bp, Homo sapien
atcaccactccagtgcagtagaatt

SEQ ID NO: 4287516 - DNA, 25 bp, Homo sapien
caccactccagtgcagtagaattgg

SEQ ID NO: 4287517 - DNA, 25 bp, Homo sapien
gaggtccagccctggagtgagctgg

SEQ ID NO: 4287518 - DNA, 25 bp, Homo sapien
ccagccctggagtgagctgggtctt

SEQ ID NO: 4287519 - DNA, 25 bp, Homo sapien
ctgcaggtacaaggttgaggtccag

SEQ ID NO: 4287520 - DNA, 25 bp, Homo sapien
gcaggtacaaggttgaggtccagcc

SEQ ID NO: 4287521 - DNA, 25 bp, Homo sapien
ttcccttctaacacctgcagccata

SEQ ID NO: 4287522 - DNA, 25 bp, Homo sapien
tcccttctaacacctgcagccatac

SEQ ID NO: 4287523 - DNA, 25 bp, Homo sapien
cttcccttctaacacctgcagccat

SEQ ID NO: 4287524 - DNA, 25 bp, Homo sapien
ggagcacaactctgagggatgcaga

SEQ ID NO: 4287525 - DNA, 25 bp, Homo sapien
aggagtcccattcggcaaggaaagg

SEQ ID NO: 4287526 - DNA, 25 bp, Homo sapien
gggcttccagtacctgtgatcagga

SEQ ID NO: 4287527 - DNA, 25 bp, Homo sapien
gcacaactctgagggatgcagagta

SEQ ID NO: 4287528 - DNA, 25 bp, Homo sapien
ccgggctactatggggcaccatttg

SEQ ID NO: 4287529 - DNA, 25 bp, Homo sapien
tgcaggggatgcaccccacatggca

SEQ ID NO: 4287530 - DNA, 25 bp, Homo sapien
cctgtgtgtttggatataggcccgg

SEQ ID NO: 4287531 - DNA, 25 bp, Homo sapien
tgtttggatataggcccgggctact

SEQ ID NO: 4287532 - DNA, 25 bp, Homo sapien
agtatcccctcggaattcctgtgcc

SEQ ID NO: 4287533 - DNA, 25 bp, Homo sapien
cagcccgcccgaggctccagtatcc

SEQ ID NO: 4287534 - DNA, 25 bp, Homo sapien
tatcccctcggaattcctgtgccga

SEQ ID NO: 4287535 - DNA, 25 bp, Homo sapien
tccagtatcccctcggaattcctgt

SEQ ID NO: 4287536 - DNA, 25 bp, Homo sapien
cttgtggtcgtcactaggtcaggtg

SEQ ID NO: 4287537 - DNA, 25 bp, Homo sapien
gccagagatggtggccgtcctccca

SEQ ID NO: 4287538 - DNA, 25 bp, Homo sapien
tcgtcactaggtcaggtgactgagc

SEQ ID NO: 4287539 - DNA, 25 bp, Homo sapien
ggtcaggtgactgagcttttaccca

SEQ ID NO: 4287540 - DNA, 25 bp, Homo sapien
aaaaaagacaaggcggccggtgcag

SEQ ID NO: 4287541 - DNA, 25 bp, Homo sapien
gggtgaatttcctcctggttccagc

SEQ ID NO: 4287542 - DNA, 25 bp, Homo sapien
gtggcagaccaaccctggcctggct

SEQ ID NO: 4287543 - DNA, 25 bp, Homo sapien
gcaacccgcggaggaagatggtcct

SEQ ID NO: 4287544 - DNA, 25 bp, Homo sapien
tgaagtccgggaagaacatttgtgg

SEQ ID NO: 4287545 - DNA, 25 bp, Homo sapien
ggagaaggctgcacacggaacctca

SEQ ID NO: 4287546 - DNA, 25 bp, Homo sapien
ccagcttttgatcggctcagagcca

SEQ ID NO: 4287547 - DNA, 25 bp, Homo sapien
gggcccacgtctagaggaaacacag

SEQ ID NO: 4287548 - DNA, 25 bp, Homo sapien
gcccgttgctggcaccatcatccag

SEQ ID NO: 4287549 - DNA, 25 bp, Homo sapien
cagaaacaaagtccaggccagggtg

SEQ ID NO: 4287550 - DNA, 25 bp, Homo sapien
ggctgggccaatgacttccctgttg

SEQ ID NO: 4287551 - DNA, 25 bp, Homo sapien
ttcaaggttttcctgcccgttgctg

SEQ ID NO: 4287552 - DNA, 25 bp, Homo sapien
agtgcagtgtatcccacgcagccgg

SEQ ID NO: 4287553 - DNA, 25 bp, Homo sapien
ctccaggacctcaagactatgaagt

SEQ ID NO: 4287554 - DNA, 25 bp, Homo sapien
tgttggctcggtcacccctcacaag

SEQ ID NO: 4287555 - DNA, 25 bp, Homo sapien
ccagatccgagtgcagtgtatccca

SEQ ID NO: 4287556 - DNA, 25 bp, Homo sapien
tgataaagatgcgtggagttccaga

SEQ ID NO: 4287557 - DNA, 25 bp, Homo sapien
taatatacctcggagatatggcggg

SEQ ID NO: 4287558 - DNA, 25 bp, Homo sapien
tcagcccaattgtgaagcacctggg

SEQ ID NO: 4287559 - DNA, 25 bp, Homo sapien
tccagaagtgccctgtgggactcca

SEQ ID NO: 4287560 - DNA, 25 bp, Homo sapien
tgtgctgggcctattctgtgtgtct

SEQ ID NO: 4287561 - DNA, 25 bp, Homo sapien
gacagctcttccgtggtaaccagca

SEQ ID NO: 4287562 - DNA, 25 bp, Homo sapien
catgaggcagcactctaagtcctga

SEQ ID NO: 4287563 - DNA, 25 bp, Homo sapien
cacttggagtcaaccagtcaatggg

SEQ ID NO: 4287564 - DNA, 25 bp, Homo sapien
gtacgccgcgaggaaccgtgcagcc

SEQ ID NO: 4287565 - DNA, 25 bp, Homo sapien
tgggtacgccgcgaggaaccgtgca

SEQ ID NO: 4287566 - DNA, 25 bp, Homo sapien
agagcgcagcgcttcgaagccgagt

SEQ ID NO: 4287567 - DNA, 25 bp, Homo sapien
cagcgcttcgaagccgagtgcgcgc

SEQ ID NO: 4287568 - DNA, 25 bp, Homo sapien
agtgtctctacttgaggactggcca

SEQ ID NO: 4287569 - DNA, 25 bp, Homo sapien
gggtcacccatgtgcaaagcaactt

SEQ ID NO: 4287570 - DNA, 25 bp, Homo sapien
ccagcccgaagggaagcggtatact

SEQ ID NO: 4287571 - DNA, 25 bp, Homo sapien
cacgcttctggagcgggagttccga

SEQ ID NO: 4287572 - DNA, 25 bp, Homo sapien
cctctctttacaatagcgctcggct

SEQ ID NO: 4287573 - DNA, 25 bp, Homo sapien
ctctttacaatagcgctcggctcct

SEQ ID NO: 4287574 - DNA, 25 bp, Homo sapien
ccgggtccggctctcattcaaaggt

SEQ ID NO: 4287575 - DNA, 25 bp, Homo sapien
cattcaaaggtaagaagctgttttg

SEQ ID NO: 4287576 - DNA, 25 bp, Homo sapien
tggaagtctacctgctggacagcct

SEQ ID NO: 4287577 - DNA, 25 bp, Homo sapien
gtggcagcatcctccaaaacttaga

SEQ ID NO: 4287578 - DNA, 25 bp, Homo sapien
catagacatggatgcgaggaccact

SEQ ID NO: 4287579 - DNA, 25 bp, Homo sapien
ggtcagagacggcagaaaacagagc

SEQ ID NO: 4287580 - DNA, 25 bp, Homo sapien
tttagtttgacaaacctgggctgct

SEQ ID NO: 4287581 - DNA, 25 bp, Homo sapien
aaacctgggctgctgcaccacccca

SEQ ID NO: 4287582 - DNA, 25 bp, Homo sapien
caaacctgggctgctgcaccacccc

SEQ ID NO: 4287583 - DNA, 25 bp, Homo sapien
acatttagtttgacaaacctgggct

SEQ ID NO: 4287584 - DNA, 25 bp, Homo sapien
ggaacactacacctgctctgggatg

SEQ ID NO: 4287585 - DNA, 25 bp, Homo sapien
taagcatgcgcacaggcacgtgatt

SEQ ID NO: 4287586 - DNA, 25 bp, Homo sapien
cagattagagactttgttgcaccca

SEQ ID NO: 4287587 - DNA, 25 bp, Homo sapien
tacatataggcacaggcgcctgcaa

SEQ ID NO: 4287588 - DNA, 25 bp, Homo sapien
tgcaggtcataaaatcccagtccag

SEQ ID NO: 4287589 - DNA, 25 bp, Homo sapien
accacagtccgctggaagcagagga

SEQ ID NO: 4287590 - DNA, 25 bp, Homo sapien
gcacacagagcagatatgcatgccc

SEQ ID NO: 4287591 - DNA, 25 bp, Homo sapien
gctccagcctgtgatatgggatgaa

SEQ ID NO: 4287592 - DNA, 25 bp, Homo sapien
cgcagaacgtcaaatttgtcttcga

SEQ ID NO: 4287593 - DNA, 25 bp, Homo sapien
catcatcatcaaggagaacctcaaa

SEQ ID NO: 4287594 - DNA, 25 bp, Homo sapien
gccaccgacacgcagaacgtcaaat

SEQ ID NO: 4287595 - DNA, 25 bp, Homo sapien
ttgtcttcgacgctgtcaccgacat

SEQ ID NO: 4287596 - DNA, 25 bp, Homo sapien
ggtgactcagcagtgcccaactgac

SEQ ID NO: 4287597 - DNA, 25 bp, Homo sapien
ggcagctgaagctcacggtgactca

SEQ ID NO: 4287598 - DNA, 25 bp, Homo sapien
ttgacacctgtctacccagagccag

SEQ ID NO: 4287599 - DNA, 25 bp, Homo sapien
tctgagccctgctagccttgaggcg

SEQ ID NO: 4287600 - DNA, 25 bp, Homo sapien
ccctcagctagacgcacagactcag

SEQ ID NO: 4287601 - DNA, 25 bp, Homo sapien
aaggagcttccgtctggcaaggccg

SEQ ID NO: 4287602 - DNA, 25 bp, Homo sapien
gacaaggagcttccgtctggcaagg

SEQ ID NO: 4287603 - DNA, 25 bp, Homo sapien
caaggccggggcacaatttgcactc

SEQ ID NO: 4287604 - DNA, 25 bp, Homo sapien
tgtaggcatcatcctcaatgtccag

SEQ ID NO: 4287605 - DNA, 25 bp, Homo sapien
ctaagtgtaggcatcatcctcaatg

SEQ ID NO: 4287606 - DNA, 25 bp, Homo sapien
gtaggcatcatcctcaatgtccagg

SEQ ID NO: 4287607 - DNA, 25 bp, Homo sapien
agtgtaggcatcatcctcaatgtcc

SEQ ID NO: 4287608 - DNA, 25 bp, Homo sapien
tgtgggctgctttgccatcaggctc

SEQ ID NO: 4287609 - DNA, 25 bp, Homo sapien
ctctccttgatttgcgccctccaac

SEQ ID NO: 4287610 - DNA, 25 bp, Homo sapien
cttcgcagagcaagtctgtgggctg

SEQ ID NO: 4287611 - DNA, 25 bp, Homo sapien
ttgcgccctccaacctcgcaggcat

SEQ ID NO: 4287612 - DNA, 25 bp, Homo sapien
ctcctgggcccttggatactcttct

SEQ ID NO: 4287613 - DNA, 25 bp, Homo sapien
tgggagaagaaacaggccgaggccc

SEQ ID NO: 4287614 - DNA, 25 bp, Homo sapien
gaccctgctgctaggccacggtctg

SEQ ID NO: 4287615 - DNA, 25 bp, Homo sapien
cataccccatagctggggccagcag

SEQ ID NO: 4287616 - DNA, 25 bp, Homo sapien
ggccaccgaaatcccgcgctccggc

SEQ ID NO: 4287617 - DNA, 25 bp, Homo sapien
ctctcccggccaccgaaatcccgcg

SEQ ID NO: 4287618 - DNA, 25 bp, Homo sapien
aagaggcggtgcagcgcaccccgag

SEQ ID NO: 4287619 - DNA, 25 bp, Homo sapien
cgcgaagccgttccggcctctcccg

SEQ ID NO: 4287620 - DNA, 25 bp, Homo sapien
ggagcccaccgctggccaagaccca

SEQ ID NO: 4287621 - DNA, 25 bp, Homo sapien
ctggggagcccaccgctggccaaga

SEQ ID NO: 4287622 - DNA, 25 bp, Homo sapien
ctcgcaaaatgccgtcctggtgagg

SEQ ID NO: 4287623 - DNA, 25 bp, Homo sapien
gcaaaatgccgtcctggtgaggtcc

SEQ ID NO: 4287624 - DNA, 25 bp, Homo sapien
cttcttgcaatattcttccgcactg

SEQ ID NO: 4287625 - DNA, 25 bp, Homo sapien
atcttcttgcaatattcttccgcac

SEQ ID NO: 4287626 - DNA, 25 bp, Homo sapien
cttgcaatattcttccgcactgttc

SEQ ID NO: 4287627 - DNA, 25 bp, Homo sapien
tcttgcaatattcttccgcactgtt

SEQ ID NO: 4287628 - DNA, 25 bp, Homo sapien
cttcaaatgtccaatcgagggtggg

SEQ ID NO: 4287629 - DNA, 25 bp, Homo sapien
gacaggtcataagatcatggccact

SEQ ID NO: 4287630 - DNA, 25 bp, Homo sapien
gaagccacccagctaaaggagacag

SEQ ID NO: 4287631 - DNA, 25 bp, Homo sapien
aacaccgggctgttggtggcaagca

SEQ ID NO: 4287632 - DNA, 25 bp, Homo sapien
cagccgctcggaggccccaaaggaa

SEQ ID NO: 4287633 - DNA, 25 bp, Homo sapien
aaaaagcacaagaagcgtgagacgc

SEQ ID NO: 4287634 - DNA, 25 bp, Homo sapien
ggcctccctgtttgaagcctgccct

SEQ ID NO: 4287635 - DNA, 25 bp, Homo sapien
caagtccaaatgtttacagggagcc

SEQ ID NO: 4287636 - DNA, 25 bp, Homo sapien
agacaactgccaacgtcactgaggg

SEQ ID NO: 4287637 - DNA, 25 bp, Homo sapien
taaaatgtagctccctagcgctaac

SEQ ID NO: 4287638 - DNA, 25 bp, Homo sapien
caagtgactccgtgccttgagtgtg

SEQ ID NO: 4287639 - DNA, 25 bp, Homo sapien
cctggactaggcagcatacatgtgg

SEQ ID NO: 4287640 - DNA, 25 bp, Homo sapien
ggagctccgtcctgtctgtaaaact

SEQ ID NO: 4287641 - DNA, 25 bp, Homo sapien
aactccctcagttttcggctctggg

SEQ ID NO: 4287642 - DNA, 25 bp, Homo sapien
gaagtacccctcatgttacaaatgg

SEQ ID NO: 4287643 - DNA, 25 bp, Homo sapien
actctgccactgtcaacatacagtc

SEQ ID NO: 4287644 - DNA, 25 bp, Homo sapien
gggtggtgcccccactcagtgattc

SEQ ID NO: 4287645 - DNA, 25 bp, Homo sapien
tattggagtccacgggtggtgcccc

SEQ ID NO: 4287646 - DNA, 25 bp, Homo sapien
ctgtggagggagaggttgagatatt

SEQ ID NO: 4287647 - DNA, 25 bp, Homo sapien
cactcagtgattccctttgcctgct

SEQ ID NO: 4287648 - DNA, 25 bp, Homo sapien
aacccttgaatgtagcagccccggg

SEQ ID NO: 4287649 - DNA, 25 bp, Homo sapien
aaccaagcaggagacgacaggcgag

SEQ ID NO: 4287650 - DNA, 25 bp, Homo sapien
agagaggagccagacagaccctgaa

SEQ ID NO: 4287651 - DNA, 25 bp, Homo sapien
cgcaacgcactggtgaccagactgt

SEQ ID NO: 4287652 - DNA, 25 bp, Homo sapien
ggatgccatcattggcccccgactg

SEQ ID NO: 4287653 - DNA, 25 bp, Homo sapien
ttggcccccgactgcccactgcttg

SEQ ID NO: 4287654 - DNA, 25 bp, Homo sapien
tcattggcccccgactgcccactgc

SEQ ID NO: 4287655 - DNA, 25 bp, Homo sapien
tggatgccatcattggcccccgact

SEQ ID NO: 4287656 - DNA, 25 bp, Homo sapien
caggacgtaggactgtctgctccat

SEQ ID NO: 4287657 - DNA, 25 bp, Homo sapien
caggaatctaggaagctacaggtcc

SEQ ID NO: 4287658 - DNA, 25 bp, Homo sapien
tacaggtccagtactggccaggacg

SEQ ID NO: 4287659 - DNA, 25 bp, Homo sapien
gcaccactgcatataagaagtactg

SEQ ID NO: 4287660 - DNA, 25 bp, Homo sapien
gatggggagggagaacagaaaaata

SEQ ID NO: 4287661 - DNA, 25 bp, Homo sapien
acacaaatccattccaggtagcttt

SEQ ID NO: 4287662 - DNA, 25 bp, Homo sapien
atctgtaataatccttaaaaatcag

SEQ ID NO: 4287663 - DNA, 25 bp, Homo sapien
aaatcagcacacaaatccattccag

SEQ ID NO: 4287664 - DNA, 25 bp, Homo sapien
ccccctaagagtgggtcatcctggg

SEQ ID NO: 4287665 - DNA, 25 bp, Homo sapien
tttagcctggcctgagacaggacag

SEQ ID NO: 4287666 - DNA, 25 bp, Homo sapien
tgaggaaggcacatatttagcctgg

SEQ ID NO: 4287667 - DNA, 25 bp, Homo sapien
ggagaccagttgttgcactgtcttc

SEQ ID NO: 4287668 - DNA, 25 bp, Homo sapien
gtgacaaatactggtggagaccagt

SEQ ID NO: 4287669 - DNA, 25 bp, Homo sapien
gaaagtctcctcttcagcaggtcct

SEQ ID NO: 4287670 - DNA, 25 bp, Homo sapien
tagaaagtctcctcttcagcaggtc

SEQ ID NO: 4287671 - DNA, 25 bp, Homo sapien
aagtctcctcttcagcaggtcctgc

SEQ ID NO: 4287672 - DNA, 25 bp, Homo sapien
caagggcatagaaagtctcctcttc

SEQ ID NO: 4287673 - DNA, 25 bp, Homo sapien
tcgagccttggtccgggctttgaag

SEQ ID NO: 4287674 - DNA, 25 bp, Homo sapien
cacacggcttcgagccttggtccgg

SEQ ID NO: 4287675 - DNA, 25 bp, Homo sapien
cggcttcgagccttggtccgggctt

SEQ ID NO: 4287676 - DNA, 25 bp, Homo sapien
cgcttgtcccgcacacggcttcgag

SEQ ID NO: 4287677 - DNA, 25 bp, Homo sapien
tcttccggcctctacagaattccag

SEQ ID NO: 4287678 - DNA, 25 bp, Homo sapien
gctgggggtcctcttccggcctcta

SEQ ID NO: 4287679 - DNA, 25 bp, Homo sapien
ttccggcctctacagaattccaggc

SEQ ID NO: 4287680 - DNA, 25 bp, Homo sapien
ggtcctcttccggcctctacagaat

SEQ ID NO: 4287681 - DNA, 25 bp, Homo sapien
ggccaaagatgtcacggagtagctc

SEQ ID NO: 4287682 - DNA, 25 bp, Homo sapien
tctcaaagcgtggaaccttgcaggc

SEQ ID NO: 4287683 - DNA, 25 bp, Homo sapien
aaagcgtggaaccttgcaggccttc

SEQ ID NO: 4287684 - DNA, 25 bp, Homo sapien
agatgtcacggagtagctcattgtt

SEQ ID NO: 4287685 - DNA, 25 bp, Homo sapien
actgaagcaaccacaccagatgtcc

SEQ ID NO: 4287686 - DNA, 25 bp, Homo sapien
cagactgaagcaaccacaccagatg

SEQ ID NO: 4287687 - DNA, 25 bp, Homo sapien
gccagactgaagcaaccacaccaga

SEQ ID NO: 4287688 - DNA, 25 bp, Homo sapien
gactgaagcaaccacaccagatgtc

SEQ ID NO: 4287689 - DNA, 25 bp, Homo sapien
ctcaaagccgaagcgcactatctct

SEQ ID NO: 4287690 - DNA, 25 bp, Homo sapien
cgaacccagcacttccttgaaggca

SEQ ID NO: 4287691 - DNA, 25 bp, Homo sapien
ccagctgtccatgtagagcacctca

SEQ ID NO: 4287692 - DNA, 25 bp, Homo sapien
cttgaaggcagcgtagatccggtgc

SEQ ID NO: 4287693 - DNA, 25 bp, Homo sapien
aaagtagagcgctggcgccgacgat

SEQ ID NO: 4287694 - DNA, 25 bp, Homo sapien
ccagagtgcgcaggacactgcagag

SEQ ID NO: 4287695 - DNA, 25 bp, Homo sapien
gacgatcagccttggcacggtactt

SEQ ID NO: 4287696 - DNA, 25 bp, Homo sapien
cacggtacttgttactgtcagtggc

SEQ ID NO: 4287697 - DNA, 25 bp, Homo sapien
ggtagatgcttgagctctgctggct

SEQ ID NO: 4287698 - DNA, 25 bp, Homo sapien
gcataatgacctaaagctgttctgt

SEQ ID NO: 4287699 - DNA, 25 bp, Homo sapien
gggcaggtggtgtcaccaagcaccc

SEQ ID NO: 4287700 - DNA, 25 bp, Homo sapien
gcacccatcatgacatctaggagat

SEQ ID NO: 4287701 - DNA, 25 bp, Homo sapien
gcagcgatccgcaggttcacacttt

SEQ ID NO: 4287702 - DNA, 25 bp, Homo sapien
gcaatggtttcaccggcagcgatcc

SEQ ID NO: 4287703 - DNA, 25 bp, Homo sapien
ggttcacactttcactggacaagag

SEQ ID NO: 4287704 - DNA, 25 bp, Homo sapien
tcccgggcaagctcaaagagcagtg

SEQ ID NO: 4287705 - DNA, 25 bp, Homo sapien
tttgggtgctagggcagatggtgag

SEQ ID NO: 4287706 - DNA, 25 bp, Homo sapien
gctgccccccaagccatagaaccgg

SEQ ID NO: 4287707 - DNA, 25 bp, Homo sapien
ccaagccatagaaccggctgaaaac

SEQ ID NO: 4287708 - DNA, 25 bp, Homo sapien
tgggtgctagggcagatggtgagca

SEQ ID NO: 4287709 - DNA, 25 bp, Homo sapien
agttacagccctagatgctctacca

SEQ ID NO: 4287710 - DNA, 25 bp, Homo sapien
atgctctaccacctgtgcccaaaga

SEQ ID NO: 4287711 - DNA, 25 bp, Homo sapien
ggcagagttacagccctagatgctc

SEQ ID NO: 4287712 - DNA, 25 bp, Homo sapien
gaggcagagttacagccctagatgc

SEQ ID NO: 4287713 - DNA, 25 bp, Homo sapien
ggatgtcagcggcagccacgtagca

SEQ ID NO: 4287714 - DNA, 25 bp, Homo sapien
cacgtagcagcccaggccaagggca

SEQ ID NO: 4287715 - DNA, 25 bp, Homo sapien
tgtcagcggcagccacgtagcagcc

SEQ ID NO: 4287716 - DNA, 25 bp, Homo sapien
ctggatgtcagcggcagccacgtag

SEQ ID NO: 4287717 - DNA, 25 bp, Homo sapien
gaagggcaatgcaatgccacggtca

SEQ ID NO: 4287718 - DNA, 25 bp, Homo sapien
tctgctgagggataaggtgcaggaa

SEQ ID NO: 4287719 - DNA, 25 bp, Homo sapien
aatgccacggtcagcgggtgaacct

SEQ ID NO: 4287720 - DNA, 25 bp, Homo sapien
ctcccctcagagtaaaggaggctga

SEQ ID NO: 4287721 - DNA, 25 bp, Homo sapien
gctgcaggctgtgaaacagctcctc

SEQ ID NO: 4287722 - DNA, 25 bp, Homo sapien
agcagccagggcttgttcctcgccc

SEQ ID NO: 4287723 - DNA, 25 bp, Homo sapien
gccagggcttgttcctcgcccttcc

SEQ ID NO: 4287724 - DNA, 25 bp, Homo sapien
cagcagccagggcttgttcctcgcc

SEQ ID NO: 4287725 - DNA, 25 bp, Homo sapien
cagccagggcttgttcctcgccctt

SEQ ID NO: 4287726 - DNA, 25 bp, Homo sapien
tttccagggcatcggctagcgtgag

SEQ ID NO: 4287727 - DNA, 25 bp, Homo sapien
ctcaagagcaccctgccgggtcttg

SEQ ID NO: 4287728 - DNA, 25 bp, Homo sapien
gtgaggcggcgctccagcaagaagt

SEQ ID NO: 4287729 - DNA, 25 bp, Homo sapien
gggagtaggcgggacgctagggcca

SEQ ID NO: 4287730 - DNA, 25 bp, Homo sapien
ggccagccctcccttgatcacactt

SEQ ID NO: 4287731 - DNA, 25 bp, Homo sapien
agaaggggggtcatatgggccagcc

SEQ ID NO: 4287732 - DNA, 25 bp, Homo sapien
agccctcccttgatcacacttggag

SEQ ID NO: 4287733 - DNA, 25 bp, Homo sapien
tcgagaaggggggtcatatgggcca

SEQ ID NO: 4287734 - DNA, 25 bp, Homo sapien
tgagacagtccacatactccttcag

SEQ ID NO: 4287735 - DNA, 25 bp, Homo sapien
tgctggccctgctcatccacgacat

SEQ ID NO: 4287736 - DNA, 25 bp, Homo sapien
tggccctgctcatccacgacatccc

SEQ ID NO: 4287737 - DNA, 25 bp, Homo sapien
gagacagtccacatactccttcagc

SEQ ID NO: 4287738 - DNA, 25 bp, Homo sapien
cctcagcccatggagccctcaccaa

SEQ ID NO: 4287739 - DNA, 25 bp, Homo sapien
ctgtcaaacttccacccgctctcac

SEQ ID NO: 4287740 - DNA, 25 bp, Homo sapien
agcccctgtcaaacttccacccgct

SEQ ID NO: 4287741 - DNA, 25 bp, Homo sapien
tgtcctcagcccatggagccctcac

SEQ ID NO: 4287742 - DNA, 25 bp, Homo sapien
ggaacccgagtcagcttgggcactg

SEQ ID NO: 4287743 - DNA, 25 bp, Homo sapien
cattcactggcggtgctgcgggcct

SEQ ID NO: 4287744 - DNA, 25 bp, Homo sapien
tcatcgtcactggaacccgagtcag

SEQ ID NO: 4287745 - DNA, 25 bp, Homo sapien
ttcactggcggtgctgcgggcctca

SEQ ID NO: 4287746 - DNA, 25 bp, Homo sapien
caggctggccctacttctaagaact

SEQ ID NO: 4287747 - DNA, 25 bp, Homo sapien
aaagccaagggtcagttcagtaggg

SEQ ID NO: 4287748 - DNA, 25 bp, Homo sapien
ttcagtagggctggtgcactcctgt

SEQ ID NO: 4287749 - DNA, 25 bp, Homo sapien
caaaagatagaatggtgtccctctc

SEQ ID NO: 4287750 - DNA, 25 bp, Homo sapien
gtccggtgagtttgtccacccagca

SEQ ID NO: 4287751 - DNA, 25 bp, Homo sapien
gaccagtccaggaaaggatcagggt

SEQ ID NO: 4287752 - DNA, 25 bp, Homo sapien
cgggtcaccgctgggagcgcggact

SEQ ID NO: 4287753 - DNA, 25 bp, Homo sapien
ctctcttcaccggagcaggccagga

SEQ ID NO: 4287754 - DNA, 25 bp, Homo sapien
gctgaccacccttccggagcgtgtt

SEQ ID NO: 4287755 - DNA, 25 bp, Homo sapien
ccttccggagcgtgttgcccttacg

SEQ ID NO: 4287756 - DNA, 25 bp, Homo sapien
tgttgcccttacgggcgcgaggcat

SEQ ID NO: 4287757 - DNA, 25 bp, Homo sapien
tccggagcgtgttgcccttacgggc

SEQ ID NO: 4287758 - DNA, 25 bp, Homo sapien
agacttggccagacgacgggagcca

SEQ ID NO: 4287759 - DNA, 25 bp, Homo sapien
aggccaacgagacgccggccggtgc

SEQ ID NO: 4287760 - DNA, 25 bp, Homo sapien
cggccggtgcgctgcgctgagactt

SEQ ID NO: 4287761 - DNA, 25 bp, Homo sapien
acgcgcgccaccatcttcgcgaggc

SEQ ID NO: 4287762 - DNA, 25 bp, Homo sapien
tccaggccatccgattcaggcccac

SEQ ID NO: 4287763 - DNA, 25 bp, Homo sapien
aggtcgccgggaaggcgagttccag

SEQ ID NO: 4287764 - DNA, 25 bp, Homo sapien
caggtcgccgggaaggcgagttcca

SEQ ID NO: 4287765 - DNA, 25 bp, Homo sapien
agttccaggccatccgattcaggcc

SEQ ID NO: 4287766 - DNA, 25 bp, Homo sapien
ctaatcccagaggcctgagcgcgca

SEQ ID NO: 4287767 - DNA, 25 bp, Homo sapien
tgagcgcgcaggcgacggcggctag

SEQ ID NO: 4287768 - DNA, 25 bp, Homo sapien
atccacgaggctaaaactactaatc

SEQ ID NO: 4287769 - DNA, 25 bp, Homo sapien
tccacgaggctaaaactactaatcc

SEQ ID NO: 4287770 - DNA, 25 bp, Homo sapien
ctgcgcgtagagcaccatgggaatg

SEQ ID NO: 4287771 - DNA, 25 bp, Homo sapien
agcaccatgggaatggtagtccacg

SEQ ID NO: 4287772 - DNA, 25 bp, Homo sapien
tagagcaccatgggaatggtagtcc

SEQ ID NO: 4287773 - DNA, 25 bp, Homo sapien
cgcgtagagcaccatgggaatggta

SEQ ID NO: 4287774 - DNA, 25 bp, Homo sapien
ctcagtggagcaccaaggcaggact

SEQ ID NO: 4287775 - DNA, 25 bp, Homo sapien
cttgggataacaggagcaacagcca

SEQ ID NO: 4287776 - DNA, 25 bp, Homo sapien
gttaactccgaagcgtccctcagtg

SEQ ID NO: 4287777 - DNA, 25 bp, Homo sapien
acgacgcgctggctgaactatgcac

SEQ ID NO: 4287778 - DNA, 25 bp, Homo sapien
ctttatgatgaaagagtgcagacaa

SEQ ID NO: 4287779 - DNA, 25 bp, Homo sapien
ttatgatgaaagagtgcagacaaca

SEQ ID NO: 4287780 - DNA, 25 bp, Homo sapien
gacaacagcttagcactttaccgac

SEQ ID NO: 4287781 - DNA, 25 bp, Homo sapien
gagtgcagacaacagcttagcactt

SEQ ID NO: 4287782 - DNA, 25 bp, Homo sapien
ctgcccgtgcacggcccatctgtga

SEQ ID NO: 4287783 - DNA, 25 bp, Homo sapien
tgcccgtgcacggcccatctgtgac

SEQ ID NO: 4287784 - DNA, 25 bp, Homo sapien
gtgaggtgtaggcacaaagccctag

SEQ ID NO: 4287785 - DNA, 25 bp, Homo sapien
gcttagtgaggtgtaggcacaaagc

SEQ ID NO: 4287786 - DNA, 25 bp, Homo sapien
gctggcagccctaactagctggaac

SEQ ID NO: 4287787 - DNA, 25 bp, Homo sapien
gaggactcacatgatctcagagggc

SEQ ID NO: 4287788 - DNA, 25 bp, Homo sapien
agcaagagtgggacagagtagttcc

SEQ ID NO: 4287789 - DNA, 25 bp, Homo sapien
gtgtgtgcttgggagggttgactgt

SEQ ID NO: 4287790 - DNA, 25 bp, Homo sapien
tgcttgggagggttgactgtaaact

SEQ ID NO: 4287791 - DNA, 25 bp, Homo sapien
attccaagggaagcggggtgtgtgc

SEQ ID NO: 4287792 - DNA, 25 bp, Homo sapien
ttatactgcttctttaggcccaggc

SEQ ID NO: 4287793 - DNA, 25 bp, Homo sapien
tactgcttctttaggcccaggcctg

SEQ ID NO: 4287794 - DNA, 25 bp, Homo sapien
agccccagtaacagtggcagctgaa

SEQ ID NO: 4287795 - DNA, 25 bp, Homo sapien
ccagccccagtaacagtggcagctg

SEQ ID NO: 4287796 - DNA, 25 bp, Homo sapien
cgtggccatggcaccgctggtgact

SEQ ID NO: 4287797 - DNA, 25 bp, Homo sapien
tagaaaggcttccatctgtcctgga

SEQ ID NO: 4287798 - DNA, 25 bp, Homo sapien
tgccgtctggccacaggtgtagaaa

SEQ ID NO: 4287799 - DNA, 25 bp, Homo sapien
tgactgcaggccatcgctgccctgg

SEQ ID NO: 4287800 - DNA, 25 bp, Homo sapien
gtccaccaggtagtcatggagatgc

SEQ ID NO: 4287801 - DNA, 25 bp, Homo sapien
caggtagtcatggagatgccagcac

SEQ ID NO: 4287802 - DNA, 25 bp, Homo sapien
attgatcacataggggcccaaggtg

SEQ ID NO: 4287803 - DNA, 25 bp, Homo sapien
caccaggtagtcatggagatgccag

SEQ ID NO: 4287804 - DNA, 25 bp, Homo sapien
tgctgcactcacaccaatggactgc

SEQ ID NO: 4287805 - DNA, 25 bp, Homo sapien
gctgcccctagtgctgcactcacac

SEQ ID NO: 4287806 - DNA, 25 bp, Homo sapien
gcactcacaccaatggactgcacaa

SEQ ID NO: 4287807 - DNA, 25 bp, Homo sapien
caccaatggactgcacaaggtcatc

SEQ ID NO: 4287808 - DNA, 25 bp, Homo sapien
gatgtcggtgcccaacaagggccac

SEQ ID NO: 4287809 - DNA, 25 bp, Homo sapien
atctccggtgtgtgaggcggacata

SEQ ID NO: 4287810 - DNA, 25 bp, Homo sapien
acaggaacctcccagatctccggtg

SEQ ID NO: 4287811 - DNA, 25 bp, Homo sapien
gtgtgaggcggacataggccaggac

SEQ ID NO: 4287812 - DNA, 25 bp, Homo sapien
tcctccaggcgatgtcggacaaagg

SEQ ID NO: 4287813 - DNA, 25 bp, Homo sapien
ctccaggcgatgtcggacaaaggcc

SEQ ID NO: 4287814 - DNA, 25 bp, Homo sapien
ggcctcctccaggcgatgtcggaca

SEQ ID NO: 4287815 - DNA, 25 bp, Homo sapien
cctcctccaggcgatgtcggacaaa

SEQ ID NO: 4287816 - DNA, 25 bp, Homo sapien
ggtagtgatagaagccccagagtcc

SEQ ID NO: 4287817 - DNA, 25 bp, Homo sapien
agtataggccttgtagagctgctcc

SEQ ID NO: 4287818 - DNA, 25 bp, Homo sapien
tccaaagtagggatagaggccgagt

SEQ ID NO: 4287819 - DNA, 25 bp, Homo sapien
cacagtgtgctgagggtacattcca

SEQ ID NO: 4287820 - DNA, 25 bp, Homo sapien
agggctgggcccagttgcgtggtca

SEQ ID NO: 4287821 - DNA, 25 bp, Homo sapien
gtggtaggggctggccacaacccag

SEQ ID NO: 4287822 - DNA, 25 bp, Homo sapien
ggtaggggctggccacaacccaggc

SEQ ID NO: 4287823 - DNA, 25 bp, Homo sapien
gggctgggcccagttgcgtggtcat

SEQ ID NO: 4287824 - DNA, 25 bp, Homo sapien
tctattgaaccagaaagacagttcc

SEQ ID NO: 4287825 - DNA, 25 bp, Homo sapien
tattcagccacactgacggctctga

SEQ ID NO: 4287826 - DNA, 25 bp, Homo sapien
aagagagcctttattcagccacact

SEQ ID NO: 4287827 - DNA, 25 bp, Homo sapien
tgggctgaggcttgtagactgtcgg

SEQ ID NO: 4287828 - DNA, 25 bp, Homo sapien
gggaaggcattaagcagggtggcag

SEQ ID NO: 4287829 - DNA, 25 bp, Homo sapien
gagatggtcaggcactcaggtaggg

SEQ ID NO: 4287830 - DNA, 25 bp, Homo sapien
tggtggcaatggaggtcccttggga

SEQ ID NO: 4287831 - DNA, 25 bp, Homo sapien
tggggcgccccctcacattttgata

SEQ ID NO: 4287832 - DNA, 25 bp, Homo sapien
tggcacgcaggatccagagtcagct

SEQ ID NO: 4287833 - DNA, 25 bp, Homo sapien
actgtctccactaagaggctctggg

SEQ ID NO: 4287834 - DNA, 25 bp, Homo sapien
tatagaagtgcacctggtcatgggt

SEQ ID NO: 4287835 - DNA, 25 bp, Homo sapien
tcatctctggttggcatgtggaatc

SEQ ID NO: 4287836 - DNA, 25 bp, Homo sapien
tagggtctagtgtaggggtcagctt

SEQ ID NO: 4287837 - DNA, 25 bp, Homo sapien
tgtagggtctagtgtaggggtcagc

SEQ ID NO: 4287838 - DNA, 25 bp, Homo sapien
ccggtgtgtagggtctagtgtaggg

SEQ ID NO: 4287839 - DNA, 25 bp, Homo sapien
ctagtgtaggggtcagcttggctgg

SEQ ID NO: 4287840 - DNA, 25 bp, Homo sapien
tatgcacaggatccaggttcagctg

SEQ ID NO: 4287841 - DNA, 25 bp, Homo sapien
aggatccaggttcagctgagtcagg

SEQ ID NO: 4287842 - DNA, 25 bp, Homo sapien
cacaggatccaggttcagctgagtc

SEQ ID NO: 4287843 - DNA, 25 bp, Homo sapien
ctatgcacaggatccaggttcagct

SEQ ID NO: 4287844 - DNA, 25 bp, Homo sapien
taagaccccagtctccaggcagtag

SEQ ID NO: 4287845 - DNA, 25 bp, Homo sapien
tggaggttaagaccccagtctccag

SEQ ID NO: 4287846 - DNA, 25 bp, Homo sapien
gctgctaggttgcaggtggctcagt

SEQ ID NO: 4287847 - DNA, 25 bp, Homo sapien
gggagccaaggtcacctgctgctag

SEQ ID NO: 4287848 - DNA, 25 bp, Homo sapien
ggaagagacccatcccctatagagc

SEQ ID NO: 4287849 - DNA, 25 bp, Homo sapien
gatagatccaggtgtctaccccaca

SEQ ID NO: 4287850 - DNA, 25 bp, Homo sapien
gcctgctctggctacaaatttgtcc

SEQ ID NO: 4287851 - DNA, 25 bp, Homo sapien
taaaacagccgacccaatctacttg

SEQ ID NO: 4287852 - DNA, 25 bp, Homo sapien
taaacactggtcagtaacaggcacc

SEQ ID NO: 4287853 - DNA, 25 bp, Homo sapien
gagcttgaggccaattaaacactgg

SEQ ID NO: 4287854 - DNA, 25 bp, Homo sapien
tggcttgagtttcgcaggcacccta

SEQ ID NO: 4287855 - DNA, 25 bp, Homo sapien
cagggtgtccaacggtcaccaggtt

SEQ ID NO: 4287856 - DNA, 25 bp, Homo sapien
gtctggaaacgaacgactgacgcgg

SEQ ID NO: 4287857 - DNA, 25 bp, Homo sapien
cttcgagagctcgactctgtgggca

SEQ ID NO: 4287858 - DNA, 25 bp, Homo sapien
agcagccgcaccctttggtctagag

SEQ ID NO: 4287859 - DNA, 25 bp, Homo sapien
gcttttgggaatgaggacttcgaga

SEQ ID NO: 4287860 - DNA, 25 bp, Homo sapien
atgctggcctctgggatgttccgcg

SEQ ID NO: 4287861 - DNA, 25 bp, Homo sapien
tggcctctgggatgttccgcgtcct

SEQ ID NO: 4287862 - DNA, 25 bp, Homo sapien
cctctgggatgttccgcgtcctagc

SEQ ID NO: 4287863 - DNA, 25 bp, Homo sapien
gcgtcctagctccgcacagctgggt

SEQ ID NO: 4287864 - DNA, 25 bp, Homo sapien
acaacgttggcccccagcggtgcgg

SEQ ID NO: 4287865 - DNA, 25 bp, Homo sapien
agcggtgcggcggatgttctgcagc

SEQ ID NO: 4287866 - DNA, 25 bp, Homo sapien
cggactcctcggtccgacaacgttg

SEQ ID NO: 4287867 - DNA, 25 bp, Homo sapien
gcggatgttctgcagccgtcgcgtc

SEQ ID NO: 4287868 - DNA, 25 bp, Homo sapien
tgcggcacgccacggcgttctaagg

SEQ ID NO: 4287869 - DNA, 25 bp, Homo sapien
cacagcttaggtcccgcctcgattt

SEQ ID NO: 4287870 - DNA, 25 bp, Homo sapien
cgcccctggtttgcgcgtcacaaca

SEQ ID NO: 4287871 - DNA, 25 bp, Homo sapien
ggcgccgactcagtctctaccctgg

SEQ ID NO: 4287872 - DNA, 25 bp, Homo sapien
gacaagtctagcttcggttcccgcc

SEQ ID NO: 4287873 - DNA, 25 bp, Homo sapien
cctggacattttaggcgctcagtaa

SEQ ID NO: 4287874 - DNA, 25 bp, Homo sapien
aagcagccgcccttagactgacgtc

SEQ ID NO: 4287875 - DNA, 25 bp, Homo sapien
tcagatctggtgagagtgacaagcc

SEQ ID NO: 4287876 - DNA, 25 bp, Homo sapien
caatatgtgcaactcagtgtgtggc

SEQ ID NO: 4287877 - DNA, 25 bp, Homo sapien
tatttgctggactggtgcctctcag

SEQ ID NO: 4287878 - DNA, 25 bp, Homo sapien
gtccacataaaacgcttagcacggg

SEQ ID NO: 4287879 - DNA, 25 bp, Homo sapien
caaactcagtaggagtgcaagggct

SEQ ID NO: 4287880 - DNA, 25 bp, Homo sapien
gggccccactggtcacgttcaggat

SEQ ID NO: 4287881 - DNA, 25 bp, Homo sapien
cagccagggtagcatcgacatttga

SEQ ID NO: 4287882 - DNA, 25 bp, Homo sapien
tgaagggccccagtgtagtgtccat

SEQ ID NO: 4287883 - DNA, 25 bp, Homo sapien
ggcccaccaccaggcgtgagctgga

SEQ ID NO: 4287884 - DNA, 25 bp, Homo sapien
atactccttgatggcctgacatgat

SEQ ID NO: 4287885 - DNA, 25 bp, Homo sapien
tactccttgatggcctgacatgatt

SEQ ID NO: 4287886 - DNA, 25 bp, Homo sapien
actccttgatggcctgacatgattc

SEQ ID NO: 4287887 - DNA, 25 bp, Homo sapien
agggcactgaggcactcacctgctg

SEQ ID NO: 4287888 - DNA, 25 bp, Homo sapien
gaggcactcacctgctggtcagcca

SEQ ID NO: 4287889 - DNA, 25 bp, Homo sapien
tggccatgtatggacccacccaggg

SEQ ID NO: 4287890 - DNA, 25 bp, Homo sapien
catgtatggacccacccagggcact

SEQ ID NO: 4287891 - DNA, 25 bp, Homo sapien
ccccctgggccgcactctcccccag

SEQ ID NO: 4287892 - DNA, 25 bp, Homo sapien
ccctgggccgcactctcccccaggc

SEQ ID NO: 4287893 - DNA, 25 bp, Homo sapien
cagctgccccctgggccgcactctc

SEQ ID NO: 4287894 - DNA, 25 bp, Homo sapien
gctgccccctgggccgcactctccc

SEQ ID NO: 4287895 - DNA, 25 bp, Homo sapien
acacggaatgcctcggccacacggt

SEQ ID NO: 4287896 - DNA, 25 bp, Homo sapien
cggccacacggtgttgcacatacat

SEQ ID NO: 4287897 - DNA, 25 bp, Homo sapien
gaaagtggtttgtcgtgtcatagaa

SEQ ID NO: 4287898 - DNA, 25 bp, Homo sapien
acatagggcagcaccggcagattgg

SEQ ID NO: 4287899 - DNA, 25 bp, Homo sapien
ctgtgacttccctgtgccctccagc

SEQ ID NO: 4287900 - DNA, 25 bp, Homo sapien
tgtgacttccctgtgccctccagca

SEQ ID NO: 4287901 - DNA, 25 bp, Homo sapien
tgctgggatagagggcacggctctg

SEQ ID NO: 4287902 - DNA, 25 bp, Homo sapien
ttttgggcacggatgcctgatgggc

SEQ ID NO: 4287903 - DNA, 25 bp, Homo sapien
tggggcttagaaagtcatagttgta

SEQ ID NO: 4287904 - DNA, 25 bp, Homo sapien
acagccaccctagctggtcattttg

SEQ ID NO: 4287905 - DNA, 25 bp, Homo sapien
cagaggccgcgaggacgcagtgccc

SEQ ID NO: 4287906 - DNA, 25 bp, Homo sapien
aagccccagaggccgcgaggacgca

SEQ ID NO: 4287907 - DNA, 25 bp, Homo sapien
cccagaggccgcgaggacgcagtgc

SEQ ID NO: 4287908 - DNA, 25 bp, Homo sapien
gccccagaggccgcgaggacgcagt

SEQ ID NO: 4287909 - DNA, 25 bp, Homo sapien
tgagcgctgccggtaaatgtccttg

SEQ ID NO: 4287910 - DNA, 25 bp, Homo sapien
atgcctcccagtcgatgactgccag

SEQ ID NO: 4287911 - DNA, 25 bp, Homo sapien
ttggtgtcccagttgaaggcccagc

SEQ ID NO: 4287912 - DNA, 25 bp, Homo sapien
aagtcaggagcaggtatggcagcca

SEQ ID NO: 4287913 - DNA, 25 bp, Homo sapien
gcaccactgggtgtttgcattccag

SEQ ID NO: 4287914 - DNA, 25 bp, Homo sapien
gaaaattgtcatgtcagggccgcgg

SEQ ID NO: 4287915 - DNA, 25 bp, Homo sapien
ttgggccatatcgagtaaggtcagg

SEQ ID NO: 4287916 - DNA, 25 bp, Homo sapien
ggttggctaccacatcgaagacact

SEQ ID NO: 4287917 - DNA, 25 bp, Homo sapien
tctgttaaacattgacctgcagggc

SEQ ID NO: 4287918 - DNA, 25 bp, Homo sapien
actggaggaagatccaatggcctca

SEQ ID NO: 4287919 - DNA, 25 bp, Homo sapien
tgagcccttgcgcattaatccaccg

SEQ ID NO: 4287920 - DNA, 25 bp, Homo sapien
aacaggttgcaaagtctccgattcc

SEQ ID NO: 4287921 - DNA, 25 bp, Homo sapien
ggcctggccagattccaccccagct

SEQ ID NO: 4287922 - DNA, 25 bp, Homo sapien
gggctgaagggccttatcctccaaa

SEQ ID NO: 4287923 - DNA, 25 bp, Homo sapien
gctgcaccagagactcctggaggaa

SEQ ID NO: 4287924 - DNA, 25 bp, Homo sapien
gggccttatcctccaaatttcctga

SEQ ID NO: 4287925 - DNA, 25 bp, Homo sapien
gctgggcaggcctgtttgtgacact

SEQ ID NO: 4287926 - DNA, 25 bp, Homo sapien
gccctaggcactttactttcgtgga

SEQ ID NO: 4287927 - DNA, 25 bp, Homo sapien
cgtgtcttgtgctcagggagtgttc

SEQ ID NO: 4287928 - DNA, 25 bp, Homo sapien
tgcatctgacattgatgggccctag

SEQ ID NO: 4287929 - DNA, 25 bp, Homo sapien
actggcttgggattctgccttgcaa

SEQ ID NO: 4287930 - DNA, 25 bp, Homo sapien
actcagaaatcatatactttgtgtg

SEQ ID NO: 4287931 - DNA, 25 bp, Homo sapien
gttaacttctgcttacacttacagc

SEQ ID NO: 4287932 - DNA, 25 bp, Homo sapien
gactaaagttagcatttaacaacca

SEQ ID NO: 4287933 - DNA, 25 bp, Homo sapien
cgtgagccaccgtgcctggccaaca

SEQ ID NO: 4287934 - DNA, 25 bp, Homo sapien
gcgattctcctcccctagcctcccg

SEQ ID NO: 4287935 - DNA, 25 bp, Homo sapien
tcaggatggtcttgaactcctgacc

SEQ ID NO: 4287936 - DNA, 25 bp, Homo sapien
cagagtttcagcatgttggtcagga

SEQ ID NO: 4287937 - DNA, 25 bp, Homo sapien
aagaatgtcactttctggggccagg

SEQ ID NO: 4287938 - DNA, 25 bp, Homo sapien
gtaaagaatgtcactttctggggcc

SEQ ID NO: 4287939 - DNA, 25 bp, Homo sapien
aatgtcactttctggggccaggagt

SEQ ID NO: 4287940 - DNA, 25 bp, Homo sapien
gaatgtcactttctggggccaggag

SEQ ID NO: 4287941 - DNA, 25 bp, Homo sapien
gcggccagggagagacgctcctcac

SEQ ID NO: 4287942 - DNA, 25 bp, Homo sapien
ggcggccagggagagacgctcctca

SEQ ID NO: 4287943 - DNA, 25 bp, Homo sapien
gggcggccagggagagacgctcctc

SEQ ID NO: 4287944 - DNA, 25 bp, Homo sapien
cggacggggcgacagggcagaggcg

SEQ ID NO: 4287945 - DNA, 25 bp, Homo sapien
gagctttccggacctacttatctag

SEQ ID NO: 4287946 - DNA, 25 bp, Homo sapien
cttcacactgcatgagactttacaa

SEQ ID NO: 4287947 - DNA, 25 bp, Homo sapien
ttatctagcaatgagagatcagatg

SEQ ID NO: 4287948 - DNA, 25 bp, Homo sapien
cattctattcaagtcatccttttgc

SEQ ID NO: 4287949 - DNA, 25 bp, Homo sapien
tccttcactgtgtgaatttaccacg

SEQ ID NO: 4287950 - DNA, 25 bp, Homo sapien
gcacccggcccatcattttattgac

SEQ ID NO: 4287951 - DNA, 25 bp, Homo sapien
cacttgtatgtgcacctcctccttc

SEQ ID NO: 4287952 - DNA, 25 bp, Homo sapien
tggccatgagcacctgggacccctc

SEQ ID NO: 4287953 - DNA, 25 bp, Homo sapien
tcaccttttagaacccaatgtggga

SEQ ID NO: 4287954 - DNA, 25 bp, Homo sapien
tgtgggaagcatctccaagggcacc

SEQ ID NO: 4287955 - DNA, 25 bp, Homo sapien
cagtattaggtgaagtcaggcctgg

SEQ ID NO: 4287956 - DNA, 25 bp, Homo sapien
cccatctggcatctcggtctttgca

SEQ ID NO: 4287957 - DNA, 25 bp, Homo sapien
agtcatcacggacatgggcgggacc

SEQ ID NO: 4287958 - DNA, 25 bp, Homo sapien
tgcgtggtgagtcatcacggacatg

SEQ ID NO: 4287959 - DNA, 25 bp, Homo sapien
ctgaagcagggctgcgtggtgagtc

SEQ ID NO: 4287960 - DNA, 25 bp, Homo sapien
cactcaacggcttcttgagtctgtc

SEQ ID NO: 4287961 - DNA, 25 bp, Homo sapien
aggcagaatgcactcccgtcagagg

SEQ ID NO: 4287962 - DNA, 25 bp, Homo sapien
tcccgtcagaggcagggctagtgaa

SEQ ID NO: 4287963 - DNA, 25 bp, Homo sapien
gaatgcactcccgtcagaggcaggg

SEQ ID NO: 4287964 - DNA, 25 bp, Homo sapien
gggagaggcagaatgcactcccgtc

SEQ ID NO: 4287965 - DNA, 25 bp, Homo sapien
ccctgatgagaggtgtatgtggctg

SEQ ID NO: 4287966 - DNA, 25 bp, Homo sapien
cctgatgagaggtgtatgtggctgg

SEQ ID NO: 4287967 - DNA, 25 bp, Homo sapien
tgaccctgatgagaggtgtatgtgg

SEQ ID NO: 4287968 - DNA, 25 bp, Homo sapien
taataaactatctagggcaagggag

SEQ ID NO: 4287969 - DNA, 25 bp, Homo sapien
ttgctaggcagctaggcaggagacc

SEQ ID NO: 4287970 - DNA, 25 bp, Homo sapien
tacatgcctaagagagcccttgtgg

SEQ ID NO: 4287971 - DNA, 25 bp, Homo sapien
ggcaagggagtagggtcaggtcctc

SEQ ID NO: 4287972 - DNA, 25 bp, Homo sapien
cagcagactggtgaggtgggaccca

SEQ ID NO: 4287973 - DNA, 25 bp, Homo sapien
ggcccaggacacattgaccacgtag

SEQ ID NO: 4287974 - DNA, 25 bp, Homo sapien
taatctttgaggtactggcaggtct

SEQ ID NO: 4287975 - DNA, 25 bp, Homo sapien
cactgggcccggctgcaatattggg

SEQ ID NO: 4287976 - DNA, 25 bp, Homo sapien
tctgcaggtggtcaatgtcggccca

SEQ ID NO: 4287977 - DNA, 25 bp, Homo sapien
caggcccagatggaaactgtgtcca

SEQ ID NO: 4287978 - DNA, 25 bp, Homo sapien
tgtcccatagactgagctctggcag

SEQ ID NO: 4287979 - DNA, 25 bp, Homo sapien
cagactaggattgcccacctgaggt

SEQ ID NO: 4287980 - DNA, 25 bp, Homo sapien
ggaagggcggaactcaacagctgtt

SEQ ID NO: 4287981 - DNA, 25 bp, Homo sapien
tgcttgtggtgtaccccgcgtcacc

SEQ ID NO: 4287982 - DNA, 25 bp, Homo sapien
cgtgcttgtggtgtaccccgcgtca

SEQ ID NO: 4287983 - DNA, 25 bp, Homo sapien
cagggccgcactctcgccaatggta

SEQ ID NO: 4287984 - DNA, 25 bp, Homo sapien
ctctcgccaatggtagagatgaggt

SEQ ID NO: 4287985 - DNA, 25 bp, Homo sapien
ccatttcacgtccaggcagaggctc

SEQ ID NO: 4287986 - DNA, 25 bp, Homo sapien
gaccccagcctgattcaacctgctg

SEQ ID NO: 4287987 - DNA, 25 bp, Homo sapien
agaccccagcctgattcaacctgct

SEQ ID NO: 4287988 - DNA, 25 bp, Homo sapien
agctcaacccccatttcacgtccag

SEQ ID NO: 4287989 - DNA, 25 bp, Homo sapien
ttgagcctaggtgcagctatcagga

SEQ ID NO: 4287990 - DNA, 25 bp, Homo sapien
tagtggcccctgataacccaaatgt

SEQ ID NO: 4287991 - DNA, 25 bp, Homo sapien
gattccaaagttagaaggcctgggc

SEQ ID NO: 4287992 - DNA, 25 bp, Homo sapien
ggagcagccaataaactacaggtat

SEQ ID NO: 4287993 - DNA, 25 bp, Homo sapien
gaagcaagtgtctcgtccaggtaga

SEQ ID NO: 4287994 - DNA, 25 bp, Homo sapien
tggcatggtgggtgcgagccacacg

SEQ ID NO: 4287995 - DNA, 25 bp, Homo sapien
gccccgtgagcctgcggctgtaggt

SEQ ID NO: 4287996 - DNA, 25 bp, Homo sapien
agctcacaaagttgcggccatggcg

SEQ ID NO: 4287997 - DNA, 25 bp, Homo sapien
gctgtgctgcgaactcaaactcata

SEQ ID NO: 4287998 - DNA, 25 bp, Homo sapien
gaatcgaagcgtggatacaggccta

SEQ ID NO: 4287999 - DNA, 25 bp, Homo sapien
tcaaaggcattcaggtccagtggca

SEQ ID NO: 4288000 - DNA, 25 bp, Homo sapien
cactagctggcgtgataaccggcga

SEQ ID NO: 4288001 - DNA, 25 bp, Homo sapien
gccaatgtaacggtggggcctgggc

SEQ ID NO: 4288002 - DNA, 25 bp, Homo sapien
cagcaccagggccaatgtaacggtg

SEQ ID NO: 4288003 - DNA, 25 bp, Homo sapien
agcaccagggccaatgtaacggtgg

SEQ ID NO: 4288004 - DNA, 25 bp, Homo sapien
cagggccaatgtaacggtggggcct

SEQ ID NO: 4288005 - DNA, 25 bp, Homo sapien
ggaggtgtcacctgcctggcaccag

SEQ ID NO: 4288006 - DNA, 25 bp, Homo sapien
tcacctgcctggcaccagctcagga

SEQ ID NO: 4288007 - DNA, 25 bp, Homo sapien
cacctgcctggcaccagctcaggaa

SEQ ID NO: 4288008 - DNA, 25 bp, Homo sapien
ctgcaggaggtgtcacctgcctggc

SEQ ID NO: 4288009 - DNA, 25 bp, Homo sapien
tggctcggcacaaatctctattagg

SEQ ID NO: 4288010 - DNA, 25 bp, Homo sapien
ggtctgtgacccttctaagaactag

SEQ ID NO: 4288011 - DNA, 25 bp, Homo sapien
gggcactgtgctcatggctgtaata

SEQ ID NO: 4288012 - DNA, 25 bp, Homo sapien
tagggaatactggaagtgcccacct

SEQ ID NO: 4288013 - DNA, 25 bp, Homo sapien
cataccatccagtacatggtttcag

SEQ ID NO: 4288014 - DNA, 25 bp, Homo sapien
cagagtcacatatatgcctgcatac

SEQ ID NO: 4288015 - DNA, 25 bp, Homo sapien
tatatgcctgcataccatccagtac

SEQ ID NO: 4288016 - DNA, 25 bp, Homo sapien
tggtttcagagaaccctgaacagct

SEQ ID NO: 4288017 - DNA, 25 bp, Homo sapien
cagcatttgggtaaagcagggaaca

SEQ ID NO: 4288018 - DNA, 25 bp, Homo sapien
cagggaacagctcgtcaagaggcta

SEQ ID NO: 4288019 - DNA, 25 bp, Homo sapien
gaagaacccttgatccagagaaacg

SEQ ID NO: 4288020 - DNA, 25 bp, Homo sapien
caagaggctacgaaactggaaggaa

SEQ ID NO: 4288021 - DNA, 25 bp, Homo sapien
gccgctcagggctagagcgcgctcc

SEQ ID NO: 4288022 - DNA, 25 bp, Homo sapien
cgctccgccgggtctttgtgcggga

SEQ ID NO: 4288023 - DNA, 25 bp, Homo sapien
gggtttctgggacgcctctccgcga

SEQ ID NO: 4288024 - DNA, 25 bp, Homo sapien
agagagccgccaggtttgcaccgcc

SEQ ID NO: 4288025 - DNA, 25 bp, Homo sapien
gccaccgggaccggcgccagggcca

SEQ ID NO: 4288026 - DNA, 25 bp, Homo sapien
ctcgcgcggggcgccaccgggaccg

SEQ ID NO: 4288027 - DNA, 25 bp, Homo sapien
ggaccggcgccagggccaccgccat

SEQ ID NO: 4288028 - DNA, 25 bp, Homo sapien
gcgccaccgggaccggcgccagggc

SEQ ID NO: 4288029 - DNA, 25 bp, Homo sapien
ctttaagactccagtgcggaggtgg

SEQ ID NO: 4288030 - DNA, 25 bp, Homo sapien
ccctttaagactccagtgcggaggt

SEQ ID NO: 4288031 - DNA, 25 bp, Homo sapien
cgctccggccgttcgcccaggcgcg

SEQ ID NO: 4288032 - DNA, 25 bp, Homo sapien
tgggcccgggattggacttgcggac

SEQ ID NO: 4288033 - DNA, 25 bp, Homo sapien
gaggccggtggttcagtcctcccag

SEQ ID NO: 4288034 - DNA, 25 bp, Homo sapien
tggccgcccatttaggaccctaatg

SEQ ID NO: 4288035 - DNA, 25 bp, Homo sapien
ttctatgggagtctcagccacgagc

SEQ ID NO: 4288036 - DNA, 25 bp, Homo sapien
ttctcggtgccggtgcctcgtttcg

SEQ ID NO: 4288037 - DNA, 25 bp, Homo sapien
tctggtccgccgtctaaagggaggc

SEQ ID NO: 4288038 - DNA, 25 bp, Homo sapien
tgcgagactcaactcccaaaagggc

SEQ ID NO: 4288039 - DNA, 25 bp, Homo sapien
ggactttgacctgaggcgacctctg

SEQ ID NO: 4288040 - DNA, 25 bp, Homo sapien
gcagtttctggctggacctccgaga

SEQ ID NO: 4288041 - DNA, 25 bp, Homo sapien
ctgtgtgggagtccgtcggcccagt

SEQ ID NO: 4288042 - DNA, 25 bp, Homo sapien
gggcagctcgccgaggacttgataa

SEQ ID NO: 4288043 - DNA, 25 bp, Homo sapien
tccgtcggcccagtaggtcggtggc

SEQ ID NO: 4288044 - DNA, 25 bp, Homo sapien
cttgataaaccccattccctcccat

SEQ ID NO: 4288045 - DNA, 25 bp, Homo sapien
tgttgtcccttaccacaaggtggtg

SEQ ID NO: 4288046 - DNA, 25 bp, Homo sapien
gactctgccacgacatcatcatgga

SEQ ID NO: 4288047 - DNA, 25 bp, Homo sapien
gtgaacagtcccctcccaattggag

SEQ ID NO: 4288048 - DNA, 25 bp, Homo sapien
taactactggcaccagccttagggt

SEQ ID NO: 4288049 - DNA, 25 bp, Homo sapien
tcaatagccagcaaactgtccatcc

SEQ ID NO: 4288050 - DNA, 25 bp, Homo sapien
caatagccagcaaactgtccatcca

SEQ ID NO: 4288051 - DNA, 25 bp, Homo sapien
aatagccagcaaactgtccatccat

SEQ ID NO: 4288052 - DNA, 25 bp, Homo sapien
ccaacacaggaggaatcgaggtagc

SEQ ID NO: 4288053 - DNA, 25 bp, Homo sapien
ggctaggccccaggcaaacttggaa

SEQ ID NO: 4288054 - DNA, 25 bp, Homo sapien
caaatggcaggtaggtcggaagaat

SEQ ID NO: 4288055 - DNA, 25 bp, Homo sapien
taaagtgctgtagcctctagcaggg

SEQ ID NO: 4288056 - DNA, 25 bp, Homo sapien
aatggaagccacaccttgattgagc

SEQ ID NO: 4288057 - DNA, 25 bp, Homo sapien
tttattcagggttgtggccccagcc

SEQ ID NO: 4288058 - DNA, 25 bp, Homo sapien
agcctgggagtttcttgccggggca

SEQ ID NO: 4288059 - DNA, 25 bp, Homo sapien
cagcctgggctcctcaatggaagcc

SEQ ID NO: 4288060 - DNA, 25 bp, Homo sapien
atgcgggggtgatccagcttcacga

SEQ ID NO: 4288061 - DNA, 25 bp, Homo sapien
tggatgcgggggtgatccagcttca

SEQ ID NO: 4288062 - DNA, 25 bp, Homo sapien
gggggtgatccagcttcacgatgcc

SEQ ID NO: 4288063 - DNA, 25 bp, Homo sapien
acagggaaatccacgtggatgcggg

SEQ ID NO: 4288064 - DNA, 25 bp, Homo sapien
ttcaggaagcttccttgttcctccc

SEQ ID NO: 4288065 - DNA, 25 bp, Homo sapien
cagaggctagtaagggtcagctcag

SEQ ID NO: 4288066 - DNA, 25 bp, Homo sapien
cacctccacacgcttagtgtaggct

SEQ ID NO: 4288067 - DNA, 25 bp, Homo sapien
cttagtgtaggctctgtgaccgctg

SEQ ID NO: 4288068 - DNA, 25 bp, Homo sapien
aggaatcagattcttatgcactcgc

SEQ ID NO: 4288069 - DNA, 25 bp, Homo sapien
ctgaggaatcagattcttatgcact

SEQ ID NO: 4288070 - DNA, 25 bp, Homo sapien
tgaggaatcagattcttatgcactc

SEQ ID NO: 4288071 - DNA, 25 bp, Homo sapien
gaggaatcagattcttatgcactcg

SEQ ID NO: 4288072 - DNA, 25 bp, Homo sapien
ttggcccgcttctgcccgttcttgg

SEQ ID NO: 4288073 - DNA, 25 bp, Homo sapien
cccgttcttggtgacgattgtctcc

SEQ ID NO: 4288074 - DNA, 25 bp, Homo sapien
catagaactcgtgagccagatcccc

SEQ ID NO: 4288075 - DNA, 25 bp, Homo sapien
gattgtctcctcatagaactcgtga

SEQ ID NO: 4288076 - DNA, 25 bp, Homo sapien
ctggcccagtgtcaaagactgaaat

SEQ ID NO: 4288077 - DNA, 25 bp, Homo sapien
atccaggcagccaccaaggccagtt

SEQ ID NO: 4288078 - DNA, 25 bp, Homo sapien
tgttggtctcactccagaagatgct

SEQ ID NO: 4288079 - DNA, 25 bp, Homo sapien
gcaagggcagccattctaatatcag

SEQ ID NO: 4288080 - DNA, 25 bp, Homo sapien
tccctagggagactttcagagtggc

SEQ ID NO: 4288081 - DNA, 25 bp, Homo sapien
ggaaggtccgaccagtgacaagcct

SEQ ID NO: 4288082 - DNA, 25 bp, Homo sapien
tcttatggaggtcttatggaggccc

SEQ ID NO: 4288083 - DNA, 25 bp, Homo sapien
tagcttagctttaccgtgcggaagg

SEQ ID NO: 4288084 - DNA, 25 bp, Homo sapien
cggcgcgtgaatacgaaggggggca

SEQ ID NO: 4288085 - DNA, 25 bp, Homo sapien
gcgcgtgaatacgaaggggggcaca

SEQ ID NO: 4288086 - DNA, 25 bp, Homo sapien
ccgcggcgcgtgaatacgaaggggg

SEQ ID NO: 4288087 - DNA, 25 bp, Homo sapien
cgtgaatacgaaggggggcacagct

SEQ ID NO: 4288088 - DNA, 25 bp, Homo sapien
aggccgcaccaaagcttgctcagct

SEQ ID NO: 4288089 - DNA, 25 bp, Homo sapien
cgaggccgcaccaaagcttgctcag

SEQ ID NO: 4288090 - DNA, 25 bp, Homo sapien
ctcctgctgcctctgagccgccgcc

SEQ ID NO: 4288091 - DNA, 25 bp, Homo sapien
cctgctgcctctgagccgccgcctc

SEQ ID NO: 4288092 - DNA, 25 bp, Homo sapien
aagggccacaggccccgagctttgg

SEQ ID NO: 4288093 - DNA, 25 bp, Homo sapien
cgaggcgaagggccacaggccccga

SEQ ID NO: 4288094 - DNA, 25 bp, Homo sapien
gggccacaggccccgagctttggac

SEQ ID NO: 4288095 - DNA, 25 bp, Homo sapien
ccacaggccccgagctttggacccg

SEQ ID NO: 4288096 - DNA, 25 bp, Homo sapien
gcatggcgggccccgtggccgctct

SEQ ID NO: 4288097 - DNA, 25 bp, Homo sapien
gtcagggccgccggcgcatggcggg

SEQ ID NO: 4288098 - DNA, 25 bp, Homo sapien
ggcgcatggcgggccccgtggccgc

SEQ ID NO: 4288099 - DNA, 25 bp, Homo sapien
gcgggccccgtggccgctctgctca

SEQ ID NO: 4288100 - DNA, 25 bp, Homo sapien
tgccccagccgctgatcgcaggtgc

SEQ ID NO: 4288101 - DNA, 25 bp, Homo sapien
tgtctccacggaaacctcacttccg

SEQ ID NO: 4288102 - DNA, 25 bp, Homo sapien
gcagtccgcactaccataacctgcc

SEQ ID NO: 4288103 - DNA, 25 bp, Homo sapien
gccgccttccgcaggctcggctgtc

SEQ ID NO: 4288104 - DNA, 25 bp, Homo sapien
cagggagcaagctacttcgctgttc

SEQ ID NO: 4288105 - DNA, 25 bp, Homo sapien
ggatatcctgagaccacattcaaga

SEQ ID NO: 4288106 - DNA, 25 bp, Homo sapien
cagggacatcctcctcatatgaagc

SEQ ID NO: 4288107 - DNA, 25 bp, Homo sapien
tattgagccaattctctcaggcccc

SEQ ID NO: 4288108 - DNA, 25 bp, Homo sapien
gttcaggcatgctgaaggcgtccca

SEQ ID NO: 4288109 - DNA, 25 bp, Homo sapien
cgctgcaggatacgtaggaagttat

SEQ ID NO: 4288110 - DNA, 25 bp, Homo sapien
cagggcctcttggatcttctggcgg

SEQ ID NO: 4288111 - DNA, 25 bp, Homo sapien
tctggcggcaataggagtacttctg

SEQ ID NO: 4288112 - DNA, 25 bp, Homo sapien
gccgcaggggctgctcatcatccaa

SEQ ID NO: 4288113 - DNA, 25 bp, Homo sapien
gctcagggccttgtcactgggccct

SEQ ID NO: 4288114 - DNA, 25 bp, Homo sapien
ggacaaagctcagggccttgtcact

SEQ ID NO: 4288115 - DNA, 25 bp, Homo sapien
ggggctgctcatcatccaacagctt

SEQ ID NO: 4288116 - DNA, 25 bp, Homo sapien
ttggccgtgacgctcagcgcgctca

SEQ ID NO: 4288117 - DNA, 25 bp, Homo sapien
gctcagcgcgctcaaagagtgcaaa

SEQ ID NO: 4288118 - DNA, 25 bp, Homo sapien
agaactttcgcagcagggcctcaat

SEQ ID NO: 4288119 - DNA, 25 bp, Homo sapien
ttgcgggggtcatccaccaccaaga

SEQ ID NO: 4288120 - DNA, 25 bp, Homo sapien
cccttgtgcgtgacagcacatgcag

SEQ ID NO: 4288121 - DNA, 25 bp, Homo sapien
tgtgcgtgacagcacatgcaggtgc

SEQ ID NO: 4288122 - DNA, 25 bp, Homo sapien
ttgtgcgtgacagcacatgcaggtg

SEQ ID NO: 4288123 - DNA, 25 bp, Homo sapien
tcacgtgcccttgtgcgtgacagca

SEQ ID NO: 4288124 - DNA, 25 bp, Homo sapien
gccccgccgggcatcctgcaaggag

SEQ ID NO: 4288125 - DNA, 25 bp, Homo sapien
agtgcggcgcctgacacttgtgccc

SEQ ID NO: 4288126 - DNA, 25 bp, Homo sapien
tgcaaggagggtggcttcttgctgg

SEQ ID NO: 4288127 - DNA, 25 bp, Homo sapien
aagtgcggcgcctgacacttgtgcc

SEQ ID NO: 4288128 - DNA, 25 bp, Homo sapien
gaagcctgtgtaagaaccgtccttg

SEQ ID NO: 4288129 - DNA, 25 bp, Homo sapien
agcctgtgtaagaaccgtccttgtt

SEQ ID NO: 4288130 - DNA, 25 bp, Homo sapien
ttgatgaagcctgtgtaagaaccgt

SEQ ID NO: 4288131 - DNA, 25 bp, Homo sapien
gatgaagcctgtgtaagaaccgtcc

SEQ ID NO: 4288132 - DNA, 25 bp, Homo sapien
ttgctgttgatctgggcattgtact

SEQ ID NO: 4288133 - DNA, 25 bp, Homo sapien
gctgttgatctgggcattgtactcc

SEQ ID NO: 4288134 - DNA, 25 bp, Homo sapien
ctgttgatctgggcattgtactcct

SEQ ID NO: 4288135 - DNA, 25 bp, Homo sapien
tgctgttgatctgggcattgtactc

SEQ ID NO: 4288136 - DNA, 25 bp, Homo sapien
tcaggtgtctcccactccacaggct

SEQ ID NO: 4288137 - DNA, 25 bp, Homo sapien
aggtgtctcccactccacaggctcg

SEQ ID NO: 4288138 - DNA, 25 bp, Homo sapien
ggtgtctcccactccacaggctcgt

SEQ ID NO: 4288139 - DNA, 25 bp, Homo sapien
gtgtctcccactccacaggctcgtc

SEQ ID NO: 4288140 - DNA, 25 bp, Homo sapien
gaggaacccagggcttctctgaaaa

SEQ ID NO: 4288141 - DNA, 25 bp, Homo sapien
gaacccagggcttctctgaaaaatg

SEQ ID NO: 4288142 - DNA, 25 bp, Homo sapien
cccagggcttctctgaaaaatggcc

SEQ ID NO: 4288143 - DNA, 25 bp, Homo sapien
cttgaggaacccagggcttctctga

SEQ ID NO: 4288144 - DNA, 25 bp, Homo sapien
ccttaaggataccacagaagcaggg

SEQ ID NO: 4288145 - DNA, 25 bp, Homo sapien
tcagcactgaatgtagccttaagga

SEQ ID NO: 4288146 - DNA, 25 bp, Homo sapien
gagggactctgaagagggactctca

SEQ ID NO: 4288147 - DNA, 25 bp, Homo sapien
tacatatacatagctggtgcccacc

SEQ ID NO: 4288148 - DNA, 25 bp, Homo sapien
tgagcccgggagattgcagctacag

SEQ ID NO: 4288149 - DNA, 25 bp, Homo sapien
gcccgggagattgcagctacagtaa

SEQ ID NO: 4288150 - DNA, 25 bp, Homo sapien
ttgagcccgggagattgcagctaca

SEQ ID NO: 4288151 - DNA, 25 bp, Homo sapien
gggagattgcagctacagtaagcta

SEQ ID NO: 4288152 - DNA, 25 bp, Homo sapien
cacagcaccctagttgagttggagt

SEQ ID NO: 4288153 - DNA, 25 bp, Homo sapien
tgacccactgcagggtgagaggagt

SEQ ID NO: 4288154 - DNA, 25 bp, Homo sapien
gtagtccagccaccagtggacagag

SEQ ID NO: 4288155 - DNA, 25 bp, Homo sapien
aattgcacattctgatcacagcacc

SEQ ID NO: 4288156 - DNA, 25 bp, Homo sapien
gttgaagtgattcagtctcccaagt

SEQ ID NO: 4288157 - DNA, 25 bp, Homo sapien
cggttgaagtgattcagtctcccaa

SEQ ID NO: 4288158 - DNA, 25 bp, Homo sapien
ggttgaagtgattcagtctcccaag

SEQ ID NO: 4288159 - DNA, 25 bp, Homo sapien
gaatcttccacattccagcagctgg

SEQ ID NO: 4288160 - DNA, 25 bp, Homo sapien
taagattttggcgtgctgagcacca

SEQ ID NO: 4288161 - DNA, 25 bp, Homo sapien
gatacctaggaggttccgagacacc

SEQ ID NO: 4288162 - DNA, 25 bp, Homo sapien
tccagatccaccctagaggaaggga

SEQ ID NO: 4288163 - DNA, 25 bp, Homo sapien
gaaatcgaggtgctagtccaaactg

SEQ ID NO: 4288164 - DNA, 25 bp, Homo sapien
tcaattcctggcgaggactcttccc

SEQ ID NO: 4288165 - DNA, 25 bp, Homo sapien
ccctagtctccccaaggagggagca

SEQ ID NO: 4288166 - DNA, 25 bp, Homo sapien
gagcaggagcattcgaacgcggaaa

SEQ ID NO: 4288167 - DNA, 25 bp, Homo sapien
tcatagctggataatgcccggctca

SEQ ID NO: 4288168 - DNA, 25 bp, Homo sapien
ctggataatgcccggctcaggtcta

SEQ ID NO: 4288169 - DNA, 25 bp, Homo sapien
tagctggataatgcccggctcaggt

SEQ ID NO: 4288170 - DNA, 25 bp, Homo sapien
catagctggataatgcccggctcag

SEQ ID NO: 4288171 - DNA, 25 bp, Homo sapien
cacaagccatacagctgctttttcc

SEQ ID NO: 4288172 - DNA, 25 bp, Homo sapien
gctgctttttccgtgttcaacctgt

SEQ ID NO: 4288173 - DNA, 25 bp, Homo sapien
gccatacagctgctttttccgtgtt

SEQ ID NO: 4288174 - DNA, 25 bp, Homo sapien
tacagctgctttttccgtgttcaac

SEQ ID NO: 4288175 - DNA, 25 bp, Homo sapien
ccggcacccagcatctaggcggtgg

SEQ ID NO: 4288176 - DNA, 25 bp, Homo sapien
gcacccagcatctaggcggtggaat

SEQ ID NO: 4288177 - DNA, 25 bp, Homo sapien
acccagcatctaggcggtggaatcg

SEQ ID NO: 4288178 - DNA, 25 bp, Homo sapien
ggcacccagcatctaggcggtggaa

SEQ ID NO: 4288179 - DNA, 25 bp, Homo sapien
gacccgcggggagccacgtagccag

SEQ ID NO: 4288180 - DNA, 25 bp, Homo sapien
gcggggagccacgtagccaggaggg

SEQ ID NO: 4288181 - DNA, 25 bp, Homo sapien
gggagccacgtagccaggagggtgg

SEQ ID NO: 4288182 - DNA, 25 bp, Homo sapien
ccgcggggagccacgtagccaggag

SEQ ID NO: 4288183 - DNA, 25 bp, Homo sapien
agggcggagctccagcgaccgcttc

SEQ ID NO: 4288184 - DNA, 25 bp, Homo sapien
ggagggcggagctccagcgaccgct

SEQ ID NO: 4288185 - DNA, 25 bp, Homo sapien
ccaccgacccaggacgcggcaacgg

SEQ ID NO: 4288186 - DNA, 25 bp, Homo sapien
caggacgcggcaacggaccggggag

SEQ ID NO: 4288187 - DNA, 25 bp, Homo sapien
tactgctcgagctccgagtccgagt

SEQ ID NO: 4288188 - DNA, 25 bp, Homo sapien
gctgcagtagccactgctcgtcgtg

SEQ ID NO: 4288189 - DNA, 25 bp, Homo sapien
aggttcgcgcggtgaagtactgctc

SEQ ID NO: 4288190 - DNA, 25 bp, Homo sapien
gtcatttcgaaagaaggcgcctccg

SEQ ID NO: 4288191 - DNA, 25 bp, Homo sapien
tgcgtgtacgcgtgtcagtgtgcgc

SEQ ID NO: 4288192 - DNA, 25 bp, Homo sapien
gccccggtcgcgtgcgtgcgtgtac

SEQ ID NO: 4288193 - DNA, 25 bp, Homo sapien
agagccgcgccgcaaccgttaagac

SEQ ID NO: 4288194 - DNA, 25 bp, Homo sapien
ccgttaagactgaaacgtagatcgc

SEQ ID NO: 4288195 - DNA, 25 bp, Homo sapien
cagccctcgagaatgcctgcactgt

SEQ ID NO: 4288196 - DNA, 25 bp, Homo sapien
ctcgcccttcccatacgccctcggc

SEQ ID NO: 4288197 - DNA, 25 bp, Homo sapien
tgtggcctgcccatcctcgcccttc

SEQ ID NO: 4288198 - DNA, 25 bp, Homo sapien
ccttgcgcgcggcacccaggcagcc

SEQ ID NO: 4288199 - DNA, 25 bp, Homo sapien
gcccgcaacagtccaggcagacgag

SEQ ID NO: 4288200 - DNA, 25 bp, Homo sapien
cgcaacagtccaggcagacgagcgc

SEQ ID NO: 4288201 - DNA, 25 bp, Homo sapien
gggcccgcaacagtccaggcagacg

SEQ ID NO: 4288202 - DNA, 25 bp, Homo sapien
aacagtccaggcagacgagcgcgcg

SEQ ID NO: 4288203 - DNA, 25 bp, Homo sapien
cccggagattgaagggaagccccag

SEQ ID NO: 4288204 - DNA, 25 bp, Homo sapien
aggcccgacctatctcagtgggtta

SEQ ID NO: 4288205 - DNA, 25 bp, Homo sapien
cgcaggcccgacctatctcagtggg

SEQ ID NO: 4288206 - DNA, 25 bp, Homo sapien
gaaatgtcccggagattgaagggaa

SEQ ID NO: 4288207 - DNA, 25 bp, Homo sapien
aatgttggccacctgggcgtctgga

SEQ ID NO: 4288208 - DNA, 25 bp, Homo sapien
ggactctaatgttggccacctgggc

SEQ ID NO: 4288209 - DNA, 25 bp, Homo sapien
ctcacactgctacgcggactctaat

SEQ ID NO: 4288210 - DNA, 25 bp, Homo sapien
gctacgcggactctaatgttggcca

SEQ ID NO: 4288211 - DNA, 25 bp, Homo sapien
gcagctcaatgagctcaggctcccc

SEQ ID NO: 4288212 - DNA, 25 bp, Homo sapien
atgcgcagcgcgttggcacgctcca

SEQ ID NO: 4288213 - DNA, 25 bp, Homo sapien
ctttgcgcacgacgccccagatgaa

SEQ ID NO: 4288214 - DNA, 25 bp, Homo sapien
agatgaagtcgccacagaggtcgca

SEQ ID NO: 4288215 - DNA, 25 bp, Homo sapien
gccccgacttcagcgcctcccccag

SEQ ID NO: 4288216 - DNA, 25 bp, Homo sapien
cccgacttcagcgcctcccccagga

SEQ ID NO: 4288217 - DNA, 25 bp, Homo sapien
ggccacagggcgggccccgacttca

SEQ ID NO: 4288218 - DNA, 25 bp, Homo sapien
ccacagggcgggccccgacttcagc

SEQ ID NO: 4288219 - DNA, 25 bp, Homo sapien
ggagatacccgtgtttctggaggcc

SEQ ID NO: 4288220 - DNA, 25 bp, Homo sapien
ggcgaccgcaaagcaccacgcggag

SEQ ID NO: 4288221 - DNA, 25 bp, Homo sapien
ggccacaacgacggcgaccgcaaag

SEQ ID NO: 4288222 - DNA, 25 bp, Homo sapien
aagcaccacgcggagatacccgtgt

SEQ ID NO: 4288223 - DNA, 25 bp, Homo sapien
cacatccggccctggccctcctggt

SEQ ID NO: 4288224 - DNA, 25 bp, Homo sapien
aagagggtccccacatccggccctg

SEQ ID NO: 4288225 - DNA, 25 bp, Homo sapien
cccacatccggccctggccctcctg

SEQ ID NO: 4288226 - DNA, 25 bp, Homo sapien
agaggaagagggtccccacatccgg

SEQ ID NO: 4288227 - DNA, 25 bp, Homo sapien
gggcaggaagtctcgagccttcact

SEQ ID NO: 4288228 - DNA, 25 bp, Homo sapien
aacacacttggcctacccactgggt

SEQ ID NO: 4288229 - DNA, 25 bp, Homo sapien
gcattctgggtggattcccttggca

SEQ ID NO: 4288230 - DNA, 25 bp, Homo sapien
gatcggtcagcagctttaccgcccg

SEQ ID NO: 4288231 - DNA, 25 bp, Homo sapien
ttcccagtgcttgacttggcactcc

SEQ ID NO: 4288232 - DNA, 25 bp, Homo sapien
caggacacaagtctttccatgcttt

SEQ ID NO: 4288233 - DNA, 25 bp, Homo sapien
tttcccagtgcttgacttggcactc

SEQ ID NO: 4288234 - DNA, 25 bp, Homo sapien
gcttagaagcctctgcactgcagta

SEQ ID NO: 4288235 - DNA, 25 bp, Homo sapien
tggcatcgtgagcagcgcttagaag

SEQ ID NO: 4288236 - DNA, 25 bp, Homo sapien
cactgcagtaagcacagcggggccg

SEQ ID NO: 4288237 - DNA, 25 bp, Homo sapien
gagcagcgcttagaagcctctgcac

SEQ ID NO: 4288238 - DNA, 25 bp, Homo sapien
gctggtgcttggcaattgcctgcca

SEQ ID NO: 4288239 - DNA, 25 bp, Homo sapien
gctgaacacatgctggagctggtgc

SEQ ID NO: 4288240 - DNA, 25 bp, Homo sapien
tccagccgctcccagatttctggga

SEQ ID NO: 4288241 - DNA, 25 bp, Homo sapien
tgcctctgttttctcgctccagccg

SEQ ID NO: 4288242 - DNA, 25 bp, Homo sapien
aaactctgcaagtgggccaggttgg

SEQ ID NO: 4288243 - DNA, 25 bp, Homo sapien
cttcttaggaggctgggtttcagtt

SEQ ID NO: 4288244 - DNA, 25 bp, Homo sapien
ggtcagatgggccaggaaactctgc

SEQ ID NO: 4288245 - DNA, 25 bp, Homo sapien
tgggtttcagttagggtcagatggg

SEQ ID NO: 4288246 - DNA, 25 bp, Homo sapien
gcaagggtgtccagtggaggccagt

SEQ ID NO: 4288247 - DNA, 25 bp, Homo sapien
cagtggaggccagtgtgatgcaggt

SEQ ID NO: 4288248 - DNA, 25 bp, Homo sapien
ctgcaagggtgtccagtggaggcca

SEQ ID NO: 4288249 - DNA, 25 bp, Homo sapien
ggtgtccagtggaggccagtgtgat

SEQ ID NO: 4288250 - DNA, 25 bp, Homo sapien
tcccactagctggtgtgtcacctga

SEQ ID NO: 4288251 - DNA, 25 bp, Homo sapien
caaagataaacagcagggacgcagt

SEQ ID NO: 4288252 - DNA, 25 bp, Homo sapien
gctgggttgggctgagaatgcctgt

SEQ ID NO: 4288253 - DNA, 25 bp, Homo sapien
gaggcccaaggactgaaaagagcac

SEQ ID NO: 4288254 - DNA, 25 bp, Homo sapien
ttgagtagccgtcccttggcaaaac

SEQ ID NO: 4288255 - DNA, 25 bp, Homo sapien
agcaggttgtacagggcgatccaca

SEQ ID NO: 4288256 - DNA, 25 bp, Homo sapien
tgagcctcagggcttagcagcaggt

SEQ ID NO: 4288257 - DNA, 25 bp, Homo sapien
caaaacttgtgaggcagtagcgcgc

SEQ ID NO: 4288258 - DNA, 25 bp, Homo sapien
gagaggaaccagcacactgggtgca

SEQ ID NO: 4288259 - DNA, 25 bp, Homo sapien
attctcttcaagtgagccagctgtg

SEQ ID NO: 4288260 - DNA, 25 bp, Homo sapien
gggtgcagacgttgaattctcttca

SEQ ID NO: 4288261 - DNA, 25 bp, Homo sapien
tctcttcaagtgagccagctgtggg

SEQ ID NO: 4288262 - DNA, 25 bp, Homo sapien
cagggtgagcctcagtagtggacac

SEQ ID NO: 4288263 - DNA, 25 bp, Homo sapien
aaagataccctgaagcagtagcctg

SEQ ID NO: 4288264 - DNA, 25 bp, Homo sapien
ggcatcctggtatcctcagtgggct

SEQ ID NO: 4288265 - DNA, 25 bp, Homo sapien
ggccaaccttggctgaggcatcctg

SEQ ID NO: 4288266 - DNA, 25 bp, Homo sapien
cagggcaggttgtgtgtgctaagca

SEQ ID NO: 4288267 - DNA, 25 bp, Homo sapien
gtgtgtgctaagcatacggctcaag

SEQ ID NO: 4288268 - DNA, 25 bp, Homo sapien
catacggctcaaggtgctgagagag

SEQ ID NO: 4288269 - DNA, 25 bp, Homo sapien
gccggctccagggactatgctccag

SEQ ID NO: 4288270 - DNA, 25 bp, Homo sapien
gcaggctacaggcccggtcttccag

SEQ ID NO: 4288271 - DNA, 25 bp, Homo sapien
gggcagggacgttgtgaaggaggtg

SEQ ID NO: 4288272 - DNA, 25 bp, Homo sapien
cagccctccacagtaggcccaggcc

SEQ ID NO: 4288273 - DNA, 25 bp, Homo sapien
aggcccggtcttccagccctccaca

SEQ ID NO: 4288274 - DNA, 25 bp, Homo sapien
tagcgtagtactgagagggccttca

SEQ ID NO: 4288275 - DNA, 25 bp, Homo sapien
gcgtagtactgagagggccttcagt

SEQ ID NO: 4288276 - DNA, 25 bp, Homo sapien
ctgtgatgtagcgtagtactgagag

SEQ ID NO: 4288277 - DNA, 25 bp, Homo sapien
atgtagcgtagtactgagagggcct

SEQ ID NO: 4288278 - DNA, 25 bp, Homo sapien
tcacacagtgttcacgctgggccac

SEQ ID NO: 4288279 - DNA, 25 bp, Homo sapien
gtcacacagtgttcacgctgggcca

SEQ ID NO: 4288280 - DNA, 25 bp, Homo sapien
agtgttcacgctgggccaccctcac

SEQ ID NO: 4288281 - DNA, 25 bp, Homo sapien
ctgggaggtcacacagtgttcacgc

SEQ ID NO: 4288282 - DNA, 25 bp, Homo sapien
tggggaacccagacctaggctttca

SEQ ID NO: 4288283 - DNA, 25 bp, Homo sapien
cccagacctaggctttcacaaccct

SEQ ID NO: 4288284 - DNA, 25 bp, Homo sapien
agacctaggctttcacaaccctagg

SEQ ID NO: 4288285 - DNA, 25 bp, Homo sapien
cagacctaggctttcacaaccctag

SEQ ID NO: 4288286 - DNA, 25 bp, Homo sapien
gtcagtttgcggtggcaatagtcta

SEQ ID NO: 4288287 - DNA, 25 bp, Homo sapien
cagtttgcggtggcaatagtctacc

SEQ ID NO: 4288288 - DNA, 25 bp, Homo sapien
ctaccaagtccaagacagtgtcttc

SEQ ID NO: 4288289 - DNA, 25 bp, Homo sapien
ctccccctcaggggggccaccacag

SEQ ID NO: 4288290 - DNA, 25 bp, Homo sapien
ccaagaggttgatgatggaggcctc

SEQ ID NO: 4288291 - DNA, 25 bp, Homo sapien
gttgatgatggaggcctcgtggtgc

SEQ ID NO: 4288292 - DNA, 25 bp, Homo sapien
actgtctccaagaggttgatgatgg

SEQ ID NO: 4288293 - DNA, 25 bp, Homo sapien
tctccaagaggttgatgatggaggc

SEQ ID NO: 4288294 - DNA, 25 bp, Homo sapien
ttgaagtcctccaccctgcagaaca

SEQ ID NO: 4288295 - DNA, 25 bp, Homo sapien
tgcagaacacagggaacaccttctg

SEQ ID NO: 4288296 - DNA, 25 bp, Homo sapien
tggggaaggtgttctggggcttgaa

SEQ ID NO: 4288297 - DNA, 25 bp, Homo sapien
tgcttccacatctccactgcgatca

SEQ ID NO: 4288298 - DNA, 25 bp, Homo sapien
ccccggctcagctcaaccctgatat

SEQ ID NO: 4288299 - DNA, 25 bp, Homo sapien
gatgggcctacctttgcctggcaac

SEQ ID NO: 4288300 - DNA, 25 bp, Homo sapien
tgctgggcccctaaactattccaga

SEQ ID NO: 4288301 - DNA, 25 bp, Homo sapien
cagggatgagatgggcctacctttg

SEQ ID NO: 4288302 - DNA, 25 bp, Homo sapien
tcctgaatgggctcgccctggctga

SEQ ID NO: 4288303 - DNA, 25 bp, Homo sapien
gaggatggcttgcatgttcagcttc

SEQ ID NO: 4288304 - DNA, 25 bp, Homo sapien
tcgccctggctgactgtggcatcga

SEQ ID NO: 4288305 - DNA, 25 bp, Homo sapien
tggcatcgaggatggcttgcatgtt

SEQ ID NO: 4288306 - DNA, 25 bp, Homo sapien
gaccccgcaccagcacttcagcttc

SEQ ID NO: 4288307 - DNA, 25 bp, Homo sapien
cttcggagcccatctcgcgtagcgg

SEQ ID NO: 4288308 - DNA, 25 bp, Homo sapien
agcccatctcgcgtagcgggaagct

SEQ ID NO: 4288309 - DNA, 25 bp, Homo sapien
ccatctcgcgtagcgggaagctgcg

SEQ ID NO: 4288310 - DNA, 25 bp, Homo sapien
ggatgctgtcacattcggggacgac

SEQ ID NO: 4288311 - DNA, 25 bp, Homo sapien
tgctgtcacattcggggacgacgga

SEQ ID NO: 4288312 - DNA, 25 bp, Homo sapien
ggggatgctgtcacattcggggacg

SEQ ID NO: 4288313 - DNA, 25 bp, Homo sapien
gatgctgtcacattcggggacgacg

SEQ ID NO: 4288314 - DNA, 25 bp, Homo sapien
gtcagttctcgcagccatggaaacg

SEQ ID NO: 4288315 - DNA, 25 bp, Homo sapien
gggagcgtcagttctcgcagccatg

SEQ ID NO: 4288316 - DNA, 25 bp, Homo sapien
atggaaacgggttagccgcgcctgc

SEQ ID NO: 4288317 - DNA, 25 bp, Homo sapien
tgggacaggacagttgcgggacggt

SEQ ID NO: 4288318 - DNA, 25 bp, Homo sapien
gctcgcgcctaaatccgggcgggtc

SEQ ID NO: 4288319 - DNA, 25 bp, Homo sapien
gcccctggaggtggctcgcgcctaa

SEQ ID NO: 4288320 - DNA, 25 bp, Homo sapien
tcgcgcctaaatccgggcgggtctc

SEQ ID NO: 4288321 - DNA, 25 bp, Homo sapien
ctggaggtggctcgcgcctaaatcc

SEQ ID NO: 4288322 - DNA, 25 bp, Homo sapien
gtggcccacgagtctctcctgagct

SEQ ID NO: 4288323 - DNA, 25 bp, Homo sapien
gcgactgccaatcgccatagtattt

SEQ ID NO: 4288324 - DNA, 25 bp, Homo sapien
gatccttgtggtctggactctgtcc

SEQ ID NO: 4288325 - DNA, 25 bp, Homo sapien
ttcccagcgctttctcgggctgtgg

SEQ ID NO: 4288326 - DNA, 25 bp, Homo sapien
gaaatactgccagggcgcacgactt

SEQ ID NO: 4288327 - DNA, 25 bp, Homo sapien
cagcccggagccttaaaagtgtata

SEQ ID NO: 4288328 - DNA, 25 bp, Homo sapien
ggtgggatgccgcttactagcagct

SEQ ID NO: 4288329 - DNA, 25 bp, Homo sapien
cctgtcatgggtgaactgcggcagc

SEQ ID NO: 4288330 - DNA, 25 bp, Homo sapien
caacctctagacagtatgacaagcc

SEQ ID NO: 4288331 - DNA, 25 bp, Homo sapien
taagagtcaacctctagacagtatg

SEQ ID NO: 4288332 - DNA, 25 bp, Homo sapien
cagaactaagagtcaacctctagac

SEQ ID NO: 4288333 - DNA, 25 bp, Homo sapien
cctctagacagtatgacaagcctcc

SEQ ID NO: 4288334 - DNA, 25 bp, Homo sapien
gtaggagggactacccacagcaatg

SEQ ID NO: 4288335 - DNA, 25 bp, Homo sapien
agtaggagggactacccacagcaat

SEQ ID NO: 4288336 - DNA, 25 bp, Homo sapien
taggagggactacccacagcaatgt

SEQ ID NO: 4288337 - DNA, 25 bp, Homo sapien
tagtaggagggactacccacagcaa

SEQ ID NO: 4288338 - DNA, 25 bp, Homo sapien
ggtcattttcaagccgctcatccag

SEQ ID NO: 4288339 - DNA, 25 bp, Homo sapien
cgctcatccagctcatggtagctca

SEQ ID NO: 4288340 - DNA, 25 bp, Homo sapien
gctcatccagctcatggtagctcat

SEQ ID NO: 4288341 - DNA, 25 bp, Homo sapien
agatgatgatgttggggtcattttc

SEQ ID NO: 4288342 - DNA, 25 bp, Homo sapien
tggtggaggagaggtcagtggcctt

SEQ ID NO: 4288343 - DNA, 25 bp, Homo sapien
gtggaggagaggtcagtggccttgg

SEQ ID NO: 4288344 - DNA, 25 bp, Homo sapien
ggtggtggaggagaggtcagtggcc

SEQ ID NO: 4288345 - DNA, 25 bp, Homo sapien
gggtggtggaggagaggtcagtggc

SEQ ID NO: 4288346 - DNA, 25 bp, Homo sapien
ttcataagcccgaactggatcagct

SEQ ID NO: 4288347 - DNA, 25 bp, Homo sapien
agtcacccgcacaggatacttctgt

SEQ ID NO: 4288348 - DNA, 25 bp, Homo sapien
tagtcgcctgatgaggttcttcata

SEQ ID NO: 4288349 - DNA, 25 bp, Homo sapien
agatctcgtcatagctgtggcagcc

SEQ ID NO: 4288350 - DNA, 25 bp, Homo sapien
tgcttggattggcagtgccccatga

SEQ ID NO: 4288351 - DNA, 25 bp, Homo sapien
tgccccatgatccagggctcctgag

SEQ ID NO: 4288352 - DNA, 25 bp, Homo sapien
ggccttctttcaggcaggccaaccc

SEQ ID NO: 4288353 - DNA, 25 bp, Homo sapien
gagagacataaagggtctagcttcc

SEQ ID NO: 4288354 - DNA, 25 bp, Homo sapien
cccaaatgccccagcaaattctcct

SEQ ID NO: 4288355 - DNA, 25 bp, Homo sapien
tcccaaatgccccagcaaattctcc

SEQ ID NO: 4288356 - DNA, 25 bp, Homo sapien
gcggccaatgaggtctcgcacggta

SEQ ID NO: 4288357 - DNA, 25 bp, Homo sapien
ctcgcacggtagtgccagggctcag

SEQ ID NO: 4288358 - DNA, 25 bp, Homo sapien
gcagtatagctggaacacatcccgg

SEQ ID NO: 4288359 - DNA, 25 bp, Homo sapien
atcccggagactggccctcttgtgc

SEQ ID NO: 4288360 - DNA, 25 bp, Homo sapien
cagggatcagctcatcatgtggccc

SEQ ID NO: 4288361 - DNA, 25 bp, Homo sapien
gtcacgtaggatagacatgcctctt

SEQ ID NO: 4288362 - DNA, 25 bp, Homo sapien
gcgttgggcagtatacattggagta

SEQ ID NO: 4288363 - DNA, 25 bp, Homo sapien
tgcttggtcacgtaggatagacatg

SEQ ID NO: 4288364 - DNA, 25 bp, Homo sapien
gaccttgggcgttgggcagtataca

SEQ ID NO: 4288365 - DNA, 25 bp, Homo sapien
ggtagcagaaggcataggggcctga

SEQ ID NO: 4288366 - DNA, 25 bp, Homo sapien
tgacacagccctggtctggtccagc

SEQ ID NO: 4288367 - DNA, 25 bp, Homo sapien
gaagctgacacagccctggtctggt

SEQ ID NO: 4288368 - DNA, 25 bp, Homo sapien
tagcagaaggcataggggcctgagt

SEQ ID NO: 4288369 - DNA, 25 bp, Homo sapien
gatggacaccagtgtcacaacgccg

SEQ ID NO: 4288370 - DNA, 25 bp, Homo sapien
gaggatggacaccagtgtcacaacg

SEQ ID NO: 4288371 - DNA, 25 bp, Homo sapien
tggacaccagtgtcacaacgccgta

SEQ ID NO: 4288372 - DNA, 25 bp, Homo sapien
caccagtgtcacaacgccgtagtac

SEQ ID NO: 4288373 - DNA, 25 bp, Homo sapien
tgagagagagagctgtgctcagctt

SEQ ID NO: 4288374 - DNA, 25 bp, Homo sapien
gctggtgaccttgtcccaggtatga

SEQ ID NO: 4288375 - DNA, 25 bp, Homo sapien
ggctggtgaccttgtcccaggtatg

SEQ ID NO: 4288376 - DNA, 25 bp, Homo sapien
gcaggttctggatagcaatgcgcac

SEQ ID NO: 4288377 - DNA, 25 bp, Homo sapien
agcaggttctggatagcaatgcgca

SEQ ID NO: 4288378 - DNA, 25 bp, Homo sapien
tggcggaacccatcaatgtagggca

SEQ ID NO: 4288379 - DNA, 25 bp, Homo sapien
gatgtggcggaacccatcaatgtag

SEQ ID NO: 4288380 - DNA, 25 bp, Homo sapien
tcttctggatgtggcggaacccatc

SEQ ID NO: 4288381 - DNA, 25 bp, Homo sapien
ctggatgtggcggaacccatcaatg

SEQ ID NO: 4288382 - DNA, 25 bp, Homo sapien
ccccaggtgatgatacccagggagg

SEQ ID NO: 4288383 - DNA, 25 bp, Homo sapien
cagccccaggtgatgatacccaggg

SEQ ID NO: 4288384 - DNA, 25 bp, Homo sapien
cccaggtgatgatacccagggaggg

SEQ ID NO: 4288385 - DNA, 25 bp, Homo sapien
agccccaggtgatgatacccaggga

SEQ ID NO: 4288386 - DNA, 25 bp, Homo sapien
ccactgtgagttgaagaaatcctcc

SEQ ID NO: 4288387 - DNA, 25 bp, Homo sapien
tgttgtgtagtgaggtcccactgtg

SEQ ID NO: 4288388 - DNA, 25 bp, Homo sapien
tgtgagttgaagaaatcctccttgt

SEQ ID NO: 4288389 - DNA, 25 bp, Homo sapien
tggtaaagacaggtacatcatactc

SEQ ID NO: 4288390 - DNA, 25 bp, Homo sapien
ccaagaggtcctcaattaccatcca

SEQ ID NO: 4288391 - DNA, 25 bp, Homo sapien
gaggtcctcaattaccatccaggcc

SEQ ID NO: 4288392 - DNA, 25 bp, Homo sapien
aagaggtcctcaattaccatccagg

SEQ ID NO: 4288393 - DNA, 25 bp, Homo sapien
gggccccatccatatcctcagtgcc

SEQ ID NO: 4288394 - DNA, 25 bp, Homo sapien
tgcccaccaatgtgttcatgagtct

SEQ ID NO: 4288395 - DNA, 25 bp, Homo sapien
ttgcccttctccctgactagctggg

SEQ ID NO: 4288396 - DNA, 25 bp, Homo sapien
ctctgggtagggctaatctttctct

SEQ ID NO: 4288397 - DNA, 25 bp, Homo sapien
tcatgcattggaccctggacatggg

SEQ ID NO: 4288398 - DNA, 25 bp, Homo sapien
cctctgctgtccttgcagaggctgg

SEQ ID NO: 4288399 - DNA, 25 bp, Homo sapien
ctgtccttgcagaggctggccatac

SEQ ID NO: 4288400 - DNA, 25 bp, Homo sapien
ctgctgtccttgcagaggctggcca

SEQ ID NO: 4288401 - DNA, 25 bp, Homo sapien
ccctctgctgtccttgcagaggctg

SEQ ID NO: 4288402 - DNA, 25 bp, Homo sapien
agtgcaccggcctgaggcatttagc

SEQ ID NO: 4288403 - DNA, 25 bp, Homo sapien
agatggtcatgatgggcaccaactt

SEQ ID NO: 4288404 - DNA, 25 bp, Homo sapien
ggtcatgatgggcaccaacttctgc

SEQ ID NO: 4288405 - DNA, 25 bp, Homo sapien
caatgggcagagtgcaccggcctga

SEQ ID NO: 4288406 - DNA, 25 bp, Homo sapien
catggaaagcatggtgggcacatcc

SEQ ID NO: 4288407 - DNA, 25 bp, Homo sapien
tgtcggtaaacccaagcccatctca

SEQ ID NO: 4288408 - DNA, 25 bp, Homo sapien
acccctggctggttggctgccctga

SEQ ID NO: 4288409 - DNA, 25 bp, Homo sapien
ttccccaactctgcctgtcggtaaa

SEQ ID NO: 4288410 - DNA, 25 bp, Homo sapien
ctttttaacaatgggctcgagggcg

SEQ ID NO: 4288411 - DNA, 25 bp, Homo sapien
cccaggttgaagaggagagcattgc

SEQ ID NO: 4288412 - DNA, 25 bp, Homo sapien
ggcatcacacacgaagcccaggttg

SEQ ID NO: 4288413 - DNA, 25 bp, Homo sapien
tagtgtggtcagatagccagccagc

SEQ ID NO: 4288414 - DNA, 25 bp, Homo sapien
tgggacaacccctgccacccaccgc

SEQ ID NO: 4288415 - DNA, 25 bp, Homo sapien
ctggataattggaacacagtcaggc

SEQ ID NO: 4288416 - DNA, 25 bp, Homo sapien
ggataattggaacacagtcaggccc

SEQ ID NO: 4288417 - DNA, 25 bp, Homo sapien
acaacccctgccacccaccgctcac

SEQ ID NO: 4288418 - DNA, 25 bp, Homo sapien
gactgtgtcaaacagctctcgggag

SEQ ID NO: 4288419 - DNA, 25 bp, Homo sapien
tcaaacagctctcgggagatgaagt

SEQ ID NO: 4288420 - DNA, 25 bp, Homo sapien
tgatgatgtacacttggactgtgtc

SEQ ID NO: 4288421 - DNA, 25 bp, Homo sapien
acttggactgtgtcaaacagctctc

SEQ ID NO: 4288422 - DNA, 25 bp, Homo sapien
cagttcagggatactcatgggtcac

SEQ ID NO: 4288423 - DNA, 25 bp, Homo sapien
tagtacaaatggtgacctcctcatg

SEQ ID NO: 4288424 - DNA, 25 bp, Homo sapien
tgtttccaaacatacgctatgatct

SEQ ID NO: 4288425 - DNA, 25 bp, Homo sapien
cagtggacatctgtactgggtgtag

SEQ ID NO: 4288426 - DNA, 25 bp, Homo sapien
tacaaacactgccaatgtgacgtat

SEQ ID NO: 4288427 - DNA, 25 bp, Homo sapien
tacagcccgatatcctacaaacact

SEQ ID NO: 4288428 - DNA, 25 bp, Homo sapien
gggcctgggtctgactatcctctag

SEQ ID NO: 4288429 - DNA, 25 bp, Homo sapien
aatgtgacgtatgtcttccctgcca

SEQ ID NO: 4288430 - DNA, 25 bp, Homo sapien
tgagctctcgagaacgtccctcttc

SEQ ID NO: 4288431 - DNA, 25 bp, Homo sapien
cagccagttgagctctcgagaacgt

SEQ ID NO: 4288432 - DNA, 25 bp, Homo sapien
gcatgcctgcgtgcagcacgggaaa

SEQ ID NO: 4288433 - DNA, 25 bp, Homo sapien
gaaactactgccttcaggcagccag

SEQ ID NO: 4288434 - DNA, 25 bp, Homo sapien
gggtggaactcgctgaagaatatgc

SEQ ID NO: 4288435 - DNA, 25 bp, Homo sapien
ataggtgatcttgggtcccagcgtg

SEQ ID NO: 4288436 - DNA, 25 bp, Homo sapien
aatatgcattcgatgcggcagccgc

SEQ ID NO: 4288437 - DNA, 25 bp, Homo sapien
ctgaagaatatgcattcgatgcggc

SEQ ID NO: 4288438 - DNA, 25 bp, Homo sapien
tagctcctcgttcctcgcgcagagg

SEQ ID NO: 4288439 - DNA, 25 bp, Homo sapien
agacagcctcgaggcctgtgtcgct

SEQ ID NO: 4288440 - DNA, 25 bp, Homo sapien
tcctgtgaacacttgtcagagacag

SEQ ID NO: 4288441 - DNA, 25 bp, Homo sapien
tggggcacgcaagcttgccaatccc

SEQ ID NO: 4288442 - DNA, 25 bp, Homo sapien
tgcgcagcgcgactcagaggcgtgg

SEQ ID NO: 4288443 - DNA, 25 bp, Homo sapien
ctgcgcagcgcgactcagaggcgtg

SEQ ID NO: 4288444 - DNA, 25 bp, Homo sapien
aagtcctgggtgggtagacgtcgca

SEQ ID NO: 4288445 - DNA, 25 bp, Homo sapien
agtcctgggtgggtagacgtcgcac

SEQ ID NO: 4288446 - DNA, 25 bp, Homo sapien
aagtaaagcggctccgtgacggagc

SEQ ID NO: 4288447 - DNA, 25 bp, Homo sapien
ctccgtgacggagcggcggtgcgcg

SEQ ID NO: 4288448 - DNA, 25 bp, Homo sapien
ccggaagtaaagcggctccgtgacg

SEQ ID NO: 4288449 - DNA, 25 bp, Homo sapien
cggcagggcccggagtatcccgctt

SEQ ID NO: 4288450 - DNA, 25 bp, Homo sapien
aggaaaccaccgcatcagatctgcg

SEQ ID NO: 4288451 - DNA, 25 bp, Homo sapien
ctttggaggaaaccaccgcatcaga

SEQ ID NO: 4288452 - DNA, 25 bp, Homo sapien
tggaggaaaccaccgcatcagatct

SEQ ID NO: 4288453 - DNA, 25 bp, Homo sapien
ttggaggaaaccaccgcatcagatc

SEQ ID NO: 4288454 - DNA, 25 bp, Homo sapien
gaccgcagcagggaactacaatttc

SEQ ID NO: 4288455 - DNA, 25 bp, Homo sapien
tcacgctgtaactgggaccgcagca

SEQ ID NO: 4288456 - DNA, 25 bp, Homo sapien
aatttccatagtgctccgcgccctc

SEQ ID NO: 4288457 - DNA, 25 bp, Homo sapien
ggtgcgctaagggattcacgctgta

SEQ ID NO: 4288458 - DNA, 25 bp, Homo sapien
ctggaaggcgggccagcgattggta

SEQ ID NO: 4288459 - DNA, 25 bp, Homo sapien
tggaaggcgggccagcgattggtac

SEQ ID NO: 4288460 - DNA, 25 bp, Homo sapien
tacacgttgacaggccgccggccgt

SEQ ID NO: 4288461 - DNA, 25 bp, Homo sapien
cagacatgggtacacgttgacaggc

SEQ ID NO: 4288462 - DNA, 25 bp, Homo sapien
cagttcagacatgggtacacgttga

SEQ ID NO: 4288463 - DNA, 25 bp, Homo sapien
acatgggtacacgttgacaggccgc

SEQ ID NO: 4288464 - DNA, 25 bp, Homo sapien
gacatttcagactggcacctaggag

SEQ ID NO: 4288465 - DNA, 25 bp, Homo sapien
tcctgatgaccgaggcactactggt

SEQ ID NO: 4288466 - DNA, 25 bp, Homo sapien
cactggcagctaagggttacataaa

SEQ ID NO: 4288467 - DNA, 25 bp, Homo sapien
cacaaagagcagcttggcaaagccc

SEQ ID NO: 4288468 - DNA, 25 bp, Homo sapien
tgttggcgagaaacagcagaaggcc

SEQ ID NO: 4288469 - DNA, 25 bp, Homo sapien
tggactggccgatgcctcagaggct

SEQ ID NO: 4288470 - DNA, 25 bp, Homo sapien
ctttattgatactgcgagcctgggc

SEQ ID NO: 4288471 - DNA, 25 bp, Homo sapien
agggctctcggcaaccagtttcaga

SEQ ID NO: 4288472 - DNA, 25 bp, Homo sapien
cagccgctcattgagtgccttcagg

SEQ ID NO: 4288473 - DNA, 25 bp, Homo sapien
ggagctgcctcgaaggtgattagac

SEQ ID NO: 4288474 - DNA, 25 bp, Homo sapien
ttcagccgctcattgagtgccttca

SEQ ID NO: 4288475 - DNA, 25 bp, Homo sapien
ttagactggattctggggcagcccc

SEQ ID NO: 4288476 - DNA, 25 bp, Homo sapien
taatgaaagggtcatcgccactccc

SEQ ID NO: 4288477 - DNA, 25 bp, Homo sapien
gatagcttggtttacagataatgaa

SEQ ID NO: 4288478 - DNA, 25 bp, Homo sapien
gggactcctgatgctgtggatagct

SEQ ID NO: 4288479 - DNA, 25 bp, Homo sapien
tgccctggccaaagtgcattcagtg

SEQ ID NO: 4288480 - DNA, 25 bp, Homo sapien
gtacagcgaacacctcaacagatgg

SEQ ID NO: 4288481 - DNA, 25 bp, Homo sapien
cagtatgctcctagcttgacaagat

SEQ ID NO: 4288482 - DNA, 25 bp, Homo sapien
ggtctccacctatgtacagcgaaca

SEQ ID NO: 4288483 - DNA, 25 bp, Homo sapien
caacagatggcatgtgactcgacca

SEQ ID NO: 4288484 - DNA, 25 bp, Homo sapien
atcgtagcgcttcaccgtcttctgg

SEQ ID NO: 4288485 - DNA, 25 bp, Homo sapien
ctcagggaagaaagtggcgaaagca

SEQ ID NO: 4288486 - DNA, 25 bp, Homo sapien
tctccgctcggcgtcttgagggtct

SEQ ID NO: 4288487 - DNA, 25 bp, Homo sapien
tgtgcaccaagttcgccagcaaacc

SEQ ID NO: 4288488 - DNA, 25 bp, Homo sapien
agagcagcccgaagccataggaagc

SEQ ID NO: 4288489 - DNA, 25 bp, Homo sapien
cgaagccataggaagccagcgccgg

SEQ ID NO: 4288490 - DNA, 25 bp, Homo sapien
gatatacccaactggagagcagccc

SEQ ID NO: 4288491 - DNA, 25 bp, Homo sapien
ctggtagaagcgaagatatacccaa

SEQ ID NO: 4288492 - DNA, 25 bp, Homo sapien
agcatgggcatcacactgacgcgca

SEQ ID NO: 4288493 - DNA, 25 bp, Homo sapien
gcatgggcatcacactgacgcgcac

SEQ ID NO: 4288494 - DNA, 25 bp, Homo sapien
cagcatgggcatcacactgacgcgc

SEQ ID NO: 4288495 - DNA, 25 bp, Homo sapien
gtagaggaatagtaccgccgcacac

SEQ ID NO: 4288496 - DNA, 25 bp, Homo sapien
gtttgcttgagtgccaccaggacgc

SEQ ID NO: 4288497 - DNA, 25 bp, Homo sapien
tacggacagtgaacaggtagaccag

SEQ ID NO: 4288498 - DNA, 25 bp, Homo sapien
ccaaggcgccgtggatacggacagt

SEQ ID NO: 4288499 - DNA, 25 bp, Homo sapien
taaaggatccgcttccgatcgggtg

SEQ ID NO: 4288500 - DNA, 25 bp, Homo sapien
cactgcgaggcccttcggttcgcaa

SEQ ID NO: 4288501 - DNA, 25 bp, Homo sapien
tagtcactggcctatggccctggta

SEQ ID NO: 4288502 - DNA, 25 bp, Homo sapien
tgtacccgagtcaagcctggtcagc

SEQ ID NO: 4288503 - DNA, 25 bp, Homo sapien
ttaggcattgctctgcagccgaacc

SEQ ID NO: 4288504 - DNA, 25 bp, Homo sapien
taatgagaaggattagacccagctg

SEQ ID NO: 4288505 - DNA, 25 bp, Homo sapien
caaagtcacccctgctaaggcaaag

SEQ ID NO: 4288506 - DNA, 25 bp, Homo sapien
cagcagaggcctggttttggcacca

SEQ ID NO: 4288507 - DNA, 25 bp, Homo sapien
gttcctctgccgaaaggtgcaggca

SEQ ID NO: 4288508 - DNA, 25 bp, Homo sapien
ggcggcgagaggcgtggacgaggac

SEQ ID NO: 4288509 - DNA, 25 bp, Homo sapien
aggccccgcggccacagtctgaggt

SEQ ID NO: 4288510 - DNA, 25 bp, Homo sapien
cagttgcagggagaccaggacgccc

SEQ ID NO: 4288511 - DNA, 25 bp, Homo sapien
cgcggccacagtctgaggtatcttc

SEQ ID NO: 4288512 - DNA, 25 bp, Homo sapien
gacgcccagcgacggcgggaaggag

SEQ ID NO: 4288513 - DNA, 25 bp, Homo sapien
tccggtatcgcggtctctgcactag

SEQ ID NO: 4288514 - DNA, 25 bp, Homo sapien
ggtctctgcactagctcacactgct

SEQ ID NO: 4288515 - DNA, 25 bp, Homo sapien
tgtcgcgttgtagtcgaagcagatg

SEQ ID NO: 4288516 - DNA, 25 bp, Homo sapien
agatgtgcgggcctctccggtatcg

SEQ ID NO: 4288517 - DNA, 25 bp, Homo sapien
ctgcagcagccggccagcctcgcac

SEQ ID NO: 4288518 - DNA, 25 bp, Homo sapien
tccttctgcagcagccggccagcct

SEQ ID NO: 4288519 - DNA, 25 bp, Homo sapien
ccttctgcagcagccggccagcctc

SEQ ID NO: 4288520 - DNA, 25 bp, Homo sapien
ttctgcagcagccggccagcctcgc

SEQ ID NO: 4288521 - DNA, 25 bp, Homo sapien
gattggtgttggtcagtctctgcgc

SEQ ID NO: 4288522 - DNA, 25 bp, Homo sapien
tggtcagtctctgcgcgtggaacag

SEQ ID NO: 4288523 - DNA, 25 bp, Homo sapien
gctgcacagcggcttctcggccacc

SEQ ID NO: 4288524 - DNA, 25 bp, Homo sapien
ccaccacaaagagaagattggtgtt

SEQ ID NO: 4288525 - DNA, 25 bp, Homo sapien
tccgcccttggcctctggtcccgcc

SEQ ID NO: 4288526 - DNA, 25 bp, Homo sapien
ggcctctggtcccgccccactgcca

SEQ ID NO: 4288527 - DNA, 25 bp, Homo sapien
ttccgcccttggcctctggtcccgc

SEQ ID NO: 4288528 - DNA, 25 bp, Homo sapien
ctctggtcccgccccactgccagca

SEQ ID NO: 4288529 - DNA, 25 bp, Homo sapien
tctgtttcatgacgcagctgctctc

SEQ ID NO: 4288530 - DNA, 25 bp, Homo sapien
tgtaggaggcgtttaccgagccgaa

SEQ ID NO: 4288531 - DNA, 25 bp, Homo sapien
tccgcagtcgatgatggcgttgtag

SEQ ID NO: 4288532 - DNA, 25 bp, Homo sapien
cgaagtagtactgggtctgtttcat

SEQ ID NO: 4288533 - DNA, 25 bp, Homo sapien
ttggaaccagctgtggtagatgagg

SEQ ID NO: 4288534 - DNA, 25 bp, Homo sapien
atgaggccgtagagaagctgctgga

SEQ ID NO: 4288535 - DNA, 25 bp, Homo sapien
tggtagatgaggccgtagagaagct

SEQ ID NO: 4288536 - DNA, 25 bp, Homo sapien
tagatgaggccgtagagaagctgct

SEQ ID NO: 4288537 - DNA, 25 bp, Homo sapien
accaggccaggttaaggaaatctgc

SEQ ID NO: 4288538 - DNA, 25 bp, Homo sapien
ccaggttaaggaaatctgcaacggt

SEQ ID NO: 4288539 - DNA, 25 bp, Homo sapien
aggccaggttaaggaaatctgcaac

SEQ ID NO: 4288540 - DNA, 25 bp, Homo sapien
aggttaaggaaatctgcaacggtgg

SEQ ID NO: 4288541 - DNA, 25 bp, Homo sapien
agtgccagcatcaggttggcatcca

SEQ ID NO: 4288542 - DNA, 25 bp, Homo sapien
aggctgcctgatagtcataggactc

SEQ ID NO: 4288543 - DNA, 25 bp, Homo sapien
tccttgcgggtgtagaaggagttat

SEQ ID NO: 4288544 - DNA, 25 bp, Homo sapien
tgatagtcataggactccttgcggg

SEQ ID NO: 4288545 - DNA, 25 bp, Homo sapien
ggtttgacagcaccaggaatcctcc

SEQ ID NO: 4288546 - DNA, 25 bp, Homo sapien
aggaatcctccatcatcaatgagga

SEQ ID NO: 4288547 - DNA, 25 bp, Homo sapien
ttgttaacctcgcagtccatctcac

SEQ ID NO: 4288548 - DNA, 25 bp, Homo sapien
gttaacctcgcagtccatctcacag

SEQ ID NO: 4288549 - DNA, 25 bp, Homo sapien
ttaacctcgcagtccatctcacagt

SEQ ID NO: 4288550 - DNA, 25 bp, Homo sapien
cattgttaacctcgcagtccatctc

SEQ ID NO: 4288551 - DNA, 25 bp, Homo sapien
tgaggctggtcttggtgggtacggt

SEQ ID NO: 4288552 - DNA, 25 bp, Homo sapien
gcccaagcctctaggtccagcttga

SEQ ID NO: 4288553 - DNA, 25 bp, Homo sapien
ggtacggttgctggctagcaccttg

SEQ ID NO: 4288554 - DNA, 25 bp, Homo sapien
aagcctctaggtccagcttgacgcc

SEQ ID NO: 4288555 - DNA, 25 bp, Homo sapien
ctccacagctgtgctgacgaggatg

SEQ ID NO: 4288556 - DNA, 25 bp, Homo sapien
cacagctgtgctgacgaggatgccc

SEQ ID NO: 4288557 - DNA, 25 bp, Homo sapien
tgtgctgacgaggatgcccacagtg

SEQ ID NO: 4288558 - DNA, 25 bp, Homo sapien
gctgacgaggatgcccacagtgtca

SEQ ID NO: 4288559 - DNA, 25 bp, Homo sapien
gcttgaagacataaccgtggttatc

SEQ ID NO: 4288560 - DNA, 25 bp, Homo sapien
gttatccaggctgcggcggtagaag

SEQ ID NO: 4288561 - DNA, 25 bp, Homo sapien
aaccgtggttatccaggctgcggcg

SEQ ID NO: 4288562 - DNA, 25 bp, Homo sapien
tgtgggggcttgaagacataaccgt

SEQ ID NO: 4288563 - DNA, 25 bp, Homo sapien
agcgaacacggccagtaggctgtac

SEQ ID NO: 4288564 - DNA, 25 bp, Homo sapien
agactcgggtgatgccaccgtctgt

SEQ ID NO: 4288565 - DNA, 25 bp, Homo sapien
gtctgtggcagcgaacacggccagt

SEQ ID NO: 4288566 - DNA, 25 bp, Homo sapien
gccaccgtctgtggcagcgaacacg

SEQ ID NO: 4288567 - DNA, 25 bp, Homo sapien
cccgtgtccaagatcaggttgtgca

SEQ ID NO: 4288568 - DNA, 25 bp, Homo sapien
tccaagatcaggttgtgcagaagga

SEQ ID NO: 4288569 - DNA, 25 bp, Homo sapien
tgcgtgatgcccgtgtccaagatca

SEQ ID NO: 4288570 - DNA, 25 bp, Homo sapien
cagctgctgcgtgatgcccgtgtcc

SEQ ID NO: 4288571 - DNA, 25 bp, Homo sapien
agtctggagtcactttctccatgag

SEQ ID NO: 4288572 - DNA, 25 bp, Homo sapien
actgcttggagtctggagtcacttt

SEQ ID NO: 4288573 - DNA, 25 bp, Homo sapien
gcttggagtctggagtcactttctc

SEQ ID NO: 4288574 - DNA, 25 bp, Homo sapien
tttcaggaactcggtgttgttgtct

SEQ ID NO: 4288575 - DNA, 25 bp, Homo sapien
ctgggtctcttgtcagctgcatcca

SEQ ID NO: 4288576 - DNA, 25 bp, Homo sapien
cgaaggtgaggcatgtccagagccc

SEQ ID NO: 4288577 - DNA, 25 bp, Homo sapien
gtgcacacacgaaggtgaggcatgt

SEQ ID NO: 4288578 - DNA, 25 bp, Homo sapien
gtgctgccttccagtgcccctgggt

SEQ ID NO: 4288579 - DNA, 25 bp, Homo sapien
cctagacccggcactgccgacaggg

SEQ ID NO: 4288580 - DNA, 25 bp, Homo sapien
tagacccggcactgccgacaggggc

SEQ ID NO: 4288581 - DNA, 25 bp, Homo sapien
ctagacccggcactgccgacagggg

SEQ ID NO: 4288582 - DNA, 25 bp, Homo sapien
agacccggcactgccgacaggggct

SEQ ID NO: 4288583 - DNA, 25 bp, Homo sapien
actgacacaggacaacgatggggtg

SEQ ID NO: 4288584 - DNA, 25 bp, Homo sapien
acacaggacaacgatggggtgcggg

SEQ ID NO: 4288585 - DNA, 25 bp, Homo sapien
caccccagggcggaaagggctcctg

SEQ ID NO: 4288586 - DNA, 25 bp, Homo sapien
gggatgggcaggacaccacaaacca

SEQ ID NO: 4288587 - DNA, 25 bp, Homo sapien
cgatgtatgggggccgggggatgac

SEQ ID NO: 4288588 - DNA, 25 bp, Homo sapien
gcgatgtatgggggccgggggatga

SEQ ID NO: 4288589 - DNA, 25 bp, Homo sapien
gatgtatgggggccgggggatgaca

SEQ ID NO: 4288590 - DNA, 25 bp, Homo sapien
acgtgtccttcagactcaaagctgc

SEQ ID NO: 4288591 - DNA, 25 bp, Homo sapien
aatgaaaacgtgtccttcagactca

SEQ ID NO: 4288592 - DNA, 25 bp, Homo sapien
gaaaacgtgtccttcagactcaaag

SEQ ID NO: 4288593 - DNA, 25 bp, Homo sapien
gggagcaatgaaaacgtgtccttca

SEQ ID NO: 4288594 - DNA, 25 bp, Homo sapien
cactgagattggcttggaggtagaa

SEQ ID NO: 4288595 - DNA, 25 bp, Homo sapien
tcactgagattggcttggaggtaga

SEQ ID NO: 4288596 - DNA, 25 bp, Homo sapien
gattggcttggaggtagaaggtgct

SEQ ID NO: 4288597 - DNA, 25 bp, Homo sapien
tggtcactgagattggcttggaggt

SEQ ID NO: 4288598 - DNA, 25 bp, Homo sapien
gttagtgctccttataggcacccag

SEQ ID NO: 4288599 - DNA, 25 bp, Homo sapien
gcacccaggtgtagttccgtgtcac

SEQ ID NO: 4288600 - DNA, 25 bp, Homo sapien
gttccgtgtcacctcatctatgtac

SEQ ID NO: 4288601 - DNA, 25 bp, Homo sapien
ctgtagttagtgctccttataggca

SEQ ID NO: 4288602 - DNA, 25 bp, Homo sapien
cttgaccaacgttctgatctgcttg

SEQ ID NO: 4288603 - DNA, 25 bp, Homo sapien
gcccttgttgccatcaatcatgctc

SEQ ID NO: 4288604 - DNA, 25 bp, Homo sapien
tgccatcaatcatgctccgacggat

SEQ ID NO: 4288605 - DNA, 25 bp, Homo sapien
agggacttgaccaacgttctgatct

SEQ ID NO: 4288606 - DNA, 25 bp, Homo sapien
gtccagagtcacaggctcccggaag

SEQ ID NO: 4288607 - DNA, 25 bp, Homo sapien
cagagtcacaggctcccggaagttg

SEQ ID NO: 4288608 - DNA, 25 bp, Homo sapien
tccagagtcacaggctcccggaagt

SEQ ID NO: 4288609 - DNA, 25 bp, Homo sapien
gagtcacaggctcccggaagttggt

SEQ ID NO: 4288610 - DNA, 25 bp, Homo sapien
gggtgcagcaacacgtagccgttca

SEQ ID NO: 4288611 - DNA, 25 bp, Homo sapien
ggcaaacacatagccgttggctcca

SEQ ID NO: 4288612 - DNA, 25 bp, Homo sapien
cacgtagccgttcaggtcaatggca

SEQ ID NO: 4288613 - DNA, 25 bp, Homo sapien
ccgttcaggtcaatggcaaacacat

SEQ ID NO: 4288614 - DNA, 25 bp, Homo sapien
cagcgggacgagtggacccttcgga

SEQ ID NO: 4288615 - DNA, 25 bp, Homo sapien
ttactgtacctggaggccaactgcc

SEQ ID NO: 4288616 - DNA, 25 bp, Homo sapien
gagtaagtgggacctggacctagcc

SEQ ID NO: 4288617 - DNA, 25 bp, Homo sapien
tgatgctgttgtacataccacacct

SEQ ID NO: 4288618 - DNA, 25 bp, Homo sapien
ttcagagccacgtcaatgcccatca

SEQ ID NO: 4288619 - DNA, 25 bp, Homo sapien
acgtcaatgcccatcacgcccagga

SEQ ID NO: 4288620 - DNA, 25 bp, Homo sapien
ccacgtcaatgcccatcacgcccag

SEQ ID NO: 4288621 - DNA, 25 bp, Homo sapien
cattcagagccacgtcaatgcccat

SEQ ID NO: 4288622 - DNA, 25 bp, Homo sapien
tgtgtcaggttgaaaacagggaggg

SEQ ID NO: 4288623 - DNA, 25 bp, Homo sapien
tccccagggccatcctgtgtcaggt

SEQ ID NO: 4288624 - DNA, 25 bp, Homo sapien
tgtcaggttgaaaacagggagggtc

SEQ ID NO: 4288625 - DNA, 25 bp, Homo sapien
ttcttttccccagggccatcctgtg

SEQ ID NO: 4288626 - DNA, 25 bp, Homo sapien
gaagggagaggaagatgatggagtc

SEQ ID NO: 4288627 - DNA, 25 bp, Homo sapien
ctgaagggagaggaagatgatggag

SEQ ID NO: 4288628 - DNA, 25 bp, Homo sapien
aagggagaggaagatgatggagtca

SEQ ID NO: 4288629 - DNA, 25 bp, Homo sapien
agggagaggaagatgatggagtcac

SEQ ID NO: 4288630 - DNA, 25 bp, Homo sapien
atgggcctgcccaacacatctagat

SEQ ID NO: 4288631 - DNA, 25 bp, Homo sapien
catgggcctgcccaacacatctaga

SEQ ID NO: 4288632 - DNA, 25 bp, Homo sapien
ctgtgtgttgatgcggatggctccg

SEQ ID NO: 4288633 - DNA, 25 bp, Homo sapien
tggctccgatggaagggatctcaaa

SEQ ID NO: 4288634 - DNA, 25 bp, Homo sapien
gcggatggctccgatggaagggatc

SEQ ID NO: 4288635 - DNA, 25 bp, Homo sapien
tgttgatgcggatggctccgatgga

SEQ ID NO: 4288636 - DNA, 25 bp, Homo sapien
gacgtcatagttatgctgccccacg

SEQ ID NO: 4288637 - DNA, 25 bp, Homo sapien
tatgctgccccacggagaaagtaaa

SEQ ID NO: 4288638 - DNA, 25 bp, Homo sapien
tccactgcagcggtgtgacgtcata

SEQ ID NO: 4288639 - DNA, 25 bp, Homo sapien
ccacggagaaagtaaacacgcgcac

SEQ ID NO: 4288640 - DNA, 25 bp, Homo sapien
ttctcaaagacgtcctgcacgcggt

SEQ ID NO: 4288641 - DNA, 25 bp, Homo sapien
tccggtttggccaattgtacttctc

SEQ ID NO: 4288642 - DNA, 25 bp, Homo sapien
caccatccgtgaacatcatgatcat

SEQ ID NO: 4288643 - DNA, 25 bp, Homo sapien
tcatcttgttgcagttggcccgagt

SEQ ID NO: 4288644 - DNA, 25 bp, Homo sapien
tgtgtgaagcatgacacaggctgtg

SEQ ID NO: 4288645 - DNA, 25 bp, Homo sapien
ggcatactcaaagccggccttgtag

SEQ ID NO: 4288646 - DNA, 25 bp, Homo sapien
caccttcttgttgcgcacattggcc

SEQ ID NO: 4288647 - DNA, 25 bp, Homo sapien
ggtcaaaggcatactcaaagccggc

SEQ ID NO: 4288648 - DNA, 25 bp, Homo sapien
ccagcatctcgcagacagatgtctt

SEQ ID NO: 4288649 - DNA, 25 bp, Homo sapien
atagtcatcatcagacagcgtgtcc

SEQ ID NO: 4288650 - DNA, 25 bp, Homo sapien
agacagcgtgtccagcatctcgcag

SEQ ID NO: 4288651 - DNA, 25 bp, Homo sapien
agcgtgtccagcatctcgcagacag

SEQ ID NO: 4288652 - DNA, 25 bp, Homo sapien
tgatgaccatgtctttgggtgacga

SEQ ID NO: 4288653 - DNA, 25 bp, Homo sapien
acgatgatgaccatgtctttgggtg

SEQ ID NO: 4288654 - DNA, 25 bp, Homo sapien
cgatgatgaccatgtctttgggtga

SEQ ID NO: 4288655 - DNA, 25 bp, Homo sapien
gatgatgaccatgtctttgggtgac

SEQ ID NO: 4288656 - DNA, 25 bp, Homo sapien
tcggacatcgtacaggtcgatcttc

SEQ ID NO: 4288657 - DNA, 25 bp, Homo sapien
cagggtctccttcggacatcgtaca

SEQ ID NO: 4288658 - DNA, 25 bp, Homo sapien
tctccttcggacatcgtacaggtcg

SEQ ID NO: 4288659 - DNA, 25 bp, Homo sapien
catcgtacaggtcgatcttcttggg

SEQ ID NO: 4288660 - DNA, 25 bp, Homo sapien
gtggcgctgccgaagacctgccaca

SEQ ID NO: 4288661 - DNA, 25 bp, Homo sapien
agtgactcctgtggcgctgccgaag

SEQ ID NO: 4288662 - DNA, 25 bp, Homo sapien
ggtcttgtctgcggttttccatgaa

SEQ ID NO: 4288663 - DNA, 25 bp, Homo sapien
tagtagcgagtgactcctgtggcgc

SEQ ID NO: 4288664 - DNA, 25 bp, Homo sapien
tgggtcctcgatgaagtccagcctt

SEQ ID NO: 4288665 - DNA, 25 bp, Homo sapien
gcctttgtagatgtccgtagggatc

SEQ ID NO: 4288666 - DNA, 25 bp, Homo sapien
cagccttagggtgctggccttagac

SEQ ID NO: 4288667 - DNA, 25 bp, Homo sapien
tacagccgcgtatgaatagttgacc

SEQ ID NO: 4288668 - DNA, 25 bp, Homo sapien
gtcagccttggcgtcatagtacacg

SEQ ID NO: 4288669 - DNA, 25 bp, Homo sapien
gccttggcgtcatagtacacgatgt

SEQ ID NO: 4288670 - DNA, 25 bp, Homo sapien
cgtcatagtacacgatgtcttcctc

SEQ ID NO: 4288671 - DNA, 25 bp, Homo sapien
tggcgtcatagtacacgatgtcttc

SEQ ID NO: 4288672 - DNA, 25 bp, Homo sapien
cacaataaggagtttcagttgacga

SEQ ID NO: 4288673 - DNA, 25 bp, Homo sapien
cagttgacgaagatcattcctgaac

SEQ ID NO: 4288674 - DNA, 25 bp, Homo sapien
ggctccgaccgaagcgcataatgaa

SEQ ID NO: 4288675 - DNA, 25 bp, Homo sapien
tgacattacatcaaacacaataagg

SEQ ID NO: 4288676 - DNA, 25 bp, Homo sapien
agcccgagcatagctggctggtgtt

SEQ ID NO: 4288677 - DNA, 25 bp, Homo sapien
gatacaccattagcattgatgcctt

SEQ ID NO: 4288678 - DNA, 25 bp, Homo sapien
gctggtgttgggctcttggatacac

SEQ ID NO: 4288679 - DNA, 25 bp, Homo sapien
gggctcttggatacaccattagcat

SEQ ID NO: 4288680 - DNA, 25 bp, Homo sapien
actagatcctctgcgctcagcttct

SEQ ID NO: 4288681 - DNA, 25 bp, Homo sapien
ctagatcctctgcgctcagcttctt

SEQ ID NO: 4288682 - DNA, 25 bp, Homo sapien
ctctgctccaaggagcgagcctgag

SEQ ID NO: 4288683 - DNA, 25 bp, Homo sapien
acactagatcctctgcgctcagctt

SEQ ID NO: 4288684 - DNA, 25 bp, Homo sapien
tcctgccagcggtgtgctttctgga

SEQ ID NO: 4288685 - DNA, 25 bp, Homo sapien
tgttgtcctgccagcggtgtgcttt

SEQ ID NO: 4288686 - DNA, 25 bp, Homo sapien
cttgatgttgtcctgccagcggtgt

SEQ ID NO: 4288687 - DNA, 25 bp, Homo sapien
tttctggaagttctctgcagcatca

SEQ ID NO: 4288688 - DNA, 25 bp, Homo sapien
ctgccctatgcccaccccaaagcct

SEQ ID NO: 4288689 - DNA, 25 bp, Homo sapien
cagggaggtcagaagcggaggaagg

SEQ ID NO: 4288690 - DNA, 25 bp, Homo sapien
caggcacaacctcgcagaaccacca

SEQ ID NO: 4288691 - DNA, 25 bp, Homo sapien
tgggcacgctgggtgccagactgtg

SEQ ID NO: 4288692 - DNA, 25 bp, Homo sapien
actgggcacgctgggtgccagactg

SEQ ID NO: 4288693 - DNA, 25 bp, Homo sapien
tcacaggcacaacctcgcagaacca

SEQ ID NO: 4288694 - DNA, 25 bp, Homo sapien
ctttcctgtcgggtgcactgttgac

SEQ ID NO: 4288695 - DNA, 25 bp, Homo sapien
gggtgatggagacacgccagtggct

SEQ ID NO: 4288696 - DNA, 25 bp, Homo sapien
tgtcgggtgcactgttgacatgcat

SEQ ID NO: 4288697 - DNA, 25 bp, Homo sapien
ctgtgctttcctgtcgggtgcactg

SEQ ID NO: 4288698 - DNA, 25 bp, Homo sapien
gccaggtcagccaggagctgagtcc

SEQ ID NO: 4288699 - DNA, 25 bp, Homo sapien
cctggtgccagatcagtgcattctc

SEQ ID NO: 4288700 - DNA, 25 bp, Homo sapien
ggtggacaggagtgcctcatctggc

SEQ ID NO: 4288701 - DNA, 25 bp, Homo sapien
gaagccttctcagatgcctctatgc

SEQ ID NO: 4288702 - DNA, 25 bp, Homo sapien
gctagaggcctctacaggaagagct

SEQ ID NO: 4288703 - DNA, 25 bp, Homo sapien
tggaatggcaccgtcactggaagaa

SEQ ID NO: 4288704 - DNA, 25 bp, Homo sapien
tagggtgctaggaagctcccctgca

SEQ ID NO: 4288705 - DNA, 25 bp, Homo sapien
tcagtgagcattacagacatagccc

SEQ ID NO: 4288706 - DNA, 25 bp, Homo sapien
cacctctgtatccctgagaagagtc

SEQ ID NO: 4288707 - DNA, 25 bp, Homo sapien
cctctgtatccctgagaagagtctg

SEQ ID NO: 4288708 - DNA, 25 bp, Homo sapien
acctctgtatccctgagaagagtct

SEQ ID NO: 4288709 - DNA, 25 bp, Homo sapien
catttaaggcgtttgtcagagccgt

SEQ ID NO: 4288710 - DNA, 25 bp, Homo sapien
ttacgaggagtaaaggcggccagtg

SEQ ID NO: 4288711 - DNA, 25 bp, Homo sapien
tcagagccgtgggacacggactgcc

SEQ ID NO: 4288712 - DNA, 25 bp, Homo sapien
acagctggagccgtggtgacaacat

SEQ ID NO: 4288713 - DNA, 25 bp, Homo sapien
tcacagatgcctagcaacggccaca

SEQ ID NO: 4288714 - DNA, 25 bp, Homo sapien
ctgggcctcacagatgcctagcaac

SEQ ID NO: 4288715 - DNA, 25 bp, Homo sapien
agatgcctagcaacggccacagagc

SEQ ID NO: 4288716 - DNA, 25 bp, Homo sapien
ggcctcacagatgcctagcaacggc

SEQ ID NO: 4288717 - DNA, 25 bp, Homo sapien
agggcaggacagcagtcgtgtacat

SEQ ID NO: 4288718 - DNA, 25 bp, Homo sapien
taagtgacgcatggcttcagaggca

SEQ ID NO: 4288719 - DNA, 25 bp, Homo sapien
ccacccagtgtgataggcaggctag

SEQ ID NO: 4288720 - DNA, 25 bp, Homo sapien
tatactctggaaacaggagtcctgg

SEQ ID NO: 4288721 - DNA, 25 bp, Homo sapien
tcctgtcacctatgagagccgctga

SEQ ID NO: 4288722 - DNA, 25 bp, Homo sapien
ctctgcggcatcctggtgctcccca

SEQ ID NO: 4288723 - DNA, 25 bp, Homo sapien
ggccagtgtgcagggatctttgttc

SEQ ID NO: 4288724 - DNA, 25 bp, Homo sapien
tctttgttctagctccacagggcca

SEQ ID NO: 4288725 - DNA, 25 bp, Homo sapien
ggccatggccgcctcttctctgcgg

SEQ ID NO: 4288726 - DNA, 25 bp, Homo sapien
tctacaagggaaacattggtgaccc

SEQ ID NO: 4288727 - DNA, 25 bp, Homo sapien
gacaccatggttggagctctgagtc

SEQ ID NO: 4288728 - DNA, 25 bp, Homo sapien
tggtgaccccgttggtgaccttgag

SEQ ID NO: 4288729 - DNA, 25 bp, Homo sapien
gctctgagtcgggaattctacaagg

SEQ ID NO: 4288730 - DNA, 25 bp, Homo sapien
gtggccccacatccagaaatctttc

SEQ ID NO: 4288731 - DNA, 25 bp, Homo sapien
ggtggccccacatccagaaatcttt

SEQ ID NO: 4288732 - DNA, 25 bp, Homo sapien
cactggctgcctcctggggaggtgt

SEQ ID NO: 4288733 - DNA, 25 bp, Homo sapien
ctgcctcctggggaggtgtcggcag

SEQ ID NO: 4288734 - DNA, 25 bp, Homo sapien
ctcctggggaggtgtcggcagacat

SEQ ID NO: 4288735 - DNA, 25 bp, Homo sapien
gcctcctggggaggtgtcggcagac

SEQ ID NO: 4288736 - DNA, 25 bp, Homo sapien
ttgcctgtcccatgttagctgctct

SEQ ID NO: 4288737 - DNA, 25 bp, Homo sapien
ccaggatttcagaacgaagggccag

SEQ ID NO: 4288738 - DNA, 25 bp, Homo sapien
ttacttctctgatcctaaattaggc

SEQ ID NO: 4288739 - DNA, 25 bp, Homo sapien
cgaagggccagacactattaaaact

SEQ ID NO: 4288740 - DNA, 25 bp, Homo sapien
cctgtgggcggcaacttgccaggaa

SEQ ID NO: 4288741 - DNA, 25 bp, Homo sapien
taatcagctgtaaacgccgcaatca

SEQ ID NO: 4288742 - DNA, 25 bp, Homo sapien
acacaatgggtgtccaacagattcc

SEQ ID NO: 4288743 - DNA, 25 bp, Homo sapien
gcctaattggctccacgtgtctgcg

SEQ ID NO: 4288744 - DNA, 25 bp, Homo sapien
catttgtaaactggacagggggcag

SEQ ID NO: 4288745 - DNA, 25 bp, Homo sapien
gggcagcaaagctaggaagtagtgt

SEQ ID NO: 4288746 - DNA, 25 bp, Homo sapien
ctggagcaactgcagttatgcctct

SEQ ID NO: 4288747 - DNA, 25 bp, Homo sapien
gaactatagtggtctgaggctgaca

SEQ ID NO: 4288748 - DNA, 25 bp, Homo sapien
gcagcctcgaatttgaaatcctggg

SEQ ID NO: 4288749 - DNA, 25 bp, Homo sapien
tcatttacgtatgaccttccctggt

SEQ ID NO: 4288750 - DNA, 25 bp, Homo sapien
gcttgcagagccccctcgacactcc

SEQ ID NO: 4288751 - DNA, 25 bp, Homo sapien
tgcagagccccctcgacactccctc

SEQ ID NO: 4288752 - DNA, 25 bp, Homo sapien
gcagcctacctcaggggcaaactcc

SEQ ID NO: 4288753 - DNA, 25 bp, Homo sapien
tgcagcctacctcaggggcaaactc

SEQ ID NO: 4288754 - DNA, 25 bp, Homo sapien
agaaggctctcaatgtcccctgcca

SEQ ID NO: 4288755 - DNA, 25 bp, Homo sapien
ctcgaacaggttccggttgtccttg

SEQ ID NO: 4288756 - DNA, 25 bp, Homo sapien
ggctcattctcctgtacctcgaaca

SEQ ID NO: 4288757 - DNA, 25 bp, Homo sapien
tccaccaacttctgaggctcattct

SEQ ID NO: 4288758 - DNA, 25 bp, Homo sapien
aagccaggggtgagaccaggtggtc

SEQ ID NO: 4288759 - DNA, 25 bp, Homo sapien
ggtgagaccaggtggtcccacgtcc

SEQ ID NO: 4288760 - DNA, 25 bp, Homo sapien
agaccaggtggtcccacgtcctcat

SEQ ID NO: 4288761 - DNA, 25 bp, Homo sapien
tgagaccaggtggtcccacgtcctc

SEQ ID NO: 4288762 - DNA, 25 bp, Homo sapien
agccatgggaaaagaggcataggga

SEQ ID NO: 4288763 - DNA, 25 bp, Homo sapien
ggctgaaagactgaggcccctggaa

SEQ ID NO: 4288764 - DNA, 25 bp, Homo sapien
gaggcatagggatgaactgggcagg

SEQ ID NO: 4288765 - DNA, 25 bp, Homo sapien
cttggggcggatgcaggcagaggct

SEQ ID NO: 4288766 - DNA, 25 bp, Homo sapien
ttggggttttgccaggtgctccagc

SEQ ID NO: 4288767 - DNA, 25 bp, Homo sapien
ggttttgccaggtgctccagcaccc

SEQ ID NO: 4288768 - DNA, 25 bp, Homo sapien
gcacccctggcctgagccccgaggc

SEQ ID NO: 4288769 - DNA, 25 bp, Homo sapien
agcacccctggcctgagccccgagg

SEQ ID NO: 4288770 - DNA, 25 bp, Homo sapien
tatgcaattagtgtaaaaagtgcac

SEQ ID NO: 4288771 - DNA, 25 bp, Homo sapien
tagtacattatgtctaattatgcaa

SEQ ID NO: 4288772 - DNA, 25 bp, Homo sapien
actgtcatccattaccgcaattagt

SEQ ID NO: 4288773 - DNA, 25 bp, Homo sapien
cagcaacgcctccctgtttttaaag

SEQ ID NO: 4288774 - DNA, 25 bp, Homo sapien
ttatccatttacaccaggcctgact

SEQ ID NO: 4288775 - DNA, 25 bp, Homo sapien
tgacttgaggcctccagtgttaagg

SEQ ID NO: 4288776 - DNA, 25 bp, Homo sapien
tgctcctctgaaacatacgcgaatt

SEQ ID NO: 4288777 - DNA, 25 bp, Homo sapien
cagtgttaaggcctgtatctcaggg

SEQ ID NO: 4288778 - DNA, 25 bp, Homo sapien
ggtgtgctgagatactggagcactg

SEQ ID NO: 4288779 - DNA, 25 bp, Homo sapien
tgggtgtgctgagatactggagcac

SEQ ID NO: 4288780 - DNA, 25 bp, Homo sapien
gggtgtgctgagatactggagcact

SEQ ID NO: 4288781 - DNA, 25 bp, Homo sapien
gtgtgctgagatactggagcactga

SEQ ID NO: 4288782 - DNA, 25 bp, Homo sapien
tcccaactcacagaagtcgccgggt

SEQ ID NO: 4288783 - DNA, 25 bp, Homo sapien
gggtgcggccggctggtgtgggcgc

SEQ ID NO: 4288784 - DNA, 25 bp, Homo sapien
actcacagaagtcgccgggtgcggc

SEQ ID NO: 4288785 - DNA, 25 bp, Homo sapien
caactcacagaagtcgccgggtgcg

SEQ ID NO: 4288786 - DNA, 25 bp, Homo sapien
cgtgcacagtgtttgccatgcaaac

SEQ ID NO: 4288787 - DNA, 25 bp, Homo sapien
cttcccgcatccgtgcacagtgttt

SEQ ID NO: 4288788 - DNA, 25 bp, Homo sapien
aggactgatggcccggccacactgg

SEQ ID NO: 4288789 - DNA, 25 bp, Homo sapien
gggcccttagcctgaacagccatga

SEQ ID NO: 4288790 - DNA, 25 bp, Homo sapien
cacagaccctgtttcggactctgcc

SEQ ID NO: 4288791 - DNA, 25 bp, Homo sapien
agaccctgtttcggactctgcctcc

SEQ ID NO: 4288792 - DNA, 25 bp, Homo sapien
accctgtttcggactctgcctccat

SEQ ID NO: 4288793 - DNA, 25 bp, Homo sapien
gaccctgtttcggactctgcctcca

SEQ ID NO: 4288794 - DNA, 25 bp, Homo sapien
gtcttggaggcgatggtgccctggg

SEQ ID NO: 4288795 - DNA, 25 bp, Homo sapien
gggcttccacatcgtctgtcggcaa

SEQ ID NO: 4288796 - DNA, 25 bp, Homo sapien
cacttctagctctgtcaagggctcc

SEQ ID NO: 4288797 - DNA, 25 bp, Homo sapien
aaggagggaggcctgcacttctagc

SEQ ID NO: 4288798 - DNA, 25 bp, Homo sapien
caagaggcataaccagaacctgggt

SEQ ID NO: 4288799 - DNA, 25 bp, Homo sapien
tacagaggcctcaaaagtgaccagt

SEQ ID NO: 4288800 - DNA, 25 bp, Homo sapien
gaccctatcggagctggtgccagaa

SEQ ID NO: 4288801 - DNA, 25 bp, Homo sapien
gctaattaacccactgagcaggctg

SEQ ID NO: 4288802 - DNA, 25 bp, Homo sapien
gaggagccaagtccagtccctgctc

SEQ ID NO: 4288803 - DNA, 25 bp, Homo sapien
aaggaggagccaagtccagtccctg

SEQ ID NO: 4288804 - DNA, 25 bp, Homo sapien
ccacagcctatggagaggcagagaa

SEQ ID NO: 4288805 - DNA, 25 bp, Homo sapien
gaaggaggagccaagtccagtccct

SEQ ID NO: 4288806 - DNA, 25 bp, Homo sapien
tgctgcactggtaggccctctgctt

SEQ ID NO: 4288807 - DNA, 25 bp, Homo sapien
caggcgtccaatcccaaaagtcttc

SEQ ID NO: 4288808 - DNA, 25 bp, Homo sapien
gcatttccaggcgtccaatcccaaa

SEQ ID NO: 4288809 - DNA, 25 bp, Homo sapien
tgcctgctgcactggtaggccctct

SEQ ID NO: 4288810 - DNA, 25 bp, Homo sapien
ggatagaacaggtcacaagcctgct

SEQ ID NO: 4288811 - DNA, 25 bp, Homo sapien
agggatagaacaggtcacaagcctg

SEQ ID NO: 4288812 - DNA, 25 bp, Homo sapien
gaggctgattccactccaaaacagg

SEQ ID NO: 4288813 - DNA, 25 bp, Homo sapien
gctctcacagatgagcggcataatc

SEQ ID NO: 4288814 - DNA, 25 bp, Homo sapien
cattgagcacctctctattgcagct

SEQ ID NO: 4288815 - DNA, 25 bp, Homo sapien
tgagcacctctctattgcagctctc

SEQ ID NO: 4288816 - DNA, 25 bp, Homo sapien
cggcataatcactccgctctctggg

SEQ ID NO: 4288817 - DNA, 25 bp, Homo sapien
taatatgcctgcgaccggcacatgg

SEQ ID NO: 4288818 - DNA, 25 bp, Homo sapien
ccaggaccagtcaaagtaatatgcc

SEQ ID NO: 4288819 - DNA, 25 bp, Homo sapien
gaccggcacatggacttttatttct

SEQ ID NO: 4288820 - DNA, 25 bp, Homo sapien
agggagacgtcaaagccgccaggac

SEQ ID NO: 4288821 - DNA, 25 bp, Homo sapien
aacacagcgttacaaacatcgggtg

SEQ ID NO: 4288822 - DNA, 25 bp, Homo sapien
gaggccagcgcaacaaggacctcag

SEQ ID NO: 4288823 - DNA, 25 bp, Homo sapien
aacaaggacctcagggagcaagcac

SEQ ID NO: 4288824 - DNA, 25 bp, Homo sapien
ggtgcatcagattactgttctctgc

SEQ ID NO: 4288825 - DNA, 25 bp, Homo sapien
gaagatctcagcgatggaaaggctt

SEQ ID NO: 4288826 - DNA, 25 bp, Homo sapien
tcccagaatcgagctgaagaccaca

SEQ ID NO: 4288827 - DNA, 25 bp, Homo sapien
tcgagctgaagaccacacttggcag

SEQ ID NO: 4288828 - DNA, 25 bp, Homo sapien
ggaaaggcttcctccggcgtctcac

SEQ ID NO: 4288829 - DNA, 25 bp, Homo sapien
gcagtagcgcagactaaaaatagtt

SEQ ID NO: 4288830 - DNA, 25 bp, Homo sapien
cagcagtagcgcagactaaaaatag

SEQ ID NO: 4288831 - DNA, 25 bp, Homo sapien
agtagcgcagactaaaaatagttta

SEQ ID NO: 4288832 - DNA, 25 bp, Homo sapien
cagtagcgcagactaaaaatagttt

SEQ ID NO: 4288833 - DNA, 25 bp, Homo sapien
agcaatcagcaaaacagacacttgg

SEQ ID NO: 4288834 - DNA, 25 bp, Homo sapien
gagcaatcagcaaaacagacacttg

SEQ ID NO: 4288835 - DNA, 25 bp, Homo sapien
cccattcctctcctcgttctgcccc

SEQ ID NO: 4288836 - DNA, 25 bp, Homo sapien
ctccccccattcctctcctcgttct

SEQ ID NO: 4288837 - DNA, 25 bp, Homo sapien
tccccccattcctctcctcgttctg

SEQ ID NO: 4288838 - DNA, 25 bp, Homo sapien
cccccattcctctcctcgttctgcc

SEQ ID NO: 4288839 - DNA, 25 bp, Homo sapien
ctgaggcttggtttcatcacttgca

SEQ ID NO: 4288840 - DNA, 25 bp, Homo sapien
tggtttcatcacttgcagcaatgat

SEQ ID NO: 4288841 - DNA, 25 bp, Homo sapien
cagcaatgatgctgagcgcagagac

SEQ ID NO: 4288842 - DNA, 25 bp, Homo sapien
cttgcagcaatgatgctgagcgcag

SEQ ID NO: 4288843 - DNA, 25 bp, Homo sapien
gtggccccacatccagaaatctttc

SEQ ID NO: 4288844 - DNA, 25 bp, Homo sapien
ggtggccccacatccagaaatcttt

SEQ ID NO: 4288845 - DNA, 25 bp, Homo sapien
tcactggctgcctcctggggagggg

SEQ ID NO: 4288846 - DNA, 25 bp, Homo sapien
ctcctggggaggggtcagcagacat

SEQ ID NO: 4288847 - DNA, 25 bp, Homo sapien
gcctcctggggaggggtcagcagac

SEQ ID NO: 4288848 - DNA, 25 bp, Homo sapien
gctcactggctgcctcctggggagg

SEQ ID NO: 4288849 - DNA, 25 bp, Homo sapien
ccaagattatttgggcactccagga

SEQ ID NO: 4288850 - DNA, 25 bp, Homo sapien
cctagggcatctaaggctgtgagtt

SEQ ID NO: 4288851 - DNA, 25 bp, Homo sapien
tagacatgaccttctctagtttgcc

SEQ ID NO: 4288852 - DNA, 25 bp, Homo sapien
tgagtgtgcacattcctggagggct

SEQ ID NO: 4288853 - DNA, 25 bp, Homo sapien
ctgaaaatcatgcaggtgggagaat

SEQ ID NO: 4288854 - DNA, 25 bp, Homo sapien
cacactggtagatggagcataatga

SEQ ID NO: 4288855 - DNA, 25 bp, Homo sapien
tccgtcagcacctgatcaagaggca

SEQ ID NO: 4288856 - DNA, 25 bp, Homo sapien
cctgcacgatgatgcagtgcagtgg

SEQ ID NO: 4288857 - DNA, 25 bp, Homo sapien
agcttccgggtctccctgcacgatg

SEQ ID NO: 4288858 - DNA, 25 bp, Homo sapien
cagaagaggctgcccccaggtctgg

SEQ ID NO: 4288859 - DNA, 25 bp, Homo sapien
gaagaggctgcccccaggtctgggc

SEQ ID NO: 4288860 - DNA, 25 bp, Homo sapien
agaagaggctgcccccaggtctggg

SEQ ID NO: 4288861 - DNA, 25 bp, Homo sapien
cgggagccagctccagatgtagtac

SEQ ID NO: 4288862 - DNA, 25 bp, Homo sapien
tattaattacacattcctgaggagt

SEQ ID NO: 4288863 - DNA, 25 bp, Homo sapien
gtcagtgccgggagccagctccaga

SEQ ID NO: 4288864 - DNA, 25 bp, Homo sapien
catggccagactttggtcagtgccg

SEQ ID NO: 4288865 - DNA, 25 bp, Homo sapien
gagtgccccgtgccaagaaacagcc

SEQ ID NO: 4288866 - DNA, 25 bp, Homo sapien
cccagagctgttggcaggaagtaag

SEQ ID NO: 4288867 - DNA, 25 bp, Homo sapien
agccccagagctgttggcaggaagt

SEQ ID NO: 4288868 - DNA, 25 bp, Homo sapien
agtgccccgtgccaagaaacagccc

SEQ ID NO: 4288869 - DNA, 25 bp, Homo sapien
aggagtgctgcccatccagtcatgt

SEQ ID NO: 4288870 - DNA, 25 bp, Homo sapien
tccgatcgttgcctcaggaagagca

SEQ ID NO: 4288871 - DNA, 25 bp, Homo sapien
acagggtcatcgtccaagccgggtg

SEQ ID NO: 4288872 - DNA, 25 bp, Homo sapien
aatccctttcagcaacagggtcatc

SEQ ID NO: 4288873 - DNA, 25 bp, Homo sapien
cacgccgtcgacctcctgctccaga

SEQ ID NO: 4288874 - DNA, 25 bp, Homo sapien
ctgctggacgcctccaaaaatccgc

SEQ ID NO: 4288875 - DNA, 25 bp, Homo sapien
caaaaatccgcatcacgccgtcgac

SEQ ID NO: 4288876 - DNA, 25 bp, Homo sapien
ccagacgccgggcccagtgctgcat

SEQ ID NO: 4288877 - DNA, 25 bp, Homo sapien
gctacttttcattgtgaagagccag

SEQ ID NO: 4288878 - DNA, 25 bp, Homo sapien
caattttcactagaggaggacccac

SEQ ID NO: 4288879 - DNA, 25 bp, Homo sapien
ccaggtgctcctcatgcactgtggg

SEQ ID NO: 4288880 - DNA, 25 bp, Homo sapien
aagcacctgcgattcccctttgaag

SEQ ID NO: 4288881 - DNA, 25 bp, Homo sapien
ctctctcctgcacacttgggttctg

SEQ ID NO: 4288882 - DNA, 25 bp, Homo sapien
tctggttcccggagccagactccat

SEQ ID NO: 4288883 - DNA, 25 bp, Homo sapien
ggttctggttcccggagccagactc

SEQ ID NO: 4288884 - DNA, 25 bp, Homo sapien
ttctggttcccggagccagactcca

SEQ ID NO: 4288885 - DNA, 25 bp, Homo sapien
cagagagcacagtagggttgggaca

SEQ ID NO: 4288886 - DNA, 25 bp, Homo sapien
agagagcacagtagggttgggacac

SEQ ID NO: 4288887 - DNA, 25 bp, Homo sapien
aaggcaggctgctcccacaccgagg

SEQ ID NO: 4288888 - DNA, 25 bp, Homo sapien
caaggcaggctgctcccacaccgag

SEQ ID NO: 4288889 - DNA, 25 bp, Homo sapien
aggcaggctgctcccacaccgaggc

SEQ ID NO: 4288890 - DNA, 25 bp, Homo sapien
tgccctgcctgactactctgtgaga

SEQ ID NO: 4288891 - DNA, 25 bp, Homo sapien
agaccctactgtacaagcccctagg

SEQ ID NO: 4288892 - DNA, 25 bp, Homo sapien
tcaagttgctctgcccacgtactgc

SEQ ID NO: 4288893 - DNA, 25 bp, Homo sapien
tgcgccagccaaggtgtggcttaaa

SEQ ID NO: 4288894 - DNA, 25 bp, Homo sapien
gccggaggagggtgttggtcaggaa

SEQ ID NO: 4288895 - DNA, 25 bp, Homo sapien
tcacatcggccttctagaggagact

SEQ ID NO: 4288896 - DNA, 25 bp, Homo sapien
ggtgcctactctggtcaggttctca

SEQ ID NO: 4288897 - DNA, 25 bp, Homo sapien
aggagactcgtgcaggcccagaagc

SEQ ID NO: 4288898 - DNA, 25 bp, Homo sapien
ggacagagggataggtgcctactct

SEQ ID NO: 4288899 - DNA, 25 bp, Homo sapien
tgaagtccatttccatcacggcaaa

SEQ ID NO: 4288900 - DNA, 25 bp, Homo sapien
gcactatgattgaagtccatttcca

SEQ ID NO: 4288901 - DNA, 25 bp, Homo sapien
gaaagacaataacgcatccaccagc

SEQ ID NO: 4288902 - DNA, 25 bp, Homo sapien
cagccctgaacttccattcgattct

SEQ ID NO: 4288903 - DNA, 25 bp, Homo sapien
ttgacagaggacacgtccgtgcggc

SEQ ID NO: 4288904 - DNA, 25 bp, Homo sapien
ggacacgtccgtgcggcacttgtaa

SEQ ID NO: 4288905 - DNA, 25 bp, Homo sapien
gcacttgtaatttgccaactgatca

SEQ ID NO: 4288906 - DNA, 25 bp, Homo sapien
tgtgaaaaatccagacggttgacag

SEQ ID NO: 4288907 - DNA, 25 bp, Homo sapien
gggcagatgcgcggctccaactccg

SEQ ID NO: 4288908 - DNA, 25 bp, Homo sapien
ctctggctgtaaagcgccggattcc

SEQ ID NO: 4288909 - DNA, 25 bp, Homo sapien
caactccgccggacaggggtcgctg

SEQ ID NO: 4288910 - DNA, 25 bp, Homo sapien
aagcgccggattcccaccagggagg

SEQ ID NO: 4288911 - DNA, 25 bp, Homo sapien
gcttgaagatcttgccttgcctcat

SEQ ID NO: 4288912 - DNA, 25 bp, Homo sapien
agtttcgcgacgcagccagagcgcc

SEQ ID NO: 4288913 - DNA, 25 bp, Homo sapien
gaatcagctgacaagctcggaccgc

SEQ ID NO: 4288914 - DNA, 25 bp, Homo sapien
gggaccgcggctgccagccttcggg

SEQ ID NO: 4288915 - DNA, 25 bp, Homo sapien
ggaagctgtaggcagaggcgccggg

SEQ ID NO: 4288916 - DNA, 25 bp, Homo sapien
ccgcaggtccgagccggcaccgcca

SEQ ID NO: 4288917 - DNA, 25 bp, Homo sapien
cgctgggccgggccgagaggcgccg

SEQ ID NO: 4288918 - DNA, 25 bp, Homo sapien
cgagcagcggtagaagcggcagcag

SEQ ID NO: 4288919 - DNA, 25 bp, Homo sapien
tccattcaagatgcggcgccgcggg

SEQ ID NO: 4288920 - DNA, 25 bp, Homo sapien
cattcaagatgcggcgccgcgggga

SEQ ID NO: 4288921 - DNA, 25 bp, Homo sapien
gtttccattcaagatgcggcgccgc

SEQ ID NO: 4288922 - DNA, 25 bp, Homo sapien
tttccattcaagatgcggcgccgcg

SEQ ID NO: 4288923 - DNA, 25 bp, Homo sapien
gcgggcggtaactcggcctctcctc

SEQ ID NO: 4288924 - DNA, 25 bp, Homo sapien
gctgcgcgctgctatctccctgcag

SEQ ID NO: 4288925 - DNA, 25 bp, Homo sapien
tgcagcgctggctccaagcgctctg

SEQ ID NO: 4288926 - DNA, 25 bp, Homo sapien
ggacctgcgctcaaatagcagccgc

SEQ ID NO: 4288927 - DNA, 25 bp, Homo sapien
ctggctcgggcgtcctgcgccccag

SEQ ID NO: 4288928 - DNA, 25 bp, Homo sapien
gaatcctgccctactggctcgggcg

SEQ ID NO: 4288929 - DNA, 25 bp, Homo sapien
cccgaatcctgccctactggctcgg

SEQ ID NO: 4288930 - DNA, 25 bp, Homo sapien
cgcgcgcctctcgtccccgcgcagc

SEQ ID NO: 4288931 - DNA, 25 bp, Homo sapien
ccccgtggctctagctatctttaag

SEQ ID NO: 4288932 - DNA, 25 bp, Homo sapien
atttctctctgtcgggggcttgcac

SEQ ID NO: 4288933 - DNA, 25 bp, Homo sapien
cctgggcacggctgtacggttgtgg

SEQ ID NO: 4288934 - DNA, 25 bp, Homo sapien
cctaagcggaaacctgggcacggct

SEQ ID NO: 4288935 - DNA, 25 bp, Homo sapien
ccccaggggaccatcataaaggaca

SEQ ID NO: 4288936 - DNA, 25 bp, Homo sapien
cattcctcttgggtgccctgtcggg

SEQ ID NO: 4288937 - DNA, 25 bp, Homo sapien
tgggtgccctgtcgggggtgggcgc

SEQ ID NO: 4288938 - DNA, 25 bp, Homo sapien
tgccctgtcgggggtgggcgccttc

SEQ ID NO: 4288939 - DNA, 25 bp, Homo sapien
ggtgggcgccttcccaaggcagact

SEQ ID NO: 4288940 - DNA, 25 bp, Homo sapien
tcagctaccctcacaaaactcaggt

SEQ ID NO: 4288941 - DNA, 25 bp, Homo sapien
gatgggcgcaactgctcagctagag

SEQ ID NO: 4288942 - DNA, 25 bp, Homo sapien
aaaggctccaggctaaggtctaagt

SEQ ID NO: 4288943 - DNA, 25 bp, Homo sapien
gagaggtcgggatcaacctgctcat

SEQ ID NO: 4288944 - DNA, 25 bp, Homo sapien
gcagcagactgatgccagctcctcc

SEQ ID NO: 4288945 - DNA, 25 bp, Homo sapien
ggcagcagactgatgccagctcctc

SEQ ID NO: 4288946 - DNA, 25 bp, Homo sapien
cacgacatctataaggagcatccaa

SEQ ID NO: 4288947 - DNA, 25 bp, Homo sapien
ccagtgcaaggtccctcatggaagg

SEQ ID NO: 4288948 - DNA, 25 bp, Homo sapien
gagcatccaagggtggactccgttg

SEQ ID NO: 4288949 - DNA, 25 bp, Homo sapien
gatgccttgtatagttgcccagcac

SEQ ID NO: 4288950 - DNA, 25 bp, Homo sapien
acatgaggctggcatatctggaaaa

SEQ ID NO: 4288951 - DNA, 25 bp, Homo sapien
tgaggctggcatatctggaaaagcc

SEQ ID NO: 4288952 - DNA, 25 bp, Homo sapien
gctggcatatctggaaaagccctgc

SEQ ID NO: 4288953 - DNA, 25 bp, Homo sapien
tgccctgatgccatgcggtactgct

SEQ ID NO: 4288954 - DNA, 25 bp, Homo sapien
aattgagcatgctccagatactcca

SEQ ID NO: 4288955 - DNA, 25 bp, Homo sapien
tgggcaggtagaattgagcatgctc

SEQ ID NO: 4288956 - DNA, 25 bp, Homo sapien
tctgggggatttatggaggatttta

SEQ ID NO: 4288957 - DNA, 25 bp, Homo sapien
ggattttatcttccctccttgatca

SEQ ID NO: 4288958 - DNA, 25 bp, Homo sapien
tatggaggattttatcttccctcct

SEQ ID NO: 4288959 - DNA, 25 bp, Homo sapien
ggatttatggaggattttatcttcc

SEQ ID NO: 4288960 - DNA, 25 bp, Homo sapien
gagagggaatgcttcattccctccc

SEQ ID NO: 4288961 - DNA, 25 bp, Homo sapien
ggagagggaatgcttcattccctcc

SEQ ID NO: 4288962 - DNA, 25 bp, Homo sapien
gaggaaccccaggcactgactcagc

SEQ ID NO: 4288963 - DNA, 25 bp, Homo sapien
atgaaactccgcaggaggaacccca

SEQ ID NO: 4288964 - DNA, 25 bp, Homo sapien
catagccatgaaactccgcaggagg

SEQ ID NO: 4288965 - DNA, 25 bp, Homo sapien
cactgactcagcagacacgtggctg

SEQ ID NO: 4288966 - DNA, 25 bp, Homo sapien
gagcacctgccccaacctgcagccc

SEQ ID NO: 4288967 - DNA, 25 bp, Homo sapien
ttcctggagcaagggcacctcctca

SEQ ID NO: 4288968 - DNA, 25 bp, Homo sapien
tggagcaagggcacctcctcaccag

SEQ ID NO: 4288969 - DNA, 25 bp, Homo sapien
cccaggagcacctgccccaacctgc

SEQ ID NO: 4288970 - DNA, 25 bp, Homo sapien
tttacgaacccctctctggcttgga

SEQ ID NO: 4288971 - DNA, 25 bp, Homo sapien
tttatggcccgtggtgcttcctctg

SEQ ID NO: 4288972 - DNA, 25 bp, Homo sapien
ttcctctgcaatggcctatgctgtt

SEQ ID NO: 4288973 - DNA, 25 bp, Homo sapien
gggctcgctaagtgaacattccttg

SEQ ID NO: 4288974 - DNA, 25 bp, Homo sapien
tggagccgatcacaaagcactaatg

SEQ ID NO: 4288975 - DNA, 25 bp, Homo sapien
caattagcagagatgaggcaacggg

SEQ ID NO: 4288976 - DNA, 25 bp, Homo sapien
cctgaggccggtgggactttatctc

SEQ ID NO: 4288977 - DNA, 25 bp, Homo sapien
tgtccccaccaacgaaggcagtggt

SEQ ID NO: 4288978 - DNA, 25 bp, Homo sapien
gtcaagttctgtgcacatgctcggg

SEQ ID NO: 4288979 - DNA, 25 bp, Homo sapien
agcagagcccacagggtcaagttct

SEQ ID NO: 4288980 - DNA, 25 bp, Homo sapien
tcaagttctgtgcacatgctcgggg

SEQ ID NO: 4288981 - DNA, 25 bp, Homo sapien
gcagagcccacagggtcaagttctg

SEQ ID NO: 4288982 - DNA, 25 bp, Homo sapien
cgggccacaggggagttgacgatgg

SEQ ID NO: 4288983 - DNA, 25 bp, Homo sapien
ggagcccgggccacaggggagttga

SEQ ID NO: 4288984 - DNA, 25 bp, Homo sapien
gagcccgggccacaggggagttgac

SEQ ID NO: 4288985 - DNA, 25 bp, Homo sapien
gcccgggccacaggggagttgacga

SEQ ID NO: 4288986 - DNA, 25 bp, Homo sapien
tctgagggactccatgtaaaggctt

SEQ ID NO: 4288987 - DNA, 25 bp, Homo sapien
gccttgcataggaaccgaggtccca

SEQ ID NO: 4288988 - DNA, 25 bp, Homo sapien
tcattcaggtcagcataaggcaggc

SEQ ID NO: 4288989 - DNA, 25 bp, Homo sapien
tatgggtttggatctaggctctcag

SEQ ID NO: 4288990 - DNA, 25 bp, Homo sapien
aaatgctgctggtcttcttcttgca

SEQ ID NO: 4288991 - DNA, 25 bp, Homo sapien
tcttcttgcaggacctggattgagt

SEQ ID NO: 4288992 - DNA, 25 bp, Homo sapien
tcttgcaggacctggattgagtccc

SEQ ID NO: 4288993 - DNA, 25 bp, Homo sapien
gcaggacctggattgagtcccatga

SEQ ID NO: 4288994 - DNA, 25 bp, Homo sapien
tggaccaaaagaatcagggaggacc

SEQ ID NO: 4288995 - DNA, 25 bp, Homo sapien
ccaaaagaatcagggaggacccagg

SEQ ID NO: 4288996 - DNA, 25 bp, Homo sapien
gctggaccaaaagaatcagggagga

SEQ ID NO: 4288997 - DNA, 25 bp, Homo sapien
gaccaaaagaatcagggaggaccca

SEQ ID NO: 4288998 - DNA, 25 bp, Homo sapien
cccaatatttattgaccccacactc

SEQ ID NO: 4288999 - DNA, 25 bp, Homo sapien
aatatttattgaccccacactctgg

SEQ ID NO: 4289000 - DNA, 25 bp, Homo sapien
cagaacctttcaccccaatatttat

SEQ ID NO: 4289001 - DNA, 25 bp, Homo sapien
caaccagaacctttcaccccaatat

SEQ ID NO: 4289002 - DNA, 25 bp, Homo sapien
gatcttctgaagctcccacatccct

SEQ ID NO: 4289003 - DNA, 25 bp, Homo sapien
tcttctgaagctcccacatccctgg

SEQ ID NO: 4289004 - DNA, 25 bp, Homo sapien
ggatcttctgaagctcccacatccc

SEQ ID NO: 4289005 - DNA, 25 bp, Homo sapien
ccccagacgctggatcttctgaagc

SEQ ID NO: 4289006 - DNA, 25 bp, Homo sapien
tctcagggcccataacagatgctgc

SEQ ID NO: 4289007 - DNA, 25 bp, Homo sapien
gaggctccagattccaaaaaacagg

SEQ ID NO: 4289008 - DNA, 25 bp, Homo sapien
tatcagaagtccaggcttgtcccag

SEQ ID NO: 4289009 - DNA, 25 bp, Homo sapien
gacagggagccgttttcagaagcag

SEQ ID NO: 4289010 - DNA, 25 bp, Homo sapien
atggcattggccacatcggtaaaca

SEQ ID NO: 4289011 - DNA, 25 bp, Homo sapien
catcggtaaacaccagccggctggg

SEQ ID NO: 4289012 - DNA, 25 bp, Homo sapien
ttggccacatcggtaaacaccagcc

SEQ ID NO: 4289013 - DNA, 25 bp, Homo sapien
cggtaaacaccagccggctgggtct

SEQ ID NO: 4289014 - DNA, 25 bp, Homo sapien
tgaccacaaggcaggtgctagaaag

SEQ ID NO: 4289015 - DNA, 25 bp, Homo sapien
agcagcctgtacagaggcggcgtcc

SEQ ID NO: 4289016 - DNA, 25 bp, Homo sapien
agcctgtacagaggcggcgtcccgc

SEQ ID NO: 4289017 - DNA, 25 bp, Homo sapien
acagaggcggcgtcccgcccatgct

SEQ ID NO: 4289018 - DNA, 25 bp, Homo sapien
gtacagaggcggcgtcccgcccatg

SEQ ID NO: 4289019 - DNA, 25 bp, Homo sapien
gagctggtggcgtagcttctccagc

SEQ ID NO: 4289020 - DNA, 25 bp, Homo sapien
atgagctggtggcgtagcttctcca

SEQ ID NO: 4289021 - DNA, 25 bp, Homo sapien
tgagctggtggcgtagcttctccag

SEQ ID NO: 4289022 - DNA, 25 bp, Homo sapien
cacacaaccatgcttagggccttaa

SEQ ID NO: 4289023 - DNA, 25 bp, Homo sapien
cacaaccatgcttagggccttaagg

SEQ ID NO: 4289024 - DNA, 25 bp, Homo sapien
caaccatgcttagggccttaaggtt

SEQ ID NO: 4289025 - DNA, 25 bp, Homo sapien
tggggatgggggcaaaggctgctgg

SEQ ID NO: 4289026 - DNA, 25 bp, Homo sapien
ctcttcttcttcctgatgtacaaaa

SEQ ID NO: 4289027 - DNA, 25 bp, Homo sapien
tcttcttcttcctgatgtacaaaac

SEQ ID NO: 4289028 - DNA, 25 bp, Homo sapien
acactggccccatgcctccttttga

SEQ ID NO: 4289029 - DNA, 25 bp, Homo sapien
tgacattgttagctgcagacagtgc

SEQ ID NO: 4289030 - DNA, 25 bp, Homo sapien
gccccatgcctccttttgacattgt

SEQ ID NO: 4289031 - DNA, 25 bp, Homo sapien
gacattgttagctgcagacagtgcc

SEQ ID NO: 4289032 - DNA, 25 bp, Homo sapien
cattaatagattgttggcgggcaca

SEQ ID NO: 4289033 - DNA, 25 bp, Homo sapien
taaatgaatgttcactgccaacagc

SEQ ID NO: 4289034 - DNA, 25 bp, Homo sapien
gaggcaggagactcgattaagcccc

SEQ ID NO: 4289035 - DNA, 25 bp, Homo sapien
tttccagttggaagcgtagcctctc

SEQ ID NO: 4289036 - DNA, 25 bp, Homo sapien
acagccaggcctatcaccgtgatga

SEQ ID NO: 4289037 - DNA, 25 bp, Homo sapien
gccaccagctgcatcagggattctg

SEQ ID NO: 4289038 - DNA, 25 bp, Homo sapien
tctggtgtcattaaaggtggtggcc

SEQ ID NO: 4289039 - DNA, 25 bp, Homo sapien
agcccctagcagatgcggtcctgga

SEQ ID NO: 4289040 - DNA, 25 bp, Homo sapien
tcctgactccggagtgccccagcct

SEQ ID NO: 4289041 - DNA, 25 bp, Homo sapien
ctgagaggctgcctgatgccagtca

SEQ ID NO: 4289042 - DNA, 25 bp, Homo sapien
cagccacctccttggataaagggag

SEQ ID NO: 4289043 - DNA, 25 bp, Homo sapien
tggataaagggagccccctgccttc

SEQ ID NO: 4289044 - DNA, 25 bp, Homo sapien
ctgcatcctctgtctgtgggtgaga

SEQ ID NO: 4289045 - DNA, 25 bp, Homo sapien
ggtgagatgatcatagtgatcaaac

SEQ ID NO: 4289046 - DNA, 25 bp, Homo sapien
ctgtgggtgagatgatcatagtgat

SEQ ID NO: 4289047 - DNA, 25 bp, Homo sapien
cgtatctacggtgcccctgtttttg

SEQ ID NO: 4289048 - DNA, 25 bp, Homo sapien
agagatttgcccagtgcagagggcc

SEQ ID NO: 4289049 - DNA, 25 bp, Homo sapien
tgagagatttgcccagtgcagaggg

SEQ ID NO: 4289050 - DNA, 25 bp, Homo sapien
agatttgcccagtgcagagggccct

SEQ ID NO: 4289051 - DNA, 25 bp, Homo sapien
gagatttgcccagtgcagagggccc

SEQ ID NO: 4289052 - DNA, 25 bp, Homo sapien
tctcccggcgccgagctcagttgga

SEQ ID NO: 4289053 - DNA, 25 bp, Homo sapien
gcgccgagctcagttggagaggcta

SEQ ID NO: 4289054 - DNA, 25 bp, Homo sapien
ccgagctcagttggagaggctaggg

SEQ ID NO: 4289055 - DNA, 25 bp, Homo sapien
ttaatcctctcccggcgccgagctc

SEQ ID NO: 4289056 - DNA, 25 bp, Homo sapien
caagcccggcgtctggggctgcggg

SEQ ID NO: 4289057 - DNA, 25 bp, Homo sapien
atccgcgagcgctggctctgccggc

SEQ ID NO: 4289058 - DNA, 25 bp, Homo sapien
tactgcgcaccagccgcatccgcga

SEQ ID NO: 4289059 - DNA, 25 bp, Homo sapien
gagccgctggccaggcccgctactg

SEQ ID NO: 4289060 - DNA, 25 bp, Homo sapien
tatctgaggaccagagccattttgg

SEQ ID NO: 4289061 - DNA, 25 bp, Homo sapien
cagagccattttggggcaccagagc

SEQ ID NO: 4289062 - DNA, 25 bp, Homo sapien
ccagggtggcaaccaactatatctg

SEQ ID NO: 4289063 - DNA, 25 bp, Homo sapien
gtggcaaccaactatatctgaggac

SEQ ID NO: 4289064 - DNA, 25 bp, Homo sapien
aatccagtgagtacatcgtggctca

SEQ ID NO: 4289065 - DNA, 25 bp, Homo sapien
tgccatagaactggtcagccactgg

SEQ ID NO: 4289066 - DNA, 25 bp, Homo sapien
ttatccagtgccatagaactggtca

SEQ ID NO: 4289067 - DNA, 25 bp, Homo sapien
ccgggaatccagtgagtacatcgtg

SEQ ID NO: 4289068 - DNA, 25 bp, Homo sapien
tgtactgggcacctggaactcattc

SEQ ID NO: 4289069 - DNA, 25 bp, Homo sapien
gaaccacactccgttgacctctggg

SEQ ID NO: 4289070 - DNA, 25 bp, Homo sapien
gcttcatgcttggagcttggcaccc

SEQ ID NO: 4289071 - DNA, 25 bp, Homo sapien
ccaataccggtgctttgcttagctg

SEQ ID NO: 4289072 - DNA, 25 bp, Homo sapien
ggtagcacgcttggcgctgtgctca

SEQ ID NO: 4289073 - DNA, 25 bp, Homo sapien
ttcttaacgccagcattgtccccat

SEQ ID NO: 4289074 - DNA, 25 bp, Homo sapien
cattggggtggatgggtagcacgct

SEQ ID NO: 4289075 - DNA, 25 bp, Homo sapien
ccttcttaacgccagcattgtcccc

SEQ ID NO: 4289076 - DNA, 25 bp, Homo sapien
tctgcattctccaggctattttcca

SEQ ID NO: 4289077 - DNA, 25 bp, Homo sapien
tcctgggtggcttgatgctgaagct

SEQ ID NO: 4289078 - DNA, 25 bp, Homo sapien
catgtcctgggtggcttgatgctga

SEQ ID NO: 4289079 - DNA, 25 bp, Homo sapien
tccaaaaggccagatgcatgtcctg

SEQ ID NO: 4289080 - DNA, 25 bp, Homo sapien
aggtcactggctgtcctctgagcct

SEQ ID NO: 4289081 - DNA, 25 bp, Homo sapien
cccaggtcactggctgtcctctgag

SEQ ID NO: 4289082 - DNA, 25 bp, Homo sapien
cactggctgtcctctgagcctcact

SEQ ID NO: 4289083 - DNA, 25 bp, Homo sapien
actggctgtcctctgagcctcactc

SEQ ID NO: 4289084 - DNA, 25 bp, Homo sapien
tggctagtgtcaacatgtgtgcccc

SEQ ID NO: 4289085 - DNA, 25 bp, Homo sapien
tgtgtgccccttttactaggccagg

SEQ ID NO: 4289086 - DNA, 25 bp, Homo sapien
agtggtgatcacgttggccagagga

SEQ ID NO: 4289087 - DNA, 25 bp, Homo sapien
cagcatctgttaggctgagtctctg

SEQ ID NO: 4289088 - DNA, 25 bp, Homo sapien
gacctattctttgccatgactgcct

SEQ ID NO: 4289089 - DNA, 25 bp, Homo sapien
tcagacctattctttgccatgactg

SEQ ID NO: 4289090 - DNA, 25 bp, Homo sapien
ctaacgtcagacctattctttgcca

SEQ ID NO: 4289091 - DNA, 25 bp, Homo sapien
acgtcagacctattctttgccatga

SEQ ID NO: 4289092 - DNA, 25 bp, Homo sapien
ccctcaagcaaaggtgcggaaaact

SEQ ID NO: 4289093 - DNA, 25 bp, Homo sapien
tgagggctaagacaacaggaaggtt

SEQ ID NO: 4289094 - DNA, 25 bp, Homo sapien
caaccagtctggactagaacccgga

SEQ ID NO: 4289095 - DNA, 25 bp, Homo sapien
tctgtgtgtcaggaacacgtgcctc

SEQ ID NO: 4289096 - DNA, 25 bp, Homo sapien
tgtgtacacaactgaaaatcggccc

SEQ ID NO: 4289097 - DNA, 25 bp, Homo sapien
ttgtttacacatctctcagggctga

SEQ ID NO: 4289098 - DNA, 25 bp, Homo sapien
cctgcaggcagtctaactggccttt

SEQ ID NO: 4289099 - DNA, 25 bp, Homo sapien
tctccgctagcccaaatatcaaatg

SEQ ID NO: 4289100 - DNA, 25 bp, Homo sapien
ttcacagacgggtgggtcagtacca

SEQ ID NO: 4289101 - DNA, 25 bp, Homo sapien
caagatgtctcaggatgggctttcc

SEQ ID NO: 4289102 - DNA, 25 bp, Homo sapien
tataattgtgcagtcccctagcctg

SEQ ID NO: 4289103 - DNA, 25 bp, Homo sapien
tgagaccagctctatgcagatacag

SEQ ID NO: 4289104 - DNA, 25 bp, Homo sapien
ggtactgtcggaggtagtcggccat

SEQ ID NO: 4289105 - DNA, 25 bp, Homo sapien
cagacggttgatgacaaggcggcac

SEQ ID NO: 4289106 - DNA, 25 bp, Homo sapien
gggctgcaccagttttaggtgtaca

SEQ ID NO: 4289107 - DNA, 25 bp, Homo sapien
gcttctgcgtacaaagggctgcacc

SEQ ID NO: 4289108 - DNA, 25 bp, Homo sapien
caggaggccacatagtgctgcacaa

SEQ ID NO: 4289109 - DNA, 25 bp, Homo sapien
cagtgctgggtcactaggcgcatcc

SEQ ID NO: 4289110 - DNA, 25 bp, Homo sapien
cgtactaagaacgtgccttctggca

SEQ ID NO: 4289111 - DNA, 25 bp, Homo sapien
tgaccacatccggaaaggccaggat

SEQ ID NO: 4289112 - DNA, 25 bp, Homo sapien
tcgggcctcgctggccgtaatggaa

SEQ ID NO: 4289113 - DNA, 25 bp, Homo sapien
ctgcaggtgttgtcgggcctcgctg

SEQ ID NO: 4289114 - DNA, 25 bp, Homo sapien
gccgtaatggaaccccaataccagc

SEQ ID NO: 4289115 - DNA, 25 bp, Homo sapien
tcgctggccgtaatggaaccccaat

SEQ ID NO: 4289116 - DNA, 25 bp, Homo sapien
cttggctatgcacagcagatcctcc

SEQ ID NO: 4289117 - DNA, 25 bp, Homo sapien
gggtccagcacctttggctcactct

SEQ ID NO: 4289118 - DNA, 25 bp, Homo sapien
cacctcctcgaggaaggccccagca

SEQ ID NO: 4289119 - DNA, 25 bp, Homo sapien
ccagtccgctccacagccagcaaag

SEQ ID NO: 4289120 - DNA, 25 bp, Homo sapien
aggcagtggatgagcagtgagtgga

SEQ ID NO: 4289121 - DNA, 25 bp, Homo sapien
taaatggcccactgatgaatggtcc

SEQ ID NO: 4289122 - DNA, 25 bp, Homo sapien
ccagcagggtgatactagggcttcc

SEQ ID NO: 4289123 - DNA, 25 bp, Homo sapien
ggaactgagccgaccaaaatctgag

SEQ ID NO: 4289124 - DNA, 25 bp, Homo sapien
gactagtttcatgacctctggctgg

SEQ ID NO: 4289125 - DNA, 25 bp, Homo sapien
ttcccaggagcatggttggtggcta

SEQ ID NO: 4289126 - DNA, 25 bp, Homo sapien
tcctcagatcccacatgtaggtgtg

SEQ ID NO: 4289127 - DNA, 25 bp, Homo sapien
tgggtggccacgtccagatagctta

SEQ ID NO: 4289128 - DNA, 25 bp, Homo sapien
tgtgttgatcaccacaagctcctgg

SEQ ID NO: 4289129 - DNA, 25 bp, Homo sapien
tctaggtacatgtgtgtgcccgctt

SEQ ID NO: 4289130 - DNA, 25 bp, Homo sapien
tgtgtgcccgctttggagcgcagca

SEQ ID NO: 4289131 - DNA, 25 bp, Homo sapien
tggagcgcagcagtctaaaactttg

SEQ ID NO: 4289132 - DNA, 25 bp, Homo sapien
cagtctaaaactttgttccctgaca

SEQ ID NO: 4289133 - DNA, 25 bp, Homo sapien
caccaggccagttgcgataagcaca

SEQ ID NO: 4289134 - DNA, 25 bp, Homo sapien
tccaaggttactagcaggcagggca

SEQ ID NO: 4289135 - DNA, 25 bp, Homo sapien
gagagttgcagaccatcaggtgcca

SEQ ID NO: 4289136 - DNA, 25 bp, Homo sapien
tgtgagttcctcctttagccggcca

SEQ ID NO: 4289137 - DNA, 25 bp, Homo sapien
cggagtggggactcggctggacggc

SEQ ID NO: 4289138 - DNA, 25 bp, Homo sapien
agcgcgtgctgggtaggctcccggg

SEQ ID NO: 4289139 - DNA, 25 bp, Homo sapien
gagggaaccagtgggcgcggagcgc

SEQ ID NO: 4289140 - DNA, 25 bp, Homo sapien
ccagtgggcgcggagcgcgtgctgg

SEQ ID NO: 4289141 - DNA, 25 bp, Homo sapien
aatcctttgtctgccgcgttccagc

SEQ ID NO: 4289142 - DNA, 25 bp, Homo sapien
gcgttccagcccttcccggaagcag

SEQ ID NO: 4289143 - DNA, 25 bp, Homo sapien
gcccttcccggaagcagcgtcttcc

SEQ ID NO: 4289144 - DNA, 25 bp, Homo sapien
agcgtcttcctagaaccgcgggctg

SEQ ID NO: 4289145 - DNA, 25 bp, Homo sapien
gagcggtcggggagggccaatagca

SEQ ID NO: 4289146 - DNA, 25 bp, Homo sapien
gcagcgcgtggacccggggctgaag

SEQ ID NO: 4289147 - DNA, 25 bp, Homo sapien
gctgaaggtggagccgagcggtcgg

SEQ ID NO: 4289148 - DNA, 25 bp, Homo sapien
gagggccaatagcagcgcgtggacc

SEQ ID NO: 4289149 - DNA, 25 bp, Homo sapien
ttatctcgcggtggaactcgtggca

SEQ ID NO: 4289150 - DNA, 25 bp, Homo sapien
tccactgaggtcaagccggcggtca

SEQ ID NO: 4289151 - DNA, 25 bp, Homo sapien
cctaggactctgtgtgtcgggtgtc

SEQ ID NO: 4289152 - DNA, 25 bp, Homo sapien
tcggcgtgtgcaagcgccccgtgtt

SEQ ID NO: 4289153 - DNA, 25 bp, Homo sapien
tggcactggtttctggccggccctg

SEQ ID NO: 4289154 - DNA, 25 bp, Homo sapien
gactacagatttgagaaagcaagca

SEQ ID NO: 4289155 - DNA, 25 bp, Homo sapien
gaagagactacagatttgagaaagc

SEQ ID NO: 4289156 - DNA, 25 bp, Homo sapien
aacttttcgaatcaggcagaccatc

SEQ ID NO: 4289157 - DNA, 25 bp, Homo sapien
gatatgcggcccctgtgtggaccac

SEQ ID NO: 4289158 - DNA, 25 bp, Homo sapien
ggaccactgacttgccagtaggaac

SEQ ID NO: 4289159 - DNA, 25 bp, Homo sapien
gacttgccagtaggaactgtccact

SEQ ID NO: 4289160 - DNA, 25 bp, Homo sapien
ctggatagcctgatatgcggcccct

SEQ ID NO: 4289161 - DNA, 25 bp, Homo sapien
cctgggtgtgaacggcaaagtgctg

SEQ ID NO: 4289162 - DNA, 25 bp, Homo sapien
cgggagcccaagaagtacgcagtga

SEQ ID NO: 4289163 - DNA, 25 bp, Homo sapien
gaccgacgactaccagttgtccaag

SEQ ID NO: 4289164 - DNA, 25 bp, Homo sapien
ggagtgcttccatcggcgcactgga

SEQ ID NO: 4289165 - DNA, 25 bp, Homo sapien
catcttgcctgttctgccaggttct

SEQ ID NO: 4289166 - DNA, 25 bp, Homo sapien
tctccatcttgcctgttctgccagg

SEQ ID NO: 4289167 - DNA, 25 bp, Homo sapien
cttgcctgttctgccaggttctggt

SEQ ID NO: 4289168 - DNA, 25 bp, Homo sapien
ctccatcttgcctgttctgccaggt

SEQ ID NO: 4289169 - DNA, 25 bp, Homo sapien
atgtgagccgccctccttggaaccg

SEQ ID NO: 4289170 - DNA, 25 bp, Homo sapien
ggggtcagtggtatcatgtgagccg

SEQ ID NO: 4289171 - DNA, 25 bp, Homo sapien
ggtcagtggtatcatgtgagccgcc

SEQ ID NO: 4289172 - DNA, 25 bp, Homo sapien
gtgagccgccctccttggaaccgag

SEQ ID NO: 4289173 - DNA, 25 bp, Homo sapien
gctgagcagtgctgatccgagcccc

SEQ ID NO: 4289174 - DNA, 25 bp, Homo sapien
gccctgtgtaaagtggcctggctct

SEQ ID NO: 4289175 - DNA, 25 bp, Homo sapien
tccgagccccggtcttgagcatcag

SEQ ID NO: 4289176 - DNA, 25 bp, Homo sapien
agagcctgcccctaacagtgccctg

SEQ ID NO: 4289177 - DNA, 25 bp, Homo sapien
ggcaggaggtagaccatcactggca

SEQ ID NO: 4289178 - DNA, 25 bp, Homo sapien
gcatcctggatgtgtatgagaacat

SEQ ID NO: 4289179 - DNA, 25 bp, Homo sapien
tctggcggcccccatattgtctgca

SEQ ID NO: 4289180 - DNA, 25 bp, Homo sapien
caaggcccggcaggaggtagaccat

SEQ ID NO: 4289181 - DNA, 25 bp, Homo sapien
gggaggctgatttctcacacactgg

SEQ ID NO: 4289182 - DNA, 25 bp, Homo sapien
taagtggcttcccattaacctgagg

SEQ ID NO: 4289183 - DNA, 25 bp, Homo sapien
tactgcctgacaagtgcctgacacg

SEQ ID NO: 4289184 - DNA, 25 bp, Homo sapien
cctttagctaggttggcccgagtga

SEQ ID NO: 4289185 - DNA, 25 bp, Homo sapien
ggagggttcttgttggtcacatttg

SEQ ID NO: 4289186 - DNA, 25 bp, Homo sapien
ttgttggtcacatttggccccttgc

SEQ ID NO: 4289187 - DNA, 25 bp, Homo sapien
gttggtcacatttggccccttgctg

SEQ ID NO: 4289188 - DNA, 25 bp, Homo sapien
gttcttgttggtcacatttggcccc

SEQ ID NO: 4289189 - DNA, 25 bp, Homo sapien
tgactgggtggtcgtgggtgtctta

SEQ ID NO: 4289190 - DNA, 25 bp, Homo sapien
agagtccatacttcatgggcacagg

SEQ ID NO: 4289191 - DNA, 25 bp, Homo sapien
ggcgtcactggtgctgacaaaggga

SEQ ID NO: 4289192 - DNA, 25 bp, Homo sapien
tggtcgtgggtgtcttaggcaggct

SEQ ID NO: 4289193 - DNA, 25 bp, Homo sapien
gactttatcgatgaccggttttgtg

SEQ ID NO: 4289194 - DNA, 25 bp, Homo sapien
tgaaggggactttatcgatgaccgg

SEQ ID NO: 4289195 - DNA, 25 bp, Homo sapien
ctttatcgatgaccggttttgtggc

SEQ ID NO: 4289196 - DNA, 25 bp, Homo sapien
ttcctgaaggggactttatcgatga

SEQ ID NO: 4289197 - DNA, 25 bp, Homo sapien
tgtattgtagcaataatttcaccat

SEQ ID NO: 4289198 - DNA, 25 bp, Homo sapien
tttatgtatagagaaattacctctg

SEQ ID NO: 4289199 - DNA, 25 bp, Homo sapien
atttcaccatttggctatgcagagg

SEQ ID NO: 4289200 - DNA, 25 bp, Homo sapien
cttttgggcctgtttgtattgtagc

SEQ ID NO: 4289201 - DNA, 25 bp, Homo sapien
gtagcaagagcctccagaatgctca

SEQ ID NO: 4289202 - DNA, 25 bp, Homo sapien
tcatggataaacatcatctttgtgg

SEQ ID NO: 4289203 - DNA, 25 bp, Homo sapien
tgctcatggataaacatcatctttg

SEQ ID NO: 4289204 - DNA, 25 bp, Homo sapien
agctgagtcatcagactggctggct

SEQ ID NO: 4289205 - DNA, 25 bp, Homo sapien
ttcttggaacagttagctctttcgt

SEQ ID NO: 4289206 - DNA, 25 bp, Homo sapien
tacttccatggtggccaccggggag

SEQ ID NO: 4289207 - DNA, 25 bp, Homo sapien
tcgttatgttcttggacacccctgc

SEQ ID NO: 4289208 - DNA, 25 bp, Homo sapien
ttcattccatagaatacttccatgg

SEQ ID NO: 4289209 - DNA, 25 bp, Homo sapien
ctggttccctcgtggcgactccatc

SEQ ID NO: 4289210 - DNA, 25 bp, Homo sapien
ccctgggaatgcacagggtggctcc

SEQ ID NO: 4289211 - DNA, 25 bp, Homo sapien
ggatctcccctctccgaccaggagg

SEQ ID NO: 4289212 - DNA, 25 bp, Homo sapien
gggacctttccgacagcactgtggg

SEQ ID NO: 4289213 - DNA, 25 bp, Homo sapien
gatttccctccgctggcgcgcagca

SEQ ID NO: 4289214 - DNA, 25 bp, Homo sapien
gggccgggcagtccaatagcttctc

SEQ ID NO: 4289215 - DNA, 25 bp, Homo sapien
ccaatagcttctcgcggatttccct

SEQ ID NO: 4289216 - DNA, 25 bp, Homo sapien
gcagcggcgcgtggattcgcgcgcg

SEQ ID NO: 4289217 - DNA, 25 bp, Homo sapien
tctcccctccaaaagctcgatttta

SEQ ID NO: 4289218 - DNA, 25 bp, Homo sapien
caaaagctcgattttaatgagtttc

SEQ ID NO: 4289219 - DNA, 25 bp, Homo sapien
gctcgattttaatgagtttccgcac

SEQ ID NO: 4289220 - DNA, 25 bp, Homo sapien
cctccaaaagctcgattttaatgag

SEQ ID NO: 4289221 - DNA, 25 bp, Homo sapien
ttgatctggaaccttacaagaaaac

SEQ ID NO: 4289222 - DNA, 25 bp, Homo sapien
tgatctggaaccttacaagaaaacg

SEQ ID NO: 4289223 - DNA, 25 bp, Homo sapien
tttttgatctggaaccttacaagaa

SEQ ID NO: 4289224 - DNA, 25 bp, Homo sapien
ttttgatctggaaccttacaagaaa

SEQ ID NO: 4289225 - DNA, 25 bp, Homo sapien
ttatgatgttaatacagggatattt

SEQ ID NO: 4289226 - DNA, 25 bp, Homo sapien
gatgttaatacagggatatttgttt

SEQ ID NO: 4289227 - DNA, 25 bp, Homo sapien
tatgatgttaatacagggatatttg

SEQ ID NO: 4289228 - DNA, 25 bp, Homo sapien
acagggatatttgtttcttcctcac

SEQ ID NO: 4289229 - DNA, 25 bp, Homo sapien
gaagttctcatcagatctccttgta

SEQ ID NO: 4289230 - DNA, 25 bp, Homo sapien
cagatctccttgtagctggacttgc

SEQ ID NO: 4289231 - DNA, 25 bp, Homo sapien
aagctggaacccttattatcaaatc

SEQ ID NO: 4289232 - DNA, 25 bp, Homo sapien
acaccattatggcatgttaagtcac

SEQ ID NO: 4289233 - DNA, 25 bp, Homo sapien
tagaacatggtggggttgacggtgg

SEQ ID NO: 4289234 - DNA, 25 bp, Homo sapien
ctagaacatggtggggttgacggtg

SEQ ID NO: 4289235 - DNA, 25 bp, Homo sapien
taaagctcctgattttctgacacat

SEQ ID NO: 4289236 - DNA, 25 bp, Homo sapien
ctttaaagctcctgattttctgaca

SEQ ID NO: 4289237 - DNA, 25 bp, Homo sapien
tttaaagctcctgattttctgacac

SEQ ID NO: 4289238 - DNA, 25 bp, Homo sapien
ttaaagctcctgattttctgacaca

SEQ ID NO: 4289239 - DNA, 25 bp, Homo sapien
atggcctgcataatattaatgctat

SEQ ID NO: 4289240 - DNA, 25 bp, Homo sapien
ctggatctagagcactccatggcct

SEQ ID NO: 4289241 - DNA, 25 bp, Homo sapien
ccatggcctgcataatattaatgct

SEQ ID NO: 4289242 - DNA, 25 bp, Homo sapien
tctcactggtcttgccgtttctgga

SEQ ID NO: 4289243 - DNA, 25 bp, Homo sapien
cagtgcagatgaaaaactgggaacc

SEQ ID NO: 4289244 - DNA, 25 bp, Homo sapien
gtgcagatgaaaaactgggaaccat

SEQ ID NO: 4289245 - DNA, 25 bp, Homo sapien
ggcagtgcagatgaaaaactgggaa

SEQ ID NO: 4289246 - DNA, 25 bp, Homo sapien
tgccatccaaccactgaggtcttgg

SEQ ID NO: 4289247 - DNA, 25 bp, Homo sapien
caggaacacttataaccaaatgcat

SEQ ID NO: 4289248 - DNA, 25 bp, Homo sapien
acttataaccaaatgcattctttcc

SEQ ID NO: 4289249 - DNA, 25 bp, Homo sapien
cgggacttgtatgcttcagagtgaa

SEQ ID NO: 4289250 - DNA, 25 bp, Homo sapien
tgacatggacaagatgccgggactt

SEQ ID NO: 4289251 - DNA, 25 bp, Homo sapien
gatgtcggggttctgggtagtgtcg

SEQ ID NO: 4289252 - DNA, 25 bp, Homo sapien
agcccaagggcgtaccgtccacagt

SEQ ID NO: 4289253 - DNA, 25 bp, Homo sapien
atgcagcccaagggcgtaccgtcca

SEQ ID NO: 4289254 - DNA, 25 bp, Homo sapien
agggcgtaccgtccacagtgatgtc

SEQ ID NO: 4289255 - DNA, 25 bp, Homo sapien
taaaaatcctatcagtggacatcat

SEQ ID NO: 4289256 - DNA, 25 bp, Homo sapien
tttaaaaatcctatcagtggacatc

SEQ ID NO: 4289257 - DNA, 25 bp, Homo sapien
ttaaaaatcctatcagtggacatca

SEQ ID NO: 4289258 - DNA, 25 bp, Homo sapien
atgatttatgaaatcttttgccaca

SEQ ID NO: 4289259 - DNA, 25 bp, Homo sapien
agtgtttgttttcatgtgttcatga

SEQ ID NO: 4289260 - DNA, 25 bp, Homo sapien
tttatgaaatcttttgccacagatt

SEQ ID NO: 4289261 - DNA, 25 bp, Homo sapien
tgttttcatgtgttcatgaaaatac

SEQ ID NO: 4289262 - DNA, 25 bp, Homo sapien
gggagtgccccatgagtgacatact

SEQ ID NO: 4289263 - DNA, 25 bp, Homo sapien
gcatgtctttcatgtgtgcaaccat

SEQ ID NO: 4289264 - DNA, 25 bp, Homo sapien
tgcccaacgtggatgctcatgtggg

SEQ ID NO: 4289265 - DNA, 25 bp, Homo sapien
ggcatgtctttcatgtgtgcaacca

SEQ ID NO: 4289266 - DNA, 25 bp, Homo sapien
tgatatgttcatgaaggatccagtt

SEQ ID NO: 4289267 - DNA, 25 bp, Homo sapien
cttgatatgttcatgaaggatccag

SEQ ID NO: 4289268 - DNA, 25 bp, Homo sapien
ttgatatgttcatgaaggatccagt

SEQ ID NO: 4289269 - DNA, 25 bp, Homo sapien
gatatgttcatgaaggatccagttt

SEQ ID NO: 4289270 - DNA, 25 bp, Homo sapien
tcacagtctgtttgccggtgaagat

SEQ ID NO: 4289271 - DNA, 25 bp, Homo sapien
tgaacgatttattacaggcaacaaa

SEQ ID NO: 4289272 - DNA, 25 bp, Homo sapien
gtgaagatatagctcactttccagg

SEQ ID NO: 4289273 - DNA, 25 bp, Homo sapien
cgatttattacaggcaacaaactaa

SEQ ID NO: 4289274 - DNA, 25 bp, Homo sapien
ccgcttcttacgcttaggtggctct

SEQ ID NO: 4289275 - DNA, 25 bp, Homo sapien
cccgcttcttacgcttaggtggctc

SEQ ID NO: 4289276 - DNA, 25 bp, Homo sapien
ctctctcttcctcctcattgtttaa

SEQ ID NO: 4289277 - DNA, 25 bp, Homo sapien
tctctcttcctcctcattgtttaag

SEQ ID NO: 4289278 - DNA, 25 bp, Homo sapien
tctcttcctcctcattgtttaagaa

SEQ ID NO: 4289279 - DNA, 25 bp, Homo sapien
ctcttcctcctcattgtttaagaac

SEQ ID NO: 4289280 - DNA, 25 bp, Homo sapien
tacatttaatgtttgattattaagg

SEQ ID NO: 4289281 - DNA, 25 bp, Homo sapien
ggtacatttaatgtttgattattaa

SEQ ID NO: 4289282 - DNA, 25 bp, Homo sapien
catttaatgtttgattattaaggtt

SEQ ID NO: 4289283 - DNA, 25 bp, Homo sapien
ctttaggtacatttaatgtttgatt

SEQ ID NO: 4289284 - DNA, 25 bp, Homo sapien
gcatgcacatcagactctgctcctg

SEQ ID NO: 4289285 - DNA, 25 bp, Homo sapien
tccttaatagcatgcacatcagact

SEQ ID NO: 4289286 - DNA, 25 bp, Homo sapien
taatagcatgcacatcagactctgc

SEQ ID NO: 4289287 - DNA, 25 bp, Homo sapien
tagcatgcacatcagactctgctcc

SEQ ID NO: 4289288 - DNA, 25 bp, Homo sapien
tataggcatgcgtcaccacgctcgg

SEQ ID NO: 4289289 - DNA, 25 bp, Homo sapien
gtgtgattttggctaactgcaagct

SEQ ID NO: 4289290 - DNA, 25 bp, Homo sapien
tcccaacttcaggtgatttgcccac

SEQ ID NO: 4289291 - DNA, 25 bp, Homo sapien
ataggcatgcgtcaccacgctcggc

SEQ ID NO: 4289292 - DNA, 25 bp, Homo sapien
tcctatctaggctgagtctgtaatt

SEQ ID NO: 4289293 - DNA, 25 bp, Homo sapien
cttgaatggtgcctctcctatctag

SEQ ID NO: 4289294 - DNA, 25 bp, Homo sapien
tggtgcctctcctatctaggctgag

SEQ ID NO: 4289295 - DNA, 25 bp, Homo sapien
tcctgttacttgaatggtgcctctc

SEQ ID NO: 4289296 - DNA, 25 bp, Homo sapien
tctgtaatgtgatgaagatactgac

SEQ ID NO: 4289297 - DNA, 25 bp, Homo sapien
tgacatacagaatggtcaagcgagg

SEQ ID NO: 4289298 - DNA, 25 bp, Homo sapien
gatactgactgtgttgacatacaga

SEQ ID NO: 4289299 - DNA, 25 bp, Homo sapien
acatacagaatggtcaagcgaggat

SEQ ID NO: 4289300 - DNA, 25 bp, Homo sapien
cccctattactgacaattgcctttt

SEQ ID NO: 4289301 - DNA, 25 bp, Homo sapien
ccctattactgacaattgccttttt

SEQ ID NO: 4289302 - DNA, 25 bp, Homo sapien
actgacaattgcctttttcaagtga

SEQ ID NO: 4289303 - DNA, 25 bp, Homo sapien
gacaattgcctttttcaagtgaatg

SEQ ID NO: 4289304 - DNA, 25 bp, Homo sapien
catgaatctttatctgactgcagca

SEQ ID NO: 4289305 - DNA, 25 bp, Homo sapien
tttcagacccaagcctcttctagga

SEQ ID NO: 4289306 - DNA, 25 bp, Homo sapien
gactgcagcagtttacagtgaacct

SEQ ID NO: 4289307 - DNA, 25 bp, Homo sapien
cactttcttcatgaatctttatctg

SEQ ID NO: 4289308 - DNA, 25 bp, Homo sapien
ctacagtaacaaggggatgcccctc

SEQ ID NO: 4289309 - DNA, 25 bp, Homo sapien
cagtaacaaggggatgcccctctcc

SEQ ID NO: 4289310 - DNA, 25 bp, Homo sapien
ccagtggagtctgtagaatgaactg

SEQ ID NO: 4289311 - DNA, 25 bp, Homo sapien
tacagtaacaaggggatgcccctct

SEQ ID NO: 4289312 - DNA, 25 bp, Homo sapien
aagtatggcagacaggaagtatccc

SEQ ID NO: 4289313 - DNA, 25 bp, Homo sapien
gaaggtagctagaggacattaacac

SEQ ID NO: 4289314 - DNA, 25 bp, Homo sapien
gaagcttagtgaactccaaatggga

SEQ ID NO: 4289315 - DNA, 25 bp, Homo sapien
taccctgaattgtgtatgcagcaaa

SEQ ID NO: 4289316 - DNA, 25 bp, Homo sapien
tactggtaggctgagcagctacata

SEQ ID NO: 4289317 - DNA, 25 bp, Homo sapien
gagcagctacatatgtatattgcaa

SEQ ID NO: 4289318 - DNA, 25 bp, Homo sapien
aaaattaatactggtaggctgagca

SEQ ID NO: 4289319 - DNA, 25 bp, Homo sapien
caatctctagagcaatcattaaaat

SEQ ID NO: 4289320 - DNA, 25 bp, Homo sapien
taagatgaataggtcaaattctaga

SEQ ID NO: 4289321 - DNA, 25 bp, Homo sapien
aacactagttttatacagagtcttc

SEQ ID NO: 4289322 - DNA, 25 bp, Homo sapien
cataaattgtcaaaactcacccaag

SEQ ID NO: 4289323 - DNA, 25 bp, Homo sapien
tcctgcaactgttaacataattgaa

SEQ ID NO: 4289324 - DNA, 25 bp, Homo sapien
gatgccattatgacctgtggcagtt

SEQ ID NO: 4289325 - DNA, 25 bp, Homo sapien
ttgatgccattatgacctgtggcag

SEQ ID NO: 4289326 - DNA, 25 bp, Homo sapien
cttttgatgccattatgacctgtgg

SEQ ID NO: 4289327 - DNA, 25 bp, Homo sapien
gccattatgacctgtggcagttata

SEQ ID NO: 4289328 - DNA, 25 bp, Homo sapien
tattgctgaggaattagtgtgatcc

SEQ ID NO: 4289329 - DNA, 25 bp, Homo sapien
tcagccccactgagattatttaaaa

SEQ ID NO: 4289330 - DNA, 25 bp, Homo sapien
ggtcattaggttctggatgctttta

SEQ ID NO: 4289331 - DNA, 25 bp, Homo sapien
gtgtgtcatcatgctcagccccact

SEQ ID NO: 4289332 - DNA, 25 bp, Homo sapien
tatcttttttgttgatcctttcaaa

SEQ ID NO: 4289333 - DNA, 25 bp, Homo sapien
tgctagtggtctatcttttttgttg

SEQ ID NO: 4289334 - DNA, 25 bp, Homo sapien
tatgctgcttctgctatctcgattg

SEQ ID NO: 4289335 - DNA, 25 bp, Homo sapien
tgcttctgctatctcgattgttcat

SEQ ID NO: 4289336 - DNA, 25 bp, Homo sapien
cttatgctgcttctgctatctcgat

SEQ ID NO: 4289337 - DNA, 25 bp, Homo sapien
tgctgcttctgctatctcgattgtt

SEQ ID NO: 4289338 - DNA, 25 bp, Homo sapien
tcttcatccgagaggctttccccag

SEQ ID NO: 4289339 - DNA, 25 bp, Homo sapien
ctggctcttcatccgagaggctttc

SEQ ID NO: 4289340 - DNA, 25 bp, Homo sapien
ggctcttcatccgagaggctttccc

SEQ ID NO: 4289341 - DNA, 25 bp, Homo sapien
ccctggctcttcatccgagaggctt

SEQ ID NO: 4289342 - DNA, 25 bp, Homo sapien
taaaaccgtagaaataatgccacaa

SEQ ID NO: 4289343 - DNA, 25 bp, Homo sapien
tgccacaaatgcatatttagcagaa

SEQ ID NO: 4289344 - DNA, 25 bp, Homo sapien
taatgccacaaatgcatatttagca

SEQ ID NO: 4289345 - DNA, 25 bp, Homo sapien
ttactgctataaaaccgtagaaata

SEQ ID NO: 4289346 - DNA, 25 bp, Homo sapien
ttccttctccttgttcgtctattgt

SEQ ID NO: 4289347 - DNA, 25 bp, Homo sapien
ctttgtctgattgcattaatttgaa

SEQ ID NO: 4289348 - DNA, 25 bp, Homo sapien
tgtctgattgcattaatttgaaagc

SEQ ID NO: 4289349 - DNA, 25 bp, Homo sapien
ctccttgttcgtctattgttgaaac

SEQ ID NO: 4289350 - DNA, 25 bp, Homo sapien
accccatgccttacttgcttcttag

SEQ ID NO: 4289351 - DNA, 25 bp, Homo sapien
tgcttcttagctctggctgtaggta

SEQ ID NO: 4289352 - DNA, 25 bp, Homo sapien
agtcccattagcgacagctcgagtt

SEQ ID NO: 4289353 - DNA, 25 bp, Homo sapien
taggtatgcttccagcatactcccc

SEQ ID NO: 4289354 - DNA, 25 bp, Homo sapien
gctatctaatttacgcagaaccagg

SEQ ID NO: 4289355 - DNA, 25 bp, Homo sapien
tataagttgtccttaaatgacagtg

SEQ ID NO: 4289356 - DNA, 25 bp, Homo sapien
tatatgcctttatagacccttgcag

SEQ ID NO: 4289357 - DNA, 25 bp, Homo sapien
tatataatctcagtgcagttctaca

SEQ ID NO: 4289358 - DNA, 25 bp, Homo sapien
tcaagtgatccagtactggcatact

SEQ ID NO: 4289359 - DNA, 25 bp, Homo sapien
ctcaagtgatccagtactggcatac

SEQ ID NO: 4289360 - DNA, 25 bp, Homo sapien
ggcctcagttgagttttaatgcttt

SEQ ID NO: 4289361 - DNA, 25 bp, Homo sapien
gcctcagttgagttttaatgctttg

SEQ ID NO: 4289362 - DNA, 25 bp, Homo sapien
taattctagcccttagatttaggtc

SEQ ID NO: 4289363 - DNA, 25 bp, Homo sapien
aagtatgagactgcaattttgttcc

SEQ ID NO: 4289364 - DNA, 25 bp, Homo sapien
tgtataagataagtgtctgacttca

SEQ ID NO: 4289365 - DNA, 25 bp, Homo sapien
tggctattccaggtcacttgtgatt

SEQ ID NO: 4289366 - DNA, 25 bp, Homo sapien
catctctcagtaggggccaacagat

SEQ ID NO: 4289367 - DNA, 25 bp, Homo sapien
tcagtaggggccaacagatacctca

SEQ ID NO: 4289368 - DNA, 25 bp, Homo sapien
cctgactgggagacatctctcagta

SEQ ID NO: 4289369 - DNA, 25 bp, Homo sapien
gacatctctcagtaggggccaacag

SEQ ID NO: 4289370 - DNA, 25 bp, Homo sapien
gagggcagtcgaaaaggaaacatcc

SEQ ID NO: 4289371 - DNA, 25 bp, Homo sapien
gaaagtcaatccctggacaaggcag

SEQ ID NO: 4289372 - DNA, 25 bp, Homo sapien
tccagacagtaaaggccatggtcag

SEQ ID NO: 4289373 - DNA, 25 bp, Homo sapien
tgcactgagtagagccaacggttcc

SEQ ID NO: 4289374 - DNA, 25 bp, Homo sapien
tcaacagatgtaaggcgtggccgaa

SEQ ID NO: 4289375 - DNA, 25 bp, Homo sapien
tcaaaggttggatccgttgcccacg

SEQ ID NO: 4289376 - DNA, 25 bp, Homo sapien
taacctgttgtcttggctgacccca

SEQ ID NO: 4289377 - DNA, 25 bp, Homo sapien
ggtacgcgggtcaactcaacagatg

SEQ ID NO: 4289378 - DNA, 25 bp, Homo sapien
tccgtgaccgttctggcggcggcgc

SEQ ID NO: 4289379 - DNA, 25 bp, Homo sapien
gcgactgcgaaggtgcgggataggg

SEQ ID NO: 4289380 - DNA, 25 bp, Homo sapien
ctggctctgagcgtgctgccgggca

SEQ ID NO: 4289381 - DNA, 25 bp, Homo sapien
aggggctggcggtggcgctggctct

SEQ ID NO: 4289382 - DNA, 25 bp, Homo sapien
cgcccgccctagtaaatctttcttg

SEQ ID NO: 4289383 - DNA, 25 bp, Homo sapien
tgggcctagaaaacattggtccgac

SEQ ID NO: 4289384 - DNA, 25 bp, Homo sapien
aaagttgagactagatcccgttgaa

SEQ ID NO: 4289385 - DNA, 25 bp, Homo sapien
ttggtccgacgaagaaaagttgaga

SEQ ID NO: 4289386 - DNA, 25 bp, Homo sapien
agggctggccgtgggtgctgcgccc

SEQ ID NO: 4289387 - DNA, 25 bp, Homo sapien
ggctggccgtgggtgctgcgccctg

SEQ ID NO: 4289388 - DNA, 25 bp, Homo sapien
gctggccgtgggtgctgcgccctgt

SEQ ID NO: 4289389 - DNA, 25 bp, Homo sapien
tggccgtgggtgctgcgccctgtct

SEQ ID NO: 4289390 - DNA, 25 bp, Homo sapien
gaaccgggttctgtctacctgtaga

SEQ ID NO: 4289391 - DNA, 25 bp, Homo sapien
tacaggataggcaagggccgaatcc

SEQ ID NO: 4289392 - DNA, 25 bp, Homo sapien
tcaaggacacgtgttcaccatgggc

SEQ ID NO: 4289393 - DNA, 25 bp, Homo sapien
ggtaagtagctggtgatcctcccca

SEQ ID NO: 4289394 - DNA, 25 bp, Homo sapien
aaatgaactgatgcctaaatatgcc

SEQ ID NO: 4289395 - DNA, 25 bp, Homo sapien
catgcaaaggctgtgcagaaaagtc

SEQ ID NO: 4289396 - DNA, 25 bp, Homo sapien
gcagccagtgcacggaccgatttgt

SEQ ID NO: 4289397 - DNA, 25 bp, Homo sapien
gaaaagtctgactacatccggaaga

SEQ ID NO: 4289398 - DNA, 25 bp, Homo sapien
tttatctctcaacccaccagtgctg

SEQ ID NO: 4289399 - DNA, 25 bp, Homo sapien
gaaaataccagagcaggacataggg

SEQ ID NO: 4289400 - DNA, 25 bp, Homo sapien
gctggtgtactctaggacttcaaag

SEQ ID NO: 4289401 - DNA, 25 bp, Homo sapien
gtgggctcctgacaatactgtatca

SEQ ID NO: 4289402 - DNA, 25 bp, Homo sapien
ccagtgcctgcaagaggagatagct

SEQ ID NO: 4289403 - DNA, 25 bp, Homo sapien
tcggttattacctgcgtgacagcaa

SEQ ID NO: 4289404 - DNA, 25 bp, Homo sapien
catgcattagtccttggcgccgtca

SEQ ID NO: 4289405 - DNA, 25 bp, Homo sapien
cacaaagcgttaggtcgtctcgccg

SEQ ID NO: 4289406 - DNA, 25 bp, Homo sapien
caccgccgcgccgagtccttttgtc

SEQ ID NO: 4289407 - DNA, 25 bp, Homo sapien
ccgccgcgccgagtccttttgtcca

SEQ ID NO: 4289408 - DNA, 25 bp, Homo sapien
gccgcgccgagtccttttgtccaag

SEQ ID NO: 4289409 - DNA, 25 bp, Homo sapien
cgcgccgagtccttttgtccaagat

SEQ ID NO: 4289410 - DNA, 25 bp, Homo sapien
cagttcaagcgcttcggcgagatca

SEQ ID NO: 4289411 - DNA, 25 bp, Homo sapien
gccgtgtggcctacgtgaatttccg

SEQ ID NO: 4289412 - DNA, 25 bp, Homo sapien
cctggactactacgggctgtacgac

SEQ ID NO: 4289413 - DNA, 25 bp, Homo sapien
taccagtacaagcagcgctcgctgt

SEQ ID NO: 4289414 - DNA, 25 bp, Homo sapien
cagcccaagcttgacgaggtcacac

SEQ ID NO: 4289415 - DNA, 25 bp, Homo sapien
cagagacggcacaggcatgctctac

SEQ ID NO: 4289416 - DNA, 25 bp, Homo sapien
tggaagagccaaaacacgagaccaa

SEQ ID NO: 4289417 - DNA, 25 bp, Homo sapien
gaatctttcagagtacgctcagaca

SEQ ID NO: 4289418 - DNA, 25 bp, Homo sapien
tcaggacccggaagaatcatctacc

SEQ ID NO: 4289419 - DNA, 25 bp, Homo sapien
caggtacctaagcaagtcagttggg

SEQ ID NO: 4289420 - DNA, 25 bp, Homo sapien
tgcagctctccaacaaacgcctgag

SEQ ID NO: 4289421 - DNA, 25 bp, Homo sapien
gctggtaccgccagaaacaggagtg

SEQ ID NO: 4289422 - DNA, 25 bp, Homo sapien
ggtgattttatgagactgccccact

SEQ ID NO: 4289423 - DNA, 25 bp, Homo sapien
aagtgactccgattttcagccctgg

SEQ ID NO: 4289424 - DNA, 25 bp, Homo sapien
taaagcgaggcatgaagcaaagagc

SEQ ID NO: 4289425 - DNA, 25 bp, Homo sapien
tgtgtgacacagacccacttcagtg

SEQ ID NO: 4289426 - DNA, 25 bp, Homo sapien
agagttttagccgtcttgtgtttct

SEQ ID NO: 4289427 - DNA, 25 bp, Homo sapien
tagccgtcttgtgtttcttgtttac

SEQ ID NO: 4289428 - DNA, 25 bp, Homo sapien
ctgcccctggagagttttagccgtc

SEQ ID NO: 4289429 - DNA, 25 bp, Homo sapien
cttcacaaccaaatttgtcccctct

SEQ ID NO: 4289430 - DNA, 25 bp, Homo sapien
cagaaaacattagtggccgctgccc

SEQ ID NO: 4289431 - DNA, 25 bp, Homo sapien
cagagacggccgaaatgctttcact

SEQ ID NO: 4289432 - DNA, 25 bp, Homo sapien
gtggaaatccctggtaccttgcctg

SEQ ID NO: 4289433 - DNA, 25 bp, Homo sapien
ccaaatctgtacttgggagcagcct

SEQ ID NO: 4289434 - DNA, 25 bp, Homo sapien
ctatgtgggcagaacatgctctcct

SEQ ID NO: 4289435 - DNA, 25 bp, Homo sapien
tctatgtgggcagaacatgctctcc

SEQ ID NO: 4289436 - DNA, 25 bp, Homo sapien
tatgtgggcagaacatgctctcctt

SEQ ID NO: 4289437 - DNA, 25 bp, Homo sapien
atgtgggcagaacatgctctccttg

SEQ ID NO: 4289438 - DNA, 25 bp, Homo sapien
ctgcaaaaaagggacacaccccact

SEQ ID NO: 4289439 - DNA, 25 bp, Homo sapien
taatcttctgaatgcagggcatgca

SEQ ID NO: 4289440 - DNA, 25 bp, Homo sapien
taacctgacagcatatgaggcaaca

SEQ ID NO: 4289441 - DNA, 25 bp, Homo sapien
ctcgggtgccaatgaggctctctaa

SEQ ID NO: 4289442 - DNA, 25 bp, Homo sapien
taggcatttacccagcagacagagt

SEQ ID NO: 4289443 - DNA, 25 bp, Homo sapien
ctgccaagaatctcttccaagcagt

SEQ ID NO: 4289444 - DNA, 25 bp, Homo sapien
aatctcttccaagcagtgatggctc

SEQ ID NO: 4289445 - DNA, 25 bp, Homo sapien
gaatctcttccaagcagtgatggct

SEQ ID NO: 4289446 - DNA, 25 bp, Homo sapien
caagaatctcttccaagcagtgatg

SEQ ID NO: 4289447 - DNA, 25 bp, Homo sapien
ttccaaatcagagttgtcagagctg

SEQ ID NO: 4289448 - DNA, 25 bp, Homo sapien
ccaaatcagagttgtcagagctgtc

SEQ ID NO: 4289449 - DNA, 25 bp, Homo sapien
aaatcagagttgtcagagctgtcag

SEQ ID NO: 4289450 - DNA, 25 bp, Homo sapien
caaatcagagttgtcagagctgtca

SEQ ID NO: 4289451 - DNA, 25 bp, Homo sapien
tgaagggatcaagcgagtgccatct

SEQ ID NO: 4289452 - DNA, 25 bp, Homo sapien
tggcagttgtattctcccggagacc

SEQ ID NO: 4289453 - DNA, 25 bp, Homo sapien
ggagagacaagattacacactaggc

SEQ ID NO: 4289454 - DNA, 25 bp, Homo sapien
tcacatacattcatgcccgagcaag

SEQ ID NO: 4289455 - DNA, 25 bp, Homo sapien
tgcatcagagtcttcatcctccccg

SEQ ID NO: 4289456 - DNA, 25 bp, Homo sapien
aggtttgctagctcctcatcagagg

SEQ ID NO: 4289457 - DNA, 25 bp, Homo sapien
tgcgttctcattattgtcgtcctcc

SEQ ID NO: 4289458 - DNA, 25 bp, Homo sapien
tccctcctctagaaggtttgctagc

SEQ ID NO: 4289459 - DNA, 25 bp, Homo sapien
ctaaatcatcggtgtcatcatcatc

SEQ ID NO: 4289460 - DNA, 25 bp, Homo sapien
tcatcatcttcttcctcctgttctt

SEQ ID NO: 4289461 - DNA, 25 bp, Homo sapien
atcatcttcttcctcctgttcttcc

SEQ ID NO: 4289462 - DNA, 25 bp, Homo sapien
ttcatcatcatcttcttcctcctgt

SEQ ID NO: 4289463 - DNA, 25 bp, Homo sapien
ccacttcatacagcctgcatactgt

SEQ ID NO: 4289464 - DNA, 25 bp, Homo sapien
gcccacttcatacagcctgcatact

SEQ ID NO: 4289465 - DNA, 25 bp, Homo sapien
ctgcccacttcatacagcctgcata

SEQ ID NO: 4289466 - DNA, 25 bp, Homo sapien
tgcctgcccacttcatacagcctgc

SEQ ID NO: 4289467 - DNA, 25 bp, Homo sapien
cagcaagatagcagtctttggtgtc

SEQ ID NO: 4289468 - DNA, 25 bp, Homo sapien
ctcaatgacagcaagatagcagtct

SEQ ID NO: 4289469 - DNA, 25 bp, Homo sapien
gtctttggtgtctgtacacaggtca

SEQ ID NO: 4289470 - DNA, 25 bp, Homo sapien
ggtcaaagatgttccgtttcacatc

SEQ ID NO: 4289471 - DNA, 25 bp, Homo sapien
ttaaatgttcggaaggatgacccaa

SEQ ID NO: 4289472 - DNA, 25 bp, Homo sapien
cagttgcattaaatgttcggaagga

SEQ ID NO: 4289473 - DNA, 25 bp, Homo sapien
tgcattaaatgttcggaaggatgac

SEQ ID NO: 4289474 - DNA, 25 bp, Homo sapien
gtcagttgcattaaatgttcggaag

SEQ ID NO: 4289475 - DNA, 25 bp, Homo sapien
gatccagagcgggaacagtatgcaa

SEQ ID NO: 4289476 - DNA, 25 bp, Homo sapien
acactgatccagagcgggaacagta

SEQ ID NO: 4289477 - DNA, 25 bp, Homo sapien
tcactgttcccgtgtgattgaacac

SEQ ID NO: 4289478 - DNA, 25 bp, Homo sapien
tgattgaacaccacgcgacactgat

SEQ ID NO: 4289479 - DNA, 25 bp, Homo sapien
gaggacgccatcatttaagacaaga

SEQ ID NO: 4289480 - DNA, 25 bp, Homo sapien
caaacttgtggatggcctgtgcaga

SEQ ID NO: 4289481 - DNA, 25 bp, Homo sapien
gatgttcatattgaacttgtcaaac

SEQ ID NO: 4289482 - DNA, 25 bp, Homo sapien
gattaaaggtggcacagttcctctt

SEQ ID NO: 4289483 - DNA, 25 bp, Homo sapien
tgttgccagtctgaatatcataaat

SEQ ID NO: 4289484 - DNA, 25 bp, Homo sapien
ctttagagaagaagggatgggaaga

SEQ ID NO: 4289485 - DNA, 25 bp, Homo sapien
gaagagaaaaatcagaccaatccat

SEQ ID NO: 4289486 - DNA, 25 bp, Homo sapien
gagaaaaatcagaccaatccatcca

SEQ ID NO: 4289487 - DNA, 25 bp, Homo sapien
ggaagagaaaaatcagaccaatcca

SEQ ID NO: 4289488 - DNA, 25 bp, Homo sapien
cccgatcctgggagtgcttactgaa

SEQ ID NO: 4289489 - DNA, 25 bp, Homo sapien
ttttgtgccgatgacccgatcctgg

SEQ ID NO: 4289490 - DNA, 25 bp, Homo sapien
caacatagtgatcttctgtgaagga

SEQ ID NO: 4289491 - DNA, 25 bp, Homo sapien
gtgggcaatgtctccttttgtgccg

SEQ ID NO: 4289492 - DNA, 25 bp, Homo sapien
gaagttaacaataaccgacagcatc

SEQ ID NO: 4289493 - DNA, 25 bp, Homo sapien
taacaataaccgacagcatcctctt

SEQ ID NO: 4289494 - DNA, 25 bp, Homo sapien
cacagactaggttccaaaagcagat

SEQ ID NO: 4289495 - DNA, 25 bp, Homo sapien
gtataaactaggtaaataaagcaca

SEQ ID NO: 4289496 - DNA, 25 bp, Homo sapien
cattccccaaagtgcagacaaaggc

SEQ ID NO: 4289497 - DNA, 25 bp, Homo sapien
tagcagatgtcagcagcaaggaccc

SEQ ID NO: 4289498 - DNA, 25 bp, Homo sapien
cccaaagtgcagacaaaggctggct

SEQ ID NO: 4289499 - DNA, 25 bp, Homo sapien
ggctccaagtagcagatgtcagcag

SEQ ID NO: 4289500 - DNA, 25 bp, Homo sapien
atcaggaaccgctcccgtgctgaga

SEQ ID NO: 4289501 - DNA, 25 bp, Homo sapien
tgtgcaggtgccaagcatcaggaac

SEQ ID NO: 4289502 - DNA, 25 bp, Homo sapien
tgtgacagttatagctggcctcctc

SEQ ID NO: 4289503 - DNA, 25 bp, Homo sapien
ggcttcccggaacactgaaatagga

SEQ ID NO: 4289504 - DNA, 25 bp, Homo sapien
gcaaactgctaggatagaagaaaaa

SEQ ID NO: 4289505 - DNA, 25 bp, Homo sapien
cagaacattaatgtttcaaatggct

SEQ ID NO: 4289506 - DNA, 25 bp, Homo sapien
acaaaaattcccatgtttaggccag

SEQ ID NO: 4289507 - DNA, 25 bp, Homo sapien
gaagggggggtatcaattgaggtca

SEQ ID NO: 4289508 - DNA, 25 bp, Homo sapien
tctgcagtcgtgctagggaaacatc

SEQ ID NO: 4289509 - DNA, 25 bp, Homo sapien
gatgccctgcggtttagccttgacg

SEQ ID NO: 4289510 - DNA, 25 bp, Homo sapien
tgatctgccggacagtgctactgcg

SEQ ID NO: 4289511 - DNA, 25 bp, Homo sapien
gtaaagtttattggcgcttgccgcc

SEQ ID NO: 4289512 - DNA, 25 bp, Homo sapien
tggatgaagaactcaccctcagcca

SEQ ID NO: 4289513 - DNA, 25 bp, Homo sapien
atggatgaagaactcaccctcagcc

SEQ ID NO: 4289514 - DNA, 25 bp, Homo sapien
gagactgtagatccagcctcatcca

SEQ ID NO: 4289515 - DNA, 25 bp, Homo sapien
cacagtaagaatagccaggacatcc

SEQ ID NO: 4289516 - DNA, 25 bp, Homo sapien
ctgccaactggagctggatttttgg

SEQ ID NO: 4289517 - DNA, 25 bp, Homo sapien
caaagcaaagcgcacagtgtcattc

SEQ ID NO: 4289518 - DNA, 25 bp, Homo sapien
gctgcgctgggccatattctatcaa

SEQ ID NO: 4289519 - DNA, 25 bp, Homo sapien
ctggttcccaatatagctgcgctgg

SEQ ID NO: 4289520 - DNA, 25 bp, Homo sapien
taataggtcttccaattgcaggcaa

SEQ ID NO: 4289521 - DNA, 25 bp, Homo sapien
gtttgaggaaaacttcagctggttc

SEQ ID NO: 4289522 - DNA, 25 bp, Homo sapien
catcactcagaagtgcaccctgatc

SEQ ID NO: 4289523 - DNA, 25 bp, Homo sapien
tgtttcccagtttggcggctagcaa

SEQ ID NO: 4289524 - DNA, 25 bp, Homo sapien
aagtatttgcgcaaggccatgcagg

SEQ ID NO: 4289525 - DNA, 25 bp, Homo sapien
tgttccaatttaatggccaggtgag

SEQ ID NO: 4289526 - DNA, 25 bp, Homo sapien
tagcggtcaaagagctccaagacgg

SEQ ID NO: 4289527 - DNA, 25 bp, Homo sapien
taaccacagggtatagttcaccaca

SEQ ID NO: 4289528 - DNA, 25 bp, Homo sapien
caagacggcccgaaatgagaagcaa

SEQ ID NO: 4289529 - DNA, 25 bp, Homo sapien
cagacgacgaagaccatcatagcgg

SEQ ID NO: 4289530 - DNA, 25 bp, Homo sapien
gtgagactccatcttaaatttaaaa

SEQ ID NO: 4289531 - DNA, 25 bp, Homo sapien
agtgagactccatcttaaatttaaa

SEQ ID NO: 4289532 - DNA, 25 bp, Homo sapien
agctcccgtgatccaagttgcatga

SEQ ID NO: 4289533 - DNA, 25 bp, Homo sapien
ctttagtgcctcaaatgtaagcagg

SEQ ID NO: 4289534 - DNA, 25 bp, Homo sapien
tcaggtcaatatagaacatcatcag

SEQ ID NO: 4289535 - DNA, 25 bp, Homo sapien
tgtaagcaggacatcattagtttgc

SEQ ID NO: 4289536 - DNA, 25 bp, Homo sapien
taattggtgccaatcacccagggag

SEQ ID NO: 4289537 - DNA, 25 bp, Homo sapien
tctgctactagtcttgtggcctgaa

SEQ ID NO: 4289538 - DNA, 25 bp, Homo sapien
caaatattggagaatgagtcgctgc

SEQ ID NO: 4289539 - DNA, 25 bp, Homo sapien
tattagacagctcaacaaacatgcg

SEQ ID NO: 4289540 - DNA, 25 bp, Homo sapien
tgtagctccctcagtcttcgaagca

SEQ ID NO: 4289541 - DNA, 25 bp, Homo sapien
tcagtcttcgaagcactattgccac

SEQ ID NO: 4289542 - DNA, 25 bp, Homo sapien
tcagaagagagcttccgtggactgg

SEQ ID NO: 4289543 - DNA, 25 bp, Homo sapien
ggacgcttgttttcctgccgcaaag

SEQ ID NO: 4289544 - DNA, 25 bp, Homo sapien
tgtcttgattttccatagcacctcc

SEQ ID NO: 4289545 - DNA, 25 bp, Homo sapien
tcctaacagtccagtagaatatgtc

SEQ ID NO: 4289546 - DNA, 25 bp, Homo sapien
ctcaatggttgatcggcctctcggg

SEQ ID NO: 4289547 - DNA, 25 bp, Homo sapien
tatagttggcagcaatgtcttgatt

SEQ ID NO: 4289548 - DNA, 25 bp, Homo sapien
tcaaattaggaactaggcctaacta

SEQ ID NO: 4289549 - DNA, 25 bp, Homo sapien
atttatagctgcaaacacatgcaat

SEQ ID NO: 4289550 - DNA, 25 bp, Homo sapien
gcctaactatgccttatgccatatg

SEQ ID NO: 4289551 - DNA, 25 bp, Homo sapien
caatactcaaagctagcaaaagaaa

SEQ ID NO: 4289552 - DNA, 25 bp, Homo sapien
acagaaatgaaacaggcctcattac

SEQ ID NO: 4289553 - DNA, 25 bp, Homo sapien
taccatatacaattgtacaacaaca

SEQ ID NO: 4289554 - DNA, 25 bp, Homo sapien
gaaacaggcctcattactaccaact

SEQ ID NO: 4289555 - DNA, 25 bp, Homo sapien
gaggactcacattactagcaacaga

SEQ ID NO: 4289556 - DNA, 25 bp, Homo sapien
ggctctcggcttgtcatcacatatg

SEQ ID NO: 4289557 - DNA, 25 bp, Homo sapien
tctgcaagctgcagtgtttaaaggg

SEQ ID NO: 4289558 - DNA, 25 bp, Homo sapien
ccagccctggcatgatgtctaatag

SEQ ID NO: 4289559 - DNA, 25 bp, Homo sapien
agacgacagcagtttccagccctgg

SEQ ID NO: 4289560 - DNA, 25 bp, Homo sapien
cagcaagtggcccagcatacactct

SEQ ID NO: 4289561 - DNA, 25 bp, Homo sapien
gcaagtggcccagcatacactctgg

SEQ ID NO: 4289562 - DNA, 25 bp, Homo sapien
attcatgaaatcatcattcttgaag

SEQ ID NO: 4289563 - DNA, 25 bp, Homo sapien
tggcccagcatacactctggatcag

SEQ ID NO: 4289564 - DNA, 25 bp, Homo sapien
aatgggtctggatcccctttacgat

SEQ ID NO: 4289565 - DNA, 25 bp, Homo sapien
ggatcccctttacgatactcttcag

SEQ ID NO: 4289566 - DNA, 25 bp, Homo sapien
tcatcaaatgggtctggatcccctt

SEQ ID NO: 4289567 - DNA, 25 bp, Homo sapien
caggatgtcgatcatcaaatgggtc

SEQ ID NO: 4289568 - DNA, 25 bp, Homo sapien
ccagcagggtagtgagctcagcttt

SEQ ID NO: 4289569 - DNA, 25 bp, Homo sapien
cactgctccagcagggtagtgagct

SEQ ID NO: 4289570 - DNA, 25 bp, Homo sapien
ctggtaaggataggtaccatgtcct

SEQ ID NO: 4289571 - DNA, 25 bp, Homo sapien
ggataggtaccatgtcctgcccact

SEQ ID NO: 4289572 - DNA, 25 bp, Homo sapien
aaagatagtacacagtgttcccaca

SEQ ID NO: 4289573 - DNA, 25 bp, Homo sapien
aagaaaccaacattgttacattatt

SEQ ID NO: 4289574 - DNA, 25 bp, Homo sapien
agttttccctcatgttaccatatta

SEQ ID NO: 4289575 - DNA, 25 bp, Homo sapien
ccatattatagtggtacactgtcaa

SEQ ID NO: 4289576 - DNA, 25 bp, Homo sapien
cagtcagccgagattaccccaatgc

SEQ ID NO: 4289577 - DNA, 25 bp, Homo sapien
atgcacaccggcctgggcaaaagga

SEQ ID NO: 4289578 - DNA, 25 bp, Homo sapien
cacttgaactcggaggggacggagg

SEQ ID NO: 4289579 - DNA, 25 bp, Homo sapien
tcagccgagattaccccaatgcaca

SEQ ID NO: 4289580 - DNA, 25 bp, Homo sapien
taacttctccaaatctcaatttcct

SEQ ID NO: 4289581 - DNA, 25 bp, Homo sapien
tatttaacttctccaaatctcaatt

SEQ ID NO: 4289582 - DNA, 25 bp, Homo sapien
ctgtgaagtcttggttatttaactt

SEQ ID NO: 4289583 - DNA, 25 bp, Homo sapien
acttctccaaatctcaatttcctta

SEQ ID NO: 4289584 - DNA, 25 bp, Homo sapien
cctcaggtcccgcactcactctcca

SEQ ID NO: 4289585 - DNA, 25 bp, Homo sapien
gtcccgcactcactctccactcaca

SEQ ID NO: 4289586 - DNA, 25 bp, Homo sapien
ccccgaccccgccagtggccacagt

SEQ ID NO: 4289587 - DNA, 25 bp, Homo sapien
cccgaccccgccagtggccacagtt

SEQ ID NO: 4289588 - DNA, 25 bp, Homo sapien
ttgacgcatgagctcttcgcctggc

SEQ ID NO: 4289589 - DNA, 25 bp, Homo sapien
cgaactgctgagtactcattggctg

SEQ ID NO: 4289590 - DNA, 25 bp, Homo sapien
ttttttggataaatgcgaactgctg

SEQ ID NO: 4289591 - DNA, 25 bp, Homo sapien
ttcgcctggcgcattgacttctgga

SEQ ID NO: 4289592 - DNA, 25 bp, Homo sapien
taagaaggggctttggagaagccag

SEQ ID NO: 4289593 - DNA, 25 bp, Homo sapien
gaaggggctttggagaagccagggc

SEQ ID NO: 4289594 - DNA, 25 bp, Homo sapien
aagaaggggctttggagaagccagg

SEQ ID NO: 4289595 - DNA, 25 bp, Homo sapien
ttaagaaggggctttggagaagcca

SEQ ID NO: 4289596 - DNA, 25 bp, Homo sapien
ctgcctgttccaccccctgctccat

SEQ ID NO: 4289597 - DNA, 25 bp, Homo sapien
gctctgcctgttccaccccctgctc

SEQ ID NO: 4289598 - DNA, 25 bp, Homo sapien
tgctctgcctgttccaccccctgct

SEQ ID NO: 4289599 - DNA, 25 bp, Homo sapien
cttgctctgcctgttccaccccctg

SEQ ID NO: 4289600 - DNA, 25 bp, Homo sapien
tccaggcttctgacaagatagcctt

SEQ ID NO: 4289601 - DNA, 25 bp, Homo sapien
aggtggcgatgtctctgtgtgaaaa

SEQ ID NO: 4289602 - DNA, 25 bp, Homo sapien
aggacaaccagggactagtgggcat

SEQ ID NO: 4289603 - DNA, 25 bp, Homo sapien
acaaagctggttgcctccccacagg

SEQ ID NO: 4289604 - DNA, 25 bp, Homo sapien
agtcagtagtcaggtttaattgtgc

SEQ ID NO: 4289605 - DNA, 25 bp, Homo sapien
tattcttcaatccgagtcctcctca

SEQ ID NO: 4289606 - DNA, 25 bp, Homo sapien
tgcattcgcgaagtcagtagtcagg

SEQ ID NO: 4289607 - DNA, 25 bp, Homo sapien
actcccaccttgtgcattcgcgaag

SEQ ID NO: 4289608 - DNA, 25 bp, Homo sapien
gggcaatccattgtaggctggtgtt

SEQ ID NO: 4289609 - DNA, 25 bp, Homo sapien
catgagtaagcttgggttccacata

SEQ ID NO: 4289610 - DNA, 25 bp, Homo sapien
gttcgtaggattgttccatagtgca

SEQ ID NO: 4289611 - DNA, 25 bp, Homo sapien
tccacatacccaaaagaatccatca

SEQ ID NO: 4289612 - DNA, 25 bp, Homo sapien
ggtaagtgttcaggactgcgggcat

SEQ ID NO: 4289613 - DNA, 25 bp, Homo sapien
tgggttggtaagtgttcaggactgc

SEQ ID NO: 4289614 - DNA, 25 bp, Homo sapien
ggttggtaagtgttcaggactgcgg

SEQ ID NO: 4289615 - DNA, 25 bp, Homo sapien
ttggtaagtgttcaggactgcgggc

SEQ ID NO: 4289616 - DNA, 25 bp, Homo sapien
gggacgctttctggcgcggaccgtg

SEQ ID NO: 4289617 - DNA, 25 bp, Homo sapien
gcgcgtgttcccgtccgtgcggtcg

SEQ ID NO: 4289618 - DNA, 25 bp, Homo sapien
tttctggcgcggaccgtgagcggag

SEQ ID NO: 4289619 - DNA, 25 bp, Homo sapien
cgtccgtgcggtcgggcgcgcgggc

SEQ ID NO: 4289620 - DNA, 25 bp, Homo sapien
aatctgctccctatggcctcaacct

SEQ ID NO: 4289621 - DNA, 25 bp, Homo sapien
tggcccatgctatcctcttaggcgg

SEQ ID NO: 4289622 - DNA, 25 bp, Homo sapien
gctatcctcttaggcgggtgccacc

SEQ ID NO: 4289623 - DNA, 25 bp, Homo sapien
acctcactcagtgccaaccagatgc

SEQ ID NO: 4289624 - DNA, 25 bp, Homo sapien
tcatgtagcaaaatgagctggtact

SEQ ID NO: 4289625 - DNA, 25 bp, Homo sapien
gacggatctgcttataccattctgc

SEQ ID NO: 4289626 - DNA, 25 bp, Homo sapien
tgctcttgcttggaggctaaaatcc

SEQ ID NO: 4289627 - DNA, 25 bp, Homo sapien
gctttagtaatacagactgcttgga

SEQ ID NO: 4289628 - DNA, 25 bp, Homo sapien
agttatgtctgttgaccctgttggc

SEQ ID NO: 4289629 - DNA, 25 bp, Homo sapien
gattagttcctcgtgcgtttgtaca

SEQ ID NO: 4289630 - DNA, 25 bp, Homo sapien
catggcctgggttgagatatgtgcc

SEQ ID NO: 4289631 - DNA, 25 bp, Homo sapien
gatgtatcatttgcctaggaccact

SEQ ID NO: 4289632 - DNA, 25 bp, Homo sapien
gtgagttgcactcctcattcttgta

SEQ ID NO: 4289633 - DNA, 25 bp, Homo sapien
acagtgagttgcactcctcattctt

SEQ ID NO: 4289634 - DNA, 25 bp, Homo sapien
actgttatgtaacagtgagttgcac

SEQ ID NO: 4289635 - DNA, 25 bp, Homo sapien
cagtgagttgcactcctcattcttg

SEQ ID NO: 4289636 - DNA, 25 bp, Homo sapien
cttgaagggtctaagccagggaagt

SEQ ID NO: 4289637 - DNA, 25 bp, Homo sapien
cctacttgaagggtctaagccaggg

SEQ ID NO: 4289638 - DNA, 25 bp, Homo sapien
tattcaatgacttcctacttgaagg

SEQ ID NO: 4289639 - DNA, 25 bp, Homo sapien
gggtgtgctattcaatgacttccta

SEQ ID NO: 4289640 - DNA, 25 bp, Homo sapien
tctgcggggaaatgaccattcactt

SEQ ID NO: 4289641 - DNA, 25 bp, Homo sapien
gctagcttattcagttggagtctca

SEQ ID NO: 4289642 - DNA, 25 bp, Homo sapien
tgctgtctgttgctagcttattcag

SEQ ID NO: 4289643 - DNA, 25 bp, Homo sapien
gctgtcatgtggcttgggaatccgt

SEQ ID NO: 4289644 - DNA, 25 bp, Homo sapien
gtagggcagattgaagagggatggg

SEQ ID NO: 4289645 - DNA, 25 bp, Homo sapien
tagggcagattgaagagggatgggt

SEQ ID NO: 4289646 - DNA, 25 bp, Homo sapien
tctccaagaaggtatcctgagccac

SEQ ID NO: 4289647 - DNA, 25 bp, Homo sapien
tggttctccaagaaggtatcctgag

SEQ ID NO: 4289648 - DNA, 25 bp, Homo sapien
ggttctccaagaaggtatcctgagc

SEQ ID NO: 4289649 - DNA, 25 bp, Homo sapien
ccaagaaggtatcctgagccaccac

SEQ ID NO: 4289650 - DNA, 25 bp, Homo sapien
tttggcctacgttgtggacagccat

SEQ ID NO: 4289651 - DNA, 25 bp, Homo sapien
gcctcaaagtaggtggctttgcctt

SEQ ID NO: 4289652 - DNA, 25 bp, Homo sapien
aactgtatgtgtattgtcagactga

SEQ ID NO: 4289653 - DNA, 25 bp, Homo sapien
aaaagctgtggttcaatgcctcaaa

SEQ ID NO: 4289654 - DNA, 25 bp, Homo sapien
gtatgtgtattgtcagactgagggc

SEQ ID NO: 4289655 - DNA, 25 bp, Homo sapien
gtacttttgaatgagctgcagccat

SEQ ID NO: 4289656 - DNA, 25 bp, Homo sapien
tctcctttcatacagtacttttgaa

SEQ ID NO: 4289657 - DNA, 25 bp, Homo sapien
ctcctttcatacagtacttttgaat

SEQ ID NO: 4289658 - DNA, 25 bp, Homo sapien
tcctttcatacagtacttttgaatg

SEQ ID NO: 4289659 - DNA, 25 bp, Homo sapien
tgggttggaaggtccttcttgttgc

SEQ ID NO: 4289660 - DNA, 25 bp, Homo sapien
ctaagtctcccttggatgaggagct

SEQ ID NO: 4289661 - DNA, 25 bp, Homo sapien
ccttcttgttgctgctttacttcct

SEQ ID NO: 4289662 - DNA, 25 bp, Homo sapien
ccttggatgaggagctccaggaagg

SEQ ID NO: 4289663 - DNA, 25 bp, Homo sapien
gaaggatcaggcagcaatatttgct

SEQ ID NO: 4289664 - DNA, 25 bp, Homo sapien
ccagaggaaggatcaggcagcaata

SEQ ID NO: 4289665 - DNA, 25 bp, Homo sapien
tatttgctgttctgcagcctctgct

SEQ ID NO: 4289666 - DNA, 25 bp, Homo sapien
gaggaaggatcaggcagcaatattt

SEQ ID NO: 4289667 - DNA, 25 bp, Homo sapien
gtatctcagagcctaagaaccatgt

SEQ ID NO: 4289668 - DNA, 25 bp, Homo sapien
ttccacccattatccaggcctgagg

SEQ ID NO: 4289669 - DNA, 25 bp, Homo sapien
ggtttagccaagttctcagcctggg

SEQ ID NO: 4289670 - DNA, 25 bp, Homo sapien
tctttgatcataaacacttggtggt

SEQ ID NO: 4289671 - DNA, 25 bp, Homo sapien
gaagcaggagaaatgaccacgcaga

SEQ ID NO: 4289672 - DNA, 25 bp, Homo sapien
aggagaaatgaccacgcagaccctg

SEQ ID NO: 4289673 - DNA, 25 bp, Homo sapien
aatgaccacgcagaccctgcaggca

SEQ ID NO: 4289674 - DNA, 25 bp, Homo sapien
gaaatgaccacgcagaccctgcagg

SEQ ID NO: 4289675 - DNA, 25 bp, Homo sapien
tctcccagacccgtccagaatcttt

SEQ ID NO: 4289676 - DNA, 25 bp, Homo sapien
cagtttgctcatatctgtctgtagc

SEQ ID NO: 4289677 - DNA, 25 bp, Homo sapien
ggattgtgtgtgtaaggtctctagt

SEQ ID NO: 4289678 - DNA, 25 bp, Homo sapien
tctgtctgtagcacttggtgaggaa

SEQ ID NO: 4289679 - DNA, 25 bp, Homo sapien
agcacccggtattccaggcagtctc

SEQ ID NO: 4289680 - DNA, 25 bp, Homo sapien
cagacaagatcaggtgcattcaggg

SEQ ID NO: 4289681 - DNA, 25 bp, Homo sapien
ttgcttagcttctgagatcagacaa

SEQ ID NO: 4289682 - DNA, 25 bp, Homo sapien
caagtactaactagacccgaccttg

SEQ ID NO: 4289683 - DNA, 25 bp, Homo sapien
agagcgctcggggattcagcaccac

SEQ ID NO: 4289684 - DNA, 25 bp, Homo sapien
gcaccacgaggcggacagctccagg

SEQ ID NO: 4289685 - DNA, 25 bp, Homo sapien
cagcaccacgaggcggacagctcca

SEQ ID NO: 4289686 - DNA, 25 bp, Homo sapien
ctccagcgcagagcgagagcgctcg

SEQ ID NO: 4289687 - DNA, 25 bp, Homo sapien
gtcaagcccagcgagaagtcagaaa

SEQ ID NO: 4289688 - DNA, 25 bp, Homo sapien
gaaatgcaacccatggtacccacag

SEQ ID NO: 4289689 - DNA, 25 bp, Homo sapien
tgcatccacaggctagcaaggttgt

SEQ ID NO: 4289690 - DNA, 25 bp, Homo sapien
ggacaaagtcctgcattagccggca

SEQ ID NO: 4289691 - DNA, 25 bp, Homo sapien
agtgaaggatctccttctatccctg

SEQ ID NO: 4289692 - DNA, 25 bp, Homo sapien
cgaacatggtttgcagctaaaaagg

SEQ ID NO: 4289693 - DNA, 25 bp, Homo sapien
caaaacaagtagttacgaacatggt

SEQ ID NO: 4289694 - DNA, 25 bp, Homo sapien
aaaaggtacaaagggcatccagtga

SEQ ID NO: 4289695 - DNA, 25 bp, Homo sapien
agatgtctccgcctcaagttccagc

SEQ ID NO: 4289696 - DNA, 25 bp, Homo sapien
gagttgagcactgagagatgggact

SEQ ID NO: 4289697 - DNA, 25 bp, Homo sapien
gaaaaaggattggagcccactgcat

SEQ ID NO: 4289698 - DNA, 25 bp, Homo sapien
cctgtggaagagaggctagatgtgg

SEQ ID NO: 4289699 - DNA, 25 bp, Homo sapien
tgagggtgaggggacaggaagtgag

SEQ ID NO: 4289700 - DNA, 25 bp, Homo sapien
caggaagagggaaatggaggggact

SEQ ID NO: 4289701 - DNA, 25 bp, Homo sapien
ggactgagggtgaggggacaggaag

SEQ ID NO: 4289702 - DNA, 25 bp, Homo sapien
aagagggaaatggaggggactgagg

SEQ ID NO: 4289703 - DNA, 25 bp, Homo sapien
ccttcactatattggcattggctgc

SEQ ID NO: 4289704 - DNA, 25 bp, Homo sapien
taggtgttagtgcactgttgtggca

SEQ ID NO: 4289705 - DNA, 25 bp, Homo sapien
tgtaaggtgcctagttggtagctcc

SEQ ID NO: 4289706 - DNA, 25 bp, Homo sapien
ttcacatgtgtagctaagtcccaac

SEQ ID NO: 4289707 - DNA, 25 bp, Homo sapien
gggccctctctgctgaggccaccat

SEQ ID NO: 4289708 - DNA, 25 bp, Homo sapien
ctttggagactggagggggtgagtc

SEQ ID NO: 4289709 - DNA, 25 bp, Homo sapien
tttggagactggagggggtgagtcc

SEQ ID NO: 4289710 - DNA, 25 bp, Homo sapien
gggggtgagtcctgggccctctctg

SEQ ID NO: 4289711 - DNA, 25 bp, Homo sapien
gtcagtaagggtctttattggaaga

SEQ ID NO: 4289712 - DNA, 25 bp, Homo sapien
cagcctccttggctctgtcagcgcc

SEQ ID NO: 4289713 - DNA, 25 bp, Homo sapien
tgagtgctgcctgcagtaacgtccg

SEQ ID NO: 4289714 - DNA, 25 bp, Homo sapien
gtatagagtcttagtgccaggcgcc

SEQ ID NO: 4289715 - DNA, 25 bp, Homo sapien
tttcgatgtcaagctccagccggct

SEQ ID NO: 4289716 - DNA, 25 bp, Homo sapien
gcatgccagcgccagtgagactgga

SEQ ID NO: 4289717 - DNA, 25 bp, Homo sapien
ttaagagtgagccagtaccccttct

SEQ ID NO: 4289718 - DNA, 25 bp, Homo sapien
ttaactgtggtagcccctaggcaca

SEQ ID NO: 4289719 - DNA, 25 bp, Homo sapien
aaaggtcttggtatcatgaacacgg

SEQ ID NO: 4289720 - DNA, 25 bp, Homo sapien
gacaaagggctctaactggaagata

SEQ ID NO: 4289721 - DNA, 25 bp, Homo sapien
tccaaggacttccaatccatgctga

SEQ ID NO: 4289722 - DNA, 25 bp, Homo sapien
ccatgctgacgatgaccatattcca

SEQ ID NO: 4289723 - DNA, 25 bp, Homo sapien
acgatgaccatattccactgacaca

SEQ ID NO: 4289724 - DNA, 25 bp, Homo sapien
caagtcttcagactccaaggacttc

SEQ ID NO: 4289725 - DNA, 25 bp, Homo sapien
agggactcctgcttctagtaatgat

SEQ ID NO: 4289726 - DNA, 25 bp, Homo sapien
tgctgaaggtaactagaaaagctga

SEQ ID NO: 4289727 - DNA, 25 bp, Homo sapien
tagtaatgatgtgctaaggagctgg

SEQ ID NO: 4289728 - DNA, 25 bp, Homo sapien
ctagaaaagctgatcaatgtacatt

SEQ ID NO: 4289729 - DNA, 25 bp, Homo sapien
catcttctgactgcgacaggagagc

SEQ ID NO: 4289730 - DNA, 25 bp, Homo sapien
cttttcagtggtcgggatcaggcag

SEQ ID NO: 4289731 - DNA, 25 bp, Homo sapien
caaagacatttgtaccccagctggg

SEQ ID NO: 4289732 - DNA, 25 bp, Homo sapien
tgccggcttctgcagtggctgtgct

SEQ ID NO: 4289733 - DNA, 25 bp, Homo sapien
tagttcacaggcttcattagaatac

SEQ ID NO: 4289734 - DNA, 25 bp, Homo sapien
aaaaatcaatctgctatggaaactg

SEQ ID NO: 4289735 - DNA, 25 bp, Homo sapien
aattttagttcacaggcttcattag

SEQ ID NO: 4289736 - DNA, 25 bp, Homo sapien
caatctgctatggaaactgctttcc

SEQ ID NO: 4289737 - DNA, 25 bp, Homo sapien
attccttccctgtgatagataagcc

SEQ ID NO: 4289738 - DNA, 25 bp, Homo sapien
gggttggtttcaatcatcctacaca

SEQ ID NO: 4289739 - DNA, 25 bp, Homo sapien
ttgctgctaccggagacacagacac

SEQ ID NO: 4289740 - DNA, 25 bp, Homo sapien
cagacacggcttctgtttgtaaggc

SEQ ID NO: 4289741 - DNA, 25 bp, Homo sapien
aggggtatgcattgttgcaccttac

SEQ ID NO: 4289742 - DNA, 25 bp, Homo sapien
tcttttaatggaaggggtatgcatt

SEQ ID NO: 4289743 - DNA, 25 bp, Homo sapien
aaggggtatgcattgttgcacctta

SEQ ID NO: 4289744 - DNA, 25 bp, Homo sapien
taatggaaggggtatgcattgttgc

SEQ ID NO: 4289745 - DNA, 25 bp, Homo sapien
acacgggaatggcagctgtgccagc

SEQ ID NO: 4289746 - DNA, 25 bp, Homo sapien
tttctttgagttcatagtggccctc

SEQ ID NO: 4289747 - DNA, 25 bp, Homo sapien
gtggccctcaataaagacacgggaa

SEQ ID NO: 4289748 - DNA, 25 bp, Homo sapien
taaagacacgggaatggcagctgtg

SEQ ID NO: 4289749 - DNA, 25 bp, Homo sapien
agacctggatgatgcggacagcgtt

SEQ ID NO: 4289750 - DNA, 25 bp, Homo sapien
gatgatgcggacagcgttgagcaaa

SEQ ID NO: 4289751 - DNA, 25 bp, Homo sapien
cagcgttgagcaaacgacagtaacg

SEQ ID NO: 4289752 - DNA, 25 bp, Homo sapien
tgcggacagcgttgagcaaacgaca

SEQ ID NO: 4289753 - DNA, 25 bp, Homo sapien
cagcagtgtgcgtcgcaccagcatg

SEQ ID NO: 4289754 - DNA, 25 bp, Homo sapien
gcagtgtgcgtcgcaccagcatgcc

SEQ ID NO: 4289755 - DNA, 25 bp, Homo sapien
gcagcagtgtgcgtcgcaccagcat

SEQ ID NO: 4289756 - DNA, 25 bp, Homo sapien
tgcagcagtgtgcgtcgcaccagca

SEQ ID NO: 4289757 - DNA, 25 bp, Homo sapien
catggttaggggctagatggtccca

SEQ ID NO: 4289758 - DNA, 25 bp, Homo sapien
ttaggggctagatggtcccatcacc

SEQ ID NO: 4289759 - DNA, 25 bp, Homo sapien
gatcaggactccaacaggaagagtg

SEQ ID NO: 4289760 - DNA, 25 bp, Homo sapien
ggcccgcactcctccgatcaggact

SEQ ID NO: 4289761 - DNA, 25 bp, Homo sapien
cagaggttctcagtaggccccttgc

SEQ ID NO: 4289762 - DNA, 25 bp, Homo sapien
agaggttctcagtaggccccttgca

SEQ ID NO: 4289763 - DNA, 25 bp, Homo sapien
ttcatccactaccctttctagattc

SEQ ID NO: 4289764 - DNA, 25 bp, Homo sapien
cttcatccactaccctttctagatt

SEQ ID NO: 4289765 - DNA, 25 bp, Homo sapien
gaaaatgctaattcaacacagcctg

SEQ ID NO: 4289766 - DNA, 25 bp, Homo sapien
taacctctatgtgtatgaaacaaac

SEQ ID NO: 4289767 - DNA, 25 bp, Homo sapien
gttgcttattgaagggtaactgcca

SEQ ID NO: 4289768 - DNA, 25 bp, Homo sapien
tgacagatgtaccaatacggcttgg

SEQ ID NO: 4289769 - DNA, 25 bp, Homo sapien
tcttgccaactgtgtagctcagcag

SEQ ID NO: 4289770 - DNA, 25 bp, Homo sapien
gtcagccaccgtcttgccaactgtg

SEQ ID NO: 4289771 - DNA, 25 bp, Homo sapien
cacacattcgaccaacagtggaact

SEQ ID NO: 4289772 - DNA, 25 bp, Homo sapien
aacttctgggtcttccatttcagtg

SEQ ID NO: 4289773 - DNA, 25 bp, Homo sapien
agggattccacatgctttctattct

SEQ ID NO: 4289774 - DNA, 25 bp, Homo sapien
ccacatgctttctattctctgaagg

SEQ ID NO: 4289775 - DNA, 25 bp, Homo sapien
tatattttaggcactagtacaaact

SEQ ID NO: 4289776 - DNA, 25 bp, Homo sapien
catataccttctgtcttttagggat

SEQ ID NO: 4289777 - DNA, 25 bp, Homo sapien
tgagcacctggcaatagcgtctgcg

SEQ ID NO: 4289778 - DNA, 25 bp, Homo sapien
gctgtgactctgtactggcccttga

SEQ ID NO: 4289779 - DNA, 25 bp, Homo sapien
ccagtaagcctggatgatgcgaaca

SEQ ID NO: 4289780 - DNA, 25 bp, Homo sapien
gaatcttggacagtatcagccgcca

SEQ ID NO: 4289781 - DNA, 25 bp, Homo sapien
cgtatctttgtcagagagcttcttt

SEQ ID NO: 4289782 - DNA, 25 bp, Homo sapien
ctaccgtatctttgtcagagagctt

SEQ ID NO: 4289783 - DNA, 25 bp, Homo sapien
ctttgtcagagagcttcttttggtt

SEQ ID NO: 4289784 - DNA, 25 bp, Homo sapien
tatctttgtcagagagcttcttttg

SEQ ID NO: 4289785 - DNA, 25 bp, Homo sapien
cctctggttgatagccacaagcaca

SEQ ID NO: 4289786 - DNA, 25 bp, Homo sapien
ggctacctcacccagttttccatgg

SEQ ID NO: 4289787 - DNA, 25 bp, Homo sapien
gaagatcaggtagatgtcctgcctc

SEQ ID NO: 4289788 - DNA, 25 bp, Homo sapien
ttctggaattcaggagcactgggca

SEQ ID NO: 4289789 - DNA, 25 bp, Homo sapien
tgtgtctcaaccagaactggagttt

SEQ ID NO: 4289790 - DNA, 25 bp, Homo sapien
ctgtctgtgtctcaaccagaactgg

SEQ ID NO: 4289791 - DNA, 25 bp, Homo sapien
cactgtctgtgtctcaaccagaact
